United States Patent Application Publication US 2018/0305689 A1 - sequence listing, part 151

SEQ ID NO: 2144491 - RNA, 19 nt, Artificial Sequence
  Description of Artificial Sequence: Synthetic oligonucleotide
  Antisense strand to SEQ ID NO: 2144490
uaucucccagcacauucca

SEQ ID NO: 2144492 - RNA, 19 nt, Artificial Sequence
  Description of Artificial Sequence: Synthetic oligonucleotide
  Sense strand starting at position 1238 of SEQ ID NO: 1882746
gggagauacugagaaagua

SEQ ID NO: 2144493 - RNA, 19 nt, Artificial Sequence
  Description of Artificial Sequence: Synthetic oligonucleotide
  Antisense strand to SEQ ID NO: 2144492
uacuuucucaguaucuccc

SEQ ID NO: 2144494 - RNA, 19 nt, Artificial Sequence
  Description of Artificial Sequence: Synthetic oligonucleotide
  Sense strand starting at position 1257 of SEQ ID NO: 1882746
cuucuugaaucagccugaa

SEQ ID NO: 2144495 - RNA, 19 nt, Artificial Sequence
  Description of Artificial Sequence: Synthetic oligonucleotide
  Antisense strand to SEQ ID NO: 2144494
uucaggcugauucaagaag

SEQ ID NO: 2144496 - RNA, 19 nt, Artificial Sequence
  Description of Artificial Sequence: Synthetic oligonucleotide
  Sense strand starting at position 1260 of SEQ ID NO: 1882746
cuugaaucagccugaagac

SEQ ID NO: 2144497 - RNA, 19 nt, Artificial Sequence
  Description of Artificial Sequence: Synthetic oligonucleotide
  Antisense strand to SEQ ID NO: 2144496
gucuucaggcugauucaag

SEQ ID NO: 2144498 - RNA, 19 nt, Artificial Sequence
  Description of Artificial Sequence: Synthetic oligonucleotide
  Sense strand starting at position 1285 of SEQ ID NO: 1882746
ggcuuuagauggucuggga

SEQ ID NO: 2144499 - RNA, 19 nt, Artificial Sequence
  Description of Artificial Sequence: Synthetic oligonucleotide
  Antisense strand to SEQ ID NO: 2144498
ucccagaccaucuaaagcc

SEQ ID NO: 2144500 - RNA, 19 nt, Artificial Sequence
  Description of Artificial Sequence: Synthetic oligonucleotide
  Sense strand starting at position 1490 of SEQ ID NO: 1882746
ucaggaguucgagaaggca

SEQ ID NO: 2144501 - RNA, 19 nt, Artificial Sequence
  Description of Artificial Sequence: Synthetic oligonucleotide
  Antisense strand to SEQ ID NO: 2144500
ugccuucucgaacuccuga

SEQ ID NO: 2144502 - RNA, 19 nt, Artificial Sequence
  Description of Artificial Sequence: Synthetic oligonucleotide
  Sense strand starting at position 1820 of SEQ ID NO: 1882746
ugaagacuguguuuauuag

SEQ ID NO: 2144503 - RNA, 19 nt, Artificial Sequence
  Description of Artificial Sequence: Synthetic oligonucleotide
  Antisense strand to SEQ ID NO: 2144502
cuaauaaacacagucuuca

SEQ ID NO: 2144504 - RNA, 19 nt, Artificial Sequence
  Description of Artificial Sequence: Synthetic oligonucleotide
  Sense strand starting at position 1827 of SEQ ID NO: 1882746
uguguuuauuagcucauuu

SEQ ID NO: 2144505 - RNA, 19 nt, Artificial Sequence
  Description of Artificial Sequence: Synthetic oligonucleotide
  Antisense strand to SEQ ID NO: 2144504
aaaugagcuaauaaacaca

SEQ ID NO: 2144506 - RNA, 19 nt, Artificial Sequence
  Description of Artificial Sequence: Synthetic oligonucleotide
  Sense strand starting at position 2032 of SEQ ID NO: 1882746
acugguuaaucagugauac

SEQ ID NO: 2144507 - RNA, 19 nt, Artificial Sequence
  Description of Artificial Sequence: Synthetic oligonucleotide
  Antisense strand to SEQ ID NO: 2144506
guaucacugauuaaccagu

SEQ ID NO: 2144508 - RNA, 19 nt, Artificial Sequence
  Description of Artificial Sequence: Synthetic oligonucleotide
  Sense strand starting at position 2033 of SEQ ID NO: 1882746
cugguuaaucagugauaca

SEQ ID NO: 2144509 - RNA, 19 nt, Artificial Sequence
  Description of Artificial Sequence: Synthetic oligonucleotide
  Antisense strand to SEQ ID NO: 2144508
uguaucacugauuaaccag

SEQ ID NO: 2144510 - RNA, 19 nt, Artificial Sequence
  Description of Artificial Sequence: Synthetic oligonucleotide
  Sense strand starting at position 2096 of SEQ ID NO: 1882746
cagccaauugaacggaaau

SEQ ID NO: 2144511 - RNA, 19 nt, Artificial Sequence
  Description of Artificial Sequence: Synthetic oligonucleotide
  Antisense strand to SEQ ID NO: 2144510
auuuccguucaauuggcug

SEQ ID NO: 2144512 - RNA, 19 nt, Artificial Sequence
  Description of Artificial Sequence: Synthetic oligonucleotide
  Sense strand starting at position 2255 of SEQ ID NO: 1882746
ccucucucccuaggaagau

SEQ ID NO: 2144513 - RNA, 19 nt, Artificial Sequence
  Description of Artificial Sequence: Synthetic oligonucleotide
  Antisense strand to SEQ ID NO: 2144512
aucuuccuagggagagagg

SEQ ID NO: 2144514 - RNA, 19 nt, Artificial Sequence
  Description of Artificial Sequence: Synthetic oligonucleotide
  Sense strand starting at position 2333 of SEQ ID NO: 1882746
gaggaacccuaaguuauca

SEQ ID NO: 2144515 - RNA, 19 nt, Artificial Sequence
  Description of Artificial Sequence: Synthetic oligonucleotide
  Antisense strand to SEQ ID NO: 2144514
ugauaacuuaggguuccuc

SEQ ID NO: 2144516 - RNA, 19 nt, Artificial Sequence
  Description of Artificial Sequence: Synthetic oligonucleotide
  Sense strand starting at position 2379 of SEQ ID NO: 1882746
agauaaagcuccuccaugu

SEQ ID NO: 2144517 - RNA, 19 nt, Artificial Sequence
  Description of Artificial Sequence: Synthetic oligonucleotide
  Antisense strand to SEQ ID NO: 2144516
acauggaggagcuuuaucu

SEQ ID NO: 2144518 - RNA, 19 nt, Artificial Sequence
  Description of Artificial Sequence: Synthetic oligonucleotide
  Sense strand starting at position 2553 of SEQ ID NO: 1882746
gaaugagcacuugaguucu

SEQ ID NO: 2144519 - RNA, 19 nt, Artificial Sequence
  Description of Artificial Sequence: Synthetic oligonucleotide
  Antisense strand to SEQ ID NO: 2144518
agaacucaagugcucauuc

SEQ ID NO: 2144520 - RNA, 19 nt, Artificial Sequence
  Description of Artificial Sequence: Synthetic oligonucleotide
  Sense strand starting at position 2793 of SEQ ID NO: 1882746
aguaaauagucuuugaguc

SEQ ID NO: 2144521 - RNA, 19 nt, Artificial Sequence
  Description of Artificial Sequence: Synthetic oligonucleotide
  Antisense strand to SEQ ID NO: 2144520
gacucaaagacuauuuacu

SEQ ID NO: 2144522 - RNA, 19 nt, Artificial Sequence
  Description of Artificial Sequence: Synthetic oligonucleotide
  Sense strand starting at position 2836 of SEQ ID NO: 1882746
ggcaaauaauuggcagaua

SEQ ID NO: 2144523 - RNA, 19 nt, Artificial Sequence
  Description of Artificial Sequence: Synthetic oligonucleotide
  Antisense strand to SEQ ID NO: 2144522
uaucugccaauuauuugcc

SEQ ID NO: 2144524 - RNA, 19 nt, Artificial Sequence
  Description of Artificial Sequence: Synthetic oligonucleotide
  Sense strand starting at position 2867 of SEQ ID NO: 1882746
gagagcuccuugguguaga

SEQ ID NO: 2144525 - RNA, 19 nt, Artificial Sequence
  Description of Artificial Sequence: Synthetic oligonucleotide
  Antisense strand to SEQ ID NO: 2144524
ucuacaccaaggagcucuc

SEQ ID NO: 2144526 - RNA, 19 nt, Artificial Sequence
  Description of Artificial Sequence: Synthetic oligonucleotide
  Sense strand starting at position 2878 of SEQ ID NO: 1882746
gguguagauuuccuccagu

SEQ ID NO: 2144527 - RNA, 19 nt, Artificial Sequence
  Description of Artificial Sequence: Synthetic oligonucleotide
  Antisense strand to SEQ ID NO: 2144526
acuggaggaaaucuacacc

SEQ ID NO: 2144528 - RNA, 19 nt, Artificial Sequence
  Description of Artificial Sequence: Synthetic oligonucleotide
  Sense strand starting at position 2990 of SEQ ID NO: 1882746
ggaaaucuauguccugcuu

SEQ ID NO: 2144529 - RNA, 19 nt, Artificial Sequence
  Description of Artificial Sequence: Synthetic oligonucleotide
  Antisense strand to SEQ ID NO: 2144528
aagcaggacauagauuucc

SEQ ID NO: 2144530 - RNA, 19 nt, Artificial Sequence
  Description of Artificial Sequence: Synthetic oligonucleotide
  Sense strand starting at position 3181 of SEQ ID NO: 1882746
cauggauagguauguauuc

SEQ ID NO: 2144531 - RNA, 19 nt, Artificial Sequence
  Description of Artificial Sequence: Synthetic oligonucleotide
  Antisense strand to SEQ ID NO: 2144530
gaauacauaccuauccaug

SEQ ID NO: 2144532 - RNA, 19 nt, Artificial Sequence
  Description of Artificial Sequence: Synthetic oligonucleotide
  Sense strand starting at position 3183 of SEQ ID NO: 1882746
uggauagguauguauucua

SEQ ID NO: 2144533 - RNA, 19 nt, Artificial Sequence
  Description of Artificial Sequence: Synthetic oligonucleotide
  Antisense strand to SEQ ID NO: 2144532
uagaauacauaccuaucca

SEQ ID NO: 2144534 - RNA, 19 nt, Artificial Sequence
  Description of Artificial Sequence: Synthetic oligonucleotide
  Sense strand starting at position 3186 of SEQ ID NO: 1882746
auagguauguauucuacca

SEQ ID NO: 2144535 - RNA, 19 nt, Artificial Sequence
  Description of Artificial Sequence: Synthetic oligonucleotide
  Antisense strand to SEQ ID NO: 2144534
ugguagaauacauaccuau

SEQ ID NO: 2144536 - RNA, 19 nt, Artificial Sequence
  Description of Artificial Sequence: Synthetic oligonucleotide
  Sense strand starting at position 3193 of SEQ ID NO: 1882746
uguauucuaccacauguuu

SEQ ID NO: 2144537 - RNA, 19 nt, Artificial Sequence
  Description of Artificial Sequence: Synthetic oligonucleotide
  Antisense strand to SEQ ID NO: 2144536
aaacaugugguagaauaca

SEQ ID NO: 2144538 - RNA, 19 nt, Artificial Sequence
  Description of Artificial Sequence: Synthetic oligonucleotide
  Sense strand starting at position 3353 of SEQ ID NO: 1882746
ugugucuucccauaaauuc

SEQ ID NO: 2144539 - RNA, 19 nt, Artificial Sequence
  Description of Artificial Sequence: Synthetic oligonucleotide
  Antisense strand to SEQ ID NO: 2144538
gaauuuaugggaagacaca

SEQ ID NO: 2144540 - RNA, 19 nt, Artificial Sequence
  Description of Artificial Sequence: Synthetic oligonucleotide
  Sense strand starting at position 3473 of SEQ ID NO: 1882746
ggccuaauuuaacaugacu

SEQ ID NO: 2144541 - RNA, 19 nt, Artificial Sequence
  Description of Artificial Sequence: Synthetic oligonucleotide
  Antisense strand to SEQ ID NO: 2144540
agucauguuaaauuaggcc

SEQ ID NO: 2144542 - RNA, 19 nt, Artificial Sequence
  Description of Artificial Sequence: Synthetic oligonucleotide
  Sense strand starting at position 3487 of SEQ ID NO: 1882746
ugacuaggguccucauaag

SEQ ID NO: 2144543 - RNA, 19 nt, Artificial Sequence
  Description of Artificial Sequence: Synthetic oligonucleotide
  Antisense strand to SEQ ID NO: 2144542
cuuaugaggacccuaguca

SEQ ID NO: 2144544 - RNA, 19 nt, Artificial Sequence
  Description of Artificial Sequence: Synthetic oligonucleotide
  Sense strand starting at position 3926 of SEQ ID NO: 1882746
acggauccuuccucauaga

SEQ ID NO: 2144545 - RNA, 19 nt, Artificial Sequence
  Description of Artificial Sequence: Synthetic oligonucleotide
  Antisense strand to SEQ ID NO: 2144544
ucuaugaggaaggauccgu

SEQ ID NO: 2144546 - RNA, 19 nt, Artificial Sequence
  Description of Artificial Sequence: Synthetic oligonucleotide
  Sense strand starting at position 3927 of SEQ ID NO: 1882746
cggauccuuccucauagau

SEQ ID NO: 2144547 - RNA, 19 nt, Artificial Sequence
  Description of Artificial Sequence: Synthetic oligonucleotide
  Antisense strand to SEQ ID NO: 2144546
aucuaugaggaaggauccg

SEQ ID NO: 2144548 - RNA, 19 nt, Artificial Sequence
  Description of Artificial Sequence: Synthetic oligonucleotide
  Sense strand starting at position 153 of SEQ ID NO: 1882747
agcagugaacaagguauaa

SEQ ID NO: 2144549 - RNA, 19 nt, Artificial Sequence
  Description of Artificial Sequence: Synthetic oligonucleotide
  Antisense strand to SEQ ID NO: 2144548
uuauaccuuguucacugcu

SEQ ID NO: 2144550 - RNA, 19 nt, Artificial Sequence
  Description of Artificial Sequence: Synthetic oligonucleotide
  Sense strand starting at position 240 of SEQ ID NO: 1882747
ggugaaucaccucaaguca

SEQ ID NO: 2144551 - RNA, 19 nt, Artificial Sequence
  Description of Artificial Sequence: Synthetic oligonucleotide
  Antisense strand to SEQ ID NO: 2144550
ugacuugaggugauucacc

SEQ ID NO: 2144552 - RNA, 19 nt, Artificial Sequence
  Description of Artificial Sequence: Synthetic oligonucleotide
  Sense strand starting at position 516 of SEQ ID NO: 1882747
guagcaggaaauugauaua

SEQ ID NO: 2144553 - RNA, 19 nt, Artificial Sequence
  Description of Artificial Sequence: Synthetic oligonucleotide
  Antisense strand to SEQ ID NO: 2144552
uauaucaauuuccugcuac

SEQ ID NO: 2144554 - RNA, 19 nt, Artificial Sequence
  Description of Artificial Sequence: Synthetic oligonucleotide
  Sense strand starting at position 526 of SEQ ID NO: 1882747
auugauauagcuugaacgu

SEQ ID NO: 2144555 - RNA, 19 nt, Artificial Sequence
  Description of Artificial Sequence: Synthetic oligonucleotide
  Antisense strand to SEQ ID NO: 2144554
acguucaagcuauaucaau

SEQ ID NO: 2144556 - RNA, 19 nt, Artificial Sequence
  Description of Artificial Sequence: Synthetic oligonucleotide
  Sense strand starting at position 527 of SEQ ID NO: 1882747
uugauauagcuugaacguu

SEQ ID NO: 2144557 - RNA, 19 nt, Artificial Sequence
  Description of Artificial Sequence: Synthetic oligonucleotide
  Antisense strand to SEQ ID NO: 2144556
aacguucaagcuauaucaa

SEQ ID NO: 2144558 - RNA, 19 nt, Artificial Sequence
  Description of Artificial Sequence: Synthetic oligonucleotide
  Sense strand starting at position 539 of SEQ ID NO: 1882747
gaacguuugucucuuccaa

SEQ ID NO: 2144559 - RNA, 19 nt, Artificial Sequence
  Description of Artificial Sequence: Synthetic oligonucleotide
  Antisense strand to SEQ ID NO: 2144558
uuggaagagacaaacguuc

SEQ ID NO: 2144560 - RNA, 19 nt, Artificial Sequence
  Description of Artificial Sequence: Synthetic oligonucleotide
  Sense strand starting at position 541 of SEQ ID NO: 1882747
acguuugucucuuccaaau

SEQ ID NO: 2144561 - RNA, 19 nt, Artificial Sequence
  Description of Artificial Sequence: Synthetic oligonucleotide
  Antisense strand to SEQ ID NO: 2144560
auuuggaagagacaaacgu

SEQ ID NO: 2144562 - RNA, 19 nt, Artificial Sequence
  Description of Artificial Sequence: Synthetic oligonucleotide
  Sense strand starting at position 603 of SEQ ID NO: 1882747
ggaggugugugagucauga

SEQ ID NO: 2144563 - RNA, 19 nt, Artificial Sequence
  Description of Artificial Sequence: Synthetic oligonucleotide
  Antisense strand to SEQ ID NO: 2144562
ucaugacucacacaccucc

SEQ ID NO: 2144564 - RNA, 19 nt, Artificial Sequence
  Description of Artificial Sequence: Synthetic oligonucleotide
  Sense strand starting at position 611 of SEQ ID NO: 1882747
gugagucaugagggcagau

SEQ ID NO: 2144565 - RNA, 19 nt, Artificial Sequence
  Description of Artificial Sequence: Synthetic oligonucleotide
  Antisense strand to SEQ ID NO: 2144564
aucugcccucaugacucac

SEQ ID NO: 2144566 - RNA, 19 nt, Artificial Sequence
  Description of Artificial Sequence: Synthetic oligonucleotide
  Sense strand starting at position 882 of SEQ ID NO: 1882747
gcgagagagcaguagugua

SEQ ID NO: 2144567 - RNA, 19 nt, Artificial Sequence
  Description of Artificial Sequence: Synthetic oligonucleotide
  Antisense strand to SEQ ID NO: 2144566
uacacuacugcucucucgc

SEQ ID NO: 2144568 - RNA, 19 nt, Artificial Sequence
  Description of Artificial Sequence: Synthetic oligonucleotide
  Sense strand starting at position 887 of SEQ ID NO: 1882747
agagcaguaguguaauuau

SEQ ID NO: 2144569 - RNA, 19 nt, Artificial Sequence
  Description of Artificial Sequence: Synthetic oligonucleotide
  Antisense strand to SEQ ID NO: 2144568
auaauuacacuacugcucu

SEQ ID NO: 2144570 - RNA, 19 nt, Artificial Sequence
  Description of Artificial Sequence: Synthetic oligonucleotide
  Sense strand starting at position 919 of SEQ ID NO: 1882747
ccugacaucccgggcuaaa

SEQ ID NO: 2144571 - RNA, 19 nt, Artificial Sequence
  Description of Artificial Sequence: Synthetic oligonucleotide
  Antisense strand to SEQ ID NO: 2144570
uuuagcccgggaugucagg

SEQ ID NO: 2144572 - RNA, 19 nt, Artificial Sequence
  Description of Artificial Sequence: Synthetic oligonucleotide
  Sense strand starting at position 992 of SEQ ID NO: 1882747
guaccaucauacuuggcua

SEQ ID NO: 2144573 - RNA, 19 nt, Artificial Sequence
  Description of Artificial Sequence: Synthetic oligonucleotide
  Antisense strand to SEQ ID NO: 2144572
uagccaaguaugaugguac

SEQ ID NO: 2144574 - RNA, 19 nt, Artificial Sequence
  Description of Artificial Sequence: Synthetic oligonucleotide
  Sense strand starting at position 1160 of SEQ ID NO: 1882747
acuuguauagucugcagga

SEQ ID NO: 2144575 - RNA, 19 nt, Artificial Sequence
  Description of Artificial Sequence: Synthetic oligonucleotide
  Antisense strand to SEQ ID NO: 2144574
uccugcagacuauacaagu

SEQ ID NO: 2144576 - RNA, 19 nt, Artificial Sequence
  Description of Artificial Sequence: Synthetic oligonucleotide
  Sense strand starting at position 1162 of SEQ ID NO: 1882747
uuguauagucugcaggacu

SEQ ID NO: 2144577 - RNA, 19 nt, Artificial Sequence
  Description of Artificial Sequence: Synthetic oligonucleotide
  Antisense strand to SEQ ID NO: 2144576
aguccugcagacuauacaa

SEQ ID NO: 2144578 - RNA, 19 nt, Artificial Sequence
  Description of Artificial Sequence: Synthetic oligonucleotide
  Sense strand starting at position 1347 of SEQ ID NO: 1882747
uguugcaucauagagagua

SEQ ID NO: 2144579 - RNA, 19 nt, Artificial Sequence
  Description of Artificial Sequence: Synthetic oligonucleotide
  Antisense strand to SEQ ID NO: 2144578
uacucucuaugaugcaaca

SEQ ID NO: 2144580 - RNA, 19 nt, Artificial Sequence
  Description of Artificial Sequence: Synthetic oligonucleotide
  Sense strand starting at position 1377 of SEQ ID NO: 1882747
cuuggcugaggcuaaagau

SEQ ID NO: 2144581 - RNA, 19 nt, Artificial Sequence
  Description of Artificial Sequence: Synthetic oligonucleotide
  Antisense strand to SEQ ID NO: 2144580
aucuuuagccucagccaag

SEQ ID NO: 2144582 - RNA, 19 nt, Artificial Sequence
  Description of Artificial Sequence: Synthetic oligonucleotide
  Sense strand starting at position 1582 of SEQ ID NO: 1882747
uuuggacuuugucuuaaag

SEQ ID NO: 2144583 - RNA, 19 nt, Artificial Sequence
  Description of Artificial Sequence: Synthetic oligonucleotide
  Antisense strand to SEQ ID NO: 2144582
cuuuaagacaaaguccaaa

SEQ ID NO: 2144584 - RNA, 19 nt, Artificial Sequence
  Description of Artificial Sequence: Synthetic oligonucleotide
  Sense strand starting at position 1847 of SEQ ID NO: 1882747
gccagagcaaugugaugaa

SEQ ID NO: 2144585 - RNA, 19 nt, Artificial Sequence
  Description of Artificial Sequence: Synthetic oligonucleotide
  Antisense strand to SEQ ID NO: 2144584
uucaucacauugcucuggc

SEQ ID NO: 2144586 - RNA, 19 nt, Artificial Sequence
  Description of Artificial Sequence: Synthetic oligonucleotide
  Sense strand starting at position 2230 of SEQ ID NO: 1882747
aaggaauuguguuugugcu

SEQ ID NO: 2144587 - RNA, 19 nt, Artificial Sequence
  Description of Artificial Sequence: Synthetic oligonucleotide
  Antisense strand to SEQ ID NO: 2144586
agcacaaacacaauuccuu

SEQ ID NO: 2144588 - RNA, 19 nt, Artificial Sequence
  Description of Artificial Sequence: Synthetic oligonucleotide
  Sense strand starting at position 2231 of SEQ ID NO: 1882747
aggaauuguguuugugcua

SEQ ID NO: 2144589 - RNA, 19 nt, Artificial Sequence
  Description of Artificial Sequence: Synthetic oligonucleotide
  Antisense strand to SEQ ID NO: 2144588
uagcacaaacacaauuccu

SEQ ID NO: 2144590 - RNA, 19 nt, Artificial Sequence
  Description of Artificial Sequence: Synthetic oligonucleotide
  Sense strand starting at position 2232 of SEQ ID NO: 1882747
ggaauuguguuugugcuau

SEQ ID NO: 2144591 - RNA, 19 nt, Artificial Sequence
  Description of Artificial Sequence: Synthetic oligonucleotide
  Antisense strand to SEQ ID NO: 2144590
auagcacaaacacaauucc

SEQ ID NO: 2144592 - RNA, 19 nt, Artificial Sequence
  Description of Artificial Sequence: Synthetic oligonucleotide
  Sense strand starting at position 2254 of SEQ ID NO: 1882747
gggagcucucuggaucuca

SEQ ID NO: 2144593 - RNA, 19 nt, Artificial Sequence
  Description of Artificial Sequence: Synthetic oligonucleotide
  Antisense strand to SEQ ID NO: 2144592
ugagauccagagagcuccc

SEQ ID NO: 2144594 - RNA, 19 nt, Artificial Sequence
  Description of Artificial Sequence: Synthetic oligonucleotide
  Sense strand starting at position 2277 of SEQ ID NO: 1882747
augacuuaugcugagaggu

SEQ ID NO: 2144595 - RNA, 19 nt, Artificial Sequence
  Description of Artificial Sequence: Synthetic oligonucleotide
  Antisense strand to SEQ ID NO: 2144594
accucucagcauaagucau

SEQ ID NO: 2144596 - RNA, 19 nt, Artificial Sequence
  Description of Artificial Sequence: Synthetic oligonucleotide
  Sense strand starting at position 2336 of SEQ ID NO: 1882747
agugcagcggucuccaauu

SEQ ID NO: 2144597 - RNA, 19 nt, Artificial Sequence
  Description of Artificial Sequence: Synthetic oligonucleotide
  Antisense strand to SEQ ID NO: 2144596
aauuggagaccgcugcacu

SEQ ID NO: 2144598 - RNA, 19 nt, Artificial Sequence
  Description of Artificial Sequence: Synthetic oligonucleotide
  Sense strand starting at position 2716 of SEQ ID NO: 1882747
cagagaucaggugguaaug

SEQ ID NO: 2144599 - RNA, 19 nt, Artificial Sequence
  Description of Artificial Sequence: Synthetic oligonucleotide
  Antisense strand to SEQ ID NO: 2144598
cauuaccaccugaucucug

SEQ ID NO: 2144600 - RNA, 19 nt, Artificial Sequence
  Description of Artificial Sequence: Synthetic oligonucleotide
  Sense strand starting at position 2791 of SEQ ID NO: 1882747
uguuguguggcccaguaca

SEQ ID NO: 2144601 - RNA, 19 nt, Artificial Sequence
  Description of Artificial Sequence: Synthetic oligonucleotide
  Antisense strand to SEQ ID NO: 2144600
uguacugggccacacaaca

SEQ ID NO: 2144602 - RNA, 19 nt, Artificial Sequence
  Description of Artificial Sequence: Synthetic oligonucleotide
  Sense strand starting at position 2811 of SEQ ID NO: 1882747
gccugugacccagggauca

SEQ ID NO: 2144603 - RNA, 19 nt, Artificial Sequence
  Description of Artificial Sequence: Synthetic oligonucleotide
  Antisense strand to SEQ ID NO: 2144602
ugaucccugggucacaggc

SEQ ID NO: 2144604 - RNA, 19 nt, Artificial Sequence
  Description of Artificial Sequence: Synthetic oligonucleotide
  Sense strand starting at position 2956 of SEQ ID NO: 1882747
gugguagcuugagucauua

SEQ ID NO: 2144605 - RNA, 19 nt, Artificial Sequence
  Description of Artificial Sequence: Synthetic oligonucleotide
  Antisense strand to SEQ ID NO: 2144604
uaaugacucaagcuaccac

SEQ ID NO: 2144606 - RNA, 19 nt, Artificial Sequence
  Description of Artificial Sequence: Synthetic oligonucleotide
  Sense strand starting at position 2958 of SEQ ID NO: 1882747
gguagcuugagucauuaug

SEQ ID NO: 2144607 - RNA, 19 nt, Artificial Sequence
  Description of Artificial Sequence: Synthetic oligonucleotide
  Antisense strand to SEQ ID NO: 2144606
cauaaugacucaagcuacc

SEQ ID NO: 2144608 - RNA, 19 nt, Artificial Sequence
  Description of Artificial Sequence: Synthetic oligonucleotide
  Sense strand starting at position 2960 of SEQ ID NO: 1882747
uagcuugagucauuaugag

SEQ ID NO: 2144609 - RNA, 19 nt, Artificial Sequence
  Description of Artificial Sequence: Synthetic oligonucleotide
  Antisense strand to SEQ ID NO: 2144608
cucauaaugacucaagcua

SEQ ID NO: 2144610 - RNA, 19 nt, Artificial Sequence
  Description of Artificial Sequence: Synthetic oligonucleotide
  Sense strand starting at position 3205 of SEQ ID NO: 1882747
acagcauaaugagagauuu

SEQ ID NO: 2144611 - RNA, 19 nt, Artificial Sequence
  Description of Artificial Sequence: Synthetic oligonucleotide
  Antisense strand to SEQ ID NO: 2144610
aaaucucucauuaugcugu

SEQ ID NO: 2144612 - RNA, 19 nt, Artificial Sequence
  Description of Artificial Sequence: Synthetic oligonucleotide
  Sense strand starting at position 3236 of SEQ ID NO: 1882747
uaaagagaaugcuagagaa

SEQ ID NO: 2144613 - RNA, 19 nt, Artificial Sequence
  Description of Artificial Sequence: Synthetic oligonucleotide
  Antisense strand to SEQ ID NO: 2144612
uucucuagcauucucuuua

SEQ ID NO: 2144614 - RNA, 19 nt, Artificial Sequence
  Description of Artificial Sequence: Synthetic oligonucleotide
  Sense strand starting at position 3442 of SEQ ID NO: 1882747
ccuauaguccuacguacuu

SEQ ID NO: 2144615 - RNA, 19 nt, Artificial Sequence
  Description of Artificial Sequence: Synthetic oligonucleotide
  Antisense strand to SEQ ID NO: 2144614
aaguacguaggacuauagg

SEQ ID NO: 2144616 - RNA, 19 nt, Artificial Sequence
  Description of Artificial Sequence: Synthetic oligonucleotide
  Sense strand starting at position 3448 of SEQ ID NO: 1882747
guccuacguacuuaggaga

SEQ ID NO: 2144617 - RNA, 19 nt, Artificial Sequence
  Description of Artificial Sequence: Synthetic oligonucleotide
  Antisense strand to SEQ ID NO: 2144616
ucuccuaaguacguaggac

SEQ ID NO: 2144618 - RNA, 19 nt, Artificial Sequence
  Description of Artificial Sequence: Synthetic oligonucleotide
  Sense strand starting at position 3627 of SEQ ID NO: 1882747
cugagauacugugaucaag

SEQ ID NO: 2144619 - RNA, 19 nt, Artificial Sequence
  Description of Artificial Sequence: Synthetic oligonucleotide
  Antisense strand to SEQ ID NO: 2144618
cuugaucacaguaucucag

SEQ ID NO: 2144620 - RNA, 19 nt, Artificial Sequence
  Description of Artificial Sequence: Synthetic oligonucleotide
  Sense strand starting at position 3692 of SEQ ID NO: 1882747
gagcacagucauggguaau

SEQ ID NO: 2144621 - RNA, 19 nt, Artificial Sequence
  Description of Artificial Sequence: Synthetic oligonucleotide
  Antisense strand to SEQ ID NO: 2144620
auuacccaugacugugcuc

SEQ ID NO: 2144622 - RNA, 19 nt, Artificial Sequence
  Description of Artificial Sequence: Synthetic oligonucleotide
  Sense strand starting at position 3693 of SEQ ID NO: 1882747
agcacagucauggguaauu

SEQ ID NO: 2144623 - RNA, 19 nt, Artificial Sequence
  Description of Artificial Sequence: Synthetic oligonucleotide
  Antisense strand to SEQ ID NO: 2144622
aauuacccaugacugugcu

SEQ ID NO: 2144624 - RNA, 19 nt, Artificial Sequence
  Description of Artificial Sequence: Synthetic oligonucleotide
  Sense strand starting at position 3855 of SEQ ID NO: 1882747
agagaaacugcuggucacu

SEQ ID NO: 2144625 - RNA, 19 nt, Artificial Sequence
  Description of Artificial Sequence: Synthetic oligonucleotide
  Antisense strand to SEQ ID NO: 2144624
agugaccagcaguuucucu

SEQ ID NO: 2144626 - RNA, 19 nt, Artificial Sequence
  Description of Artificial Sequence: Synthetic oligonucleotide
  Sense strand starting at position 3932 of SEQ ID NO: 1882747
uggagauucgcacaccaca

SEQ ID NO: 2144627 - RNA, 19 nt, Artificial Sequence
  Description of Artificial Sequence: Synthetic oligonucleotide
  Antisense strand to SEQ ID NO: 2144626
uguggugugcgaaucucca

SEQ ID NO: 2144628 - RNA, 19 nt, Artificial Sequence
  Description of Artificial Sequence: Synthetic oligonucleotide
  Sense strand starting at position 340 of SEQ ID NO: 1882748
cccugcugacuugagaagu

SEQ ID NO: 2144629 - RNA, 19 nt, Artificial Sequence
  Description of Artificial Sequence: Synthetic oligonucleotide
  Antisense strand to SEQ ID NO: 2144628
acuucucaagucagcaggg

SEQ ID NO: 2144630 - RNA, 19 nt, Artificial Sequence
  Description of Artificial Sequence: Synthetic oligonucleotide
  Sense strand starting at position 351 of SEQ ID NO: 1882748
ugagaaguugugcaucuuu

SEQ ID NO: 2144631 - RNA, 19 nt, Artificial Sequence
  Description of Artificial Sequence: Synthetic oligonucleotide
  Antisense strand to SEQ ID NO: 2144630
aaagaugcacaacuucuca

SEQ ID NO: 2144632 - RNA, 19 nt, Artificial Sequence
  Description of Artificial Sequence: Synthetic oligonucleotide
  Sense strand starting at position 507 of SEQ ID NO: 1882748
ucaccagauggaugguuua

SEQ ID NO: 2144633 - RNA, 19 nt, Artificial Sequence
  Description of Artificial Sequence: Synthetic oligonucleotide
  Antisense strand to SEQ ID NO: 2144632
uaaaccauccaucugguga

SEQ ID NO: 2144634 - RNA, 19 nt, Artificial Sequence
  Description of Artificial Sequence: Synthetic oligonucleotide
  Sense strand starting at position 605 of SEQ ID NO: 1882748
aagaauuguagauggugga

SEQ ID NO: 2144635 - RNA, 19 nt, Artificial Sequence
  Description of Artificial Sequence: Synthetic oligonucleotide
  Antisense strand to SEQ ID NO: 2144634
uccaccaucuacaauucuu

SEQ ID NO: 2144636 - RNA, 19 nt, Artificial Sequence
  Description of Artificial Sequence: Synthetic oligonucleotide
  Sense strand starting at position 606 of SEQ ID NO: 1882748
agaauuguagaugguggau

SEQ ID NO: 2144637 - RNA, 19 nt, Artificial Sequence
  Description of Artificial Sequence: Synthetic oligonucleotide
  Antisense strand to SEQ ID NO: 2144636
auccaccaucuacaauucu

SEQ ID NO: 2144638 - RNA, 19 nt, Artificial Sequence
  Description of Artificial Sequence: Synthetic oligonucleotide
  Sense strand starting at position 732 of SEQ ID NO: 1882748
gaaauaaguuuacuguaag

SEQ ID NO: 2144639 - RNA, 19 nt, Artificial Sequence
  Description of Artificial Sequence: Synthetic oligonucleotide
  Antisense strand to SEQ ID NO: 2144638
cuuacaguaaacuuauuuc

SEQ ID NO: 2144640 - RNA, 19 nt, Artificial Sequence
  Description of Artificial Sequence: Synthetic oligonucleotide
  Sense strand starting at position 735 of SEQ ID NO: 1882748
auaaguuuacuguaaguga

SEQ ID NO: 2144641 - RNA, 19 nt, Artificial Sequence
  Description of Artificial Sequence: Synthetic oligonucleotide
  Antisense strand to SEQ ID NO: 2144640
ucacuuacaguaaacuuau

SEQ ID NO: 2144642 - RNA, 19 nt, Artificial Sequence
  Description of Artificial Sequence: Synthetic oligonucleotide
  Sense strand starting at position 1028 of SEQ ID NO: 1882748
ugccaauaggaaggaguua

SEQ ID NO: 2144643 - RNA, 19 nt, Artificial Sequence
  Description of Artificial Sequence: Synthetic oligonucleotide
  Antisense strand to SEQ ID NO: 2144642
uaacuccuuccuauuggca

SEQ ID NO: 2144644 - RNA, 19 nt, Artificial Sequence
  Description of Artificial Sequence: Synthetic oligonucleotide
  Sense strand starting at position 1049 of SEQ ID NO: 1882748
agagaaugaucgagguuag

SEQ ID NO: 2144645 - RNA, 19 nt, Artificial Sequence
  Description of Artificial Sequence: Synthetic oligonucleotide
  Antisense strand to SEQ ID NO: 2144644
cuaaccucgaucauucucu

SEQ ID NO: 2144646 - RNA, 19 nt, Artificial Sequence
  Description of Artificial Sequence: Synthetic oligonucleotide
  Sense strand starting at position 1050 of SEQ ID NO: 1882748
gagaaugaucgagguuagu

SEQ ID NO: 2144647 - RNA, 19 nt, Artificial Sequence
  Description of Artificial Sequence: Synthetic oligonucleotide
  Antisense strand to SEQ ID NO: 2144646
acuaaccucgaucauucuc

SEQ ID NO: 2144648 - RNA, 19 nt, Artificial Sequence
  Description of Artificial Sequence: Synthetic oligonucleotide
  Sense strand starting at position 1105 of SEQ ID NO: 1882748
gauuguauucgguaaguau

SEQ ID NO: 2144649 - RNA, 19 nt, Artificial Sequence
  Description of Artificial Sequence: Synthetic oligonucleotide
  Antisense strand to SEQ ID NO: 2144648
auacuuaccgaauacaauc

SEQ ID NO: 2144650 - RNA, 19 nt, Artificial Sequence
  Description of Artificial Sequence: Synthetic oligonucleotide
  Sense strand starting at position 1108 of SEQ ID NO: 1882748
uguauucgguaaguauuua

SEQ ID NO: 2144651 - RNA, 19 nt, Artificial Sequence
  Description of Artificial Sequence: Synthetic oligonucleotide
  Antisense strand to SEQ ID NO: 2144650
uaaauacuuaccgaauaca

SEQ ID NO: 2144652 - RNA, 19 nt, Artificial Sequence
  Description of Artificial Sequence: Synthetic oligonucleotide
  Sense strand starting at position 1159 of SEQ ID NO: 1882748
agcugcugugaagaaugua

SEQ ID NO: 2144653 - RNA, 19 nt, Artificial Sequence
  Description of Artificial Sequence: Synthetic oligonucleotide
  Antisense strand to SEQ ID NO: 2144652
uacauucuucacagcagcu

SEQ ID NO: 2144654 - RNA, 19 nt, Artificial Sequence
  Description of Artificial Sequence: Synthetic oligonucleotide
  Sense strand starting at position 1212 of SEQ ID NO: 1882748
uuguaauucguugagaaag

SEQ ID NO: 2144655 - RNA, 19 nt, Artificial Sequence
  Description of Artificial Sequence: Synthetic oligonucleotide
  Antisense strand to SEQ ID NO: 2144654
cuuucucaacgaauuacaa

SEQ ID NO: 2144656 - RNA, 19 nt, Artificial Sequence
  Description of Artificial Sequence: Synthetic oligonucleotide
  Sense strand starting at position 2074 of SEQ ID NO: 1882748
auugcuggauguguaauaa

SEQ ID NO: 2144657 - RNA, 19 nt, Artificial Sequence
  Description of Artificial Sequence: Synthetic oligonucleotide
  Antisense strand to SEQ ID NO: 2144656
uuauuacacauccagcaau

SEQ ID NO: 2144658 - RNA, 19 nt, Artificial Sequence
  Description of Artificial Sequence: Synthetic oligonucleotide
  Sense strand starting at position 2112 of SEQ ID NO: 1882748
auuacuauauuugggaaca

SEQ ID NO: 2144659 - RNA, 19 nt, Artificial Sequence
  Description of Artificial Sequence: Synthetic oligonucleotide
  Antisense strand to SEQ ID NO: 2144658
uguucccaaauauaguaau

SEQ ID NO: 2144660 - RNA, 19 nt, Artificial Sequence
  Description of Artificial Sequence: Synthetic oligonucleotide
  Sense strand starting at position 2126 of SEQ ID NO: 1882748
gaacaacuuguggguaaua

SEQ ID NO: 2144661 - RNA, 19 nt, Artificial Sequence
  Description of Artificial Sequence: Synthetic oligonucleotide
  Antisense strand to SEQ ID NO: 2144660
uauuacccacaaguuguuc

SEQ ID NO: 2144662 - RNA, 19 nt, Artificial Sequence
  Description of Artificial Sequence: Synthetic oligonucleotide
  Sense strand starting at position 2165 of SEQ ID NO: 1882748
uaugauaaaucuuugugug

SEQ ID NO: 2144663 - RNA, 19 nt, Artificial Sequence
  Description of Artificial Sequence: Synthetic oligonucleotide
  Antisense strand to SEQ ID NO: 2144662
cacacaaagauuuaucaua

SEQ ID NO: 2144664 - RNA, 19 nt, Artificial Sequence
  Description of Artificial Sequence: Synthetic oligonucleotide
  Sense strand starting at position 2166 of SEQ ID NO: 1882748
augauaaaucuuuguguga

SEQ ID NO: 2144665 - RNA, 19 nt, Artificial Sequence
  Description of Artificial Sequence: Synthetic oligonucleotide
  Antisense strand to SEQ ID NO: 2144664
ucacacaaagauuuaucau

SEQ ID NO: 2144666 - RNA, 19 nt, Artificial Sequence
  Description of Artificial Sequence: Synthetic oligonucleotide
  Sense strand starting at position 2167 of SEQ ID NO: 1882748
ugauaaaucuuugugugau

SEQ ID NO: 2144667 - RNA, 19 nt, Artificial Sequence
  Description of Artificial Sequence: Synthetic oligonucleotide
  Antisense strand to SEQ ID NO: 2144666
aucacacaaagauuuauca

SEQ ID NO: 2144668 - RNA, 19 nt, Artificial Sequence
  Description of Artificial Sequence: Synthetic oligonucleotide
  Sense strand starting at position 2177 of SEQ ID NO: 1882748
uugugugaugucuaggaau

SEQ ID NO: 2144669 - RNA, 19 nt, Artificial Sequence
  Description of Artificial Sequence: Synthetic oligonucleotide
  Antisense strand to SEQ ID NO: 2144668
auuccuagacaucacacaa

SEQ ID NO: 2144670 - RNA, 19 nt, Artificial Sequence
  Description of Artificial Sequence: Synthetic oligonucleotide
  Sense strand starting at position 2183 of SEQ ID NO: 1882748
gaugucuaggaaugccauu

SEQ ID NO: 2144671 - RNA, 19 nt, Artificial Sequence
  Description of Artificial Sequence: Synthetic oligonucleotide
  Antisense strand to SEQ ID NO: 2144670
aauggcauuccuagacauc

SEQ ID NO: 2144672 - RNA, 19 nt, Artificial Sequence
  Description of Artificial Sequence: Synthetic oligonucleotide
  Sense strand starting at position 2404 of SEQ ID NO: 1882748
ucugcugaauuugaaugaa

SEQ ID NO: 2144673 - RNA, 19 nt, Artificial Sequence
  Description of Artificial Sequence: Synthetic oligonucleotide
  Antisense strand to SEQ ID NO: 2144672
uucauucaaauucagcaga

SEQ ID NO: 2144674 - RNA, 19 nt, Artificial Sequence
  Description of Artificial Sequence: Synthetic oligonucleotide
  Sense strand starting at position 2577 of SEQ ID NO: 1882748
ccgagaagcuggucugaag

SEQ ID NO: 2144675 - RNA, 19 nt, Artificial Sequence
  Description of Artificial Sequence: Synthetic oligonucleotide
  Antisense strand to SEQ ID NO: 2144674
cuucagaccagcuucucgg

SEQ ID NO: 2144676 - RNA, 19 nt, Artificial Sequence
  Description of Artificial Sequence: Synthetic oligonucleotide
  Sense strand starting at position 2931 of SEQ ID NO: 1882748
cuuugaauuccuugaguuc

SEQ ID NO: 2144677 - RNA, 19 nt, Artificial Sequence
  Description of Artificial Sequence: Synthetic oligonucleotide
  Antisense strand to SEQ ID NO: 2144676
gaacucaaggaauucaaag

SEQ ID NO: 2144678 - RNA, 19 nt, Artificial Sequence
  Description of Artificial Sequence: Synthetic oligonucleotide
  Sense strand starting at position 2934 of SEQ ID NO: 1882748
ugaauuccuugaguuccau

SEQ ID NO: 2144679 - RNA, 19 nt, Artificial Sequence
  Description of Artificial Sequence: Synthetic oligonucleotide
  Antisense strand to SEQ ID NO: 2144678
auggaacucaaggaauuca

SEQ ID NO: 2144680 - RNA, 19 nt, Artificial Sequence
  Description of Artificial Sequence: Synthetic oligonucleotide
  Sense strand starting at position 2940 of SEQ ID NO: 1882748
ccuugaguuccaugaggua

SEQ ID NO: 2144681 - RNA, 19 nt, Artificial Sequence
  Description of Artificial Sequence: Synthetic oligonucleotide
  Antisense strand to SEQ ID NO: 2144680
uaccucauggaacucaagg

SEQ ID NO: 2144682 - RNA, 19 nt, Artificial Sequence
  Description of Artificial Sequence: Synthetic oligonucleotide
  Sense strand starting at position 2947 of SEQ ID NO: 1882748
uuccaugagguauauucua

SEQ ID NO: 2144683 - RNA, 19 nt, Artificial Sequence
  Description of Artificial Sequence: Synthetic oligonucleotide
  Antisense strand to SEQ ID NO: 2144682
uagaauauaccucauggaa

SEQ ID NO: 2144684 - RNA, 19 nt, Artificial Sequence
  Description of Artificial Sequence: Synthetic oligonucleotide
  Sense strand starting at position 2984 of SEQ ID NO: 1882748
uuguuaauuugaguggcuu

SEQ ID NO: 2144685 - RNA, 19 nt, Artificial Sequence
  Description of Artificial Sequence: Synthetic oligonucleotide
  Antisense strand to SEQ ID NO: 2144684
aagccacucaaauuaacaa

SEQ ID NO: 2144686 - RNA, 19 nt, Artificial Sequence
  Description of Artificial Sequence: Synthetic oligonucleotide
  Sense strand starting at position 2985 of SEQ ID NO: 1882748
uguuaauuugaguggcuuu

SEQ ID NO: 2144687 - RNA, 19 nt, Artificial Sequence
  Description of Artificial Sequence: Synthetic oligonucleotide
  Antisense strand to SEQ ID NO: 2144686
aaagccacucaaauuaaca

SEQ ID NO: 2144688 - RNA, 19 nt, Artificial Sequence
  Description of Artificial Sequence: Synthetic oligonucleotide
  Sense strand starting at position 3122 of SEQ ID NO: 1882748
agaagcauuccauguugau

SEQ ID NO: 2144689 - RNA, 19 nt, Artificial Sequence
  Description of Artificial Sequence: Synthetic oligonucleotide
  Antisense strand to SEQ ID NO: 2144688
aucaacauggaaugcuucu

SEQ ID NO: 2144690 - RNA, 19 nt, Artificial Sequence
  Description of Artificial Sequence: Synthetic oligonucleotide
  Sense strand starting at position 3318 of SEQ ID NO: 1882748
augaacguuuacuuaguga

SEQ ID NO: 2144691 - RNA, 19 nt, Artificial Sequence
  Description of Artificial Sequence: Synthetic oligonucleotide
  Antisense strand to SEQ ID NO: 2144690
ucacuaaguaaacguucau

SEQ ID NO: 2144692 - RNA, 19 nt, Artificial Sequence
  Description of Artificial Sequence: Synthetic oligonucleotide
  Sense strand starting at position 3332 of SEQ ID NO: 1882748
agugacuaccgguacuaga

SEQ ID NO: 2144693 - RNA, 19 nt, Artificial Sequence
  Description of Artificial Sequence: Synthetic oligonucleotide
  Antisense strand to SEQ ID NO: 2144692
ucuaguaccgguagucacu

SEQ ID NO: 2144694 - RNA, 19 nt, Artificial Sequence
  Description of Artificial Sequence: Synthetic oligonucleotide
  Sense strand starting at position 3488 of SEQ ID NO: 1882748
gugguaucuguucaggaga

SEQ ID NO: 2144695 - RNA, 19 nt, Artificial Sequence
  Description of Artificial Sequence: Synthetic oligonucleotide
  Antisense strand to SEQ ID NO: 2144694
ucuccugaacagauaccac

SEQ ID NO: 2144696 - RNA, 19 nt, Artificial Sequence
  Description of Artificial Sequence: Synthetic oligonucleotide
  Sense strand starting at position 3641 of SEQ ID NO: 1882748
cuuagaugcugacuuuauu

SEQ ID NO: 2144697 - RNA, 19 nt, Artificial Sequence
  Description of Artificial Sequence: Synthetic oligonucleotide
  Antisense strand to SEQ ID NO: 2144696
aauaaagucagcaucuaag

SEQ ID NO: 2144698 - RNA, 19 nt, Artificial Sequence
  Description of Artificial Sequence: Synthetic oligonucleotide
  Sense strand starting at position 3870 of SEQ ID NO: 1882748
cuaucaucucucgaacugu

SEQ ID NO: 2144699 - RNA, 19 nt, Artificial Sequence
  Description of Artificial Sequence: Synthetic oligonucleotide
  Antisense strand to SEQ ID NO: 2144698
acaguucgagagaugauag

SEQ ID NO: 2144700 - RNA, 19 nt, Artificial Sequence
  Description of Artificial Sequence: Synthetic oligonucleotide
  Sense strand starting at position 3896 of SEQ ID NO: 1882748
aggcaaaugucauugaauu

SEQ ID NO: 2144701 - RNA, 19 nt, Artificial Sequence
  Description of Artificial Sequence: Synthetic oligonucleotide
  Antisense strand to SEQ ID NO: 2144700
aauucaaugacauuugccu

SEQ ID NO: 2144702 - RNA, 19 nt, Artificial Sequence
  Description of Artificial Sequence: Synthetic oligonucleotide
  Sense strand starting at position 3897 of SEQ ID NO: 1882748
ggcaaaugucauugaauua

SEQ ID NO: 2144703 - RNA, 19 nt, Artificial Sequence
  Description of Artificial Sequence: Synthetic oligonucleotide
  Antisense strand to SEQ ID NO: 2144702
uaauucaaugacauuugcc

SEQ ID NO: 2144704 - RNA, 19 nt, Artificial Sequence
  Description of Artificial Sequence: Synthetic oligonucleotide
  Sense strand starting at position 3938 of SEQ ID NO: 1882748
gugacuuggagguggauua

SEQ ID NO: 2144705 - RNA, 19 nt, Artificial Sequence
  Description of Artificial Sequence: Synthetic oligonucleotide
  Antisense strand to SEQ ID NO: 2144704
uaauccaccuccaagucac

SEQ ID NO: 2144706 - RNA, 19 nt, Artificial Sequence
  Description of Artificial Sequence: Synthetic oligonucleotide
  Sense strand starting at position 3952 of SEQ ID NO: 1882748
gauuauacugcaggcagaa

SEQ ID NO: 2144707 - RNA, 19 nt, Artificial Sequence
  Description of Artificial Sequence: Synthetic oligonucleotide
  Antisense strand to SEQ ID NO: 2144706
uucugccugcaguauaauc

SEQ ID NO: 2144708 - RNA, 19 nt, Artificial Sequence
  Description of Artificial Sequence: Synthetic oligonucleotide
  Sense strand starting at position 1 of SEQ ID NO: 1882749
guaaccuugucuuugggaa

SEQ ID NO: 2144709 - RNA, 19 nt, Artificial Sequence
  Description of Artificial Sequence: Synthetic oligonucleotide
  Antisense strand to SEQ ID NO: 2144708
uucccaaagacaagguuac

SEQ ID NO: 2144710 - RNA, 19 nt, Artificial Sequence
  Description of Artificial Sequence: Synthetic oligonucleotide
  Sense strand starting at position 2 of SEQ ID NO: 1882749
uaaccuugucuuugggaau

SEQ ID NO: 2144711 - RNA, 19 nt, Artificial Sequence
  Description of Artificial Sequence: Synthetic oligonucleotide
  Antisense strand to SEQ ID NO: 2144710
auucccaaagacaagguua

SEQ ID NO: 2144712 - RNA, 19 nt, Artificial Sequence
  Description of Artificial Sequence: Synthetic oligonucleotide
  Sense strand starting at position 63 of SEQ ID NO: 1882749
agcagauuacaguaaaucu

SEQ ID NO: 2144713 - RNA, 19 nt, Artificial Sequence
  Description of Artificial Sequence: Synthetic oligonucleotide
  Antisense strand to SEQ ID NO: 2144712
agauuuacuguaaucugcu

SEQ ID NO: 2144714 - RNA, 19 nt, Artificial Sequence
  Description of Artificial Sequence: Synthetic oligonucleotide
  Sense strand starting at position 651 of SEQ ID NO: 1882749
gaaggagacuagcaaauua

SEQ ID NO: 2144715 - RNA, 19 nt, Artificial Sequence
  Description of Artificial Sequence: Synthetic oligonucleotide
  Antisense strand to SEQ ID NO: 2144714
uaauuugcuagucuccuuc

SEQ ID NO: 2144716 - RNA, 19 nt, Artificial Sequence
  Description of Artificial Sequence: Synthetic oligonucleotide
  Sense strand starting at position 706 of SEQ ID NO: 1882749
ugaagugaccaggguaaga

SEQ ID NO: 2144717 - RNA, 19 nt, Artificial Sequence
  Description of Artificial Sequence: Synthetic oligonucleotide
  Antisense strand to SEQ ID NO: 2144716
ucuuacccuggucacuuca

SEQ ID NO: 2144718 - RNA, 19 nt, Artificial Sequence
  Description of Artificial Sequence: Synthetic oligonucleotide
  Sense strand starting at position 1024 of SEQ ID NO: 1882749
gaaggaucuccuugugaau

SEQ ID NO: 2144719 - RNA, 19 nt, Artificial Sequence
  Description of Artificial Sequence: Synthetic oligonucleotide
  Antisense strand to SEQ ID NO: 2144718
auucacaaggagauccuuc

SEQ ID NO: 2144720 - RNA, 19 nt, Artificial Sequence
  Description of Artificial Sequence: Synthetic oligonucleotide
  Sense strand starting at position 1033 of SEQ ID NO: 1882749
ccuugugaauugcuaauua

SEQ ID NO: 2144721 - RNA, 19 nt, Artificial Sequence
  Description of Artificial Sequence: Synthetic oligonucleotide
  Antisense strand to SEQ ID NO: 2144720
uaauuagcaauucacaagg

SEQ ID NO: 2144722 - RNA, 19 nt, Artificial Sequence
  Description of Artificial Sequence: Synthetic oligonucleotide
  Sense strand starting at position 1037 of SEQ ID NO: 1882749
gugaauugcuaauuagaag

SEQ ID NO: 2144723 - RNA, 19 nt, Artificial Sequence
  Description of Artificial Sequence: Synthetic oligonucleotide
  Antisense strand to SEQ ID NO: 2144722
cuucuaauuagcaauucac

SEQ ID NO: 2144724 - RNA, 19 nt, Artificial Sequence
  Description of Artificial Sequence: Synthetic oligonucleotide
  Sense strand starting at position 1057 of SEQ ID NO: 1882749
ucuggaaauuaccuauguu

SEQ ID NO: 2144725 - RNA, 19 nt, Artificial Sequence
  Description of Artificial Sequence: Synthetic oligonucleotide
  Antisense strand to SEQ ID NO: 2144724
aacauagguaauuuccaga

SEQ ID NO: 2144726 - RNA, 19 nt, Artificial Sequence
  Description of Artificial Sequence: Synthetic oligonucleotide
  Sense strand starting at position 1060 of SEQ ID NO: 1882749
ggaaauuaccuauguucug

SEQ ID NO: 2144727 - RNA, 19 nt, Artificial Sequence
  Description of Artificial Sequence: Synthetic oligonucleotide
  Antisense strand to SEQ ID NO: 2144726
cagaacauagguaauuucc

SEQ ID NO: 2144728 - RNA, 19 nt, Artificial Sequence
  Description of Artificial Sequence: Synthetic oligonucleotide
  Sense strand starting at position 1191 of SEQ ID NO: 1882749
guucuaaugucccuccacu

SEQ ID NO: 2144729 - RNA, 19 nt, Artificial Sequence
  Description of Artificial Sequence: Synthetic oligonucleotide
  Antisense strand to SEQ ID NO: 2144728
aguggagggacauuagaac

SEQ ID NO: 2144730 - RNA, 19 nt, Artificial Sequence
  Description of Artificial Sequence: Synthetic oligonucleotide
  Sense strand starting at position 1266 of SEQ ID NO: 1882749
uguaaauaagcauagaguu

SEQ ID NO: 2144731 - RNA, 19 nt, Artificial Sequence
  Description of Artificial Sequence: Synthetic oligonucleotide
  Antisense strand to SEQ ID NO: 2144730
aacucuaugcuuauuuaca

SEQ ID NO: 2144732 - RNA, 19 nt, Artificial Sequence
  Description of Artificial Sequence: Synthetic oligonucleotide
  Sense strand starting at position 1347 of SEQ ID NO: 1882749
cagcguuuccaaggugaag

SEQ ID NO: 2144733 - RNA, 19 nt, Artificial Sequence
  Description of Artificial Sequence: Synthetic oligonucleotide
  Antisense strand to SEQ ID NO: 2144732
cuucaccuuggaaacgcug

SEQ ID NO: 2144734 - RNA, 19 nt, Artificial Sequence
  Description of Artificial Sequence: Synthetic oligonucleotide
  Sense strand starting at position 1413 of SEQ ID NO: 1882749
uacaaaugugcaugcaagu

SEQ ID NO: 2144735 - RNA, 19 nt, Artificial Sequence
  Description of Artificial Sequence: Synthetic oligonucleotide
  Antisense strand to SEQ ID NO: 2144734
acuugcaugcacauuugua

SEQ ID NO: 2144736 - RNA, 19 nt, Artificial Sequence
  Description of Artificial Sequence: Synthetic oligonucleotide
  Sense strand starting at position 1430 of SEQ ID NO: 1882749
guugcauaccuacaacgau

SEQ ID NO: 2144737 - RNA, 19 nt, Artificial Sequence
  Description of Artificial Sequence: Synthetic oligonucleotide
  Antisense strand to SEQ ID NO: 2144736
aucguuguagguaugcaac

SEQ ID NO: 2144738 - RNA, 19 nt, Artificial Sequence
  Description of Artificial Sequence: Synthetic oligonucleotide
  Sense strand starting at position 1445 of SEQ ID NO: 1882749
cgaugugguugguuucaga

SEQ ID NO: 2144739 - RNA, 19 nt, Artificial Sequence
  Description of Artificial Sequence: Synthetic oligonucleotide
  Antisense strand to SEQ ID NO: 2144738
ucugaaaccaaccacaucg

SEQ ID NO: 2144740 - RNA, 19 nt, Artificial Sequence
  Description of Artificial Sequence: Synthetic oligonucleotide
  Sense strand starting at position 2107 of SEQ ID NO: 1882749
gccguugucacggaaaucu

SEQ ID NO: 2144741 - RNA, 19 nt, Artificial Sequence
  Description of Artificial Sequence: Synthetic oligonucleotide
  Antisense strand to SEQ ID NO: 2144740
agauuuccgugacaacggc

SEQ ID NO: 2144742 - RNA, 19 nt, Artificial Sequence
  Description of Artificial Sequence: Synthetic oligonucleotide
  Sense strand starting at position 2478 of SEQ ID NO: 1882749
aggaacugucguuggcaga

SEQ ID NO: 2144743 - RNA, 19 nt, Artificial Sequence
  Description of Artificial Sequence: Synthetic oligonucleotide
  Antisense strand to SEQ ID NO: 2144742
ucugccaacgacaguuccu

SEQ ID NO: 2144744 - RNA, 19 nt, Artificial Sequence
  Description of Artificial Sequence: Synthetic oligonucleotide
  Sense strand starting at position 2675 of SEQ ID NO: 1882749
aggagaauuggcuagagcu

SEQ ID NO: 2144745 - RNA, 19 nt, Artificial Sequence
  Description of Artificial Sequence: Synthetic oligonucleotide
  Antisense strand to SEQ ID NO: 2144744
agcucuagccaauucuccu

SEQ ID NO: 2144746 - RNA, 19 nt, Artificial Sequence
  Description of Artificial Sequence: Synthetic oligonucleotide
  Sense strand starting at position 2677 of SEQ ID NO: 1882749
gagaauuggcuagagcuga

SEQ ID NO: 2144747 - RNA, 19 nt, Artificial Sequence
  Description of Artificial Sequence: Synthetic oligonucleotide
  Antisense strand to SEQ ID NO: 2144746
ucagcucuagccaauucuc

SEQ ID NO: 2144748 - RNA, 19 nt, Artificial Sequence
  Description of Artificial Sequence: Synthetic oligonucleotide
  Sense strand starting at position 2934 of SEQ ID NO: 1882749
ggcucuaggacguguuaaa

SEQ ID NO: 2144749 - RNA, 19 nt, Artificial Sequence
  Description of Artificial Sequence: Synthetic oligonucleotide
  Antisense strand to SEQ ID NO: 2144748
uuuaacacguccuagagcc

SEQ ID NO: 2144750 - RNA, 19 nt, Artificial Sequence
  Description of Artificial Sequence: Synthetic oligonucleotide
  Sense strand starting at position 2979 of SEQ ID NO: 1882749
gccucugcucuggaaguga

SEQ ID NO: 2144751 - RNA, 19 nt, Artificial Sequence
  Description of Artificial Sequence: Synthetic oligonucleotide
  Antisense strand to SEQ ID NO: 2144750
ucacuuccagagcagaggc

SEQ ID NO: 2144752 - RNA, 19 nt, Artificial Sequence
  Description of Artificial Sequence: Synthetic oligonucleotide
  Sense strand starting at position 2992 of SEQ ID NO: 1882749
aagugaucguuuguacuga

SEQ ID NO: 2144753 - RNA, 19 nt, Artificial Sequence
  Description of Artificial Sequence: Synthetic oligonucleotide
  Antisense strand to SEQ ID NO: 2144752
ucaguacaaacgaucacuu

SEQ ID NO: 2144754 - RNA, 19 nt, Artificial Sequence
  Description of Artificial Sequence: Synthetic oligonucleotide
  Sense strand starting at position 3237 of SEQ ID NO: 1882749
cuggaagugguguauccua

SEQ ID NO: 2144755 - RNA, 19 nt, Artificial Sequence
  Description of Artificial Sequence: Synthetic oligonucleotide
  Antisense strand to SEQ ID NO: 2144754
uaggauacaccacuuccag

SEQ ID NO: 2144756 - RNA, 19 nt, Artificial Sequence
  Description of Artificial Sequence: Synthetic oligonucleotide
  Sense strand starting at position 3276 of SEQ ID NO: 1882749
aguacaugggcuugagacu

SEQ ID NO: 2144757 - RNA, 19 nt, Artificial Sequence
  Description of Artificial Sequence: Synthetic oligonucleotide
  Antisense strand to SEQ ID NO: 2144756
agucucaagcccauguacu

SEQ ID NO: 2144758 - RNA, 19 nt, Artificial Sequence
  Description of Artificial Sequence: Synthetic oligonucleotide
  Sense strand starting at position 3277 of SEQ ID NO: 1882749
guacaugggcuugagacuu

SEQ ID NO: 2144759 - RNA, 19 nt, Artificial Sequence
  Description of Artificial Sequence: Synthetic oligonucleotide
  Antisense strand to SEQ ID NO: 2144758
aagucucaagcccauguac

SEQ ID NO: 2144760 - RNA, 19 nt, Artificial Sequence
  Description of Artificial Sequence: Synthetic oligonucleotide
  Sense strand starting at position 3316 of SEQ ID NO: 1882749
gcguuuggaggcugaucaa

SEQ ID NO: 2144761 - RNA, 19 nt, Artificial Sequence
  Description of Artificial Sequence: Synthetic oligonucleotide
  Antisense strand to SEQ ID NO: 2144760
uugaucagccuccaaacgc

SEQ ID NO: 2144762 - RNA, 19 nt, Artificial Sequence
  Description of Artificial Sequence: Synthetic oligonucleotide
  Sense strand starting at position 3319 of SEQ ID NO: 1882749
uuuggaggcugaucaagaa

SEQ ID NO: 2144763 - RNA, 19 nt, Artificial Sequence
  Description of Artificial Sequence: Synthetic oligonucleotide
  Antisense strand to SEQ ID NO: 2144762
uucuugaucagccuccaaa

SEQ ID NO: 2144764 - RNA, 19 nt, Artificial Sequence
  Description of Artificial Sequence: Synthetic oligonucleotide
  Sense strand starting at position 3388 of SEQ ID NO: 1882749
cuuggauagggaugcauaa

SEQ ID NO: 2144765 - RNA, 19 nt, Artificial Sequence
  Description of Artificial Sequence: Synthetic oligonucleotide
  Antisense strand to SEQ ID NO: 2144764
uuaugcaucccuauccaag

SEQ ID NO: 2144766 - RNA, 19 nt, Artificial Sequence
  Description of Artificial Sequence: Synthetic oligonucleotide
  Sense strand starting at position 3597 of SEQ ID NO: 1882749
acuacaaagcuaugucgua

SEQ ID NO: 2144767 - RNA, 19 nt, Artificial Sequence
  Description of Artificial Sequence: Synthetic oligonucleotide
  Antisense strand to SEQ ID NO: 2144766
uacgacauagcuuuguagu

SEQ ID NO: 2144768 - RNA, 19 nt, Artificial Sequence
  Description of Artificial Sequence: Synthetic oligonucleotide
  Sense strand starting at position 3598 of SEQ ID NO: 1882749
cuacaaagcuaugucguau

SEQ ID NO: 2144769 - RNA, 19 nt, Artificial Sequence
  Description of Artificial Sequence: Synthetic oligonucleotide
  Antisense strand to SEQ ID NO: 2144768
auacgacauagcuuuguag

SEQ ID NO: 2144770 - RNA, 19 nt, Artificial Sequence
  Description of Artificial Sequence: Synthetic oligonucleotide
  Sense strand starting at position 3610 of SEQ ID NO: 1882749
gucguaucuauugcuagca

SEQ ID NO: 2144771 - RNA, 19 nt, Artificial Sequence
  Description of Artificial Sequence: Synthetic oligonucleotide
  Antisense strand to SEQ ID NO: 2144770
ugcuagcaauagauacgac

SEQ ID NO: 2144772 - RNA, 19 nt, Artificial Sequence
  Description of Artificial Sequence: Synthetic oligonucleotide
  Sense strand starting at position 3712 of SEQ ID NO: 1882749
auaacuggauguguagaaa

SEQ ID NO: 2144773 - RNA, 19 nt, Artificial Sequence
  Description of Artificial Sequence: Synthetic oligonucleotide
  Antisense strand to SEQ ID NO: 2144772
uuucuacacauccaguuau

SEQ ID NO: 2144774 - RNA, 19 nt, Artificial Sequence
  Description of Artificial Sequence: Synthetic oligonucleotide
  Sense strand starting at position 3766 of SEQ ID NO: 1882749
ggucucagcccauggugaa

SEQ ID NO: 2144775 - RNA, 19 nt, Artificial Sequence
  Description of Artificial Sequence: Synthetic oligonucleotide
  Antisense strand to SEQ ID NO: 2144774
uucaccaugggcugagacc

SEQ ID NO: 2144776 - RNA, 19 nt, Artificial Sequence
  Description of Artificial Sequence: Synthetic oligonucleotide
  Sense strand starting at position 3818 of SEQ ID NO: 1882749
ccaccuuuggcucaucgau

SEQ ID NO: 2144777 - RNA, 19 nt, Artificial Sequence
  Description of Artificial Sequence: Synthetic oligonucleotide
  Antisense strand to SEQ ID NO: 2144776
aucgaugagccaaaggugg

SEQ ID NO: 2144778 - RNA, 19 nt, Artificial Sequence
  Description of Artificial Sequence: Synthetic oligonucleotide
  Sense strand starting at position 3820 of SEQ ID NO: 1882749
accuuuggcucaucgauau

SEQ ID NO: 2144779 - RNA, 19 nt, Artificial Sequence
  Description of Artificial Sequence: Synthetic oligonucleotide
  Antisense strand to SEQ ID NO: 2144778
auaucgaugagccaaaggu

SEQ ID NO: 2144780 - RNA, 19 nt, Artificial Sequence
  Description of Artificial Sequence: Synthetic oligonucleotide
  Sense strand starting at position 3824 of SEQ ID NO: 1882749
uuggcucaucgauauaaca

SEQ ID NO: 2144781 - RNA, 19 nt, Artificial Sequence
  Description of Artificial Sequence: Synthetic oligonucleotide
  Antisense strand to SEQ ID NO: 2144780
uguuauaucgaugagccaa

SEQ ID NO: 2144782 - RNA, 19 nt, Artificial Sequence
  Description of Artificial Sequence: Synthetic oligonucleotide
  Sense strand starting at position 3858 of SEQ ID NO: 1882749
gagagaaaggucugcugcu

SEQ ID NO: 2144783 - RNA, 19 nt, Artificial Sequence
  Description of Artificial Sequence: Synthetic oligonucleotide
  Antisense strand to SEQ ID NO: 2144782
agcagcagaccuuucucuc

SEQ ID NO: 2144784 - RNA, 19 nt, Artificial Sequence
  Description of Artificial Sequence: Synthetic oligonucleotide
  Sense strand starting at position 3905 of SEQ ID NO: 1882749
caggguccucucggauagu

SEQ ID NO: 2144785 - RNA, 19 nt, Artificial Sequence
  Description of Artificial Sequence: Synthetic oligonucleotide
  Antisense strand to SEQ ID NO: 2144784
acuauccgagaggacccug

SEQ ID NO: 2144786 - RNA, 19 nt, Artificial Sequence
  Description of Artificial Sequence: Synthetic oligonucleotide
  Sense strand starting at position 3908 of SEQ ID NO: 1882749
gguccucucggauaguaca

SEQ ID NO: 2144787 - RNA, 19 nt, Artificial Sequence
  Description of Artificial Sequence: Synthetic oligonucleotide
  Antisense strand to SEQ ID NO: 2144786
uguacuauccgagaggacc

SEQ ID NO: 2144788 - RNA, 19 nt, Artificial Sequence
  Description of Artificial Sequence: Synthetic oligonucleotide
  Sense strand starting at position 129 of SEQ ID NO: 1882750
aaagaagucugucccaguu

SEQ ID NO: 2144789 - RNA, 19 nt, Artificial Sequence
  Description of Artificial Sequence: Synthetic oligonucleotide
  Antisense strand to SEQ ID NO: 2144788
aacugggacagacuucuuu

SEQ ID NO: 2144790 - RNA, 19 nt, Artificial Sequence
  Description of Artificial Sequence: Synthetic oligonucleotide
  Sense strand starting at position 198 of SEQ ID NO: 1882750
gucacucuguacuugagua

SEQ ID NO: 2144791 - RNA, 19 nt, Artificial Sequence
  Description of Artificial Sequence: Synthetic oligonucleotide
  Antisense strand to SEQ ID NO: 2144790
uacucaaguacagagugac

SEQ ID NO: 2144792 - RNA, 19 nt, Artificial Sequence
  Description of Artificial Sequence: Synthetic oligonucleotide
  Sense strand starting at position 235 of SEQ ID NO: 1882750
ugaucagcuggcuaugaga

SEQ ID NO: 2144793 - RNA, 19 nt, Artificial Sequence
  Description of Artificial Sequence: Synthetic oligonucleotide
  Antisense strand to SEQ ID NO: 2144792
ucucauagccagcugauca

SEQ ID NO: 2144794 - RNA, 19 nt, Artificial Sequence
  Description of Artificial Sequence: Synthetic oligonucleotide
  Sense strand starting at position 278 of SEQ ID NO: 1882750
cugggaugugucuggccaa

SEQ ID NO: 2144795 - RNA, 19 nt, Artificial Sequence
  Description of Artificial Sequence: Synthetic oligonucleotide
  Antisense strand to SEQ ID NO: 2144794
uuggccagacacaucccag

SEQ ID NO: 2144796 - RNA, 19 nt, Artificial Sequence
  Description of Artificial Sequence: Synthetic oligonucleotide
  Sense strand starting at position 300 of SEQ ID NO: 1882750
ggaagagucagguagcuca

SEQ ID NO: 2144797 - RNA, 19 nt, Artificial Sequence
  Description of Artificial Sequence: Synthetic oligonucleotide
  Antisense strand to SEQ ID NO: 2144796
ugagcuaccugacucuucc

SEQ ID NO: 2144798 - RNA, 19 nt, Artificial Sequence
  Description of Artificial Sequence: Synthetic oligonucleotide
  Sense strand starting at position 313 of SEQ ID NO: 1882750
agcucaaggccuggagauu

SEQ ID NO: 2144799 - RNA, 19 nt, Artificial Sequence
  Description of Artificial Sequence: Synthetic oligonucleotide
  Antisense strand to SEQ ID NO: 2144798
aaucuccaggccuugagcu

SEQ ID NO: 2144800 - RNA, 19 nt, Artificial Sequence
  Description of Artificial Sequence: Synthetic oligonucleotide
  Sense strand starting at position 399 of SEQ ID NO: 1882750
gaaccaguguccucaguga

SEQ ID NO: 2144801 - RNA, 19 nt, Artificial Sequence
  Description of Artificial Sequence: Synthetic oligonucleotide
  Antisense strand to SEQ ID NO: 2144800
ucacugaggacacugguuc

SEQ ID NO: 2144802 - RNA, 19 nt, Artificial Sequence
  Description of Artificial Sequence: Synthetic oligonucleotide
  Sense strand starting at position 593 of SEQ ID NO: 1882750
guagaauaagugugaccca

SEQ ID NO: 2144803 - RNA, 19 nt, Artificial Sequence
  Description of Artificial Sequence: Synthetic oligonucleotide
  Antisense strand to SEQ ID NO: 2144802
ugggucacacuuauucuac

SEQ ID NO: 2144804 - RNA, 19 nt, Artificial Sequence
  Description of Artificial Sequence: Synthetic oligonucleotide
  Sense strand starting at position 753 of SEQ ID NO: 1882750
ucagaaaucaggugggagu

SEQ ID NO: 2144805 - RNA, 19 nt, Artificial Sequence
  Description of Artificial Sequence: Synthetic oligonucleotide
  Antisense strand to SEQ ID NO: 2144804
acucccaccugauuucuga

SEQ ID NO: 2144806 - RNA, 19 nt, Artificial Sequence
  Description of Artificial Sequence: Synthetic oligonucleotide
  Sense strand starting at position 754 of SEQ ID NO: 1882750
cagaaaucaggugggaguu

SEQ ID NO: 2144807 - RNA, 19 nt, Artificial Sequence
  Description of Artificial Sequence: Synthetic oligonucleotide
  Antisense strand to SEQ ID NO: 2144806
aacucccaccugauuucug

SEQ ID NO: 2144808 - RNA, 19 nt, Artificial Sequence
  Description of Artificial Sequence: Synthetic oligonucleotide
  Sense strand starting at position 795 of SEQ ID NO: 1882750
ccugcaauagcauguugaa

SEQ ID NO: 2144809 - RNA, 19 nt, Artificial Sequence
  Description of Artificial Sequence: Synthetic oligonucleotide
  Antisense strand to SEQ ID NO: 2144808
uucaacaugcuauugcagg

SEQ ID NO: 2144810 - RNA, 19 nt, Artificial Sequence
  Description of Artificial Sequence: Synthetic oligonucleotide
  Sense strand starting at position 838 of SEQ ID NO: 1882750
uguguaauuccauguccau

SEQ ID NO: 2144811 - RNA, 19 nt, Artificial Sequence
  Description of Artificial Sequence: Synthetic oligonucleotide
  Antisense strand to SEQ ID NO: 2144810
auggacauggaauuacaca

SEQ ID NO: 2144812 - RNA, 19 nt, Artificial Sequence
  Description of Artificial Sequence: Synthetic oligonucleotide
  Sense strand starting at position 850 of SEQ ID NO: 1882750
uguccauaugcaugauuuc

SEQ ID NO: 2144813 - RNA, 19 nt, Artificial Sequence
  Description of Artificial Sequence: Synthetic oligonucleotide
  Antisense strand to SEQ ID NO: 2144812
gaaaucaugcauauggaca

SEQ ID NO: 2144814 - RNA, 19 nt, Artificial Sequence
  Description of Artificial Sequence: Synthetic oligonucleotide
  Sense strand starting at position 889 of SEQ ID NO: 1882750
aggaguuccugugcaaaug

SEQ ID NO: 2144815 - RNA, 19 nt, Artificial Sequence
  Description of Artificial Sequence: Synthetic oligonucleotide
  Antisense strand to SEQ ID NO: 2144814
cauuugcacaggaacuccu

SEQ ID NO: 2144816 - RNA, 19 nt, Artificial Sequence
  Description of Artificial Sequence: Synthetic oligonucleotide
  Sense strand starting at position 906 of SEQ ID NO: 1882750
ugguauugccaauauuaag

SEQ ID NO: 2144817 - RNA, 19 nt, Artificial Sequence
  Description of Artificial Sequence: Synthetic oligonucleotide
  Antisense strand to SEQ ID NO: 2144816
cuuaauauuggcaauacca

SEQ ID NO: 2144818 - RNA, 19 nt, Artificial Sequence
  Description of Artificial Sequence: Synthetic oligonucleotide
  Sense strand starting at position 984 of SEQ ID NO: 1882750
ccacaaauugguugccuua

SEQ ID NO: 2144819 - RNA, 19 nt, Artificial Sequence
  Description of Artificial Sequence: Synthetic oligonucleotide
  Antisense strand to SEQ ID NO: 2144818
uaaggcaaccaauuugugg

SEQ ID NO: 2144820 - RNA, 19 nt, Artificial Sequence
  Description of Artificial Sequence: Synthetic oligonucleotide
  Sense strand starting at position 986 of SEQ ID NO: 1882750
acaaauugguugccuuaaa

SEQ ID NO: 2144821 - RNA, 19 nt, Artificial Sequence
  Description of Artificial Sequence: Synthetic oligonucleotide
  Antisense strand to SEQ ID NO: 2144820
uuuaaggcaaccaauuugu

SEQ ID NO: 2144822 - RNA, 19 nt, Artificial Sequence
  Description of Artificial Sequence: Synthetic oligonucleotide
  Sense strand starting at position 1143 of SEQ ID NO: 1882750
cugugucucuucccaucau

SEQ ID NO: 2144823 - RNA, 19 nt, Artificial Sequence
  Description of Artificial Sequence: Synthetic oligonucleotide
  Antisense strand to SEQ ID NO: 2144822
augaugggaagagacacag

SEQ ID NO: 2144824 - RNA, 19 nt, Artificial Sequence
  Description of Artificial Sequence: Synthetic oligonucleotide
  Sense strand starting at position 1171 of SEQ ID NO: 1882750
aggcaugucuggguccaaa

SEQ ID NO: 2144825 - RNA, 19 nt, Artificial Sequence
  Description of Artificial Sequence: Synthetic oligonucleotide
  Antisense strand to SEQ ID NO: 2144824
uuuggacccagacaugccu

SEQ ID NO: 2144826 - RNA, 19 nt, Artificial Sequence
  Description of Artificial Sequence: Synthetic oligonucleotide
  Sense strand starting at position 1551 of SEQ ID NO: 1882750
ggucauauuggaugaguca

SEQ ID NO: 2144827 - RNA, 19 nt, Artificial Sequence
  Description of Artificial Sequence: Synthetic oligonucleotide
  Antisense strand to SEQ ID NO: 2144826
ugacucauccaauaugacc

SEQ ID NO: 2144828 - RNA, 19 nt, Artificial Sequence
  Description of Artificial Sequence: Synthetic oligonucleotide
  Sense strand starting at position 1552 of SEQ ID NO: 1882750
gucauauuggaugagucau

SEQ ID NO: 2144829 - RNA, 19 nt, Artificial Sequence
  Description of Artificial Sequence: Synthetic oligonucleotide
  Antisense strand to SEQ ID NO: 2144828
augacucauccaauaugac

SEQ ID NO: 2144830 - RNA, 19 nt, Artificial Sequence
  Description of Artificial Sequence: Synthetic oligonucleotide
  Sense strand starting at position 1554 of SEQ ID NO: 1882750
cauauuggaugagucauau

SEQ ID NO: 2144831 - RNA, 19 nt, Artificial Sequence
  Description of Artificial Sequence: Synthetic oligonucleotide
  Antisense strand to SEQ ID NO: 2144830
auaugacucauccaauaug

SEQ ID NO: 2144832 - RNA, 19 nt, Artificial Sequence
  Description of Artificial Sequence: Synthetic oligonucleotide
  Sense strand starting at position 1750 of SEQ ID NO: 1882750
ggcaauuaaugaucuucuu

SEQ ID NO: 2144833 - RNA, 19 nt, Artificial Sequence
  Description of Artificial Sequence: Synthetic oligonucleotide
  Antisense strand to SEQ ID NO: 2144832
aagaagaucauuaauugcc

SEQ ID NO: 2144834 - RNA, 19 nt, Artificial Sequence
  Description of Artificial Sequence: Synthetic oligonucleotide
  Sense strand starting at position 1988 of SEQ ID NO: 1882750
gguggucaucgucacugau

SEQ ID NO: 2144835 - RNA, 19 nt, Artificial Sequence
  Description of Artificial Sequence: Synthetic oligonucleotide
  Antisense strand to SEQ ID NO: 2144834
aucagugacgaugaccacc

SEQ ID NO: 2144836 - RNA, 19 nt, Artificial Sequence
  Description of Artificial Sequence: Synthetic oligonucleotide
  Sense strand starting at position 1990 of SEQ ID NO: 1882750
uggucaucgucacugauca

SEQ ID NO: 2144837 - RNA, 19 nt, Artificial Sequence
  Description of Artificial Sequence: Synthetic oligonucleotide
  Antisense strand to SEQ ID NO: 2144836
ugaucagugacgaugacca

SEQ ID NO: 2144838 - RNA, 19 nt, Artificial Sequence
  Description of Artificial Sequence: Synthetic oligonucleotide
  Sense strand starting at position 2124 of SEQ ID NO: 1882750
aguauauuguuagugggaa

SEQ ID NO: 2144839 - RNA, 19 nt, Artificial Sequence
  Description of Artificial Sequence: Synthetic oligonucleotide
  Antisense strand to SEQ ID NO: 2144838
uucccacuaacaauauacu

SEQ ID NO: 2144840 - RNA, 19 nt, Artificial Sequence
  Description of Artificial Sequence: Synthetic oligonucleotide
  Sense strand starting at position 2626 of SEQ ID NO: 1882750
gugggaaugguucaugggu

SEQ ID NO: 2144841 - RNA, 19 nt, Artificial Sequence
  Description of Artificial Sequence: Synthetic oligonucleotide
  Antisense strand to SEQ ID NO: 2144840
acccaugaaccauucccac

SEQ ID NO: 2144842 - RNA, 19 nt, Artificial Sequence
  Description of Artificial Sequence: Synthetic oligonucleotide
  Sense strand starting at position 2921 of SEQ ID NO: 1882750
ucuugucaacaguguauua

SEQ ID NO: 2144843 - RNA, 19 nt, Artificial Sequence
  Description of Artificial Sequence: Synthetic oligonucleotide
  Antisense strand to SEQ ID NO: 2144842
uaauacacuguugacaaga

SEQ ID NO: 2144844 - RNA, 19 nt, Artificial Sequence
  Description of Artificial Sequence: Synthetic oligonucleotide
  Sense strand starting at position 2952 of SEQ ID NO: 1882750
guugcaauuuccuuagcau

SEQ ID NO: 2144845 - RNA, 19 nt, Artificial Sequence
  Description of Artificial Sequence: Synthetic oligonucleotide
  Antisense strand to SEQ ID NO: 2144844
augcuaaggaaauugcaac

SEQ ID NO: 2144846 - RNA, 19 nt, Artificial Sequence
  Description of Artificial Sequence: Synthetic oligonucleotide
  Sense strand starting at position 3343 of SEQ ID NO: 1882750
guaaacuggccauauauga

SEQ ID NO: 2144847 - RNA, 19 nt, Artificial Sequence
  Description of Artificial Sequence: Synthetic oligonucleotide
  Antisense strand to SEQ ID NO: 2144846
ucauauauggccaguuuac

SEQ ID NO: 2144848 - RNA, 19 nt, Artificial Sequence
  Description of Artificial Sequence: Synthetic oligonucleotide
  Sense strand starting at position 3413 of SEQ ID NO: 1882750
guagcuauuguugaauaag

SEQ ID NO: 2144849 - RNA, 19 nt, Artificial Sequence
  Description of Artificial Sequence: Synthetic oligonucleotide
  Antisense strand to SEQ ID NO: 2144848
cuuauucaacaauagcuac

SEQ ID NO: 2144850 - RNA, 19 nt, Artificial Sequence
  Description of Artificial Sequence: Synthetic oligonucleotide
  Sense strand starting at position 3416 of SEQ ID NO: 1882750
gcuauuguugaauaagaug

SEQ ID NO: 2144851 - RNA, 19 nt, Artificial Sequence
  Description of Artificial Sequence: Synthetic oligonucleotide
  Antisense strand to SEQ ID NO: 2144850
caucuuauucaacaauagc

SEQ ID NO: 2144852 - RNA, 19 nt, Artificial Sequence
  Description of Artificial Sequence: Synthetic oligonucleotide
  Sense strand starting at position 3453 of SEQ ID NO: 1882750
aauagagaaucagugcaca

SEQ ID NO: 2144853 - RNA, 19 nt, Artificial Sequence
  Description of Artificial Sequence: Synthetic oligonucleotide
  Antisense strand to SEQ ID NO: 2144852
ugugcacugauucucuauu

SEQ ID NO: 2144854 - RNA, 19 nt, Artificial Sequence
  Description of Artificial Sequence: Synthetic oligonucleotide
  Sense strand starting at position 3481 of SEQ ID NO: 1882750
gcaggauuaccggguacau

SEQ ID NO: 2144855 - RNA, 19 nt, Artificial Sequence
  Description of Artificial Sequence: Synthetic oligonucleotide
  Antisense strand to SEQ ID NO: 2144854
auguacccgguaauccugc

SEQ ID NO: 2144856 - RNA, 19 nt, Artificial Sequence
  Description of Artificial Sequence: Synthetic oligonucleotide
  Sense strand starting at position 3483 of SEQ ID NO: 1882750
aggauuaccggguacaucu

SEQ ID NO: 2144857 - RNA, 19 nt, Artificial Sequence
  Description of Artificial Sequence: Synthetic oligonucleotide
  Antisense strand to SEQ ID NO: 2144856
agauguacccgguaauccu

SEQ ID NO: 2144858 - RNA, 19 nt, Artificial Sequence
  Description of Artificial Sequence: Synthetic oligonucleotide
  Sense strand starting at position 3728 of SEQ ID NO: 1882750
cauuauggauguccaguaa

SEQ ID NO: 2144859 - RNA, 19 nt, Artificial Sequence
  Description of Artificial Sequence: Synthetic oligonucleotide
  Antisense strand to SEQ ID NO: 2144858
uuacuggacauccauaaug

SEQ ID NO: 2144860 - RNA, 19 nt, Artificial Sequence
  Description of Artificial Sequence: Synthetic oligonucleotide
  Sense strand starting at position 3859 of SEQ ID NO: 1882750
uagcgaguuucugcaagga

SEQ ID NO: 2144861 - RNA, 19 nt, Artificial Sequence
  Description of Artificial Sequence: Synthetic oligonucleotide
  Antisense strand to SEQ ID NO: 2144860
uccuugcagaaacucgcua

SEQ ID NO: 2144862 - RNA, 19 nt, Artificial Sequence
  Description of Artificial Sequence: Synthetic oligonucleotide
  Sense strand starting at position 3863 of SEQ ID NO: 1882750
gaguuucugcaaggaagaa

SEQ ID NO: 2144863 - RNA, 19 nt, Artificial Sequence
  Description of Artificial Sequence: Synthetic oligonucleotide
  Antisense strand to SEQ ID NO: 2144862
uucuuccuugcagaaacuc

SEQ ID NO: 2144864 - RNA, 19 nt, Artificial Sequence
  Description of Artificial Sequence: Synthetic oligonucleotide
  Sense strand starting at position 3883 of SEQ ID NO: 1882750
agggcuugaucaucucauu

SEQ ID NO: 2144865 - RNA, 19 nt, Artificial Sequence
  Description of Artificial Sequence: Synthetic oligonucleotide
  Antisense strand to SEQ ID NO: 2144864
aaugagaugaucaagcccu

SEQ ID NO: 2144866 - RNA, 19 nt, Artificial Sequence
  Description of Artificial Sequence: Synthetic oligonucleotide
  Sense strand starting at position 3918 of SEQ ID NO: 1882750
agaauugaaucacagugga

SEQ ID NO: 2144867 - RNA, 19 nt, Artificial Sequence
  Description of Artificial Sequence: Synthetic oligonucleotide
  Antisense strand to SEQ ID NO: 2144866
uccacugugauucaauucu

SEQ ID NO: 2144868 - RNA, 19 nt, Artificial Sequence
  Description of Artificial Sequence: Synthetic oligonucleotide
  Sense strand starting at position 23 of SEQ ID NO: 1882751
guuguaaauuuggaggaca

SEQ ID NO: 2144869 - RNA, 19 nt, Artificial Sequence
  Description of Artificial Sequence: Synthetic oligonucleotide
  Antisense strand to SEQ ID NO: 2144868
uguccuccaaauuuacaac

SEQ ID NO: 2144870 - RNA, 19 nt, Artificial Sequence
  Description of Artificial Sequence: Synthetic oligonucleotide
  Sense strand starting at position 91 of SEQ ID NO: 1882751
agaagucagucuccgagaa

SEQ ID NO: 2144871 - RNA, 19 nt, Artificial Sequence
  Description of Artificial Sequence: Synthetic oligonucleotide
  Antisense strand to SEQ ID NO: 2144870
uucucggagacugacuucu

SEQ ID NO: 2144872 - RNA, 19 nt, Artificial Sequence
  Description of Artificial Sequence: Synthetic oligonucleotide
  Sense strand starting at position 92 of SEQ ID NO: 1882751
gaagucagucuccgagaag

SEQ ID NO: 2144873 - RNA, 19 nt, Artificial Sequence
  Description of Artificial Sequence: Synthetic oligonucleotide
  Antisense strand to SEQ ID NO: 2144872
cuucucggagacugacuuc

SEQ ID NO: 2144874 - RNA, 19 nt, Artificial Sequence
  Description of Artificial Sequence: Synthetic oligonucleotide
  Sense strand starting at position 162 of SEQ ID NO: 1882751
ggcucacugucccaaacau

SEQ ID NO: 2144875 - RNA, 19 nt, Artificial Sequence
  Description of Artificial Sequence: Synthetic oligonucleotide
  Antisense strand to SEQ ID NO: 2144874
auguuugggacagugagcc

SEQ ID NO: 2144876 - RNA, 19 nt, Artificial Sequence
  Description of Artificial Sequence: Synthetic oligonucleotide
  Sense strand starting at position 229 of SEQ ID NO: 1882751
uccacaauggugugggaua

SEQ ID NO: 2144877 - RNA, 19 nt, Artificial Sequence
  Description of Artificial Sequence: Synthetic oligonucleotide
  Antisense strand to SEQ ID NO: 2144876
uaucccacaccauugugga

SEQ ID NO: 2144878 - RNA, 19 nt, Artificial Sequence
  Description of Artificial Sequence: Synthetic oligonucleotide
  Sense strand starting at position 431 of SEQ ID NO: 1882751
ugagaagcagcccauauua

SEQ ID NO: 2144879 - RNA, 19 nt, Artificial Sequence
  Description of Artificial Sequence: Synthetic oligonucleotide
  Antisense strand to SEQ ID NO: 2144878
uaauaugggcugcuucuca

SEQ ID NO: 2144880 - RNA, 19 nt, Artificial Sequence
  Description of Artificial Sequence: Synthetic oligonucleotide
  Sense strand starting at position 486 of SEQ ID NO: 1882751
agauuauuauuguccuugu

SEQ ID NO: 2144881 - RNA, 19 nt, Artificial Sequence
  Description of Artificial Sequence: Synthetic oligonucleotide
  Antisense strand to SEQ ID NO: 2144880
acaaggacaauaauaaucu

SEQ ID NO: 2144882 - RNA, 19 nt, Artificial Sequence
  Description of Artificial Sequence: Synthetic oligonucleotide
  Sense strand starting at position 575 of SEQ ID NO: 1882751
agaagcuguuucuugcaau

SEQ ID NO: 2144883 - RNA, 19 nt, Artificial Sequence
  Description of Artificial Sequence: Synthetic oligonucleotide
  Antisense strand to SEQ ID NO: 2144882
auugcaagaaacagcuucu

SEQ ID NO: 2144884 - RNA, 19 nt, Artificial Sequence
  Description of Artificial Sequence: Synthetic oligonucleotide
  Sense strand starting at position 633 of SEQ ID NO: 1882751
ugagcucuccaucauugga

SEQ ID NO: 2144885 - RNA, 19 nt, Artificial Sequence
  Description of Artificial Sequence: Synthetic oligonucleotide
  Antisense strand to SEQ ID NO: 2144884
uccaaugauggagagcuca

SEQ ID NO: 2144886 - RNA, 19 nt, Artificial Sequence
  Description of Artificial Sequence: Synthetic oligonucleotide
  Sense strand starting at position 713 of SEQ ID NO: 1882751
ccacguaucacacggaaga

SEQ ID NO: 2144887 - RNA, 19 nt, Artificial Sequence
  Description of Artificial Sequence: Synthetic oligonucleotide
  Antisense strand to SEQ ID NO: 2144886
ucuuccgugugauacgugg

SEQ ID NO: 2144888 - RNA, 19 nt, Artificial Sequence
  Description of Artificial Sequence: Synthetic oligonucleotide
  Sense strand starting at position 754 of SEQ ID NO: 1882751
uccuguccaugauuucgua

SEQ ID NO: 2144889 - RNA, 19 nt, Artificial Sequence
  Description of Artificial Sequence: Synthetic oligonucleotide
  Antisense strand to SEQ ID NO: 2144888
uacgaaaucauggacagga

SEQ ID NO: 2144890 - RNA, 19 nt, Artificial Sequence
  Description of Artificial Sequence: Synthetic oligonucleotide
  Sense strand starting at position 861 of SEQ ID NO: 1882751
ccuugauauugugagccua

SEQ ID NO: 2144891 - RNA, 19 nt, Artificial Sequence
  Description of Artificial Sequence: Synthetic oligonucleotide
  Antisense strand to SEQ ID NO: 2144890
uaggcucacaauaucaagg

SEQ ID NO: 2144892 - RNA, 19 nt, Artificial Sequence
  Description of Artificial Sequence: Synthetic oligonucleotide
  Sense strand starting at position 863 of SEQ ID NO: 1882751
uugauauugugagccuaca

SEQ ID NO: 2144893 - RNA, 19 nt, Artificial Sequence
  Description of Artificial Sequence: Synthetic oligonucleotide
  Antisense strand to SEQ ID NO: 2144892
uguaggcucacaauaucaa

SEQ ID NO: 2144894 - RNA, 19 nt, Artificial Sequence
  Description of Artificial Sequence: Synthetic oligonucleotide
  Sense strand starting at position 2006 of SEQ ID NO: 1882751
gcaaucagaugucccagau

SEQ ID NO: 2144895 - RNA, 19 nt, Artificial Sequence
  Description of Artificial Sequence: Synthetic oligonucleotide
  Antisense strand to SEQ ID NO: 2144894
aucugggacaucugauugc

SEQ ID NO: 2144896 - RNA, 19 nt, Artificial Sequence
  Description of Artificial Sequence: Synthetic oligonucleotide
  Sense strand starting at position 2010 of SEQ ID NO: 1882751
ucagaugucccagauucua

SEQ ID NO: 2144897 - RNA, 19 nt, Artificial Sequence
  Description of Artificial Sequence: Synthetic oligonucleotide
  Antisense strand to SEQ ID NO: 2144896
uagaaucugggacaucuga

SEQ ID NO: 2144898 - RNA, 19 nt, Artificial Sequence
  Description of Artificial Sequence: Synthetic oligonucleotide
  Sense strand starting at position 2080 of SEQ ID NO: 1882751
ccuagaaagcucuggaaag

SEQ ID NO: 2144899 - RNA, 19 nt, Artificial Sequence
  Description of Artificial Sequence: Synthetic oligonucleotide
  Antisense strand to SEQ ID NO: 2144898
cuuuccagagcuuucuagg

SEQ ID NO: 2144900 - RNA, 19 nt, Artificial Sequence
  Description of Artificial Sequence: Synthetic oligonucleotide
  Sense strand starting at position 2188 of SEQ ID NO: 1882751
gccagauggccuuagagac

SEQ ID NO: 2144901 - RNA, 19 nt, Artificial Sequence
  Description of Artificial Sequence: Synthetic oligonucleotide
  Antisense strand to SEQ ID NO: 2144900
gucucuaaggccaucuggc

SEQ ID NO: 2144902 - RNA, 19 nt, Artificial Sequence
  Description of Artificial Sequence: Synthetic oligonucleotide
  Sense strand starting at position 2200 of SEQ ID NO: 1882751
uagagaccuuccuagcagu

SEQ ID NO: 2144903 - RNA, 19 nt, Artificial Sequence
  Description of Artificial Sequence: Synthetic oligonucleotide
  Antisense strand to SEQ ID NO: 2144902
acugcuaggaaggucucua

SEQ ID NO: 2144904 - RNA, 19 nt, Artificial Sequence
  Description of Artificial Sequence: Synthetic oligonucleotide
  Sense strand starting at position 2267 of SEQ ID NO: 1882751
cgguuuauagaauagacuu

SEQ ID NO: 2144905 - RNA, 19 nt, Artificial Sequence
  Description of Artificial Sequence: Synthetic oligonucleotide
  Antisense strand to SEQ ID NO: 2144904
aagucuauucuauaaaccg

SEQ ID NO: 2144906 - RNA, 19 nt, Artificial Sequence
  Description of Artificial Sequence: Synthetic oligonucleotide
  Sense strand starting at position 2279 of SEQ ID NO: 1882751
uagacuuguuggccugauu

SEQ ID NO: 2144907 - RNA, 19 nt, Artificial Sequence
  Description of Artificial Sequence: Synthetic oligonucleotide
  Antisense strand to SEQ ID NO: 2144906
aaucaggccaacaagucua

SEQ ID NO: 2144908 - RNA, 19 nt, Artificial Sequence
  Description of Artificial Sequence: Synthetic oligonucleotide
  Sense strand starting at position 2282 of SEQ ID NO: 1882751
acuuguuggccugauugau

SEQ ID NO: 2144909 - RNA, 19 nt, Artificial Sequence
  Description of Artificial Sequence: Synthetic oligonucleotide
  Antisense strand to SEQ ID NO: 2144908
aucaaucaggccaacaagu

SEQ ID NO: 2144910 - RNA, 19 nt, Artificial Sequence
  Description of Artificial Sequence: Synthetic oligonucleotide
  Sense strand starting at position 2288 of SEQ ID NO: 1882751
uggccugauugauggagga

SEQ ID NO: 2144911 - RNA, 19 nt, Artificial Sequence
  Description of Artificial Sequence: Synthetic oligonucleotide
  Antisense strand to SEQ ID NO: 2144910
uccuccaucaaucaggcca

SEQ ID NO: 2144912 - RNA, 19 nt, Artificial Sequence
  Description of Artificial Sequence: Synthetic oligonucleotide
  Sense strand starting at position 2523 of SEQ ID NO: 1882751
guuuaugugcugucagcca

SEQ ID NO: 2144913 - RNA, 19 nt, Artificial Sequence
  Description of Artificial Sequence: Synthetic oligonucleotide
  Antisense strand to SEQ ID NO: 2144912
uggcugacagcacauaaac

SEQ ID NO: 2144914 - RNA, 19 nt, Artificial Sequence
  Description of Artificial Sequence: Synthetic oligonucleotide
  Sense strand starting at position 2528 of SEQ ID NO: 1882751
ugugcugucagccaagaaa

SEQ ID NO: 2144915 - RNA, 19 nt, Artificial Sequence
  Description of Artificial Sequence: Synthetic oligonucleotide
  Antisense strand to SEQ ID NO: 2144914
uuucuuggcugacagcaca

SEQ ID NO: 2144916 - RNA, 19 nt, Artificial Sequence
  Description of Artificial Sequence: Synthetic oligonucleotide
  Sense strand starting at position 2540 of SEQ ID NO: 1882751
caagaaagcuguuucguga

SEQ ID NO: 2144917 - RNA, 19 nt, Artificial Sequence
  Description of Artificial Sequence: Synthetic oligonucleotide
  Antisense strand to SEQ ID NO: 2144916
ucacgaaacagcuuucuug

SEQ ID NO: 2144918 - RNA, 19 nt, Artificial Sequence
  Description of Artificial Sequence: Synthetic oligonucleotide
  Sense strand starting at position 2543 of SEQ ID NO: 1882751
gaaagcuguuucgugauga

SEQ ID NO: 2144919 - RNA, 19 nt, Artificial Sequence
  Description of Artificial Sequence: Synthetic oligonucleotide
  Antisense strand to SEQ ID NO: 2144918
ucaucacgaaacagcuuuc

SEQ ID NO: 2144920 - RNA, 19 nt, Artificial Sequence
  Description of Artificial Sequence: Synthetic oligonucleotide
  Sense strand starting at position 2548 of SEQ ID NO: 1882751
cuguuucgugaugauuacu

SEQ ID NO: 2144921 - RNA, 19 nt, Artificial Sequence
  Description of Artificial Sequence: Synthetic oligonucleotide
  Antisense strand to SEQ ID NO: 2144920
aguaaucaucacgaaacag

SEQ ID NO: 2144922 - RNA, 19 nt, Artificial Sequence
  Description of Artificial Sequence: Synthetic oligonucleotide
  Sense strand starting at position 2551 of SEQ ID NO: 1882751
uuucgugaugauuacuaau

SEQ ID NO: 2144923 - RNA, 19 nt, Artificial Sequence
  Description of Artificial Sequence: Synthetic oligonucleotide
  Antisense strand to SEQ ID NO: 2144922
auuaguaaucaucacgaaa

SEQ ID NO: 2144924 - RNA, 19 nt, Artificial Sequence
  Description of Artificial Sequence: Synthetic oligonucleotide
  Sense strand starting at position 2553 of SEQ ID NO: 1882751
ucgugaugauuacuaauua

SEQ ID NO: 2144925 - RNA, 19 nt, Artificial Sequence
  Description of Artificial Sequence: Synthetic oligonucleotide
  Antisense strand to SEQ ID NO: 2144924
uaauuaguaaucaucacga

SEQ ID NO: 2144926 - RNA, 19 nt, Artificial Sequence
  Description of Artificial Sequence: Synthetic oligonucleotide
  Sense strand starting at position 2554 of SEQ ID NO: 1882751
cgugaugauuacuaauuac

SEQ ID NO: 2144927 - RNA, 19 nt, Artificial Sequence
  Description of Artificial Sequence: Synthetic oligonucleotide
  Antisense strand to SEQ ID NO: 2144926
guaauuaguaaucaucacg

SEQ ID NO: 2144928 - RNA, 19 nt, Artificial Sequence
  Description of Artificial Sequence: Synthetic oligonucleotide
  Sense strand starting at position 2594 of SEQ ID NO: 1882751
cugguuauggagcaauuau

SEQ ID NO: 2144929 - RNA, 19 nt, Artificial Sequence
  Description of Artificial Sequence: Synthetic oligonucleotide
  Antisense strand to SEQ ID NO: 2144928
auaauugcuccauaaccag

SEQ ID NO: 2144930 - RNA, 19 nt, Artificial Sequence
  Description of Artificial Sequence: Synthetic oligonucleotide
  Sense strand starting at position 2630 of SEQ ID NO: 1882751
agggccuuauaaggauuaa

SEQ ID NO: 2144931 - RNA, 19 nt, Artificial Sequence
  Description of Artificial Sequence: Synthetic oligonucleotide
  Antisense strand to SEQ ID NO: 2144930
uuaauccuuauaaggcccu

SEQ ID NO: 2144932 - RNA, 19 nt, Artificial Sequence
  Description of Artificial Sequence: Synthetic oligonucleotide
  Sense strand starting at position 3064 of SEQ ID NO: 1882751
uguuguauguuuguuccau

SEQ ID NO: 2144933 - RNA, 19 nt, Artificial Sequence
  Description of Artificial Sequence: Synthetic oligonucleotide
  Antisense strand to SEQ ID NO: 2144932
auggaacaaacauacaaca

SEQ ID NO: 2144934 - RNA, 19 nt, Artificial Sequence
  Description of Artificial Sequence: Synthetic oligonucleotide
  Sense strand starting at position 3065 of SEQ ID NO: 1882751
guuguauguuuguuccauu

SEQ ID NO: 2144935 - RNA, 19 nt, Artificial Sequence
  Description of Artificial Sequence: Synthetic oligonucleotide
  Antisense strand to SEQ ID NO: 2144934
aauggaacaaacauacaac

SEQ ID NO: 2144936 - RNA, 19 nt, Artificial Sequence
  Description of Artificial Sequence: Synthetic oligonucleotide
  Sense strand starting at position 3066 of SEQ ID NO: 1882751
uuguauguuuguuccauuu

SEQ ID NO: 2144937 - RNA, 19 nt, Artificial Sequence
  Description of Artificial Sequence: Synthetic oligonucleotide
  Antisense strand to SEQ ID NO: 2144936
aaauggaacaaacauacaa

SEQ ID NO: 2144938 - RNA, 19 nt, Artificial Sequence
  Description of Artificial Sequence: Synthetic oligonucleotide
  Sense strand starting at position 3068 of SEQ ID NO: 1882751
guauguuuguuccauuuac

SEQ ID NO: 2144939 - RNA, 19 nt, Artificial Sequence
  Description of Artificial Sequence: Synthetic oligonucleotide
  Antisense strand to SEQ ID NO: 2144938
guaaauggaacaaacauac

SEQ ID NO: 2144940 - RNA, 19 nt, Artificial Sequence
  Description of Artificial Sequence: Synthetic oligonucleotide
  Sense strand starting at position 3201 of SEQ ID NO: 1882751
uggucaaggucguucagaa

SEQ ID NO: 2144941 - RNA, 19 nt, Artificial Sequence
  Description of Artificial Sequence: Synthetic oligonucleotide
  Antisense strand to SEQ ID NO: 2144940
uucugaacgaccuugacca

SEQ ID NO: 2144942 - RNA, 19 nt, Artificial Sequence
  Description of Artificial Sequence: Synthetic oligonucleotide
  Sense strand starting at position 3449 of SEQ ID NO: 1882751
cuccuuuccuccguuugau

SEQ ID NO: 2144943 - RNA, 19 nt, Artificial Sequence
  Description of Artificial Sequence: Synthetic oligonucleotide
  Antisense strand to SEQ ID NO: 2144942
aucaaacggaggaaaggag

SEQ ID NO: 2144944 - RNA, 19 nt, Artificial Sequence
  Description of Artificial Sequence: Synthetic oligonucleotide
  Sense strand starting at position 3452 of SEQ ID NO: 1882751
cuuuccuccguuugaucua

SEQ ID NO: 2144945 - RNA, 19 nt, Artificial Sequence
  Description of Artificial Sequence: Synthetic oligonucleotide
  Antisense strand to SEQ ID NO: 2144944
uagaucaaacggaggaaag

SEQ ID NO: 2144946 - RNA, 19 nt, Artificial Sequence
  Description of Artificial Sequence: Synthetic oligonucleotide
  Sense strand starting at position 3453 of SEQ ID NO: 1882751
uuuccuccguuugaucuaa

SEQ ID NO: 2144947 - RNA, 19 nt, Artificial Sequence
  Description of Artificial Sequence: Synthetic oligonucleotide
  Antisense strand to SEQ ID NO: 2144946
uuagaucaaacggaggaaa

SEQ ID NO: 2144948 - RNA, 19 nt, Artificial Sequence
  Description of Artificial Sequence: Synthetic oligonucleotide
  Sense strand starting at position 2799 of SEQ ID NO: 1882752
uuaggcaaaugguauuauu

SEQ ID NO: 2144949 - RNA, 19 nt, Artificial Sequence
  Description of Artificial Sequence: Synthetic oligonucleotide
  Antisense strand to SEQ ID NO: 2144948
aauaauaccauuugccuaa

SEQ ID NO: 2144950 - RNA, 19 nt, Artificial Sequence
  Description of Artificial Sequence: Synthetic oligonucleotide
  Sense strand starting at position 2802 of SEQ ID NO: 1882752
ggcaaaugguauuauuaaa

SEQ ID NO: 2144951 - RNA, 19 nt, Artificial Sequence
  Description of Artificial Sequence: Synthetic oligonucleotide
  Antisense strand to SEQ ID NO: 2144950
uuuaauaauaccauuugcc

SEQ ID NO: 2144952 - RNA, 19 nt, Artificial Sequence
  Description of Artificial Sequence: Synthetic oligonucleotide
  Sense strand starting at position 2906 of SEQ ID NO: 1882752
auggaaucuugguguggga

SEQ ID NO: 2144953 - RNA, 19 nt, Artificial Sequence
  Description of Artificial Sequence: Synthetic oligonucleotide
  Antisense strand to SEQ ID NO: 2144952
ucccacaccaagauuccau

SEQ ID NO: 2144954 - RNA, 19 nt, Artificial Sequence
  Description of Artificial Sequence: Synthetic oligonucleotide
  Sense strand starting at position 3877 of SEQ ID NO: 1882752
ucaggauaugacuguuaga

SEQ ID NO: 2144955 - RNA, 19 nt, Artificial Sequence
  Description of Artificial Sequence: Synthetic oligonucleotide
  Antisense strand to SEQ ID NO: 2144954
ucuaacagucauauccuga

SEQ ID NO: 2144956 - RNA, 19 nt, Artificial Sequence
  Description of Artificial Sequence: Synthetic oligonucleotide
  Sense strand starting at position 3880 of SEQ ID NO: 1882752
ggauaugacuguuagagcu

SEQ ID NO: 2144957 - RNA, 19 nt, Artificial Sequence
  Description of Artificial Sequence: Synthetic oligonucleotide
  Antisense strand to SEQ ID NO: 2144956
agcucuaacagucauaucc

SEQ ID NO: 2144958 - RNA, 19 nt, Artificial Sequence
  Description of Artificial Sequence: Synthetic oligonucleotide
  Sense strand starting at position 3887 of SEQ ID NO: 1882752
acuguuagagcuugggacu

SEQ ID NO: 2144959 - RNA, 19 nt, Artificial Sequence
  Description of Artificial Sequence: Synthetic oligonucleotide
  Antisense strand to SEQ ID NO: 2144958
agucccaagcucuaacagu

SEQ ID NO: 2144960 - RNA, 19 nt, Artificial Sequence
  Description of Artificial Sequence: Synthetic oligonucleotide
  Sense strand starting at position 3888 of SEQ ID NO: 1882752
cuguuagagcuugggacua

SEQ ID NO: 2144961 - RNA, 19 nt, Artificial Sequence
  Description of Artificial Sequence: Synthetic oligonucleotide
  Antisense strand to SEQ ID NO: 2144960
uagucccaagcucuaacag

SEQ ID NO: 2144962 - RNA, 19 nt, Artificial Sequence
  Description of Artificial Sequence: Synthetic oligonucleotide
  Sense strand starting at position 79 of SEQ ID NO: 1882753
cgcuuucuaggccaugaaa

SEQ ID NO: 2144963 - RNA, 19 nt, Artificial Sequence
  Description of Artificial Sequence: Synthetic oligonucleotide
  Antisense strand to SEQ ID NO: 2144962
uuucauggccuagaaagcg

SEQ ID NO: 2144964 - RNA, 19 nt, Artificial Sequence
  Description of Artificial Sequence: Synthetic oligonucleotide
  Sense strand starting at position 333 of SEQ ID NO: 1882753
cuaaucugcccuugaaaug

SEQ ID NO: 2144965 - RNA, 19 nt, Artificial Sequence
  Description of Artificial Sequence: Synthetic oligonucleotide
  Antisense strand to SEQ ID NO: 2144964
cauuucaagggcagauuag

SEQ ID NO: 2144966 - RNA, 19 nt, Artificial Sequence
  Description of Artificial Sequence: Synthetic oligonucleotide
  Sense strand starting at position 343 of SEQ ID NO: 1882753
cuugaaaugcucuauucug

SEQ ID NO: 2144967 - RNA, 19 nt, Artificial Sequence
  Description of Artificial Sequence: Synthetic oligonucleotide
  Antisense strand to SEQ ID NO: 2144966
cagaauagagcauuucaag

SEQ ID NO: 2144968 - RNA, 19 nt, Artificial Sequence
  Description of Artificial Sequence: Synthetic oligonucleotide
  Sense strand starting at position 568 of SEQ ID NO: 1882753
aguaaacuaugaucacguu

SEQ ID NO: 2144969 - RNA, 19 nt, Artificial Sequence
  Description of Artificial Sequence: Synthetic oligonucleotide
  Antisense strand to SEQ ID NO: 2144968
aacgugaucauaguuuacu

SEQ ID NO: 2144970 - RNA, 19 nt, Artificial Sequence
  Description of Artificial Sequence: Synthetic oligonucleotide
  Sense strand starting at position 665 of SEQ ID NO: 1882753
cucugaaggcugugacaca

SEQ ID NO: 2144971 - RNA, 19 nt, Artificial Sequence
  Description of Artificial Sequence: Synthetic oligonucleotide
  Antisense strand to SEQ ID NO: 2144970
ugugucacagccuucagag

SEQ ID NO: 2144972 - RNA, 19 nt, Artificial Sequence
  Description of Artificial Sequence: Synthetic oligonucleotide
  Sense strand starting at position 1088 of SEQ ID NO: 1882753
uuaucaugcuggucuugaa

SEQ ID NO: 2144973 - RNA, 19 nt, Artificial Sequence
  Description of Artificial Sequence: Synthetic oligonucleotide
  Antisense strand to SEQ ID NO: 2144972
uucaagaccagcaugauaa

SEQ ID NO: 2144974 - RNA, 19 nt, Artificial Sequence
  Description of Artificial Sequence: Synthetic oligonucleotide
  Sense strand starting at position 1312 of SEQ ID NO: 1882753
cgcuucuguuuguuauuua

SEQ ID NO: 2144975 - RNA, 19 nt, Artificial Sequence
  Description of Artificial Sequence: Synthetic oligonucleotide
  Antisense strand to SEQ ID NO: 2144974
uaaauaacaaacagaagcg

SEQ ID NO: 2144976 - RNA, 19 nt, Artificial Sequence
  Description of Artificial Sequence: Synthetic oligonucleotide
  Sense strand starting at position 1393 of SEQ ID NO: 1882753
ucgggaggaagguguguua

SEQ ID NO: 2144977 - RNA, 19 nt, Artificial Sequence
  Description of Artificial Sequence: Synthetic oligonucleotide
  Antisense strand to SEQ ID NO: 2144976
uaacacaccuuccucccga

SEQ ID NO: 2144978 - RNA, 19 nt, Artificial Sequence
  Description of Artificial Sequence: Synthetic oligonucleotide
  Sense strand starting at position 1396 of SEQ ID NO: 1882753
ggaggaagguguguuagga

SEQ ID NO: 2144979 - RNA, 19 nt, Artificial Sequence
  Description of Artificial Sequence: Synthetic oligonucleotide
  Antisense strand to SEQ ID NO: 2144978
uccuaacacaccuuccucc

SEQ ID NO: 2144980 - RNA, 19 nt, Artificial Sequence
  Description of Artificial Sequence: Synthetic oligonucleotide
  Sense strand starting at position 1413 of SEQ ID NO: 1882753
gaagaaugugucugacucu

SEQ ID NO: 2144981 - RNA, 19 nt, Artificial Sequence
  Description of Artificial Sequence: Synthetic oligonucleotide
  Antisense strand to SEQ ID NO: 2144980
agagucagacacauucuuc

SEQ ID NO: 2144982 - RNA, 19 nt, Artificial Sequence
  Description of Artificial Sequence: Synthetic oligonucleotide
  Sense strand starting at position 1741 of SEQ ID NO: 1882753
ugugaucagcccuaaguuc

SEQ ID NO: 2144983 - RNA, 19 nt, Artificial Sequence
  Description of Artificial Sequence: Synthetic oligonucleotide
  Antisense strand to SEQ ID NO: 2144982
gaacuuagggcugaucaca

SEQ ID NO: 2144984 - RNA, 19 nt, Artificial Sequence
  Description of Artificial Sequence: Synthetic oligonucleotide
  Sense strand starting at position 2016 of SEQ ID NO: 1882753
cuagaacuguguuucuauc

SEQ ID NO: 2144985 - RNA, 19 nt, Artificial Sequence
  Description of Artificial Sequence: Synthetic oligonucleotide
  Antisense strand to SEQ ID NO: 2144984
gauagaaacacaguucuag

SEQ ID NO: 2144986 - RNA, 19 nt, Artificial Sequence
  Description of Artificial Sequence: Synthetic oligonucleotide
  Sense strand starting at position 2018 of SEQ ID NO: 1882753
agaacuguguuucuaucga

SEQ ID NO: 2144987 - RNA, 19 nt, Artificial Sequence
  Description of Artificial Sequence: Synthetic oligonucleotide
  Antisense strand to SEQ ID NO: 2144986
ucgauagaaacacaguucu

SEQ ID NO: 2144988 - RNA, 19 nt, Artificial Sequence
  Description of Artificial Sequence: Synthetic oligonucleotide
  Sense strand starting at position 2087 of SEQ ID NO: 1882753
cugagauaugcagguuccu

SEQ ID NO: 2144989 - RNA, 19 nt, Artificial Sequence
  Description of Artificial Sequence: Synthetic oligonucleotide
  Antisense strand to SEQ ID NO: 2144988
aggaaccugcauaucucag

SEQ ID NO: 2144990 - RNA, 19 nt, Artificial Sequence
  Description of Artificial Sequence: Synthetic oligonucleotide
  Sense strand starting at position 2097 of SEQ ID NO: 1882753
cagguuccuugagcaaaua

SEQ ID NO: 2144991 - RNA, 19 nt, Artificial Sequence
  Description of Artificial Sequence: Synthetic oligonucleotide
  Antisense strand to SEQ ID NO: 2144990
uauuugcucaaggaaccug

SEQ ID NO: 2144992 - RNA, 19 nt, Artificial Sequence
  Description of Artificial Sequence: Synthetic oligonucleotide
  Sense strand starting at position 2192 of SEQ ID NO: 1882753
gcagcagagacuugaaaca

SEQ ID NO: 2144993 - RNA, 19 nt, Artificial Sequence
  Description of Artificial Sequence: Synthetic oligonucleotide
  Antisense strand to SEQ ID NO: 2144992
uguuucaagucucugcugc

SEQ ID NO: 2144994 - RNA, 19 nt, Artificial Sequence
  Description of Artificial Sequence: Synthetic oligonucleotide
  Sense strand starting at position 2271 of SEQ ID NO: 1882753
ugacaaagaucugucuaua

SEQ ID NO: 2144995 - RNA, 19 nt, Artificial Sequence
  Description of Artificial Sequence: Synthetic oligonucleotide
  Antisense strand to SEQ ID NO: 2144994
uauagacagaucuuuguca

SEQ ID NO: 2144996 - RNA, 19 nt, Artificial Sequence
  Description of Artificial Sequence: Synthetic oligonucleotide
  Sense strand starting at position 2385 of SEQ ID NO: 1882753
caaggucgagcacaaauaa

SEQ ID NO: 2144997 - RNA, 19 nt, Artificial Sequence
  Description of Artificial Sequence: Synthetic oligonucleotide
  Antisense strand to SEQ ID NO: 2144996
uuauuugugcucgaccuug

SEQ ID NO: 2144998 - RNA, 19 nt, Artificial Sequence
  Description of Artificial Sequence: Synthetic oligonucleotide
  Sense strand starting at position 2533 of SEQ ID NO: 1882753
gcacacagaugcuuaacaa

SEQ ID NO: 2144999 - RNA, 19 nt, Artificial Sequence
  Description of Artificial Sequence: Synthetic oligonucleotide
  Antisense strand to SEQ ID NO: 2144998
uuguuaagcaucugugugc

SEQ ID NO: 2145000 - RNA, 19 nt, Artificial Sequence
  Description of Artificial Sequence: Synthetic oligonucleotide
  Sense strand starting at position 2639 of SEQ ID NO: 1882753
cccuguguucuugcuccau

SEQ ID NO: 2145001 - RNA, 19 nt, Artificial Sequence
  Description of Artificial Sequence: Synthetic oligonucleotide
  Antisense strand to SEQ ID NO: 2145000
auggagcaagaacacaggg

SEQ ID NO: 2145002 - RNA, 19 nt, Artificial Sequence
  Description of Artificial Sequence: Synthetic oligonucleotide
  Sense strand starting at position 2891 of SEQ ID NO: 1882753
ugaugucuauuacucagau

SEQ ID NO: 2145003 - RNA, 19 nt, Artificial Sequence
  Description of Artificial Sequence: Synthetic oligonucleotide
  Antisense strand to SEQ ID NO: 2145002
aucugaguaauagacauca

SEQ ID NO: 2145004 - RNA, 19 nt, Artificial Sequence
  Description of Artificial Sequence: Synthetic oligonucleotide
  Sense strand starting at position 2930 of SEQ ID NO: 1882753
agggcaggaaugugugaaa

SEQ ID NO: 2145005 - RNA, 19 nt, Artificial Sequence
  Description of Artificial Sequence: Synthetic oligonucleotide
  Antisense strand to SEQ ID NO: 2145004
uuucacacauuccugcccu

SEQ ID NO: 2145006 - RNA, 19 nt, Artificial Sequence
  Description of Artificial Sequence: Synthetic oligonucleotide
  Sense strand starting at position 2961 of SEQ ID NO: 1882753
cccuucucugcugaguaau

SEQ ID NO: 2145007 - RNA, 19 nt, Artificial Sequence
  Description of Artificial Sequence: Synthetic oligonucleotide
  Antisense strand to SEQ ID NO: 2145006
auuacucagcagagaaggg

SEQ ID NO: 2145008 - RNA, 19 nt, Artificial Sequence
  Description of Artificial Sequence: Synthetic oligonucleotide
  Sense strand starting at position 2964 of SEQ ID NO: 1882753
uucucugcugaguaauuga

SEQ ID NO: 2145009 - RNA, 19 nt, Artificial Sequence
  Description of Artificial Sequence: Synthetic oligonucleotide
  Antisense strand to SEQ ID NO: 2145008
ucaauuacucagcagagaa

SEQ ID NO: 2145010 - RNA, 19 nt, Artificial Sequence
  Description of Artificial Sequence: Synthetic oligonucleotide
  Sense strand starting at position 2971 of SEQ ID NO: 1882753
cugaguaauugacucucau

SEQ ID NO: 2145011 - RNA, 19 nt, Artificial Sequence
  Description of Artificial Sequence: Synthetic oligonucleotide
  Antisense strand to SEQ ID NO: 2145010
augagagucaauuacucag

SEQ ID NO: 2145012 - RNA, 19 nt, Artificial Sequence
  Description of Artificial Sequence: Synthetic oligonucleotide
  Sense strand starting at position 3079 of SEQ ID NO: 1882753
ccaagucaucuagggaaau

SEQ ID NO: 2145013 - RNA, 19 nt, Artificial Sequence
  Description of Artificial Sequence: Synthetic oligonucleotide
  Antisense strand to SEQ ID NO: 2145012
auuucccuagaugacuugg

SEQ ID NO: 2145014 - RNA, 19 nt, Artificial Sequence
  Description of Artificial Sequence: Synthetic oligonucleotide
  Sense strand starting at position 3200 of SEQ ID NO: 1882753
acaucuuacugggagauuu

SEQ ID NO: 2145015 - RNA, 19 nt, Artificial Sequence
  Description of Artificial Sequence: Synthetic oligonucleotide
  Antisense strand to SEQ ID NO: 2145014
aaaucucccaguaagaugu

SEQ ID NO: 2145016 - RNA, 19 nt, Artificial Sequence
  Description of Artificial Sequence: Synthetic oligonucleotide
  Sense strand starting at position 3211 of SEQ ID NO: 1882753
ggagauuucucccauugag

SEQ ID NO: 2145017 - RNA, 19 nt, Artificial Sequence
  Description of Artificial Sequence: Synthetic oligonucleotide
  Antisense strand to SEQ ID NO: 2145016
cucaaugggagaaaucucc

SEQ ID NO: 2145018 - RNA, 19 nt, Artificial Sequence
  Description of Artificial Sequence: Synthetic oligonucleotide
  Sense strand starting at position 3261 of SEQ ID NO: 1882753
gcacacucaccauggaaga

SEQ ID NO: 2145019 - RNA, 19 nt, Artificial Sequence
  Description of Artificial Sequence: Synthetic oligonucleotide
  Antisense strand to SEQ ID NO: 2145018
ucuuccauggugagugugc

SEQ ID NO: 2145020 - RNA, 19 nt, Artificial Sequence
  Description of Artificial Sequence: Synthetic oligonucleotide
  Sense strand starting at position 3285 of SEQ ID NO: 1882753
ccaagaagucuuugucuuu

SEQ ID NO: 2145021 - RNA, 19 nt, Artificial Sequence
  Description of Artificial Sequence: Synthetic oligonucleotide
  Antisense strand to SEQ ID NO: 2145020
aaagacaaagacuucuugg

SEQ ID NO: 2145022 - RNA, 19 nt, Artificial Sequence
  Description of Artificial Sequence: Synthetic oligonucleotide
  Sense strand starting at position 3395 of SEQ ID NO: 1882753
gaccauugccuccagaagu

SEQ ID NO: 2145023 - RNA, 19 nt, Artificial Sequence
  Description of Artificial Sequence: Synthetic oligonucleotide
  Antisense strand to SEQ ID NO: 2145022
acuucuggaggcaaugguc

SEQ ID NO: 2145024 - RNA, 19 nt, Artificial Sequence
  Description of Artificial Sequence: Synthetic oligonucleotide
  Sense strand starting at position 3408 of SEQ ID NO: 1882753
agaaguuggcaugacgauu

SEQ ID NO: 2145025 - RNA, 19 nt, Artificial Sequence
  Description of Artificial Sequence: Synthetic oligonucleotide
  Antisense strand to SEQ ID NO: 2145024
aaucgucaugccaacuucu

SEQ ID NO: 2145026 - RNA, 19 nt, Artificial Sequence
  Description of Artificial Sequence: Synthetic oligonucleotide
  Sense strand starting at position 3423 of SEQ ID NO: 1882753
gauucuaaguucuccaggu

SEQ ID NO: 2145027 - RNA, 19 nt, Artificial Sequence
  Description of Artificial Sequence: Synthetic oligonucleotide
  Antisense strand to SEQ ID NO: 2145026
accuggagaacuuagaauc

SEQ ID NO: 2145028 - RNA, 19 nt, Artificial Sequence
  Description of Artificial Sequence: Synthetic oligonucleotide
  Sense strand starting at position 3427 of SEQ ID NO: 1882753
cuaaguucuccagguggga

SEQ ID NO: 2145029 - RNA, 19 nt, Artificial Sequence
  Description of Artificial Sequence: Synthetic oligonucleotide
  Antisense strand to SEQ ID NO: 2145028
ucccaccuggagaacuuag

SEQ ID NO: 2145030 - RNA, 19 nt, Artificial Sequence
  Description of Artificial Sequence: Synthetic oligonucleotide
  Sense strand starting at position 3429 of SEQ ID NO: 1882753
aaguucuccaggugggaga

SEQ ID NO: 2145031 - RNA, 19 nt, Artificial Sequence
  Description of Artificial Sequence: Synthetic oligonucleotide
  Antisense strand to SEQ ID NO: 2145030
ucucccaccuggagaacuu

SEQ ID NO: 2145032 - RNA, 19 nt, Artificial Sequence
  Description of Artificial Sequence: Synthetic oligonucleotide
  Sense strand starting at position 3498 of SEQ ID NO: 1882753
guugaacuccaagaucugu

SEQ ID NO: 2145033 - RNA, 19 nt, Artificial Sequence
  Description of Artificial Sequence: Synthetic oligonucleotide
  Antisense strand to SEQ ID NO: 2145032
acagaucuuggaguucaac

SEQ ID NO: 2145034 - RNA, 19 nt, Artificial Sequence
  Description of Artificial Sequence: Synthetic oligonucleotide
  Sense strand starting at position 3503 of SEQ ID NO: 1882753
acuccaagaucuguggaaa

SEQ ID NO: 2145035 - RNA, 19 nt, Artificial Sequence
  Description of Artificial Sequence: Synthetic oligonucleotide
  Antisense strand to SEQ ID NO: 2145034
uuuccacagaucuuggagu

SEQ ID NO: 2145036 - RNA, 19 nt, Artificial Sequence
  Description of Artificial Sequence: Synthetic oligonucleotide
  Sense strand starting at position 3814 of SEQ ID NO: 1882753
ugccaagaggacuguugau

SEQ ID NO: 2145037 - RNA, 19 nt, Artificial Sequence
  Description of Artificial Sequence: Synthetic oligonucleotide
  Antisense strand to SEQ ID NO: 2145036
aucaacaguccucuuggca

SEQ ID NO: 2145038 - RNA, 19 nt, Artificial Sequence
  Description of Artificial Sequence: Synthetic oligonucleotide
  Sense strand starting at position 3829 of SEQ ID NO: 1882753
ugauguucucucuagaaug

SEQ ID NO: 2145039 - RNA, 19 nt, Artificial Sequence
  Description of Artificial Sequence: Synthetic oligonucleotide
  Antisense strand to SEQ ID NO: 2145038
cauucuagagagaacauca

SEQ ID NO: 2145040 - RNA, 19 nt, Artificial Sequence
  Description of Artificial Sequence: Synthetic oligonucleotide
  Sense strand starting at position 3845 of SEQ ID NO: 1882753
augugagguacuugacugu

SEQ ID NO: 2145041 - RNA, 19 nt, Artificial Sequence
  Description of Artificial Sequence: Synthetic oligonucleotide
  Antisense strand to SEQ ID NO: 2145040
acagucaaguaccucacau

SEQ ID NO: 2145042 - RNA, 19 nt, Artificial Sequence
  Description of Artificial Sequence: Synthetic oligonucleotide
  Sense strand starting at position 2007 of SEQ ID NO: 1882754
ccuggcauauguccuacau

SEQ ID NO: 2145043 - RNA, 19 nt, Artificial Sequence
  Description of Artificial Sequence: Synthetic oligonucleotide
  Antisense strand to SEQ ID NO: 2145042
auguaggacauaugccagg

SEQ ID NO: 2145044 - RNA, 19 nt, Artificial Sequence
  Description of Artificial Sequence: Synthetic oligonucleotide
  Sense strand starting at position 2009 of SEQ ID NO: 1882754
uggcauauguccuacaugu

SEQ ID NO: 2145045 - RNA, 19 nt, Artificial Sequence
  Description of Artificial Sequence: Synthetic oligonucleotide
  Antisense strand to SEQ ID NO: 2145044
acauguaggacauaugcca

SEQ ID NO: 2145046 - RNA, 19 nt, Artificial Sequence
  Description of Artificial Sequence: Synthetic oligonucleotide
  Sense strand starting at position 2011 of SEQ ID NO: 1882754
gcauauguccuacauguaa

SEQ ID NO: 2145047 - RNA, 19 nt, Artificial Sequence
  Description of Artificial Sequence: Synthetic oligonucleotide
  Antisense strand to SEQ ID NO: 2145046
uuacauguaggacauaugc

SEQ ID NO: 2145048 - RNA, 19 nt, Artificial Sequence
  Description of Artificial Sequence: Synthetic oligonucleotide
  Sense strand starting at position 2050 of SEQ ID NO: 1882754
ggguuaauacauggaacuu

SEQ ID NO: 2145049 - RNA, 19 nt, Artificial Sequence
  Description of Artificial Sequence: Synthetic oligonucleotide
  Antisense strand to SEQ ID NO: 2145048
aaguuccauguauuaaccc

SEQ ID NO: 2145050 - RNA, 19 nt, Artificial Sequence
  Description of Artificial Sequence: Synthetic oligonucleotide
  Sense strand starting at position 2119 of SEQ ID NO: 1882754
agcauaauuguugaccaca

SEQ ID NO: 2145051 - RNA, 19 nt, Artificial Sequence
  Description of Artificial Sequence: Synthetic oligonucleotide
  Antisense strand to SEQ ID NO: 2145050
uguggucaacaauuaugcu

SEQ ID NO: 2145052 - RNA, 19 nt, Artificial Sequence
  Description of Artificial Sequence: Synthetic oligonucleotide
  Sense strand starting at position 2223 of SEQ ID NO: 1882754
uguauucuuuggcgcuuga

SEQ ID NO: 2145053 - RNA, 19 nt, Artificial Sequence
  Description of Artificial Sequence: Synthetic oligonucleotide
  Antisense strand to SEQ ID NO: 2145052
ucaagcgccaaagaauaca

SEQ ID NO: 2145054 - RNA, 19 nt, Artificial Sequence
  Description of Artificial Sequence: Synthetic oligonucleotide
  Sense strand starting at position 2227 of SEQ ID NO: 1882754
uucuuuggcgcuugaaagu

SEQ ID NO: 2145055 - RNA, 19 nt, Artificial Sequence
  Description of Artificial Sequence: Synthetic oligonucleotide
  Antisense strand to SEQ ID NO: 2145054
acuuucaagcgccaaagaa

SEQ ID NO: 2145056 - RNA, 19 nt, Artificial Sequence
  Description of Artificial Sequence: Synthetic oligonucleotide
  Sense strand starting at position 2237 of SEQ ID NO: 1882754
cuugaaaguugauccuuua

SEQ ID NO: 2145057 - RNA, 19 nt, Artificial Sequence
  Description of Artificial Sequence: Synthetic oligonucleotide
  Antisense strand to SEQ ID NO: 2145056
uaaaggaucaacuuucaag

SEQ ID NO: 2145058 - RNA, 19 nt, Artificial Sequence
  Description of Artificial Sequence: Synthetic oligonucleotide
  Sense strand starting at position 2240 of SEQ ID NO: 1882754
gaaaguugauccuuuaugu

SEQ ID NO: 2145059 - RNA, 19 nt, Artificial Sequence
  Description of Artificial Sequence: Synthetic oligonucleotide
  Antisense strand to SEQ ID NO: 2145058
acauaaaggaucaacuuuc

SEQ ID NO: 2145060 - RNA, 19 nt, Artificial Sequence
  Description of Artificial Sequence: Synthetic oligonucleotide
  Sense strand starting at position 2244 of SEQ ID NO: 1882754
guugauccuuuaugugaua

SEQ ID NO: 2145061 - RNA, 19 nt, Artificial Sequence
  Description of Artificial Sequence: Synthetic oligonucleotide
  Antisense strand to SEQ ID NO: 2145060
uaucacauaaaggaucaac

SEQ ID NO: 2145062 - RNA, 19 nt, Artificial Sequence
  Description of Artificial Sequence: Synthetic oligonucleotide
  Sense strand starting at position 2245 of SEQ ID NO: 1882754
uugauccuuuaugugauau

SEQ ID NO: 2145063 - RNA, 19 nt, Artificial Sequence
  Description of Artificial Sequence: Synthetic oligonucleotide
  Antisense strand to SEQ ID NO: 2145062
auaucacauaaaggaucaa

SEQ ID NO: 2145064 - RNA, 19 nt, Artificial Sequence
  Description of Artificial Sequence: Synthetic oligonucleotide
  Sense strand starting at position 2774 of SEQ ID NO: 1882754
ggcaacaauuaaguuuaaa

SEQ ID NO: 2145065 - RNA, 19 nt, Artificial Sequence
  Description of Artificial Sequence: Synthetic oligonucleotide
  Antisense strand to SEQ ID NO: 2145064
uuuaaacuuaauuguugcc

SEQ ID NO: 2145066 - RNA, 19 nt, Artificial Sequence
  Description of Artificial Sequence: Synthetic oligonucleotide
  Sense strand starting at position 2820 of SEQ ID NO: 1882754
ugugccauacugcauuaua

SEQ ID NO: 2145067 - RNA, 19 nt, Artificial Sequence
  Description of Artificial Sequence: Synthetic oligonucleotide
  Antisense strand to SEQ ID NO: 2145066
uauaaugcaguauggcaca

SEQ ID NO: 2145068 - RNA, 19 nt, Artificial Sequence
  Description of Artificial Sequence: Synthetic oligonucleotide
  Sense strand starting at position 2854 of SEQ ID NO: 1882754
acgaguuaguaagcaaauu

SEQ ID NO: 2145069 - RNA, 19 nt, Artificial Sequence
  Description of Artificial Sequence: Synthetic oligonucleotide
  Antisense strand to SEQ ID NO: 2145068
aauuugcuuacuaacucgu

SEQ ID NO: 2145070 - RNA, 19 nt, Artificial Sequence
  Description of Artificial Sequence: Synthetic oligonucleotide
  Sense strand starting at position 2855 of SEQ ID NO: 1882754
cgaguuaguaagcaaauua

SEQ ID NO: 2145071 - RNA, 19 nt, Artificial Sequence
  Description of Artificial Sequence: Synthetic oligonucleotide
  Antisense strand to SEQ ID NO: 2145070
uaauuugcuuacuaacucg

SEQ ID NO: 2145072 - RNA, 19 nt, Artificial Sequence
  Description of Artificial Sequence: Synthetic oligonucleotide
  Sense strand starting at position 3108 of SEQ ID NO: 1882754
gaugaauuauaguagcuga

SEQ ID NO: 2145073 - RNA, 19 nt, Artificial Sequence
  Description of Artificial Sequence: Synthetic oligonucleotide
  Antisense strand to SEQ ID NO: 2145072
ucagcuacuauaauucauc

SEQ ID NO: 2145074 - RNA, 19 nt, Artificial Sequence
  Description of Artificial Sequence: Synthetic oligonucleotide
  Sense strand starting at position 3111 of SEQ ID NO: 1882754
gaauuauaguagcugagga

SEQ ID NO: 2145075 - RNA, 19 nt, Artificial Sequence
  Description of Artificial Sequence: Synthetic oligonucleotide
  Antisense strand to SEQ ID NO: 2145074
uccucagcuacuauaauuc

SEQ ID NO: 2145076 - RNA, 19 nt, Artificial Sequence
  Description of Artificial Sequence: Synthetic oligonucleotide
  Sense strand starting at position 3592 of SEQ ID NO: 1882754
gucaaugguuaucauuuaa

SEQ ID NO: 2145077 - RNA, 19 nt, Artificial Sequence
  Description of Artificial Sequence: Synthetic oligonucleotide
  Antisense strand to SEQ ID NO: 2145076
uuaaaugauaaccauugac

SEQ ID NO: 2145078 - RNA, 19 nt, Artificial Sequence
  Description of Artificial Sequence: Synthetic oligonucleotide
  Sense strand starting at position 3599 of SEQ ID NO: 1882754
guuaucauuuaagcguaca

SEQ ID NO: 2145079 - RNA, 19 nt, Artificial Sequence
  Description of Artificial Sequence: Synthetic oligonucleotide
  Antisense strand to SEQ ID NO: 2145078
uguacgcuuaaaugauaac

SEQ ID NO: 2145080 - RNA, 19 nt, Artificial Sequence
  Description of Artificial Sequence: Synthetic oligonucleotide
  Sense strand starting at position 3632 of SEQ ID NO: 1882754
aguacauucguguugucuu

SEQ ID NO: 2145081 - RNA, 19 nt, Artificial Sequence
  Description of Artificial Sequence: Synthetic oligonucleotide
  Antisense strand to SEQ ID NO: 2145080
aagacaacacgaauguacu

SEQ ID NO: 2145082 - RNA, 19 nt, Artificial Sequence
  Description of Artificial Sequence: Synthetic oligonucleotide
  Sense strand starting at position 3633 of SEQ ID NO: 1882754
guacauucguguugucuug

SEQ ID NO: 2145083 - RNA, 19 nt, Artificial Sequence
  Description of Artificial Sequence: Synthetic oligonucleotide
  Antisense strand to SEQ ID NO: 2145082
caagacaacacgaauguac

SEQ ID NO: 2145084 - RNA, 19 nt, Artificial Sequence
  Description of Artificial Sequence: Synthetic oligonucleotide
  Sense strand starting at position 3637 of SEQ ID NO: 1882754
auucguguugucuugcaac

SEQ ID NO: 2145085 - RNA, 19 nt, Artificial Sequence
  Description of Artificial Sequence: Synthetic oligonucleotide
  Antisense strand to SEQ ID NO: 2145084
guugcaagacaacacgaau

SEQ ID NO: 2145086 - RNA, 19 nt, Artificial Sequence
  Description of Artificial Sequence: Synthetic oligonucleotide
  Sense strand starting at position 3639 of SEQ ID NO: 1882754
ucguguugucuugcaacua

SEQ ID NO: 2145087 - RNA, 19 nt, Artificial Sequence
  Description of Artificial Sequence: Synthetic oligonucleotide
  Antisense strand to SEQ ID NO: 2145086
uaguugcaagacaacacga

SEQ ID NO: 2145088 - RNA, 19 nt, Artificial Sequence
  Description of Artificial Sequence: Synthetic oligonucleotide
  Sense strand starting at position 3640 of SEQ ID NO: 1882754
cguguugucuugcaacuau

SEQ ID NO: 2145089 - RNA, 19 nt, Artificial Sequence
  Description of Artificial Sequence: Synthetic oligonucleotide
  Antisense strand to SEQ ID NO: 2145088
auaguugcaagacaacacg

SEQ ID NO: 2145090 - RNA, 19 nt, Artificial Sequence
  Description of Artificial Sequence: Synthetic oligonucleotide
  Sense strand starting at position 3936 of SEQ ID NO: 1882754
gcuuuauccuccuaagcag

SEQ ID NO: 2145091 - RNA, 19 nt, Artificial Sequence
  Description of Artificial Sequence: Synthetic oligonucleotide
  Antisense strand to SEQ ID NO: 2145090
cugcuuaggaggauaaagc

SEQ ID NO: 2145092 - RNA, 19 nt, Artificial Sequence
  Description of Artificial Sequence: Synthetic oligonucleotide
  Sense strand starting at position 5 of SEQ ID NO: 1882755
cccaguucucauuaugucu

SEQ ID NO: 2145093 - RNA, 19 nt, Artificial Sequence
  Description of Artificial Sequence: Synthetic oligonucleotide
  Antisense strand to SEQ ID NO: 2145092
agacauaaugagaacuggg

SEQ ID NO: 2145094 - RNA, 19 nt, Artificial Sequence
  Description of Artificial Sequence: Synthetic oligonucleotide
  Sense strand starting at position 666 of SEQ ID NO: 1882755
guauguuuguugccauuuc

SEQ ID NO: 2145095 - RNA, 19 nt, Artificial Sequence
  Description of Artificial Sequence: Synthetic oligonucleotide
  Antisense strand to SEQ ID NO: 2145094
gaaauggcaacaaacauac

SEQ ID NO: 2145096 - RNA, 19 nt, Artificial Sequence
  Description of Artificial Sequence: Synthetic oligonucleotide
  Sense strand starting at position 1014 of SEQ ID NO: 1882755
ggcugaagguuccuagaaa

SEQ ID NO: 2145097 - RNA, 19 nt, Artificial Sequence
  Description of Artificial Sequence: Synthetic oligonucleotide
  Antisense strand to SEQ ID NO: 2145096
uuucuaggaaccuucagcc

SEQ ID NO: 2145098 - RNA, 19 nt, Artificial Sequence
  Description of Artificial Sequence: Synthetic oligonucleotide
  Sense strand starting at position 1158 of SEQ ID NO: 1882755
cucaucuuauagguggaaa

SEQ ID NO: 2145099 - RNA, 19 nt, Artificial Sequence
  Description of Artificial Sequence: Synthetic oligonucleotide
  Antisense strand to SEQ ID NO: 2145098
uuuccaccuauaagaugag

SEQ ID NO: 2145100 - RNA, 19 nt, Artificial Sequence
  Description of Artificial Sequence: Synthetic oligonucleotide
  Sense strand starting at position 1215 of SEQ ID NO: 1882755
ucccuaucucgugauaaca

SEQ ID NO: 2145101 - RNA, 19 nt, Artificial Sequence
  Description of Artificial Sequence: Synthetic oligonucleotide
  Antisense strand to SEQ ID NO: 2145100
uguuaucacgagauaggga

SEQ ID NO: 2145102 - RNA, 19 nt, Artificial Sequence
  Description of Artificial Sequence: Synthetic oligonucleotide
  Sense strand starting at position 1444 of SEQ ID NO: 1882755
acauauaacucugcgaagu

SEQ ID NO: 2145103 - RNA, 19 nt, Artificial Sequence
  Description of Artificial Sequence: Synthetic oligonucleotide
  Antisense strand to SEQ ID NO: 2145102
acuucgcagaguuauaugu

SEQ ID NO: 2145104 - RNA, 19 nt, Artificial Sequence
  Description of Artificial Sequence: Synthetic oligonucleotide
  Sense strand starting at position 1569 of SEQ ID NO: 1882755
cgugacacgaccuauuauu

SEQ ID NO: 2145105 - RNA, 19 nt, Artificial Sequence
  Description of Artificial Sequence: Synthetic oligonucleotide
  Antisense strand to SEQ ID NO: 2145104
aauaauaggucgugucacg

SEQ ID NO: 2145106 - RNA, 19 nt, Artificial Sequence
  Description of Artificial Sequence: Synthetic oligonucleotide
  Sense strand starting at position 1872 of SEQ ID NO: 1882755
guccaaauuugcuccuguu

SEQ ID NO: 2145107 - RNA, 19 nt, Artificial Sequence
  Description of Artificial Sequence: Synthetic oligonucleotide
  Antisense strand to SEQ ID NO: 2145106
aacaggagcaaauuuggac

SEQ ID NO: 2145108 - RNA, 19 nt, Artificial Sequence
  Description of Artificial Sequence: Synthetic oligonucleotide
  Sense strand starting at position 1912 of SEQ ID NO: 1882755
cuaaguauccuuuggagac

SEQ ID NO: 2145109 - RNA, 19 nt, Artificial Sequence
  Description of Artificial Sequence: Synthetic oligonucleotide
  Antisense strand to SEQ ID NO: 2145108
gucuccaaaggauacuuag

SEQ ID NO: 2145110 - RNA, 19 nt, Artificial Sequence
  Description of Artificial Sequence: Synthetic oligonucleotide
  Sense strand starting at position 1916 of SEQ ID NO: 1882755
guauccuuuggagacgagu

SEQ ID NO: 2145111 - RNA, 19 nt, Artificial Sequence
  Description of Artificial Sequence: Synthetic oligonucleotide
  Antisense strand to SEQ ID NO: 2145110
acucgucuccaaaggauac

SEQ ID NO: 2145112 - RNA, 19 nt, Artificial Sequence
  Description of Artificial Sequence: Synthetic oligonucleotide
  Sense strand starting at position 2157 of SEQ ID NO: 1882755
ugguuucguguguuuauau

SEQ ID NO: 2145113 - RNA, 19 nt, Artificial Sequence
  Description of Artificial Sequence: Synthetic oligonucleotide
  Antisense strand to SEQ ID NO: 2145112
auauaaacacacgaaacca

SEQ ID NO: 2145114 - RNA, 19 nt, Artificial Sequence
  Description of Artificial Sequence: Synthetic oligonucleotide
  Sense strand starting at position 2344 of SEQ ID NO: 1882755
acguuucugaagcaggaaa

SEQ ID NO: 2145115 - RNA, 19 nt, Artificial Sequence
  Description of Artificial Sequence: Synthetic oligonucleotide
  Antisense strand to SEQ ID NO: 2145114
uuuccugcuucagaaacgu

SEQ ID NO: 2145116 - RNA, 19 nt, Artificial Sequence
  Description of Artificial Sequence: Synthetic oligonucleotide
  Sense strand starting at position 2355 of SEQ ID NO: 1882755
gcaggaaaucucugucacc

SEQ ID NO: 2145117 - RNA, 19 nt, Artificial Sequence
  Description of Artificial Sequence: Synthetic oligonucleotide
  Antisense strand to SEQ ID NO: 2145116
ggugacagagauuuccugc

SEQ ID NO: 2145118 - RNA, 19 nt, Artificial Sequence
  Description of Artificial Sequence: Synthetic oligonucleotide
  Sense strand starting at position 2512 of SEQ ID NO: 1882755
ugcagaagaucucucagga

SEQ ID NO: 2145119 - RNA, 19 nt, Artificial Sequence
  Description of Artificial Sequence: Synthetic oligonucleotide
  Antisense strand to SEQ ID NO: 2145118
uccugagagaucuucugca

SEQ ID NO: 2145120 - RNA, 19 nt, Artificial Sequence
  Description of Artificial Sequence: Synthetic oligonucleotide
  Sense strand starting at position 2737 of SEQ ID NO: 1882755
uugugaacuccuuacugaa

SEQ ID NO: 2145121 - RNA, 19 nt, Artificial Sequence
  Description of Artificial Sequence: Synthetic oligonucleotide
  Antisense strand to SEQ ID NO: 2145120
uucaguaaggaguucacaa

SEQ ID NO: 2145122 - RNA, 19 nt, Artificial Sequence
  Description of Artificial Sequence: Synthetic oligonucleotide
  Sense strand starting at position 2756 of SEQ ID NO: 1882755
ccuuucuagucaucugauc

SEQ ID NO: 2145123 - RNA, 19 nt, Artificial Sequence
  Description of Artificial Sequence: Synthetic oligonucleotide
  Antisense strand to SEQ ID NO: 2145122
gaucagaugacuagaaagg

SEQ ID NO: 2145124 - RNA, 19 nt, Artificial Sequence
  Description of Artificial Sequence: Synthetic oligonucleotide
  Sense strand starting at position 2764 of SEQ ID NO: 1882755
gucaucugaucuucugaac

SEQ ID NO: 2145125 - RNA, 19 nt, Artificial Sequence
  Description of Artificial Sequence: Synthetic oligonucleotide
  Antisense strand to SEQ ID NO: 2145124
guucagaagaucagaugac

SEQ ID NO: 2145126 - RNA, 19 nt, Artificial Sequence
  Description of Artificial Sequence: Synthetic oligonucleotide
  Sense strand starting at position 2862 of SEQ ID NO: 1882755
ccaccugccuggucugaaa

SEQ ID NO: 2145127 - RNA, 19 nt, Artificial Sequence
  Description of Artificial Sequence: Synthetic oligonucleotide
  Antisense strand to SEQ ID NO: 2145126
uuucagaccaggcaggugg

SEQ ID NO: 2145128 - RNA, 19 nt, Artificial Sequence
  Description of Artificial Sequence: Synthetic oligonucleotide
  Sense strand starting at position 2939 of SEQ ID NO: 1882755
gcauguauucuuguguugu

SEQ ID NO: 2145129 - RNA, 19 nt, Artificial Sequence
  Description of Artificial Sequence: Synthetic oligonucleotide
  Antisense strand to SEQ ID NO: 2145128
acaacacaagaauacaugc

SEQ ID NO: 2145130 - RNA, 19 nt, Artificial Sequence
  Description of Artificial Sequence: Synthetic oligonucleotide
  Sense strand starting at position 2949 of SEQ ID NO: 1882755
uuguguugucgguuacccu

SEQ ID NO: 2145131 - RNA, 19 nt, Artificial Sequence
  Description of Artificial Sequence: Synthetic oligonucleotide
  Antisense strand to SEQ ID NO: 2145130
aggguaaccgacaacacaa

SEQ ID NO: 2145132 - RNA, 19 nt, Artificial Sequence
  Description of Artificial Sequence: Synthetic oligonucleotide
  Sense strand starting at position 3042 of SEQ ID NO: 1882755
aguaauguugccuaauaau

SEQ ID NO: 2145133 - RNA, 19 nt, Artificial Sequence
  Description of Artificial Sequence: Synthetic oligonucleotide
  Antisense strand to SEQ ID NO: 2145132
auuauuaggcaacauuacu

SEQ ID NO: 2145134 - RNA, 19 nt, Artificial Sequence
  Description of Artificial Sequence: Synthetic oligonucleotide
  Sense strand starting at position 3169 of SEQ ID NO: 1882755
gcacaauaacgucagcauu

SEQ ID NO: 2145135 - RNA, 19 nt, Artificial Sequence
  Description of Artificial Sequence: Synthetic oligonucleotide
  Antisense strand to SEQ ID NO: 2145134
aaugcugacguuauugugc

SEQ ID NO: 2145136 - RNA, 19 nt, Artificial Sequence
  Description of Artificial Sequence: Synthetic oligonucleotide
  Sense strand starting at position 3172 of SEQ ID NO: 1882755
caauaacgucagcauuguu

SEQ ID NO: 2145137 - RNA, 19 nt, Artificial Sequence
  Description of Artificial Sequence: Synthetic oligonucleotide
  Antisense strand to SEQ ID NO: 2145136
aacaaugcugacguuauug

SEQ ID NO: 2145138 - RNA, 19 nt, Artificial Sequence
  Description of Artificial Sequence: Synthetic oligonucleotide
  Sense strand starting at position 3423 of SEQ ID NO: 1882755
guuacagacuuguuucuag

SEQ ID NO: 2145139 - RNA, 19 nt, Artificial Sequence
  Description of Artificial Sequence: Synthetic oligonucleotide
  Antisense strand to SEQ ID NO: 2145138
cuagaaacaagucuguaac

SEQ ID NO: 2145140 - RNA, 19 nt, Artificial Sequence
  Description of Artificial Sequence: Synthetic oligonucleotide
  Sense strand starting at position 3439 of SEQ ID NO: 1882755
uaggcacgucaacauuaaa

SEQ ID NO: 2145141 - RNA, 19 nt, Artificial Sequence
  Description of Artificial Sequence: Synthetic oligonucleotide
  Antisense strand to SEQ ID NO: 2145140
uuuaauguugacgugccua

SEQ ID NO: 2145142 - RNA, 19 nt, Artificial Sequence
  Description of Artificial Sequence: Synthetic oligonucleotide
  Sense strand starting at position 3442 of SEQ ID NO: 1882755
gcacgucaacauuaaagau

SEQ ID NO: 2145143 - RNA, 19 nt, Artificial Sequence
  Description of Artificial Sequence: Synthetic oligonucleotide
  Antisense strand to SEQ ID NO: 2145142
aucuuuaauguugacgugc

SEQ ID NO: 2145144 - RNA, 19 nt, Artificial Sequence
  Description of Artificial Sequence: Synthetic oligonucleotide
  Sense strand starting at position 3478 of SEQ ID NO: 1882755
uuuaaagagucuguaagug

SEQ ID NO: 2145145 - RNA, 19 nt, Artificial Sequence
  Description of Artificial Sequence: Synthetic oligonucleotide
  Antisense strand to SEQ ID NO: 2145144
cacuuacagacucuuuaaa

SEQ ID NO: 2145146 - RNA, 19 nt, Artificial Sequence
  Description of Artificial Sequence: Synthetic oligonucleotide
  Sense strand starting at position 3587 of SEQ ID NO: 1882755
ccaguaauagcugauguag

SEQ ID NO: 2145147 - RNA, 19 nt, Artificial Sequence
  Description of Artificial Sequence: Synthetic oligonucleotide
  Antisense strand to SEQ ID NO: 2145146
cuacaucagcuauuacugg

SEQ ID NO: 2145148 - RNA, 19 nt, Artificial Sequence
  Description of Artificial Sequence: Synthetic oligonucleotide
  Sense strand starting at position 3601 of SEQ ID NO: 1882755
uguaguugcaaggauuaau

SEQ ID NO: 2145149 - RNA, 19 nt, Artificial Sequence
  Description of Artificial Sequence: Synthetic oligonucleotide
  Antisense strand to SEQ ID NO: 2145148
auuaauccuugcaacuaca

SEQ ID NO: 2145150 - RNA, 19 nt, Artificial Sequence
  Description of Artificial Sequence: Synthetic oligonucleotide
  Sense strand starting at position 3611 of SEQ ID NO: 1882755
aggauuaauuucuggagua

SEQ ID NO: 2145151 - RNA, 19 nt, Artificial Sequence
  Description of Artificial Sequence: Synthetic oligonucleotide
  Antisense strand to SEQ ID NO: 2145150
uacuccagaaauuaauccu

SEQ ID NO: 2145152 - RNA, 19 nt, Artificial Sequence
  Description of Artificial Sequence: Synthetic oligonucleotide
  Sense strand starting at position 3621 of SEQ ID NO: 1882755
ucuggaguaccaugaauau

SEQ ID NO: 2145153 - RNA, 19 nt, Artificial Sequence
  Description of Artificial Sequence: Synthetic oligonucleotide
  Antisense strand to SEQ ID NO: 2145152
auauucaugguacuccaga

SEQ ID NO: 2145154 - RNA, 19 nt, Artificial Sequence
  Description of Artificial Sequence: Synthetic oligonucleotide
  Sense strand starting at position 3697 of SEQ ID NO: 1882755
acucuaucucagugaacug

SEQ ID NO: 2145155 - RNA, 19 nt, Artificial Sequence
  Description of Artificial Sequence: Synthetic oligonucleotide
  Antisense strand to SEQ ID NO: 2145154
caguucacugagauagagu

SEQ ID NO: 2145156 - RNA, 19 nt, Artificial Sequence
  Description of Artificial Sequence: Synthetic oligonucleotide
  Sense strand starting at position 3715 of SEQ ID NO: 1882755
guuauuuccuagcuguaaa

SEQ ID NO: 2145157 - RNA, 19 nt, Artificial Sequence
  Description of Artificial Sequence: Synthetic oligonucleotide
  Antisense strand to SEQ ID NO: 2145156
uuuacagcuaggaaauaac

SEQ ID NO: 2145158 - RNA, 19 nt, Artificial Sequence
  Description of Artificial Sequence: Synthetic oligonucleotide
  Sense strand starting at position 3725 of SEQ ID NO: 1882755
agcuguaaaccagguuaga

SEQ ID NO: 2145159 - RNA, 19 nt, Artificial Sequence
  Description of Artificial Sequence: Synthetic oligonucleotide
  Antisense strand to SEQ ID NO: 2145158
ucuaaccugguuuacagcu

SEQ ID NO: 2145160 - RNA, 19 nt, Artificial Sequence
  Description of Artificial Sequence: Synthetic oligonucleotide
  Sense strand starting at position 3752 of SEQ ID NO: 1882755
cuagauugcugaccaggau

SEQ ID NO: 2145161 - RNA, 19 nt, Artificial Sequence
  Description of Artificial Sequence: Synthetic oligonucleotide
  Antisense strand to SEQ ID NO: 2145160
auccuggucagcaaucuag

SEQ ID NO: 2145162 - RNA, 19 nt, Artificial Sequence
  Description of Artificial Sequence: Synthetic oligonucleotide
  Sense strand starting at position 3755 of SEQ ID NO: 1882755
gauugcugaccaggauaau

SEQ ID NO: 2145163 - RNA, 19 nt, Artificial Sequence
  Description of Artificial Sequence: Synthetic oligonucleotide
  Antisense strand to SEQ ID NO: 2145162
auuauccuggucagcaauc

SEQ ID NO: 2145164 - RNA, 19 nt, Artificial Sequence
  Description of Artificial Sequence: Synthetic oligonucleotide
  Sense strand starting at position 3814 of SEQ ID NO: 1882755
ggcgaugauagaugagaag

SEQ ID NO: 2145165 - RNA, 19 nt, Artificial Sequence
  Description of Artificial Sequence: Synthetic oligonucleotide
  Antisense strand to SEQ ID NO: 2145164
cuucucaucuaucaucgcc

SEQ ID NO: 2145166 - RNA, 19 nt, Artificial Sequence
  Description of Artificial Sequence: Synthetic oligonucleotide
  Sense strand starting at position 3935 of SEQ ID NO: 1882755
uuucccaagcuguaugaau

SEQ ID NO: 2145167 - RNA, 19 nt, Artificial Sequence
  Description of Artificial Sequence: Synthetic oligonucleotide
  Antisense strand to SEQ ID NO: 2145166
auucauacagcuugggaaa

SEQ ID NO: 2145168 - RNA, 19 nt, Artificial Sequence
  Description of Artificial Sequence: Synthetic oligonucleotide
  Sense strand starting at position 3944 of SEQ ID NO: 1882755
cuguaugaauguuucuaca

SEQ ID NO: 2145169 - RNA, 19 nt, Artificial Sequence
  Description of Artificial Sequence: Synthetic oligonucleotide
  Antisense strand to SEQ ID NO: 2145168
uguagaaacauucauacag

SEQ ID NO: 2145170 - RNA, 19 nt, Artificial Sequence
  Description of Artificial Sequence: Synthetic oligonucleotide
  Sense strand starting at position 3946 of SEQ ID NO: 1882755
guaugaauguuucuacagg

SEQ ID NO: 2145171 - RNA, 19 nt, Artificial Sequence
  Description of Artificial Sequence: Synthetic oligonucleotide
  Antisense strand to SEQ ID NO: 2145170
ccuguagaaacauucauac

SEQ ID NO: 2145172 - RNA, 19 nt, Artificial Sequence
  Description of Artificial Sequence: Synthetic oligonucleotide
  Sense strand starting at position 56 of SEQ ID NO: 1882756
uuguaacaggucggucaaa

SEQ ID NO: 2145173 - RNA, 19 nt, Artificial Sequence
  Description of Artificial Sequence: Synthetic oligonucleotide
  Antisense strand to SEQ ID NO: 2145172
uuugaccgaccuguuacaa

SEQ ID NO: 2145174 - RNA, 19 nt, Artificial Sequence
  Description of Artificial Sequence: Synthetic oligonucleotide
  Sense strand starting at position 159 of SEQ ID NO: 1882756
gugcuaacucgagauagug

SEQ ID NO: 2145175 - RNA, 19 nt, Artificial Sequence
  Description of Artificial Sequence: Synthetic oligonucleotide
  Antisense strand to SEQ ID NO: 2145174
cacuaucucgaguuagcac

SEQ ID NO: 2145176 - RNA, 19 nt, Artificial Sequence
  Description of Artificial Sequence: Synthetic oligonucleotide
  Sense strand starting at position 167 of SEQ ID NO: 1882756
ucgagauagugucagaaua

SEQ ID NO: 2145177 - RNA, 19 nt, Artificial Sequence
  Description of Artificial Sequence: Synthetic oligonucleotide
  Antisense strand to SEQ ID NO: 2145176
uauucugacacuaucucga

SEQ ID NO: 2145178 - RNA, 19 nt, Artificial Sequence
  Description of Artificial Sequence: Synthetic oligonucleotide
  Sense strand starting at position 169 of SEQ ID NO: 1882756
gagauagugucagaauaaa

SEQ ID NO: 2145179 - RNA, 19 nt, Artificial Sequence
  Description of Artificial Sequence: Synthetic oligonucleotide
  Antisense strand to SEQ ID NO: 2145178
uuuauucugacacuaucuc

SEQ ID NO: 2145180 - RNA, 19 nt, Artificial Sequence
  Description of Artificial Sequence: Synthetic oligonucleotide
  Sense strand starting at position 1136 of SEQ ID NO: 1882756
gagggaaaguuacugcgaa

SEQ ID NO: 2145181 - RNA, 19 nt, Artificial Sequence
  Description of Artificial Sequence: Synthetic oligonucleotide
  Antisense strand to SEQ ID NO: 2145180
uucgcaguaacuuucccuc

SEQ ID NO: 2145182 - RNA, 19 nt, Artificial Sequence
  Description of Artificial Sequence: Synthetic oligonucleotide
  Sense strand starting at position 1137 of SEQ ID NO: 1882756
agggaaaguuacugcgaau

SEQ ID NO: 2145183 - RNA, 19 nt, Artificial Sequence
  Description of Artificial Sequence: Synthetic oligonucleotide
  Antisense strand to SEQ ID NO: 2145182
auucgcaguaacuuucccu

SEQ ID NO: 2145184 - RNA, 19 nt, Artificial Sequence
  Description of Artificial Sequence: Synthetic oligonucleotide
  Sense strand starting at position 1140 of SEQ ID NO: 1882756
gaaaguuacugcgaauguc

SEQ ID NO: 2145185 - RNA, 19 nt, Artificial Sequence
  Description of Artificial Sequence: Synthetic oligonucleotide
  Antisense strand to SEQ ID NO: 2145184
gacauucgcaguaacuuuc

SEQ ID NO: 2145186 - RNA, 19 nt, Artificial Sequence
  Description of Artificial Sequence: Synthetic oligonucleotide
  Sense strand starting at position 1143 of SEQ ID NO: 1882756
aguuacugcgaaugucaua

SEQ ID NO: 2145187 - RNA, 19 nt, Artificial Sequence
  Description of Artificial Sequence: Synthetic oligonucleotide
  Antisense strand to SEQ ID NO: 2145186
uaugacauucgcaguaacu

SEQ ID NO: 2145188 - RNA, 19 nt, Artificial Sequence
  Description of Artificial Sequence: Synthetic oligonucleotide
  Sense strand starting at position 1732 of SEQ ID NO: 1882756
acaacaguuugugcuucua

SEQ ID NO: 2145189 - RNA, 19 nt, Artificial Sequence
  Description of Artificial Sequence: Synthetic oligonucleotide
  Antisense strand to SEQ ID NO: 2145188
uagaagcacaaacuguugu

SEQ ID NO: 2145190 - RNA, 19 nt, Artificial Sequence
  Description of Artificial Sequence: Synthetic oligonucleotide
  Sense strand starting at position 1740 of SEQ ID NO: 1882756
uugugcuucuaugagaaua

SEQ ID NO: 2145191 - RNA, 19 nt, Artificial Sequence
  Description of Artificial Sequence: Synthetic oligonucleotide
  Antisense strand to SEQ ID NO: 2145190
uauucucauagaagcacaa

SEQ ID NO: 2145192 - RNA, 19 nt, Artificial Sequence
  Description of Artificial Sequence: Synthetic oligonucleotide
  Sense strand starting at position 1742 of SEQ ID NO: 1882756
gugcuucuaugagaauaau

SEQ ID NO: 2145193 - RNA, 19 nt, Artificial Sequence
  Description of Artificial Sequence: Synthetic oligonucleotide
  Antisense strand to SEQ ID NO: 2145192
auuauucucauagaagcac

SEQ ID NO: 2145194 - RNA, 19 nt, Artificial Sequence
  Description of Artificial Sequence: Synthetic oligonucleotide
  Sense strand starting at position 1745 of SEQ ID NO: 1882756
cuucuaugagaauaaugcu

SEQ ID NO: 2145195 - RNA, 19 nt, Artificial Sequence
  Description of Artificial Sequence: Synthetic oligonucleotide
  Antisense strand to SEQ ID NO: 2145194
agcauuauucucauagaag

SEQ ID NO: 2145196 - RNA, 19 nt, Artificial Sequence
  Description of Artificial Sequence: Synthetic oligonucleotide
  Sense strand starting at position 2032 of SEQ ID NO: 1882756
gugguagccugaguaauuu

SEQ ID NO: 2145197 - RNA, 19 nt, Artificial Sequence
  Description of Artificial Sequence: Synthetic oligonucleotide
  Antisense strand to SEQ ID NO: 2145196
aaauuacucaggcuaccac

SEQ ID NO: 2145198 - RNA, 19 nt, Artificial Sequence
  Description of Artificial Sequence: Synthetic oligonucleotide
  Sense strand starting at position 3778 of SEQ ID NO: 1882756
gcuagcuucgacucuguca

SEQ ID NO: 2145199 - RNA, 19 nt, Artificial Sequence
  Description of Artificial Sequence: Synthetic oligonucleotide
  Antisense strand to SEQ ID NO: 2145198
ugacagagucgaagcuagc

SEQ ID NO: 2145200 - RNA, 19 nt, Artificial Sequence
  Description of Artificial Sequence: Synthetic oligonucleotide
  Sense strand starting at position 3823 of SEQ ID NO: 1882756
auggaagacuucuuugacu

SEQ ID NO: 2145201 - RNA, 19 nt, Artificial Sequence
  Description of Artificial Sequence: Synthetic oligonucleotide
  Antisense strand to SEQ ID NO: 2145200
agucaaagaagucuuccau

SEQ ID NO: 2145202 - RNA, 19 nt, Artificial Sequence
  Description of Artificial Sequence: Synthetic oligonucleotide
  Sense strand starting at position 432 of SEQ ID NO: 1882757
cauauuggucaggauaguu

SEQ ID NO: 2145203 - RNA, 19 nt, Artificial Sequence
  Description of Artificial Sequence: Synthetic oligonucleotide
  Antisense strand to SEQ ID NO: 2145202
aacuauccugaccaauaug

SEQ ID NO: 2145204 - RNA, 19 nt, Artificial Sequence
  Description of Artificial Sequence: Synthetic oligonucleotide
  Sense strand starting at position 437 of SEQ ID NO: 1882757
uggucaggauaguuuccaa

SEQ ID NO: 2145205 - RNA, 19 nt, Artificial Sequence
  Description of Artificial Sequence: Synthetic oligonucleotide
  Antisense strand to SEQ ID NO: 2145204
uuggaaacuauccugacca

SEQ ID NO: 2145206 - RNA, 19 nt, Artificial Sequence
  Description of Artificial Sequence: Synthetic oligonucleotide
  Sense strand starting at position 571 of SEQ ID NO: 1882757
gucuguacauuccguacau

SEQ ID NO: 2145207 - RNA, 19 nt, Artificial Sequence
  Description of Artificial Sequence: Synthetic oligonucleotide
  Antisense strand to SEQ ID NO: 2145206
auguacggaauguacagac

SEQ ID NO: 2145208 - RNA, 19 nt, Artificial Sequence
  Description of Artificial Sequence: Synthetic oligonucleotide
  Sense strand starting at position 572 of SEQ ID NO: 1882757
ucuguacauuccguacaua

SEQ ID NO: 2145209 - RNA, 19 nt, Artificial Sequence
  Description of Artificial Sequence: Synthetic oligonucleotide
  Antisense strand to SEQ ID NO: 2145208
uauguacggaauguacaga

SEQ ID NO: 2145210 - RNA, 19 nt, Artificial Sequence
  Description of Artificial Sequence: Synthetic oligonucleotide
  Sense strand starting at position 575 of SEQ ID NO: 1882757
guacauuccguacauagua

SEQ ID NO: 2145211 - RNA, 19 nt, Artificial Sequence
  Description of Artificial Sequence: Synthetic oligonucleotide
  Antisense strand to SEQ ID NO: 2145210
uacuauguacggaauguac

SEQ ID NO: 2145212 - RNA, 19 nt, Artificial Sequence
  Description of Artificial Sequence: Synthetic oligonucleotide
  Sense strand starting at position 2016 of SEQ ID NO: 1882757
ugaccuaguucgucccaaa

SEQ ID NO: 2145213 - RNA, 19 nt, Artificial Sequence
  Description of Artificial Sequence: Synthetic oligonucleotide
  Antisense strand to SEQ ID NO: 2145212
uuugggacgaacuagguca

SEQ ID NO: 2145214 - RNA, 19 nt, Artificial Sequence
  Description of Artificial Sequence: Synthetic oligonucleotide
  Sense strand starting at position 2513 of SEQ ID NO: 1882757
gaguguugcuccucuuccu

SEQ ID NO: 2145215 - RNA, 19 nt, Artificial Sequence
  Description of Artificial Sequence: Synthetic oligonucleotide
  Antisense strand to SEQ ID NO: 2145214
aggaagaggagcaacacuc

SEQ ID NO: 2145216 - RNA, 19 nt, Artificial Sequence
  Description of Artificial Sequence: Synthetic oligonucleotide
  Sense strand starting at position 3000 of SEQ ID NO: 1882757
gauggaguuucuuaaagua

SEQ ID NO: 2145217 - RNA, 19 nt, Artificial Sequence
  Description of Artificial Sequence: Synthetic oligonucleotide
  Antisense strand to SEQ ID NO: 2145216
uacuuuaagaaacuccauc

SEQ ID NO: 2145218 - RNA, 19 nt, Artificial Sequence
  Description of Artificial Sequence: Synthetic oligonucleotide
  Sense strand starting at position 3023 of SEQ ID NO: 1882757
gugagacugcagugacaaa

SEQ ID NO: 2145219 - RNA, 19 nt, Artificial Sequence
  Description of Artificial Sequence: Synthetic oligonucleotide
  Antisense strand to SEQ ID NO: 2145218
uuugucacugcagucucac

SEQ ID NO: 2145220 - RNA, 19 nt, Artificial Sequence
  Description of Artificial Sequence: Synthetic oligonucleotide
  Sense strand starting at position 3041 of SEQ ID NO: 1882757
agucgauuaucccagcaau

SEQ ID NO: 2145221 - RNA, 19 nt, Artificial Sequence
  Description of Artificial Sequence: Synthetic oligonucleotide
  Antisense strand to SEQ ID NO: 2145220
auugcugggauaaucgacu

SEQ ID NO: 2145222 - RNA, 19 nt, Artificial Sequence
  Description of Artificial Sequence: Synthetic oligonucleotide
  Sense strand starting at position 3044 of SEQ ID NO: 1882757
cgauuaucccagcaauaua

SEQ ID NO: 2145223 - RNA, 19 nt, Artificial Sequence
  Description of Artificial Sequence: Synthetic oligonucleotide
  Antisense strand to SEQ ID NO: 2145222
uauauugcugggauaaucg

SEQ ID NO: 2145224 - RNA, 19 nt, Artificial Sequence
  Description of Artificial Sequence: Synthetic oligonucleotide
  Sense strand starting at position 3412 of SEQ ID NO: 1882757
uaugcaguauucuggcgau

SEQ ID NO: 2145225 - RNA, 19 nt, Artificial Sequence
  Description of Artificial Sequence: Synthetic oligonucleotide
  Antisense strand to SEQ ID NO: 2145224
aucgccagaauacugcaua

SEQ ID NO: 2145226 - RNA, 19 nt, Artificial Sequence
  Description of Artificial Sequence: Synthetic oligonucleotide
  Sense strand starting at position 3415 of SEQ ID NO: 1882757
gcaguauucuggcgauuua

SEQ ID NO: 2145227 - RNA, 19 nt, Artificial Sequence
  Description of Artificial Sequence: Synthetic oligonucleotide
  Antisense strand to SEQ ID NO: 2145226
uaaaucgccagaauacugc

SEQ ID NO: 2145228 - RNA, 19 nt, Artificial Sequence
  Description of Artificial Sequence: Synthetic oligonucleotide
  Sense strand starting at position 3472 of SEQ ID NO: 1882757
guaaauggcugcucuugaa

SEQ ID NO: 2145229 - RNA, 19 nt, Artificial Sequence
  Description of Artificial Sequence: Synthetic oligonucleotide
  Antisense strand to SEQ ID NO: 2145228
uucaagagcagccauuuac

SEQ ID NO: 2145230 - RNA, 19 nt, Artificial Sequence
  Description of Artificial Sequence: Synthetic oligonucleotide
  Sense strand starting at position 3481 of SEQ ID NO: 1882757
ugcucuugaacguaaggau

SEQ ID NO: 2145231 - RNA, 19 nt, Artificial Sequence
  Description of Artificial Sequence: Synthetic oligonucleotide
  Antisense strand to SEQ ID NO: 2145230
auccuuacguucaagagca

SEQ ID NO: 2145232 - RNA, 19 nt, Artificial Sequence
  Description of Artificial Sequence: Synthetic oligonucleotide
  Sense strand starting at position 3484 of SEQ ID NO: 1882757
ucuugaacguaaggauaaa

SEQ ID NO: 2145233 - RNA, 19 nt, Artificial Sequence
  Description of Artificial Sequence: Synthetic oligonucleotide
  Antisense strand to SEQ ID NO: 2145232
uuuauccuuacguucaaga

SEQ ID NO: 2145234 - RNA, 19 nt, Artificial Sequence
  Description of Artificial Sequence: Synthetic oligonucleotide
  Sense strand starting at position 3505 of SEQ ID NO: 1882757
gacugaugaggcugagguu

SEQ ID NO: 2145235 - RNA, 19 nt, Artificial Sequence
  Description of Artificial Sequence: Synthetic oligonucleotide
  Antisense strand to SEQ ID NO: 2145234
aaccucagccucaucaguc

SEQ ID NO: 2145236 - RNA, 19 nt, Artificial Sequence
  Description of Artificial Sequence: Synthetic oligonucleotide
  Sense strand starting at position 3561 of SEQ ID NO: 1882757
acgagaaacccuuggcuau

SEQ ID NO: 2145237 - RNA, 19 nt, Artificial Sequence
  Description of Artificial Sequence: Synthetic oligonucleotide
  Antisense strand to SEQ ID NO: 2145236
auagccaaggguuucucgu

SEQ ID NO: 2145238 - RNA, 19 nt, Artificial Sequence
  Description of Artificial Sequence: Synthetic oligonucleotide
  Sense strand starting at position 3562 of SEQ ID NO: 1882757
cgagaaacccuuggcuauu

SEQ ID NO: 2145239 - RNA, 19 nt, Artificial Sequence
  Description of Artificial Sequence: Synthetic oligonucleotide
  Antisense strand to SEQ ID NO: 2145238
aauagccaaggguuucucg

SEQ ID NO: 2145240 - RNA, 19 nt, Artificial Sequence
  Description of Artificial Sequence: Synthetic oligonucleotide
  Sense strand starting at position 3675 of SEQ ID NO: 1882757
cccaucauggcucaugaau

SEQ ID NO: 2145241 - RNA, 19 nt, Artificial Sequence
  Description of Artificial Sequence: Synthetic oligonucleotide
  Antisense strand to SEQ ID NO: 2145240
auucaugagccaugauggg

SEQ ID NO: 2145242 - RNA, 19 nt, Artificial Sequence
  Description of Artificial Sequence: Synthetic oligonucleotide
  Sense strand starting at position 3677 of SEQ ID NO: 1882757
caucauggcucaugaaugu

SEQ ID NO: 2145243 - RNA, 19 nt, Artificial Sequence
  Description of Artificial Sequence: Synthetic oligonucleotide
  Antisense strand to SEQ ID NO: 2145242
acauucaugagccaugaug

SEQ ID NO: 2145244 - RNA, 19 nt, Artificial Sequence
  Description of Artificial Sequence: Synthetic oligonucleotide
  Sense strand starting at position 3686 of SEQ ID NO: 1882757
ucaugaauguauccguaaa

SEQ ID NO: 2145245 - RNA, 19 nt, Artificial Sequence
  Description of Artificial Sequence: Synthetic oligonucleotide
  Antisense strand to SEQ ID NO: 2145244
uuuacggauacauucauga

SEQ ID NO: 2145246 - RNA, 19 nt, Artificial Sequence
  Description of Artificial Sequence: Synthetic oligonucleotide
  Sense strand starting at position 3908 of SEQ ID NO: 1882757
uggcuuagcucgucuguca

SEQ ID NO: 2145247 - RNA, 19 nt, Artificial Sequence
  Description of Artificial Sequence: Synthetic oligonucleotide
  Antisense strand to SEQ ID NO: 2145246
ugacagacgagcuaagcca

SEQ ID NO: 2145248 - RNA, 19 nt, Artificial Sequence
  Description of Artificial Sequence: Synthetic oligonucleotide
  Sense strand starting at position 293 of SEQ ID NO: 1882758
gugugucuccacuaauauu

SEQ ID NO: 2145249 - RNA, 19 nt, Artificial Sequence
  Description of Artificial Sequence: Synthetic oligonucleotide
  Antisense strand to SEQ ID NO: 2145248
aauauuaguggagacacac

SEQ ID NO: 2145250 - RNA, 19 nt, Artificial Sequence
  Description of Artificial Sequence: Synthetic oligonucleotide
  Sense strand starting at position 375 of SEQ ID NO: 1882758
ucuuaagauguacaauguu

SEQ ID NO: 2145251 - RNA, 19 nt, Artificial Sequence
  Description of Artificial Sequence: Synthetic oligonucleotide
  Antisense strand to SEQ ID NO: 2145250
aacauuguacaucuuaaga

SEQ ID NO: 2145252 - RNA, 19 nt, Artificial Sequence
  Description of Artificial Sequence: Synthetic oligonucleotide
  Sense strand starting at position 411 of SEQ ID NO: 1882758
gguguucuuguuuauauau

SEQ ID NO: 2145253 - RNA, 19 nt, Artificial Sequence
  Description of Artificial Sequence: Synthetic oligonucleotide
  Antisense strand to SEQ ID NO: 2145252
auauauaaacaagaacacc

SEQ ID NO: 2145254 - RNA, 19 nt, Artificial Sequence
  Description of Artificial Sequence: Synthetic oligonucleotide
  Sense strand starting at position 426 of SEQ ID NO: 1882758
auauuuggcaguuguguaa

SEQ ID NO: 2145255 - RNA, 19 nt, Artificial Sequence
  Description of Artificial Sequence: Synthetic oligonucleotide
  Antisense strand to SEQ ID NO: 2145254
uuacacaacugccaaauau

SEQ ID NO: 2145256 - RNA, 19 nt, Artificial Sequence
  Description of Artificial Sequence: Synthetic oligonucleotide
  Sense strand starting at position 495 of SEQ ID NO: 1882758
acaaucaaaugguaaagaa

SEQ ID NO: 2145257 - RNA, 19 nt, Artificial Sequence
  Description of Artificial Sequence: Synthetic oligonucleotide
  Antisense strand to SEQ ID NO: 2145256
uucuuuaccauuugauugu

SEQ ID NO: 2145258 - RNA, 19 nt, Artificial Sequence
  Description of Artificial Sequence: Synthetic oligonucleotide
  Sense strand starting at position 568 of SEQ ID NO: 1882758
gugcuuauacagcacauua

SEQ ID NO: 2145259 - RNA, 19 nt, Artificial Sequence
  Description of Artificial Sequence: Synthetic oligonucleotide
  Antisense strand to SEQ ID NO: 2145258
uaaugugcuguauaagcac

SEQ ID NO: 2145260 - RNA, 19 nt, Artificial Sequence
  Description of Artificial Sequence: Synthetic oligonucleotide
  Sense strand starting at position 616 of SEQ ID NO: 1882758
cuuacugccucuuugauga

SEQ ID NO: 2145261 - RNA, 19 nt, Artificial Sequence
  Description of Artificial Sequence: Synthetic oligonucleotide
  Antisense strand to SEQ ID NO: 2145260
ucaucaaagaggcaguaag

SEQ ID NO: 2145262 - RNA, 19 nt, Artificial Sequence
  Description of Artificial Sequence: Synthetic oligonucleotide
  Sense strand starting at position 668 of SEQ ID NO: 1882758
guuuaaagucuacaccuca

SEQ ID NO: 2145263 - RNA, 19 nt, Artificial Sequence
  Description of Artificial Sequence: Synthetic oligonucleotide
  Antisense strand to SEQ ID NO: 2145262
ugagguguagacuuuaaac

SEQ ID NO: 2145264 - RNA, 19 nt, Artificial Sequence
  Description of Artificial Sequence: Synthetic oligonucleotide
  Sense strand starting at position 681 of SEQ ID NO: 1882758
accucaucuuuccugguau

SEQ ID NO: 2145265 - RNA, 19 nt, Artificial Sequence
  Description of Artificial Sequence: Synthetic oligonucleotide
  Antisense strand to SEQ ID NO: 2145264
auaccaggaaagaugaggu

SEQ ID NO: 2145266 - RNA, 19 nt, Artificial Sequence
  Description of Artificial Sequence: Synthetic oligonucleotide
  Sense strand starting at position 707 of SEQ ID NO: 1882758
uuuacuagucaggaggagu

SEQ ID NO: 2145267 - RNA, 19 nt, Artificial Sequence
  Description of Artificial Sequence: Synthetic oligonucleotide
  Antisense strand to SEQ ID NO: 2145266
acuccuccugacuaguaaa

SEQ ID NO: 2145268 - RNA, 19 nt, Artificial Sequence
  Description of Artificial Sequence: Synthetic oligonucleotide
  Sense strand starting at position 1128 of SEQ ID NO: 1882758
gggaaagacucuguuuagc

SEQ ID NO: 2145269 - RNA, 19 nt, Artificial Sequence
  Description of Artificial Sequence: Synthetic oligonucleotide
  Antisense strand to SEQ ID NO: 2145268
gcuaaacagagucuuuccc

SEQ ID NO: 2145270 - RNA, 19 nt, Artificial Sequence
  Description of Artificial Sequence: Synthetic oligonucleotide
  Sense strand starting at position 1130 of SEQ ID NO: 1882758
gaaagacucuguuuagcuu

SEQ ID NO: 2145271 - RNA, 19 nt, Artificial Sequence
  Description of Artificial Sequence: Synthetic oligonucleotide
  Antisense strand to SEQ ID NO: 2145270
aagcuaaacagagucuuuc

SEQ ID NO: 2145272 - RNA, 19 nt, Artificial Sequence
  Description of Artificial Sequence: Synthetic oligonucleotide
  Sense strand starting at position 1133 of SEQ ID NO: 1882758
agacucuguuuagcuuaua

SEQ ID NO: 2145273 - RNA, 19 nt, Artificial Sequence
  Description of Artificial Sequence: Synthetic oligonucleotide
  Antisense strand to SEQ ID NO: 2145272
uauaagcuaaacagagucu

SEQ ID NO: 2145274 - RNA, 19 nt, Artificial Sequence
  Description of Artificial Sequence: Synthetic oligonucleotide
  Sense strand starting at position 1191 of SEQ ID NO: 1882758
ccuggcuaaucuucugaau

SEQ ID NO: 2145275 - RNA, 19 nt, Artificial Sequence
  Description of Artificial Sequence: Synthetic oligonucleotide
  Antisense strand to SEQ ID NO: 2145274
auucagaagauuagccagg

SEQ ID NO: 2145276 - RNA, 19 nt, Artificial Sequence
  Description of Artificial Sequence: Synthetic oligonucleotide
  Sense strand starting at position 1363 of SEQ ID NO: 1882758
augcuuuggcuguauuaac

SEQ ID NO: 2145277 - RNA, 19 nt, Artificial Sequence
  Description of Artificial Sequence: Synthetic oligonucleotide
  Antisense strand to SEQ ID NO: 2145276
guuaauacagccaaagcau

SEQ ID NO: 2145278 - RNA, 19 nt, Artificial Sequence
  Description of Artificial Sequence: Synthetic oligonucleotide
  Sense strand starting at position 1399 of SEQ ID NO: 1882758
gguucuuuauauuuagcuu

SEQ ID NO: 2145279 - RNA, 19 nt, Artificial Sequence
  Description of Artificial Sequence: Synthetic oligonucleotide
  Antisense strand to SEQ ID NO: 2145278
aagcuaaauauaaagaacc

SEQ ID NO: 2145280 - RNA, 19 nt, Artificial Sequence
  Description of Artificial Sequence: Synthetic oligonucleotide
  Sense strand starting at position 1487 of SEQ ID NO: 1882758
ggagucaaguaaucugguu

SEQ ID NO: 2145281 - RNA, 19 nt, Artificial Sequence
  Description of Artificial Sequence: Synthetic oligonucleotide
  Antisense strand to SEQ ID NO: 2145280
aaccagauuacuugacucc

SEQ ID NO: 2145282 - RNA, 19 nt, Artificial Sequence
  Description of Artificial Sequence: Synthetic oligonucleotide
  Sense strand starting at position 1496 of SEQ ID NO: 1882758
uaaucugguuguguaauaa

SEQ ID NO: 2145283 - RNA, 19 nt, Artificial Sequence
  Description of Artificial Sequence: Synthetic oligonucleotide
  Antisense strand to SEQ ID NO: 2145282
uuauuacacaaccagauua

SEQ ID NO: 2145284 - RNA, 19 nt, Artificial Sequence
  Description of Artificial Sequence: Synthetic oligonucleotide
  Sense strand starting at position 1605 of SEQ ID NO: 1882758
accauaugauauccaaggu

SEQ ID NO: 2145285 - RNA, 19 nt, Artificial Sequence
  Description of Artificial Sequence: Synthetic oligonucleotide
  Antisense strand to SEQ ID NO: 2145284
accuuggauaucauauggu

SEQ ID NO: 2145286 - RNA, 19 nt, Artificial Sequence
  Description of Artificial Sequence: Synthetic oligonucleotide
  Sense strand starting at position 1657 of SEQ ID NO: 1882758
gugcuagaugaauauacca

SEQ ID NO: 2145287 - RNA, 19 nt, Artificial Sequence
  Description of Artificial Sequence: Synthetic oligonucleotide
  Antisense strand to SEQ ID NO: 2145286
ugguauauucaucuagcac

SEQ ID NO: 2145288 - RNA, 19 nt, Artificial Sequence
  Description of Artificial Sequence: Synthetic oligonucleotide
  Sense strand starting at position 1682 of SEQ ID NO: 1882758
ugcggaauuaaaugaugaa

SEQ ID NO: 2145289 - RNA, 19 nt, Artificial Sequence
  Description of Artificial Sequence: Synthetic oligonucleotide
  Antisense strand to SEQ ID NO: 2145288
uucaucauuuaauuccgca

SEQ ID NO: 2145290 - RNA, 19 nt, Artificial Sequence
  Description of Artificial Sequence: Synthetic oligonucleotide
  Sense strand starting at position 1820 of SEQ ID NO: 1882758
ugagacuguuacucuguca

SEQ ID NO: 2145291 - RNA, 19 nt, Artificial Sequence
  Description of Artificial Sequence: Synthetic oligonucleotide
  Antisense strand to SEQ ID NO: 2145290
ugacagaguaacagucuca

SEQ ID NO: 2145292 - RNA, 19 nt, Artificial Sequence
  Description of Artificial Sequence: Synthetic oligonucleotide
  Sense strand starting at position 2157 of SEQ ID NO: 1882758
gaucucaaguuauugguuu

SEQ ID NO: 2145293 - RNA, 19 nt, Artificial Sequence
  Description of Artificial Sequence: Synthetic oligonucleotide
  Antisense strand to SEQ ID NO: 2145292
aaaccaauaacuugagauc

SEQ ID NO: 2145294 - RNA, 19 nt, Artificial Sequence
  Description of Artificial Sequence: Synthetic oligonucleotide
  Sense strand starting at position 2163 of SEQ ID NO: 1882758
aaguuauugguuugaccuu

SEQ ID NO: 2145295 - RNA, 19 nt, Artificial Sequence
  Description of Artificial Sequence: Synthetic oligonucleotide
  Antisense strand to SEQ ID NO: 2145294
aaggucaaaccaauaacuu

SEQ ID NO: 2145296 - RNA, 19 nt, Artificial Sequence
  Description of Artificial Sequence: Synthetic oligonucleotide
  Sense strand starting at position 2257 of SEQ ID NO: 1882758
ggugaacucuuacuaugcu

SEQ ID NO: 2145297 - RNA, 19 nt, Artificial Sequence
  Description of Artificial Sequence: Synthetic oligonucleotide
  Antisense strand to SEQ ID NO: 2145296
agcauaguaagaguucacc

SEQ ID NO: 2145298 - RNA, 19 nt, Artificial Sequence
  Description of Artificial Sequence: Synthetic oligonucleotide
  Sense strand starting at position 2658 of SEQ ID NO: 1882758
uguauagaaguugguuaaa

SEQ ID NO: 2145299 - RNA, 19 nt, Artificial Sequence
  Description of Artificial Sequence: Synthetic oligonucleotide
  Antisense strand to SEQ ID NO: 2145298
uuuaaccaacuucuauaca

SEQ ID NO: 2145300 - RNA, 19 nt, Artificial Sequence
  Description of Artificial Sequence: Synthetic oligonucleotide
  Sense strand starting at position 2660 of SEQ ID NO: 1882758
uauagaaguugguuaaaug

SEQ ID NO: 2145301 - RNA, 19 nt, Artificial Sequence
  Description of Artificial Sequence: Synthetic oligonucleotide
  Antisense strand to SEQ ID NO: 2145300
cauuuaaccaacuucuaua

SEQ ID NO: 2145302 - RNA, 19 nt, Artificial Sequence
  Description of Artificial Sequence: Synthetic oligonucleotide
  Sense strand starting at position 2670 of SEQ ID NO: 1882758
gguuaaaugguacaacagu

SEQ ID NO: 2145303 - RNA, 19 nt, Artificial Sequence
  Description of Artificial Sequence: Synthetic oligonucleotide
  Antisense strand to SEQ ID NO: 2145302
acuguuguaccauuuaacc

SEQ ID NO: 2145304 - RNA, 19 nt, Artificial Sequence
  Description of Artificial Sequence: Synthetic oligonucleotide
  Sense strand starting at position 2799 of SEQ ID NO: 1882758
agauguuugaggugauagc

SEQ ID NO: 2145305 - RNA, 19 nt, Artificial Sequence
  Description of Artificial Sequence: Synthetic oligonucleotide
  Antisense strand to SEQ ID NO: 2145304
gcuaucaccucaaacaucu

SEQ ID NO: 2145306 - RNA, 19 nt, Artificial Sequence
  Description of Artificial Sequence: Synthetic oligonucleotide
  Sense strand starting at position 2800 of SEQ ID NO: 1882758
gauguuugaggugauagcu

SEQ ID NO: 2145307 - RNA, 19 nt, Artificial Sequence
  Description of Artificial Sequence: Synthetic oligonucleotide
  Antisense strand to SEQ ID NO: 2145306
agcuaucaccucaaacauc

SEQ ID NO: 2145308 - RNA, 19 nt, Artificial Sequence
  Description of Artificial Sequence: Synthetic oligonucleotide
  Sense strand starting at position 2806 of SEQ ID NO: 1882758
ugaggugauagcuauucca

SEQ ID NO: 2145309 - RNA, 19 nt, Artificial Sequence
  Description of Artificial Sequence: Synthetic oligonucleotide
  Antisense strand to SEQ ID NO: 2145308
uggaauagcuaucaccuca

SEQ ID NO: 2145310 - RNA, 19 nt, Artificial Sequence
  Description of Artificial Sequence: Synthetic oligonucleotide
  Sense strand starting at position 2809 of SEQ ID NO: 1882758
ggugauagcuauuccaacu

SEQ ID NO: 2145311 - RNA, 19 nt, Artificial Sequence
  Description of Artificial Sequence: Synthetic oligonucleotide
  Antisense strand to SEQ ID NO: 2145310
aguuggaauagcuaucacc

SEQ ID NO: 2145312 - RNA, 19 nt, Artificial Sequence
  Description of Artificial Sequence: Synthetic oligonucleotide
  Sense strand starting at position 3165 of SEQ ID NO: 1882758
acuuuaccuguuugacaag

SEQ ID NO: 2145313 - RNA, 19 nt, Artificial Sequence
  Description of Artificial Sequence: Synthetic oligonucleotide
  Antisense strand to SEQ ID NO: 2145312
cuugucaaacagguaaagu

SEQ ID NO: 2145314 - RNA, 19 nt, Artificial Sequence
  Description of Artificial Sequence: Synthetic oligonucleotide
  Sense strand starting at position 3187 of SEQ ID NO: 1882758
aguuuaggccaucagaaua

SEQ ID NO: 2145315 - RNA, 19 nt, Artificial Sequence
  Description of Artificial Sequence: Synthetic oligonucleotide
  Antisense strand to SEQ ID NO: 2145314
uauucugauggccuaaacu

SEQ ID NO: 2145316 - RNA, 19 nt, Artificial Sequence
  Description of Artificial Sequence: Synthetic oligonucleotide
  Sense strand starting at position 3240 of SEQ ID NO: 1882758
gcgguagguagguaagaua

SEQ ID NO: 2145317 - RNA, 19 nt, Artificial Sequence
  Description of Artificial Sequence: Synthetic oligonucleotide
  Antisense strand to SEQ ID NO: 2145316
uaucuuaccuaccuaccgc

SEQ ID NO: 2145318 - RNA, 19 nt, Artificial Sequence
  Description of Artificial Sequence: Synthetic oligonucleotide
  Sense strand starting at position 3271 of SEQ ID NO: 1882758
ucuguaauuuggucacuuu

SEQ ID NO: 2145319 - RNA, 19 nt, Artificial Sequence
  Description of Artificial Sequence: Synthetic oligonucleotide
  Antisense strand to SEQ ID NO: 2145318
aaagugaccaaauuacaga

SEQ ID NO: 2145320 - RNA, 19 nt, Artificial Sequence
  Description of Artificial Sequence: Synthetic oligonucleotide
  Sense strand starting at position 3321 of SEQ ID NO: 1882758
acacuucugcuagagaggu

SEQ ID NO: 2145321 - RNA, 19 nt, Artificial Sequence
  Description of Artificial Sequence: Synthetic oligonucleotide
  Antisense strand to SEQ ID NO: 2145320
accucucuagcagaagugu

SEQ ID NO: 2145322 - RNA, 19 nt, Artificial Sequence
  Description of Artificial Sequence: Synthetic oligonucleotide
  Sense strand starting at position 3379 of SEQ ID NO: 1882758
aaguuuaugcuguaaacag

SEQ ID NO: 2145323 - RNA, 19 nt, Artificial Sequence
  Description of Artificial Sequence: Synthetic oligonucleotide
  Antisense strand to SEQ ID NO: 2145322
cuguuuacagcauaaacuu

SEQ ID NO: 2145324 - RNA, 19 nt, Artificial Sequence
  Description of Artificial Sequence: Synthetic oligonucleotide
  Sense strand starting at position 3467 of SEQ ID NO: 1882758
caaggugacuuggaaauuu

SEQ ID NO: 2145325 - RNA, 19 nt, Artificial Sequence
  Description of Artificial Sequence: Synthetic oligonucleotide
  Antisense strand to SEQ ID NO: 2145324
aaauuuccaagucaccuug

SEQ ID NO: 2145326 - RNA, 19 nt, Artificial Sequence
  Description of Artificial Sequence: Synthetic oligonucleotide
  Sense strand starting at position 3520 of SEQ ID NO: 1882758
agccaagaagcugguuuau

SEQ ID NO: 2145327 - RNA, 19 nt, Artificial Sequence
  Description of Artificial Sequence: Synthetic oligonucleotide
  Antisense strand to SEQ ID NO: 2145326
auaaaccagcuucuuggcu

SEQ ID NO: 2145328 - RNA, 19 nt, Artificial Sequence
  Description of Artificial Sequence: Synthetic oligonucleotide
  Sense strand starting at position 347 of SEQ ID NO: 1882759
ggugcugguccagagauau

SEQ ID NO: 2145329 - RNA, 19 nt, Artificial Sequence
  Description of Artificial Sequence: Synthetic oligonucleotide
  Antisense strand to SEQ ID NO: 2145328
auaucucuggaccagcacc

SEQ ID NO: 2145330 - RNA, 19 nt, Artificial Sequence
  Description of Artificial Sequence: Synthetic oligonucleotide
  Sense strand starting at position 492 of SEQ ID NO: 1882759
aaguuauuagccuagacag

SEQ ID NO: 2145331 - RNA, 19 nt, Artificial Sequence
  Description of Artificial Sequence: Synthetic oligonucleotide
  Antisense strand to SEQ ID NO: 2145330
cugucuaggcuaauaacuu

SEQ ID NO: 2145332 - RNA, 19 nt, Artificial Sequence
  Description of Artificial Sequence: Synthetic oligonucleotide
  Sense strand starting at position 494 of SEQ ID NO: 1882759
guuauuagccuagacaggu

SEQ ID NO: 2145333 - RNA, 19 nt, Artificial Sequence
  Description of Artificial Sequence: Synthetic oligonucleotide
  Antisense strand to SEQ ID NO: 2145332
accugucuaggcuaauaac

SEQ ID NO: 2145334 - RNA, 19 nt, Artificial Sequence
  Description of Artificial Sequence: Synthetic oligonucleotide
  Sense strand starting at position 666 of SEQ ID NO: 1882759
acgcuuccuguaggaagaa

SEQ ID NO: 2145335 - RNA, 19 nt, Artificial Sequence
  Description of Artificial Sequence: Synthetic oligonucleotide
  Antisense strand to SEQ ID NO: 2145334
uucuuccuacaggaagcgu

SEQ ID NO: 2145336 - RNA, 19 nt, Artificial Sequence
  Description of Artificial Sequence: Synthetic oligonucleotide
  Sense strand starting at position 865 of SEQ ID NO: 1882759
gcuggucacacugaaaugu

SEQ ID NO: 2145337 - RNA, 19 nt, Artificial Sequence
  Description of Artificial Sequence: Synthetic oligonucleotide
  Antisense strand to SEQ ID NO: 2145336
acauuucagugugaccagc

SEQ ID NO: 2145338 - RNA, 19 nt, Artificial Sequence
  Description of Artificial Sequence: Synthetic oligonucleotide
  Sense strand starting at position 1424 of SEQ ID NO: 1882759
guuagaaacucucuguauc

SEQ ID NO: 2145339 - RNA, 19 nt, Artificial Sequence
  Description of Artificial Sequence: Synthetic oligonucleotide
  Antisense strand to SEQ ID NO: 2145338
gauacagagaguuucuaac

SEQ ID NO: 2145340 - RNA, 19 nt, Artificial Sequence
  Description of Artificial Sequence: Synthetic oligonucleotide
  Sense strand starting at position 1447 of SEQ ID NO: 1882759
uagggcuuccugugaucau

SEQ ID NO: 2145341 - RNA, 19 nt, Artificial Sequence
  Description of Artificial Sequence: Synthetic oligonucleotide
  Antisense strand to SEQ ID NO: 2145340
augaucacaggaagcccua

SEQ ID NO: 2145342 - RNA, 19 nt, Artificial Sequence
  Description of Artificial Sequence: Synthetic oligonucleotide
  Sense strand starting at position 1457 of SEQ ID NO: 1882759
ugugaucauccugaguguu

SEQ ID NO: 2145343 - RNA, 19 nt, Artificial Sequence
  Description of Artificial Sequence: Synthetic oligonucleotide
  Antisense strand to SEQ ID NO: 2145342
aacacucaggaugaucaca

SEQ ID NO: 2145344 - RNA, 19 nt, Artificial Sequence
  Description of Artificial Sequence: Synthetic oligonucleotide
  Sense strand starting at position 1513 of SEQ ID NO: 1882759
ggacauuaccuguggccua

SEQ ID NO: 2145345 - RNA, 19 nt, Artificial Sequence
  Description of Artificial Sequence: Synthetic oligonucleotide
  Antisense strand to SEQ ID NO: 2145344
uaggccacagguaaugucc

SEQ ID NO: 2145346 - RNA, 19 nt, Artificial Sequence
  Description of Artificial Sequence: Synthetic oligonucleotide
  Sense strand starting at position 1577 of SEQ ID NO: 1882759
guaagagagucauucuugu

SEQ ID NO: 2145347 - RNA, 19 nt, Artificial Sequence
  Description of Artificial Sequence: Synthetic oligonucleotide
  Antisense strand to SEQ ID NO: 2145346
acaagaaugacucucuuac

SEQ ID NO: 2145348 - RNA, 19 nt, Artificial Sequence
  Description of Artificial Sequence: Synthetic oligonucleotide
  Sense strand starting at position 1671 of SEQ ID NO: 1882759
gggugcuagacccagugau

SEQ ID NO: 2145349 - RNA, 19 nt, Artificial Sequence
  Description of Artificial Sequence: Synthetic oligonucleotide
  Antisense strand to SEQ ID NO: 2145348
aucacugggucuagcaccc

SEQ ID NO: 2145350 - RNA, 19 nt, Artificial Sequence
  Description of Artificial Sequence: Synthetic oligonucleotide
  Sense strand starting at position 1675 of SEQ ID NO: 1882759
gcuagacccagugauaugu

SEQ ID NO: 2145351 - RNA, 19 nt, Artificial Sequence
  Description of Artificial Sequence: Synthetic oligonucleotide
  Antisense strand to SEQ ID NO: 2145350
acauaucacugggucuagc

SEQ ID NO: 2145352 - RNA, 19 nt, Artificial Sequence
  Description of Artificial Sequence: Synthetic oligonucleotide
  Sense strand starting at position 1738 of SEQ ID NO: 1882759
aucugaguucuugguugag

SEQ ID NO: 2145353 - RNA, 19 nt, Artificial Sequence
  Description of Artificial Sequence: Synthetic oligonucleotide
  Antisense strand to SEQ ID NO: 2145352
cucaaccaagaacucagau

SEQ ID NO: 2145354 - RNA, 19 nt, Artificial Sequence
  Description of Artificial Sequence: Synthetic oligonucleotide
  Sense strand starting at position 1742 of SEQ ID NO: 1882759
gaguucuugguugagcaau

SEQ ID NO: 2145355 - RNA, 19 nt, Artificial Sequence
  Description of Artificial Sequence: Synthetic oligonucleotide
  Antisense strand to SEQ ID NO: 2145354
auugcucaaccaagaacuc

SEQ ID NO: 2145356 - RNA, 19 nt, Artificial Sequence
  Description of Artificial Sequence: Synthetic oligonucleotide
  Sense strand starting at position 1748 of SEQ ID NO: 1882759
uugguugagcaauauguca

SEQ ID NO: 2145357 - RNA, 19 nt, Artificial Sequence
  Description of Artificial Sequence: Synthetic oligonucleotide
  Antisense strand to SEQ ID NO: 2145356
ugacauauugcucaaccaa

SEQ ID NO: 2145358 - RNA, 19 nt, Artificial Sequence
  Description of Artificial Sequence: Synthetic oligonucleotide
  Sense strand starting at position 1750 of SEQ ID NO: 1882759
gguugagcaauaugucaca

SEQ ID NO: 2145359 - RNA, 19 nt, Artificial Sequence
  Description of Artificial Sequence: Synthetic oligonucleotide
  Antisense strand to SEQ ID NO: 2145358
ugugacauauugcucaacc

SEQ ID NO: 2145360 - RNA, 19 nt, Artificial Sequence
  Description of Artificial Sequence: Synthetic oligonucleotide
  Sense strand starting at position 1769 of SEQ ID NO: 1882759
aucccuucuguauguagaa

SEQ ID NO: 2145361 - RNA, 19 nt, Artificial Sequence
  Description of Artificial Sequence: Synthetic oligonucleotide
  Antisense strand to SEQ ID NO: 2145360
uucuacauacagaagggau

SEQ ID NO: 2145362 - RNA, 19 nt, Artificial Sequence
  Description of Artificial Sequence: Synthetic oligonucleotide
  Sense strand starting at position 1957 of SEQ ID NO: 1882759
ucacauuaccuagguuaua

SEQ ID NO: 2145363 - RNA, 19 nt, Artificial Sequence
  Description of Artificial Sequence: Synthetic oligonucleotide
  Antisense strand to SEQ ID NO: 2145362
uauaaccuagguaauguga

SEQ ID NO: 2145364 - RNA, 19 nt, Artificial Sequence
  Description of Artificial Sequence: Synthetic oligonucleotide
  Sense strand starting at position 1968 of SEQ ID NO: 1882759
agguuauaggcccagugau

SEQ ID NO: 2145365 - RNA, 19 nt, Artificial Sequence
  Description of Artificial Sequence: Synthetic oligonucleotide
  Antisense strand to SEQ ID NO: 2145364
aucacugggccuauaaccu

SEQ ID NO: 2145366 - RNA, 19 nt, Artificial Sequence
  Description of Artificial Sequence: Synthetic oligonucleotide
  Sense strand starting at position 2044 of SEQ ID NO: 1882759
cugugaugugcccagagau

SEQ ID NO: 2145367 - RNA, 19 nt, Artificial Sequence
  Description of Artificial Sequence: Synthetic oligonucleotide
  Antisense strand to SEQ ID NO: 2145366
aucucugggcacaucacag

SEQ ID NO: 2145368 - RNA, 19 nt, Artificial Sequence
  Description of Artificial Sequence: Synthetic oligonucleotide
  Sense strand starting at position 2175 of SEQ ID NO: 1882759
agagucaugucacaauuuc

SEQ ID NO: 2145369 - RNA, 19 nt, Artificial Sequence
  Description of Artificial Sequence: Synthetic oligonucleotide
  Antisense strand to SEQ ID NO: 2145368
gaaauugugacaugacucu

SEQ ID NO: 2145370 - RNA, 19 nt, Artificial Sequence
  Description of Artificial Sequence: Synthetic oligonucleotide
  Sense strand starting at position 2378 of SEQ ID NO: 1882759
guccaaagauauguuacaa

SEQ ID NO: 2145371 - RNA, 19 nt, Artificial Sequence
  Description of Artificial Sequence: Synthetic oligonucleotide
  Antisense strand to SEQ ID NO: 2145370
uuguaacauaucuuuggac

SEQ ID NO: 2145372 - RNA, 19 nt, Artificial Sequence
  Description of Artificial Sequence: Synthetic oligonucleotide
  Sense strand starting at position 2693 of SEQ ID NO: 1882759
ugcaaacaguguucccaua

SEQ ID NO: 2145373 - RNA, 19 nt, Artificial Sequence
  Description of Artificial Sequence: Synthetic oligonucleotide
  Antisense strand to SEQ ID NO: 2145372
uaugggaacacuguuugca

SEQ ID NO: 2145374 - RNA, 19 nt, Artificial Sequence
  Description of Artificial Sequence: Synthetic oligonucleotide
  Sense strand starting at position 2779 of SEQ ID NO: 1882759
augcauguacgugagucaa

SEQ ID NO: 2145375 - RNA, 19 nt, Artificial Sequence
  Description of Artificial Sequence: Synthetic oligonucleotide
  Antisense strand to SEQ ID NO: 2145374
uugacucacguacaugcau

SEQ ID NO: 2145376 - RNA, 19 nt, Artificial Sequence
  Description of Artificial Sequence: Synthetic oligonucleotide
  Sense strand starting at position 2783 of SEQ ID NO: 1882759
auguacgugagucaaacuu

SEQ ID NO: 2145377 - RNA, 19 nt, Artificial Sequence
  Description of Artificial Sequence: Synthetic oligonucleotide
  Antisense strand to SEQ ID NO: 2145376
aaguuugacucacguacau

SEQ ID NO: 2145378 - RNA, 19 nt, Artificial Sequence
  Description of Artificial Sequence: Synthetic oligonucleotide
  Sense strand starting at position 2890 of SEQ ID NO: 1882759
uggguaugcauaggagauu

SEQ ID NO: 2145379 - RNA, 19 nt, Artificial Sequence
  Description of Artificial Sequence: Synthetic oligonucleotide
  Antisense strand to SEQ ID NO: 2145378
aaucuccuaugcauaccca

SEQ ID NO: 2145380 - RNA, 19 nt, Artificial Sequence
  Description of Artificial Sequence: Synthetic oligonucleotide
  Sense strand starting at position 2922 of SEQ ID NO: 1882759
guguuucuggcuguguuau

SEQ ID NO: 2145381 - RNA, 19 nt, Artificial Sequence
  Description of Artificial Sequence: Synthetic oligonucleotide
  Antisense strand to SEQ ID NO: 2145380
auaacacagccagaaacac

SEQ ID NO: 2145382 - RNA, 19 nt, Artificial Sequence
  Description of Artificial Sequence: Synthetic oligonucleotide
  Sense strand starting at position 2948 of SEQ ID NO: 1882759
ucuguaccaucugagauuu

SEQ ID NO: 2145383 - RNA, 19 nt, Artificial Sequence
  Description of Artificial Sequence: Synthetic oligonucleotide
  Antisense strand to SEQ ID NO: 2145382
aaaucucagaugguacaga

SEQ ID NO: 2145384 - RNA, 19 nt, Artificial Sequence
  Description of Artificial Sequence: Synthetic oligonucleotide
  Sense strand starting at position 2969 of SEQ ID NO: 1882759
acauaauaugcuugagagu

SEQ ID NO: 2145385 - RNA, 19 nt, Artificial Sequence
  Description of Artificial Sequence: Synthetic oligonucleotide
  Antisense strand to SEQ ID NO: 2145384
acucucaagcauauuaugu

SEQ ID NO: 2145386 - RNA, 19 nt, Artificial Sequence
  Description of Artificial Sequence: Synthetic oligonucleotide
  Sense strand starting at position 2970 of SEQ ID NO: 1882759
cauaauaugcuugagagug

SEQ ID NO: 2145387 - RNA, 19 nt, Artificial Sequence
  Description of Artificial Sequence: Synthetic oligonucleotide
  Antisense strand to SEQ ID NO: 2145386
cacucucaagcauauuaug

SEQ ID NO: 2145388 - RNA, 19 nt, Artificial Sequence
  Description of Artificial Sequence: Synthetic oligonucleotide
  Sense strand starting at position 2975 of SEQ ID NO: 1882759
uaugcuugagaguggaauu

SEQ ID NO: 2145389 - RNA, 19 nt, Artificial Sequence
  Description of Artificial Sequence: Synthetic oligonucleotide
  Antisense strand to SEQ ID NO: 2145388
aauuccacucucaagcaua

SEQ ID NO: 2145390 - RNA, 19 nt, Artificial Sequence
  Description of Artificial Sequence: Synthetic oligonucleotide
  Sense strand starting at position 2988 of SEQ ID NO: 1882759
ggaauucugcucugugaac

SEQ ID NO: 2145391 - RNA, 19 nt, Artificial Sequence
  Description of Artificial Sequence: Synthetic oligonucleotide
  Antisense strand to SEQ ID NO: 2145390
guucacagagcagaauucc

SEQ ID NO: 2145392 - RNA, 19 nt, Artificial Sequence
  Description of Artificial Sequence: Synthetic oligonucleotide
  Sense strand starting at position 2989 of SEQ ID NO: 1882759
gaauucugcucugugaacu

SEQ ID NO: 2145393 - RNA, 19 nt, Artificial Sequence
  Description of Artificial Sequence: Synthetic oligonucleotide
  Antisense strand to SEQ ID NO: 2145392
aguucacagagcagaauuc

SEQ ID NO: 2145394 - RNA, 19 nt, Artificial Sequence
  Description of Artificial Sequence: Synthetic oligonucleotide
  Sense strand starting at position 3011 of SEQ ID NO: 1882759
uuuguauggcucuaagauc

SEQ ID NO: 2145395 - RNA, 19 nt, Artificial Sequence
  Description of Artificial Sequence: Synthetic oligonucleotide
  Antisense strand to SEQ ID NO: 2145394
gaucuuagagccauacaaa

SEQ ID NO: 2145396 - RNA, 19 nt, Artificial Sequence
  Description of Artificial Sequence: Synthetic oligonucleotide
  Sense strand starting at position 3222 of SEQ ID NO: 1882759
augggaucuguccaugugu

SEQ ID NO: 2145397 - RNA, 19 nt, Artificial Sequence
  Description of Artificial Sequence: Synthetic oligonucleotide
  Antisense strand to SEQ ID NO: 2145396
acacauggacagaucccau

SEQ ID NO: 2145398 - RNA, 19 nt, Artificial Sequence
  Description of Artificial Sequence: Synthetic oligonucleotide
  Sense strand starting at position 3272 of SEQ ID NO: 1882759
ugcauaugagaauaagucu

SEQ ID NO: 2145399 - RNA, 19 nt, Artificial Sequence
  Description of Artificial Sequence: Synthetic oligonucleotide
  Antisense strand to SEQ ID NO: 2145398
agacuuauucucauaugca

SEQ ID NO: 2145400 - RNA, 19 nt, Artificial Sequence
  Description of Artificial Sequence: Synthetic oligonucleotide
  Sense strand starting at position 3448 of SEQ ID NO: 1882759
acuagcuugguccaaguau

SEQ ID NO: 2145401 - RNA, 19 nt, Artificial Sequence
  Description of Artificial Sequence: Synthetic oligonucleotide
  Antisense strand to SEQ ID NO: 2145400
auacuuggaccaagcuagu

SEQ ID NO: 2145402 - RNA, 19 nt, Artificial Sequence
  Description of Artificial Sequence: Synthetic oligonucleotide
  Sense strand starting at position 3579 of SEQ ID NO: 1882759
gguuuauaaccucaccagu

SEQ ID NO: 2145403 - RNA, 19 nt, Artificial Sequence
  Description of Artificial Sequence: Synthetic oligonucleotide
  Antisense strand to SEQ ID NO: 2145402
acuggugagguuauaaacc

SEQ ID NO: 2145404 - RNA, 19 nt, Artificial Sequence
  Description of Artificial Sequence: Synthetic oligonucleotide
  Sense strand starting at position 3602 of SEQ ID NO: 1882759
ugugucuagguuuaagaau

SEQ ID NO: 2145405 - RNA, 19 nt, Artificial Sequence
  Description of Artificial Sequence: Synthetic oligonucleotide
  Antisense strand to SEQ ID NO: 2145404
auucuuaaaccuagacaca

SEQ ID NO: 2145406 - RNA, 19 nt, Artificial Sequence
  Description of Artificial Sequence: Synthetic oligonucleotide
  Sense strand starting at position 3794 of SEQ ID NO: 1882759
guagcucagagcugaggaa

SEQ ID NO: 2145407 - RNA, 19 nt, Artificial Sequence
  Description of Artificial Sequence: Synthetic oligonucleotide
  Antisense strand to SEQ ID NO: 2145406
uuccucagcucugagcuac

SEQ ID NO: 2145408 - RNA, 19 nt, Artificial Sequence
  Description of Artificial Sequence: Synthetic oligonucleotide
  Sense strand starting at position 48 of SEQ ID NO: 1882760
ugagccaaucacugaauca

SEQ ID NO: 2145409 - RNA, 19 nt, Artificial Sequence
  Description of Artificial Sequence: Synthetic oligonucleotide
  Antisense strand to SEQ ID NO: 2145408
ugauucagugauuggcuca

SEQ ID NO: 2145410 - RNA, 19 nt, Artificial Sequence
  Description of Artificial Sequence: Synthetic oligonucleotide
  Sense strand starting at position 103 of SEQ ID NO: 1882760
ggucaugagcguuaagaag

SEQ ID NO: 2145411 - RNA, 19 nt, Artificial Sequence
  Description of Artificial Sequence: Synthetic oligonucleotide
  Antisense strand to SEQ ID NO: 2145410
cuucuuaacgcucaugacc

SEQ ID NO: 2145412 - RNA, 19 nt, Artificial Sequence
  Description of Artificial Sequence: Synthetic oligonucleotide
  Sense strand starting at position 164 of SEQ ID NO: 1882760
acuguagguccaggaguua

SEQ ID NO: 2145413 - RNA, 19 nt, Artificial Sequence
  Description of Artificial Sequence: Synthetic oligonucleotide
  Antisense strand to SEQ ID NO: 2145412
uaacuccuggaccuacagu

SEQ ID NO: 2145414 - RNA, 19 nt, Artificial Sequence
  Description of Artificial Sequence: Synthetic oligonucleotide
  Sense strand starting at position 282 of SEQ ID NO: 1882760
cuacgcuuggugcuguuaa

SEQ ID NO: 2145415 - RNA, 19 nt, Artificial Sequence
  Description of Artificial Sequence: Synthetic oligonucleotide
  Antisense strand to SEQ ID NO: 2145414
uuaacagcaccaagcguag

SEQ ID NO: 2145416 - RNA, 19 nt, Artificial Sequence
  Description of Artificial Sequence: Synthetic oligonucleotide
  Sense strand starting at position 284 of SEQ ID NO: 1882760
acgcuuggugcuguuaaua

SEQ ID NO: 2145417 - RNA, 19 nt, Artificial Sequence
  Description of Artificial Sequence: Synthetic oligonucleotide
  Antisense strand to SEQ ID NO: 2145416
uauuaacagcaccaagcgu

SEQ ID NO: 2145418 - RNA, 19 nt, Artificial Sequence
  Description of Artificial Sequence: Synthetic oligonucleotide
  Sense strand starting at position 315 of SEQ ID NO: 1882760
acuguuaccucauuucgua

SEQ ID NO: 2145419 - RNA, 19 nt, Artificial Sequence
  Description of Artificial Sequence: Synthetic oligonucleotide
  Antisense strand to SEQ ID NO: 2145418
uacgaaaugagguaacagu

SEQ ID NO: 2145420 - RNA, 19 nt, Artificial Sequence
  Description of Artificial Sequence: Synthetic oligonucleotide
  Sense strand starting at position 480 of SEQ ID NO: 1882760
gugagcugggcacauaaau

SEQ ID NO: 2145421 - RNA, 19 nt, Artificial Sequence
  Description of Artificial Sequence: Synthetic oligonucleotide
  Antisense strand to SEQ ID NO: 2145420
auuuaugugcccagcucac

SEQ ID NO: 2145422 - RNA, 19 nt, Artificial Sequence
  Description of Artificial Sequence: Synthetic oligonucleotide
  Sense strand starting at position 746 of SEQ ID NO: 1882760
uccuaagaggagugucaua

SEQ ID NO: 2145423 - RNA, 19 nt, Artificial Sequence
  Description of Artificial Sequence: Synthetic oligonucleotide
  Antisense strand to SEQ ID NO: 2145422
uaugacacuccucuuagga

SEQ ID NO: 2145424 - RNA, 19 nt, Artificial Sequence
  Description of Artificial Sequence: Synthetic oligonucleotide
  Sense strand starting at position 977 of SEQ ID NO: 1882760
uucgcauuucucugacaca

SEQ ID NO: 2145425 - RNA, 19 nt, Artificial Sequence
  Description of Artificial Sequence: Synthetic oligonucleotide
  Antisense strand to SEQ ID NO: 2145424
ugugucagagaaaugcgaa

SEQ ID NO: 2145426 - RNA, 19 nt, Artificial Sequence
  Description of Artificial Sequence: Synthetic oligonucleotide
  Sense strand starting at position 1128 of SEQ ID NO: 1882760
uuaggauuccuuuaggcuu

SEQ ID NO: 2145427 - RNA, 19 nt, Artificial Sequence
  Description of Artificial Sequence: Synthetic oligonucleotide
  Antisense strand to SEQ ID NO: 2145426
aagccuaaaggaauccuaa

SEQ ID NO: 2145428 - RNA, 19 nt, Artificial Sequence
  Description of Artificial Sequence: Synthetic oligonucleotide
  Sense strand starting at position 1226 of SEQ ID NO: 1882760
ggcacaaaugguuaaagca

SEQ ID NO: 2145429 - RNA, 19 nt, Artificial Sequence
  Description of Artificial Sequence: Synthetic oligonucleotide
  Antisense strand to SEQ ID NO: 2145428
ugcuuuaaccauuugugcc

SEQ ID NO: 2145430 - RNA, 19 nt, Artificial Sequence
  Description of Artificial Sequence: Synthetic oligonucleotide
  Sense strand starting at position 1344 of SEQ ID NO: 1882760
agugcugauagugaaauua

SEQ ID NO: 2145431 - RNA, 19 nt, Artificial Sequence
  Description of Artificial Sequence: Synthetic oligonucleotide
  Antisense strand to SEQ ID NO: 2145430
uaauuucacuaucagcacu

SEQ ID NO: 2145432 - RNA, 19 nt, Artificial Sequence
  Description of Artificial Sequence: Synthetic oligonucleotide
  Sense strand starting at position 1469 of SEQ ID NO: 1882760
augcacauuccugagcaau

SEQ ID NO: 2145433 - RNA, 19 nt, Artificial Sequence
  Description of Artificial Sequence: Synthetic oligonucleotide
  Antisense strand to SEQ ID NO: 2145432
auugcucaggaaugugcau

SEQ ID NO: 2145434 - RNA, 19 nt, Artificial Sequence
  Description of Artificial Sequence: Synthetic oligonucleotide
  Sense strand starting at position 1471 of SEQ ID NO: 1882760
gcacauuccugagcaauau

SEQ ID NO: 2145435 - RNA, 19 nt, Artificial Sequence
  Description of Artificial Sequence: Synthetic oligonucleotide
  Antisense strand to SEQ ID NO: 2145434
auauugcucaggaaugugc

SEQ ID NO: 2145436 - RNA, 19 nt, Artificial Sequence
  Description of Artificial Sequence: Synthetic oligonucleotide
  Sense strand starting at position 1488 of SEQ ID NO: 1882760
auuuguuccuaugcucauu

SEQ ID NO: 2145437 - RNA, 19 nt, Artificial Sequence
  Description of Artificial Sequence: Synthetic oligonucleotide
  Antisense strand to SEQ ID NO: 2145436
aaugagcauaggaacaaau

SEQ ID NO: 2145438 - RNA, 19 nt, Artificial Sequence
  Description of Artificial Sequence: Synthetic oligonucleotide
  Sense strand starting at position 1701 of SEQ ID NO: 1882760
uccaguugacgacgacaaa

SEQ ID NO: 2145439 - RNA, 19 nt, Artificial Sequence
  Description of Artificial Sequence: Synthetic oligonucleotide
  Antisense strand to SEQ ID NO: 2145438
uuugucgucgucaacugga

SEQ ID NO: 2145440 - RNA, 19 nt, Artificial Sequence
  Description of Artificial Sequence: Synthetic oligonucleotide
  Sense strand starting at position 1730 of SEQ ID NO: 1882760
uguccuuaucaucaguuaa

SEQ ID NO: 2145441 - RNA, 19 nt, Artificial Sequence
  Description of Artificial Sequence: Synthetic oligonucleotide
  Antisense strand to SEQ ID NO: 2145440
uuaacugaugauaaggaca

SEQ ID NO: 2145442 - RNA, 19 nt, Artificial Sequence
  Description of Artificial Sequence: Synthetic oligonucleotide
  Sense strand starting at position 1753 of SEQ ID NO: 1882760
aagggugcauguuuacuaa

SEQ ID NO: 2145443 - RNA, 19 nt, Artificial Sequence
  Description of Artificial Sequence: Synthetic oligonucleotide
  Antisense strand to SEQ ID NO: 2145442
uuaguaaacaugcacccuu

SEQ ID NO: 2145444 - RNA, 19 nt, Artificial Sequence
  Description of Artificial Sequence: Synthetic oligonucleotide
  Sense strand starting at position 1883 of SEQ ID NO: 1882760
ccuggauggcagcaucaua

SEQ ID NO: 2145445 - RNA, 19 nt, Artificial Sequence
  Description of Artificial Sequence: Synthetic oligonucleotide
  Antisense strand to SEQ ID NO: 2145444
uaugaugcugccauccagg

SEQ ID NO: 2145446 - RNA, 19 nt, Artificial Sequence
  Description of Artificial Sequence: Synthetic oligonucleotide
  Sense strand starting at position 1894 of SEQ ID NO: 1882760
gcaucauagcuacagaaau

SEQ ID NO: 2145447 - RNA, 19 nt, Artificial Sequence
  Description of Artificial Sequence: Synthetic oligonucleotide
  Antisense strand to SEQ ID NO: 2145446
auuucuguagcuaugaugc

SEQ ID NO: 2145448 - RNA, 19 nt, Artificial Sequence
  Description of Artificial Sequence: Synthetic oligonucleotide
  Sense strand starting at position 2049 of SEQ ID NO: 1882760
gagagcucccuuugaccca

SEQ ID NO: 2145449 - RNA, 19 nt, Artificial Sequence
  Description of Artificial Sequence: Synthetic oligonucleotide
  Antisense strand to SEQ ID NO: 2145448
ugggucaaagggagcucuc

SEQ ID NO: 2145450 - RNA, 19 nt, Artificial Sequence
  Description of Artificial Sequence: Synthetic oligonucleotide
  Sense strand starting at position 2146 of SEQ ID NO: 1882760
uuaauuagacuugguaucu

SEQ ID NO: 2145451 - RNA, 19 nt, Artificial Sequence
  Description of Artificial Sequence: Synthetic oligonucleotide
  Antisense strand to SEQ ID NO: 2145450
agauaccaagucuaauuaa

SEQ ID NO: 2145452 - RNA, 19 nt, Artificial Sequence
  Description of Artificial Sequence: Synthetic oligonucleotide
  Sense strand starting at position 2213 of SEQ ID NO: 1882760
uuuacuuuccuugaguuau

SEQ ID NO: 2145453 - RNA, 19 nt, Artificial Sequence
  Description of Artificial Sequence: Synthetic oligonucleotide
  Antisense strand to SEQ ID NO: 2145452
auaacucaaggaaaguaaa

SEQ ID NO: 2145454 - RNA, 19 nt, Artificial Sequence
  Description of Artificial Sequence: Synthetic oligonucleotide
  Sense strand starting at position 2219 of SEQ ID NO: 1882760
uuccuugaguuauuaccua

SEQ ID NO: 2145455 - RNA, 19 nt, Artificial Sequence
  Description of Artificial Sequence: Synthetic oligonucleotide
  Antisense strand to SEQ ID NO: 2145454
uagguaauaacucaaggaa

SEQ ID NO: 2145456 - RNA, 19 nt, Artificial Sequence
  Description of Artificial Sequence: Synthetic oligonucleotide
  Sense strand starting at position 2270 of SEQ ID NO: 1882760
uaaucacuugcaugggagu

SEQ ID NO: 2145457 - RNA, 19 nt, Artificial Sequence
  Description of Artificial Sequence: Synthetic oligonucleotide
  Antisense strand to SEQ ID NO: 2145456
acucccaugcaagugauua

SEQ ID NO: 2145458 - RNA, 19 nt, Artificial Sequence
  Description of Artificial Sequence: Synthetic oligonucleotide
  Sense strand starting at position 2296 of SEQ ID NO: 1882760
ucaguugcaagagaaguau

SEQ ID NO: 2145459 - RNA, 19 nt, Artificial Sequence
  Description of Artificial Sequence: Synthetic oligonucleotide
  Antisense strand to SEQ ID NO: 2145458
auacuucucuugcaacuga

SEQ ID NO: 2145460 - RNA, 19 nt, Artificial Sequence
  Description of Artificial Sequence: Synthetic oligonucleotide
  Sense strand starting at position 2302 of SEQ ID NO: 1882760
gcaagagaaguauggcaua

SEQ ID NO: 2145461 - RNA, 19 nt, Artificial Sequence
  Description of Artificial Sequence: Synthetic oligonucleotide
  Antisense strand to SEQ ID NO: 2145460
uaugccauacuucucuugc

SEQ ID NO: 2145462 - RNA, 19 nt, Artificial Sequence
  Description of Artificial Sequence: Synthetic oligonucleotide
  Sense strand starting at position 2329 of SEQ ID NO: 1882760
acuguacuugcuuguauuu

SEQ ID NO: 2145463 - RNA, 19 nt, Artificial Sequence
  Description of Artificial Sequence: Synthetic oligonucleotide
  Antisense strand to SEQ ID NO: 2145462
aaauacaagcaaguacagu

SEQ ID NO: 2145464 - RNA, 19 nt, Artificial Sequence
  Description of Artificial Sequence: Synthetic oligonucleotide
  Sense strand starting at position 2481 of SEQ ID NO: 1882760
cugaguuaauagcuccaua

SEQ ID NO: 2145465 - RNA, 19 nt, Artificial Sequence
  Description of Artificial Sequence: Synthetic oligonucleotide
  Antisense strand to SEQ ID NO: 2145464
uauggagcuauuaacucag

SEQ ID NO: 2145466 - RNA, 19 nt, Artificial Sequence
  Description of Artificial Sequence: Synthetic oligonucleotide
  Sense strand starting at position 2531 of SEQ ID NO: 1882760
cugagugacucuuucuuua

SEQ ID NO: 2145467 - RNA, 19 nt, Artificial Sequence
  Description of Artificial Sequence: Synthetic oligonucleotide
  Antisense strand to SEQ ID NO: 2145466
uaaagaaagagucacucag

SEQ ID NO: 2145468 - RNA, 19 nt, Artificial Sequence
  Description of Artificial Sequence: Synthetic oligonucleotide
  Sense strand starting at position 2566 of SEQ ID NO: 1882760
agacaaaguucugccauga

SEQ ID NO: 2145469 - RNA, 19 nt, Artificial Sequence
  Description of Artificial Sequence: Synthetic oligonucleotide
  Antisense strand to SEQ ID NO: 2145468
ucauggcagaacuuugucu

SEQ ID NO: 2145470 - RNA, 19 nt, Artificial Sequence
  Description of Artificial Sequence: Synthetic oligonucleotide
  Sense strand starting at position 2840 of SEQ ID NO: 1882760
aguguuauacaccauuacu

SEQ ID NO: 2145471 - RNA, 19 nt, Artificial Sequence
  Description of Artificial Sequence: Synthetic oligonucleotide
  Antisense strand to SEQ ID NO: 2145470
aguaaugguguauaacacu

SEQ ID NO: 2145472 - RNA, 19 nt, Artificial Sequence
  Description of Artificial Sequence: Synthetic oligonucleotide
  Sense strand starting at position 3048 of SEQ ID NO: 1882760
guucgcauguuccuauuua

SEQ ID NO: 2145473 - RNA, 19 nt, Artificial Sequence
  Description of Artificial Sequence: Synthetic oligonucleotide
  Antisense strand to SEQ ID NO: 2145472
uaaauaggaacaugcgaac

SEQ ID NO: 2145474 - RNA, 19 nt, Artificial Sequence
  Description of Artificial Sequence: Synthetic oligonucleotide
  Sense strand starting at position 3142 of SEQ ID NO: 1882760
ccaugcauuugcucuagga

SEQ ID NO: 2145475 - RNA, 19 nt, Artificial Sequence
  Description of Artificial Sequence: Synthetic oligonucleotide
  Antisense strand to SEQ ID NO: 2145474
uccuagagcaaaugcaugg

SEQ ID NO: 2145476 - RNA, 19 nt, Artificial Sequence
  Description of Artificial Sequence: Synthetic oligonucleotide
  Sense strand starting at position 3525 of SEQ ID NO: 1882760
acacaagccugauucuagu

SEQ ID NO: 2145477 - RNA, 19 nt, Artificial Sequence
  Description of Artificial Sequence: Synthetic oligonucleotide
  Antisense strand to SEQ ID NO: 2145476
acuagaaucaggcuugugu

SEQ ID NO: 2145478 - RNA, 19 nt, Artificial Sequence
  Description of Artificial Sequence: Synthetic oligonucleotide
  Sense strand starting at position 3538 of SEQ ID NO: 1882760
ucuaguaagucccugacaa

SEQ ID NO: 2145479 - RNA, 19 nt, Artificial Sequence
  Description of Artificial Sequence: Synthetic oligonucleotide
  Antisense strand to SEQ ID NO: 2145478
uugucagggacuuacuaga

SEQ ID NO: 2145480 - RNA, 19 nt, Artificial Sequence
  Description of Artificial Sequence: Synthetic oligonucleotide
  Sense strand starting at position 3539 of SEQ ID NO: 1882760
cuaguaagucccugacaag

SEQ ID NO: 2145481 - RNA, 19 nt, Artificial Sequence
  Description of Artificial Sequence: Synthetic oligonucleotide
  Antisense strand to SEQ ID NO: 2145480
cuugucagggacuuacuag

SEQ ID NO: 2145482 - RNA, 19 nt, Artificial Sequence
  Description of Artificial Sequence: Synthetic oligonucleotide
  Sense strand starting at position 3670 of SEQ ID NO: 1882760
cuuggccucauguagaaga

SEQ ID NO: 2145483 - RNA, 19 nt, Artificial Sequence
  Description of Artificial Sequence: Synthetic oligonucleotide
  Antisense strand to SEQ ID NO: 2145482
ucuucuacaugaggccaag

SEQ ID NO: 2145484 - RNA, 19 nt, Artificial Sequence
  Description of Artificial Sequence: Synthetic oligonucleotide
  Sense strand starting at position 3672 of SEQ ID NO: 1882760
uggccucauguagaagauu

SEQ ID NO: 2145485 - RNA, 19 nt, Artificial Sequence
  Description of Artificial Sequence: Synthetic oligonucleotide
  Antisense strand to SEQ ID NO: 2145484
aaucuucuacaugaggcca

SEQ ID NO: 2145486 - RNA, 19 nt, Artificial Sequence
  Description of Artificial Sequence: Synthetic oligonucleotide
  Sense strand starting at position 3954 of SEQ ID NO: 1882760
acaggauaauacuuguauu

SEQ ID NO: 2145487 - RNA, 19 nt, Artificial Sequence
  Description of Artificial Sequence: Synthetic oligonucleotide
  Antisense strand to SEQ ID NO: 2145486
aauacaaguauuauccugu

SEQ ID NO: 2145488 - RNA, 19 nt, Artificial Sequence
  Description of Artificial Sequence: Synthetic oligonucleotide
  Sense strand starting at position 111 of SEQ ID NO: 1882761
ccagcuauucgaggacuuu

SEQ ID NO: 2145489 - RNA, 19 nt, Artificial Sequence
  Description of Artificial Sequence: Synthetic oligonucleotide
  Antisense strand to SEQ ID NO: 2145488
aaaguccucgaauagcugg

SEQ ID NO: 2145490 - RNA, 19 nt, Artificial Sequence
  Description of Artificial Sequence: Synthetic oligonucleotide
  Sense strand starting at position 112 of SEQ ID NO: 1882761
cagcuauucgaggacuuug

SEQ ID NO: 2145491 - RNA, 19 nt, Artificial Sequence
  Description of Artificial Sequence: Synthetic oligonucleotide
  Antisense strand to SEQ ID NO: 2145490
caaaguccucgaauagcug

SEQ ID NO: 2145492 - RNA, 19 nt, Artificial Sequence
  Description of Artificial Sequence: Synthetic oligonucleotide
  Sense strand starting at position 144 of SEQ ID NO: 1882761
aguuucucaggauguaaca

SEQ ID NO: 2145493 - RNA, 19 nt, Artificial Sequence
  Description of Artificial Sequence: Synthetic oligonucleotide
  Antisense strand to SEQ ID NO: 2145492
uguuacauccugagaaacu

SEQ ID NO: 2145494 - RNA, 19 nt, Artificial Sequence
  Description of Artificial Sequence: Synthetic oligonucleotide
  Sense strand starting at position 165 of SEQ ID NO: 1882761
agcaaaucacugugcacuu

SEQ ID NO: 2145495 - RNA, 19 nt, Artificial Sequence
  Description of Artificial Sequence: Synthetic oligonucleotide
  Antisense strand to SEQ ID NO: 2145494
aagugcacagugauuugcu

SEQ ID NO: 2145496 - RNA, 19 nt, Artificial Sequence
  Description of Artificial Sequence: Synthetic oligonucleotide
  Sense strand starting at position 228 of SEQ ID NO: 1882761
ggcccauauugggcaugaa

SEQ ID NO: 2145497 - RNA, 19 nt, Artificial Sequence
  Description of Artificial Sequence: Synthetic oligonucleotide
  Antisense strand to SEQ ID NO: 2145496
uucaugcccaauaugggcc

SEQ ID NO: 2145498 - RNA, 19 nt, Artificial Sequence
  Description of Artificial Sequence: Synthetic oligonucleotide
  Sense strand starting at position 229 of SEQ ID NO: 1882761
gcccauauugggcaugaaa

SEQ ID NO: 2145499 - RNA, 19 nt, Artificial Sequence
  Description of Artificial Sequence: Synthetic oligonucleotide
  Antisense strand to SEQ ID NO: 2145498
uuucaugcccaauaugggc

SEQ ID NO: 2145500 - RNA, 19 nt, Artificial Sequence
  Description of Artificial Sequence: Synthetic oligonucleotide
  Sense strand starting at position 326 of SEQ ID NO: 1882761
ggugcaucuuaauuaggga

SEQ ID NO: 2145501 - RNA, 19 nt, Artificial Sequence
  Description of Artificial Sequence: Synthetic oligonucleotide
  Antisense strand to SEQ ID NO: 2145500
ucccuaauuaagaugcacc

SEQ ID NO: 2145502 - RNA, 19 nt, Artificial Sequence
  Description of Artificial Sequence: Synthetic oligonucleotide
  Sense strand starting at position 327 of SEQ ID NO: 1882761
gugcaucuuaauuagggaa

SEQ ID NO: 2145503 - RNA, 19 nt, Artificial Sequence
  Description of Artificial Sequence: Synthetic oligonucleotide
  Antisense strand to SEQ ID NO: 2145502
uucccuaauuaagaugcac

SEQ ID NO: 2145504 - RNA, 19 nt, Artificial Sequence
  Description of Artificial Sequence: Synthetic oligonucleotide
  Sense strand starting at position 466 of SEQ ID NO: 1882761
guugcaaaccuguagggaa

SEQ ID NO: 2145505 - RNA, 19 nt, Artificial Sequence
  Description of Artificial Sequence: Synthetic oligonucleotide
  Antisense strand to SEQ ID NO: 2145504
uucccuacagguuugcaac

SEQ ID NO: 2145506 - RNA, 19 nt, Artificial Sequence
  Description of Artificial Sequence: Synthetic oligonucleotide
  Sense strand starting at position 500 of SEQ ID NO: 1882761
auaaaugaugccgggacau

SEQ ID NO: 2145507 - RNA, 19 nt, Artificial Sequence
  Description of Artificial Sequence: Synthetic oligonucleotide
  Antisense strand to SEQ ID NO: 2145506
augucccggcaucauuuau

SEQ ID NO: 2145508 - RNA, 19 nt, Artificial Sequence
  Description of Artificial Sequence: Synthetic oligonucleotide
  Sense strand starting at position 522 of SEQ ID NO: 1882761
guuagcuauuuggaaggaa

SEQ ID NO: 2145509 - RNA, 19 nt, Artificial Sequence
  Description of Artificial Sequence: Synthetic oligonucleotide
  Antisense strand to SEQ ID NO: 2145508
uuccuuccaaauagcuaac

SEQ ID NO: 2145510 - RNA, 19 nt, Artificial Sequence
  Description of Artificial Sequence: Synthetic oligonucleotide
  Sense strand starting at position 886 of SEQ ID NO: 1882761
gugaaugagaaaugcccaa

SEQ ID NO: 2145511 - RNA, 19 nt, Artificial Sequence
  Description of Artificial Sequence: Synthetic oligonucleotide
  Antisense strand to SEQ ID NO: 2145510
uugggcauuucucauucac

SEQ ID NO: 2145512 - RNA, 19 nt, Artificial Sequence
  Description of Artificial Sequence: Synthetic oligonucleotide
  Sense strand starting at position 1006 of SEQ ID NO: 1882761
cuuaucaaagaacguuuaa

SEQ ID NO: 2145513 - RNA, 19 nt, Artificial Sequence
  Description of Artificial Sequence: Synthetic oligonucleotide
  Antisense strand to SEQ ID NO: 2145512
uuaaacguucuuugauaag

SEQ ID NO: 2145514 - RNA, 19 nt, Artificial Sequence
  Description of Artificial Sequence: Synthetic oligonucleotide
  Sense strand starting at position 1042 of SEQ ID NO: 1882761
aaucucauugaguggagua

SEQ ID NO: 2145515 - RNA, 19 nt, Artificial Sequence
  Description of Artificial Sequence: Synthetic oligonucleotide
  Antisense strand to SEQ ID NO: 2145514
uacuccacucaaugagauu

SEQ ID NO: 2145516 - RNA, 19 nt, Artificial Sequence
  Description of Artificial Sequence: Synthetic oligonucleotide
  Sense strand starting at position 1043 of SEQ ID NO: 1882761
aucucauugaguggaguaa

SEQ ID NO: 2145517 - RNA, 19 nt, Artificial Sequence
  Description of Artificial Sequence: Synthetic oligonucleotide
  Antisense strand to SEQ ID NO: 2145516
uuacuccacucaaugagau

SEQ ID NO: 2145518 - RNA, 19 nt, Artificial Sequence
  Description of Artificial Sequence: Synthetic oligonucleotide
  Sense strand starting at position 1199 of SEQ ID NO: 1882761
uaaggugcuguccaggauu

SEQ ID NO: 2145519 - RNA, 19 nt, Artificial Sequence
  Description of Artificial Sequence: Synthetic oligonucleotide
  Antisense strand to SEQ ID NO: 2145518
aauccuggacagcaccuua

SEQ ID NO: 2145520 - RNA, 19 nt, Artificial Sequence
  Description of Artificial Sequence: Synthetic oligonucleotide
  Sense strand starting at position 1202 of SEQ ID NO: 1882761
ggugcuguccaggauugaa

SEQ ID NO: 2145521 - RNA, 19 nt, Artificial Sequence
  Description of Artificial Sequence: Synthetic oligonucleotide
  Antisense strand to SEQ ID NO: 2145520
uucaauccuggacagcacc

SEQ ID NO: 2145522 - RNA, 19 nt, Artificial Sequence
  Description of Artificial Sequence: Synthetic oligonucleotide
  Sense strand starting at position 1285 of SEQ ID NO: 1882761
acacgugggcaugguuaaa

SEQ ID NO: 2145523 - RNA, 19 nt, Artificial Sequence
  Description of Artificial Sequence: Synthetic oligonucleotide
  Antisense strand to SEQ ID NO: 2145522
uuuaaccaugcccacgugu

SEQ ID NO: 2145524 - RNA, 19 nt, Artificial Sequence
  Description of Artificial Sequence: Synthetic oligonucleotide
  Sense strand starting at position 1367 of SEQ ID NO: 1882761
acuuaauggcauggaaaua

SEQ ID NO: 2145525 - RNA, 19 nt, Artificial Sequence
  Description of Artificial Sequence: Synthetic oligonucleotide
  Antisense strand to SEQ ID NO: 2145524
uauuuccaugccauuaagu

SEQ ID NO: 2145526 - RNA, 19 nt, Artificial Sequence
  Description of Artificial Sequence: Synthetic oligonucleotide
  Sense strand starting at position 1377 of SEQ ID NO: 1882761
auggaaauaugucuaugac

SEQ ID NO: 2145527 - RNA, 19 nt, Artificial Sequence
  Description of Artificial Sequence: Synthetic oligonucleotide
  Antisense strand to SEQ ID NO: 2145526
gucauagacauauuuccau

SEQ ID NO: 2145528 - RNA, 19 nt, Artificial Sequence
  Description of Artificial Sequence: Synthetic oligonucleotide
  Sense strand starting at position 1394 of SEQ ID NO: 1882761
acauaauauuaagcggaaa

SEQ ID NO: 2145529 - RNA, 19 nt, Artificial Sequence
  Description of Artificial Sequence: Synthetic oligonucleotide
  Antisense strand to SEQ ID NO: 2145528
uuuccgcuuaauauuaugu

SEQ ID NO: 2145530 - RNA, 19 nt, Artificial Sequence
  Description of Artificial Sequence: Synthetic oligonucleotide
  Sense strand starting at position 1425 of SEQ ID NO: 1882761
uuggguuucuuagcugaca

SEQ ID NO: 2145531 - RNA, 19 nt, Artificial Sequence
  Description of Artificial Sequence: Synthetic oligonucleotide
  Antisense strand to SEQ ID NO: 2145530
ugucagcuaagaaacccaa

SEQ ID NO: 2145532 - RNA, 19 nt, Artificial Sequence
  Description of Artificial Sequence: Synthetic oligonucleotide
  Sense strand starting at position 1456 of SEQ ID NO: 1882761
cacucuggcugucuggaua

SEQ ID NO: 2145533 - RNA, 19 nt, Artificial Sequence
  Description of Artificial Sequence: Synthetic oligonucleotide
  Antisense strand to SEQ ID NO: 2145532
uauccagacagccagagug

SEQ ID NO: 2145534 - RNA, 19 nt, Artificial Sequence
  Description of Artificial Sequence: Synthetic oligonucleotide
  Sense strand starting at position 1888 of SEQ ID NO: 1882761
gaacguaggcucugagacu

SEQ ID NO: 2145535 - RNA, 19 nt, Artificial Sequence
  Description of Artificial Sequence: Synthetic oligonucleotide
  Antisense strand to SEQ ID NO: 2145534
agucucagagccuacguuc

SEQ ID NO: 2145536 - RNA, 19 nt, Artificial Sequence
  Description of Artificial Sequence: Synthetic oligonucleotide
  Sense strand starting at position 2087 of SEQ ID NO: 1882761
aggauaauuugaggaagau

SEQ ID NO: 2145537 - RNA, 19 nt, Artificial Sequence
  Description of Artificial Sequence: Synthetic oligonucleotide
  Antisense strand to SEQ ID NO: 2145536
aucuuccucaaauuauccu

SEQ ID NO: 2145538 - RNA, 19 nt, Artificial Sequence
  Description of Artificial Sequence: Synthetic oligonucleotide
  Sense strand starting at position 2405 of SEQ ID NO: 1882761
agaccauaugccuagccau

SEQ ID NO: 2145539 - RNA, 19 nt, Artificial Sequence
  Description of Artificial Sequence: Synthetic oligonucleotide
  Antisense strand to SEQ ID NO: 2145538
auggcuaggcauauggucu

SEQ ID NO: 2145540 - RNA, 19 nt, Artificial Sequence
  Description of Artificial Sequence: Synthetic oligonucleotide
  Sense strand starting at position 2638 of SEQ ID NO: 1882761
gugggaugcaguuagcaca

SEQ ID NO: 2145541 - RNA, 19 nt, Artificial Sequence
  Description of Artificial Sequence: Synthetic oligonucleotide
  Antisense strand to SEQ ID NO: 2145540
ugugcuaacugcaucccac

SEQ ID NO: 2145542 - RNA, 19 nt, Artificial Sequence
  Description of Artificial Sequence: Synthetic oligonucleotide
  Sense strand starting at position 2717 of SEQ ID NO: 1882761
augaaugaucuaugcuuua

SEQ ID NO: 2145543 - RNA, 19 nt, Artificial Sequence
  Description of Artificial Sequence: Synthetic oligonucleotide
  Antisense strand to SEQ ID NO: 2145542
uaaagcauagaucauucau

SEQ ID NO: 2145544 - RNA, 19 nt, Artificial Sequence
  Description of Artificial Sequence: Synthetic oligonucleotide
  Sense strand starting at position 2939 of SEQ ID NO: 1882761
uagccaugccaggagacau

SEQ ID NO: 2145545 - RNA, 19 nt, Artificial Sequence
  Description of Artificial Sequence: Synthetic oligonucleotide
  Antisense strand to SEQ ID NO: 2145544
augucuccuggcauggcua

SEQ ID NO: 2145546 - RNA, 19 nt, Artificial Sequence
  Description of Artificial Sequence: Synthetic oligonucleotide
  Sense strand starting at position 2995 of SEQ ID NO: 1882761
ggauauugucaacagcuuu

SEQ ID NO: 2145547 - RNA, 19 nt, Artificial Sequence
  Description of Artificial Sequence: Synthetic oligonucleotide
  Antisense strand to SEQ ID NO: 2145546
aaagcuguugacaauaucc

SEQ ID NO: 2145548 - RNA, 19 nt, Artificial Sequence
  Description of Artificial Sequence: Synthetic oligonucleotide
  Sense strand starting at position 3476 of SEQ ID NO: 1882761
ccagccucagauugcuuaa

SEQ ID NO: 2145549 - RNA, 19 nt, Artificial Sequence
  Description of Artificial Sequence: Synthetic oligonucleotide
  Antisense strand to SEQ ID NO: 2145548
uuaagcaaucugaggcugg

SEQ ID NO: 2145550 - RNA, 19 nt, Artificial Sequence
  Description of Artificial Sequence: Synthetic oligonucleotide
  Sense strand starting at position 3483 of SEQ ID NO: 1882761
cagauugcuuaagugauga

SEQ ID NO: 2145551 - RNA, 19 nt, Artificial Sequence
  Description of Artificial Sequence: Synthetic oligonucleotide
  Antisense strand to SEQ ID NO: 2145550
ucaucacuuaagcaaucug

SEQ ID NO: 2145552 - RNA, 19 nt, Artificial Sequence
  Description of Artificial Sequence: Synthetic oligonucleotide
  Sense strand starting at position 3488 of SEQ ID NO: 1882761
ugcuuaagugaugaauucu

SEQ ID NO: 2145553 - RNA, 19 nt, Artificial Sequence
  Description of Artificial Sequence: Synthetic oligonucleotide
  Antisense strand to SEQ ID NO: 2145552
agaauucaucacuuaagca

SEQ ID NO: 2145554 - RNA, 19 nt, Artificial Sequence
  Description of Artificial Sequence: Synthetic oligonucleotide
  Sense strand starting at position 3578 of SEQ ID NO: 1882761
guauuugcuuauucuagac

SEQ ID NO: 2145555 - RNA, 19 nt, Artificial Sequence
  Description of Artificial Sequence: Synthetic oligonucleotide
  Antisense strand to SEQ ID NO: 2145554
gucuagaauaagcaaauac

SEQ ID NO: 2145556 - RNA, 19 nt, Artificial Sequence
  Description of Artificial Sequence: Synthetic oligonucleotide
  Sense strand starting at position 3582 of SEQ ID NO: 1882761
uugcuuauucuagacaugu

SEQ ID NO: 2145557 - RNA, 19 nt, Artificial Sequence
  Description of Artificial Sequence: Synthetic oligonucleotide
  Antisense strand to SEQ ID NO: 2145556
acaugucuagaauaagcaa

SEQ ID NO: 2145558 - RNA, 19 nt, Artificial Sequence
  Description of Artificial Sequence: Synthetic oligonucleotide
  Sense strand starting at position 3759 of SEQ ID NO: 1882761
auccauuccucaguugauu

SEQ ID NO: 2145559 - RNA, 19 nt, Artificial Sequence
  Description of Artificial Sequence: Synthetic oligonucleotide
  Antisense strand to SEQ ID NO: 2145558
aaucaacugaggaauggau

SEQ ID NO: 2145560 - RNA, 19 nt, Artificial Sequence
  Description of Artificial Sequence: Synthetic oligonucleotide
  Sense strand starting at position 3874 of SEQ ID NO: 1882761
auggauagcuaucuuagag

SEQ ID NO: 2145561 - RNA, 19 nt, Artificial Sequence
  Description of Artificial Sequence: Synthetic oligonucleotide
  Antisense strand to SEQ ID NO: 2145560
cucuaagauagcuauccau

SEQ ID NO: 2145562 - RNA, 19 nt, Artificial Sequence
  Description of Artificial Sequence: Synthetic oligonucleotide
  Sense strand starting at position 3881 of SEQ ID NO: 1882761
gcuaucuuagaguggaaug

SEQ ID NO: 2145563 - RNA, 19 nt, Artificial Sequence
  Description of Artificial Sequence: Synthetic oligonucleotide
  Antisense strand to SEQ ID NO: 2145562
cauuccacucuaagauagc

SEQ ID NO: 2145564 - RNA, 19 nt, Artificial Sequence
  Description of Artificial Sequence: Synthetic oligonucleotide
  Sense strand starting at position 3909 of SEQ ID NO: 1882761
uuugguaacucucuguuua

SEQ ID NO: 2145565 - RNA, 19 nt, Artificial Sequence
  Description of Artificial Sequence: Synthetic oligonucleotide
  Antisense strand to SEQ ID NO: 2145564
uaaacagagaguuaccaaa

SEQ ID NO: 2145566 - RNA, 19 nt, Artificial Sequence
  Description of Artificial Sequence: Synthetic oligonucleotide
  Sense strand starting at position 3910 of SEQ ID NO: 1882761
uugguaacucucuguuuag

SEQ ID NO: 2145567 - RNA, 19 nt, Artificial Sequence
  Description of Artificial Sequence: Synthetic oligonucleotide
  Antisense strand to SEQ ID NO: 2145566
cuaaacagagaguuaccaa

SEQ ID NO: 2145568 - RNA, 19 nt, Artificial Sequence
  Description of Artificial Sequence: Synthetic oligonucleotide
  Sense strand starting at position 359 of SEQ ID NO: 1882762
uuuguccacuucuugauau

SEQ ID NO: 2145569 - RNA, 19 nt, Artificial Sequence
  Description of Artificial Sequence: Synthetic oligonucleotide
  Antisense strand to SEQ ID NO: 2145568
auaucaagaaguggacaaa

SEQ ID NO: 2145570 - RNA, 19 nt, Artificial Sequence
  Description of Artificial Sequence: Synthetic oligonucleotide
  Sense strand starting at position 361 of SEQ ID NO: 1882762
uguccacuucuugauauag

SEQ ID NO: 2145571 - RNA, 19 nt, Artificial Sequence
  Description of Artificial Sequence: Synthetic oligonucleotide
  Antisense strand to SEQ ID NO: 2145570
cuauaucaagaaguggaca

SEQ ID NO: 2145572 - RNA, 19 nt, Artificial Sequence
  Description of Artificial Sequence: Synthetic oligonucleotide
  Sense strand starting at position 492 of SEQ ID NO: 1882762
aagacauguggaugcaaau

SEQ ID NO: 2145573 - RNA, 19 nt, Artificial Sequence
  Description of Artificial Sequence: Synthetic oligonucleotide
  Antisense strand to SEQ ID NO: 2145572
auuugcauccacaugucuu

SEQ ID NO: 2145574 - RNA, 19 nt, Artificial Sequence
  Description of Artificial Sequence: Synthetic oligonucleotide
  Sense strand starting at position 561 of SEQ ID NO: 1882762
ccguauaccagugacauga

SEQ ID NO: 2145575 - RNA, 19 nt, Artificial Sequence
  Description of Artificial Sequence: Synthetic oligonucleotide
  Antisense strand to SEQ ID NO: 2145574
ucaugucacugguauacgg

SEQ ID NO: 2145576 - RNA, 19 nt, Artificial Sequence
  Description of Artificial Sequence: Synthetic oligonucleotide
  Sense strand starting at position 854 of SEQ ID NO: 1882762
uuuaguuacugaucuacuu

SEQ ID NO: 2145577 - RNA, 19 nt, Artificial Sequence
  Description of Artificial Sequence: Synthetic oligonucleotide
  Antisense strand to SEQ ID NO: 2145576
aaguagaucaguaacuaaa

SEQ ID NO: 2145578 - RNA, 19 nt, Artificial Sequence
  Description of Artificial Sequence: Synthetic oligonucleotide
  Sense strand starting at position 992 of SEQ ID NO: 1882762
gcucuaauaugagauuuga

SEQ ID NO: 2145579 - RNA, 19 nt, Artificial Sequence
  Description of Artificial Sequence: Synthetic oligonucleotide
  Antisense strand to SEQ ID NO: 2145578
ucaaaucucauauuagagc

SEQ ID NO: 2145580 - RNA, 19 nt, Artificial Sequence
  Description of Artificial Sequence: Synthetic oligonucleotide
  Sense strand starting at position 1038 of SEQ ID NO: 1882762
ugaaucuuagcaggaauaa

SEQ ID NO: 2145581 - RNA, 19 nt, Artificial Sequence
  Description of Artificial Sequence: Synthetic oligonucleotide
  Antisense strand to SEQ ID NO: 2145580
uuauuccugcuaagauuca

SEQ ID NO: 2145582 - RNA, 19 nt, Artificial Sequence
  Description of Artificial Sequence: Synthetic oligonucleotide
  Sense strand starting at position 1074 of SEQ ID NO: 1882762
cagcuuagugcugacugaa

SEQ ID NO: 2145583 - RNA, 19 nt, Artificial Sequence
  Description of Artificial Sequence: Synthetic oligonucleotide
  Antisense strand to SEQ ID NO: 2145582
uucagucagcacuaagcug

SEQ ID NO: 2145584 - RNA, 19 nt, Artificial Sequence
  Description of Artificial Sequence: Synthetic oligonucleotide
  Sense strand starting at position 1848 of SEQ ID NO: 1882762
cucauucgucguccugcaa

SEQ ID NO: 2145585 - RNA, 19 nt, Artificial Sequence
  Description of Artificial Sequence: Synthetic oligonucleotide
  Antisense strand to SEQ ID NO: 2145584
uugcaggacgacgaaugag

SEQ ID NO: 2145586 - RNA, 19 nt, Artificial Sequence
  Description of Artificial Sequence: Synthetic oligonucleotide
  Sense strand starting at position 1849 of SEQ ID NO: 1882762
ucauucgucguccugcaaa

SEQ ID NO: 2145587 - RNA, 19 nt, Artificial Sequence
  Description of Artificial Sequence: Synthetic oligonucleotide
  Antisense strand to SEQ ID NO: 2145586
uuugcaggacgacgaauga

SEQ ID NO: 2145588 - RNA, 19 nt, Artificial Sequence
  Description of Artificial Sequence: Synthetic oligonucleotide
  Sense strand starting at position 1915 of SEQ ID NO: 1882762
guuuguaacuuaccuaaag

SEQ ID NO: 2145589 - RNA, 19 nt, Artificial Sequence
  Description of Artificial Sequence: Synthetic oligonucleotide
  Antisense strand to SEQ ID NO: 2145588
cuuuagguaaguuacaaac

SEQ ID NO: 2145590 - RNA, 19 nt, Artificial Sequence
  Description of Artificial Sequence: Synthetic oligonucleotide
  Sense strand starting at position 1916 of SEQ ID NO: 1882762
uuuguaacuuaccuaaagu

SEQ ID NO: 2145591 - RNA, 19 nt, Artificial Sequence
  Description of Artificial Sequence: Synthetic oligonucleotide
  Antisense strand to SEQ ID NO: 2145590
acuuuagguaaguuacaaa

SEQ ID NO: 2145592 - RNA, 19 nt, Artificial Sequence
  Description of Artificial Sequence: Synthetic oligonucleotide
  Sense strand starting at position 1943 of SEQ ID NO: 1882762
ugauaaaggugucccugaa

SEQ ID NO: 2145593 - RNA, 19 nt, Artificial Sequence
  Description of Artificial Sequence: Synthetic oligonucleotide
  Antisense strand to SEQ ID NO: 2145592
uucagggacaccuuuauca

SEQ ID NO: 2145594 - RNA, 19 nt, Artificial Sequence
  Description of Artificial Sequence: Synthetic oligonucleotide
  Sense strand starting at position 1947 of SEQ ID NO: 1882762
aaaggugucccugaaucca

SEQ ID NO: 2145595 - RNA, 19 nt, Artificial Sequence
  Description of Artificial Sequence: Synthetic oligonucleotide
  Antisense strand to SEQ ID NO: 2145594
uggauucagggacaccuuu

SEQ ID NO: 2145596 - RNA, 19 nt, Artificial Sequence
  Description of Artificial Sequence: Synthetic oligonucleotide
  Sense strand starting at position 2373 of SEQ ID NO: 1882762
gauagcaaguccuuauuga

SEQ ID NO: 2145597 - RNA, 19 nt, Artificial Sequence
  Description of Artificial Sequence: Synthetic oligonucleotide
  Antisense strand to SEQ ID NO: 2145596
ucaauaaggacuugcuauc

SEQ ID NO: 2145598 - RNA, 19 nt, Artificial Sequence
  Description of Artificial Sequence: Synthetic oligonucleotide
  Sense strand starting at position 2374 of SEQ ID NO: 1882762
auagcaaguccuuauugag

SEQ ID NO: 2145599 - RNA, 19 nt, Artificial Sequence
  Description of Artificial Sequence: Synthetic oligonucleotide
  Antisense strand to SEQ ID NO: 2145598
cucaauaaggacuugcuau

SEQ ID NO: 2145600 - RNA, 19 nt, Artificial Sequence
  Description of Artificial Sequence: Synthetic oligonucleotide
  Sense strand starting at position 2380 of SEQ ID NO: 1882762
aguccuuauugagucauga

SEQ ID NO: 2145601 - RNA, 19 nt, Artificial Sequence
  Description of Artificial Sequence: Synthetic oligonucleotide
  Antisense strand to SEQ ID NO: 2145600
ucaugacucaauaaggacu

SEQ ID NO: 2145602 - RNA, 19 nt, Artificial Sequence
  Description of Artificial Sequence: Synthetic oligonucleotide
  Sense strand starting at position 2427 of SEQ ID NO: 1882762
uuauaacuugaaugaguca

SEQ ID NO: 2145603 - RNA, 19 nt, Artificial Sequence
  Description of Artificial Sequence: Synthetic oligonucleotide
  Antisense strand to SEQ ID NO: 2145602
ugacucauucaaguuauaa

SEQ ID NO: 2145604 - RNA, 19 nt, Artificial Sequence
  Description of Artificial Sequence: Synthetic oligonucleotide
  Sense strand starting at position 2496 of SEQ ID NO: 1882762
aagagauugcaaggguaau

SEQ ID NO: 2145605 - RNA, 19 nt, Artificial Sequence
  Description of Artificial Sequence: Synthetic oligonucleotide
  Antisense strand to SEQ ID NO: 2145604
auuacccuugcaaucucuu

SEQ ID NO: 2145606 - RNA, 19 nt, Artificial Sequence
  Description of Artificial Sequence: Synthetic oligonucleotide
  Sense strand starting at position 2497 of SEQ ID NO: 1882762
agagauugcaaggguaaua

SEQ ID NO: 2145607 - RNA, 19 nt, Artificial Sequence
  Description of Artificial Sequence: Synthetic oligonucleotide
  Antisense strand to SEQ ID NO: 2145606
uauuacccuugcaaucucu

SEQ ID NO: 2145608 - RNA, 19 nt, Artificial Sequence
  Description of Artificial Sequence: Synthetic oligonucleotide
  Sense strand starting at position 2823 of SEQ ID NO: 1882762
uaaugagauguuugauguu

SEQ ID NO: 2145609 - RNA, 19 nt, Artificial Sequence
  Description of Artificial Sequence: Synthetic oligonucleotide
  Antisense strand to SEQ ID NO: 2145608
aacaucaaacaucucauua

SEQ ID NO: 2145610 - RNA, 19 nt, Artificial Sequence
  Description of Artificial Sequence: Synthetic oligonucleotide
  Sense strand starting at position 2898 of SEQ ID NO: 1882762
guucucugucuguaaccaa

SEQ ID NO: 2145611 - RNA, 19 nt, Artificial Sequence
  Description of Artificial Sequence: Synthetic oligonucleotide
  Antisense strand to SEQ ID NO: 2145610
uugguuacagacagagaac

SEQ ID NO: 2145612 - RNA, 19 nt, Artificial Sequence
  Description of Artificial Sequence: Synthetic oligonucleotide
  Sense strand starting at position 2901 of SEQ ID NO: 1882762
cucugucuguaaccaaaga

SEQ ID NO: 2145613 - RNA, 19 nt, Artificial Sequence
  Description of Artificial Sequence: Synthetic oligonucleotide
  Antisense strand to SEQ ID NO: 2145612
ucuuugguuacagacagag

SEQ ID NO: 2145614 - RNA, 19 nt, Artificial Sequence
  Description of Artificial Sequence: Synthetic oligonucleotide
  Sense strand starting at position 2927 of SEQ ID NO: 1882762
ucaucacccugguuagaca

SEQ ID NO: 2145615 - RNA, 19 nt, Artificial Sequence
  Description of Artificial Sequence: Synthetic oligonucleotide
  Antisense strand to SEQ ID NO: 2145614
ugucuaaccagggugauga

SEQ ID NO: 2145616 - RNA, 19 nt, Artificial Sequence
  Description of Artificial Sequence: Synthetic oligonucleotide
  Sense strand starting at position 3025 of SEQ ID NO: 1882762
uguguuuggaguuacuaca

SEQ ID NO: 2145617 - RNA, 19 nt, Artificial Sequence
  Description of Artificial Sequence: Synthetic oligonucleotide
  Antisense strand to SEQ ID NO: 2145616
uguaguaacuccaaacaca

SEQ ID NO: 2145618 - RNA, 19 nt, Artificial Sequence
  Description of Artificial Sequence: Synthetic oligonucleotide
  Sense strand starting at position 3048 of SEQ ID NO: 1882762
uuggucaucagugaaugau

SEQ ID NO: 2145619 - RNA, 19 nt, Artificial Sequence
  Description of Artificial Sequence: Synthetic oligonucleotide
  Antisense strand to SEQ ID NO: 2145618
aucauucacugaugaccaa

SEQ ID NO: 2145620 - RNA, 19 nt, Artificial Sequence
  Description of Artificial Sequence: Synthetic oligonucleotide
  Sense strand starting at position 3051 of SEQ ID NO: 1882762
gucaucagugaaugaugau

SEQ ID NO: 2145621 - RNA, 19 nt, Artificial Sequence
  Description of Artificial Sequence: Synthetic oligonucleotide
  Antisense strand to SEQ ID NO: 2145620
aucaucauucacugaugac

SEQ ID NO: 2145622 - RNA, 19 nt, Artificial Sequence
  Description of Artificial Sequence: Synthetic oligonucleotide
  Sense strand starting at position 3075 of SEQ ID NO: 1882762
uuuagaaagucucuguaag

SEQ ID NO: 2145623 - RNA, 19 nt, Artificial Sequence
  Description of Artificial Sequence: Synthetic oligonucleotide
  Antisense strand to SEQ ID NO: 2145622
cuuacagagacuuucuaaa

SEQ ID NO: 2145624 - RNA, 19 nt, Artificial Sequence
  Description of Artificial Sequence: Synthetic oligonucleotide
  Sense strand starting at position 3076 of SEQ ID NO: 1882762
uuagaaagucucuguaagg

SEQ ID NO: 2145625 - RNA, 19 nt, Artificial Sequence
  Description of Artificial Sequence: Synthetic oligonucleotide
  Antisense strand to SEQ ID NO: 2145624
ccuuacagagacuuucuaa

SEQ ID NO: 2145626 - RNA, 19 nt, Artificial Sequence
  Description of Artificial Sequence: Synthetic oligonucleotide
  Sense strand starting at position 3107 of SEQ ID NO: 1882762
cccugaagauguguaaagu

SEQ ID NO: 2145627 - RNA, 19 nt, Artificial Sequence
  Description of Artificial Sequence: Synthetic oligonucleotide
  Antisense strand to SEQ ID NO: 2145626
acuuuacacaucuucaggg

SEQ ID NO: 2145628 - RNA, 19 nt, Artificial Sequence
  Description of Artificial Sequence: Synthetic oligonucleotide
  Sense strand starting at position 3108 of SEQ ID NO: 1882762
ccugaagauguguaaaguc

SEQ ID NO: 2145629 - RNA, 19 nt, Artificial Sequence
  Description of Artificial Sequence: Synthetic oligonucleotide
  Antisense strand to SEQ ID NO: 2145628
gacuuuacacaucuucagg

SEQ ID NO: 2145630 - RNA, 19 nt, Artificial Sequence
  Description of Artificial Sequence: Synthetic oligonucleotide
  Sense strand starting at position 3136 of SEQ ID NO: 1882762
guuugagcauucuuaagga

SEQ ID NO: 2145631 - RNA, 19 nt, Artificial Sequence
  Description of Artificial Sequence: Synthetic oligonucleotide
  Antisense strand to SEQ ID NO: 2145630
uccuuaagaaugcucaaac

SEQ ID NO: 2145632 - RNA, 19 nt, Artificial Sequence
  Description of Artificial Sequence: Synthetic oligonucleotide
  Sense strand starting at position 3202 of SEQ ID NO: 1882762
guucuauagguuugauauu

SEQ ID NO: 2145633 - RNA, 19 nt, Artificial Sequence
  Description of Artificial Sequence: Synthetic oligonucleotide
  Antisense strand to SEQ ID NO: 2145632
aauaucaaaccuauagaac

SEQ ID NO: 2145634 - RNA, 19 nt, Artificial Sequence
  Description of Artificial Sequence: Synthetic oligonucleotide
  Sense strand starting at position 3213 of SEQ ID NO: 1882762
uugauauucuuuccuggaa

SEQ ID NO: 2145635 - RNA, 19 nt, Artificial Sequence
  Description of Artificial Sequence: Synthetic oligonucleotide
  Antisense strand to SEQ ID NO: 2145634
uuccaggaaagaauaucaa

SEQ ID NO: 2145636 - RNA, 19 nt, Artificial Sequence
  Description of Artificial Sequence: Synthetic oligonucleotide
  Sense strand starting at position 3214 of SEQ ID NO: 1882762
ugauauucuuuccuggaaa

SEQ ID NO: 2145637 - RNA, 19 nt, Artificial Sequence
  Description of Artificial Sequence: Synthetic oligonucleotide
  Antisense strand to SEQ ID NO: 2145636
uuuccaggaaagaauauca

SEQ ID NO: 2145638 - RNA, 19 nt, Artificial Sequence
  Description of Artificial Sequence: Synthetic oligonucleotide
  Sense strand starting at position 3333 of SEQ ID NO: 1882762
uugggaucuugacuuuagu

SEQ ID NO: 2145639 - RNA, 19 nt, Artificial Sequence
  Description of Artificial Sequence: Synthetic oligonucleotide
  Antisense strand to SEQ ID NO: 2145638
acuaaagucaagaucccaa

SEQ ID NO: 2145640 - RNA, 19 nt, Artificial Sequence
  Description of Artificial Sequence: Synthetic oligonucleotide
  Sense strand starting at position 3347 of SEQ ID NO: 1882762
uuaguccguuugucaauuu

SEQ ID NO: 2145641 - RNA, 19 nt, Artificial Sequence
  Description of Artificial Sequence: Synthetic oligonucleotide
  Antisense strand to SEQ ID NO: 2145640
aaauugacaaacggacuaa

SEQ ID NO: 2145642 - RNA, 19 nt, Artificial Sequence
  Description of Artificial Sequence: Synthetic oligonucleotide
  Sense strand starting at position 3379 of SEQ ID NO: 1882762
agagcuuagcaaugacaua

SEQ ID NO: 2145643 - RNA, 19 nt, Artificial Sequence
  Description of Artificial Sequence: Synthetic oligonucleotide
  Antisense strand to SEQ ID NO: 2145642
uaugucauugcuaagcucu

SEQ ID NO: 2145644 - RNA, 19 nt, Artificial Sequence
  Description of Artificial Sequence: Synthetic oligonucleotide
  Sense strand starting at position 3554 of SEQ ID NO: 1882762
aaagaagucccauguguau

SEQ ID NO: 2145645 - RNA, 19 nt, Artificial Sequence
  Description of Artificial Sequence: Synthetic oligonucleotide
  Antisense strand to SEQ ID NO: 2145644
auacacaugggacuucuuu

SEQ ID NO: 2145646 - RNA, 19 nt, Artificial Sequence
  Description of Artificial Sequence: Synthetic oligonucleotide
  Sense strand starting at position 3728 of SEQ ID NO: 1882762
uuauuacauguagauguga

SEQ ID NO: 2145647 - RNA, 19 nt, Artificial Sequence
  Description of Artificial Sequence: Synthetic oligonucleotide
  Antisense strand to SEQ ID NO: 2145646
ucacaucuacauguaauaa

SEQ ID NO: 2145648 - RNA, 19 nt, Artificial Sequence
  Description of Artificial Sequence: Synthetic oligonucleotide
  Sense strand starting at position 885 of SEQ ID NO: 1882763
uuggcaauuuccuacuaag

SEQ ID NO: 2145649 - RNA, 19 nt, Artificial Sequence
  Description of Artificial Sequence: Synthetic oligonucleotide
  Antisense strand to SEQ ID NO: 2145648
cuuaguaggaaauugccaa

SEQ ID NO: 2145650 - RNA, 19 nt, Artificial Sequence
  Description of Artificial Sequence: Synthetic oligonucleotide
  Sense strand starting at position 1304 of SEQ ID NO: 1882763
aaacuucuaggugaauguu

SEQ ID NO: 2145651 - RNA, 19 nt, Artificial Sequence
  Description of Artificial Sequence: Synthetic oligonucleotide
  Antisense strand to SEQ ID NO: 2145650
aacauucaccuagaaguuu

SEQ ID NO: 2145652 - RNA, 19 nt, Artificial Sequence
  Description of Artificial Sequence: Synthetic oligonucleotide
  Sense strand starting at position 1307 of SEQ ID NO: 1882763
cuucuaggugaauguuaac

SEQ ID NO: 2145653 - RNA, 19 nt, Artificial Sequence
  Description of Artificial Sequence: Synthetic oligonucleotide
  Antisense strand to SEQ ID NO: 2145652
guuaacauucaccuagaag

SEQ ID NO: 2145654 - RNA, 19 nt, Artificial Sequence
  Description of Artificial Sequence: Synthetic oligonucleotide
  Sense strand starting at position 1316 of SEQ ID NO: 1882763
gaauguuaacagcagcuua

SEQ ID NO: 2145655 - RNA, 19 nt, Artificial Sequence
  Description of Artificial Sequence: Synthetic oligonucleotide
  Antisense strand to SEQ ID NO: 2145654
uaagcugcuguuaacauuc

SEQ ID NO: 2145656 - RNA, 19 nt, Artificial Sequence
  Description of Artificial Sequence: Synthetic oligonucleotide
  Sense strand starting at position 1375 of SEQ ID NO: 1882763
cuaguaaauggaugaguaa

SEQ ID NO: 2145657 - RNA, 19 nt, Artificial Sequence
  Description of Artificial Sequence: Synthetic oligonucleotide
  Antisense strand to SEQ ID NO: 2145656
uuacucauccauuuacuag

SEQ ID NO: 2145658 - RNA, 19 nt, Artificial Sequence
  Description of Artificial Sequence: Synthetic oligonucleotide
  Sense strand starting at position 1378 of SEQ ID NO: 1882763
guaaauggaugaguaaacu

SEQ ID NO: 2145659 - RNA, 19 nt, Artificial Sequence
  Description of Artificial Sequence: Synthetic oligonucleotide
  Antisense strand to SEQ ID NO: 2145658
aguuuacucauccauuuac

SEQ ID NO: 2145660 - RNA, 19 nt, Artificial Sequence
  Description of Artificial Sequence: Synthetic oligonucleotide
  Sense strand starting at position 1460 of SEQ ID NO: 1882763
ucaaaugauuaugcuaagu

SEQ ID NO: 2145661 - RNA, 19 nt, Artificial Sequence
  Description of Artificial Sequence: Synthetic oligonucleotide
  Antisense strand to SEQ ID NO: 2145660
acuuagcauaaucauuuga

SEQ ID NO: 2145662 - RNA, 19 nt, Artificial Sequence
  Description of Artificial Sequence: Synthetic oligonucleotide
  Sense strand starting at position 1465 of SEQ ID NO: 1882763
ugauuaugcuaaguggaag

SEQ ID NO: 2145663 - RNA, 19 nt, Artificial Sequence
  Description of Artificial Sequence: Synthetic oligonucleotide
  Antisense strand to SEQ ID NO: 2145662
cuuccacuuagcauaauca

SEQ ID NO: 2145664 - RNA, 19 nt, Artificial Sequence
  Description of Artificial Sequence: Synthetic oligonucleotide
  Sense strand starting at position 1533 of SEQ ID NO: 1882763
gguaacuuguaaucuuuau

SEQ ID NO: 2145665 - RNA, 19 nt, Artificial Sequence
  Description of Artificial Sequence: Synthetic oligonucleotide
  Antisense strand to SEQ ID NO: 2145664
auaaagauuacaaguuacc

SEQ ID NO: 2145666 - RNA, 19 nt, Artificial Sequence
  Description of Artificial Sequence: Synthetic oligonucleotide
  Sense strand starting at position 1593 of SEQ ID NO: 1882763
ucuccugacgcuugagaug

SEQ ID NO: 2145667 - RNA, 19 nt, Artificial Sequence
  Description of Artificial Sequence: Synthetic oligonucleotide
  Antisense strand to SEQ ID NO: 2145666
caucucaagcgucaggaga

SEQ ID NO: 2145668 - RNA, 19 nt, Artificial Sequence
  Description of Artificial Sequence: Synthetic oligonucleotide
  Sense strand starting at position 1612 of SEQ ID NO: 1882763
agcccucuuccagagagau

SEQ ID NO: 2145669 - RNA, 19 nt, Artificial Sequence
  Description of Artificial Sequence: Synthetic oligonucleotide
  Antisense strand to SEQ ID NO: 2145668
aucucucuggaagagggcu

SEQ ID NO: 2145670 - RNA, 19 nt, Artificial Sequence
  Description of Artificial Sequence: Synthetic oligonucleotide
  Sense strand starting at position 1659 of SEQ ID NO: 1882763
uugagaauccuuggcccaa

SEQ ID NO: 2145671 - RNA, 19 nt, Artificial Sequence
  Description of Artificial Sequence: Synthetic oligonucleotide
  Antisense strand to SEQ ID NO: 2145670
uugggccaaggauucucaa

SEQ ID NO: 2145672 - RNA, 19 nt, Artificial Sequence
  Description of Artificial Sequence: Synthetic oligonucleotide
  Sense strand starting at position 1660 of SEQ ID NO: 1882763
ugagaauccuuggcccaac

SEQ ID NO: 2145673 - RNA, 19 nt, Artificial Sequence
  Description of Artificial Sequence: Synthetic oligonucleotide
  Antisense strand to SEQ ID NO: 2145672
guugggccaaggauucuca

SEQ ID NO: 2145674 - RNA, 19 nt, Artificial Sequence
  Description of Artificial Sequence: Synthetic oligonucleotide
  Sense strand starting at position 1684 of SEQ ID NO: 1882763
auguauauuugagaagcua

SEQ ID NO: 2145675 - RNA, 19 nt, Artificial Sequence
  Description of Artificial Sequence: Synthetic oligonucleotide
  Antisense strand to SEQ ID NO: 2145674
uagcuucucaaauauacau

SEQ ID NO: 2145676 - RNA, 19 nt, Artificial Sequence
  Description of Artificial Sequence: Synthetic oligonucleotide
  Sense strand starting at position 1725 of SEQ ID NO: 1882763
acaggccuuccagggaaau

SEQ ID NO: 2145677 - RNA, 19 nt, Artificial Sequence
  Description of Artificial Sequence: Synthetic oligonucleotide
  Antisense strand to SEQ ID NO: 2145676
auuucccuggaaggccugu

SEQ ID NO: 2145678 - RNA, 19 nt, Artificial Sequence
  Description of Artificial Sequence: Synthetic oligonucleotide
  Sense strand starting at position 1726 of SEQ ID NO: 1882763
caggccuuccagggaaauu

SEQ ID NO: 2145679 - RNA, 19 nt, Artificial Sequence
  Description of Artificial Sequence: Synthetic oligonucleotide
  Antisense strand to SEQ ID NO: 2145678
aauuucccuggaaggccug

SEQ ID NO: 2145680 - RNA, 19 nt, Artificial Sequence
  Description of Artificial Sequence: Synthetic oligonucleotide
  Sense strand starting at position 1800 of SEQ ID NO: 1882763
auuacaacugcugggaaga

SEQ ID NO: 2145681 - RNA, 19 nt, Artificial Sequence
  Description of Artificial Sequence: Synthetic oligonucleotide
  Antisense strand to SEQ ID NO: 2145680
ucuucccagcaguuguaau

SEQ ID NO: 2145682 - RNA, 19 nt, Artificial Sequence
  Description of Artificial Sequence: Synthetic oligonucleotide
  Sense strand starting at position 2032 of SEQ ID NO: 1882763
uucccucccugguuauaga

SEQ ID NO: 2145683 - RNA, 19 nt, Artificial Sequence
  Description of Artificial Sequence: Synthetic oligonucleotide
  Antisense strand to SEQ ID NO: 2145682
ucuauaaccagggagggaa

SEQ ID NO: 2145684 - RNA, 19 nt, Artificial Sequence
  Description of Artificial Sequence: Synthetic oligonucleotide
  Sense strand starting at position 2189 of SEQ ID NO: 1882763
guaauugguguacauggua

SEQ ID NO: 2145685 - RNA, 19 nt, Artificial Sequence
  Description of Artificial Sequence: Synthetic oligonucleotide
  Antisense strand to SEQ ID NO: 2145684
uaccauguacaccaauuac

SEQ ID NO: 2145686 - RNA, 19 nt, Artificial Sequence
  Description of Artificial Sequence: Synthetic oligonucleotide
  Sense strand starting at position 2192 of SEQ ID NO: 1882763
auugguguacaugguauaa

SEQ ID NO: 2145687 - RNA, 19 nt, Artificial Sequence
  Description of Artificial Sequence: Synthetic oligonucleotide
  Antisense strand to SEQ ID NO: 2145686
uuauaccauguacaccaau

SEQ ID NO: 2145688 - RNA, 19 nt, Artificial Sequence
  Description of Artificial Sequence: Synthetic oligonucleotide
  Sense strand starting at position 2526 of SEQ ID NO: 1882763
ggaguauacuuaccuccuu

SEQ ID NO: 2145689 - RNA, 19 nt, Artificial Sequence
  Description of Artificial Sequence: Synthetic oligonucleotide
  Antisense strand to SEQ ID NO: 2145688
aaggagguaaguauacucc

SEQ ID NO: 2145690 - RNA, 19 nt, Artificial Sequence
  Description of Artificial Sequence: Synthetic oligonucleotide
  Sense strand starting at position 2553 of SEQ ID NO: 1882763
cccaauauguuagucuuau

SEQ ID NO: 2145691 - RNA, 19 nt, Artificial Sequence
  Description of Artificial Sequence: Synthetic oligonucleotide
  Antisense strand to SEQ ID NO: 2145690
auaagacuaacauauuggg

SEQ ID NO: 2145692 - RNA, 19 nt, Artificial Sequence
  Description of Artificial Sequence: Synthetic oligonucleotide
  Sense strand starting at position 2554 of SEQ ID NO: 1882763
ccaauauguuagucuuauu

SEQ ID NO: 2145693 - RNA, 19 nt, Artificial Sequence
  Description of Artificial Sequence: Synthetic oligonucleotide
  Antisense strand to SEQ ID NO: 2145692
aauaagacuaacauauugg

SEQ ID NO: 2145694 - RNA, 19 nt, Artificial Sequence
  Description of Artificial Sequence: Synthetic oligonucleotide
  Sense strand starting at position 2565 of SEQ ID NO: 1882763
gucuuauuauuucuuagcu

SEQ ID NO: 2145695 - RNA, 19 nt, Artificial Sequence
  Description of Artificial Sequence: Synthetic oligonucleotide
  Antisense strand to SEQ ID NO: 2145694
agcuaagaaauaauaagac

SEQ ID NO: 2145696 - RNA, 19 nt, Artificial Sequence
  Description of Artificial Sequence: Synthetic oligonucleotide
  Sense strand starting at position 2684 of SEQ ID NO: 1882763
gaagaagagugacaauaaa

SEQ ID NO: 2145697 - RNA, 19 nt, Artificial Sequence
  Description of Artificial Sequence: Synthetic oligonucleotide
  Antisense strand to SEQ ID NO: 2145696
uuuauugucacucuucuuc

SEQ ID NO: 2145698 - RNA, 19 nt, Artificial Sequence
  Description of Artificial Sequence: Synthetic oligonucleotide
  Sense strand starting at position 2715 of SEQ ID NO: 1882763
uugucagguaaauguuaua

SEQ ID NO: 2145699 - RNA, 19 nt, Artificial Sequence
  Description of Artificial Sequence: Synthetic oligonucleotide
  Antisense strand to SEQ ID NO: 2145698
uauaacauuuaccugacaa

SEQ ID NO: 2145700 - RNA, 19 nt, Artificial Sequence
  Description of Artificial Sequence: Synthetic oligonucleotide
  Sense strand starting at position 2799 of SEQ ID NO: 1882763
uguauuguauaguuaagga

SEQ ID NO: 2145701 - RNA, 19 nt, Artificial Sequence
  Description of Artificial Sequence: Synthetic oligonucleotide
  Antisense strand to SEQ ID NO: 2145700
uccuuaacuauacaauaca

SEQ ID NO: 2145702 - RNA, 19 nt, Artificial Sequence
  Description of Artificial Sequence: Synthetic oligonucleotide
  Sense strand starting at position 2892 of SEQ ID NO: 1882763
ggaauuguuauaggcagaa

SEQ ID NO: 2145703 - RNA, 19 nt, Artificial Sequence
  Description of Artificial Sequence: Synthetic oligonucleotide
  Antisense strand to SEQ ID NO: 2145702
uucugccuauaacaauucc

SEQ ID NO: 2145704 - RNA, 19 nt, Artificial Sequence
  Description of Artificial Sequence: Synthetic oligonucleotide
  Sense strand starting at position 2941 of SEQ ID NO: 1882763
cuugcuugccugguguauu

SEQ ID NO: 2145705 - RNA, 19 nt, Artificial Sequence
  Description of Artificial Sequence: Synthetic oligonucleotide
  Antisense strand to SEQ ID NO: 2145704
aauacaccaggcaagcaag

SEQ ID NO: 2145706 - RNA, 19 nt, Artificial Sequence
  Description of Artificial Sequence: Synthetic oligonucleotide
  Sense strand starting at position 2952 of SEQ ID NO: 1882763
gguguauuccaggaauagc

SEQ ID NO: 2145707 - RNA, 19 nt, Artificial Sequence
  Description of Artificial Sequence: Synthetic oligonucleotide
  Antisense strand to SEQ ID NO: 2145706
gcuauuccuggaauacacc

SEQ ID NO: 2145708 - RNA, 19 nt, Artificial Sequence
  Description of Artificial Sequence: Synthetic oligonucleotide
  Sense strand starting at position 3095 of SEQ ID NO: 1882763
ugguaaagaccuuagcuuu

SEQ ID NO: 2145709 - RNA, 19 nt, Artificial Sequence
  Description of Artificial Sequence: Synthetic oligonucleotide
  Antisense strand to SEQ ID NO: 2145708
aaagcuaaggucuuuacca

SEQ ID NO: 2145710 - RNA, 19 nt, Artificial Sequence
  Description of Artificial Sequence: Synthetic oligonucleotide
  Sense strand starting at position 3152 of SEQ ID NO: 1882763
agaguaguaccaugaucug

SEQ ID NO: 2145711 - RNA, 19 nt, Artificial Sequence
  Description of Artificial Sequence: Synthetic oligonucleotide
  Antisense strand to SEQ ID NO: 2145710
cagaucaugguacuacucu

SEQ ID NO: 2145712 - RNA, 19 nt, Artificial Sequence
  Description of Artificial Sequence: Synthetic oligonucleotide
  Sense strand starting at position 3163 of SEQ ID NO: 1882763
augaucugacgcuguauuu

SEQ ID NO: 2145713 - RNA, 19 nt, Artificial Sequence
  Description of Artificial Sequence: Synthetic oligonucleotide
  Antisense strand to SEQ ID NO: 2145712
aaauacagcgucagaucau

SEQ ID NO: 2145714 - RNA, 19 nt, Artificial Sequence
  Description of Artificial Sequence: Synthetic oligonucleotide
  Sense strand starting at position 3272 of SEQ ID NO: 1882763
gggaaauuauuugaccaca

SEQ ID NO: 2145715 - RNA, 19 nt, Artificial Sequence
  Description of Artificial Sequence: Synthetic oligonucleotide
  Antisense strand to SEQ ID NO: 2145714
uguggucaaauaauuuccc

SEQ ID NO: 2145716 - RNA, 19 nt, Artificial Sequence
  Description of Artificial Sequence: Synthetic oligonucleotide
  Sense strand starting at position 3286 of SEQ ID NO: 1882763
ccacaagcauugucuaaag

SEQ ID NO: 2145717 - RNA, 19 nt, Artificial Sequence
  Description of Artificial Sequence: Synthetic oligonucleotide
  Antisense strand to SEQ ID NO: 2145716
cuuuagacaaugcuugugg

SEQ ID NO: 2145718 - RNA, 19 nt, Artificial Sequence
  Description of Artificial Sequence: Synthetic oligonucleotide
  Sense strand starting at position 3288 of SEQ ID NO: 1882763
acaagcauugucuaaagau

SEQ ID NO: 2145719 - RNA, 19 nt, Artificial Sequence
  Description of Artificial Sequence: Synthetic oligonucleotide
  Antisense strand to SEQ ID NO: 2145718
aucuuuagacaaugcuugu

SEQ ID NO: 2145720 - RNA, 19 nt, Artificial Sequence
  Description of Artificial Sequence: Synthetic oligonucleotide
  Sense strand starting at position 3361 of SEQ ID NO: 1882763
gaauguuagaaaugugguu

SEQ ID NO: 2145721 - RNA, 19 nt, Artificial Sequence
  Description of Artificial Sequence: Synthetic oligonucleotide
  Antisense strand to SEQ ID NO: 2145720
aaccacauuucuaacauuc

SEQ ID NO: 2145722 - RNA, 19 nt, Artificial Sequence
  Description of Artificial Sequence: Synthetic oligonucleotide
  Sense strand starting at position 3363 of SEQ ID NO: 1882763
auguuagaaaugugguucu

SEQ ID NO: 2145723 - RNA, 19 nt, Artificial Sequence
  Description of Artificial Sequence: Synthetic oligonucleotide
  Antisense strand to SEQ ID NO: 2145722
agaaccacauuucuaacau

SEQ ID NO: 2145724 - RNA, 19 nt, Artificial Sequence
  Description of Artificial Sequence: Synthetic oligonucleotide
  Sense strand starting at position 3366 of SEQ ID NO: 1882763
uuagaaaugugguucuaaa

SEQ ID NO: 2145725 - RNA, 19 nt, Artificial Sequence
  Description of Artificial Sequence: Synthetic oligonucleotide
  Antisense strand to SEQ ID NO: 2145724
uuuagaaccacauuucuaa

SEQ ID NO: 2145726 - RNA, 19 nt, Artificial Sequence
  Description of Artificial Sequence: Synthetic oligonucleotide
  Sense strand starting at position 3392 of SEQ ID NO: 1882763
auauaauguuauccuguga

SEQ ID NO: 2145727 - RNA, 19 nt, Artificial Sequence
  Description of Artificial Sequence: Synthetic oligonucleotide
  Antisense strand to SEQ ID NO: 2145726
ucacaggauaacauuauau

SEQ ID NO: 2145728 - RNA, 19 nt, Artificial Sequence
  Description of Artificial Sequence: Synthetic oligonucleotide
  Sense strand starting at position 312 of SEQ ID NO: 1882764
ucccaagggucagaaauuu

SEQ ID NO: 2145729 - RNA, 19 nt, Artificial Sequence
  Description of Artificial Sequence: Synthetic oligonucleotide
  Antisense strand to SEQ ID NO: 2145728
aaauuucugacccuuggga

SEQ ID NO: 2145730 - RNA, 19 nt, Artificial Sequence
  Description of Artificial Sequence: Synthetic oligonucleotide
  Sense strand starting at position 320 of SEQ ID NO: 1882764
gucagaaauuuggagguua

SEQ ID NO: 2145731 - RNA, 19 nt, Artificial Sequence
  Description of Artificial Sequence: Synthetic oligonucleotide
  Antisense strand to SEQ ID NO: 2145730
uaaccuccaaauuucugac

SEQ ID NO: 2145732 - RNA, 19 nt, Artificial Sequence
  Description of Artificial Sequence: Synthetic oligonucleotide
  Sense strand starting at position 489 of SEQ ID NO: 1882764
gaguuacuuugaucauaga

SEQ ID NO: 2145733 - RNA, 19 nt, Artificial Sequence
  Description of Artificial Sequence: Synthetic oligonucleotide
  Antisense strand to SEQ ID NO: 2145732
ucuaugaucaaaguaacuc

SEQ ID NO: 2145734 - RNA, 19 nt, Artificial Sequence
  Description of Artificial Sequence: Synthetic oligonucleotide
  Sense strand starting at position 492 of SEQ ID NO: 1882764
uuacuuugaucauagagga

SEQ ID NO: 2145735 - RNA, 19 nt, Artificial Sequence
  Description of Artificial Sequence: Synthetic oligonucleotide
  Antisense strand to SEQ ID NO: 2145734
uccucuaugaucaaaguaa

SEQ ID NO: 2145736 - RNA, 19 nt, Artificial Sequence
  Description of Artificial Sequence: Synthetic oligonucleotide
  Sense strand starting at position 566 of SEQ ID NO: 1882764
gaaagcuaugggugccuga

SEQ ID NO: 2145737 - RNA, 19 nt, Artificial Sequence
  Description of Artificial Sequence: Synthetic oligonucleotide
  Antisense strand to SEQ ID NO: 2145736
ucaggcacccauagcuuuc

SEQ ID NO: 2145738 - RNA, 19 nt, Artificial Sequence
  Description of Artificial Sequence: Synthetic oligonucleotide
  Sense strand starting at position 612 of SEQ ID NO: 1882764
gcuacuagucuagaggaca

SEQ ID NO: 2145739 - RNA, 19 nt, Artificial Sequence
  Description of Artificial Sequence: Synthetic oligonucleotide
  Antisense strand to SEQ ID NO: 2145738
uguccucuagacuaguagc

SEQ ID NO: 2145740 - RNA, 19 nt, Artificial Sequence
  Description of Artificial Sequence: Synthetic oligonucleotide
  Sense strand starting at position 649 of SEQ ID NO: 1882764
aauucucagugagggaaga

SEQ ID NO: 2145741 - RNA, 19 nt, Artificial Sequence
  Description of Artificial Sequence: Synthetic oligonucleotide
  Antisense strand to SEQ ID NO: 2145740
ucuucccucacugagaauu

SEQ ID NO: 2145742 - RNA, 19 nt, Artificial Sequence
  Description of Artificial Sequence: Synthetic oligonucleotide
  Sense strand starting at position 745 of SEQ ID NO: 1882764
gccauaccaguucgucuau

SEQ ID NO: 2145743 - RNA, 19 nt, Artificial Sequence
  Description of Artificial Sequence: Synthetic oligonucleotide
  Antisense strand to SEQ ID NO: 2145742
auagacgaacugguauggc

SEQ ID NO: 2145744 - RNA, 19 nt, Artificial Sequence
  Description of Artificial Sequence: Synthetic oligonucleotide
  Sense strand starting at position 877 of SEQ ID NO: 1882764
ugcgguauuugauggagag

SEQ ID NO: 2145745 - RNA, 19 nt, Artificial Sequence
  Description of Artificial Sequence: Synthetic oligonucleotide
  Antisense strand to SEQ ID NO: 2145744
cucuccaucaaauaccgca

SEQ ID NO: 2145746 - RNA, 19 nt, Artificial Sequence
  Description of Artificial Sequence: Synthetic oligonucleotide
  Sense strand starting at position 891 of SEQ ID NO: 1882764
gagagaguuucaguuuggu

SEQ ID NO: 2145747 - RNA, 19 nt, Artificial Sequence
  Description of Artificial Sequence: Synthetic oligonucleotide
  Antisense strand to SEQ ID NO: 2145746
accaaacugaaacucucuc

SEQ ID NO: 2145748 - RNA, 19 nt, Artificial Sequence
  Description of Artificial Sequence: Synthetic oligonucleotide
  Sense strand starting at position 946 of SEQ ID NO: 1882764
uuguguaggugccuucuua

SEQ ID NO: 2145749 - RNA, 19 nt, Artificial Sequence
  Description of Artificial Sequence: Synthetic oligonucleotide
  Antisense strand to SEQ ID NO: 2145748
uaagaaggcaccuacacaa

SEQ ID NO: 2145750 - RNA, 19 nt, Artificial Sequence
  Description of Artificial Sequence: Synthetic oligonucleotide
  Sense strand starting at position 950 of SEQ ID NO: 1882764
guaggugccuucuuaagau

SEQ ID NO: 2145751 - RNA, 19 nt, Artificial Sequence
  Description of Artificial Sequence: Synthetic oligonucleotide
  Antisense strand to SEQ ID NO: 2145750
aucuuaagaaggcaccuac

SEQ ID NO: 2145752 - RNA, 19 nt, Artificial Sequence
  Description of Artificial Sequence: Synthetic oligonucleotide
  Sense strand starting at position 954 of SEQ ID NO: 1882764
gugccuucuuaagauggga

SEQ ID NO: 2145753 - RNA, 19 nt, Artificial Sequence
  Description of Artificial Sequence: Synthetic oligonucleotide
  Antisense strand to SEQ ID NO: 2145752
ucccaucuuaagaaggcac

SEQ ID NO: 2145754 - RNA, 19 nt, Artificial Sequence
  Description of Artificial Sequence: Synthetic oligonucleotide
  Sense strand starting at position 959 of SEQ ID NO: 1882764
uucuuaagaugggaaauau

SEQ ID NO: 2145755 - RNA, 19 nt, Artificial Sequence
  Description of Artificial Sequence: Synthetic oligonucleotide
  Antisense strand to SEQ ID NO: 2145754
auauuucccaucuuaagaa

SEQ ID NO: 2145756 - RNA, 19 nt, Artificial Sequence
  Description of Artificial Sequence: Synthetic oligonucleotide
  Sense strand starting at position 1104 of SEQ ID NO: 1882764
ggguuauuauggccggacu

SEQ ID NO: 2145757 - RNA, 19 nt, Artificial Sequence
  Description of Artificial Sequence: Synthetic oligonucleotide
  Antisense strand to SEQ ID NO: 2145756
aguccggccauaauaaccc

SEQ ID NO: 2145758 - RNA, 19 nt, Artificial Sequence
  Description of Artificial Sequence: Synthetic oligonucleotide
  Sense strand starting at position 1106 of SEQ ID NO: 1882764
guuauuauggccggacugu

SEQ ID NO: 2145759 - RNA, 19 nt, Artificial Sequence
  Description of Artificial Sequence: Synthetic oligonucleotide
  Antisense strand to SEQ ID NO: 2145758
acaguccggccauaauaac

SEQ ID NO: 2145760 - RNA, 19 nt, Artificial Sequence
  Description of Artificial Sequence: Synthetic oligonucleotide
  Sense strand starting at position 1161 of SEQ ID NO: 1882764
cgguguguucucuuagcag

SEQ ID NO: 2145761 - RNA, 19 nt, Artificial Sequence
  Description of Artificial Sequence: Synthetic oligonucleotide
  Antisense strand to SEQ ID NO: 2145760
cugcuaagagaacacaccg

SEQ ID NO: 2145762 - RNA, 19 nt, Artificial Sequence
  Description of Artificial Sequence: Synthetic oligonucleotide
  Sense strand starting at position 1212 of SEQ ID NO: 1882764
ugccaagagguggguuauu

SEQ ID NO: 2145763 - RNA, 19 nt, Artificial Sequence
  Description of Artificial Sequence: Synthetic oligonucleotide
  Antisense strand to SEQ ID NO: 2145762
aauaacccaccucuuggca

SEQ ID NO: 2145764 - RNA, 19 nt, Artificial Sequence
  Description of Artificial Sequence: Synthetic oligonucleotide
  Sense strand starting at position 1356 of SEQ ID NO: 1882764
ggcgcuucucgagagccaa

SEQ ID NO: 2145765 - RNA, 19 nt, Artificial Sequence
  Description of Artificial Sequence: Synthetic oligonucleotide
  Antisense strand to SEQ ID NO: 2145764
uuggcucucgagaagcgcc

SEQ ID NO: 2145766 - RNA, 19 nt, Artificial Sequence
  Description of Artificial Sequence: Synthetic oligonucleotide
  Sense strand starting at position 1510 of SEQ ID NO: 1882764
aggccaaaucucgggauua

SEQ ID NO: 2145767 - RNA, 19 nt, Artificial Sequence
  Description of Artificial Sequence: Synthetic oligonucleotide
  Antisense strand to SEQ ID NO: 2145766
uaaucccgagauuuggccu

SEQ ID NO: 2145768 - RNA, 19 nt, Artificial Sequence
  Description of Artificial Sequence: Synthetic oligonucleotide
  Sense strand starting at position 1512 of SEQ ID NO: 1882764
gccaaaucucgggauuauc

SEQ ID NO: 2145769 - RNA, 19 nt, Artificial Sequence
  Description of Artificial Sequence: Synthetic oligonucleotide
  Antisense strand to SEQ ID NO: 2145768
gauaaucccgagauuuggc

SEQ ID NO: 2145770 - RNA, 19 nt, Artificial Sequence
  Description of Artificial Sequence: Synthetic oligonucleotide
  Sense strand starting at position 2032 of SEQ ID NO: 1882764
cuccauuuguuggcaguua

SEQ ID NO: 2145771 - RNA, 19 nt, Artificial Sequence
  Description of Artificial Sequence: Synthetic oligonucleotide
  Antisense strand to SEQ ID NO: 2145770
uaacugccaacaaauggag

SEQ ID NO: 2145772 - RNA, 19 nt, Artificial Sequence
  Description of Artificial Sequence: Synthetic oligonucleotide
  Sense strand starting at position 2182 of SEQ ID NO: 1882764
ugaguugccucacuugaag

SEQ ID NO: 2145773 - RNA, 19 nt, Artificial Sequence
  Description of Artificial Sequence: Synthetic oligonucleotide
  Antisense strand to SEQ ID NO: 2145772
cuucaagugaggcaacuca

SEQ ID NO: 2145774 - RNA, 19 nt, Artificial Sequence
  Description of Artificial Sequence: Synthetic oligonucleotide
  Sense strand starting at position 2419 of SEQ ID NO: 1882764
ugccucauccaggauuagu

SEQ ID NO: 2145775 - RNA, 19 nt, Artificial Sequence
  Description of Artificial Sequence: Synthetic oligonucleotide
  Antisense strand to SEQ ID NO: 2145774
acuaauccuggaugaggca

SEQ ID NO: 2145776 - RNA, 19 nt, Artificial Sequence
  Description of Artificial Sequence: Synthetic oligonucleotide
  Sense strand starting at position 2424 of SEQ ID NO: 1882764
cauccaggauuaguggaua

SEQ ID NO: 2145777 - RNA, 19 nt, Artificial Sequence
  Description of Artificial Sequence: Synthetic oligonucleotide
  Antisense strand to SEQ ID NO: 2145776
uauccacuaauccuggaug

SEQ ID NO: 2145778 - RNA, 19 nt, Artificial Sequence
  Description of Artificial Sequence: Synthetic oligonucleotide
  Sense strand starting at position 2497 of SEQ ID NO: 1882764
acuauaggcagguggaaau

SEQ ID NO: 2145779 - RNA, 19 nt, Artificial Sequence
  Description of Artificial Sequence: Synthetic oligonucleotide
  Antisense strand to SEQ ID NO: 2145778
auuuccaccugccuauagu

SEQ ID NO: 2145780 - RNA, 19 nt, Artificial Sequence
  Description of Artificial Sequence: Synthetic oligonucleotide
  Sense strand starting at position 2511 of SEQ ID NO: 1882764
gaaauaagaaugcggguaa

SEQ ID NO: 2145781 - RNA, 19 nt, Artificial Sequence
  Description of Artificial Sequence: Synthetic oligonucleotide
  Antisense strand to SEQ ID NO: 2145780
uuacccgcauucuuauuuc

SEQ ID NO: 2145782 - RNA, 19 nt, Artificial Sequence
  Description of Artificial Sequence: Synthetic oligonucleotide
  Sense strand starting at position 2515 of SEQ ID NO: 1882764
uaagaaugcggguaagaug

SEQ ID NO: 2145783 - RNA, 19 nt, Artificial Sequence
  Description of Artificial Sequence: Synthetic oligonucleotide
  Antisense strand to SEQ ID NO: 2145782
caucuuacccgcauucuua

SEQ ID NO: 2145784 - RNA, 19 nt, Artificial Sequence
  Description of Artificial Sequence: Synthetic oligonucleotide
  Sense strand starting at position 2574 of SEQ ID NO: 1882764
gggaacuaaugggaauuaa

SEQ ID NO: 2145785 - RNA, 19 nt, Artificial Sequence
  Description of Artificial Sequence: Synthetic oligonucleotide
  Antisense strand to SEQ ID NO: 2145784
uuaauucccauuaguuccc

SEQ ID NO: 2145786 - RNA, 19 nt, Artificial Sequence
  Description of Artificial Sequence: Synthetic oligonucleotide
  Sense strand starting at position 2915 of SEQ ID NO: 1882764
ggauauugaagucgagugu

SEQ ID NO: 2145787 - RNA, 19 nt, Artificial Sequence
  Description of Artificial Sequence: Synthetic oligonucleotide
  Antisense strand to SEQ ID NO: 2145786
acacucgacuucaauaucc

SEQ ID NO: 2145788 - RNA, 19 nt, Artificial Sequence
  Description of Artificial Sequence: Synthetic oligonucleotide
  Sense strand starting at position 2947 of SEQ ID NO: 1882764
cagcgagauugguugucca

SEQ ID NO: 2145789 - RNA, 19 nt, Artificial Sequence
  Description of Artificial Sequence: Synthetic oligonucleotide
  Antisense strand to SEQ ID NO: 2145788
uggacaaccaaucucgcug

SEQ ID NO: 2145790 - RNA, 19 nt, Artificial Sequence
  Description of Artificial Sequence: Synthetic oligonucleotide
  Sense strand starting at position 2951 of SEQ ID NO: 1882764
gagauugguuguccaaggu

SEQ ID NO: 2145791 - RNA, 19 nt, Artificial Sequence
  Description of Artificial Sequence: Synthetic oligonucleotide
  Antisense strand to SEQ ID NO: 2145790
accuuggacaaccaaucuc

SEQ ID NO: 2145792 - RNA, 19 nt, Artificial Sequence
  Description of Artificial Sequence: Synthetic oligonucleotide
  Sense strand starting at position 2955 of SEQ ID NO: 1882764
uugguuguccaagguauau

SEQ ID NO: 2145793 - RNA, 19 nt, Artificial Sequence
  Description of Artificial Sequence: Synthetic oligonucleotide
  Antisense strand to SEQ ID NO: 2145792
auauaccuuggacaaccaa

SEQ ID NO: 2145794 - RNA, 19 nt, Artificial Sequence
  Description of Artificial Sequence: Synthetic oligonucleotide
  Sense strand starting at position 2968 of SEQ ID NO: 1882764
guauauugcagccaggcaa

SEQ ID NO: 2145795 - RNA, 19 nt, Artificial Sequence
  Description of Artificial Sequence: Synthetic oligonucleotide
  Antisense strand to SEQ ID NO: 2145794
uugccuggcugcaauauac

SEQ ID NO: 2145796 - RNA, 19 nt, Artificial Sequence
  Description of Artificial Sequence: Synthetic oligonucleotide
  Sense strand starting at position 3017 of SEQ ID NO: 1882764
uuaaaucuugauugaguug

SEQ ID NO: 2145797 - RNA, 19 nt, Artificial Sequence
  Description of Artificial Sequence: Synthetic oligonucleotide
  Antisense strand to SEQ ID NO: 2145796
caacucaaucaagauuuaa

SEQ ID NO: 2145798 - RNA, 19 nt, Artificial Sequence
  Description of Artificial Sequence: Synthetic oligonucleotide
  Sense strand starting at position 3020 of SEQ ID NO: 1882764
aaucuugauugaguuguaa

SEQ ID NO: 2145799 - RNA, 19 nt, Artificial Sequence
  Description of Artificial Sequence: Synthetic oligonucleotide
  Antisense strand to SEQ ID NO: 2145798
uuacaacucaaucaagauu

SEQ ID NO: 2145800 - RNA, 19 nt, Artificial Sequence
  Description of Artificial Sequence: Synthetic oligonucleotide
  Sense strand starting at position 3022 of SEQ ID NO: 1882764
ucuugauugaguuguaaag

SEQ ID NO: 2145801 - RNA, 19 nt, Artificial Sequence
  Description of Artificial Sequence: Synthetic oligonucleotide
  Antisense strand to SEQ ID NO: 2145800
cuuuacaacucaaucaaga

SEQ ID NO: 2145802 - RNA, 19 nt, Artificial Sequence
  Description of Artificial Sequence: Synthetic oligonucleotide
  Sense strand starting at position 3211 of SEQ ID NO: 1882764
ggacgucucugagucguca

SEQ ID NO: 2145803 - RNA, 19 nt, Artificial Sequence
  Description of Artificial Sequence: Synthetic oligonucleotide
  Antisense strand to SEQ ID NO: 2145802
ugacgacucagagacgucc

SEQ ID NO: 2145804 - RNA, 19 nt, Artificial Sequence
  Description of Artificial Sequence: Synthetic oligonucleotide
  Sense strand starting at position 3220 of SEQ ID NO: 1882764
ugagucgucagugccgauu

SEQ ID NO: 2145805 - RNA, 19 nt, Artificial Sequence
  Description of Artificial Sequence: Synthetic oligonucleotide
  Antisense strand to SEQ ID NO: 2145804
aaucggcacugacgacuca

SEQ ID NO: 2145806 - RNA, 19 nt, Artificial Sequence
  Description of Artificial Sequence: Synthetic oligonucleotide
  Sense strand starting at position 3285 of SEQ ID NO: 1882764
cuggccuucccuugaagaa

SEQ ID NO: 2145807 - RNA, 19 nt, Artificial Sequence
  Description of Artificial Sequence: Synthetic oligonucleotide
  Antisense strand to SEQ ID NO: 2145806
uucuucaagggaaggccag

SEQ ID NO: 2145808 - RNA, 19 nt, Artificial Sequence
  Description of Artificial Sequence: Synthetic oligonucleotide
  Sense strand starting at position 68 of SEQ ID NO: 1882765
uauugugauuguuuaggaa

SEQ ID NO: 2145809 - RNA, 19 nt, Artificial Sequence
  Description of Artificial Sequence: Synthetic oligonucleotide
  Antisense strand to SEQ ID NO: 2145808
uuccuaaacaaucacaaua

SEQ ID NO: 2145810 - RNA, 19 nt, Artificial Sequence
  Description of Artificial Sequence: Synthetic oligonucleotide
  Sense strand starting at position 198 of SEQ ID NO: 1882765
uacucaggugucugaauca

SEQ ID NO: 2145811 - RNA, 19 nt, Artificial Sequence
  Description of Artificial Sequence: Synthetic oligonucleotide
  Antisense strand to SEQ ID NO: 2145810
ugauucagacaccugagua

SEQ ID NO: 2145812 - RNA, 19 nt, Artificial Sequence
  Description of Artificial Sequence: Synthetic oligonucleotide
  Sense strand starting at position 428 of SEQ ID NO: 1882765
uuuguuuggguggaguauu

SEQ ID NO: 2145813 - RNA, 19 nt, Artificial Sequence
  Description of Artificial Sequence: Synthetic oligonucleotide
  Antisense strand to SEQ ID NO: 2145812
aauacuccacccaaacaaa

SEQ ID NO: 2145814 - RNA, 19 nt, Artificial Sequence
  Description of Artificial Sequence: Synthetic oligonucleotide
  Sense strand starting at position 438 of SEQ ID NO: 1882765
uggaguauuucugauaauu

SEQ ID NO: 2145815 - RNA, 19 nt, Artificial Sequence
  Description of Artificial Sequence: Synthetic oligonucleotide
  Antisense strand to SEQ ID NO: 2145814
aauuaucagaaauacucca

SEQ ID NO: 2145816 - RNA, 19 nt, Artificial Sequence
  Description of Artificial Sequence: Synthetic oligonucleotide
  Sense strand starting at position 508 of SEQ ID NO: 1882765
aagaguauguuaguuauac

SEQ ID NO: 2145817 - RNA, 19 nt, Artificial Sequence
  Description of Artificial Sequence: Synthetic oligonucleotide
  Antisense strand to SEQ ID NO: 2145816
guauaacuaacauacucuu

SEQ ID NO: 2145818 - RNA, 19 nt, Artificial Sequence
  Description of Artificial Sequence: Synthetic oligonucleotide
  Sense strand starting at position 509 of SEQ ID NO: 1882765
agaguauguuaguuauaca

SEQ ID NO: 2145819 - RNA, 19 nt, Artificial Sequence
  Description of Artificial Sequence: Synthetic oligonucleotide
  Antisense strand to SEQ ID NO: 2145818
uguauaacuaacauacucu

SEQ ID NO: 2145820 - RNA, 19 nt, Artificial Sequence
  Description of Artificial Sequence: Synthetic oligonucleotide
  Sense strand starting at position 540 of SEQ ID NO: 1882765
ccaugucgucacugauuua

SEQ ID NO: 2145821 - RNA, 19 nt, Artificial Sequence
  Description of Artificial Sequence: Synthetic oligonucleotide
  Antisense strand to SEQ ID NO: 2145820
uaaaucagugacgacaugg

SEQ ID NO: 2145822 - RNA, 19 nt, Artificial Sequence
  Description of Artificial Sequence: Synthetic oligonucleotide
  Sense strand starting at position 569 of SEQ ID NO: 1882765
cagguacaguggucauuaa

SEQ ID NO: 2145823 - RNA, 19 nt, Artificial Sequence
  Description of Artificial Sequence: Synthetic oligonucleotide
  Antisense strand to SEQ ID NO: 2145822
uuaaugaccacuguaccug

SEQ ID NO: 2145824 - RNA, 19 nt, Artificial Sequence
  Description of Artificial Sequence: Synthetic oligonucleotide
  Sense strand starting at position 570 of SEQ ID NO: 1882765
agguacaguggucauuaaa

SEQ ID NO: 2145825 - RNA, 19 nt, Artificial Sequence
  Description of Artificial Sequence: Synthetic oligonucleotide
  Antisense strand to SEQ ID NO: 2145824
uuuaaugaccacuguaccu

SEQ ID NO: 2145826 - RNA, 19 nt, Artificial Sequence
  Description of Artificial Sequence: Synthetic oligonucleotide
  Sense strand starting at position 624 of SEQ ID NO: 1882765
auguguuaaggauguagau

SEQ ID NO: 2145827 - RNA, 19 nt, Artificial Sequence
  Description of Artificial Sequence: Synthetic oligonucleotide
  Antisense strand to SEQ ID NO: 2145826
aucuacauccuuaacacau

SEQ ID NO: 2145828 - RNA, 19 nt, Artificial Sequence
  Description of Artificial Sequence: Synthetic oligonucleotide
  Sense strand starting at position 647 of SEQ ID NO: 1882765
aguuauuuaugggaucauc

SEQ ID NO: 2145829 - RNA, 19 nt, Artificial Sequence
  Description of Artificial Sequence: Synthetic oligonucleotide
  Antisense strand to SEQ ID NO: 2145828
gaugaucccauaaauaacu

SEQ ID NO: 2145830 - RNA, 19 nt, Artificial Sequence
  Description of Artificial Sequence: Synthetic oligonucleotide
  Sense strand starting at position 696 of SEQ ID NO: 1882765
aauuuauauugguaggagu

SEQ ID NO: 2145831 - RNA, 19 nt, Artificial Sequence
  Description of Artificial Sequence: Synthetic oligonucleotide
  Antisense strand to SEQ ID NO: 2145830
acuccuaccaauauaaauu

SEQ ID NO: 2145832 - RNA, 19 nt, Artificial Sequence
  Description of Artificial Sequence: Synthetic oligonucleotide
  Sense strand starting at position 698 of SEQ ID NO: 1882765
uuuauauugguaggagucu

SEQ ID NO: 2145833 - RNA, 19 nt, Artificial Sequence
  Description of Artificial Sequence: Synthetic oligonucleotide
  Antisense strand to SEQ ID NO: 2145832
agacuccuaccaauauaaa

SEQ ID NO: 2145834 - RNA, 19 nt, Artificial Sequence
  Description of Artificial Sequence: Synthetic oligonucleotide
  Sense strand starting at position 835 of SEQ ID NO: 1882765
guugcuugugaauauggaa

SEQ ID NO: 2145835 - RNA, 19 nt, Artificial Sequence
  Description of Artificial Sequence: Synthetic oligonucleotide
  Antisense strand to SEQ ID NO: 2145834
uuccauauucacaagcaac

SEQ ID NO: 2145836 - RNA, 19 nt, Artificial Sequence
  Description of Artificial Sequence: Synthetic oligonucleotide
  Sense strand starting at position 961 of SEQ ID NO: 1882765
agagaaaugcugugaagca

SEQ ID NO: 2145837 - RNA, 19 nt, Artificial Sequence
  Description of Artificial Sequence: Synthetic oligonucleotide
  Antisense strand to SEQ ID NO: 2145836
ugcuucacagcauuucucu

SEQ ID NO: 2145838 - RNA, 19 nt, Artificial Sequence
  Description of Artificial Sequence: Synthetic oligonucleotide
  Sense strand starting at position 1151 of SEQ ID NO: 1882765
uuuggaaaucagugaugua

SEQ ID NO: 2145839 - RNA, 19 nt, Artificial Sequence
  Description of Artificial Sequence: Synthetic oligonucleotide
  Antisense strand to SEQ ID NO: 2145838
uacaucacugauuuccaaa

SEQ ID NO: 2145840 - RNA, 19 nt, Artificial Sequence
  Description of Artificial Sequence: Synthetic oligonucleotide
  Sense strand starting at position 1186 of SEQ ID NO: 1882765
ccgucuugguuguuaauuu

SEQ ID NO: 2145841 - RNA, 19 nt, Artificial Sequence
  Description of Artificial Sequence: Synthetic oligonucleotide
  Antisense strand to SEQ ID NO: 2145840
aaauuaacaaccaagacgg

SEQ ID NO: 2145842 - RNA, 19 nt, Artificial Sequence
  Description of Artificial Sequence: Synthetic oligonucleotide
  Sense strand starting at position 2121 of SEQ ID NO: 1882765
ucugucacucuggaguaaa

SEQ ID NO: 2145843 - RNA, 19 nt, Artificial Sequence
  Description of Artificial Sequence: Synthetic oligonucleotide
  Antisense strand to SEQ ID NO: 2145842
uuuacuccagagugacaga

SEQ ID NO: 2145844 - RNA, 19 nt, Artificial Sequence
  Description of Artificial Sequence: Synthetic oligonucleotide
  Sense strand starting at position 2403 of SEQ ID NO: 1882765
auuaauuguggcuggaaac

SEQ ID NO: 2145845 - RNA, 19 nt, Artificial Sequence
  Description of Artificial Sequence: Synthetic oligonucleotide
  Antisense strand to SEQ ID NO: 2145844
guuuccagccacaauuaau

SEQ ID NO: 2145846 - RNA, 19 nt, Artificial Sequence
  Description of Artificial Sequence: Synthetic oligonucleotide
  Sense strand starting at position 2404 of SEQ ID NO: 1882765
uuaauuguggcuggaaacu

SEQ ID NO: 2145847 - RNA, 19 nt, Artificial Sequence
  Description of Artificial Sequence: Synthetic oligonucleotide
  Antisense strand to SEQ ID NO: 2145846
aguuuccagccacaauuaa

SEQ ID NO: 2145848 - RNA, 19 nt, Artificial Sequence
  Description of Artificial Sequence: Synthetic oligonucleotide
  Sense strand starting at position 2603 of SEQ ID NO: 1882765
uguaguucugagggacuga

SEQ ID NO: 2145849 - RNA, 19 nt, Artificial Sequence
  Description of Artificial Sequence: Synthetic oligonucleotide
  Antisense strand to SEQ ID NO: 2145848
ucagucccucagaacuaca

SEQ ID NO: 2145850 - RNA, 19 nt, Artificial Sequence
  Description of Artificial Sequence: Synthetic oligonucleotide
  Sense strand starting at position 2692 of SEQ ID NO: 1882765
gcagcuaaggucuauggaa

SEQ ID NO: 2145851 - RNA, 19 nt, Artificial Sequence
  Description of Artificial Sequence: Synthetic oligonucleotide
  Antisense strand to SEQ ID NO: 2145850
uuccauagaccuuagcugc

SEQ ID NO: 2145852 - RNA, 19 nt, Artificial Sequence
  Description of Artificial Sequence: Synthetic oligonucleotide
  Sense strand starting at position 2694 of SEQ ID NO: 1882765
agcuaaggucuauggaaac

SEQ ID NO: 2145853 - RNA, 19 nt, Artificial Sequence
  Description of Artificial Sequence: Synthetic oligonucleotide
  Antisense strand to SEQ ID NO: 2145852
guuuccauagaccuuagcu

SEQ ID NO: 2145854 - RNA, 19 nt, Artificial Sequence
  Description of Artificial Sequence: Synthetic oligonucleotide
  Sense strand starting at position 2817 of SEQ ID NO: 1882765
ugguuugagcaauauuccu

SEQ ID NO: 2145855 - RNA, 19 nt, Artificial Sequence
  Description of Artificial Sequence: Synthetic oligonucleotide
  Antisense strand to SEQ ID NO: 2145854
aggaauauugcucaaacca

SEQ ID NO: 2145856 - RNA, 19 nt, Artificial Sequence
  Description of Artificial Sequence: Synthetic oligonucleotide
  Sense strand starting at position 2918 of SEQ ID NO: 1882765
ggaguaacauccuuagcca

SEQ ID NO: 2145857 - RNA, 19 nt, Artificial Sequence
  Description of Artificial Sequence: Synthetic oligonucleotide
  Antisense strand to SEQ ID NO: 2145856
uggcuaaggauguuacucc

SEQ ID NO: 2145858 - RNA, 19 nt, Artificial Sequence
  Description of Artificial Sequence: Synthetic oligonucleotide
  Sense strand starting at position 2921 of SEQ ID NO: 1882765
guaacauccuuagccaaag

SEQ ID NO: 2145859 - RNA, 19 nt, Artificial Sequence
  Description of Artificial Sequence: Synthetic oligonucleotide
  Antisense strand to SEQ ID NO: 2145858
cuuuggcuaaggauguuac

SEQ ID NO: 2145860 - RNA, 19 nt, Artificial Sequence
  Description of Artificial Sequence: Synthetic oligonucleotide
  Sense strand starting at position 3032 of SEQ ID NO: 1882765
acaggaguugggugugaug

SEQ ID NO: 2145861 - RNA, 19 nt, Artificial Sequence
  Description of Artificial Sequence: Synthetic oligonucleotide
  Antisense strand to SEQ ID NO: 2145860
caucacacccaacuccugu

SEQ ID NO: 2145862 - RNA, 19 nt, Artificial Sequence
  Description of Artificial Sequence: Synthetic oligonucleotide
  Sense strand starting at position 3192 of SEQ ID NO: 1882765
ggcaucauccaguauccaa

SEQ ID NO: 2145863 - RNA, 19 nt, Artificial Sequence
  Description of Artificial Sequence: Synthetic oligonucleotide
  Antisense strand to SEQ ID NO: 2145862
uuggauacuggaugaugcc

SEQ ID NO: 2145864 - RNA, 19 nt, Artificial Sequence
  Description of Artificial Sequence: Synthetic oligonucleotide
  Sense strand starting at position 3264 of SEQ ID NO: 1882765
aagcuagcugaguacugaa

SEQ ID NO: 2145865 - RNA, 19 nt, Artificial Sequence
  Description of Artificial Sequence: Synthetic oligonucleotide
  Antisense strand to SEQ ID NO: 2145864
uucaguacucagcuagcuu

SEQ ID NO: 2145866 - RNA, 19 nt, Artificial Sequence
  Description of Artificial Sequence: Synthetic oligonucleotide
  Sense strand starting at position 3343 of SEQ ID NO: 1882765
gaaacagguucuuuauugu

SEQ ID NO: 2145867 - RNA, 19 nt, Artificial Sequence
  Description of Artificial Sequence: Synthetic oligonucleotide
  Antisense strand to SEQ ID NO: 2145866
acaauaaagaaccuguuuc

SEQ ID NO: 2145868 - RNA, 19 nt, Artificial Sequence
  Description of Artificial Sequence: Synthetic oligonucleotide
  Sense strand starting at position 3358 of SEQ ID NO: 1882765
uuguuaugugcgucauaac

SEQ ID NO: 2145869 - RNA, 19 nt, Artificial Sequence
  Description of Artificial Sequence: Synthetic oligonucleotide
  Antisense strand to SEQ ID NO: 2145868
guuaugacgcacauaacaa

SEQ ID NO: 2145870 - RNA, 19 nt, Artificial Sequence
  Description of Artificial Sequence: Synthetic oligonucleotide
  Sense strand starting at position 3473 of SEQ ID NO: 1882765
guccuaaugaauuggaagu

SEQ ID NO: 2145871 - RNA, 19 nt, Artificial Sequence
  Description of Artificial Sequence: Synthetic oligonucleotide
  Antisense strand to SEQ ID NO: 2145870
acuuccaauucauuaggac

SEQ ID NO: 2145872 - RNA, 19 nt, Artificial Sequence
  Description of Artificial Sequence: Synthetic oligonucleotide
  Sense strand starting at position 3536 of SEQ ID NO: 1882765
ccgggaguacuuuauuaau

SEQ ID NO: 2145873 - RNA, 19 nt, Artificial Sequence
  Description of Artificial Sequence: Synthetic oligonucleotide
  Antisense strand to SEQ ID NO: 2145872
auuaauaaaguacucccgg

SEQ ID NO: 2145874 - RNA, 19 nt, Artificial Sequence
  Description of Artificial Sequence: Synthetic oligonucleotide
  Sense strand starting at position 3538 of SEQ ID NO: 1882765
gggaguacuuuauuaauug

SEQ ID NO: 2145875 - RNA, 19 nt, Artificial Sequence
  Description of Artificial Sequence: Synthetic oligonucleotide
  Antisense strand to SEQ ID NO: 2145874
caauuaauaaaguacuccc

SEQ ID NO: 2145876 - RNA, 19 nt, Artificial Sequence
  Description of Artificial Sequence: Synthetic oligonucleotide
  Sense strand starting at position 3607 of SEQ ID NO: 1882765
aaugguuuauugguaaaca

SEQ ID NO: 2145877 - RNA, 19 nt, Artificial Sequence
  Description of Artificial Sequence: Synthetic oligonucleotide
  Antisense strand to SEQ ID NO: 2145876
uguuuaccaauaaaccauu

SEQ ID NO: 2145878 - RNA, 19 nt, Artificial Sequence
  Description of Artificial Sequence: Synthetic oligonucleotide
  Sense strand starting at position 3618 of SEQ ID NO: 1882765
gguaaacaaguauggcaau

SEQ ID NO: 2145879 - RNA, 19 nt, Artificial Sequence
  Description of Artificial Sequence: Synthetic oligonucleotide
  Antisense strand to SEQ ID NO: 2145878
auugccauacuuguuuacc

SEQ ID NO: 2145880 - RNA, 19 nt, Artificial Sequence
  Description of Artificial Sequence: Synthetic oligonucleotide
  Sense strand starting at position 3715 of SEQ ID NO: 1882765
ucuugaaaguaaguguaau

SEQ ID NO: 2145881 - RNA, 19 nt, Artificial Sequence
  Description of Artificial Sequence: Synthetic oligonucleotide
  Antisense strand to SEQ ID NO: 2145880
auuacacuuacuuucaaga

SEQ ID NO: 2145882 - RNA, 19 nt, Artificial Sequence
  Description of Artificial Sequence: Synthetic oligonucleotide
  Sense strand starting at position 3716 of SEQ ID NO: 1882765
cuugaaaguaaguguaaug

SEQ ID NO: 2145883 - RNA, 19 nt, Artificial Sequence
  Description of Artificial Sequence: Synthetic oligonucleotide
  Antisense strand to SEQ ID NO: 2145882
cauuacacuuacuuucaag

SEQ ID NO: 2145884 - RNA, 19 nt, Artificial Sequence
  Description of Artificial Sequence: Synthetic oligonucleotide
  Sense strand starting at position 3813 of SEQ ID NO: 1882765
auguacauuucugcagcua

SEQ ID NO: 2145885 - RNA, 19 nt, Artificial Sequence
  Description of Artificial Sequence: Synthetic oligonucleotide
  Antisense strand to SEQ ID NO: 2145884
uagcugcagaaauguacau

SEQ ID NO: 2145886 - RNA, 19 nt, Artificial Sequence
  Description of Artificial Sequence: Synthetic oligonucleotide
  Sense strand starting at position 3864 of SEQ ID NO: 1882765
ugaaaucuacuguggaaau

SEQ ID NO: 2145887 - RNA, 19 nt, Artificial Sequence
  Description of Artificial Sequence: Synthetic oligonucleotide
  Antisense strand to SEQ ID NO: 2145886
auuuccacaguagauuuca

SEQ ID NO: 2145888 - RNA, 19 nt, Artificial Sequence
  Description of Artificial Sequence: Synthetic oligonucleotide
  Sense strand starting at position 158 of SEQ ID NO: 1882766
gugguuugaacagaagcau

SEQ ID NO: 2145889 - RNA, 19 nt, Artificial Sequence
  Description of Artificial Sequence: Synthetic oligonucleotide
  Antisense strand to SEQ ID NO: 2145888
augcuucuguucaaaccac

SEQ ID NO: 2145890 - RNA, 19 nt, Artificial Sequence
  Description of Artificial Sequence: Synthetic oligonucleotide
  Sense strand starting at position 164 of SEQ ID NO: 1882766
ugaacagaagcauguuuau

SEQ ID NO: 2145891 - RNA, 19 nt, Artificial Sequence
  Description of Artificial Sequence: Synthetic oligonucleotide
  Antisense strand to SEQ ID NO: 2145890
auaaacaugcuucuguuca

SEQ ID NO: 2145892 - RNA, 19 nt, Artificial Sequence
  Description of Artificial Sequence: Synthetic oligonucleotide
  Sense strand starting at position 191 of SEQ ID NO: 1882766
uauguaacagccugaugaa

SEQ ID NO: 2145893 - RNA, 19 nt, Artificial Sequence
  Description of Artificial Sequence: Synthetic oligonucleotide
  Antisense strand to SEQ ID NO: 2145892
uucaucaggcuguuacaua

SEQ ID NO: 2145894 - RNA, 19 nt, Artificial Sequence
  Description of Artificial Sequence: Synthetic oligonucleotide
  Sense strand starting at position 231 of SEQ ID NO: 1882766
uucuauuugucuucugcau

SEQ ID NO: 2145895 - RNA, 19 nt, Artificial Sequence
  Description of Artificial Sequence: Synthetic oligonucleotide
  Antisense strand to SEQ ID NO: 2145894
augcagaagacaaauagaa

SEQ ID NO: 2145896 - RNA, 19 nt, Artificial Sequence
  Description of Artificial Sequence: Synthetic oligonucleotide
  Sense strand starting at position 366 of SEQ ID NO: 1882766
cggucuucccaggaaucau

SEQ ID NO: 2145897 - RNA, 19 nt, Artificial Sequence
  Description of Artificial Sequence: Synthetic oligonucleotide
  Antisense strand to SEQ ID NO: 2145896
augauuccugggaagaccg

SEQ ID NO: 2145898 - RNA, 19 nt, Artificial Sequence
  Description of Artificial Sequence: Synthetic oligonucleotide
  Sense strand starting at position 683 of SEQ ID NO: 1882766
auguaucuagcauaaagca

SEQ ID NO: 2145899 - RNA, 19 nt, Artificial Sequence
  Description of Artificial Sequence: Synthetic oligonucleotide
  Antisense strand to SEQ ID NO: 2145898
ugcuuuaugcuagauacau

SEQ ID NO: 2145900 - RNA, 19 nt, Artificial Sequence
  Description of Artificial Sequence: Synthetic oligonucleotide
  Sense strand starting at position 814 of SEQ ID NO: 1882766
ccacuaggcuuuccaaaug

SEQ ID NO: 2145901 - RNA, 19 nt, Artificial Sequence
  Description of Artificial Sequence: Synthetic oligonucleotide
  Antisense strand to SEQ ID NO: 2145900
cauuuggaaagccuagugg

SEQ ID NO: 2145902 - RNA, 19 nt, Artificial Sequence
  Description of Artificial Sequence: Synthetic oligonucleotide
  Sense strand starting at position 871 of SEQ ID NO: 1882766
gguguuuggaaagaguacu

SEQ ID NO: 2145903 - RNA, 19 nt, Artificial Sequence
  Description of Artificial Sequence: Synthetic oligonucleotide
  Antisense strand to SEQ ID NO: 2145902
aguacucuuuccaaacacc

SEQ ID NO: 2145904 - RNA, 19 nt, Artificial Sequence
  Description of Artificial Sequence: Synthetic oligonucleotide
  Sense strand starting at position 1040 of SEQ ID NO: 1882766
guuugugugcaggcuauua

SEQ ID NO: 2145905 - RNA, 19 nt, Artificial Sequence
  Description of Artificial Sequence: Synthetic oligonucleotide
  Antisense strand to SEQ ID NO: 2145904
uaauagccugcacacaaac

SEQ ID NO: 2145906 - RNA, 19 nt, Artificial Sequence
  Description of Artificial Sequence: Synthetic oligonucleotide
  Sense strand starting at position 1104 of SEQ ID NO: 1882766
guuaucauaucaguauuag

SEQ ID NO: 2145907 - RNA, 19 nt, Artificial Sequence
  Description of Artificial Sequence: Synthetic oligonucleotide
  Antisense strand to SEQ ID NO: 2145906
cuaauacugauaugauaac

SEQ ID NO: 2145908 - RNA, 19 nt, Artificial Sequence
  Description of Artificial Sequence: Synthetic oligonucleotide
  Sense strand starting at position 1118 of SEQ ID NO: 1882766
auuagaagcuuuguuagga

SEQ ID NO: 2145909 - RNA, 19 nt, Artificial Sequence
  Description of Artificial Sequence: Synthetic oligonucleotide
  Antisense strand to SEQ ID NO: 2145908
uccuaacaaagcuucuaau

SEQ ID NO: 2145910 - RNA, 19 nt, Artificial Sequence
  Description of Artificial Sequence: Synthetic oligonucleotide
  Sense strand starting at position 1119 of SEQ ID NO: 1882766
uuagaagcuuuguuaggaa

SEQ ID NO: 2145911 - RNA, 19 nt, Artificial Sequence
  Description of Artificial Sequence: Synthetic oligonucleotide
  Antisense strand to SEQ ID NO: 2145910
uuccuaacaaagcuucuaa

SEQ ID NO: 2145912 - RNA, 19 nt, Artificial Sequence
  Description of Artificial Sequence: Synthetic oligonucleotide
  Sense strand starting at position 1395 of SEQ ID NO: 1882766
guagauaaauacuucuguu

SEQ ID NO: 2145913 - RNA, 19 nt, Artificial Sequence
  Description of Artificial Sequence: Synthetic oligonucleotide
  Antisense strand to SEQ ID NO: 2145912
aacagaaguauuuaucuac

SEQ ID NO: 2145914 - RNA, 19 nt, Artificial Sequence
  Description of Artificial Sequence: Synthetic oligonucleotide
  Sense strand starting at position 1564 of SEQ ID NO: 1882766
ugggaauacucagcccacu

SEQ ID NO: 2145915 - RNA, 19 nt, Artificial Sequence
  Description of Artificial Sequence: Synthetic oligonucleotide
  Antisense strand to SEQ ID NO: 2145914
agugggcugaguauuccca

SEQ ID NO: 2145916 - RNA, 19 nt, Artificial Sequence
  Description of Artificial Sequence: Synthetic oligonucleotide
  Sense strand starting at position 1636 of SEQ ID NO: 1882766
ucuggaaaggcuuaaugua

SEQ ID NO: 2145917 - RNA, 19 nt, Artificial Sequence
  Description of Artificial Sequence: Synthetic oligonucleotide
  Antisense strand to SEQ ID NO: 2145916
uacauuaagccuuuccaga

SEQ ID NO: 2145918 - RNA, 19 nt, Artificial Sequence
  Description of Artificial Sequence: Synthetic oligonucleotide
  Sense strand starting at position 1741 of SEQ ID NO: 1882766
aguagaucuggucaucaug

SEQ ID NO: 2145919 - RNA, 19 nt, Artificial Sequence
  Description of Artificial Sequence: Synthetic oligonucleotide
  Antisense strand to SEQ ID NO: 2145918
caugaugaccagaucuacu

SEQ ID NO: 2145920 - RNA, 19 nt, Artificial Sequence
  Description of Artificial Sequence: Synthetic oligonucleotide
  Sense strand starting at position 1758 of SEQ ID NO: 1882766
uguguuacaccagauucua

SEQ ID NO: 2145921 - RNA, 19 nt, Artificial Sequence
  Description of Artificial Sequence: Synthetic oligonucleotide
  Antisense strand to SEQ ID NO: 2145920
uagaaucugguguaacaca

SEQ ID NO: 2145922 - RNA, 19 nt, Artificial Sequence
  Description of Artificial Sequence: Synthetic oligonucleotide
  Sense strand starting at position 1820 of SEQ ID NO: 1882766
ggacucaccuuucucaaga

SEQ ID NO: 2145923 - RNA, 19 nt, Artificial Sequence
  Description of Artificial Sequence: Synthetic oligonucleotide
  Antisense strand to SEQ ID NO: 2145922
ucuugagaaaggugagucc

SEQ ID NO: 2145924 - RNA, 19 nt, Artificial Sequence
  Description of Artificial Sequence: Synthetic oligonucleotide
  Sense strand starting at position 1941 of SEQ ID NO: 1882766
agguaauugggugagcauu

SEQ ID NO: 2145925 - RNA, 19 nt, Artificial Sequence
  Description of Artificial Sequence: Synthetic oligonucleotide
  Antisense strand to SEQ ID NO: 2145924
aaugcucacccaauuaccu

SEQ ID NO: 2145926 - RNA, 19 nt, Artificial Sequence
  Description of Artificial Sequence: Synthetic oligonucleotide
  Sense strand starting at position 1947 of SEQ ID NO: 1882766
uugggugagcauuacuaag

SEQ ID NO: 2145927 - RNA, 19 nt, Artificial Sequence
  Description of Artificial Sequence: Synthetic oligonucleotide
  Antisense strand to SEQ ID NO: 2145926
cuuaguaaugcucacccaa

SEQ ID NO: 2145928 - RNA, 19 nt, Artificial Sequence
  Description of Artificial Sequence: Synthetic oligonucleotide
  Sense strand starting at position 1967 of SEQ ID NO: 1882766
gugagucauaaauagugua

SEQ ID NO: 2145929 - RNA, 19 nt, Artificial Sequence
  Description of Artificial Sequence: Synthetic oligonucleotide
  Antisense strand to SEQ ID NO: 2145928
uacacuauuuaugacucac

SEQ ID NO: 2145930 - RNA, 19 nt, Artificial Sequence
  Description of Artificial Sequence: Synthetic oligonucleotide
  Sense strand starting at position 1984 of SEQ ID NO: 1882766
uaacaaaggcuuugaguga

SEQ ID NO: 2145931 - RNA, 19 nt, Artificial Sequence
  Description of Artificial Sequence: Synthetic oligonucleotide
  Antisense strand to SEQ ID NO: 2145930
ucacucaaagccuuuguua

SEQ ID NO: 2145932 - RNA, 19 nt, Artificial Sequence
  Description of Artificial Sequence: Synthetic oligonucleotide
  Sense strand starting at position 1989 of SEQ ID NO: 1882766
aaggcuuugagugagucau

SEQ ID NO: 2145933 - RNA, 19 nt, Artificial Sequence
  Description of Artificial Sequence: Synthetic oligonucleotide
  Antisense strand to SEQ ID NO: 2145932
augacucacucaaagccuu

SEQ ID NO: 2145934 - RNA, 19 nt, Artificial Sequence
  Description of Artificial Sequence: Synthetic oligonucleotide
  Sense strand starting at position 2166 of SEQ ID NO: 1882766
gauuaaggcucuuuggaac

SEQ ID NO: 2145935 - RNA, 19 nt, Artificial Sequence
  Description of Artificial Sequence: Synthetic oligonucleotide
  Antisense strand to SEQ ID NO: 2145934
guuccaaagagccuuaauc

SEQ ID NO: 2145936 - RNA, 19 nt, Artificial Sequence
  Description of Artificial Sequence: Synthetic oligonucleotide
  Sense strand starting at position 2588 of SEQ ID NO: 1882766
cuccauugaucaguggaaa

SEQ ID NO: 2145937 - RNA, 19 nt, Artificial Sequence
  Description of Artificial Sequence: Synthetic oligonucleotide
  Antisense strand to SEQ ID NO: 2145936
uuuccacugaucaauggag

SEQ ID NO: 2145938 - RNA, 19 nt, Artificial Sequence
  Description of Artificial Sequence: Synthetic oligonucleotide
  Sense strand starting at position 2589 of SEQ ID NO: 1882766
uccauugaucaguggaaag

SEQ ID NO: 2145939 - RNA, 19 nt, Artificial Sequence
  Description of Artificial Sequence: Synthetic oligonucleotide
  Antisense strand to SEQ ID NO: 2145938
cuuuccacugaucaaugga

SEQ ID NO: 2145940 - RNA, 19 nt, Artificial Sequence
  Description of Artificial Sequence: Synthetic oligonucleotide
  Sense strand starting at position 2668 of SEQ ID NO: 1882766
ugagucauuccugagcaug

SEQ ID NO: 2145941 - RNA, 19 nt, Artificial Sequence
  Description of Artificial Sequence: Synthetic oligonucleotide
  Antisense strand to SEQ ID NO: 2145940
caugcucaggaaugacuca

SEQ ID NO: 2145942 - RNA, 19 nt, Artificial Sequence
  Description of Artificial Sequence: Synthetic oligonucleotide
  Sense strand starting at position 2796 of SEQ ID NO: 1882766
aagguauuagaacgaauuc

SEQ ID NO: 2145943 - RNA, 19 nt, Artificial Sequence
  Description of Artificial Sequence: Synthetic oligonucleotide
  Antisense strand to SEQ ID NO: 2145942
gaauucguucuaauaccuu

SEQ ID NO: 2145944 - RNA, 19 nt, Artificial Sequence
  Description of Artificial Sequence: Synthetic oligonucleotide
  Sense strand starting at position 2923 of SEQ ID NO: 1882766
agaggcagucagugaaacu

SEQ ID NO: 2145945 - RNA, 19 nt, Artificial Sequence
  Description of Artificial Sequence: Synthetic oligonucleotide
  Antisense strand to SEQ ID NO: 2145944
aguuucacugacugccucu

SEQ ID NO: 2145946 - RNA, 19 nt, Artificial Sequence
  Description of Artificial Sequence: Synthetic oligonucleotide
  Sense strand starting at position 2924 of SEQ ID NO: 1882766
gaggcagucagugaaacua

SEQ ID NO: 2145947 - RNA, 19 nt, Artificial Sequence
  Description of Artificial Sequence: Synthetic oligonucleotide
  Antisense strand to SEQ ID NO: 2145946
uaguuucacugacugccuc

SEQ ID NO: 2145948 - RNA, 19 nt, Artificial Sequence
  Description of Artificial Sequence: Synthetic oligonucleotide
  Sense strand starting at position 2953 of SEQ ID NO: 1882766
ccugaauaugacuguuauu

SEQ ID NO: 2145949 - RNA, 19 nt, Artificial Sequence
  Description of Artificial Sequence: Synthetic oligonucleotide
  Antisense strand to SEQ ID NO: 2145948
aauaacagucauauucagg

SEQ ID NO: 2145950 - RNA, 19 nt, Artificial Sequence
  Description of Artificial Sequence: Synthetic oligonucleotide
  Sense strand starting at position 2975 of SEQ ID NO: 1882766
auuuguugcuagguucuua

SEQ ID NO: 2145951 - RNA, 19 nt, Artificial Sequence
  Description of Artificial Sequence: Synthetic oligonucleotide
  Antisense strand to SEQ ID NO: 2145950
uaagaaccuagcaacaaau

SEQ ID NO: 2145952 - RNA, 19 nt, Artificial Sequence
  Description of Artificial Sequence: Synthetic oligonucleotide
  Sense strand starting at position 3026 of SEQ ID NO: 1882766
gcacauaucauaggguuga

SEQ ID NO: 2145953 - RNA, 19 nt, Artificial Sequence
  Description of Artificial Sequence: Synthetic oligonucleotide
  Antisense strand to SEQ ID NO: 2145952
ucaacccuaugauaugugc

SEQ ID NO: 2145954 - RNA, 19 nt, Artificial Sequence
  Description of Artificial Sequence: Synthetic oligonucleotide
  Sense strand starting at position 3030 of SEQ ID NO: 1882766
auaucauaggguugauauu

SEQ ID NO: 2145955 - RNA, 19 nt, Artificial Sequence
  Description of Artificial Sequence: Synthetic oligonucleotide
  Antisense strand to SEQ ID NO: 2145954
aauaucaacccuaugauau

SEQ ID NO: 2145956 - RNA, 19 nt, Artificial Sequence
  Description of Artificial Sequence: Synthetic oligonucleotide
  Sense strand starting at position 3247 of SEQ ID NO: 1882766
cucuauuccugagccaaga

SEQ ID NO: 2145957 - RNA, 19 nt, Artificial Sequence
  Description of Artificial Sequence: Synthetic oligonucleotide
  Antisense strand to SEQ ID NO: 2145956
ucuuggcucaggaauagag

SEQ ID NO: 2145958 - RNA, 19 nt, Artificial Sequence
  Description of Artificial Sequence: Synthetic oligonucleotide
  Sense strand starting at position 3332 of SEQ ID NO: 1882766
guguaugggaagugaugga

SEQ ID NO: 2145959 - RNA, 19 nt, Artificial Sequence
  Description of Artificial Sequence: Synthetic oligonucleotide
  Antisense strand to SEQ ID NO: 2145958
uccaucacuucccauacac

SEQ ID NO: 2145960 - RNA, 19 nt, Artificial Sequence
  Description of Artificial Sequence: Synthetic oligonucleotide
  Sense strand starting at position 3420 of SEQ ID NO: 1882766
cugcucugugucccaguua

SEQ ID NO: 2145961 - RNA, 19 nt, Artificial Sequence
  Description of Artificial Sequence: Synthetic oligonucleotide
  Antisense strand to SEQ ID NO: 2145960
uaacugggacacagagcag

SEQ ID NO: 2145962 - RNA, 19 nt, Artificial Sequence
  Description of Artificial Sequence: Synthetic oligonucleotide
  Sense strand starting at position 3685 of SEQ ID NO: 1882766
ucauuugagugagaaauga

SEQ ID NO: 2145963 - RNA, 19 nt, Artificial Sequence
  Description of Artificial Sequence: Synthetic oligonucleotide
  Antisense strand to SEQ ID NO: 2145962
ucauuucucacucaaauga

SEQ ID NO: 2145964 - RNA, 19 nt, Artificial Sequence
  Description of Artificial Sequence: Synthetic oligonucleotide
  Sense strand starting at position 3778 of SEQ ID NO: 1882766
caaggauguuauguaaaua

SEQ ID NO: 2145965 - RNA, 19 nt, Artificial Sequence
  Description of Artificial Sequence: Synthetic oligonucleotide
  Antisense strand to SEQ ID NO: 2145964
uauuuacauaacauccuug

SEQ ID NO: 2145966 - RNA, 19 nt, Artificial Sequence
  Description of Artificial Sequence: Synthetic oligonucleotide
  Sense strand starting at position 3800 of SEQ ID NO: 1882766
agacuagaguuauuacuug

SEQ ID NO: 2145967 - RNA, 19 nt, Artificial Sequence
  Description of Artificial Sequence: Synthetic oligonucleotide
  Antisense strand to SEQ ID NO: 2145966
caaguaauaacucuagucu

SEQ ID NO: 2145968 - RNA, 19 nt, Artificial Sequence
  Description of Artificial Sequence: Synthetic oligonucleotide
  Sense strand starting at position 127 of SEQ ID NO: 1882767
aguauauuccagugaugac

SEQ ID NO: 2145969 - RNA, 19 nt, Artificial Sequence
  Description of Artificial Sequence: Synthetic oligonucleotide
  Antisense strand to SEQ ID NO: 2145968
gucaucacuggaauauacu

SEQ ID NO: 2145970 - RNA, 19 nt, Artificial Sequence
  Description of Artificial Sequence: Synthetic oligonucleotide
  Sense strand starting at position 361 of SEQ ID NO: 1882767
uguuaugcaguauauauca

SEQ ID NO: 2145971 - RNA, 19 nt, Artificial Sequence
  Description of Artificial Sequence: Synthetic oligonucleotide
  Antisense strand to SEQ ID NO: 2145970
ugauauauacugcauaaca

SEQ ID NO: 2145972 - RNA, 19 nt, Artificial Sequence
  Description of Artificial Sequence: Synthetic oligonucleotide
  Sense strand starting at position 881 of SEQ ID NO: 1882767
agaauuugaucguauucua

SEQ ID NO: 2145973 - RNA, 19 nt, Artificial Sequence
  Description of Artificial Sequence: Synthetic oligonucleotide
  Antisense strand to SEQ ID NO: 2145972
uagaauacgaucaaauucu

SEQ ID NO: 2145974 - RNA, 19 nt, Artificial Sequence
  Description of Artificial Sequence: Synthetic oligonucleotide
  Sense strand starting at position 888 of SEQ ID NO: 1882767
gaucguauucuauaugagc

SEQ ID NO: 2145975 - RNA, 19 nt, Artificial Sequence
  Description of Artificial Sequence: Synthetic oligonucleotide
  Antisense strand to SEQ ID NO: 2145974
gcucauauagaauacgauc

SEQ ID NO: 2145976 - RNA, 19 nt, Artificial Sequence
  Description of Artificial Sequence: Synthetic oligonucleotide
  Sense strand starting at position 1102 of SEQ ID NO: 1882767
aggagauuauaagaacaua

SEQ ID NO: 2145977 - RNA, 19 nt, Artificial Sequence
  Description of Artificial Sequence: Synthetic oligonucleotide
  Antisense strand to SEQ ID NO: 2145976
uauguucuuauaaucuccu

SEQ ID NO: 2145978 - RNA, 19 nt, Artificial Sequence
  Description of Artificial Sequence: Synthetic oligonucleotide
  Sense strand starting at position 1147 of SEQ ID NO: 1882767
aaugauaaaugggagcuaa

SEQ ID NO: 2145979 - RNA, 19 nt, Artificial Sequence
  Description of Artificial Sequence: Synthetic oligonucleotide
  Antisense strand to SEQ ID NO: 2145978
uuagcucccauuuaucauu

SEQ ID NO: 2145980 - RNA, 19 nt, Artificial Sequence
  Description of Artificial Sequence: Synthetic oligonucleotide
  Sense strand starting at position 1482 of SEQ ID NO: 1882767
agaauugaauuacagauca

SEQ ID NO: 2145981 - RNA, 19 nt, Artificial Sequence
  Description of Artificial Sequence: Synthetic oligonucleotide
  Antisense strand to SEQ ID NO: 2145980
ugaucuguaauucaauucu

SEQ ID NO: 2145982 - RNA, 19 nt, Artificial Sequence
  Description of Artificial Sequence: Synthetic oligonucleotide
  Sense strand starting at position 1572 of SEQ ID NO: 1882767
uaaacuuuguagguaaaga

SEQ ID NO: 2145983 - RNA, 19 nt, Artificial Sequence
  Description of Artificial Sequence: Synthetic oligonucleotide
  Antisense strand to SEQ ID NO: 2145982
ucuuuaccuacaaaguuua

SEQ ID NO: 2145984 - RNA, 19 nt, Artificial Sequence
  Description of Artificial Sequence: Synthetic oligonucleotide
  Sense strand starting at position 1667 of SEQ ID NO: 1882767
uauaaauaaugagagguga

SEQ ID NO: 2145985 - RNA, 19 nt, Artificial Sequence
  Description of Artificial Sequence: Synthetic oligonucleotide
  Antisense strand to SEQ ID NO: 2145984
ucaccucucauuauuuaua

SEQ ID NO: 2145986 - RNA, 19 nt, Artificial Sequence
  Description of Artificial Sequence: Synthetic oligonucleotide
  Sense strand starting at position 1687 of SEQ ID NO: 1882767
augucagacuggucuuaga

SEQ ID NO: 2145987 - RNA, 19 nt, Artificial Sequence
  Description of Artificial Sequence: Synthetic oligonucleotide
  Antisense strand to SEQ ID NO: 2145986
ucuaagaccagucugacau

SEQ ID NO: 2145988 - RNA, 19 nt, Artificial Sequence
  Description of Artificial Sequence: Synthetic oligonucleotide
  Sense strand starting at position 1769 of SEQ ID NO: 1882767
auaguaucucaguauguuc

SEQ ID NO: 2145989 - RNA, 19 nt, Artificial Sequence
  Description of Artificial Sequence: Synthetic oligonucleotide
  Antisense strand to SEQ ID NO: 2145988
gaacauacugagauacuau

SEQ ID NO: 2145990 - RNA, 19 nt, Artificial Sequence
  Description of Artificial Sequence: Synthetic oligonucleotide
  Sense strand starting at position 1780 of SEQ ID NO: 1882767
guauguucuguguugcuau

SEQ ID NO: 2145991 - RNA, 19 nt, Artificial Sequence
  Description of Artificial Sequence: Synthetic oligonucleotide
  Antisense strand to SEQ ID NO: 2145990
auagcaacacagaacauac

SEQ ID NO: 2145992 - RNA, 19 nt, Artificial Sequence
  Description of Artificial Sequence: Synthetic oligonucleotide
  Sense strand starting at position 2337 of SEQ ID NO: 1882767
auuggagaugcuggaguaa

SEQ ID NO: 2145993 - RNA, 19 nt, Artificial Sequence
  Description of Artificial Sequence: Synthetic oligonucleotide
  Antisense strand to SEQ ID NO: 2145992
uuacuccagcaucuccaau

SEQ ID NO: 2145994 - RNA, 19 nt, Artificial Sequence
  Description of Artificial Sequence: Synthetic oligonucleotide
  Sense strand starting at position 2365 of SEQ ID NO: 1882767
ggcaucugucaacacacaa

SEQ ID NO: 2145995 - RNA, 19 nt, Artificial Sequence
  Description of Artificial Sequence: Synthetic oligonucleotide
  Antisense strand to SEQ ID NO: 2145994
uuguguguugacagaugcc

SEQ ID NO: 2145996 - RNA, 19 nt, Artificial Sequence
  Description of Artificial Sequence: Synthetic oligonucleotide
  Sense strand starting at position 2706 of SEQ ID NO: 1882767
aucauuaacuuggauaaug

SEQ ID NO: 2145997 - RNA, 19 nt, Artificial Sequence
  Description of Artificial Sequence: Synthetic oligonucleotide
  Antisense strand to SEQ ID NO: 2145996
cauuauccaaguuaaugau

SEQ ID NO: 2145998 - RNA, 19 nt, Artificial Sequence
  Description of Artificial Sequence: Synthetic oligonucleotide
  Sense strand starting at position 2756 of SEQ ID NO: 1882767
aggaacugaugcucuguaa

SEQ ID NO: 2145999 - RNA, 19 nt, Artificial Sequence
  Description of Artificial Sequence: Synthetic oligonucleotide
  Antisense strand to SEQ ID NO: 2145998
uuacagagcaucaguuccu

SEQ ID NO: 2146000 - RNA, 19 nt, Artificial Sequence
  Description of Artificial Sequence: Synthetic oligonucleotide
  Sense strand starting at position 2760 of SEQ ID NO: 1882767
acugaugcucuguaaauag

SEQ ID NO: 2146001 - RNA, 19 nt, Artificial Sequence
  Description of Artificial Sequence: Synthetic oligonucleotide
  Antisense strand to SEQ ID NO: 2146000
cuauuuacagagcaucagu

SEQ ID NO: 2146002 - RNA, 19 nt, Artificial Sequence
  Description of Artificial Sequence: Synthetic oligonucleotide
  Sense strand starting at position 2767 of SEQ ID NO: 1882767
cucuguaaauagcuguuua

SEQ ID NO: 2146003 - RNA, 19 nt, Artificial Sequence
  Description of Artificial Sequence: Synthetic oligonucleotide
  Antisense strand to SEQ ID NO: 2146002
uaaacagcuauuuacagag

SEQ ID NO: 2146004 - RNA, 19 nt, Artificial Sequence
  Description of Artificial Sequence: Synthetic oligonucleotide
  Sense strand starting at position 2929 of SEQ ID NO: 1882767
gaggaaauaugggaacauc

SEQ ID NO: 2146005 - RNA, 19 nt, Artificial Sequence
  Description of Artificial Sequence: Synthetic oligonucleotide
  Antisense strand to SEQ ID NO: 2146004
gauguucccauauuuccuc

SEQ ID NO: 2146006 - RNA, 19 nt, Artificial Sequence
  Description of Artificial Sequence: Synthetic oligonucleotide
  Sense strand starting at position 2941 of SEQ ID NO: 1882767
gaacaucuuugugugcuua

SEQ ID NO: 2146007 - RNA, 19 nt, Artificial Sequence
  Description of Artificial Sequence: Synthetic oligonucleotide
  Antisense strand to SEQ ID NO: 2146006
uaagcacacaaagauguuc

SEQ ID NO: 2146008 - RNA, 19 nt, Artificial Sequence
  Description of Artificial Sequence: Synthetic oligonucleotide
  Sense strand starting at position 2952 of SEQ ID NO: 1882767
ugugcuuauuucucaucuu

SEQ ID NO: 2146009 - RNA, 19 nt, Artificial Sequence
  Description of Artificial Sequence: Synthetic oligonucleotide
  Antisense strand to SEQ ID NO: 2146008
aagaugagaaauaagcaca

SEQ ID NO: 2146010 - RNA, 19 nt, Artificial Sequence
  Description of Artificial Sequence: Synthetic oligonucleotide
  Sense strand starting at position 3025 of SEQ ID NO: 1882767
cuuuaugcucuugauguuu

SEQ ID NO: 2146011 - RNA, 19 nt, Artificial Sequence
  Description of Artificial Sequence: Synthetic oligonucleotide
  Antisense strand to SEQ ID NO: 2146010
aaacaucaagagcauaaag

SEQ ID NO: 2146012 - RNA, 19 nt, Artificial Sequence
  Description of Artificial Sequence: Synthetic oligonucleotide
  Sense strand starting at position 3068 of SEQ ID NO: 1882767
gacaaaugauuuggaaguu

SEQ ID NO: 2146013 - RNA, 19 nt, Artificial Sequence
  Description of Artificial Sequence: Synthetic oligonucleotide
  Antisense strand to SEQ ID NO: 2146012
aacuuccaaaucauuuguc

SEQ ID NO: 2146014 - RNA, 19 nt, Artificial Sequence
  Description of Artificial Sequence: Synthetic oligonucleotide
  Sense strand starting at position 3069 of SEQ ID NO: 1882767
acaaaugauuuggaaguua

SEQ ID NO: 2146015 - RNA, 19 nt, Artificial Sequence
  Description of Artificial Sequence: Synthetic oligonucleotide
  Antisense strand to SEQ ID NO: 2146014
uaacuuccaaaucauuugu

SEQ ID NO: 2146016 - RNA, 19 nt, Artificial Sequence
  Description of Artificial Sequence: Synthetic oligonucleotide
  Sense strand starting at position 3083 of SEQ ID NO: 1882767
aguuauaucacagguggua

SEQ ID NO: 2146017 - RNA, 19 nt, Artificial Sequence
  Description of Artificial Sequence: Synthetic oligonucleotide
  Antisense strand to SEQ ID NO: 2146016
uaccaccugugauauaacu

SEQ ID NO: 2146018 - RNA, 19 nt, Artificial Sequence
  Description of Artificial Sequence: Synthetic oligonucleotide
  Sense strand starting at position 3086 of SEQ ID NO: 1882767
uauaucacaggugguaaua

SEQ ID NO: 2146019 - RNA, 19 nt, Artificial Sequence
  Description of Artificial Sequence: Synthetic oligonucleotide
  Antisense strand to SEQ ID NO: 2146018
uauuaccaccugugauaua

SEQ ID NO: 2146020 - RNA, 19 nt, Artificial Sequence
  Description of Artificial Sequence: Synthetic oligonucleotide
  Sense strand starting at position 3110 of SEQ ID NO: 1882767
guaucuagagcucagaaau

SEQ ID NO: 2146021 - RNA, 19 nt, Artificial Sequence
  Description of Artificial Sequence: Synthetic oligonucleotide
  Antisense strand to SEQ ID NO: 2146020
auuucugagcucuagauac

SEQ ID NO: 2146022 - RNA, 19 nt, Artificial Sequence
  Description of Artificial Sequence: Synthetic oligonucleotide
  Sense strand starting at position 3120 of SEQ ID NO: 1882767
cucagaaauucuguaaguu

SEQ ID NO: 2146023 - RNA, 19 nt, Artificial Sequence
  Description of Artificial Sequence: Synthetic oligonucleotide
  Antisense strand to SEQ ID NO: 2146022
aacuuacagaauuucugag

SEQ ID NO: 2146024 - RNA, 19 nt, Artificial Sequence
  Description of Artificial Sequence: Synthetic oligonucleotide
  Sense strand starting at position 3160 of SEQ ID NO: 1882767
guuaaaggcaaucgaaauu

SEQ ID NO: 2146025 - RNA, 19 nt, Artificial Sequence
  Description of Artificial Sequence: Synthetic oligonucleotide
  Antisense strand to SEQ ID NO: 2146024
aauuucgauugccuuuaac

SEQ ID NO: 2146026 - RNA, 19 nt, Artificial Sequence
  Description of Artificial Sequence: Synthetic oligonucleotide
  Sense strand starting at position 3203 of SEQ ID NO: 1882767
agcacacuauugcuaugaa

SEQ ID NO: 2146027 - RNA, 19 nt, Artificial Sequence
  Description of Artificial Sequence: Synthetic oligonucleotide
  Antisense strand to SEQ ID NO: 2146026
uucauagcaauagugugcu

SEQ ID NO: 2146028 - RNA, 19 nt, Artificial Sequence
  Description of Artificial Sequence: Synthetic oligonucleotide
  Sense strand starting at position 3233 of SEQ ID NO: 1882767
gucuauucuucugcauaca

SEQ ID NO: 2146029 - RNA, 19 nt, Artificial Sequence
  Description of Artificial Sequence: Synthetic oligonucleotide
  Antisense strand to SEQ ID NO: 2146028
uguaugcagaagaauagac

SEQ ID NO: 2146030 - RNA, 19 nt, Artificial Sequence
  Description of Artificial Sequence: Synthetic oligonucleotide
  Sense strand starting at position 3297 of SEQ ID NO: 1882767
guugguuguuauuugagau

SEQ ID NO: 2146031 - RNA, 19 nt, Artificial Sequence
  Description of Artificial Sequence: Synthetic oligonucleotide
  Antisense strand to SEQ ID NO: 2146030
aucucaaauaacaaccaac

SEQ ID NO: 2146032 - RNA, 19 nt, Artificial Sequence
  Description of Artificial Sequence: Synthetic oligonucleotide
  Sense strand starting at position 3632 of SEQ ID NO: 1882767
uuugguggcuuguuaauuu

SEQ ID NO: 2146033 - RNA, 19 nt, Artificial Sequence
  Description of Artificial Sequence: Synthetic oligonucleotide
  Antisense strand to SEQ ID NO: 2146032
aaauuaacaagccaccaaa

SEQ ID NO: 2146034 - RNA, 19 nt, Artificial Sequence
  Description of Artificial Sequence: Synthetic oligonucleotide
  Sense strand starting at position 3685 of SEQ ID NO: 1882767
uugagugcauaauuaauca

SEQ ID NO: 2146035 - RNA, 19 nt, Artificial Sequence
  Description of Artificial Sequence: Synthetic oligonucleotide
  Antisense strand to SEQ ID NO: 2146034
ugauuaauuaugcacucaa

SEQ ID NO: 2146036 - RNA, 19 nt, Artificial Sequence
  Description of Artificial Sequence: Synthetic oligonucleotide
  Sense strand starting at position 3689 of SEQ ID NO: 1882767
gugcauaauuaaucauuga

SEQ ID NO: 2146037 - RNA, 19 nt, Artificial Sequence
  Description of Artificial Sequence: Synthetic oligonucleotide
  Antisense strand to SEQ ID NO: 2146036
ucaaugauuaauuaugcac

SEQ ID NO: 2146038 - RNA, 19 nt, Artificial Sequence
  Description of Artificial Sequence: Synthetic oligonucleotide
  Sense strand starting at position 3767 of SEQ ID NO: 1882767
ugcaauguuauggguagau

SEQ ID NO: 2146039 - RNA, 19 nt, Artificial Sequence
  Description of Artificial Sequence: Synthetic oligonucleotide
  Antisense strand to SEQ ID NO: 2146038
aucuacccauaacauugca

SEQ ID NO: 2146040 - RNA, 19 nt, Artificial Sequence
  Description of Artificial Sequence: Synthetic oligonucleotide
  Sense strand starting at position 3776 of SEQ ID NO: 1882767
auggguagauaacauuaua

SEQ ID NO: 2146041 - RNA, 19 nt, Artificial Sequence
  Description of Artificial Sequence: Synthetic oligonucleotide
  Antisense strand to SEQ ID NO: 2146040
uauaauguuaucuacccau

SEQ ID NO: 2146042 - RNA, 19 nt, Artificial Sequence
  Description of Artificial Sequence: Synthetic oligonucleotide
  Sense strand starting at position 3803 of SEQ ID NO: 1882767
uauuguguaagggauguuu

SEQ ID NO: 2146043 - RNA, 19 nt, Artificial Sequence
  Description of Artificial Sequence: Synthetic oligonucleotide
  Antisense strand to SEQ ID NO: 2146042
aaacaucccuuacacaaua

SEQ ID NO: 2146044 - RNA, 19 nt, Artificial Sequence
  Description of Artificial Sequence: Synthetic oligonucleotide
  Sense strand starting at position 3805 of SEQ ID NO: 1882767
uuguguaagggauguuucu

SEQ ID NO: 2146045 - RNA, 19 nt, Artificial Sequence
  Description of Artificial Sequence: Synthetic oligonucleotide
  Antisense strand to SEQ ID NO: 2146044
agaaacaucccuuacacaa

SEQ ID NO: 2146046 - RNA, 19 nt, Artificial Sequence
  Description of Artificial Sequence: Synthetic oligonucleotide
  Sense strand starting at position 3811 of SEQ ID NO: 1882767
aagggauguuucuuaaacu

SEQ ID NO: 2146047 - RNA, 19 nt, Artificial Sequence
  Description of Artificial Sequence: Synthetic oligonucleotide
  Antisense strand to SEQ ID NO: 2146046
aguuuaagaaacaucccuu

SEQ ID NO: 2146048 - RNA, 19 nt, Artificial Sequence
  Description of Artificial Sequence: Synthetic oligonucleotide
  Sense strand starting at position 5 of SEQ ID NO: 1882768
uuauuuccuccacguugua

SEQ ID NO: 2146049 - RNA, 19 nt, Artificial Sequence
  Description of Artificial Sequence: Synthetic oligonucleotide
  Antisense strand to SEQ ID NO: 2146048
uacaacguggaggaaauaa

SEQ ID NO: 2146050 - RNA, 19 nt, Artificial Sequence
  Description of Artificial Sequence: Synthetic oligonucleotide
  Sense strand starting at position 18 of SEQ ID NO: 1882768
guuguacucuaagcauuua

SEQ ID NO: 2146051 - RNA, 19 nt, Artificial Sequence
  Description of Artificial Sequence: Synthetic oligonucleotide
  Antisense strand to SEQ ID NO: 2146050
uaaaugcuuagaguacaac

SEQ ID NO: 2146052 - RNA, 19 nt, Artificial Sequence
  Description of Artificial Sequence: Synthetic oligonucleotide
  Sense strand starting at position 99 of SEQ ID NO: 1882768
uggucauauuuguagauuu

SEQ ID NO: 2146053 - RNA, 19 nt, Artificial Sequence
  Description of Artificial Sequence: Synthetic oligonucleotide
  Antisense strand to SEQ ID NO: 2146052
aaaucuacaaauaugacca

SEQ ID NO: 2146054 - RNA, 19 nt, Artificial Sequence
  Description of Artificial Sequence: Synthetic oligonucleotide
  Sense strand starting at position 196 of SEQ ID NO: 1882768
agagaauuccaguggaugu

SEQ ID NO: 2146055 - RNA, 19 nt, Artificial Sequence
  Description of Artificial Sequence: Synthetic oligonucleotide
  Antisense strand to SEQ ID NO: 2146054
acauccacuggaauucucu

SEQ ID NO: 2146056 - RNA, 19 nt, Artificial Sequence
  Description of Artificial Sequence: Synthetic oligonucleotide
  Sense strand starting at position 197 of SEQ ID NO: 1882768
gagaauuccaguggauguc

SEQ ID NO: 2146057 - RNA, 19 nt, Artificial Sequence
  Description of Artificial Sequence: Synthetic oligonucleotide
  Antisense strand to SEQ ID NO: 2146056
gacauccacuggaauucuc

SEQ ID NO: 2146058 - RNA, 19 nt, Artificial Sequence
  Description of Artificial Sequence: Synthetic oligonucleotide
  Sense strand starting at position 200 of SEQ ID NO: 1882768
aauuccaguggaugucaaa

SEQ ID NO: 2146059 - RNA, 19 nt, Artificial Sequence
  Description of Artificial Sequence: Synthetic oligonucleotide
  Antisense strand to SEQ ID NO: 2146058
uuugacauccacuggaauu

SEQ ID NO: 2146060 - RNA, 19 nt, Artificial Sequence
  Description of Artificial Sequence: Synthetic oligonucleotide
  Sense strand starting at position 207 of SEQ ID NO: 1882768
guggaugucaaaugaauga

SEQ ID NO: 2146061 - RNA, 19 nt, Artificial Sequence
  Description of Artificial Sequence: Synthetic oligonucleotide
  Antisense strand to SEQ ID NO: 2146060
ucauucauuugacauccac

SEQ ID NO: 2146062 - RNA, 19 nt, Artificial Sequence
  Description of Artificial Sequence: Synthetic oligonucleotide
  Sense strand starting at position 301 of SEQ ID NO: 1882768
uucucugaagcagaacauu

SEQ ID NO: 2146063 - RNA, 19 nt, Artificial Sequence
  Description of Artificial Sequence: Synthetic oligonucleotide
  Antisense strand to SEQ ID NO: 2146062
aauguucugcuucagagaa

SEQ ID NO: 2146064 - RNA, 19 nt, Artificial Sequence
  Description of Artificial Sequence: Synthetic oligonucleotide
  Sense strand starting at position 533 of SEQ ID NO: 1882768
uggaguaguaaaugaggua

SEQ ID NO: 2146065 - RNA, 19 nt, Artificial Sequence
  Description of Artificial Sequence: Synthetic oligonucleotide
  Antisense strand to SEQ ID NO: 2146064
uaccucauuuacuacucca

SEQ ID NO: 2146066 - RNA, 19 nt, Artificial Sequence
  Description of Artificial Sequence: Synthetic oligonucleotide
  Sense strand starting at position 657 of SEQ ID NO: 1882768
augagcauuugcucuugca

SEQ ID NO: 2146067 - RNA, 19 nt, Artificial Sequence
  Description of Artificial Sequence: Synthetic oligonucleotide
  Antisense strand to SEQ ID NO: 2146066
ugcaagagcaaaugcucau

SEQ ID NO: 2146068 - RNA, 19 nt, Artificial Sequence
  Description of Artificial Sequence: Synthetic oligonucleotide
  Sense strand starting at position 696 of SEQ ID NO: 1882768
aucucagaguuuccuggaa

SEQ ID NO: 2146069 - RNA, 19 nt, Artificial Sequence
  Description of Artificial Sequence: Synthetic oligonucleotide
  Antisense strand to SEQ ID NO: 2146068
uuccaggaaacucugagau

SEQ ID NO: 2146070 - RNA, 19 nt, Artificial Sequence
  Description of Artificial Sequence: Synthetic oligonucleotide
  Sense strand starting at position 714 of SEQ ID NO: 1882768
auagaaucuuaugucaagu

SEQ ID NO: 2146071 - RNA, 19 nt, Artificial Sequence
  Description of Artificial Sequence: Synthetic oligonucleotide
  Antisense strand to SEQ ID NO: 2146070
acuugacauaagauucuau

SEQ ID NO: 2146072 - RNA, 19 nt, Artificial Sequence
  Description of Artificial Sequence: Synthetic oligonucleotide
  Sense strand starting at position 772 of SEQ ID NO: 1882768
aacuauugacaaugugaug

SEQ ID NO: 2146073 - RNA, 19 nt, Artificial Sequence
  Description of Artificial Sequence: Synthetic oligonucleotide
  Antisense strand to SEQ ID NO: 2146072
caucacauugucaauaguu

SEQ ID NO: 2146074 - RNA, 19 nt, Artificial Sequence
  Description of Artificial Sequence: Synthetic oligonucleotide
  Sense strand starting at position 790 of SEQ ID NO: 1882768
gcagauucugaaugaacaa

SEQ ID NO: 2146075 - RNA, 19 nt, Artificial Sequence
  Description of Artificial Sequence: Synthetic oligonucleotide
  Antisense strand to SEQ ID NO: 2146074
uuguucauucagaaucugc

SEQ ID NO: 2146076 - RNA, 19 nt, Artificial Sequence
  Description of Artificial Sequence: Synthetic oligonucleotide
  Sense strand starting at position 1002 of SEQ ID NO: 1882768
uuaacauaaugguuugaag

SEQ ID NO: 2146077 - RNA, 19 nt, Artificial Sequence
  Description of Artificial Sequence: Synthetic oligonucleotide
  Antisense strand to SEQ ID NO: 2146076
cuucaaaccauuauguuaa

SEQ ID NO: 2146078 - RNA, 19 nt, Artificial Sequence
  Description of Artificial Sequence: Synthetic oligonucleotide
  Sense strand starting at position 1004 of SEQ ID NO: 1882768
aacauaaugguuugaagua

SEQ ID NO: 2146079 - RNA, 19 nt, Artificial Sequence
  Description of Artificial Sequence: Synthetic oligonucleotide
  Antisense strand to SEQ ID NO: 2146078
uacuucaaaccauuauguu

SEQ ID NO: 2146080 - RNA, 19 nt, Artificial Sequence
  Description of Artificial Sequence: Synthetic oligonucleotide
  Sense strand starting at position 1256 of SEQ ID NO: 1882768
ucggcuuaacaucaaacuu

SEQ ID NO: 2146081 - RNA, 19 nt, Artificial Sequence
  Description of Artificial Sequence: Synthetic oligonucleotide
  Antisense strand to SEQ ID NO: 2146080
aaguuugauguuaagccga

SEQ ID NO: 2146082 - RNA, 19 nt, Artificial Sequence
  Description of Artificial Sequence: Synthetic oligonucleotide
  Sense strand starting at position 1359 of SEQ ID NO: 1882768
ugaugaccuuuaguagaag

SEQ ID NO: 2146083 - RNA, 19 nt, Artificial Sequence
  Description of Artificial Sequence: Synthetic oligonucleotide
  Antisense strand to SEQ ID NO: 2146082
cuucuacuaaaggucauca

SEQ ID NO: 2146084 - RNA, 19 nt, Artificial Sequence
  Description of Artificial Sequence: Synthetic oligonucleotide
  Sense strand starting at position 1448 of SEQ ID NO: 1882768
uaaaucuuguagguagaua

SEQ ID NO: 2146085 - RNA, 19 nt, Artificial Sequence
  Description of Artificial Sequence: Synthetic oligonucleotide
  Antisense strand to SEQ ID NO: 2146084
uaucuaccuacaagauuua

SEQ ID NO: 2146086 - RNA, 19 nt, Artificial Sequence
  Description of Artificial Sequence: Synthetic oligonucleotide
  Sense strand starting at position 1470 of SEQ ID NO: 1882768
gcauguguauuucugaauu

SEQ ID NO: 2146087 - RNA, 19 nt, Artificial Sequence
  Description of Artificial Sequence: Synthetic oligonucleotide
  Antisense strand to SEQ ID NO: 2146086
aauucagaaauacacaugc

SEQ ID NO: 2146088 - RNA, 19 nt, Artificial Sequence
  Description of Artificial Sequence: Synthetic oligonucleotide
  Sense strand starting at position 1472 of SEQ ID NO: 1882768
auguguauuucugaauuug

SEQ ID NO: 2146089 - RNA, 19 nt, Artificial Sequence
  Description of Artificial Sequence: Synthetic oligonucleotide
  Antisense strand to SEQ ID NO: 2146088
caaauucagaaauacacau

SEQ ID NO: 2146090 - RNA, 19 nt, Artificial Sequence
  Description of Artificial Sequence: Synthetic oligonucleotide
  Sense strand starting at position 1499 of SEQ ID NO: 1882768
uguauauaugcauaaugac

SEQ ID NO: 2146091 - RNA, 19 nt, Artificial Sequence
  Description of Artificial Sequence: Synthetic oligonucleotide
  Antisense strand to SEQ ID NO: 2146090
gucauuaugcauauauaca

SEQ ID NO: 2146092 - RNA, 19 nt, Artificial Sequence
  Description of Artificial Sequence: Synthetic oligonucleotide
  Sense strand starting at position 1995 of SEQ ID NO: 1882768
uaauguccugagugacaaa

SEQ ID NO: 2146093 - RNA, 19 nt, Artificial Sequence
  Description of Artificial Sequence: Synthetic oligonucleotide
  Antisense strand to SEQ ID NO: 2146092
uuugucacucaggacauua

SEQ ID NO: 2146094 - RNA, 19 nt, Artificial Sequence
  Description of Artificial Sequence: Synthetic oligonucleotide
  Sense strand starting at position 2164 of SEQ ID NO: 1882768
gaagguugaguugaucauc

SEQ ID NO: 2146095 - RNA, 19 nt, Artificial Sequence
  Description of Artificial Sequence: Synthetic oligonucleotide
  Antisense strand to SEQ ID NO: 2146094
gaugaucaacucaaccuuc

SEQ ID NO: 2146096 - RNA, 19 nt, Artificial Sequence
  Description of Artificial Sequence: Synthetic oligonucleotide
  Sense strand starting at position 2173 of SEQ ID NO: 1882768
guugaucaucaauggacaa

SEQ ID NO: 2146097 - RNA, 19 nt, Artificial Sequence
  Description of Artificial Sequence: Synthetic oligonucleotide
  Antisense strand to SEQ ID NO: 2146096
uuguccauugaugaucaac

SEQ ID NO: 2146098 - RNA, 19 nt, Artificial Sequence
  Description of Artificial Sequence: Synthetic oligonucleotide
  Sense strand starting at position 2387 of SEQ ID NO: 1882768
ugcaauguccuuuaugaua

SEQ ID NO: 2146099 - RNA, 19 nt, Artificial Sequence
  Description of Artificial Sequence: Synthetic oligonucleotide
  Antisense strand to SEQ ID NO: 2146098
uaucauaaaggacauugca

SEQ ID NO: 2146100 - RNA, 19 nt, Artificial Sequence
  Description of Artificial Sequence: Synthetic oligonucleotide
  Sense strand starting at position 2521 of SEQ ID NO: 1882768
gggacugucaccugaagug

SEQ ID NO: 2146101 - RNA, 19 nt, Artificial Sequence
  Description of Artificial Sequence: Synthetic oligonucleotide
  Antisense strand to SEQ ID NO: 2146100
cacuucaggugacaguccc

SEQ ID NO: 2146102 - RNA, 19 nt, Artificial Sequence
  Description of Artificial Sequence: Synthetic oligonucleotide
  Sense strand starting at position 2689 of SEQ ID NO: 1882768
uugguaaccagagguaaag

SEQ ID NO: 2146103 - RNA, 19 nt, Artificial Sequence
  Description of Artificial Sequence: Synthetic oligonucleotide
  Antisense strand to SEQ ID NO: 2146102
cuuuaccucugguuaccaa

SEQ ID NO: 2146104 - RNA, 19 nt, Artificial Sequence
  Description of Artificial Sequence: Synthetic oligonucleotide
  Sense strand starting at position 2733 of SEQ ID NO: 1882768
guaagaauguagagggaga

SEQ ID NO: 2146105 - RNA, 19 nt, Artificial Sequence
  Description of Artificial Sequence: Synthetic oligonucleotide
  Antisense strand to SEQ ID NO: 2146104
ucucccucuacauucuuac

SEQ ID NO: 2146106 - RNA, 19 nt, Artificial Sequence
  Description of Artificial Sequence: Synthetic oligonucleotide
  Sense strand starting at position 2797 of SEQ ID NO: 1882768
auguguagaugugucauuu

SEQ ID NO: 2146107 - RNA, 19 nt, Artificial Sequence
  Description of Artificial Sequence: Synthetic oligonucleotide
  Antisense strand to SEQ ID NO: 2146106
aaaugacacaucuacacau

SEQ ID NO: 2146108 - RNA, 19 nt, Artificial Sequence
  Description of Artificial Sequence: Synthetic oligonucleotide
  Sense strand starting at position 3000 of SEQ ID NO: 1882768
gugagcauuucccuaaguu

SEQ ID NO: 2146109 - RNA, 19 nt, Artificial Sequence
  Description of Artificial Sequence: Synthetic oligonucleotide
  Antisense strand to SEQ ID NO: 2146108
aacuuagggaaaugcucac

SEQ ID NO: 2146110 - RNA, 19 nt, Artificial Sequence
  Description of Artificial Sequence: Synthetic oligonucleotide
  Sense strand starting at position 3234 of SEQ ID NO: 1882768
gacagagcugggcauguua

SEQ ID NO: 2146111 - RNA, 19 nt, Artificial Sequence
  Description of Artificial Sequence: Synthetic oligonucleotide
  Antisense strand to SEQ ID NO: 2146110
uaacaugcccagcucuguc

SEQ ID NO: 2146112 - RNA, 19 nt, Artificial Sequence
  Description of Artificial Sequence: Synthetic oligonucleotide
  Sense strand starting at position 3245 of SEQ ID NO: 1882768
gcauguuaucaucacacag

SEQ ID NO: 2146113 - RNA, 19 nt, Artificial Sequence
  Description of Artificial Sequence: Synthetic oligonucleotide
  Antisense strand to SEQ ID NO: 2146112
cugugugaugauaacaugc

SEQ ID NO: 2146114 - RNA, 19 nt, Artificial Sequence
  Description of Artificial Sequence: Synthetic oligonucleotide
  Sense strand starting at position 3343 of SEQ ID NO: 1882768
uagcauuauguggaauauu

SEQ ID NO: 2146115 - RNA, 19 nt, Artificial Sequence
  Description of Artificial Sequence: Synthetic oligonucleotide
  Antisense strand to SEQ ID NO: 2146114
aauauuccacauaaugcua

SEQ ID NO: 2146116 - RNA, 19 nt, Artificial Sequence
  Description of Artificial Sequence: Synthetic oligonucleotide
  Sense strand starting at position 3534 of SEQ ID NO: 1882768
uuuguauauugaccuauga

SEQ ID NO: 2146117 - RNA, 19 nt, Artificial Sequence
  Description of Artificial Sequence: Synthetic oligonucleotide
  Antisense strand to SEQ ID NO: 2146116
ucauaggucaauauacaaa

SEQ ID NO: 2146118 - RNA, 19 nt, Artificial Sequence
  Description of Artificial Sequence: Synthetic oligonucleotide
  Sense strand starting at position 3561 of SEQ ID NO: 1882768
auaacucuuuguuuagaga

SEQ ID NO: 2146119 - RNA, 19 nt, Artificial Sequence
  Description of Artificial Sequence: Synthetic oligonucleotide
  Antisense strand to SEQ ID NO: 2146118
ucucuaaacaaagaguuau

SEQ ID NO: 2146120 - RNA, 19 nt, Artificial Sequence
  Description of Artificial Sequence: Synthetic oligonucleotide
  Sense strand starting at position 3572 of SEQ ID NO: 1882768
uuuagagacguguaauaca

SEQ ID NO: 2146121 - RNA, 19 nt, Artificial Sequence
  Description of Artificial Sequence: Synthetic oligonucleotide
  Antisense strand to SEQ ID NO: 2146120
uguauuacacgucucuaaa

SEQ ID NO: 2146122 - RNA, 19 nt, Artificial Sequence
  Description of Artificial Sequence: Synthetic oligonucleotide
  Sense strand starting at position 3577 of SEQ ID NO: 1882768
agacguguaauacaguaau

SEQ ID NO: 2146123 - RNA, 19 nt, Artificial Sequence
  Description of Artificial Sequence: Synthetic oligonucleotide
  Antisense strand to SEQ ID NO: 2146122
auuacuguauuacacgucu

SEQ ID NO: 2146124 - RNA, 19 nt, Artificial Sequence
  Description of Artificial Sequence: Synthetic oligonucleotide
  Sense strand starting at position 3595 of SEQ ID NO: 1882768
uuugaccauguguauaaua

SEQ ID NO: 2146125 - RNA, 19 nt, Artificial Sequence
  Description of Artificial Sequence: Synthetic oligonucleotide
  Antisense strand to SEQ ID NO: 2146124
uauuauacacauggucaaa

SEQ ID NO: 2146126 - RNA, 19 nt, Artificial Sequence
  Description of Artificial Sequence: Synthetic oligonucleotide
  Sense strand starting at position 3727 of SEQ ID NO: 1882768
ugaguuuaucgaugauaaa

SEQ ID NO: 2146127 - RNA, 19 nt, Artificial Sequence
  Description of Artificial Sequence: Synthetic oligonucleotide
  Antisense strand to SEQ ID NO: 2146126
uuuaucaucgauaaacuca

SEQ ID NO: 2146128 - RNA, 19 nt, Artificial Sequence
  Description of Artificial Sequence: Synthetic oligonucleotide
  Sense strand starting at position 6 of SEQ ID NO: 1882769
auuguaauguuucccaaac

SEQ ID NO: 2146129 - RNA, 19 nt, Artificial Sequence
  Description of Artificial Sequence: Synthetic oligonucleotide
  Antisense strand to SEQ ID NO: 2146128
guuugggaaacauuacaau

SEQ ID NO: 2146130 - RNA, 19 nt, Artificial Sequence
  Description of Artificial Sequence: Synthetic oligonucleotide
  Sense strand starting at position 7 of SEQ ID NO: 1882769
uuguaauguuucccaaaca

SEQ ID NO: 2146131 - RNA, 19 nt, Artificial Sequence
  Description of Artificial Sequence: Synthetic oligonucleotide
  Antisense strand to SEQ ID NO: 2146130
uguuugggaaacauuacaa

SEQ ID NO: 2146132 - RNA, 19 nt, Artificial Sequence
  Description of Artificial Sequence: Synthetic oligonucleotide
  Sense strand starting at position 31 of SEQ ID NO: 1882769
auaauaagugcuugaagua

SEQ ID NO: 2146133 - RNA, 19 nt, Artificial Sequence
  Description of Artificial Sequence: Synthetic oligonucleotide
  Antisense strand to SEQ ID NO: 2146132
uacuucaagcacuuauuau

SEQ ID NO: 2146134 - RNA, 19 nt, Artificial Sequence
  Description of Artificial Sequence: Synthetic oligonucleotide
  Sense strand starting at position 32 of SEQ ID NO: 1882769
uaauaagugcuugaaguaa

SEQ ID NO: 2146135 - RNA, 19 nt, Artificial Sequence
  Description of Artificial Sequence: Synthetic oligonucleotide
  Antisense strand to SEQ ID NO: 2146134
uuacuucaagcacuuauua

SEQ ID NO: 2146136 - RNA, 19 nt, Artificial Sequence
  Description of Artificial Sequence: Synthetic oligonucleotide
  Sense strand starting at position 56 of SEQ ID NO: 1882769
accuaauuagccugacuug

SEQ ID NO: 2146137 - RNA, 19 nt, Artificial Sequence
  Description of Artificial Sequence: Synthetic oligonucleotide
  Antisense strand to SEQ ID NO: 2146136
caagucaggcuaauuaggu

SEQ ID NO: 2146138 - RNA, 19 nt, Artificial Sequence
  Description of Artificial Sequence: Synthetic oligonucleotide
  Sense strand starting at position 57 of SEQ ID NO: 1882769
ccuaauuagccugacuuga

SEQ ID NO: 2146139 - RNA, 19 nt, Artificial Sequence
  Description of Artificial Sequence: Synthetic oligonucleotide
  Antisense strand to SEQ ID NO: 2146138
ucaagucaggcuaauuagg

SEQ ID NO: 2146140 - RNA, 19 nt, Artificial Sequence
  Description of Artificial Sequence: Synthetic oligonucleotide
  Sense strand starting at position 62 of SEQ ID NO: 1882769
uuagccugacuugaucauu

SEQ ID NO: 2146141 - RNA, 19 nt, Artificial Sequence
  Description of Artificial Sequence: Synthetic oligonucleotide
  Antisense strand to SEQ ID NO: 2146140
aaugaucaagucaggcuaa

SEQ ID NO: 2146142 - RNA, 19 nt, Artificial Sequence
  Description of Artificial Sequence: Synthetic oligonucleotide
  Sense strand starting at position 647 of SEQ ID NO: 1882769
auagcauaauguccugaaa

SEQ ID NO: 2146143 - RNA, 19 nt, Artificial Sequence
  Description of Artificial Sequence: Synthetic oligonucleotide
  Antisense strand to SEQ ID NO: 2146142
uuucaggacauuaugcuau

SEQ ID NO: 2146144 - RNA, 19 nt, Artificial Sequence
  Description of Artificial Sequence: Synthetic oligonucleotide
  Sense strand starting at position 650 of SEQ ID NO: 1882769
gcauaauguccugaaauua

SEQ ID NO: 2146145 - RNA, 19 nt, Artificial Sequence
  Description of Artificial Sequence: Synthetic oligonucleotide
  Antisense strand to SEQ ID NO: 2146144
uaauuucaggacauuaugc

SEQ ID NO: 2146146 - RNA, 19 nt, Artificial Sequence
  Description of Artificial Sequence: Synthetic oligonucleotide
  Sense strand starting at position 769 of SEQ ID NO: 1882769
ugguacaauguuugacaga

SEQ ID NO: 2146147 - RNA, 19 nt, Artificial Sequence
  Description of Artificial Sequence: Synthetic oligonucleotide
  Antisense strand to SEQ ID NO: 2146146
ucugucaaacauuguacca

SEQ ID NO: 2146148 - RNA, 19 nt, Artificial Sequence
  Description of Artificial Sequence: Synthetic oligonucleotide
  Sense strand starting at position 1293 of SEQ ID NO: 1882769
cuuaaaugauguuugacua

SEQ ID NO: 2146149 - RNA, 19 nt, Artificial Sequence
  Description of Artificial Sequence: Synthetic oligonucleotide
  Antisense strand to SEQ ID NO: 2146148
uagucaaacaucauuuaag

SEQ ID NO: 2146150 - RNA, 19 nt, Artificial Sequence
  Description of Artificial Sequence: Synthetic oligonucleotide
  Sense strand starting at position 1356 of SEQ ID NO: 1882769
guggcacaauuauccauau

SEQ ID NO: 2146151 - RNA, 19 nt, Artificial Sequence
  Description of Artificial Sequence: Synthetic oligonucleotide
  Antisense strand to SEQ ID NO: 2146150
auauggauaauugugccac

SEQ ID NO: 2146152 - RNA, 19 nt, Artificial Sequence
  Description of Artificial Sequence: Synthetic oligonucleotide
  Sense strand starting at position 1506 of SEQ ID NO: 1882769
uguaccacaugcuuaaaga

SEQ ID NO: 2146153 - RNA, 19 nt, Artificial Sequence
  Description of Artificial Sequence: Synthetic oligonucleotide
  Antisense strand to SEQ ID NO: 2146152
ucuuuaagcaugugguaca

SEQ ID NO: 2146154 - RNA, 19 nt, Artificial Sequence
  Description of Artificial Sequence: Synthetic oligonucleotide
  Sense strand starting at position 1507 of SEQ ID NO: 1882769
guaccacaugcuuaaagau

SEQ ID NO: 2146155 - RNA, 19 nt, Artificial Sequence
  Description of Artificial Sequence: Synthetic oligonucleotide
  Antisense strand to SEQ ID NO: 2146154
aucuuuaagcaugugguac

SEQ ID NO: 2146156 - RNA, 19 nt, Artificial Sequence
  Description of Artificial Sequence: Synthetic oligonucleotide
  Sense strand starting at position 1517 of SEQ ID NO: 1882769
cuuaaagaugcuggacaua

SEQ ID NO: 2146157 - RNA, 19 nt, Artificial Sequence
  Description of Artificial Sequence: Synthetic oligonucleotide
  Antisense strand to SEQ ID NO: 2146156
uauguccagcaucuuuaag

SEQ ID NO: 2146158 - RNA, 19 nt, Artificial Sequence
  Description of Artificial Sequence: Synthetic oligonucleotide
  Sense strand starting at position 1581 of SEQ ID NO: 1882769
uaauccguaggaugagaau

SEQ ID NO: 2146159 - RNA, 19 nt, Artificial Sequence
  Description of Artificial Sequence: Synthetic oligonucleotide
  Antisense strand to SEQ ID NO: 2146158
auucucauccuacggauua

SEQ ID NO: 2146160 - RNA, 19 nt, Artificial Sequence
  Description of Artificial Sequence: Synthetic oligonucleotide
  Sense strand starting at position 1587 of SEQ ID NO: 1882769
guaggaugagaauguucuu

SEQ ID NO: 2146161 - RNA, 19 nt, Artificial Sequence
  Description of Artificial Sequence: Synthetic oligonucleotide
  Antisense strand to SEQ ID NO: 2146160
aagaacauucucauccuac

SEQ ID NO: 2146162 - RNA, 19 nt, Artificial Sequence
  Description of Artificial Sequence: Synthetic oligonucleotide
  Sense strand starting at position 1592 of SEQ ID NO: 1882769
augagaauguucuuggagu

SEQ ID NO: 2146163 - RNA, 19 nt, Artificial Sequence
  Description of Artificial Sequence: Synthetic oligonucleotide
  Antisense strand to SEQ ID NO: 2146162
acuccaagaacauucucau

SEQ ID NO: 2146164 - RNA, 19 nt, Artificial Sequence
  Description of Artificial Sequence: Synthetic oligonucleotide
  Sense strand starting at position 2193 of SEQ ID NO: 1882769
auaguauuugucugcguga

SEQ ID NO: 2146165 - RNA, 19 nt, Artificial Sequence
  Description of Artificial Sequence: Synthetic oligonucleotide
  Antisense strand to SEQ ID NO: 2146164
ucacgcagacaaauacuau

SEQ ID NO: 2146166 - RNA, 19 nt, Artificial Sequence
  Description of Artificial Sequence: Synthetic oligonucleotide
  Sense strand starting at position 2194 of SEQ ID NO: 1882769
uaguauuugucugcgugaa

SEQ ID NO: 2146167 - RNA, 19 nt, Artificial Sequence
  Description of Artificial Sequence: Synthetic oligonucleotide
  Antisense strand to SEQ ID NO: 2146166
uucacgcagacaaauacua

SEQ ID NO: 2146168 - RNA, 19 nt, Artificial Sequence
  Description of Artificial Sequence: Synthetic oligonucleotide
  Sense strand starting at position 2195 of SEQ ID NO: 1882769
aguauuugucugcgugaau

SEQ ID NO: 2146169 - RNA, 19 nt, Artificial Sequence
  Description of Artificial Sequence: Synthetic oligonucleotide
  Antisense strand to SEQ ID NO: 2146168
auucacgcagacaaauacu

SEQ ID NO: 2146170 - RNA, 19 nt, Artificial Sequence
  Description of Artificial Sequence: Synthetic oligonucleotide
  Sense strand starting at position 2196 of SEQ ID NO: 1882769
guauuugucugcgugaaua

SEQ ID NO: 2146171 - RNA, 19 nt, Artificial Sequence
  Description of Artificial Sequence: Synthetic oligonucleotide
  Antisense strand to SEQ ID NO: 2146170
uauucacgcagacaaauac

SEQ ID NO: 2146172 - RNA, 19 nt, Artificial Sequence
  Description of Artificial Sequence: Synthetic oligonucleotide
  Sense strand starting at position 2198 of SEQ ID NO: 1882769
auuugucugcgugaauauu

SEQ ID NO: 2146173 - RNA, 19 nt, Artificial Sequence
  Description of Artificial Sequence: Synthetic oligonucleotide
  Antisense strand to SEQ ID NO: 2146172
aauauucacgcagacaaau

SEQ ID NO: 2146174 - RNA, 19 nt, Artificial Sequence
  Description of Artificial Sequence: Synthetic oligonucleotide
  Sense strand starting at position 2290 of SEQ ID NO: 1882769
guauuucugguucaagcga

SEQ ID NO: 2146175 - RNA, 19 nt, Artificial Sequence
  Description of Artificial Sequence: Synthetic oligonucleotide
  Antisense strand to SEQ ID NO: 2146174
ucgcuugaaccagaaauac

SEQ ID NO: 2146176 - RNA, 19 nt, Artificial Sequence
  Description of Artificial Sequence: Synthetic oligonucleotide
  Sense strand starting at position 2531 of SEQ ID NO: 1882769
agcacacucugguugacaa

SEQ ID NO: 2146177 - RNA, 19 nt, Artificial Sequence
  Description of Artificial Sequence: Synthetic oligonucleotide
  Antisense strand to SEQ ID NO: 2146176
uugucaaccagagugugcu

SEQ ID NO: 2146178 - RNA, 19 nt, Artificial Sequence
  Description of Artificial Sequence: Synthetic oligonucleotide
  Sense strand starting at position 2532 of SEQ ID NO: 1882769
gcacacucugguugacaaa

SEQ ID NO: 2146179 - RNA, 19 nt, Artificial Sequence
  Description of Artificial Sequence: Synthetic oligonucleotide
  Antisense strand to SEQ ID NO: 2146178
uuugucaaccagagugugc

SEQ ID NO: 2146180 - RNA, 19 nt, Artificial Sequence
  Description of Artificial Sequence: Synthetic oligonucleotide
  Sense strand starting at position 2700 of SEQ ID NO: 1882769
gaaucauugguuugaaaug

SEQ ID NO: 2146181 - RNA, 19 nt, Artificial Sequence
  Description of Artificial Sequence: Synthetic oligonucleotide
  Antisense strand to SEQ ID NO: 2146180
cauuucaaaccaaugauuc

SEQ ID NO: 2146182 - RNA, 19 nt, Artificial Sequence
  Description of Artificial Sequence: Synthetic oligonucleotide
  Sense strand starting at position 2749 of SEQ ID NO: 1882769
guugauaaaggauggagua

SEQ ID NO: 2146183 - RNA, 19 nt, Artificial Sequence
  Description of Artificial Sequence: Synthetic oligonucleotide
  Antisense strand to SEQ ID NO: 2146182
uacuccauccuuuaucaac

SEQ ID NO: 2146184 - RNA, 19 nt, Artificial Sequence
  Description of Artificial Sequence: Synthetic oligonucleotide
  Sense strand starting at position 2759 of SEQ ID NO: 1882769
gauggaguauugucacaaa

SEQ ID NO: 2146185 - RNA, 19 nt, Artificial Sequence
  Description of Artificial Sequence: Synthetic oligonucleotide
  Antisense strand to SEQ ID NO: 2146184
uuugugacaauacuccauc

SEQ ID NO: 2146186 - RNA, 19 nt, Artificial Sequence
  Description of Artificial Sequence: Synthetic oligonucleotide
  Sense strand starting at position 3048 of SEQ ID NO: 1882769
ugcgaauagaccugacauu

SEQ ID NO: 2146187 - RNA, 19 nt, Artificial Sequence
  Description of Artificial Sequence: Synthetic oligonucleotide
  Antisense strand to SEQ ID NO: 2146186
aaugucaggucuauucgca

SEQ ID NO: 2146188 - RNA, 19 nt, Artificial Sequence
  Description of Artificial Sequence: Synthetic oligonucleotide
  Sense strand starting at position 3049 of SEQ ID NO: 1882769
gcgaauagaccugacauug

SEQ ID NO: 2146189 - RNA, 19 nt, Artificial Sequence
  Description of Artificial Sequence: Synthetic oligonucleotide
  Antisense strand to SEQ ID NO: 2146188
caaugucaggucuauucgc

SEQ ID NO: 2146190 - RNA, 19 nt, Artificial Sequence
  Description of Artificial Sequence: Synthetic oligonucleotide
  Sense strand starting at position 3119 of SEQ ID NO: 1882769
ccaacaagauugcuaugaa

SEQ ID NO: 2146191 - RNA, 19 nt, Artificial Sequence
  Description of Artificial Sequence: Synthetic oligonucleotide
  Antisense strand to SEQ ID NO: 2146190
uucauagcaaucuuguugg

SEQ ID NO: 2146192 - RNA, 19 nt, Artificial Sequence
  Description of Artificial Sequence: Synthetic oligonucleotide
  Sense strand starting at position 3122 of SEQ ID NO: 1882769
acaagauugcuaugaaauc

SEQ ID NO: 2146193 - RNA, 19 nt, Artificial Sequence
  Description of Artificial Sequence: Synthetic oligonucleotide
  Antisense strand to SEQ ID NO: 2146192
gauuucauagcaaucuugu

SEQ ID NO: 2146194 - RNA, 19 nt, Artificial Sequence
  Description of Artificial Sequence: Synthetic oligonucleotide
  Sense strand starting at position 3179 of SEQ ID NO: 1882769
guggucguuguauuguaua

SEQ ID NO: 2146195 - RNA, 19 nt, Artificial Sequence
  Description of Artificial Sequence: Synthetic oligonucleotide
  Antisense strand to SEQ ID NO: 2146194
uauacaauacaacgaccac

SEQ ID NO: 2146196 - RNA, 19 nt, Artificial Sequence
  Description of Artificial Sequence: Synthetic oligonucleotide
  Sense strand starting at position 3232 of SEQ ID NO: 1882769
uauagauagcaacgauuga

SEQ ID NO: 2146197 - RNA, 19 nt, Artificial Sequence
  Description of Artificial Sequence: Synthetic oligonucleotide
  Antisense strand to SEQ ID NO: 2146196
ucaaucguugcuaucuaua

SEQ ID NO: 2146198 - RNA, 19 nt, Artificial Sequence
  Description of Artificial Sequence: Synthetic oligonucleotide
  Sense strand starting at position 3236 of SEQ ID NO: 1882769
gauagcaacgauugaacau

SEQ ID NO: 2146199 - RNA, 19 nt, Artificial Sequence
  Description of Artificial Sequence: Synthetic oligonucleotide
  Antisense strand to SEQ ID NO: 2146198
auguucaaucguugcuauc

SEQ ID NO: 2146200 - RNA, 19 nt, Artificial Sequence
  Description of Artificial Sequence: Synthetic oligonucleotide
  Sense strand starting at position 3396 of SEQ ID NO: 1882769
uguagugugcaauauaaga

SEQ ID NO: 2146201 - RNA, 19 nt, Artificial Sequence
  Description of Artificial Sequence: Synthetic oligonucleotide
  Antisense strand to SEQ ID NO: 2146200
ucuuauauugcacacuaca

SEQ ID NO: 2146202 - RNA, 19 nt, Artificial Sequence
  Description of Artificial Sequence: Synthetic oligonucleotide
  Sense strand starting at position 3523 of SEQ ID NO: 1882769
auaaauccucaagaguguu

SEQ ID NO: 2146203 - RNA, 19 nt, Artificial Sequence
  Description of Artificial Sequence: Synthetic oligonucleotide
  Antisense strand to SEQ ID NO: 2146202
aacacucuugaggauuuau

SEQ ID NO: 2146204 - RNA, 19 nt, Artificial Sequence
  Description of Artificial Sequence: Synthetic oligonucleotide
  Sense strand starting at position 3845 of SEQ ID NO: 1882769
acuucuucugaagggauca

SEQ ID NO: 2146205 - RNA, 19 nt, Artificial Sequence
  Description of Artificial Sequence: Synthetic oligonucleotide
  Antisense strand to SEQ ID NO: 2146204
ugaucccuucagaagaagu

SEQ ID NO: 2146206 - RNA, 19 nt, Artificial Sequence
  Description of Artificial Sequence: Synthetic oligonucleotide
  Sense strand starting at position 3871 of SEQ ID NO: 1882769
gcacacuuucugcagaacu

SEQ ID NO: 2146207 - RNA, 19 nt, Artificial Sequence
  Description of Artificial Sequence: Synthetic oligonucleotide
  Antisense strand to SEQ ID NO: 2146206
aguucugcagaaagugugc

SEQ ID NO: 2146208 - RNA, 19 nt, Artificial Sequence
  Description of Artificial Sequence: Synthetic oligonucleotide
  Sense strand starting at position 94 of SEQ ID NO: 1882770
uuugcauaugcucagacau

SEQ ID NO: 2146209 - RNA, 19 nt, Artificial Sequence
  Description of Artificial Sequence: Synthetic oligonucleotide
  Antisense strand to SEQ ID NO: 2146208
augucugagcauaugcaaa

SEQ ID NO: 2146210 - RNA, 19 nt, Artificial Sequence
  Description of Artificial Sequence: Synthetic oligonucleotide
  Sense strand starting at position 96 of SEQ ID NO: 1882770
ugcauaugcucagacauuc

SEQ ID NO: 2146211 - RNA, 19 nt, Artificial Sequence
  Description of Artificial Sequence: Synthetic oligonucleotide
  Antisense strand to SEQ ID NO: 2146210
gaaugucugagcauaugca

SEQ ID NO: 2146212 - RNA, 19 nt, Artificial Sequence
  Description of Artificial Sequence: Synthetic oligonucleotide
  Sense strand starting at position 126 of SEQ ID NO: 1882770
cuggcacaaucagagguua

SEQ ID NO: 2146213 - RNA, 19 nt, Artificial Sequence
  Description of Artificial Sequence: Synthetic oligonucleotide
  Antisense strand to SEQ ID NO: 2146212
uaaccucugauugugccag

SEQ ID NO: 2146214 - RNA, 19 nt, Artificial Sequence
  Description of Artificial Sequence: Synthetic oligonucleotide
  Sense strand starting at position 128 of SEQ ID NO: 1882770
ggcacaaucagagguuaua

SEQ ID NO: 2146215 - RNA, 19 nt, Artificial Sequence
  Description of Artificial Sequence: Synthetic oligonucleotide
  Antisense strand to SEQ ID NO: 2146214
uauaaccucugauugugcc

SEQ ID NO: 2146216 - RNA, 19 nt, Artificial Sequence
  Description of Artificial Sequence: Synthetic oligonucleotide
  Sense strand starting at position 141 of SEQ ID NO: 1882770
guuauaaccucagagagga

SEQ ID NO: 2146217 - RNA, 19 nt, Artificial Sequence
  Description of Artificial Sequence: Synthetic oligonucleotide
  Antisense strand to SEQ ID NO: 2146216
uccucucugagguuauaac

SEQ ID NO: 2146218 - RNA, 19 nt, Artificial Sequence
  Description of Artificial Sequence: Synthetic oligonucleotide
  Sense strand starting at position 194 of SEQ ID NO: 1882770
uuugucucuuaccugauau

SEQ ID NO: 2146219 - RNA, 19 nt, Artificial Sequence
  Description of Artificial Sequence: Synthetic oligonucleotide
  Antisense strand to SEQ ID NO: 2146218
auaucagguaagagacaaa

SEQ ID NO: 2146220 - RNA, 19 nt, Artificial Sequence
  Description of Artificial Sequence: Synthetic oligonucleotide
  Sense strand starting at position 198 of SEQ ID NO: 1882770
ucucuuaccugauaucgau

SEQ ID NO: 2146221 - RNA, 19 nt, Artificial Sequence
  Description of Artificial Sequence: Synthetic oligonucleotide
  Antisense strand to SEQ ID NO: 2146220
aucgauaucagguaagaga

SEQ ID NO: 2146222 - RNA, 19 nt, Artificial Sequence
  Description of Artificial Sequence: Synthetic oligonucleotide
  Sense strand starting at position 862 of SEQ ID NO: 1882770
cucaaaguuugagagaaag

SEQ ID NO: 2146223 - RNA, 19 nt, Artificial Sequence
  Description of Artificial Sequence: Synthetic oligonucleotide
  Antisense strand to SEQ ID NO: 2146222
cuuucucucaaacuuugag

SEQ ID NO: 2146224 - RNA, 19 nt, Artificial Sequence
  Description of Artificial Sequence: Synthetic oligonucleotide
  Sense strand starting at position 891 of SEQ ID NO: 1882770
gccugagucuaaugaauuc

SEQ ID NO: 2146225 - RNA, 19 nt, Artificial Sequence
  Description of Artificial Sequence: Synthetic oligonucleotide
  Antisense strand to SEQ ID NO: 2146224
gaauucauuagacucaggc

SEQ ID NO: 2146226 - RNA, 19 nt, Artificial Sequence
  Description of Artificial Sequence: Synthetic oligonucleotide
  Sense strand starting at position 902 of SEQ ID NO: 1882770
augaauucccaaugcugaa

SEQ ID NO: 2146227 - RNA, 19 nt, Artificial Sequence
  Description of Artificial Sequence: Synthetic oligonucleotide
  Antisense strand to SEQ ID NO: 2146226
uucagcauugggaauucau

SEQ ID NO: 2146228 - RNA, 19 nt, Artificial Sequence
  Description of Artificial Sequence: Synthetic oligonucleotide
  Sense strand starting at position 968 of SEQ ID NO: 1882770
caguguuuggacuggaaga

SEQ ID NO: 2146229 - RNA, 19 nt, Artificial Sequence
  Description of Artificial Sequence: Synthetic oligonucleotide
  Antisense strand to SEQ ID NO: 2146228
ucuuccaguccaaacacug

SEQ ID NO: 2146230 - RNA, 19 nt, Artificial Sequence
  Description of Artificial Sequence: Synthetic oligonucleotide
  Sense strand starting at position 969 of SEQ ID NO: 1882770
aguguuuggacuggaagau

SEQ ID NO: 2146231 - RNA, 19 nt, Artificial Sequence
  Description of Artificial Sequence: Synthetic oligonucleotide
  Antisense strand to SEQ ID NO: 2146230
aucuuccaguccaaacacu

SEQ ID NO: 2146232 - RNA, 19 nt, Artificial Sequence
  Description of Artificial Sequence: Synthetic oligonucleotide
  Sense strand starting at position 1322 of SEQ ID NO: 1882770
agacaucagcacuguuuga

SEQ ID NO: 2146233 - RNA, 19 nt, Artificial Sequence
  Description of Artificial Sequence: Synthetic oligonucleotide
  Antisense strand to SEQ ID NO: 2146232
ucaaacagugcugaugucu

SEQ ID NO: 2146234 - RNA, 19 nt, Artificial Sequence
  Description of Artificial Sequence: Synthetic oligonucleotide
  Sense strand starting at position 1327 of SEQ ID NO: 1882770
ucagcacuguuugagggaa

SEQ ID NO: 2146235 - RNA, 19 nt, Artificial Sequence
  Description of Artificial Sequence: Synthetic oligonucleotide
  Antisense strand to SEQ ID NO: 2146234
uucccucaaacagugcuga

SEQ ID NO: 2146236 - RNA, 19 nt, Artificial Sequence
  Description of Artificial Sequence: Synthetic oligonucleotide
  Sense strand starting at position 1455 of SEQ ID NO: 1882770
agggcaugaucccugguua

SEQ ID NO: 2146237 - RNA, 19 nt, Artificial Sequence
  Description of Artificial Sequence: Synthetic oligonucleotide
  Antisense strand to SEQ ID NO: 2146236
uaaccagggaucaugcccu

SEQ ID NO: 2146238 - RNA, 19 nt, Artificial Sequence
  Description of Artificial Sequence: Synthetic oligonucleotide
  Sense strand starting at position 1456 of SEQ ID NO: 1882770
gggcaugaucccugguuag

SEQ ID NO: 2146239 - RNA, 19 nt, Artificial Sequence
  Description of Artificial Sequence: Synthetic oligonucleotide
  Antisense strand to SEQ ID NO: 2146238
cuaaccagggaucaugccc

SEQ ID NO: 2146240 - RNA, 19 nt, Artificial Sequence
  Description of Artificial Sequence: Synthetic oligonucleotide
  Sense strand starting at position 2249 of SEQ ID NO: 1882770
gccaguaggaaauaaaugu

SEQ ID NO: 2146241 - RNA, 19 nt, Artificial Sequence
  Description of Artificial Sequence: Synthetic oligonucleotide
  Antisense strand to SEQ ID NO: 2146240
acauuuauuuccuacuggc

SEQ ID NO: 2146242 - RNA, 19 nt, Artificial Sequence
  Description of Artificial Sequence: Synthetic oligonucleotide
  Sense strand starting at position 2260 of SEQ ID NO: 1882770
auaaauguguccuucccua

SEQ ID NO: 2146243 - RNA, 19 nt, Artificial Sequence
  Description of Artificial Sequence: Synthetic oligonucleotide
  Antisense strand to SEQ ID NO: 2146242
uagggaaggacacauuuau

SEQ ID NO: 2146244 - RNA, 19 nt, Artificial Sequence
  Description of Artificial Sequence: Synthetic oligonucleotide
  Sense strand starting at position 2488 of SEQ ID NO: 1882770
ucacuucguuccuugcuaa

SEQ ID NO: 2146245 - RNA, 19 nt, Artificial Sequence
  Description of Artificial Sequence: Synthetic oligonucleotide
  Antisense strand to SEQ ID NO: 2146244
uuagcaaggaacgaaguga

SEQ ID NO: 2146246 - RNA, 19 nt, Artificial Sequence
  Description of Artificial Sequence: Synthetic oligonucleotide
  Sense strand starting at position 2491 of SEQ ID NO: 1882770
cuucguuccuugcuaagau

SEQ ID NO: 2146247 - RNA, 19 nt, Artificial Sequence
  Description of Artificial Sequence: Synthetic oligonucleotide
  Antisense strand to SEQ ID NO: 2146246
aucuuagcaaggaacgaag

SEQ ID NO: 2146248 - RNA, 19 nt, Artificial Sequence
  Description of Artificial Sequence: Synthetic oligonucleotide
  Sense strand starting at position 2492 of SEQ ID NO: 1882770
uucguuccuugcuaagaua

SEQ ID NO: 2146249 - RNA, 19 nt, Artificial Sequence
  Description of Artificial Sequence: Synthetic oligonucleotide
  Antisense strand to SEQ ID NO: 2146248
uaucuuagcaaggaacgaa

SEQ ID NO: 2146250 - RNA, 19 nt, Artificial Sequence
  Description of Artificial Sequence: Synthetic oligonucleotide
  Sense strand starting at position 2593 of SEQ ID NO: 1882770
agguaagucugcuguagug

SEQ ID NO: 2146251 - RNA, 19 nt, Artificial Sequence
  Description of Artificial Sequence: Synthetic oligonucleotide
  Antisense strand to SEQ ID NO: 2146250
cacuacagcagacuuaccu

SEQ ID NO: 2146252 - RNA, 19 nt, Artificial Sequence
  Description of Artificial Sequence: Synthetic oligonucleotide
  Sense strand starting at position 2632 of SEQ ID NO: 1882770
caccuugacugugugauca

SEQ ID NO: 2146253 - RNA, 19 nt, Artificial Sequence
  Description of Artificial Sequence: Synthetic oligonucleotide
  Antisense strand to SEQ ID NO: 2146252
ugaucacacagucaaggug

SEQ ID NO: 2146254 - RNA, 19 nt, Artificial Sequence
  Description of Artificial Sequence: Synthetic oligonucleotide
  Sense strand starting at position 2722 of SEQ ID NO: 1882770
ucuccaucaccaugagaag

SEQ ID NO: 2146255 - RNA, 19 nt, Artificial Sequence
  Description of Artificial Sequence: Synthetic oligonucleotide
  Antisense strand to SEQ ID NO: 2146254
cuucucauggugauggaga

SEQ ID NO: 2146256 - RNA, 19 nt, Artificial Sequence
  Description of Artificial Sequence: Synthetic oligonucleotide
  Sense strand starting at position 2964 of SEQ ID NO: 1882770
ggaagcugcagucaaaugu

SEQ ID NO: 2146257 - RNA, 19 nt, Artificial Sequence
  Description of Artificial Sequence: Synthetic oligonucleotide
  Antisense strand to SEQ ID NO: 2146256
acauuugacugcagcuucc

SEQ ID NO: 2146258 - RNA, 19 nt, Artificial Sequence
  Description of Artificial Sequence: Synthetic oligonucleotide
  Sense strand starting at position 3258 of SEQ ID NO: 1882770
aaaugucagugggagacua

SEQ ID NO: 2146259 - RNA, 19 nt, Artificial Sequence
  Description of Artificial Sequence: Synthetic oligonucleotide
  Antisense strand to SEQ ID NO: 2146258
uagucucccacugacauuu

SEQ ID NO: 2146260 - RNA, 19 nt, Artificial Sequence
  Description of Artificial Sequence: Synthetic oligonucleotide
  Sense strand starting at position 3273 of SEQ ID NO: 1882770
acuagaaguuagcucaaca

SEQ ID NO: 2146261 - RNA, 19 nt, Artificial Sequence
  Description of Artificial Sequence: Synthetic oligonucleotide
  Antisense strand to SEQ ID NO: 2146260
uguugagcuaacuucuagu

SEQ ID NO: 2146262 - RNA, 19 nt, Artificial Sequence
  Description of Artificial Sequence: Synthetic oligonucleotide
  Sense strand starting at position 3373 of SEQ ID NO: 1882770
caguguugucagggcugaa

SEQ ID NO: 2146263 - RNA, 19 nt, Artificial Sequence
  Description of Artificial Sequence: Synthetic oligonucleotide
  Antisense strand to SEQ ID NO: 2146262
uucagcccugacaacacug

SEQ ID NO: 2146264 - RNA, 19 nt, Artificial Sequence
  Description of Artificial Sequence: Synthetic oligonucleotide
  Sense strand starting at position 3443 of SEQ ID NO: 1882770
ugaggaggguucuuagcau

SEQ ID NO: 2146265 - RNA, 19 nt, Artificial Sequence
  Description of Artificial Sequence: Synthetic oligonucleotide
  Antisense strand to SEQ ID NO: 2146264
augcuaagaacccuccuca

SEQ ID NO: 2146266 - RNA, 19 nt, Artificial Sequence
  Description of Artificial Sequence: Synthetic oligonucleotide
  Sense strand starting at position 3447 of SEQ ID NO: 1882770
gaggguucuuagcauccuu

SEQ ID NO: 2146267 - RNA, 19 nt, Artificial Sequence
  Description of Artificial Sequence: Synthetic oligonucleotide
  Antisense strand to SEQ ID NO: 2146266
aaggaugcuaagaacccuc

SEQ ID NO: 2146268 - RNA, 19 nt, Artificial Sequence
  Description of Artificial Sequence: Synthetic oligonucleotide
  Sense strand starting at position 3471 of SEQ ID NO: 1882770
ccaacuuggccaugggaga

SEQ ID NO: 2146269 - RNA, 19 nt, Artificial Sequence
  Description of Artificial Sequence: Synthetic oligonucleotide
  Antisense strand to SEQ ID NO: 2146268
ucucccauggccaaguugg

SEQ ID NO: 2146270 - RNA, 19 nt, Artificial Sequence
  Description of Artificial Sequence: Synthetic oligonucleotide
  Sense strand starting at position 3540 of SEQ ID NO: 1882770
agauguuuacuuuaggcuu

SEQ ID NO: 2146271 - RNA, 19 nt, Artificial Sequence
  Description of Artificial Sequence: Synthetic oligonucleotide
  Antisense strand to SEQ ID NO: 2146270
aagccuaaaguaaacaucu

SEQ ID NO: 2146272 - RNA, 19 nt, Artificial Sequence
  Description of Artificial Sequence: Synthetic oligonucleotide
  Sense strand starting at position 3543 of SEQ ID NO: 1882770
uguuuacuuuaggcuuuau

SEQ ID NO: 2146273 - RNA, 19 nt, Artificial Sequence
  Description of Artificial Sequence: Synthetic oligonucleotide
  Antisense strand to SEQ ID NO: 2146272
auaaagccuaaaguaaaca

SEQ ID NO: 2146274 - RNA, 19 nt, Artificial Sequence
  Description of Artificial Sequence: Synthetic oligonucleotide
  Sense strand starting at position 3675 of SEQ ID NO: 1882770
auuauuguagcuuggugua

SEQ ID NO: 2146275 - RNA, 19 nt, Artificial Sequence
  Description of Artificial Sequence: Synthetic oligonucleotide
  Antisense strand to SEQ ID NO: 2146274
uacaccaagcuacaauaau

SEQ ID NO: 2146276 - RNA, 19 nt, Artificial Sequence
  Description of Artificial Sequence: Synthetic oligonucleotide
  Sense strand starting at position 3743 of SEQ ID NO: 1882770
ucagaugagcuuugagaua

SEQ ID NO: 2146277 - RNA, 19 nt, Artificial Sequence
  Description of Artificial Sequence: Synthetic oligonucleotide
  Antisense strand to SEQ ID NO: 2146276
uaucucaaagcucaucuga

SEQ ID NO: 2146278 - RNA, 19 nt, Artificial Sequence
  Description of Artificial Sequence: Synthetic oligonucleotide
  Sense strand starting at position 3795 of SEQ ID NO: 1882770
guacuuagcuuguaugcua

SEQ ID NO: 2146279 - RNA, 19 nt, Artificial Sequence
  Description of Artificial Sequence: Synthetic oligonucleotide
  Antisense strand to SEQ ID NO: 2146278
uagcauacaagcuaaguac

SEQ ID NO: 2146280 - RNA, 19 nt, Artificial Sequence
  Description of Artificial Sequence: Synthetic oligonucleotide
  Sense strand starting at position 3862 of SEQ ID NO: 1882770
gugguuuacugucuuuguu

SEQ ID NO: 2146281 - RNA, 19 nt, Artificial Sequence
  Description of Artificial Sequence: Synthetic oligonucleotide
  Antisense strand to SEQ ID NO: 2146280
aacaaagacaguaaaccac

SEQ ID NO: 2146282 - RNA, 19 nt, Artificial Sequence
  Description of Artificial Sequence: Synthetic oligonucleotide
  Sense strand starting at position 56 of SEQ ID NO: 1882771
aguugauugaggcaugagu

SEQ ID NO: 2146283 - RNA, 19 nt, Artificial Sequence
  Description of Artificial Sequence: Synthetic oligonucleotide
  Antisense strand to SEQ ID NO: 2146282
acucaugccucaaucaacu

SEQ ID NO: 2146284 - RNA, 19 nt, Artificial Sequence
  Description of Artificial Sequence: Synthetic oligonucleotide
  Sense strand starting at position 67 of SEQ ID NO: 1882771
gcaugaguucuauauguau

SEQ ID NO: 2146285 - RNA, 19 nt, Artificial Sequence
  Description of Artificial Sequence: Synthetic oligonucleotide
  Antisense strand to SEQ ID NO: 2146284
auacauauagaacucaugc

SEQ ID NO: 2146286 - RNA, 19 nt, Artificial Sequence
  Description of Artificial Sequence: Synthetic oligonucleotide
  Sense strand starting at position 192 of SEQ ID NO: 1882771
agagucuuucugcacagau

SEQ ID NO: 2146287 - RNA, 19 nt, Artificial Sequence
  Description of Artificial Sequence: Synthetic oligonucleotide
  Antisense strand to SEQ ID NO: 2146286
aucugugcagaaagacucu

SEQ ID NO: 2146288 - RNA, 19 nt, Artificial Sequence
  Description of Artificial Sequence: Synthetic oligonucleotide
  Sense strand starting at position 194 of SEQ ID NO: 1882771
agucuuucugcacagauag

SEQ ID NO: 2146289 - RNA, 19 nt, Artificial Sequence
  Description of Artificial Sequence: Synthetic oligonucleotide
  Antisense strand to SEQ ID NO: 2146288
cuaucugugcagaaagacu

SEQ ID NO: 2146290 - RNA, 19 nt, Artificial Sequence
  Description of Artificial Sequence: Synthetic oligonucleotide
  Sense strand starting at position 221 of SEQ ID NO: 1882771
ccucaaugaccuugagacu

SEQ ID NO: 2146291 - RNA, 19 nt, Artificial Sequence
  Description of Artificial Sequence: Synthetic oligonucleotide
  Antisense strand to SEQ ID NO: 2146290
agucucaaggucauugagg

SEQ ID NO: 2146292 - RNA, 19 nt, Artificial Sequence
  Description of Artificial Sequence: Synthetic oligonucleotide
  Sense strand starting at position 254 of SEQ ID NO: 1882771
uuuaguauaugggcaugau

SEQ ID NO: 2146293 - RNA, 19 nt, Artificial Sequence
  Description of Artificial Sequence: Synthetic oligonucleotide
  Antisense strand to SEQ ID NO: 2146292
aucaugcccauauacuaaa

SEQ ID NO: 2146294 - RNA, 19 nt, Artificial Sequence
  Description of Artificial Sequence: Synthetic oligonucleotide
  Sense strand starting at position 258 of SEQ ID NO: 1882771
guauaugggcaugaugacu

SEQ ID NO: 2146295 - RNA, 19 nt, Artificial Sequence
  Description of Artificial Sequence: Synthetic oligonucleotide
  Antisense strand to SEQ ID NO: 2146294
agucaucaugcccauauac

SEQ ID NO: 2146296 - RNA, 19 nt, Artificial Sequence
  Description of Artificial Sequence: Synthetic oligonucleotide
  Sense strand starting at position 263 of SEQ ID NO: 1882771
ugggcaugaugacuccaaa

SEQ ID NO: 2146297 - RNA, 19 nt, Artificial Sequence
  Description of Artificial Sequence: Synthetic oligonucleotide
  Antisense strand to SEQ ID NO: 2146296
uuuggagucaucaugccca

SEQ ID NO: 2146298 - RNA, 19 nt, Artificial Sequence
  Description of Artificial Sequence: Synthetic oligonucleotide
  Sense strand starting at position 299 of SEQ ID NO: 1882771
auguuaaagaguuguuaag

SEQ ID NO: 2146299 - RNA, 19 nt, Artificial Sequence
  Description of Artificial Sequence: Synthetic oligonucleotide
  Antisense strand to SEQ ID NO: 2146298
cuuaacaacucuuuaacau

SEQ ID NO: 2146300 - RNA, 19 nt, Artificial Sequence
  Description of Artificial Sequence: Synthetic oligonucleotide
  Sense strand starting at position 301 of SEQ ID NO: 1882771
guuaaagaguuguuaagac

SEQ ID NO: 2146301 - RNA, 19 nt, Artificial Sequence
  Description of Artificial Sequence: Synthetic oligonucleotide
  Antisense strand to SEQ ID NO: 2146300
gucuuaacaacucuuuaac

SEQ ID NO: 2146302 - RNA, 19 nt, Artificial Sequence
  Description of Artificial Sequence: Synthetic oligonucleotide
  Sense strand starting at position 310 of SEQ ID NO: 1882771
uuguuaagacuccaguaag

SEQ ID NO: 2146303 - RNA, 19 nt, Artificial Sequence
  Description of Artificial Sequence: Synthetic oligonucleotide
  Antisense strand to SEQ ID NO: 2146302
cuuacuggagucuuaacaa

SEQ ID NO: 2146304 - RNA, 19 nt, Artificial Sequence
  Description of Artificial Sequence: Synthetic oligonucleotide
  Sense strand starting at position 397 of SEQ ID NO: 1882771
cugucauagucauccaaga

SEQ ID NO: 2146305 - RNA, 19 nt, Artificial Sequence
  Description of Artificial Sequence: Synthetic oligonucleotide
  Antisense strand to SEQ ID NO: 2146304
ucuuggaugacuaugacag

SEQ ID NO: 2146306 - RNA, 19 nt, Artificial Sequence
  Description of Artificial Sequence: Synthetic oligonucleotide
  Sense strand starting at position 533 of SEQ ID NO: 1882771
cucaaauggccauagucaa

SEQ ID NO: 2146307 - RNA, 19 nt, Artificial Sequence
  Description of Artificial Sequence: Synthetic oligonucleotide
  Antisense strand to SEQ ID NO: 2146306
uugacuauggccauuugag

SEQ ID NO: 2146308 - RNA, 19 nt, Artificial Sequence
  Description of Artificial Sequence: Synthetic oligonucleotide
  Sense strand starting at position 720 of SEQ ID NO: 1882771
acuuuaaggcagcaauaau

SEQ ID NO: 2146309 - RNA, 19 nt, Artificial Sequence
  Description of Artificial Sequence: Synthetic oligonucleotide
  Antisense strand to SEQ ID NO: 2146308
auuauugcugccuuaaagu

SEQ ID NO: 2146310 - RNA, 19 nt, Artificial Sequence
  Description of Artificial Sequence: Synthetic oligonucleotide
  Sense strand starting at position 829 of SEQ ID NO: 1882771
gugcauguggaaggauaau

SEQ ID NO: 2146311 - RNA, 19 nt, Artificial Sequence
  Description of Artificial Sequence: Synthetic oligonucleotide
  Antisense strand to SEQ ID NO: 2146310
auuauccuuccacaugcac

SEQ ID NO: 2146312 - RNA, 19 nt, Artificial Sequence
  Description of Artificial Sequence: Synthetic oligonucleotide
  Sense strand starting at position 841 of SEQ ID NO: 1882771
ggauaauugccaggaguuc

SEQ ID NO: 2146313 - RNA, 19 nt, Artificial Sequence
  Description of Artificial Sequence: Synthetic oligonucleotide
  Antisense strand to SEQ ID NO: 2146312
gaacuccuggcaauuaucc

SEQ ID NO: 2146314 - RNA, 19 nt, Artificial Sequence
  Description of Artificial Sequence: Synthetic oligonucleotide
  Sense strand starting at position 1132 of SEQ ID NO: 1882771
agccauauugaguauaguu

SEQ ID NO: 2146315 - RNA, 19 nt, Artificial Sequence
  Description of Artificial Sequence: Synthetic oligonucleotide
  Antisense strand to SEQ ID NO: 2146314
aacuauacucaauauggcu

SEQ ID NO: 2146316 - RNA, 19 nt, Artificial Sequence
  Description of Artificial Sequence: Synthetic oligonucleotide
  Sense strand starting at position 1137 of SEQ ID NO: 1882771
uauugaguauaguuagaga

SEQ ID NO: 2146317 - RNA, 19 nt, Artificial Sequence
  Description of Artificial Sequence: Synthetic oligonucleotide
  Antisense strand to SEQ ID NO: 2146316
ucucuaacuauacucaaua

SEQ ID NO: 2146318 - RNA, 19 nt, Artificial Sequence
  Description of Artificial Sequence: Synthetic oligonucleotide
  Sense strand starting at position 1191 of SEQ ID NO: 1882771
augcucugaggucaucaaa

SEQ ID NO: 2146319 - RNA, 19 nt, Artificial Sequence
  Description of Artificial Sequence: Synthetic oligonucleotide
  Antisense strand to SEQ ID NO: 2146318
uuugaugaccucagagcau

SEQ ID NO: 2146320 - RNA, 19 nt, Artificial Sequence
  Description of Artificial Sequence: Synthetic oligonucleotide
  Sense strand starting at position 1194 of SEQ ID NO: 1882771
cucugaggucaucaaagua

SEQ ID NO: 2146321 - RNA, 19 nt, Artificial Sequence
  Description of Artificial Sequence: Synthetic oligonucleotide
  Antisense strand to SEQ ID NO: 2146320
uacuuugaugaccucagag

SEQ ID NO: 2146322 - RNA, 19 nt, Artificial Sequence
  Description of Artificial Sequence: Synthetic oligonucleotide
  Sense strand starting at position 1365 of SEQ ID NO: 1882771
ucagcaaauguuugaauaa

SEQ ID NO: 2146323 - RNA, 19 nt, Artificial Sequence
  Description of Artificial Sequence: Synthetic oligonucleotide
  Antisense strand to SEQ ID NO: 2146322
uuauucaaacauuugcuga

SEQ ID NO: 2146324 - RNA, 19 nt, Artificial Sequence
  Description of Artificial Sequence: Synthetic oligonucleotide
  Sense strand starting at position 1394 of SEQ ID NO: 1882771
uaagaaaguggauguaugu

SEQ ID NO: 2146325 - RNA, 19 nt, Artificial Sequence
  Description of Artificial Sequence: Synthetic oligonucleotide
  Antisense strand to SEQ ID NO: 2146324
acauacauccacuuucuua

SEQ ID NO: 2146326 - RNA, 19 nt, Artificial Sequence
  Description of Artificial Sequence: Synthetic oligonucleotide
  Sense strand starting at position 1644 of SEQ ID NO: 1882771
auucuucuguaauugaaug

SEQ ID NO: 2146327 - RNA, 19 nt, Artificial Sequence
  Description of Artificial Sequence: Synthetic oligonucleotide
  Antisense strand to SEQ ID NO: 2146326
cauucaauuacagaagaau

SEQ ID NO: 2146328 - RNA, 19 nt, Artificial Sequence
  Description of Artificial Sequence: Synthetic oligonucleotide
  Sense strand starting at position 1649 of SEQ ID NO: 1882771
ucuguaauugaauggaacu

SEQ ID NO: 2146329 - RNA, 19 nt, Artificial Sequence
  Description of Artificial Sequence: Synthetic oligonucleotide
  Antisense strand to SEQ ID NO: 2146328
aguuccauucaauuacaga

SEQ ID NO: 2146330 - RNA, 19 nt, Artificial Sequence
  Description of Artificial Sequence: Synthetic oligonucleotide
  Sense strand starting at position 1671 of SEQ ID NO: 1882771
uugaucuaguuacuaugua

SEQ ID NO: 2146331 - RNA, 19 nt, Artificial Sequence
  Description of Artificial Sequence: Synthetic oligonucleotide
  Antisense strand to SEQ ID NO: 2146330
uacauaguaacuagaucaa

SEQ ID NO: 2146332 - RNA, 19 nt, Artificial Sequence
  Description of Artificial Sequence: Synthetic oligonucleotide
  Sense strand starting at position 1714 of SEQ ID NO: 1882771
augugauugcaaugaauac

SEQ ID NO: 2146333 - RNA, 19 nt, Artificial Sequence
  Description of Artificial Sequence: Synthetic oligonucleotide
  Antisense strand to SEQ ID NO: 2146332
guauucauugcaaucacau

SEQ ID NO: 2146334 - RNA, 19 nt, Artificial Sequence
  Description of Artificial Sequence: Synthetic oligonucleotide
  Sense strand starting at position 2237 of SEQ ID NO: 1882771
uaaagaaggguuugaguga

SEQ ID NO: 2146335 - RNA, 19 nt, Artificial Sequence
  Description of Artificial Sequence: Synthetic oligonucleotide
  Antisense strand to SEQ ID NO: 2146334
ucacucaaacccuucuuua

SEQ ID NO: 2146336 - RNA, 19 nt, Artificial Sequence
  Description of Artificial Sequence: Synthetic oligonucleotide
  Sense strand starting at position 2493 of SEQ ID NO: 1882771
gauggcuuuguuuauauca

SEQ ID NO: 2146337 - RNA, 19 nt, Artificial Sequence
  Description of Artificial Sequence: Synthetic oligonucleotide
  Antisense strand to SEQ ID NO: 2146336
ugauauaaacaaagccauc

SEQ ID NO: 2146338 - RNA, 19 nt, Artificial Sequence
  Description of Artificial Sequence: Synthetic oligonucleotide
  Sense strand starting at position 2556 of SEQ ID NO: 1882771
guaugaugugcuugaauuu

SEQ ID NO: 2146339 - RNA, 19 nt, Artificial Sequence
  Description of Artificial Sequence: Synthetic oligonucleotide
  Antisense strand to SEQ ID NO: 2146338
aaauucaagcacaucauac

SEQ ID NO: 2146340 - RNA, 19 nt, Artificial Sequence
  Description of Artificial Sequence: Synthetic oligonucleotide
  Sense strand starting at position 3289 of SEQ ID NO: 1882771
ggugaacaugcucauaggu

SEQ ID NO: 2146341 - RNA, 19 nt, Artificial Sequence
  Description of Artificial Sequence: Synthetic oligonucleotide
  Antisense strand to SEQ ID NO: 2146340
accuaugagcauguucacc

SEQ ID NO: 2146342 - RNA, 19 nt, Artificial Sequence
  Description of Artificial Sequence: Synthetic oligonucleotide
  Sense strand starting at position 3359 of SEQ ID NO: 1882771
gaguuucugggccauagga

SEQ ID NO: 2146343 - RNA, 19 nt, Artificial Sequence
  Description of Artificial Sequence: Synthetic oligonucleotide
  Antisense strand to SEQ ID NO: 2146342
uccuauggcccagaaacuc

SEQ ID NO: 2146344 - RNA, 19 nt, Artificial Sequence
  Description of Artificial Sequence: Synthetic oligonucleotide
  Sense strand starting at position 3361 of SEQ ID NO: 1882771
guuucugggccauaggaua

SEQ ID NO: 2146345 - RNA, 19 nt, Artificial Sequence
  Description of Artificial Sequence: Synthetic oligonucleotide
  Antisense strand to SEQ ID NO: 2146344
uauccuauggcccagaaac

SEQ ID NO: 2146346 - RNA, 19 nt, Artificial Sequence
  Description of Artificial Sequence: Synthetic oligonucleotide
  Sense strand starting at position 3465 of SEQ ID NO: 1882771
acucuaauacaugguuagu

SEQ ID NO: 2146347 - RNA, 19 nt, Artificial Sequence
  Description of Artificial Sequence: Synthetic oligonucleotide
  Antisense strand to SEQ ID NO: 2146346
acuaaccauguauuagagu

SEQ ID NO: 2146348 - RNA, 19 nt, Artificial Sequence
  Description of Artificial Sequence: Synthetic oligonucleotide
  Sense strand starting at position 3467 of SEQ ID NO: 1882771
ucuaauacaugguuaguca

SEQ ID NO: 2146349 - RNA, 19 nt, Artificial Sequence
  Description of Artificial Sequence: Synthetic oligonucleotide
  Antisense strand to SEQ ID NO: 2146348
ugacuaaccauguauuaga

SEQ ID NO: 2146350 - RNA, 19 nt, Artificial Sequence
  Description of Artificial Sequence: Synthetic oligonucleotide
  Sense strand starting at position 3470 of SEQ ID NO: 1882771
aauacaugguuagucagau

SEQ ID NO: 2146351 - RNA, 19 nt, Artificial Sequence
  Description of Artificial Sequence: Synthetic oligonucleotide
  Antisense strand to SEQ ID NO: 2146350
aucugacuaaccauguauu

SEQ ID NO: 2146352 - RNA, 19 nt, Artificial Sequence
  Description of Artificial Sequence: Synthetic oligonucleotide
  Sense strand starting at position 3471 of SEQ ID NO: 1882771
auacaugguuagucagauu

SEQ ID NO: 2146353 - RNA, 19 nt, Artificial Sequence
  Description of Artificial Sequence: Synthetic oligonucleotide
  Antisense strand to SEQ ID NO: 2146352
aaucugacuaaccauguau

SEQ ID NO: 2146354 - RNA, 19 nt, Artificial Sequence
  Description of Artificial Sequence: Synthetic oligonucleotide
  Sense strand starting at position 3698 of SEQ ID NO: 1882771
ugcagauaaaguugagauc

SEQ ID NO: 2146355 - RNA, 19 nt, Artificial Sequence
  Description of Artificial Sequence: Synthetic oligonucleotide
  Antisense strand to SEQ ID NO: 2146354
gaucucaacuuuaucugca

SEQ ID NO: 2146356 - RNA, 19 nt, Artificial Sequence
  Description of Artificial Sequence: Synthetic oligonucleotide
  Sense strand starting at position 3707 of SEQ ID NO: 1882771
aguugagauccucauguag

SEQ ID NO: 2146357 - RNA, 19 nt, Artificial Sequence
  Description of Artificial Sequence: Synthetic oligonucleotide
  Antisense strand to SEQ ID NO: 2146356
cuacaugaggaucucaacu

SEQ ID NO: 2146358 - RNA, 19 nt, Artificial Sequence
  Description of Artificial Sequence: Synthetic oligonucleotide
  Sense strand starting at position 3887 of SEQ ID NO: 1882771
gcauccuauuugucaaugu

SEQ ID NO: 2146359 - RNA, 19 nt, Artificial Sequence
  Description of Artificial Sequence: Synthetic oligonucleotide
  Antisense strand to SEQ ID NO: 2146358
acauugacaaauaggaugc

SEQ ID NO: 2146360 - RNA, 19 nt, Artificial Sequence
  Description of Artificial Sequence: Synthetic oligonucleotide
  Sense strand starting at position 3891 of SEQ ID NO: 1882771
ccuauuugucaauguuugu

SEQ ID NO: 2146361 - RNA, 19 nt, Artificial Sequence
  Description of Artificial Sequence: Synthetic oligonucleotide
  Antisense strand to SEQ ID NO: 2146360
acaaacauugacaaauagg

SEQ ID NO: 2146362 - RNA, 19 nt, Artificial Sequence
  Description of Artificial Sequence: Synthetic oligonucleotide
  Sense strand starting at position 71 of SEQ ID NO: 1882772
gagucaugauguucuaaua

SEQ ID NO: 2146363 - RNA, 19 nt, Artificial Sequence
  Description of Artificial Sequence: Synthetic oligonucleotide
  Antisense strand to SEQ ID NO: 2146362
uauuagaacaucaugacuc

SEQ ID NO: 2146364 - RNA, 19 nt, Artificial Sequence
  Description of Artificial Sequence: Synthetic oligonucleotide
  Sense strand starting at position 340 of SEQ ID NO: 1882772
cuuggcuagguauagaauu

SEQ ID NO: 2146365 - RNA, 19 nt, Artificial Sequence
  Description of Artificial Sequence: Synthetic oligonucleotide
  Antisense strand to SEQ ID NO: 2146364
aauucuauaccuagccaag

SEQ ID NO: 2146366 - RNA, 19 nt, Artificial Sequence
  Description of Artificial Sequence: Synthetic oligonucleotide
  Sense strand starting at position 342 of SEQ ID NO: 1882772
uggcuagguauagaauuau

SEQ ID NO: 2146367 - RNA, 19 nt, Artificial Sequence
  Description of Artificial Sequence: Synthetic oligonucleotide
  Antisense strand to SEQ ID NO: 2146366
auaauucuauaccuagcca

SEQ ID NO: 2146368 - RNA, 19 nt, Artificial Sequence
  Description of Artificial Sequence: Synthetic oligonucleotide
  Sense strand starting at position 354 of SEQ ID NO: 1882772
gaauuauagcagggaauuc

SEQ ID NO: 2146369 - RNA, 19 nt, Artificial Sequence
  Description of Artificial Sequence: Synthetic oligonucleotide
  Antisense strand to SEQ ID NO: 2146368
gaauucccugcuauaauuc

SEQ ID NO: 2146370 - RNA, 19 nt, Artificial Sequence
  Description of Artificial Sequence: Synthetic oligonucleotide
  Sense strand starting at position 477 of SEQ ID NO: 1882772
ucuugauccucuguauaga

SEQ ID NO: 2146371 - RNA, 19 nt, Artificial Sequence
  Description of Artificial Sequence: Synthetic oligonucleotide
  Antisense strand to SEQ ID NO: 2146370
ucuauacagaggaucaaga

SEQ ID NO: 2146372 - RNA, 19 nt, Artificial Sequence
  Description of Artificial Sequence: Synthetic oligonucleotide
  Sense strand starting at position 556 of SEQ ID NO: 1882772
caaugaugaucauuggugu

SEQ ID NO: 2146373 - RNA, 19 nt, Artificial Sequence
  Description of Artificial Sequence: Synthetic oligonucleotide
  Antisense strand to SEQ ID NO: 2146372
acaccaaugaucaucauug

SEQ ID NO: 2146374 - RNA, 19 nt, Artificial Sequence
  Description of Artificial Sequence: Synthetic oligonucleotide
  Sense strand starting at position 559 of SEQ ID NO: 1882772
ugaugaucauuggugugga

SEQ ID NO: 2146375 - RNA, 19 nt, Artificial Sequence
  Description of Artificial Sequence: Synthetic oligonucleotide
  Antisense strand to SEQ ID NO: 2146374
uccacaccaaugaucauca

SEQ ID NO: 2146376 - RNA, 19 nt, Artificial Sequence
  Description of Artificial Sequence: Synthetic oligonucleotide
  Sense strand starting at position 564 of SEQ ID NO: 1882772
aucauugguguggaucuau

SEQ ID NO: 2146377 - RNA, 19 nt, Artificial Sequence
  Description of Artificial Sequence: Synthetic oligonucleotide
  Antisense strand to SEQ ID NO: 2146376
auagauccacaccaaugau

SEQ ID NO: 2146378 - RNA, 19 nt, Artificial Sequence
  Description of Artificial Sequence: Synthetic oligonucleotide
  Sense strand starting at position 673 of SEQ ID NO: 1882772
aucuauuugugugcuaucu

SEQ ID NO: 2146379 - RNA, 19 nt, Artificial Sequence
  Description of Artificial Sequence: Synthetic oligonucleotide
  Antisense strand to SEQ ID NO: 2146378
agauagcacacaaauagau

SEQ ID NO: 2146380 - RNA, 19 nt, Artificial Sequence
  Description of Artificial Sequence: Synthetic oligonucleotide
  Sense strand starting at position 782 of SEQ ID NO: 1882772
cuggaauaguuccuuaacu

SEQ ID NO: 2146381 - RNA, 19 nt, Artificial Sequence
  Description of Artificial Sequence: Synthetic oligonucleotide
  Antisense strand to SEQ ID NO: 2146380
aguuaaggaacuauuccag

SEQ ID NO: 2146382 - RNA, 19 nt, Artificial Sequence
  Description of Artificial Sequence: Synthetic oligonucleotide
  Sense strand starting at position 783 of SEQ ID NO: 1882772
uggaauaguuccuuaacuu

SEQ ID NO: 2146383 - RNA, 19 nt, Artificial Sequence
  Description of Artificial Sequence: Synthetic oligonucleotide
  Antisense strand to SEQ ID NO: 2146382
aaguuaaggaacuauucca

SEQ ID NO: 2146384 - RNA, 19 nt, Artificial Sequence
  Description of Artificial Sequence: Synthetic oligonucleotide
  Sense strand starting at position 784 of SEQ ID NO: 1882772
ggaauaguuccuuaacuuu

SEQ ID NO: 2146385 - RNA, 19 nt, Artificial Sequence
  Description of Artificial Sequence: Synthetic oligonucleotide
  Antisense strand to SEQ ID NO: 2146384
aaaguuaaggaacuauucc

SEQ ID NO: 2146386 - RNA, 19 nt, Artificial Sequence
  Description of Artificial Sequence: Synthetic oligonucleotide
  Sense strand starting at position 1529 of SEQ ID NO: 1882772
uuucuuaauguguacucua

SEQ ID NO: 2146387 - RNA, 19 nt, Artificial Sequence
  Description of Artificial Sequence: Synthetic oligonucleotide
  Antisense strand to SEQ ID NO: 2146386
uagaguacacauuaagaaa

SEQ ID NO: 2146388 - RNA, 19 nt, Artificial Sequence
  Description of Artificial Sequence: Synthetic oligonucleotide
  Sense strand starting at position 2165 of SEQ ID NO: 1882772
aaauguaguucuguaaaug

SEQ ID NO: 2146389 - RNA, 19 nt, Artificial Sequence
  Description of Artificial Sequence: Synthetic oligonucleotide
  Antisense strand to SEQ ID NO: 2146388
cauuuacagaacuacauuu

SEQ ID NO: 2146390 - RNA, 19 nt, Artificial Sequence
  Description of Artificial Sequence: Synthetic oligonucleotide
  Sense strand starting at position 2233 of SEQ ID NO: 1882772
ugaauaugucaggagcuug

SEQ ID NO: 2146391 - RNA, 19 nt, Artificial Sequence
  Description of Artificial Sequence: Synthetic oligonucleotide
  Antisense strand to SEQ ID NO: 2146390
caagcuccugacauauuca

SEQ ID NO: 2146392 - RNA, 19 nt, Artificial Sequence
  Description of Artificial Sequence: Synthetic oligonucleotide
  Sense strand starting at position 2272 of SEQ ID NO: 1882772
ccagaauuuccaugcagcu

SEQ ID NO: 2146393 - RNA, 19 nt, Artificial Sequence
  Description of Artificial Sequence: Synthetic oligonucleotide
  Antisense strand to SEQ ID NO: 2146392
agcugcauggaaauucugg

SEQ ID NO: 2146394 - RNA, 19 nt, Artificial Sequence
  Description of Artificial Sequence: Synthetic oligonucleotide
  Sense strand starting at position 2308 of SEQ ID NO: 1882772
ccaggagauuccuuucuua

SEQ ID NO: 2146395 - RNA, 19 nt, Artificial Sequence
  Description of Artificial Sequence: Synthetic oligonucleotide
  Antisense strand to SEQ ID NO: 2146394
uaagaaaggaaucuccugg

SEQ ID NO: 2146396 - RNA, 19 nt, Artificial Sequence
  Description of Artificial Sequence: Synthetic oligonucleotide
  Sense strand starting at position 2311 of SEQ ID NO: 1882772
ggagauuccuuucuuauca

SEQ ID NO: 2146397 - RNA, 19 nt, Artificial Sequence
  Description of Artificial Sequence: Synthetic oligonucleotide
  Antisense strand to SEQ ID NO: 2146396
ugauaagaaaggaaucucc

SEQ ID NO: 2146398 - RNA, 19 nt, Artificial Sequence
  Description of Artificial Sequence: Synthetic oligonucleotide
  Sense strand starting at position 2407 of SEQ ID NO: 1882772
aagaguuccagagguaugu

SEQ ID NO: 2146399 - RNA, 19 nt, Artificial Sequence
  Description of Artificial Sequence: Synthetic oligonucleotide
  Antisense strand to SEQ ID NO: 2146398
acauaccucuggaacucuu

SEQ ID NO: 2146400 - RNA, 19 nt, Artificial Sequence
  Description of Artificial Sequence: Synthetic oligonucleotide
  Sense strand starting at position 2413 of SEQ ID NO: 1882772
uccagagguauguggagau

SEQ ID NO: 2146401 - RNA, 19 nt, Artificial Sequence
  Description of Artificial Sequence: Synthetic oligonucleotide
  Antisense strand to SEQ ID NO: 2146400
aucuccacauaccucugga

SEQ ID NO: 2146402 - RNA, 19 nt, Artificial Sequence
  Description of Artificial Sequence: Synthetic oligonucleotide
  Sense strand starting at position 2417 of SEQ ID NO: 1882772
gagguauguggagauccuu

SEQ ID NO: 2146403 - RNA, 19 nt, Artificial Sequence
  Description of Artificial Sequence: Synthetic oligonucleotide
  Antisense strand to SEQ ID NO: 2146402
aaggaucuccacauaccuc

SEQ ID NO: 2146404 - RNA, 19 nt, Artificial Sequence
  Description of Artificial Sequence: Synthetic oligonucleotide
  Sense strand starting at position 2425 of SEQ ID NO: 1882772
uggagauccuucucaguaa

SEQ ID NO: 2146405 - RNA, 19 nt, Artificial Sequence
  Description of Artificial Sequence: Synthetic oligonucleotide
  Antisense strand to SEQ ID NO: 2146404
uuacugagaaggaucucca

SEQ ID NO: 2146406 - RNA, 19 nt, Artificial Sequence
  Description of Artificial Sequence: Synthetic oligonucleotide
  Sense strand starting at position 2428 of SEQ ID NO: 1882772
agauccuucucaguaagaa

SEQ ID NO: 2146407 - RNA, 19 nt, Artificial Sequence
  Description of Artificial Sequence: Synthetic oligonucleotide
  Antisense strand to SEQ ID NO: 2146406
uucuuacugagaaggaucu

SEQ ID NO: 2146408 - RNA, 19 nt, Artificial Sequence
  Description of Artificial Sequence: Synthetic oligonucleotide
  Sense strand starting at position 2911 of SEQ ID NO: 1882772
augaaaguuccauguaacc

SEQ ID NO: 2146409 - RNA, 19 nt, Artificial Sequence
  Description of Artificial Sequence: Synthetic oligonucleotide
  Antisense strand to SEQ ID NO: 2146408
gguuacauggaacuuucau

SEQ ID NO: 2146410 - RNA, 19 nt, Artificial Sequence
  Description of Artificial Sequence: Synthetic oligonucleotide
  Sense strand starting at position 2920 of SEQ ID NO: 1882772
ccauguaaccuauggagaa

SEQ ID NO: 2146411 - RNA, 19 nt, Artificial Sequence
  Description of Artificial Sequence: Synthetic oligonucleotide
  Antisense strand to SEQ ID NO: 2146410
uucuccauagguuacaugg

SEQ ID NO: 2146412 - RNA, 19 nt, Artificial Sequence
  Description of Artificial Sequence: Synthetic oligonucleotide
  Sense strand starting at position 2936 of SEQ ID NO: 1882772
gaacacuagugcucuggga

SEQ ID NO: 2146413 - RNA, 19 nt, Artificial Sequence
  Description of Artificial Sequence: Synthetic oligonucleotide
  Antisense strand to SEQ ID NO: 2146412
ucccagagcacuaguguuc

SEQ ID NO: 2146414 - RNA, 19 nt, Artificial Sequence
  Description of Artificial Sequence: Synthetic oligonucleotide
  Sense strand starting at position 2938 of SEQ ID NO: 1882772
acacuagugcucugggaaa

SEQ ID NO: 2146415 - RNA, 19 nt, Artificial Sequence
  Description of Artificial Sequence: Synthetic oligonucleotide
  Antisense strand to SEQ ID NO: 2146414
uuucccagagcacuagugu

SEQ ID NO: 2146416 - RNA, 19 nt, Artificial Sequence
  Description of Artificial Sequence: Synthetic oligonucleotide
  Sense strand starting at position 2940 of SEQ ID NO: 1882772
acuagugcucugggaaaua

SEQ ID NO: 2146417 - RNA, 19 nt, Artificial Sequence
  Description of Artificial Sequence: Synthetic oligonucleotide
  Antisense strand to SEQ ID NO: 2146416
uauuucccagagcacuagu

SEQ ID NO: 2146418 - RNA, 19 nt, Artificial Sequence
  Description of Artificial Sequence: Synthetic oligonucleotide
  Sense strand starting at position 2945 of SEQ ID NO: 1882772
ugcucugggaaauauaguu

SEQ ID NO: 2146419 - RNA, 19 nt, Artificial Sequence
  Description of Artificial Sequence: Synthetic oligonucleotide
  Antisense strand to SEQ ID NO: 2146418
aacuauauuucccagagca

SEQ ID NO: 2146420 - RNA, 19 nt, Artificial Sequence
  Description of Artificial Sequence: Synthetic oligonucleotide
  Sense strand starting at position 3058 of SEQ ID NO: 1882772
ccagauauauuagcgacaa

SEQ ID NO: 2146421 - RNA, 19 nt, Artificial Sequence
  Description of Artificial Sequence: Synthetic oligonucleotide
  Antisense strand to SEQ ID NO: 2146420
uugucgcuaauauaucugg

SEQ ID NO: 2146422 - RNA, 19 nt, Artificial Sequence
  Description of Artificial Sequence: Synthetic oligonucleotide
  Sense strand starting at position 3062 of SEQ ID NO: 1882772
auauauuagcgacaaacuu

SEQ ID NO: 2146423 - RNA, 19 nt, Artificial Sequence
  Description of Artificial Sequence: Synthetic oligonucleotide
  Antisense strand to SEQ ID NO: 2146422
aaguuugucgcuaauauau

SEQ ID NO: 2146424 - RNA, 19 nt, Artificial Sequence
  Description of Artificial Sequence: Synthetic oligonucleotide
  Sense strand starting at position 3111 of SEQ ID NO: 1882772
gguuggauuggugauggau

SEQ ID NO: 2146425 - RNA, 19 nt, Artificial Sequence
  Description of Artificial Sequence: Synthetic oligonucleotide
  Antisense strand to SEQ ID NO: 2146424
auccaucaccaauccaacc

SEQ ID NO: 2146426 - RNA, 19 nt, Artificial Sequence
  Description of Artificial Sequence: Synthetic oligonucleotide
  Sense strand starting at position 3366 of SEQ ID NO: 1882772
agaguauuaccagggcaga

SEQ ID NO: 2146427 - RNA, 19 nt, Artificial Sequence
  Description of Artificial Sequence: Synthetic oligonucleotide
  Antisense strand to SEQ ID NO: 2146426
ucugcccugguaauacucu

SEQ ID NO: 2146428 - RNA, 19 nt, Artificial Sequence
  Description of Artificial Sequence: Synthetic oligonucleotide
  Sense strand starting at position 3367 of SEQ ID NO: 1882772
gaguauuaccagggcagaa

SEQ ID NO: 2146429 - RNA, 19 nt, Artificial Sequence
  Description of Artificial Sequence: Synthetic oligonucleotide
  Antisense strand to SEQ ID NO: 2146428
uucugcccugguaauacuc

SEQ ID NO: 2146430 - RNA, 19 nt, Artificial Sequence
  Description of Artificial Sequence: Synthetic oligonucleotide
  Sense strand starting at position 3388 of SEQ ID NO: 1882772
cuuuauauuuggguaacgu

SEQ ID NO: 2146431 - RNA, 19 nt, Artificial Sequence
  Description of Artificial Sequence: Synthetic oligonucleotide
  Antisense strand to SEQ ID NO: 2146430
acguuacccaaauauaaag

SEQ ID NO: 2146432 - RNA, 19 nt, Artificial Sequence
  Description of Artificial Sequence: Synthetic oligonucleotide
  Sense strand starting at position 3399 of SEQ ID NO: 1882772
gguaacgucaauugggaga

SEQ ID NO: 2146433 - RNA, 19 nt, Artificial Sequence
  Description of Artificial Sequence: Synthetic oligonucleotide
  Antisense strand to SEQ ID NO: 2146432
ucucccaauugacguuacc

SEQ ID NO: 2146434 - RNA, 19 nt, Artificial Sequence
  Description of Artificial Sequence: Synthetic oligonucleotide
  Sense strand starting at position 3639 of SEQ ID NO: 1882772
ggcccauuucuacgguuau

SEQ ID NO: 2146435 - RNA, 19 nt, Artificial Sequence
  Description of Artificial Sequence: Synthetic oligonucleotide
  Antisense strand to SEQ ID NO: 2146434
auaaccguagaaaugggcc

SEQ ID NO: 2146436 - RNA, 19 nt, Artificial Sequence
  Description of Artificial Sequence: Synthetic oligonucleotide
  Sense strand starting at position 3694 of SEQ ID NO: 1882772
gagauugagguuugcuaca

SEQ ID NO: 2146437 - RNA, 19 nt, Artificial Sequence
  Description of Artificial Sequence: Synthetic oligonucleotide
  Antisense strand to SEQ ID NO: 2146436
uguagcaaaccucaaucuc

SEQ ID NO: 2146438 - RNA, 19 nt, Artificial Sequence
  Description of Artificial Sequence: Synthetic oligonucleotide
  Sense strand starting at position 3811 of SEQ ID NO: 1882772
gcaauaagacacuagugua

SEQ ID NO: 2146439 - RNA, 19 nt, Artificial Sequence
  Description of Artificial Sequence: Synthetic oligonucleotide
  Antisense strand to SEQ ID NO: 2146438
uacacuagugucuuauugc

SEQ ID NO: 2146440 - RNA, 19 nt, Artificial Sequence
  Description of Artificial Sequence: Synthetic oligonucleotide
  Sense strand starting at position 3946 of SEQ ID NO: 1882772
augccaugccuauauauga

SEQ ID NO: 2146441 - RNA, 19 nt, Artificial Sequence
  Description of Artificial Sequence: Synthetic oligonucleotide
  Antisense strand to SEQ ID NO: 2146440
ucauauauaggcauggcau

SEQ ID NO: 2146442 - RNA, 19 nt, Artificial Sequence
  Description of Artificial Sequence: Synthetic oligonucleotide
  Sense strand starting at position 118 of SEQ ID NO: 1882773
agugucuuugugugaauuu

SEQ ID NO: 2146443 - RNA, 19 nt, Artificial Sequence
  Description of Artificial Sequence: Synthetic oligonucleotide
  Antisense strand to SEQ ID NO: 2146442
aaauucacacaaagacacu

SEQ ID NO: 2146444 - RNA, 19 nt, Artificial Sequence
  Description of Artificial Sequence: Synthetic oligonucleotide
  Sense strand starting at position 154 of SEQ ID NO: 1882773
uuggcagucuaaccagaaa

SEQ ID NO: 2146445 - RNA, 19 nt, Artificial Sequence
  Description of Artificial Sequence: Synthetic oligonucleotide
  Antisense strand to SEQ ID NO: 2146444
uuucugguuagacugccaa

SEQ ID NO: 2146446 - RNA, 19 nt, Artificial Sequence
  Description of Artificial Sequence: Synthetic oligonucleotide
  Sense strand starting at position 294 of SEQ ID NO: 1882773
ggcaacaccucugucauuu

SEQ ID NO: 2146447 - RNA, 19 nt, Artificial Sequence
  Description of Artificial Sequence: Synthetic oligonucleotide
  Antisense strand to SEQ ID NO: 2146446
aaaugacagagguguugcc

SEQ ID NO: 2146448 - RNA, 19 nt, Artificial Sequence
  Description of Artificial Sequence: Synthetic oligonucleotide
  Sense strand starting at position 328 of SEQ ID NO: 1882773
caaagugucaaagggaagu

SEQ ID NO: 2146449 - RNA, 19 nt, Artificial Sequence
  Description of Artificial Sequence: Synthetic oligonucleotide
  Antisense strand to SEQ ID NO: 2146448
acuucccuuugacacuuug

SEQ ID NO: 2146450 - RNA, 19 nt, Artificial Sequence
  Description of Artificial Sequence: Synthetic oligonucleotide
  Sense strand starting at position 576 of SEQ ID NO: 1882773
cgaaaugugggacagucaa

SEQ ID NO: 2146451 - RNA, 19 nt, Artificial Sequence
  Description of Artificial Sequence: Synthetic oligonucleotide
  Antisense strand to SEQ ID NO: 2146450
uugacugucccacauuucg

SEQ ID NO: 2146452 - RNA, 19 nt, Artificial Sequence
  Description of Artificial Sequence: Synthetic oligonucleotide
  Sense strand starting at position 625 of SEQ ID NO: 1882773
auguaugagggcugaggaa

SEQ ID NO: 2146453 - RNA, 19 nt, Artificial Sequence
  Description of Artificial Sequence: Synthetic oligonucleotide
  Antisense strand to SEQ ID NO: 2146452
uuccucagcccucauacau

SEQ ID NO: 2146454 - RNA, 19 nt, Artificial Sequence
  Description of Artificial Sequence: Synthetic oligonucleotide
  Sense strand starting at position 814 of SEQ ID NO: 1882773
ugacauguuccaggaacca

SEQ ID NO: 2146455 - RNA, 19 nt, Artificial Sequence
  Description of Artificial Sequence: Synthetic oligonucleotide
  Antisense strand to SEQ ID NO: 2146454
ugguuccuggaacauguca

SEQ ID NO: 2146456 - RNA, 19 nt, Artificial Sequence
  Description of Artificial Sequence: Synthetic oligonucleotide
  Sense strand starting at position 878 of SEQ ID NO: 1882773
gaguaaggucuuugaaaug

SEQ ID NO: 2146457 - RNA, 19 nt, Artificial Sequence
  Description of Artificial Sequence: Synthetic oligonucleotide
  Antisense strand to SEQ ID NO: 2146456
cauuucaaagaccuuacuc

SEQ ID NO: 2146458 - RNA, 19 nt, Artificial Sequence
  Description of Artificial Sequence: Synthetic oligonucleotide
  Sense strand starting at position 887 of SEQ ID NO: 1882773
cuuugaaauguguaugaca

SEQ ID NO: 2146459 - RNA, 19 nt, Artificial Sequence
  Description of Artificial Sequence: Synthetic oligonucleotide
  Antisense strand to SEQ ID NO: 2146458
ugucauacacauuucaaag

SEQ ID NO: 2146460 - RNA, 19 nt, Artificial Sequence
  Description of Artificial Sequence: Synthetic oligonucleotide
  Sense strand starting at position 889 of SEQ ID NO: 1882773
uugaaauguguaugacaca

SEQ ID NO: 2146461 - RNA, 19 nt, Artificial Sequence
  Description of Artificial Sequence: Synthetic oligonucleotide
  Antisense strand to SEQ ID NO: 2146460
ugugucauacacauuucaa

SEQ ID NO: 2146462 - RNA, 19 nt, Artificial Sequence
  Description of Artificial Sequence: Synthetic oligonucleotide
  Sense strand starting at position 894 of SEQ ID NO: 1882773
auguguaugacacagguua

SEQ ID NO: 2146463 - RNA, 19 nt, Artificial Sequence
  Description of Artificial Sequence: Synthetic oligonucleotide
  Antisense strand to SEQ ID NO: 2146462
uaaccugugucauacacau

SEQ ID NO: 2146464 - RNA, 19 nt, Artificial Sequence
  Description of Artificial Sequence: Synthetic oligonucleotide
  Sense strand starting at position 905 of SEQ ID NO: 1882773
acagguuaugcaggacuca

SEQ ID NO: 2146465 - RNA, 19 nt, Artificial Sequence
  Description of Artificial Sequence: Synthetic oligonucleotide
  Antisense strand to SEQ ID NO: 2146464
ugaguccugcauaaccugu

SEQ ID NO: 2146466 - RNA, 19 nt, Artificial Sequence
  Description of Artificial Sequence: Synthetic oligonucleotide
  Sense strand starting at position 970 of SEQ ID NO: 1882773
aggcuuuaagcaggauaau

SEQ ID NO: 2146467 - RNA, 19 nt, Artificial Sequence
  Description of Artificial Sequence: Synthetic oligonucleotide
  Antisense strand to SEQ ID NO: 2146466
auuauccugcuuaaagccu

SEQ ID NO: 2146468 - RNA, 19 nt, Artificial Sequence
  Description of Artificial Sequence: Synthetic oligonucleotide
  Sense strand starting at position 971 of SEQ ID NO: 1882773
ggcuuuaagcaggauaaug

SEQ ID NO: 2146469 - RNA, 19 nt, Artificial Sequence
  Description of Artificial Sequence: Synthetic oligonucleotide
  Antisense strand to SEQ ID NO: 2146468
cauuauccugcuuaaagcc

SEQ ID NO: 2146470 - RNA, 19 nt, Artificial Sequence
  Description of Artificial Sequence: Synthetic oligonucleotide
  Sense strand starting at position 985 of SEQ ID NO: 1882773
uaaugacaugauuggguuu

SEQ ID NO: 2146471 - RNA, 19 nt, Artificial Sequence
  Description of Artificial Sequence: Synthetic oligonucleotide
  Antisense strand to SEQ ID NO: 2146470
aaacccaaucaugucauua

SEQ ID NO: 2146472 - RNA, 19 nt, Artificial Sequence
  Description of Artificial Sequence: Synthetic oligonucleotide
  Sense strand starting at position 988 of SEQ ID NO: 1882773
ugacaugauuggguuuaga

SEQ ID NO: 2146473 - RNA, 19 nt, Artificial Sequence
  Description of Artificial Sequence: Synthetic oligonucleotide
  Antisense strand to SEQ ID NO: 2146472
ucuaaacccaaucauguca

SEQ ID NO: 2146474 - RNA, 19 nt, Artificial Sequence
  Description of Artificial Sequence: Synthetic oligonucleotide
  Sense strand starting at position 999 of SEQ ID NO: 1882773
gguuuagauuuacaaagau

SEQ ID NO: 2146475 - RNA, 19 nt, Artificial Sequence
  Description of Artificial Sequence: Synthetic oligonucleotide
  Antisense strand to SEQ ID NO: 2146474
aucuuuguaaaucuaaacc

SEQ ID NO: 2146476 - RNA, 19 nt, Artificial Sequence
  Description of Artificial Sequence: Synthetic oligonucleotide
  Sense strand starting at position 1207 of SEQ ID NO: 1882773
aggagaacuuccuugacuu

SEQ ID NO: 2146477 - RNA, 19 nt, Artificial Sequence
  Description of Artificial Sequence: Synthetic oligonucleotide
  Antisense strand to SEQ ID NO: 2146476
aagucaaggaaguucuccu

SEQ ID NO: 2146478 - RNA, 19 nt, Artificial Sequence
  Description of Artificial Sequence: Synthetic oligonucleotide
  Sense strand starting at position 1208 of SEQ ID NO: 1882773
ggagaacuuccuugacuua

SEQ ID NO: 2146479 - RNA, 19 nt, Artificial Sequence
  Description of Artificial Sequence: Synthetic oligonucleotide
  Antisense strand to SEQ ID NO: 2146478
uaagucaaggaaguucucc

SEQ ID NO: 2146480 - RNA, 19 nt, Artificial Sequence
  Description of Artificial Sequence: Synthetic oligonucleotide
  Sense strand starting at position 1274 of SEQ ID NO: 1882773
agcaaacauccuugggaca

SEQ ID NO: 2146481 - RNA, 19 nt, Artificial Sequence
  Description of Artificial Sequence: Synthetic oligonucleotide
  Antisense strand to SEQ ID NO: 2146480
ugucccaaggauguuugcu

SEQ ID NO: 2146482 - RNA, 19 nt, Artificial Sequence
  Description of Artificial Sequence: Synthetic oligonucleotide
  Sense strand starting at position 1433 of SEQ ID NO: 1882773
accuuuauguagguacuaa

SEQ ID NO: 2146483 - RNA, 19 nt, Artificial Sequence
  Description of Artificial Sequence: Synthetic oligonucleotide
  Antisense strand to SEQ ID NO: 2146482
uuaguaccuacauaaaggu

SEQ ID NO: 2146484 - RNA, 19 nt, Artificial Sequence
  Description of Artificial Sequence: Synthetic oligonucleotide
  Sense strand starting at position 1482 of SEQ ID NO: 1882773
uggcucuuaccagacaaca

SEQ ID NO: 2146485 - RNA, 19 nt, Artificial Sequence
  Description of Artificial Sequence: Synthetic oligonucleotide
  Antisense strand to SEQ ID NO: 2146484
uguugucugguaagagcca

SEQ ID NO: 2146486 - RNA, 19 nt, Artificial Sequence
  Description of Artificial Sequence: Synthetic oligonucleotide
  Sense strand starting at position 1601 of SEQ ID NO: 1882773
acugcaucuggugaaacuu

SEQ ID NO: 2146487 - RNA, 19 nt, Artificial Sequence
  Description of Artificial Sequence: Synthetic oligonucleotide
  Antisense strand to SEQ ID NO: 2146486
aaguuucaccagaugcagu

SEQ ID NO: 2146488 - RNA, 19 nt, Artificial Sequence
  Description of Artificial Sequence: Synthetic oligonucleotide
  Sense strand starting at position 1637 of SEQ ID NO: 1882773
uggugacauggucaaguca

SEQ ID NO: 2146489 - RNA, 19 nt, Artificial Sequence
  Description of Artificial Sequence: Synthetic oligonucleotide
  Antisense strand to SEQ ID NO: 2146488
ugacuugaccaugucacca

SEQ ID NO: 2146490 - RNA, 19 nt, Artificial Sequence
  Description of Artificial Sequence: Synthetic oligonucleotide
  Sense strand starting at position 1646 of SEQ ID NO: 1882773
ggucaagucauguagaaau

SEQ ID NO: 2146491 - RNA, 19 nt, Artificial Sequence
  Description of Artificial Sequence: Synthetic oligonucleotide
  Antisense strand to SEQ ID NO: 2146490
auuucuacaugacuugacc

SEQ ID NO: 2146492 - RNA, 19 nt, Artificial Sequence
  Description of Artificial Sequence: Synthetic oligonucleotide
  Sense strand starting at position 1864 of SEQ ID NO: 1882773
gaggauaccuagcuuucuu

SEQ ID NO: 2146493 - RNA, 19 nt, Artificial Sequence
  Description of Artificial Sequence: Synthetic oligonucleotide
  Antisense strand to SEQ ID NO: 2146492
aagaaagcuagguauccuc

SEQ ID NO: 2146494 - RNA, 19 nt, Artificial Sequence
  Description of Artificial Sequence: Synthetic oligonucleotide
  Sense strand starting at position 2277 of SEQ ID NO: 1882773
ucaugagagcuccacacuu

SEQ ID NO: 2146495 - RNA, 19 nt, Artificial Sequence
  Description of Artificial Sequence: Synthetic oligonucleotide
  Antisense strand to SEQ ID NO: 2146494
aaguguggagcucucauga

SEQ ID NO: 2146496 - RNA, 19 nt, Artificial Sequence
  Description of Artificial Sequence: Synthetic oligonucleotide
  Sense strand starting at position 2357 of SEQ ID NO: 1882773
aaguuaagacuuugguaca

SEQ ID NO: 2146497 - RNA, 19 nt, Artificial Sequence
  Description of Artificial Sequence: Synthetic oligonucleotide
  Antisense strand to SEQ ID NO: 2146496
uguaccaaagucuuaacuu

SEQ ID NO: 2146498 - RNA, 19 nt, Artificial Sequence
  Description of Artificial Sequence: Synthetic oligonucleotide
  Sense strand starting at position 2530 of SEQ ID NO: 1882773
gucucaccucaguauuaug

SEQ ID NO: 2146499 - RNA, 19 nt, Artificial Sequence
  Description of Artificial Sequence: Synthetic oligonucleotide
  Antisense strand to SEQ ID NO: 2146498
cauaauacugaggugagac

SEQ ID NO: 2146500 - RNA, 19 nt, Artificial Sequence
  Description of Artificial Sequence: Synthetic oligonucleotide
  Sense strand starting at position 2670 of SEQ ID NO: 1882773
aggauagacauucguacug

SEQ ID NO: 2146501 - RNA, 19 nt, Artificial Sequence
  Description of Artificial Sequence: Synthetic oligonucleotide
  Antisense strand to SEQ ID NO: 2146500
caguacgaaugucuauccu

SEQ ID NO: 2146502 - RNA, 19 nt, Artificial Sequence
  Description of Artificial Sequence: Synthetic oligonucleotide
  Sense strand starting at position 2715 of SEQ ID NO: 1882773
agaggugaguaguccuaag

SEQ ID NO: 2146503 - RNA, 19 nt, Artificial Sequence
  Description of Artificial Sequence: Synthetic oligonucleotide
  Antisense strand to SEQ ID NO: 2146502
cuuaggacuacucaccucu

SEQ ID NO: 2146504 - RNA, 19 nt, Artificial Sequence
  Description of Artificial Sequence: Synthetic oligonucleotide
  Sense strand starting at position 3128 of SEQ ID NO: 1882773
ggcagcaucucauuucuuu

SEQ ID NO: 2146505 - RNA, 19 nt, Artificial Sequence
  Description of Artificial Sequence: Synthetic oligonucleotide
  Antisense strand to SEQ ID NO: 2146504
aaagaaaugagaugcugcc

SEQ ID NO: 2146506 - RNA, 19 nt, Artificial Sequence
  Description of Artificial Sequence: Synthetic oligonucleotide
  Sense strand starting at position 3273 of SEQ ID NO: 1882773
ccugaugaagucugaauug

SEQ ID NO: 2146507 - RNA, 19 nt, Artificial Sequence
  Description of Artificial Sequence: Synthetic oligonucleotide
  Antisense strand to SEQ ID NO: 2146506
caauucagacuucaucagg

SEQ ID NO: 2146508 - RNA, 19 nt, Artificial Sequence
  Description of Artificial Sequence: Synthetic oligonucleotide
  Sense strand starting at position 3482 of SEQ ID NO: 1882773
uguuaagauggcugauuaa

SEQ ID NO: 2146509 - RNA, 19 nt, Artificial Sequence
  Description of Artificial Sequence: Synthetic oligonucleotide
  Antisense strand to SEQ ID NO: 2146508
uuaaucagccaucuuaaca

SEQ ID NO: 2146510 - RNA, 19 nt, Artificial Sequence
  Description of Artificial Sequence: Synthetic oligonucleotide
  Sense strand starting at position 3485 of SEQ ID NO: 1882773
uaagauggcugauuaaaug

SEQ ID NO: 2146511 - RNA, 19 nt, Artificial Sequence
  Description of Artificial Sequence: Synthetic oligonucleotide
  Antisense strand to SEQ ID NO: 2146510
cauuuaaucagccaucuua

SEQ ID NO: 2146512 - RNA, 19 nt, Artificial Sequence
  Description of Artificial Sequence: Synthetic oligonucleotide
  Sense strand starting at position 3510 of SEQ ID NO: 1882773
cugaaugcaugaucucuua

SEQ ID NO: 2146513 - RNA, 19 nt, Artificial Sequence
  Description of Artificial Sequence: Synthetic oligonucleotide
  Antisense strand to SEQ ID NO: 2146512
uaagagaucaugcauucag

SEQ ID NO: 2146514 - RNA, 19 nt, Artificial Sequence
  Description of Artificial Sequence: Synthetic oligonucleotide
  Sense strand starting at position 3525 of SEQ ID NO: 1882773
cuuauuaaaugguugauca

SEQ ID NO: 2146515 - RNA, 19 nt, Artificial Sequence
  Description of Artificial Sequence: Synthetic oligonucleotide
  Antisense strand to SEQ ID NO: 2146514
ugaucaaccauuuaauaag

SEQ ID NO: 2146516 - RNA, 19 nt, Artificial Sequence
  Description of Artificial Sequence: Synthetic oligonucleotide
  Sense strand starting at position 3536 of SEQ ID NO: 1882773
guugaucauccauacucuu

SEQ ID NO: 2146517 - RNA, 19 nt, Artificial Sequence
  Description of Artificial Sequence: Synthetic oligonucleotide
  Antisense strand to SEQ ID NO: 2146516
aagaguauggaugaucaac

SEQ ID NO: 2146518 - RNA, 19 nt, Artificial Sequence
  Description of Artificial Sequence: Synthetic oligonucleotide
  Sense strand starting at position 3890 of SEQ ID NO: 1882773
ucaccagaaucuguguuaa

SEQ ID NO: 2146519 - RNA, 19 nt, Artificial Sequence
  Description of Artificial Sequence: Synthetic oligonucleotide
  Antisense strand to SEQ ID NO: 2146518
uuaacacagauucugguga

SEQ ID NO: 2146520 - RNA, 19 nt, Artificial Sequence
  Description of Artificial Sequence: Synthetic oligonucleotide
  Sense strand starting at position 3892 of SEQ ID NO: 1882773
accagaaucuguguuaaug

SEQ ID NO: 2146521 - RNA, 19 nt, Artificial Sequence
  Description of Artificial Sequence: Synthetic oligonucleotide
  Antisense strand to SEQ ID NO: 2146520
cauuaacacagauucuggu

SEQ ID NO: 2146522 - RNA, 19 nt, Artificial Sequence
  Description of Artificial Sequence: Synthetic oligonucleotide
  Sense strand starting at position 500 of SEQ ID NO: 1882774
gacagaaugcauugaccag

SEQ ID NO: 2146523 - RNA, 19 nt, Artificial Sequence
  Description of Artificial Sequence: Synthetic oligonucleotide
  Antisense strand to SEQ ID NO: 2146522
cuggucaaugcauucuguc

SEQ ID NO: 2146524 - RNA, 19 nt, Artificial Sequence
  Description of Artificial Sequence: Synthetic oligonucleotide
  Sense strand starting at position 648 of SEQ ID NO: 1882774
aagcuaagguuaucagauu

SEQ ID NO: 2146525 - RNA, 19 nt, Artificial Sequence
  Description of Artificial Sequence: Synthetic oligonucleotide
  Antisense strand to SEQ ID NO: 2146524
aaucugauaaccuuagcuu

SEQ ID NO: 2146526 - RNA, 19 nt, Artificial Sequence
  Description of Artificial Sequence: Synthetic oligonucleotide
  Sense strand starting at position 777 of SEQ ID NO: 1882774
uugugugucaaguaaagaa

SEQ ID NO: 2146527 - RNA, 19 nt, Artificial Sequence
  Description of Artificial Sequence: Synthetic oligonucleotide
  Antisense strand to SEQ ID NO: 2146526
uucuuuacuugacacacaa

SEQ ID NO: 2146528 - RNA, 19 nt, Artificial Sequence
  Description of Artificial Sequence: Synthetic oligonucleotide
  Sense strand starting at position 945 of SEQ ID NO: 1882774
ggucauaggaccugagcaa

SEQ ID NO: 2146529 - RNA, 19 nt, Artificial Sequence
  Description of Artificial Sequence: Synthetic oligonucleotide
  Antisense strand to SEQ ID NO: 2146528
uugcucagguccuaugacc

SEQ ID NO: 2146530 - RNA, 19 nt, Artificial Sequence
  Description of Artificial Sequence: Synthetic oligonucleotide
  Sense strand starting at position 1289 of SEQ ID NO: 1882774
agacgaucucuugaguguu

SEQ ID NO: 2146531 - RNA, 19 nt, Artificial Sequence
  Description of Artificial Sequence: Synthetic oligonucleotide
  Antisense strand to SEQ ID NO: 2146530
aacacucaagagaucgucu

SEQ ID NO: 2146532 - RNA, 19 nt, Artificial Sequence
  Description of Artificial Sequence: Synthetic oligonucleotide
  Sense strand starting at position 1302 of SEQ ID NO: 1882774
aguguuugucuauacagag

SEQ ID NO: 2146533 - RNA, 19 nt, Artificial Sequence
  Description of Artificial Sequence: Synthetic oligonucleotide
  Antisense strand to SEQ ID NO: 2146532
cucuguauagacaaacacu

SEQ ID NO: 2146534 - RNA, 19 nt, Artificial Sequence
  Description of Artificial Sequence: Synthetic oligonucleotide
  Sense strand starting at position 1358 of SEQ ID NO: 1882774
gcauccguugaucacaaau

SEQ ID NO: 2146535 - RNA, 19 nt, Artificial Sequence
  Description of Artificial Sequence: Synthetic oligonucleotide
  Antisense strand to SEQ ID NO: 2146534
auuugugaucaacggaugc

SEQ ID NO: 2146536 - RNA, 19 nt, Artificial Sequence
  Description of Artificial Sequence: Synthetic oligonucleotide
  Sense strand starting at position 1664 of SEQ ID NO: 1882774
gaguucugauucucuaaga

SEQ ID NO: 2146537 - RNA, 19 nt, Artificial Sequence
  Description of Artificial Sequence: Synthetic oligonucleotide
  Antisense strand to SEQ ID NO: 2146536
ucuuagagaaucagaacuc

SEQ ID NO: 2146538 - RNA, 19 nt, Artificial Sequence
  Description of Artificial Sequence: Synthetic oligonucleotide
  Sense strand starting at position 1665 of SEQ ID NO: 1882774
aguucugauucucuaagau

SEQ ID NO: 2146539 - RNA, 19 nt, Artificial Sequence
  Description of Artificial Sequence: Synthetic oligonucleotide
  Antisense strand to SEQ ID NO: 2146538
aucuuagagaaucagaacu

SEQ ID NO: 2146540 - RNA, 19 nt, Artificial Sequence
  Description of Artificial Sequence: Synthetic oligonucleotide
  Sense strand starting at position 1854 of SEQ ID NO: 1882774
gucaguaaccaauaaagug

SEQ ID NO: 2146541 - RNA, 19 nt, Artificial Sequence
  Description of Artificial Sequence: Synthetic oligonucleotide
  Antisense strand to SEQ ID NO: 2146540
cacuuuauugguuacugac

SEQ ID NO: 2146542 - RNA, 19 nt, Artificial Sequence
  Description of Artificial Sequence: Synthetic oligonucleotide
  Sense strand starting at position 1952 of SEQ ID NO: 1882774
gagagaguaucugccaauu

SEQ ID NO: 2146543 - RNA, 19 nt, Artificial Sequence
  Description of Artificial Sequence: Synthetic oligonucleotide
  Antisense strand to SEQ ID NO: 2146542
aauuggcagauacucucuc

SEQ ID NO: 2146544 - RNA, 19 nt, Artificial Sequence
  Description of Artificial Sequence: Synthetic oligonucleotide
  Sense strand starting at position 2202 of SEQ ID NO: 1882774
agacaagucaaaugguuag

SEQ ID NO: 2146545 - RNA, 19 nt, Artificial Sequence
  Description of Artificial Sequence: Synthetic oligonucleotide
  Antisense strand to SEQ ID NO: 2146544
cuaaccauuugacuugucu

SEQ ID NO: 2146546 - RNA, 19 nt, Artificial Sequence
  Description of Artificial Sequence: Synthetic oligonucleotide
  Sense strand starting at position 2205 of SEQ ID NO: 1882774
caagucaaaugguuagcaa

SEQ ID NO: 2146547 - RNA, 19 nt, Artificial Sequence
  Description of Artificial Sequence: Synthetic oligonucleotide
  Antisense strand to SEQ ID NO: 2146546
uugcuaaccauuugacuug

SEQ ID NO: 2146548 - RNA, 19 nt, Artificial Sequence
  Description of Artificial Sequence: Synthetic oligonucleotide
  Sense strand starting at position 2206 of SEQ ID NO: 1882774
aagucaaaugguuagcaau

SEQ ID NO: 2146549 - RNA, 19 nt, Artificial Sequence
  Description of Artificial Sequence: Synthetic oligonucleotide
  Antisense strand to SEQ ID NO: 2146548
auugcuaaccauuugacuu

SEQ ID NO: 2146550 - RNA, 19 nt, Artificial Sequence
  Description of Artificial Sequence: Synthetic oligonucleotide
  Sense strand starting at position 2288 of SEQ ID NO: 1882774
ucuugacuuucuuugauug

SEQ ID NO: 2146551 - RNA, 19 nt, Artificial Sequence
  Description of Artificial Sequence: Synthetic oligonucleotide
  Antisense strand to SEQ ID NO: 2146550
caaucaaagaaagucaaga

SEQ ID NO: 2146552 - RNA, 19 nt, Artificial Sequence
  Description of Artificial Sequence: Synthetic oligonucleotide
  Sense strand starting at position 2328 of SEQ ID NO: 1882774
gguugucuaggugaugaau

SEQ ID NO: 2146553 - RNA, 19 nt, Artificial Sequence
  Description of Artificial Sequence: Synthetic oligonucleotide
  Antisense strand to SEQ ID NO: 2146552
auucaucaccuagacaacc

SEQ ID NO: 2146554 - RNA, 19 nt, Artificial Sequence
  Description of Artificial Sequence: Synthetic oligonucleotide
  Sense strand starting at position 2331 of SEQ ID NO: 1882774
ugucuaggugaugaauacu

SEQ ID NO: 2146555 - RNA, 19 nt, Artificial Sequence
  Description of Artificial Sequence: Synthetic oligonucleotide
  Antisense strand to SEQ ID NO: 2146554
aguauucaucaccuagaca

SEQ ID NO: 2146556 - RNA, 19 nt, Artificial Sequence
  Description of Artificial Sequence: Synthetic oligonucleotide
  Sense strand starting at position 2339 of SEQ ID NO: 1882774
ugaugaauacugcauguca

SEQ ID NO: 2146557 - RNA, 19 nt, Artificial Sequence
  Description of Artificial Sequence: Synthetic oligonucleotide
  Antisense strand to SEQ ID NO: 2146556
ugacaugcaguauucauca

SEQ ID NO: 2146558 - RNA, 19 nt, Artificial Sequence
  Description of Artificial Sequence: Synthetic oligonucleotide
  Sense strand starting at position 2341 of SEQ ID NO: 1882774
augaauacugcaugucaua

SEQ ID NO: 2146559 - RNA, 19 nt, Artificial Sequence
  Description of Artificial Sequence: Synthetic oligonucleotide
  Antisense strand to SEQ ID NO: 2146558
uaugacaugcaguauucau

SEQ ID NO: 2146560 - RNA, 19 nt, Artificial Sequence
  Description of Artificial Sequence: Synthetic oligonucleotide
  Sense strand starting at position 2381 of SEQ ID NO: 1882774
guaaacagucacuaaugca

SEQ ID NO: 2146561 - RNA, 19 nt, Artificial Sequence
  Description of Artificial Sequence: Synthetic oligonucleotide
  Antisense strand to SEQ ID NO: 2146560
ugcauuagugacuguuuac

SEQ ID NO: 2146562 - RNA, 19 nt, Artificial Sequence
  Description of Artificial Sequence: Synthetic oligonucleotide
  Sense strand starting at position 2518 of SEQ ID NO: 1882774
acgaucugcagugaaucua

SEQ ID NO: 2146563 - RNA, 19 nt, Artificial Sequence
  Description of Artificial Sequence: Synthetic oligonucleotide
  Antisense strand to SEQ ID NO: 2146562
uagauucacugcagaucgu

SEQ ID NO: 2146564 - RNA, 19 nt, Artificial Sequence
  Description of Artificial Sequence: Synthetic oligonucleotide
  Sense strand starting at position 2674 of SEQ ID NO: 1882774
ccaagaauuuccuggaagg

SEQ ID NO: 2146565 - RNA, 19 nt, Artificial Sequence
  Description of Artificial Sequence: Synthetic oligonucleotide
  Antisense strand to SEQ ID NO: 2146564
ccuuccaggaaauucuugg

SEQ ID NO: 2146566 - RNA, 19 nt, Artificial Sequence
  Description of Artificial Sequence: Synthetic oligonucleotide
  Sense strand starting at position 2843 of SEQ ID NO: 1882774
caagcaguagcuugagaga

SEQ ID NO: 2146567 - RNA, 19 nt, Artificial Sequence
  Description of Artificial Sequence: Synthetic oligonucleotide
  Antisense strand to SEQ ID NO: 2146566
ucucucaagcuacugcuug

SEQ ID NO: 2146568 - RNA, 19 nt, Artificial Sequence
  Description of Artificial Sequence: Synthetic oligonucleotide
  Sense strand starting at position 2852 of SEQ ID NO: 1882774
gcuugagagaggugggaau

SEQ ID NO: 2146569 - RNA, 19 nt, Artificial Sequence
  Description of Artificial Sequence: Synthetic oligonucleotide
  Antisense strand to SEQ ID NO: 2146568
auucccaccucucucaagc

SEQ ID NO: 2146570 - RNA, 19 nt, Artificial Sequence
  Description of Artificial Sequence: Synthetic oligonucleotide
  Sense strand starting at position 3212 of SEQ ID NO: 1882774
agguucguuggcagagcua

SEQ ID NO: 2146571 - RNA, 19 nt, Artificial Sequence
  Description of Artificial Sequence: Synthetic oligonucleotide
  Antisense strand to SEQ ID NO: 2146570
uagcucugccaacgaaccu

SEQ ID NO: 2146572 - RNA, 19 nt, Artificial Sequence
  Description of Artificial Sequence: Synthetic oligonucleotide
  Sense strand starting at position 3221 of SEQ ID NO: 1882774
ggcagagcuauacagcaaa

SEQ ID NO: 2146573 - RNA, 19 nt, Artificial Sequence
  Description of Artificial Sequence: Synthetic oligonucleotide
  Antisense strand to SEQ ID NO: 2146572
uuugcuguauagcucugcc

SEQ ID NO: 2146574 - RNA, 19 nt, Artificial Sequence
  Description of Artificial Sequence: Synthetic oligonucleotide
  Sense strand starting at position 3323 of SEQ ID NO: 1882774
ccagcaauuuaagaguaaa

SEQ ID NO: 2146575 - RNA, 19 nt, Artificial Sequence
  Description of Artificial Sequence: Synthetic oligonucleotide
  Antisense strand to SEQ ID NO: 2146574
uuuacucuuaaauugcugg

SEQ ID NO: 2146576 - RNA, 19 nt, Artificial Sequence
  Description of Artificial Sequence: Synthetic oligonucleotide
  Sense strand starting at position 3342 of SEQ ID NO: 1882774
ugacaacuaguuugaaauu

SEQ ID NO: 2146577 - RNA, 19 nt, Artificial Sequence
  Description of Artificial Sequence: Synthetic oligonucleotide
  Antisense strand to SEQ ID NO: 2146576
aauuucaaacuaguuguca

SEQ ID NO: 2146578 - RNA, 19 nt, Artificial Sequence
  Description of Artificial Sequence: Synthetic oligonucleotide
  Sense strand starting at position 3355 of SEQ ID NO: 1882774
gaaauuguuugaucagaau

SEQ ID NO: 2146579 - RNA, 19 nt, Artificial Sequence
  Description of Artificial Sequence: Synthetic oligonucleotide
  Antisense strand to SEQ ID NO: 2146578
auucugaucaaacaauuuc

SEQ ID NO: 2146580 - RNA, 19 nt, Artificial Sequence
  Description of Artificial Sequence: Synthetic oligonucleotide
  Sense strand starting at position 3436 of SEQ ID NO: 1882774
gcuaauugagaguacaugu

SEQ ID NO: 2146581 - RNA, 19 nt, Artificial Sequence
  Description of Artificial Sequence: Synthetic oligonucleotide
  Antisense strand to SEQ ID NO: 2146580
acauguacucucaauuagc

SEQ ID NO: 2146582 - RNA, 19 nt, Artificial Sequence
  Description of Artificial Sequence: Synthetic oligonucleotide
  Sense strand starting at position 3467 of SEQ ID NO: 1882774
cauugauuugcuggcuucu

SEQ ID NO: 2146583 - RNA, 19 nt, Artificial Sequence
  Description of Artificial Sequence: Synthetic oligonucleotide
  Antisense strand to SEQ ID NO: 2146582
agaagccagcaaaucaaug

SEQ ID NO: 2146584 - RNA, 19 nt, Artificial Sequence
  Description of Artificial Sequence: Synthetic oligonucleotide
  Sense strand starting at position 3469 of SEQ ID NO: 1882774
uugauuugcuggcuucuaa

SEQ ID NO: 2146585 - RNA, 19 nt, Artificial Sequence
  Description of Artificial Sequence: Synthetic oligonucleotide
  Antisense strand to SEQ ID NO: 2146584
uuagaagccagcaaaucaa

SEQ ID NO: 2146586 - RNA, 19 nt, Artificial Sequence
  Description of Artificial Sequence: Synthetic oligonucleotide
  Sense strand starting at position 3692 of SEQ ID NO: 1882774
uucuuagagcaacauuagu

SEQ ID NO: 2146587 - RNA, 19 nt, Artificial Sequence
  Description of Artificial Sequence: Synthetic oligonucleotide
  Antisense strand to SEQ ID NO: 2146586
acuaauguugcucuaagaa

SEQ ID NO: 2146588 - RNA, 19 nt, Artificial Sequence
  Description of Artificial Sequence: Synthetic oligonucleotide
  Sense strand starting at position 3697 of SEQ ID NO: 1882774
agagcaacauuagucagaa

SEQ ID NO: 2146589 - RNA, 19 nt, Artificial Sequence
  Description of Artificial Sequence: Synthetic oligonucleotide
  Antisense strand to SEQ ID NO: 2146588
uucugacuaauguugcucu

SEQ ID NO: 2146590 - RNA, 19 nt, Artificial Sequence
  Description of Artificial Sequence: Synthetic oligonucleotide
  Sense strand starting at position 3698 of SEQ ID NO: 1882774
gagcaacauuagucagaaa

SEQ ID NO: 2146591 - RNA, 19 nt, Artificial Sequence
  Description of Artificial Sequence: Synthetic oligonucleotide
  Antisense strand to SEQ ID NO: 2146590
uuucugacuaauguugcuc

SEQ ID NO: 2146592 - RNA, 19 nt, Artificial Sequence
  Description of Artificial Sequence: Synthetic oligonucleotide
  Sense strand starting at position 3781 of SEQ ID NO: 1882774
aagcucugugcugaagaau

SEQ ID NO: 2146593 - RNA, 19 nt, Artificial Sequence
  Description of Artificial Sequence: Synthetic oligonucleotide
  Antisense strand to SEQ ID NO: 2146592
auucuucagcacagagcuu

SEQ ID NO: 2146594 - RNA, 19 nt, Artificial Sequence
  Description of Artificial Sequence: Synthetic oligonucleotide
  Sense strand starting at position 3798 of SEQ ID NO: 1882774
auggaaucauuggaaagaa

SEQ ID NO: 2146595 - RNA, 19 nt, Artificial Sequence
  Description of Artificial Sequence: Synthetic oligonucleotide
  Antisense strand to SEQ ID NO: 2146594
uucuuuccaaugauuccau

SEQ ID NO: 2146596 - RNA, 19 nt, Artificial Sequence
  Description of Artificial Sequence: Synthetic oligonucleotide
  Sense strand starting at position 3899 of SEQ ID NO: 1882774
ugagucuugcauuagucaa

SEQ ID NO: 2146597 - RNA, 19 nt, Artificial Sequence
  Description of Artificial Sequence: Synthetic oligonucleotide
  Antisense strand to SEQ ID NO: 2146596
uugacuaaugcaagacuca

SEQ ID NO: 2146598 - RNA, 19 nt, Artificial Sequence
  Description of Artificial Sequence: Synthetic oligonucleotide
  Sense strand starting at position 3965 of SEQ ID NO: 1882774
caauuugccuguuugcuga

SEQ ID NO: 2146599 - RNA, 19 nt, Artificial Sequence
  Description of Artificial Sequence: Synthetic oligonucleotide
  Antisense strand to SEQ ID NO: 2146598
ucagcaaacaggcaaauug

SEQ ID NO: 2146600 - RNA, 19 nt, Artificial Sequence
  Description of Artificial Sequence: Synthetic oligonucleotide
  Sense strand starting at position 3973 of SEQ ID NO: 1882774
cuguuugcugaagagaaca

SEQ ID NO: 2146601 - RNA, 19 nt, Artificial Sequence
  Description of Artificial Sequence: Synthetic oligonucleotide
  Antisense strand to SEQ ID NO: 2146600
uguucucuucagcaaacag

SEQ ID NO: 2146602 - RNA, 19 nt, Artificial Sequence
  Description of Artificial Sequence: Synthetic oligonucleotide
  Sense strand starting at position 471 of SEQ ID NO: 1882777
gaaggagcguccucaaauc

SEQ ID NO: 2146603 - RNA, 19 nt, Artificial Sequence
  Description of Artificial Sequence: Synthetic oligonucleotide
  Antisense strand to SEQ ID NO: 2146602
gauuugaggacgcuccuuc

SEQ ID NO: 2146604 - RNA, 19 nt, Artificial Sequence
  Description of Artificial Sequence: Synthetic oligonucleotide
  Sense strand starting at position 620 of SEQ ID NO: 1882777
auuugucccucugcgaguu

SEQ ID NO: 2146605 - RNA, 19 nt, Artificial Sequence
  Description of Artificial Sequence: Synthetic oligonucleotide
  Antisense strand to SEQ ID NO: 2146604
aacucgcagagggacaaau

SEQ ID NO: 2146606 - RNA, 19 nt, Artificial Sequence
  Description of Artificial Sequence: Synthetic oligonucleotide
  Sense strand starting at position 639 of SEQ ID NO: 1882777
cagucagaucgcugggaaa

SEQ ID NO: 2146607 - RNA, 19 nt, Artificial Sequence
  Description of Artificial Sequence: Synthetic oligonucleotide
  Antisense strand to SEQ ID NO: 2146606
uuucccagcgaucugacug

SEQ ID NO: 2146608 - RNA, 19 nt, Artificial Sequence
  Description of Artificial Sequence: Synthetic oligonucleotide
  Sense strand starting at position 693 of SEQ ID NO: 1882777
ccaggcauuugauacauaa

SEQ ID NO: 2146609 - RNA, 19 nt, Artificial Sequence
  Description of Artificial Sequence: Synthetic oligonucleotide
  Antisense strand to SEQ ID NO: 2146608
uuauguaucaaaugccugg

SEQ ID NO: 2146610 - RNA, 19 nt, Artificial Sequence
  Description of Artificial Sequence: Synthetic oligonucleotide
  Sense strand starting at position 730 of SEQ ID NO: 1882777
ucaagcuuucuggaauuac

SEQ ID NO: 2146611 - RNA, 19 nt, Artificial Sequence
  Description of Artificial Sequence: Synthetic oligonucleotide
  Antisense strand to SEQ ID NO: 2146610
guaauuccagaaagcuuga

SEQ ID NO: 2146612 - RNA, 19 nt, Artificial Sequence
  Description of Artificial Sequence: Synthetic oligonucleotide
  Sense strand starting at position 848 of SEQ ID NO: 1882777
aaacuuguuugugucagga

SEQ ID NO: 2146613 - RNA, 19 nt, Artificial Sequence
  Description of Artificial Sequence: Synthetic oligonucleotide
  Antisense strand to SEQ ID NO: 2146612
uccugacacaaacaaguuu

SEQ ID NO: 2146614 - RNA, 19 nt, Artificial Sequence
  Description of Artificial Sequence: Synthetic oligonucleotide
  Sense strand starting at position 989 of SEQ ID NO: 1882777
ggguguuugaugggaaaca

SEQ ID NO: 2146615 - RNA, 19 nt, Artificial Sequence
  Description of Artificial Sequence: Synthetic oligonucleotide
  Antisense strand to SEQ ID NO: 2146614
uguuucccaucaaacaccc

SEQ ID NO: 2146616 - RNA, 19 nt, Artificial Sequence
  Description of Artificial Sequence: Synthetic oligonucleotide
  Sense strand starting at position 1074 of SEQ ID NO: 1882777
auauguaaucucuguauac

SEQ ID NO: 2146617 - RNA, 19 nt, Artificial Sequence
  Description of Artificial Sequence: Synthetic oligonucleotide
  Antisense strand to SEQ ID NO: 2146616
guauacagagauuacauau

SEQ ID NO: 2146618 - RNA, 19 nt, Artificial Sequence
  Description of Artificial Sequence: Synthetic oligonucleotide
  Sense strand starting at position 1076 of SEQ ID NO: 1882777
auguaaucucuguauacau

SEQ ID NO: 2146619 - RNA, 19 nt, Artificial Sequence
  Description of Artificial Sequence: Synthetic oligonucleotide
  Antisense strand to SEQ ID NO: 2146618
auguauacagagauuacau

SEQ ID NO: 2146620 - RNA, 19 nt, Artificial Sequence
  Description of Artificial Sequence: Synthetic oligonucleotide
  Sense strand starting at position 1078 of SEQ ID NO: 1882777
guaaucucuguauacauag

SEQ ID NO: 2146621 - RNA, 19 nt, Artificial Sequence
  Description of Artificial Sequence: Synthetic oligonucleotide
  Antisense strand to SEQ ID NO: 2146620
cuauguauacagagauuac

SEQ ID NO: 2146622 - RNA, 19 nt, Artificial Sequence
  Description of Artificial Sequence: Synthetic oligonucleotide
  Sense strand starting at position 1173 of SEQ ID NO: 1882777
uggaaagacucacucaagu

SEQ ID NO: 2146623 - RNA, 19 nt, Artificial Sequence
  Description of Artificial Sequence: Synthetic oligonucleotide
  Antisense strand to SEQ ID NO: 2146622
acuugagugagucuuucca

SEQ ID NO: 2146624 - RNA, 19 nt, Artificial Sequence
  Description of Artificial Sequence: Synthetic oligonucleotide
  Sense strand starting at position 1229 of SEQ ID NO: 1882777
ggguauuacugacucacag

SEQ ID NO: 2146625 - RNA, 19 nt, Artificial Sequence
  Description of Artificial Sequence: Synthetic oligonucleotide
  Antisense strand to SEQ ID NO: 2146624
cugugagucaguaauaccc

SEQ ID NO: 2146626 - RNA, 19 nt, Artificial Sequence
  Description of Artificial Sequence: Synthetic oligonucleotide
  Sense strand starting at position 1319 of SEQ ID NO: 1882777
cuguaaaucuaagccagau

SEQ ID NO: 2146627 - RNA, 19 nt, Artificial Sequence
  Description of Artificial Sequence: Synthetic oligonucleotide
  Antisense strand to SEQ ID NO: 2146626
aucuggcuuagauuuacag

SEQ ID NO: 2146628 - RNA, 19 nt, Artificial Sequence
  Description of Artificial Sequence: Synthetic oligonucleotide
  Sense strand starting at position 1379 of SEQ ID NO: 1882777
aaaggaaacuguguggauu

SEQ ID NO: 2146629 - RNA, 19 nt, Artificial Sequence
  Description of Artificial Sequence: Synthetic oligonucleotide
  Antisense strand to SEQ ID NO: 2146628
aauccacacaguuuccuuu

SEQ ID NO: 2146630 - RNA, 19 nt, Artificial Sequence
  Description of Artificial Sequence: Synthetic oligonucleotide
  Sense strand starting at position 1390 of SEQ ID NO: 1882777
uguggauuggcggaaucaa

SEQ ID NO: 2146631 - RNA, 19 nt, Artificial Sequence
  Description of Artificial Sequence: Synthetic oligonucleotide
  Antisense strand to SEQ ID NO: 2146630
uugauuccgccaauccaca

SEQ ID NO: 2146632 - RNA, 19 nt, Artificial Sequence
  Description of Artificial Sequence: Synthetic oligonucleotide
  Sense strand starting at position 1513 of SEQ ID NO: 1882777
augaaugagcuccauucca

SEQ ID NO: 2146633 - RNA, 19 nt, Artificial Sequence
  Description of Artificial Sequence: Synthetic oligonucleotide
  Antisense strand to SEQ ID NO: 2146632
uggaauggagcucauucau

SEQ ID NO: 2146634 - RNA, 19 nt, Artificial Sequence
  Description of Artificial Sequence: Synthetic oligonucleotide
  Sense strand starting at position 2072 of SEQ ID NO: 1882777
ggcggauggcuugaaauug

SEQ ID NO: 2146635 - RNA, 19 nt, Artificial Sequence
  Description of Artificial Sequence: Synthetic oligonucleotide
  Antisense strand to SEQ ID NO: 2146634
caauuucaagccauccgcc

SEQ ID NO: 2146636 - RNA, 19 nt, Artificial Sequence
  Description of Artificial Sequence: Synthetic oligonucleotide
  Sense strand starting at position 2101 of SEQ ID NO: 1882777
ugcgguucugcugugucau

SEQ ID NO: 2146637 - RNA, 19 nt, Artificial Sequence
  Description of Artificial Sequence: Synthetic oligonucleotide
  Antisense strand to SEQ ID NO: 2146636
augacacagcagaaccgca

SEQ ID NO: 2146638 - RNA, 19 nt, Artificial Sequence
  Description of Artificial Sequence: Synthetic oligonucleotide
  Sense strand starting at position 2104 of SEQ ID NO: 1882777
gguucugcugugucaugca

SEQ ID NO: 2146639 - RNA, 19 nt, Artificial Sequence
  Description of Artificial Sequence: Synthetic oligonucleotide
  Antisense strand to SEQ ID NO: 2146638
ugcaugacacagcagaacc

SEQ ID NO: 2146640 - RNA, 19 nt, Artificial Sequence
  Description of Artificial Sequence: Synthetic oligonucleotide
  Sense strand starting at position 2355 of SEQ ID NO: 1882777
gcgggaagugcuagaaguc

SEQ ID NO: 2146641 - RNA, 19 nt, Artificial Sequence
  Description of Artificial Sequence: Synthetic oligonucleotide
  Antisense strand to SEQ ID NO: 2146640
gacuucuagcacuucccgc

SEQ ID NO: 2146642 - RNA, 19 nt, Artificial Sequence
  Description of Artificial Sequence: Synthetic oligonucleotide
  Sense strand starting at position 2356 of SEQ ID NO: 1882777
cgggaagugcuagaaguca

SEQ ID NO: 2146643 - RNA, 19 nt, Artificial Sequence
  Description of Artificial Sequence: Synthetic oligonucleotide
  Antisense strand to SEQ ID NO: 2146642
ugacuucuagcacuucccg

SEQ ID NO: 2146644 - RNA, 19 nt, Artificial Sequence
  Description of Artificial Sequence: Synthetic oligonucleotide
  Sense strand starting at position 2547 of SEQ ID NO: 1882777
ugauucaggguuugagaag

SEQ ID NO: 2146645 - RNA, 19 nt, Artificial Sequence
  Description of Artificial Sequence: Synthetic oligonucleotide
  Antisense strand to SEQ ID NO: 2146644
cuucucaaacccugaauca

SEQ ID NO: 2146646 - RNA, 19 nt, Artificial Sequence
  Description of Artificial Sequence: Synthetic oligonucleotide
  Sense strand starting at position 2559 of SEQ ID NO: 1882777
ugagaaguaucagcccauc

SEQ ID NO: 2146647 - RNA, 19 nt, Artificial Sequence
  Description of Artificial Sequence: Synthetic oligonucleotide
  Antisense strand to SEQ ID NO: 2146646
gaugggcugauacuucuca

SEQ ID NO: 2146648 - RNA, 19 nt, Artificial Sequence
  Description of Artificial Sequence: Synthetic oligonucleotide
  Sense strand starting at position 2820 of SEQ ID NO: 1882777
aguuccuuugaccagcaua

SEQ ID NO: 2146649 - RNA, 19 nt, Artificial Sequence
  Description of Artificial Sequence: Synthetic oligonucleotide
  Antisense strand to SEQ ID NO: 2146648
uaugcuggucaaaggaacu

SEQ ID NO: 2146650 - RNA, 19 nt, Artificial Sequence
  Description of Artificial Sequence: Synthetic oligonucleotide
  Sense strand starting at position 2836 of SEQ ID NO: 1882777
auaccucauucggcuuaaa

SEQ ID NO: 2146651 - RNA, 19 nt, Artificial Sequence
  Description of Artificial Sequence: Synthetic oligonucleotide
  Antisense strand to SEQ ID NO: 2146650
uuuaagccgaaugagguau

SEQ ID NO: 2146652 - RNA, 19 nt, Artificial Sequence
  Description of Artificial Sequence: Synthetic oligonucleotide
  Sense strand starting at position 2839 of SEQ ID NO: 1882777
ccucauucggcuuaaagga

SEQ ID NO: 2146653 - RNA, 19 nt, Artificial Sequence
  Description of Artificial Sequence: Synthetic oligonucleotide
  Antisense strand to SEQ ID NO: 2146652
uccuuuaagccgaaugagg

SEQ ID NO: 2146654 - RNA, 19 nt, Artificial Sequence
  Description of Artificial Sequence: Synthetic oligonucleotide
  Sense strand starting at position 2982 of SEQ ID NO: 1882777
uacucacuuuaggugagaa

SEQ ID NO: 2146655 - RNA, 19 nt, Artificial Sequence
  Description of Artificial Sequence: Synthetic oligonucleotide
  Antisense strand to SEQ ID NO: 2146654
uucucaccuaaagugagua

SEQ ID NO: 2146656 - RNA, 19 nt, Artificial Sequence
  Description of Artificial Sequence: Synthetic oligonucleotide
  Sense strand starting at position 2995 of SEQ ID NO: 1882777
ugagaagacugccugaaac

SEQ ID NO: 2146657 - RNA, 19 nt, Artificial Sequence
  Description of Artificial Sequence: Synthetic oligonucleotide
  Antisense strand to SEQ ID NO: 2146656
guuucaggcagucuucuca

SEQ ID NO: 2146658 - RNA, 19 nt, Artificial Sequence
  Description of Artificial Sequence: Synthetic oligonucleotide
  Sense strand starting at position 3128 of SEQ ID NO: 1882777
gaguguaguucuccagaca

SEQ ID NO: 2146659 - RNA, 19 nt, Artificial Sequence
  Description of Artificial Sequence: Synthetic oligonucleotide
  Antisense strand to SEQ ID NO: 2146658
ugucuggagaacuacacuc

SEQ ID NO: 2146660 - RNA, 19 nt, Artificial Sequence
  Description of Artificial Sequence: Synthetic oligonucleotide
  Sense strand starting at position 3129 of SEQ ID NO: 1882777
aguguaguucuccagacaa

SEQ ID NO: 2146661 - RNA, 19 nt, Artificial Sequence
  Description of Artificial Sequence: Synthetic oligonucleotide
  Antisense strand to SEQ ID NO: 2146660
uugucuggagaacuacacu

SEQ ID NO: 2146662 - RNA, 19 nt, Artificial Sequence
  Description of Artificial Sequence: Synthetic oligonucleotide
  Sense strand starting at position 3131 of SEQ ID NO: 1882777
uguaguucuccagacaacu

SEQ ID NO: 2146663 - RNA, 19 nt, Artificial Sequence
  Description of Artificial Sequence: Synthetic oligonucleotide
  Antisense strand to SEQ ID NO: 2146662
aguugucuggagaacuaca

SEQ ID NO: 2146664 - RNA, 19 nt, Artificial Sequence
  Description of Artificial Sequence: Synthetic oligonucleotide
  Sense strand starting at position 3229 of SEQ ID NO: 1882777
gucauacauuuagagguaa

SEQ ID NO: 2146665 - RNA, 19 nt, Artificial Sequence
  Description of Artificial Sequence: Synthetic oligonucleotide
  Antisense strand to SEQ ID NO: 2146664
uuaccucuaaauguaugac

SEQ ID NO: 2146666 - RNA, 19 nt, Artificial Sequence
  Description of Artificial Sequence: Synthetic oligonucleotide
  Sense strand starting at position 3317 of SEQ ID NO: 1882777
gcuccugcugcucucuaau

SEQ ID NO: 2146667 - RNA, 19 nt, Artificial Sequence
  Description of Artificial Sequence: Synthetic oligonucleotide
  Antisense strand to SEQ ID NO: 2146666
auuagagagcagcaggagc

SEQ ID NO: 2146668 - RNA, 19 nt, Artificial Sequence
  Description of Artificial Sequence: Synthetic oligonucleotide
  Sense strand starting at position 3381 of SEQ ID NO: 1882777
aaugaauggcaucggguua

SEQ ID NO: 2146669 - RNA, 19 nt, Artificial Sequence
  Description of Artificial Sequence: Synthetic oligonucleotide
  Antisense strand to SEQ ID NO: 2146668
uaacccgaugccauucauu

SEQ ID NO: 2146670 - RNA, 19 nt, Artificial Sequence
  Description of Artificial Sequence: Synthetic oligonucleotide
  Sense strand starting at position 3382 of SEQ ID NO: 1882777
augaauggcaucggguuaa

SEQ ID NO: 2146671 - RNA, 19 nt, Artificial Sequence
  Description of Artificial Sequence: Synthetic oligonucleotide
  Antisense strand to SEQ ID NO: 2146670
uuaacccgaugccauucau

SEQ ID NO: 2146672 - RNA, 19 nt, Artificial Sequence
  Description of Artificial Sequence: Synthetic oligonucleotide
  Sense strand starting at position 3419 of SEQ ID NO: 1882777
uguagcauccuggauuauu

SEQ ID NO: 2146673 - RNA, 19 nt, Artificial Sequence
  Description of Artificial Sequence: Synthetic oligonucleotide
  Antisense strand to SEQ ID NO: 2146672
aauaauccaggaugcuaca

SEQ ID NO: 2146674 - RNA, 19 nt, Artificial Sequence
  Description of Artificial Sequence: Synthetic oligonucleotide
  Sense strand starting at position 3427 of SEQ ID NO: 1882777
ccuggauuauuaucgauug

SEQ ID NO: 2146675 - RNA, 19 nt, Artificial Sequence
  Description of Artificial Sequence: Synthetic oligonucleotide
  Antisense strand to SEQ ID NO: 2146674
caaucgauaauaauccagg

SEQ ID NO: 2146676 - RNA, 19 nt, Artificial Sequence
  Description of Artificial Sequence: Synthetic oligonucleotide
  Sense strand starting at position 3551 of SEQ ID NO: 1882777
gguuuauauuuggucucgu

SEQ ID NO: 2146677 - RNA, 19 nt, Artificial Sequence
  Description of Artificial Sequence: Synthetic oligonucleotide
  Antisense strand to SEQ ID NO: 2146676
acgagaccaaauauaaacc

SEQ ID NO: 2146678 - RNA, 19 nt, Artificial Sequence
  Description of Artificial Sequence: Synthetic oligonucleotide
  Sense strand starting at position 3552 of SEQ ID NO: 1882777
guuuauauuuggucucgua

SEQ ID NO: 2146679 - RNA, 19 nt, Artificial Sequence
  Description of Artificial Sequence: Synthetic oligonucleotide
  Antisense strand to SEQ ID NO: 2146678
uacgagaccaaauauaaac

SEQ ID NO: 2146680 - RNA, 19 nt, Artificial Sequence
  Description of Artificial Sequence: Synthetic oligonucleotide
  Sense strand starting at position 3979 of SEQ ID NO: 1882777
guggcauucggagaacaca

SEQ ID NO: 2146681 - RNA, 19 nt, Artificial Sequence
  Description of Artificial Sequence: Synthetic oligonucleotide
  Antisense strand to SEQ ID NO: 2146680
uguguucuccgaaugccac

SEQ ID NO: 2146682 - RNA, 19 nt, Artificial Sequence
  Description of Artificial Sequence: Synthetic oligonucleotide
  Sense strand starting at position 5 of SEQ ID NO: 1882776
guagaaauguacccacaua

SEQ ID NO: 2146683 - RNA, 19 nt, Artificial Sequence
  Description of Artificial Sequence: Synthetic oligonucleotide
  Antisense strand to SEQ ID NO: 2146682
uauguggguacauuucuac

SEQ ID NO: 2146684 - RNA, 19 nt, Artificial Sequence
  Description of Artificial Sequence: Synthetic oligonucleotide
  Sense strand starting at position 102 of SEQ ID NO: 1882776
ggcauaugugacuguugaa

SEQ ID NO: 2146685 - RNA, 19 nt, Artificial Sequence
  Description of Artificial Sequence: Synthetic oligonucleotide
  Antisense strand to SEQ ID NO: 2146684
uucaacagucacauaugcc

SEQ ID NO: 2146686 - RNA, 19 nt, Artificial Sequence
  Description of Artificial Sequence: Synthetic oligonucleotide
  Sense strand starting at position 161 of SEQ ID NO: 1882776
aguaguccucccugauuaa

SEQ ID NO: 2146687 - RNA, 19 nt, Artificial Sequence
  Description of Artificial Sequence: Synthetic oligonucleotide
  Antisense strand to SEQ ID NO: 2146686
uuaaucagggaggacuacu

SEQ ID NO: 2146688 - RNA, 19 nt, Artificial Sequence
  Description of Artificial Sequence: Synthetic oligonucleotide
  Sense strand starting at position 162 of SEQ ID NO: 1882776
guaguccucccugauuaac

SEQ ID NO: 2146689 - RNA, 19 nt, Artificial Sequence
  Description of Artificial Sequence: Synthetic oligonucleotide
  Antisense strand to SEQ ID NO: 2146688
guuaaucagggaggacuac

SEQ ID NO: 2146690 - RNA, 19 nt, Artificial Sequence
  Description of Artificial Sequence: Synthetic oligonucleotide
  Sense strand starting at position 221 of SEQ ID NO: 1882776
acaguacuucuacgaguag

SEQ ID NO: 2146691 - RNA, 19 nt, Artificial Sequence
  Description of Artificial Sequence: Synthetic oligonucleotide
  Antisense strand to SEQ ID NO: 2146690
cuacucguagaaguacugu

SEQ ID NO: 2146692 - RNA, 19 nt, Artificial Sequence
  Description of Artificial Sequence: Synthetic oligonucleotide
  Sense strand starting at position 288 of SEQ ID NO: 1882776
gacagaugaauacguguua

SEQ ID NO: 2146693 - RNA, 19 nt, Artificial Sequence
  Description of Artificial Sequence: Synthetic oligonucleotide
  Antisense strand to SEQ ID NO: 2146692
uaacacguauucaucuguc

SEQ ID NO: 2146694 - RNA, 19 nt, Artificial Sequence
  Description of Artificial Sequence: Synthetic oligonucleotide
  Sense strand starting at position 295 of SEQ ID NO: 1882776
gaauacguguuagcuauuu

SEQ ID NO: 2146695 - RNA, 19 nt, Artificial Sequence
  Description of Artificial Sequence: Synthetic oligonucleotide
  Antisense strand to SEQ ID NO: 2146694
aaauagcuaacacguauuc

SEQ ID NO: 2146696 - RNA, 19 nt, Artificial Sequence
  Description of Artificial Sequence: Synthetic oligonucleotide
  Sense strand starting at position 459 of SEQ ID NO: 1882776
ggauguggguccaauuggu

SEQ ID NO: 2146697 - RNA, 19 nt, Artificial Sequence
  Description of Artificial Sequence: Synthetic oligonucleotide
  Antisense strand to SEQ ID NO: 2146696
accaauuggacccacaucc

SEQ ID NO: 2146698 - RNA, 19 nt, Artificial Sequence
  Description of Artificial Sequence: Synthetic oligonucleotide
  Sense strand starting at position 465 of SEQ ID NO: 1882776
ggguccaauuggucuggga

SEQ ID NO: 2146699 - RNA, 19 nt, Artificial Sequence
  Description of Artificial Sequence: Synthetic oligonucleotide
  Antisense strand to SEQ ID NO: 2146698
ucccagaccaauuggaccc

SEQ ID NO: 2146700 - RNA, 19 nt, Artificial Sequence
  Description of Artificial Sequence: Synthetic oligonucleotide
  Sense strand starting at position 467 of SEQ ID NO: 1882776
guccaauuggucugggauu

SEQ ID NO: 2146701 - RNA, 19 nt, Artificial Sequence
  Description of Artificial Sequence: Synthetic oligonucleotide
  Antisense strand to SEQ ID NO: 2146700
aaucccagaccaauuggac

SEQ ID NO: 2146702 - RNA, 19 nt, Artificial Sequence
  Description of Artificial Sequence: Synthetic oligonucleotide
  Sense strand starting at position 514 of SEQ ID NO: 1882776
acuccaguugguuauuaca

SEQ ID NO: 2146703 - RNA, 19 nt, Artificial Sequence
  Description of Artificial Sequence: Synthetic oligonucleotide
  Antisense strand to SEQ ID NO: 2146702
uguaauaaccaacuggagu

SEQ ID NO: 2146704 - RNA, 19 nt, Artificial Sequence
  Description of Artificial Sequence: Synthetic oligonucleotide
  Sense strand starting at position 1700 of SEQ ID NO: 1882776
gcaacagacuuaccgaaua

SEQ ID NO: 2146705 - RNA, 19 nt, Artificial Sequence
  Description of Artificial Sequence: Synthetic oligonucleotide
  Antisense strand to SEQ ID NO: 2146704
uauucgguaagucuguugc

SEQ ID NO: 2146706 - RNA, 19 nt, Artificial Sequence
  Description of Artificial Sequence: Synthetic oligonucleotide
  Sense strand starting at position 1705 of SEQ ID NO: 1882776
agacuuaccgaauagcaau

SEQ ID NO: 2146707 - RNA, 19 nt, Artificial Sequence
  Description of Artificial Sequence: Synthetic oligonucleotide
  Antisense strand to SEQ ID NO: 2146706
auugcuauucgguaagucu

SEQ ID NO: 2146708 - RNA, 19 nt, Artificial Sequence
  Description of Artificial Sequence: Synthetic oligonucleotide
  Sense strand starting at position 1818 of SEQ ID NO: 1882776
aagagacacugucugguau

SEQ ID NO: 2146709 - RNA, 19 nt, Artificial Sequence
  Description of Artificial Sequence: Synthetic oligonucleotide
  Antisense strand to SEQ ID NO: 2146708
auaccagacagugucucuu

SEQ ID NO: 2146710 - RNA, 19 nt, Artificial Sequence
  Description of Artificial Sequence: Synthetic oligonucleotide
  Sense strand starting at position 1982 of SEQ ID NO: 1882776
gggaguugcugauuccagu

SEQ ID NO: 2146711 - RNA, 19 nt, Artificial Sequence
  Description of Artificial Sequence: Synthetic oligonucleotide
  Antisense strand to SEQ ID NO: 2146710
acuggaaucagcaacuccc

SEQ ID NO: 2146712 - RNA, 19 nt, Artificial Sequence
  Description of Artificial Sequence: Synthetic oligonucleotide
  Sense strand starting at position 1988 of SEQ ID NO: 1882776
ugcugauuccaguggagaa

SEQ ID NO: 2146713 - RNA, 19 nt, Artificial Sequence
  Description of Artificial Sequence: Synthetic oligonucleotide
  Antisense strand to SEQ ID NO: 2146712
uucuccacuggaaucagca

SEQ ID NO: 2146714 - RNA, 19 nt, Artificial Sequence
  Description of Artificial Sequence: Synthetic oligonucleotide
  Sense strand starting at position 1989 of SEQ ID NO: 1882776
gcugauuccaguggagaac

SEQ ID NO: 2146715 - RNA, 19 nt, Artificial Sequence
  Description of Artificial Sequence: Synthetic oligonucleotide
  Antisense strand to SEQ ID NO: 2146714
guucuccacuggaaucagc

SEQ ID NO: 2146716 - RNA, 19 nt, Artificial Sequence
  Description of Artificial Sequence: Synthetic oligonucleotide
  Sense strand starting at position 2013 of SEQ ID NO: 1882776
caccgcguccuuucuaauu

SEQ ID NO: 2146717 - RNA, 19 nt, Artificial Sequence
  Description of Artificial Sequence: Synthetic oligonucleotide
  Antisense strand to SEQ ID NO: 2146716
aauuagaaaggacgcggug

SEQ ID NO: 2146718 - RNA, 19 nt, Artificial Sequence
  Description of Artificial Sequence: Synthetic oligonucleotide
  Sense strand starting at position 2074 of SEQ ID NO: 1882776
cgccuuuauuucuuguuga

SEQ ID NO: 2146719 - RNA, 19 nt, Artificial Sequence
  Description of Artificial Sequence: Synthetic oligonucleotide
  Antisense strand to SEQ ID NO: 2146718
ucaacaagaaauaaaggcg

SEQ ID NO: 2146720 - RNA, 19 nt, Artificial Sequence
  Description of Artificial Sequence: Synthetic oligonucleotide
  Sense strand starting at position 2119 of SEQ ID NO: 1882776
aggcaagaguugucucuag

SEQ ID NO: 2146721 - RNA, 19 nt, Artificial Sequence
  Description of Artificial Sequence: Synthetic oligonucleotide
  Antisense strand to SEQ ID NO: 2146720
cuagagacaacucuugccu

SEQ ID NO: 2146722 - RNA, 19 nt, Artificial Sequence
  Description of Artificial Sequence: Synthetic oligonucleotide
  Sense strand starting at position 2123 of SEQ ID NO: 1882776
aagaguugucucuagguuc

SEQ ID NO: 2146723 - RNA, 19 nt, Artificial Sequence
  Description of Artificial Sequence: Synthetic oligonucleotide
  Antisense strand to SEQ ID NO: 2146722
gaaccuagagacaacucuu

SEQ ID NO: 2146724 - RNA, 19 nt, Artificial Sequence
  Description of Artificial Sequence: Synthetic oligonucleotide
  Sense strand starting at position 2771 of SEQ ID NO: 1882776
cguagauuuguagagcgua

SEQ ID NO: 2146725 - RNA, 19 nt, Artificial Sequence
  Description of Artificial Sequence: Synthetic oligonucleotide
  Antisense strand to SEQ ID NO: 2146724
uacgcucuacaaaucuacg

SEQ ID NO: 2146726 - RNA, 19 nt, Artificial Sequence
  Description of Artificial Sequence: Synthetic oligonucleotide
  Sense strand starting at position 2781 of SEQ ID NO: 1882776
uagagcguauucuugagaa

SEQ ID NO: 2146727 - RNA, 19 nt, Artificial Sequence
  Description of Artificial Sequence: Synthetic oligonucleotide
  Antisense strand to SEQ ID NO: 2146726
uucucaagaauacgcucua

SEQ ID NO: 2146728 - RNA, 19 nt, Artificial Sequence
  Description of Artificial Sequence: Synthetic oligonucleotide
  Sense strand starting at position 2783 of SEQ ID NO: 1882776
gagcguauucuugagaauu

SEQ ID NO: 2146729 - RNA, 19 nt, Artificial Sequence
  Description of Artificial Sequence: Synthetic oligonucleotide
  Antisense strand to SEQ ID NO: 2146728
aauucucaagaauacgcuc

SEQ ID NO: 2146730 - RNA, 19 nt, Artificial Sequence
  Description of Artificial Sequence: Synthetic oligonucleotide
  Sense strand starting at position 2797 of SEQ ID NO: 1882776
gaauuucccugggaugaau

SEQ ID NO: 2146731 - RNA, 19 nt, Artificial Sequence
  Description of Artificial Sequence: Synthetic oligonucleotide
  Antisense strand to SEQ ID NO: 2146730
auucaucccagggaaauuc

SEQ ID NO: 2146732 - RNA, 19 nt, Artificial Sequence
  Description of Artificial Sequence: Synthetic oligonucleotide
  Sense strand starting at position 3357 of SEQ ID NO: 1882776
gaaggagcguccucaaauc

SEQ ID NO: 2146733 - RNA, 19 nt, Artificial Sequence
  Description of Artificial Sequence: Synthetic oligonucleotide
  Antisense strand to SEQ ID NO: 2146732
gauuugaggacgcuccuuc

SEQ ID NO: 2146734 - RNA, 19 nt, Artificial Sequence
  Description of Artificial Sequence: Synthetic oligonucleotide
  Sense strand starting at position 3440 of SEQ ID NO: 1882776
cccggagagcaaugaguuu

SEQ ID NO: 2146735 - RNA, 19 nt, Artificial Sequence
  Description of Artificial Sequence: Synthetic oligonucleotide
  Antisense strand to SEQ ID NO: 2146734
aaacucauugcucuccggg

SEQ ID NO: 2146736 - RNA, 19 nt, Artificial Sequence
  Description of Artificial Sequence: Synthetic oligonucleotide
  Sense strand starting at position 3506 of SEQ ID NO: 1882776
auuugucccucugcgaguu

SEQ ID NO: 2146737 - RNA, 19 nt, Artificial Sequence
  Description of Artificial Sequence: Synthetic oligonucleotide
  Antisense strand to SEQ ID NO: 2146736
aacucgcagagggacaaau

SEQ ID NO: 2146738 - RNA, 19 nt, Artificial Sequence
  Description of Artificial Sequence: Synthetic oligonucleotide
  Sense strand starting at position 3524 of SEQ ID NO: 1882776
ucagucagaucgcugggaa

SEQ ID NO: 2146739 - RNA, 19 nt, Artificial Sequence
  Description of Artificial Sequence: Synthetic oligonucleotide
  Antisense strand to SEQ ID NO: 2146738
uucccagcgaucugacuga

SEQ ID NO: 2146740 - RNA, 19 nt, Artificial Sequence
  Description of Artificial Sequence: Synthetic oligonucleotide
  Sense strand starting at position 3525 of SEQ ID NO: 1882776
cagucagaucgcugggaaa

SEQ ID NO: 2146741 - RNA, 19 nt, Artificial Sequence
  Description of Artificial Sequence: Synthetic oligonucleotide
  Antisense strand to SEQ ID NO: 2146740
uuucccagcgaucugacug

SEQ ID NO: 2146742 - RNA, 19 nt, Artificial Sequence
  Description of Artificial Sequence: Synthetic oligonucleotide
  Sense strand starting at position 3579 of SEQ ID NO: 1882776
ccaggcauuugauacauaa

SEQ ID NO: 2146743 - RNA, 19 nt, Artificial Sequence
  Description of Artificial Sequence: Synthetic oligonucleotide
  Antisense strand to SEQ ID NO: 2146742
uuauguaucaaaugccugg

SEQ ID NO: 2146744 - RNA, 19 nt, Artificial Sequence
  Description of Artificial Sequence: Synthetic oligonucleotide
  Sense strand starting at position 3616 of SEQ ID NO: 1882776
ucaagcuuucuggaauuac

SEQ ID NO: 2146745 - RNA, 19 nt, Artificial Sequence
  Description of Artificial Sequence: Synthetic oligonucleotide
  Antisense strand to SEQ ID NO: 2146744
guaauuccagaaagcuuga

SEQ ID NO: 2146746 - RNA, 19 nt, Artificial Sequence
  Description of Artificial Sequence: Synthetic oligonucleotide
  Sense strand starting at position 3628 of SEQ ID NO: 1882776
gaauuacguuccuccagua

SEQ ID NO: 2146747 - RNA, 19 nt, Artificial Sequence
  Description of Artificial Sequence: Synthetic oligonucleotide
  Antisense strand to SEQ ID NO: 2146746
uacuggaggaacguaauuc

SEQ ID NO: 2146748 - RNA, 19 nt, Artificial Sequence
  Description of Artificial Sequence: Synthetic oligonucleotide
  Sense strand starting at position 3650 of SEQ ID NO: 1882776
guugaugaugcuugcagga

SEQ ID NO: 2146749 - RNA, 19 nt, Artificial Sequence
  Description of Artificial Sequence: Synthetic oligonucleotide
  Antisense strand to SEQ ID NO: 2146748
uccugcaagcaucaucaac

SEQ ID NO: 2146750 - RNA, 19 nt, Artificial Sequence
  Description of Artificial Sequence: Synthetic oligonucleotide
  Sense strand starting at position 3711 of SEQ ID NO: 1882776
ggcuuuguugcugacaaca

SEQ ID NO: 2146751 - RNA, 19 nt, Artificial Sequence
  Description of Artificial Sequence: Synthetic oligonucleotide
  Antisense strand to SEQ ID NO: 2146750
uguugucagcaacaaagcc

SEQ ID NO: 2146752 - RNA, 19 nt, Artificial Sequence
  Description of Artificial Sequence: Synthetic oligonucleotide
  Sense strand starting at position 3734 of SEQ ID NO: 1882776
aaacuuguuugugucagga

SEQ ID NO: 2146753 - RNA, 19 nt, Artificial Sequence
  Description of Artificial Sequence: Synthetic oligonucleotide
  Antisense strand to SEQ ID NO: 2146752
uccugacacaaacaaguuu

SEQ ID NO: 2146754 - RNA, 19 nt, Artificial Sequence
  Description of Artificial Sequence: Synthetic oligonucleotide
  Sense strand starting at position 3875 of SEQ ID NO: 1882776
ggguguuugaugggaaaca

SEQ ID NO: 2146755 - RNA, 19 nt, Artificial Sequence
  Description of Artificial Sequence: Synthetic oligonucleotide
  Antisense strand to SEQ ID NO: 2146754
uguuucccaucaaacaccc

SEQ ID NO: 2146756 - RNA, 19 nt, Artificial Sequence
  Description of Artificial Sequence: Synthetic oligonucleotide
  Sense strand starting at position 3960 of SEQ ID NO: 1882776
auauguaaucucuguauac

SEQ ID NO: 2146757 - RNA, 19 nt, Artificial Sequence
  Description of Artificial Sequence: Synthetic oligonucleotide
  Antisense strand to SEQ ID NO: 2146756
guauacagagauuacauau

SEQ ID NO: 2146758 - RNA, 19 nt, Artificial Sequence
  Description of Artificial Sequence: Synthetic oligonucleotide
  Sense strand starting at position 3962 of SEQ ID NO: 1882776
auguaaucucuguauacau

SEQ ID NO: 2146759 - RNA, 19 nt, Artificial Sequence
  Description of Artificial Sequence: Synthetic oligonucleotide
  Antisense strand to SEQ ID NO: 2146758
auguauacagagauuacau

SEQ ID NO: 2146760 - RNA, 19 nt, Artificial Sequence
  Description of Artificial Sequence: Synthetic oligonucleotide
  Sense strand starting at position 3964 of SEQ ID NO: 1882776
guaaucucuguauacauag

SEQ ID NO: 2146761 - RNA, 19 nt, Artificial Sequence
  Description of Artificial Sequence: Synthetic oligonucleotide
  Antisense strand to SEQ ID NO: 2146760
cuauguauacagagauuac

SEQ ID NO: 2146762 - RNA, 19 nt, Artificial Sequence
  Description of Artificial Sequence: Synthetic oligonucleotide
  Sense strand starting at position 352 of SEQ ID NO: 1882775
ugauaacccugguugagaa

SEQ ID NO: 2146763 - RNA, 19 nt, Artificial Sequence
  Description of Artificial Sequence: Synthetic oligonucleotide
  Antisense strand to SEQ ID NO: 2146762
uucucaaccaggguuauca

SEQ ID NO: 2146764 - RNA, 19 nt, Artificial Sequence
  Description of Artificial Sequence: Synthetic oligonucleotide
  Sense strand starting at position 716 of SEQ ID NO: 1882775
uaaagcguuucccuagaca

SEQ ID NO: 2146765 - RNA, 19 nt, Artificial Sequence
  Description of Artificial Sequence: Synthetic oligonucleotide
  Antisense strand to SEQ ID NO: 2146764
ugucuagggaaacgcuuua

SEQ ID NO: 2146766 - RNA, 19 nt, Artificial Sequence
  Description of Artificial Sequence: Synthetic oligonucleotide
  Sense strand starting at position 719 of SEQ ID NO: 1882775
agcguuucccuagacaaag

SEQ ID NO: 2146767 - RNA, 19 nt, Artificial Sequence
  Description of Artificial Sequence: Synthetic oligonucleotide
  Antisense strand to SEQ ID NO: 2146766
cuuugucuagggaaacgcu

SEQ ID NO: 2146768 - RNA, 19 nt, Artificial Sequence
  Description of Artificial Sequence: Synthetic oligonucleotide
  Sense strand starting at position 833 of SEQ ID NO: 1882775
aggacuuguccuggaagca

SEQ ID NO: 2146769 - RNA, 19 nt, Artificial Sequence
  Description of Artificial Sequence: Synthetic oligonucleotide
  Antisense strand to SEQ ID NO: 2146768
ugcuuccaggacaaguccu

SEQ ID NO: 2146770 - RNA, 19 nt, Artificial Sequence
  Description of Artificial Sequence: Synthetic oligonucleotide
  Sense strand starting at position 834 of SEQ ID NO: 1882775
ggacuuguccuggaagcag

SEQ ID NO: 2146771 - RNA, 19 nt, Artificial Sequence
  Description of Artificial Sequence: Synthetic oligonucleotide
  Antisense strand to SEQ ID NO: 2146770
cugcuuccaggacaagucc

SEQ ID NO: 2146772 - RNA, 19 nt, Artificial Sequence
  Description of Artificial Sequence: Synthetic oligonucleotide
  Sense strand starting at position 1046 of SEQ ID NO: 1882775
agaacaauuccuugagcua

SEQ ID NO: 2146773 - RNA, 19 nt, Artificial Sequence
  Description of Artificial Sequence: Synthetic oligonucleotide
  Antisense strand to SEQ ID NO: 2146772
uagcucaaggaauuguucu

SEQ ID NO: 2146774 - RNA, 19 nt, Artificial Sequence
  Description of Artificial Sequence: Synthetic oligonucleotide
  Sense strand starting at position 1069 of SEQ ID NO: 1882775
cccuguuuccaguaacccu

SEQ ID NO: 2146775 - RNA, 19 nt, Artificial Sequence
  Description of Artificial Sequence: Synthetic oligonucleotide
  Antisense strand to SEQ ID NO: 2146774
aggguuacuggaaacaggg

SEQ ID NO: 2146776 - RNA, 19 nt, Artificial Sequence
  Description of Artificial Sequence: Synthetic oligonucleotide
  Sense strand starting at position 1162 of SEQ ID NO: 1882775
caucauagagauugccaga

SEQ ID NO: 2146777 - RNA, 19 nt, Artificial Sequence
  Description of Artificial Sequence: Synthetic oligonucleotide
  Antisense strand to SEQ ID NO: 2146776
ucuggcaaucucuaugaug

SEQ ID NO: 2146778 - RNA, 19 nt, Artificial Sequence
  Description of Artificial Sequence: Synthetic oligonucleotide
  Sense strand starting at position 1183 of SEQ ID NO: 1882775
guuaguugccuucauggga

SEQ ID NO: 2146779 - RNA, 19 nt, Artificial Sequence
  Description of Artificial Sequence: Synthetic oligonucleotide
  Antisense strand to SEQ ID NO: 2146778
ucccaugaaggcaacuaac

SEQ ID NO: 2146780 - RNA, 19 nt, Artificial Sequence
  Description of Artificial Sequence: Synthetic oligonucleotide
  Sense strand starting at position 1196 of SEQ ID NO: 1882775
augggauaguuucccuuau

SEQ ID NO: 2146781 - RNA, 19 nt, Artificial Sequence
  Description of Artificial Sequence: Synthetic oligonucleotide
  Antisense strand to SEQ ID NO: 2146780
auaagggaaacuaucccau

SEQ ID NO: 2146782 - RNA, 19 nt, Artificial Sequence
  Description of Artificial Sequence: Synthetic oligonucleotide
  Sense strand starting at position 1197 of SEQ ID NO: 1882775
ugggauaguuucccuuaug

SEQ ID NO: 2146783 - RNA, 19 nt, Artificial Sequence
  Description of Artificial Sequence: Synthetic oligonucleotide
  Antisense strand to SEQ ID NO: 2146782
cauaagggaaacuauccca

SEQ ID NO: 2146784 - RNA, 19 nt, Artificial Sequence
  Description of Artificial Sequence: Synthetic oligonucleotide
  Sense strand starting at position 1198 of SEQ ID NO: 1882775
gggauaguuucccuuauga

SEQ ID NO: 2146785 - RNA, 19 nt, Artificial Sequence
  Description of Artificial Sequence: Synthetic oligonucleotide
  Antisense strand to SEQ ID NO: 2146784
ucauaagggaaacuauccc

SEQ ID NO: 2146786 - RNA, 19 nt, Artificial Sequence
  Description of Artificial Sequence: Synthetic oligonucleotide
  Sense strand starting at position 1212 of SEQ ID NO: 1882775
uaugaauauuuaggaggaa

SEQ ID NO: 2146787 - RNA, 19 nt, Artificial Sequence
  Description of Artificial Sequence: Synthetic oligonucleotide
  Antisense strand to SEQ ID NO: 2146786
uuccuccuaaauauucaua

SEQ ID NO: 2146788 - RNA, 19 nt, Artificial Sequence
  Description of Artificial Sequence: Synthetic oligonucleotide
  Sense strand starting at position 1272 of SEQ ID NO: 1882775
uuuaaagagucagcauaac

SEQ ID NO: 2146789 - RNA, 19 nt, Artificial Sequence
  Description of Artificial Sequence: Synthetic oligonucleotide
  Antisense strand to SEQ ID NO: 2146788
guuaugcugacucuuuaaa

SEQ ID NO: 2146790 - RNA, 19 nt, Artificial Sequence
  Description of Artificial Sequence: Synthetic oligonucleotide
  Sense strand starting at position 1293 of SEQ ID NO: 1882775
uuucucuaucgagaccauu

SEQ ID NO: 2146791 - RNA, 19 nt, Artificial Sequence
  Description of Artificial Sequence: Synthetic oligonucleotide
  Antisense strand to SEQ ID NO: 2146790
aauggucucgauagagaaa

SEQ ID NO: 2146792 - RNA, 19 nt, Artificial Sequence
  Description of Artificial Sequence: Synthetic oligonucleotide
  Sense strand starting at position 1361 of SEQ ID NO: 1882775
aagcgauaacuguaccuuu

SEQ ID NO: 2146793 - RNA, 19 nt, Artificial Sequence
  Description of Artificial Sequence: Synthetic oligonucleotide
  Antisense strand to SEQ ID NO: 2146792
aaagguacaguuaucgcuu

SEQ ID NO: 2146794 - RNA, 19 nt, Artificial Sequence
  Description of Artificial Sequence: Synthetic oligonucleotide
  Sense strand starting at position 1364 of SEQ ID NO: 1882775
cgauaacuguaccuuuaaa

SEQ ID NO: 2146795 - RNA, 19 nt, Artificial Sequence
  Description of Artificial Sequence: Synthetic oligonucleotide
  Antisense strand to SEQ ID NO: 2146794
uuuaaagguacaguuaucg

SEQ ID NO: 2146796 - RNA, 19 nt, Artificial Sequence
  Description of Artificial Sequence: Synthetic oligonucleotide
  Sense strand starting at position 1424 of SEQ ID NO: 1882775
ccuccaaaggucuaguaua

SEQ ID NO: 2146797 - RNA, 19 nt, Artificial Sequence
  Description of Artificial Sequence: Synthetic oligonucleotide
  Antisense strand to SEQ ID NO: 2146796
uauacuagaccuuuggagg

SEQ ID NO: 2146798 - RNA, 19 nt, Artificial Sequence
  Description of Artificial Sequence: Synthetic oligonucleotide
  Sense strand starting at position 1515 of SEQ ID NO: 1882775
aguuccauacucuguauca

SEQ ID NO: 2146799 - RNA, 19 nt, Artificial Sequence
  Description of Artificial Sequence: Synthetic oligonucleotide
  Antisense strand to SEQ ID NO: 2146798
ugauacagaguauggaacu

SEQ ID NO: 2146800 - RNA, 19 nt, Artificial Sequence
  Description of Artificial Sequence: Synthetic oligonucleotide
  Sense strand starting at position 1516 of SEQ ID NO: 1882775
guuccauacucuguaucau

SEQ ID NO: 2146801 - RNA, 19 nt, Artificial Sequence
  Description of Artificial Sequence: Synthetic oligonucleotide
  Antisense strand to SEQ ID NO: 2146800
augauacagaguauggaac

SEQ ID NO: 2146802 - RNA, 19 nt, Artificial Sequence
  Description of Artificial Sequence: Synthetic oligonucleotide
  Sense strand starting at position 1539 of SEQ ID NO: 1882775
agcagaagguguuuaagag

SEQ ID NO: 2146803 - RNA, 19 nt, Artificial Sequence
  Description of Artificial Sequence: Synthetic oligonucleotide
  Antisense strand to SEQ ID NO: 2146802
cucuuaaacaccuucugcu

SEQ ID NO: 2146804 - RNA, 19 nt, Artificial Sequence
  Description of Artificial Sequence: Synthetic oligonucleotide
  Sense strand starting at position 1558 of SEQ ID NO: 1882775
cuugcuagccgucauuuaa

SEQ ID NO: 2146805 - RNA, 19 nt, Artificial Sequence
  Description of Artificial Sequence: Synthetic oligonucleotide
  Antisense strand to SEQ ID NO: 2146804
uuaaaugacggcuagcaag

SEQ ID NO: 2146806 - RNA, 19 nt, Artificial Sequence
  Description of Artificial Sequence: Synthetic oligonucleotide
  Sense strand starting at position 1601 of SEQ ID NO: 1882775
cuggguuaccaauaaucuu

SEQ ID NO: 2146807 - RNA, 19 nt, Artificial Sequence
  Description of Artificial Sequence: Synthetic oligonucleotide
  Antisense strand to SEQ ID NO: 2146806
aagauuauugguaacccag

SEQ ID NO: 2146808 - RNA, 19 nt, Artificial Sequence
  Description of Artificial Sequence: Synthetic oligonucleotide
  Sense strand starting at position 1633 of SEQ ID NO: 1882775
cuacucaccgaguguaaca

SEQ ID NO: 2146809 - RNA, 19 nt, Artificial Sequence
  Description of Artificial Sequence: Synthetic oligonucleotide
  Antisense strand to SEQ ID NO: 2146808
uguuacacucggugaguag

SEQ ID NO: 2146810 - RNA, 19 nt, Artificial Sequence
  Description of Artificial Sequence: Synthetic oligonucleotide
  Sense strand starting at position 1644 of SEQ ID NO: 1882775
guguaacauuucuuguagu

SEQ ID NO: 2146811 - RNA, 19 nt, Artificial Sequence
  Description of Artificial Sequence: Synthetic oligonucleotide
  Antisense strand to SEQ ID NO: 2146810
acuacaagaaauguuacac

SEQ ID NO: 2146812 - RNA, 19 nt, Artificial Sequence
  Description of Artificial Sequence: Synthetic oligonucleotide
  Sense strand starting at position 1650 of SEQ ID NO: 1882775
cauuucuuguaguuagcga

SEQ ID NO: 2146813 - RNA, 19 nt, Artificial Sequence
  Description of Artificial Sequence: Synthetic oligonucleotide
  Antisense strand to SEQ ID NO: 2146812
ucgcuaacuacaagaaaug

SEQ ID NO: 2146814 - RNA, 19 nt, Artificial Sequence
  Description of Artificial Sequence: Synthetic oligonucleotide
  Sense strand starting at position 1665 of SEQ ID NO: 1882775
gcgaccucugcuuaggaaa

SEQ ID NO: 2146815 - RNA, 19 nt, Artificial Sequence
  Description of Artificial Sequence: Synthetic oligonucleotide
  Antisense strand to SEQ ID NO: 2146814
uuuccuaagcagaggucgc

SEQ ID NO: 2146816 - RNA, 19 nt, Artificial Sequence
  Description of Artificial Sequence: Synthetic oligonucleotide
  Sense strand starting at position 1783 of SEQ ID NO: 1882775
gugacaguucaguaggaga

SEQ ID NO: 2146817 - RNA, 19 nt, Artificial Sequence
  Description of Artificial Sequence: Synthetic oligonucleotide
  Antisense strand to SEQ ID NO: 2146816
ucuccuacugaacugucac

SEQ ID NO: 2146818 - RNA, 19 nt, Artificial Sequence
  Description of Artificial Sequence: Synthetic oligonucleotide
  Sense strand starting at position 1969 of SEQ ID NO: 1882775
ggaagugauucacugcaga

SEQ ID NO: 2146819 - RNA, 19 nt, Artificial Sequence
  Description of Artificial Sequence: Synthetic oligonucleotide
  Antisense strand to SEQ ID NO: 2146818
ucugcagugaaucacuucc

SEQ ID NO: 2146820 - RNA, 19 nt, Artificial Sequence
  Description of Artificial Sequence: Synthetic oligonucleotide
  Sense strand starting at position 2316 of SEQ ID NO: 1882775
gugaguauuucugaaagag

SEQ ID NO: 2146821 - RNA, 19 nt, Artificial Sequence
  Description of Artificial Sequence: Synthetic oligonucleotide
  Antisense strand to SEQ ID NO: 2146820
cucuuucagaaauacucac

SEQ ID NO: 2146822 - RNA, 19 nt, Artificial Sequence
  Description of Artificial Sequence: Synthetic oligonucleotide
  Sense strand starting at position 2426 of SEQ ID NO: 1882775
caacgugaucacuguugac

SEQ ID NO: 2146823 - RNA, 19 nt, Artificial Sequence
  Description of Artificial Sequence: Synthetic oligonucleotide
  Antisense strand to SEQ ID NO: 2146822
gucaacagugaucacguug

SEQ ID NO: 2146824 - RNA, 19 nt, Artificial Sequence
  Description of Artificial Sequence: Synthetic oligonucleotide
  Sense strand starting at position 2430 of SEQ ID NO: 1882775
gugaucacuguugaccaga

SEQ ID NO: 2146825 - RNA, 19 nt, Artificial Sequence
  Description of Artificial Sequence: Synthetic oligonucleotide
  Antisense strand to SEQ ID NO: 2146824
ucuggucaacagugaucac

SEQ ID NO: 2146826 - RNA, 19 nt, Artificial Sequence
  Description of Artificial Sequence: Synthetic oligonucleotide
  Sense strand starting at position 2432 of SEQ ID NO: 1882775
gaucacuguugaccagaca

SEQ ID NO: 2146827 - RNA, 19 nt, Artificial Sequence
  Description of Artificial Sequence: Synthetic oligonucleotide
  Antisense strand to SEQ ID NO: 2146826
ugucuggucaacagugauc

SEQ ID NO: 2146828 - RNA, 19 nt, Artificial Sequence
  Description of Artificial Sequence: Synthetic oligonucleotide
  Sense strand starting at position 2739 of SEQ ID NO: 1882775
auccucugggcuuguaaga

SEQ ID NO: 2146829 - RNA, 19 nt, Artificial Sequence
  Description of Artificial Sequence: Synthetic oligonucleotide
  Antisense strand to SEQ ID NO: 2146828
ucuuacaagcccagaggau

SEQ ID NO: 2146830 - RNA, 19 nt, Artificial Sequence
  Description of Artificial Sequence: Synthetic oligonucleotide
  Sense strand starting at position 2903 of SEQ ID NO: 1882775
uguauuucucuaggcugua

SEQ ID NO: 2146831 - RNA, 19 nt, Artificial Sequence
  Description of Artificial Sequence: Synthetic oligonucleotide
  Antisense strand to SEQ ID NO: 2146830
uacagccuagagaaauaca

SEQ ID NO: 2146832 - RNA, 19 nt, Artificial Sequence
  Description of Artificial Sequence: Synthetic oligonucleotide
  Sense strand starting at position 3043 of SEQ ID NO: 1882775
cugagauuaguagacguuu

SEQ ID NO: 2146833 - RNA, 19 nt, Artificial Sequence
  Description of Artificial Sequence: Synthetic oligonucleotide
  Antisense strand to SEQ ID NO: 2146832
aaacgucuacuaaucucag

SEQ ID NO: 2146834 - RNA, 19 nt, Artificial Sequence
  Description of Artificial Sequence: Synthetic oligonucleotide
  Sense strand starting at position 3197 of SEQ ID NO: 1882775
cuuaaugggcacugaagaa

SEQ ID NO: 2146835 - RNA, 19 nt, Artificial Sequence
  Description of Artificial Sequence: Synthetic oligonucleotide
  Antisense strand to SEQ ID NO: 2146834
uucuucagugcccauuaag

SEQ ID NO: 2146836 - RNA, 19 nt, Artificial Sequence
  Description of Artificial Sequence: Synthetic oligonucleotide
  Sense strand starting at position 3449 of SEQ ID NO: 1882775
gacuuccugggaugugaua

SEQ ID NO: 2146837 - RNA, 19 nt, Artificial Sequence
  Description of Artificial Sequence: Synthetic oligonucleotide
  Antisense strand to SEQ ID NO: 2146836
uaucacaucccaggaaguc

SEQ ID NO: 2146838 - RNA, 19 nt, Artificial Sequence
  Description of Artificial Sequence: Synthetic oligonucleotide
  Sense strand starting at position 3780 of SEQ ID NO: 1882775
cuccaaauugaggguaagu

SEQ ID NO: 2146839 - RNA, 19 nt, Artificial Sequence
  Description of Artificial Sequence: Synthetic oligonucleotide
  Antisense strand to SEQ ID NO: 2146838
acuuacccucaauuuggag

SEQ ID NO: 2146840 - RNA, 19 nt, Artificial Sequence
  Description of Artificial Sequence: Synthetic oligonucleotide
  Sense strand starting at position 3946 of SEQ ID NO: 1882775
aacccuuuacauggagagu

SEQ ID NO: 2146841 - RNA, 19 nt, Artificial Sequence
  Description of Artificial Sequence: Synthetic oligonucleotide
  Antisense strand to SEQ ID NO: 2146840
acucuccauguaaaggguu

SEQ ID NO: 2146842 - RNA, 19 nt, Artificial Sequence
  Description of Artificial Sequence: Synthetic oligonucleotide
  Sense strand starting at position 40 of SEQ ID NO: 1882778
aggaucugaaggugucaau

SEQ ID NO: 2146843 - RNA, 19 nt, Artificial Sequence
  Description of Artificial Sequence: Synthetic oligonucleotide
  Antisense strand to SEQ ID NO: 2146842
auugacaccuucagauccu

SEQ ID NO: 2146844 - RNA, 19 nt, Artificial Sequence
  Description of Artificial Sequence: Synthetic oligonucleotide
  Sense strand starting at position 2496 of SEQ ID NO: 1882778
gggaguuccuagcaagaga

SEQ ID NO: 2146845 - RNA, 19 nt, Artificial Sequence
  Description of Artificial Sequence: Synthetic oligonucleotide
  Antisense strand to SEQ ID NO: 2146844
ucucuugcuaggaacuccc

SEQ ID NO: 2146846 - RNA, 19 nt, Artificial Sequence
  Description of Artificial Sequence: Synthetic oligonucleotide
  Sense strand starting at position 153 of SEQ ID NO: 1882779
uaauaucuguaagaaggga

SEQ ID NO: 2146847 - RNA, 19 nt, Artificial Sequence
  Description of Artificial Sequence: Synthetic oligonucleotide
  Antisense strand to SEQ ID NO: 2146846
ucccuucuuacagauauua

SEQ ID NO: 2146848 - RNA, 19 nt, Artificial Sequence
  Description of Artificial Sequence: Synthetic oligonucleotide
  Sense strand starting at position 192 of SEQ ID NO: 1882779
ugcucaguauccugcuuaa

SEQ ID NO: 2146849 - RNA, 19 nt, Artificial Sequence
  Description of Artificial Sequence: Synthetic oligonucleotide
  Antisense strand to SEQ ID NO: 2146848
uuaagcaggauacugagca

SEQ ID NO: 2146850 - RNA, 19 nt, Artificial Sequence
  Description of Artificial Sequence: Synthetic oligonucleotide
  Sense strand starting at position 202 of SEQ ID NO: 1882779
ccugcuuaaugcuaucagu

SEQ ID NO: 2146851 - RNA, 19 nt, Artificial Sequence
  Description of Artificial Sequence: Synthetic oligonucleotide
  Antisense strand to SEQ ID NO: 2146850
acugauagcauuaagcagg

SEQ ID NO: 2146852 - RNA, 19 nt, Artificial Sequence
  Description of Artificial Sequence: Synthetic oligonucleotide
  Sense strand starting at position 205 of SEQ ID NO: 1882779
gcuuaaugcuaucaguuuc

SEQ ID NO: 2146853 - RNA, 19 nt, Artificial Sequence
  Description of Artificial Sequence: Synthetic oligonucleotide
  Antisense strand to SEQ ID NO: 2146852
gaaacugauagcauuaagc

SEQ ID NO: 2146854 - RNA, 19 nt, Artificial Sequence
  Description of Artificial Sequence: Synthetic oligonucleotide
  Sense strand starting at position 308 of SEQ ID NO: 1882779
gugcccagcuucuagugau

SEQ ID NO: 2146855 - RNA, 19 nt, Artificial Sequence
  Description of Artificial Sequence: Synthetic oligonucleotide
  Antisense strand to SEQ ID NO: 2146854
aucacuagaagcugggcac

SEQ ID NO: 2146856 - RNA, 19 nt, Artificial Sequence
  Description of Artificial Sequence: Synthetic oligonucleotide
  Sense strand starting at position 311 of SEQ ID NO: 1882779
cccagcuucuagugauaga

SEQ ID NO: 2146857 - RNA, 19 nt, Artificial Sequence
  Description of Artificial Sequence: Synthetic oligonucleotide
  Antisense strand to SEQ ID NO: 2146856
ucuaucacuagaagcuggg

SEQ ID NO: 2146858 - RNA, 19 nt, Artificial Sequence
  Description of Artificial Sequence: Synthetic oligonucleotide
  Sense strand starting at position 376 of SEQ ID NO: 1882779
ggaagccuucccugaacuu

SEQ ID NO: 2146859 - RNA, 19 nt, Artificial Sequence
  Description of Artificial Sequence: Synthetic oligonucleotide
  Antisense strand to SEQ ID NO: 2146858
aaguucagggaaggcuucc

SEQ ID NO: 2146860 - RNA, 19 nt, Artificial Sequence
  Description of Artificial Sequence: Synthetic oligonucleotide
  Sense strand starting at position 490 of SEQ ID NO: 1882779
aggucagucuccucuacua

SEQ ID NO: 2146861 - RNA, 19 nt, Artificial Sequence
  Description of Artificial Sequence: Synthetic oligonucleotide
  Antisense strand to SEQ ID NO: 2146860
uaguagaggagacugaccu

SEQ ID NO: 2146862 - RNA, 19 nt, Artificial Sequence
  Description of Artificial Sequence: Synthetic oligonucleotide
  Sense strand starting at position 492 of SEQ ID NO: 1882779
gucagucuccucuacuaca

SEQ ID NO: 2146863 - RNA, 19 nt, Artificial Sequence
  Description of Artificial Sequence: Synthetic oligonucleotide
  Antisense strand to SEQ ID NO: 2146862
uguaguagaggagacugac

SEQ ID NO: 2146864 - RNA, 19 nt, Artificial Sequence
  Description of Artificial Sequence: Synthetic oligonucleotide
  Sense strand starting at position 582 of SEQ ID NO: 1882779
gaaguaagcauucgucgau

SEQ ID NO: 2146865 - RNA, 19 nt, Artificial Sequence
  Description of Artificial Sequence: Synthetic oligonucleotide
  Antisense strand to SEQ ID NO: 2146864
aucgacgaaugcuuacuuc

SEQ ID NO: 2146866 - RNA, 19 nt, Artificial Sequence
  Description of Artificial Sequence: Synthetic oligonucleotide
  Sense strand starting at position 583 of SEQ ID NO: 1882779
aaguaagcauucgucgauu

SEQ ID NO: 2146867 - RNA, 19 nt, Artificial Sequence
  Description of Artificial Sequence: Synthetic oligonucleotide
  Antisense strand to SEQ ID NO: 2146866
aaucgacgaaugcuuacuu

SEQ ID NO: 2146868 - RNA, 19 nt, Artificial Sequence
  Description of Artificial Sequence: Synthetic oligonucleotide
  Sense strand starting at position 627 of SEQ ID NO: 1882779
cauucccaguggugaguua

SEQ ID NO: 2146869 - RNA, 19 nt, Artificial Sequence
  Description of Artificial Sequence: Synthetic oligonucleotide
  Antisense strand to SEQ ID NO: 2146868
uaacucaccacugggaaug

SEQ ID NO: 2146870 - RNA, 19 nt, Artificial Sequence
  Description of Artificial Sequence: Synthetic oligonucleotide
  Sense strand starting at position 628 of SEQ ID NO: 1882779
auucccaguggugaguuaa

SEQ ID NO: 2146871 - RNA, 19 nt, Artificial Sequence
  Description of Artificial Sequence: Synthetic oligonucleotide
  Antisense strand to SEQ ID NO: 2146870
uuaacucaccacugggaau

SEQ ID NO: 2146872 - RNA, 19 nt, Artificial Sequence
  Description of Artificial Sequence: Synthetic oligonucleotide
  Sense strand starting at position 634 of SEQ ID NO: 1882779
aguggugaguuaagucaga

SEQ ID NO: 2146873 - RNA, 19 nt, Artificial Sequence
  Description of Artificial Sequence: Synthetic oligonucleotide
  Antisense strand to SEQ ID NO: 2146872
ucugacuuaacucaccacu

SEQ ID NO: 2146874 - RNA, 19 nt, Artificial Sequence
  Description of Artificial Sequence: Synthetic oligonucleotide
  Sense strand starting at position 639 of SEQ ID NO: 1882779
ugaguuaagucagagugca

SEQ ID NO: 2146875 - RNA, 19 nt, Artificial Sequence
  Description of Artificial Sequence: Synthetic oligonucleotide
  Antisense strand to SEQ ID NO: 2146874
ugcacucugacuuaacuca

SEQ ID NO: 2146876 - RNA, 19 nt, Artificial Sequence
  Description of Artificial Sequence: Synthetic oligonucleotide
  Sense strand starting at position 802 of SEQ ID NO: 1882779
ugccucaucucgcuccuaa

SEQ ID NO: 2146877 - RNA, 19 nt, Artificial Sequence
  Description of Artificial Sequence: Synthetic oligonucleotide
  Antisense strand to SEQ ID NO: 2146876
uuaggagcgagaugaggca

SEQ ID NO: 2146878 - RNA, 19 nt, Artificial Sequence
  Description of Artificial Sequence: Synthetic oligonucleotide
  Sense strand starting at position 1027 of SEQ ID NO: 1882779
cagaaacaaugcgaucaga

SEQ ID NO: 2146879 - RNA, 19 nt, Artificial Sequence
  Description of Artificial Sequence: Synthetic oligonucleotide
  Antisense strand to SEQ ID NO: 2146878
ucugaucgcauuguuucug

SEQ ID NO: 2146880 - RNA, 19 nt, Artificial Sequence
  Description of Artificial Sequence: Synthetic oligonucleotide
  Sense strand starting at position 1035 of SEQ ID NO: 1882779
augcgaucagaugagcuua

SEQ ID NO: 2146881 - RNA, 19 nt, Artificial Sequence
  Description of Artificial Sequence: Synthetic oligonucleotide
  Antisense strand to SEQ ID NO: 2146880
uaagcucaucugaucgcau

SEQ ID NO: 2146882 - RNA, 19 nt, Artificial Sequence
  Description of Artificial Sequence: Synthetic oligonucleotide
  Sense strand starting at position 1077 of SEQ ID NO: 1882779
aggaauaaaucucucugca

SEQ ID NO: 2146883 - RNA, 19 nt, Artificial Sequence
  Description of Artificial Sequence: Synthetic oligonucleotide
  Antisense strand to SEQ ID NO: 2146882
ugcagagagauuuauuccu

SEQ ID NO: 2146884 - RNA, 19 nt, Artificial Sequence
  Description of Artificial Sequence: Synthetic oligonucleotide
  Sense strand starting at position 1167 of SEQ ID NO: 1882779
guccuuagcuuuccucuua

SEQ ID NO: 2146885 - RNA, 19 nt, Artificial Sequence
  Description of Artificial Sequence: Synthetic oligonucleotide
  Antisense strand to SEQ ID NO: 2146884
uaagaggaaagcuaaggac

SEQ ID NO: 2146886 - RNA, 19 nt, Artificial Sequence
  Description of Artificial Sequence: Synthetic oligonucleotide
  Sense strand starting at position 1347 of SEQ ID NO: 1882779
guggauugcgccuguaaau

SEQ ID NO: 2146887 - RNA, 19 nt, Artificial Sequence
  Description of Artificial Sequence: Synthetic oligonucleotide
  Antisense strand to SEQ ID NO: 2146886
auuuacaggcgcaauccac

SEQ ID NO: 2146888 - RNA, 19 nt, Artificial Sequence
  Description of Artificial Sequence: Synthetic oligonucleotide
  Sense strand starting at position 1574 of SEQ ID NO: 1882779
cauggauccugcggacaaa

SEQ ID NO: 2146889 - RNA, 19 nt, Artificial Sequence
  Description of Artificial Sequence: Synthetic oligonucleotide
  Antisense strand to SEQ ID NO: 2146888
uuuguccgcaggauccaug

SEQ ID NO: 2146890 - RNA, 19 nt, Artificial Sequence
  Description of Artificial Sequence: Synthetic oligonucleotide
  Sense strand starting at position 2752 of SEQ ID NO: 1882779
uccauuguauucuagagaa

SEQ ID NO: 2146891 - RNA, 19 nt, Artificial Sequence
  Description of Artificial Sequence: Synthetic oligonucleotide
  Antisense strand to SEQ ID NO: 2146890
uucucuagaauacaaugga

SEQ ID NO: 2146892 - RNA, 19 nt, Artificial Sequence
  Description of Artificial Sequence: Synthetic oligonucleotide
  Sense strand starting at position 2976 of SEQ ID NO: 1882779
uuaauuugcugguaagaug

SEQ ID NO: 2146893 - RNA, 19 nt, Artificial Sequence
  Description of Artificial Sequence: Synthetic oligonucleotide
  Antisense strand to SEQ ID NO: 2146892
caucuuaccagcaaauuaa

SEQ ID NO: 2146894 - RNA, 19 nt, Artificial Sequence
  Description of Artificial Sequence: Synthetic oligonucleotide
  Sense strand starting at position 2987 of SEQ ID NO: 1882779
guaagaugguuuguagcuu

SEQ ID NO: 2146895 - RNA, 19 nt, Artificial Sequence
  Description of Artificial Sequence: Synthetic oligonucleotide
  Antisense strand to SEQ ID NO: 2146894
aagcuacaaaccaucuuac

SEQ ID NO: 2146896 - RNA, 19 nt, Artificial Sequence
  Description of Artificial Sequence: Synthetic oligonucleotide
  Sense strand starting at position 3074 of SEQ ID NO: 1882779
ggauuauaggcguaggcua

SEQ ID NO: 2146897 - RNA, 19 nt, Artificial Sequence
  Description of Artificial Sequence: Synthetic oligonucleotide
  Antisense strand to SEQ ID NO: 2146896
uagccuacgccuauaaucc

SEQ ID NO: 2146898 - RNA, 19 nt, Artificial Sequence
  Description of Artificial Sequence: Synthetic oligonucleotide
  Sense strand starting at position 3429 of SEQ ID NO: 1882779
ggcagugagccugauugca

SEQ ID NO: 2146899 - RNA, 19 nt, Artificial Sequence
  Description of Artificial Sequence: Synthetic oligonucleotide
  Antisense strand to SEQ ID NO: 2146898
ugcaaucaggcucacugcc

SEQ ID NO: 2146900 - RNA, 19 nt, Artificial Sequence
  Description of Artificial Sequence: Synthetic oligonucleotide
  Sense strand starting at position 3615 of SEQ ID NO: 1882779
aaggguacauucuauauga

SEQ ID NO: 2146901 - RNA, 19 nt, Artificial Sequence
  Description of Artificial Sequence: Synthetic oligonucleotide
  Antisense strand to SEQ ID NO: 2146900
ucauauagaauguacccuu

SEQ ID NO: 2146902 - RNA, 19 nt, Artificial Sequence
  Description of Artificial Sequence: Synthetic oligonucleotide
  Sense strand starting at position 3631 of SEQ ID NO: 1882779
ugaugcuguuuaugugaca

SEQ ID NO: 2146903 - RNA, 19 nt, Artificial Sequence
  Description of Artificial Sequence: Synthetic oligonucleotide
  Antisense strand to SEQ ID NO: 2146902
ugucacauaaacagcauca

SEQ ID NO: 2146904 - RNA, 19 nt, Artificial Sequence
  Description of Artificial Sequence: Synthetic oligonucleotide
  Sense strand starting at position 3632 of SEQ ID NO: 1882779
gaugcuguuuaugugacau

SEQ ID NO: 2146905 - RNA, 19 nt, Artificial Sequence
  Description of Artificial Sequence: Synthetic oligonucleotide
  Antisense strand to SEQ ID NO: 2146904
augucacauaaacagcauc

SEQ ID NO: 2146906 - RNA, 19 nt, Artificial Sequence
  Description of Artificial Sequence: Synthetic oligonucleotide
  Sense strand starting at position 3729 of SEQ ID NO: 1882779
gagggagcuuucuggaaac

SEQ ID NO: 2146907 - RNA, 19 nt, Artificial Sequence
  Description of Artificial Sequence: Synthetic oligonucleotide
  Antisense strand to SEQ ID NO: 2146906
guuuccagaaagcucccuc

SEQ ID NO: 2146908 - RNA, 19 nt, Artificial Sequence
  Description of Artificial Sequence: Synthetic oligonucleotide
  Sense strand starting at position 3774 of SEQ ID NO: 1882779
acguauauacaucaagugu

SEQ ID NO: 2146909 - RNA, 19 nt, Artificial Sequence
  Description of Artificial Sequence: Synthetic oligonucleotide
  Antisense strand to SEQ ID NO: 2146908
acacuugauguauauacgu

SEQ ID NO: 2146910 - RNA, 19 nt, Artificial Sequence
  Description of Artificial Sequence: Synthetic oligonucleotide
  Sense strand starting at position 69 of SEQ ID NO: 1882780
ggcguaguucgguuugaac

SEQ ID NO: 2146911 - RNA, 19 nt, Artificial Sequence
  Description of Artificial Sequence: Synthetic oligonucleotide
  Antisense strand to SEQ ID NO: 2146910
guucaaaccgaacuacgcc

SEQ ID NO: 2146912 - RNA, 19 nt, Artificial Sequence
  Description of Artificial Sequence: Synthetic oligonucleotide
  Sense strand starting at position 149 of SEQ ID NO: 1882780
uaauaucuguaagaaggga

SEQ ID NO: 2146913 - RNA, 19 nt, Artificial Sequence
  Description of Artificial Sequence: Synthetic oligonucleotide
  Antisense strand to SEQ ID NO: 2146912
ucccuucuuacagauauua

SEQ ID NO: 2146914 - RNA, 19 nt, Artificial Sequence
  Description of Artificial Sequence: Synthetic oligonucleotide
  Sense strand starting at position 178 of SEQ ID NO: 1882780
gggugaagcuugcucagua

SEQ ID NO: 2146915 - RNA, 19 nt, Artificial Sequence
  Description of Artificial Sequence: Synthetic oligonucleotide
  Antisense strand to SEQ ID NO: 2146914
uacugagcaagcuucaccc

SEQ ID NO: 2146916 - RNA, 19 nt, Artificial Sequence
  Description of Artificial Sequence: Synthetic oligonucleotide
  Sense strand starting at position 486 of SEQ ID NO: 1882780
aggucagucuccucuacua

SEQ ID NO: 2146917 - RNA, 19 nt, Artificial Sequence
  Description of Artificial Sequence: Synthetic oligonucleotide
  Antisense strand to SEQ ID NO: 2146916
uaguagaggagacugaccu

SEQ ID NO: 2146918 - RNA, 19 nt, Artificial Sequence
  Description of Artificial Sequence: Synthetic oligonucleotide
  Sense strand starting at position 488 of SEQ ID NO: 1882780
gucagucuccucuacuaca

SEQ ID NO: 2146919 - RNA, 19 nt, Artificial Sequence
  Description of Artificial Sequence: Synthetic oligonucleotide
  Antisense strand to SEQ ID NO: 2146918
uguaguagaggagacugac

SEQ ID NO: 2146920 - RNA, 19 nt, Artificial Sequence
  Description of Artificial Sequence: Synthetic oligonucleotide
  Sense strand starting at position 507 of SEQ ID NO: 1882780
uugugagguccuuaagggu

SEQ ID NO: 2146921 - RNA, 19 nt, Artificial Sequence
  Description of Artificial Sequence: Synthetic oligonucleotide
  Antisense strand to SEQ ID NO: 2146920
acccuuaaggaccucacaa

SEQ ID NO: 2146922 - RNA, 19 nt, Artificial Sequence
  Description of Artificial Sequence: Synthetic oligonucleotide
  Sense strand starting at position 513 of SEQ ID NO: 1882780
gguccuuaaggguggagau

SEQ ID NO: 2146923 - RNA, 19 nt, Artificial Sequence
  Description of Artificial Sequence: Synthetic oligonucleotide
  Antisense strand to SEQ ID NO: 2146922
aucuccacccuuaaggacc

SEQ ID NO: 2146924 - RNA, 19 nt, Artificial Sequence
  Description of Artificial Sequence: Synthetic oligonucleotide
  Sense strand starting at position 530 of SEQ ID NO: 1882780
auguucuaaucuucugagu

SEQ ID NO: 2146925 - RNA, 19 nt, Artificial Sequence
  Description of Artificial Sequence: Synthetic oligonucleotide
  Antisense strand to SEQ ID NO: 2146924
acucagaagauuagaacau

SEQ ID NO: 2146926 - RNA, 19 nt, Artificial Sequence
  Description of Artificial Sequence: Synthetic oligonucleotide
  Sense strand starting at position 565 of SEQ ID NO: 1882780
ccauguauugugggaagua

SEQ ID NO: 2146927 - RNA, 19 nt, Artificial Sequence
  Description of Artificial Sequence: Synthetic oligonucleotide
  Antisense strand to SEQ ID NO: 2146926
uacuucccacaauacaugg

SEQ ID NO: 2146928 - RNA, 19 nt, Artificial Sequence
  Description of Artificial Sequence: Synthetic oligonucleotide
  Sense strand starting at position 624 of SEQ ID NO: 1882780
auucccaguggugaguuaa

SEQ ID NO: 2146929 - RNA, 19 nt, Artificial Sequence
  Description of Artificial Sequence: Synthetic oligonucleotide
  Antisense strand to SEQ ID NO: 2146928
uuaacucaccacugggaau

SEQ ID NO: 2146930 - RNA, 19 nt, Artificial Sequence
  Description of Artificial Sequence: Synthetic oligonucleotide
  Sense strand starting at position 630 of SEQ ID NO: 1882780
aguggugaguuaagucaga

SEQ ID NO: 2146931 - RNA, 19 nt, Artificial Sequence
  Description of Artificial Sequence: Synthetic oligonucleotide
  Antisense strand to SEQ ID NO: 2146930
ucugacuuaacucaccacu

SEQ ID NO: 2146932 - RNA, 19 nt, Artificial Sequence
  Description of Artificial Sequence: Synthetic oligonucleotide
  Sense strand starting at position 640 of SEQ ID NO: 1882780
uaagucagagugcaaagau

SEQ ID NO: 2146933 - RNA, 19 nt, Artificial Sequence
  Description of Artificial Sequence: Synthetic oligonucleotide
  Antisense strand to SEQ ID NO: 2146932
aucuuugcacucugacuua

SEQ ID NO: 2146934 - RNA, 19 nt, Artificial Sequence
  Description of Artificial Sequence: Synthetic oligonucleotide
  Sense strand starting at position 863 of SEQ ID NO: 1882780
guuucauuagccgaggagu

SEQ ID NO: 2146935 - RNA, 19 nt, Artificial Sequence
  Description of Artificial Sequence: Synthetic oligonucleotide
  Antisense strand to SEQ ID NO: 2146934
acuccucggcuaaugaaac

SEQ ID NO: 2146936 - RNA, 19 nt, Artificial Sequence
  Description of Artificial Sequence: Synthetic oligonucleotide
  Sense strand starting at position 865 of SEQ ID NO: 1882780
uucauuagccgaggaguuu

SEQ ID NO: 2146937 - RNA, 19 nt, Artificial Sequence
  Description of Artificial Sequence: Synthetic oligonucleotide
  Antisense strand to SEQ ID NO: 2146936
aaacuccucggcuaaugaa

SEQ ID NO: 2146938 - RNA, 19 nt, Artificial Sequence
  Description of Artificial Sequence: Synthetic oligonucleotide
  Sense strand starting at position 891 of SEQ ID NO: 1882780
guaauuagaaucgaagggu

SEQ ID NO: 2146939 - RNA, 19 nt, Artificial Sequence
  Description of Artificial Sequence: Synthetic oligonucleotide
  Antisense strand to SEQ ID NO: 2146938
acccuucgauucuaauuac

SEQ ID NO: 2146940 - RNA, 19 nt, Artificial Sequence
  Description of Artificial Sequence: Synthetic oligonucleotide
  Sense strand starting at position 899 of SEQ ID NO: 1882780
aaucgaagggucuguccaa

SEQ ID NO: 2146941 - RNA, 19 nt, Artificial Sequence
  Description of Artificial Sequence: Synthetic oligonucleotide
  Antisense strand to SEQ ID NO: 2146940
uuggacagacccuucgauu

SEQ ID NO: 2146942 - RNA, 19 nt, Artificial Sequence
  Description of Artificial Sequence: Synthetic oligonucleotide
  Sense strand starting at position 920 of SEQ ID NO: 1882780
guuccagguauccauagua

SEQ ID NO: 2146943 - RNA, 19 nt, Artificial Sequence
  Description of Artificial Sequence: Synthetic oligonucleotide
  Antisense strand to SEQ ID NO: 2146942
uacuauggauaccuggaac

SEQ ID NO: 2146944 - RNA, 19 nt, Artificial Sequence
  Description of Artificial Sequence: Synthetic oligonucleotide
  Sense strand starting at position 1004 of SEQ ID NO: 1882780
cgagucucucaugaucaca

SEQ ID NO: 2146945 - RNA, 19 nt, Artificial Sequence
  Description of Artificial Sequence: Synthetic oligonucleotide
  Antisense strand to SEQ ID NO: 2146944
ugugaucaugagagacucg

SEQ ID NO: 2146946 - RNA, 19 nt, Artificial Sequence
  Description of Artificial Sequence: Synthetic oligonucleotide
  Sense strand starting at position 1006 of SEQ ID NO: 1882780
agucucucaugaucacaca

SEQ ID NO: 2146947 - RNA, 19 nt, Artificial Sequence
  Description of Artificial Sequence: Synthetic oligonucleotide
  Antisense strand to SEQ ID NO: 2146946
ugugugaucaugagagacu

SEQ ID NO: 2146948 - RNA, 19 nt, Artificial Sequence
  Description of Artificial Sequence: Synthetic oligonucleotide
  Sense strand starting at position 1031 of SEQ ID NO: 1882780
augcgaucagaugagcuua

SEQ ID NO: 2146949 - RNA, 19 nt, Artificial Sequence
  Description of Artificial Sequence: Synthetic oligonucleotide
  Antisense strand to SEQ ID NO: 2146948
uaagcucaucugaucgcau

SEQ ID NO: 2146950 - RNA, 19 nt, Artificial Sequence
  Description of Artificial Sequence: Synthetic oligonucleotide
  Sense strand starting at position 1073 of SEQ ID NO: 1882780
aggaauaaaucucucugca

SEQ ID NO: 2146951 - RNA, 19 nt, Artificial Sequence
  Description of Artificial Sequence: Synthetic oligonucleotide
  Antisense strand to SEQ ID NO: 2146950
ugcagagagauuuauuccu

SEQ ID NO: 2146952 - RNA, 19 nt, Artificial Sequence
  Description of Artificial Sequence: Synthetic oligonucleotide
  Sense strand starting at position 1835 of SEQ ID NO: 1882780
ccaggacucccugguuuaa

SEQ ID NO: 2146953 - RNA, 19 nt, Artificial Sequence
  Description of Artificial Sequence: Synthetic oligonucleotide
  Antisense strand to SEQ ID NO: 2146952
uuaaaccagggaguccugg

SEQ ID NO: 2146954 - RNA, 19 nt, Artificial Sequence
  Description of Artificial Sequence: Synthetic oligonucleotide
  Sense strand starting at position 2010 of SEQ ID NO: 1882780
cgaggaggcacucaucguu

SEQ ID NO: 2146955 - RNA, 19 nt, Artificial Sequence
  Description of Artificial Sequence: Synthetic oligonucleotide
  Antisense strand to SEQ ID NO: 2146954
aacgaugagugccuccucg

SEQ ID NO: 2146956 - RNA, 19 nt, Artificial Sequence
  Description of Artificial Sequence: Synthetic oligonucleotide
  Sense strand starting at position 2635 of SEQ ID NO: 1882780
aaggaugcagcaugugauu

SEQ ID NO: 2146957 - RNA, 19 nt, Artificial Sequence
  Description of Artificial Sequence: Synthetic oligonucleotide
  Antisense strand to SEQ ID NO: 2146956
aaucacaugcugcauccuu

SEQ ID NO: 2146958 - RNA, 19 nt, Artificial Sequence
  Description of Artificial Sequence: Synthetic oligonucleotide
  Sense strand starting at position 2839 of SEQ ID NO: 1882780
gcuggaguucagugaugga

SEQ ID NO: 2146959 - RNA, 19 nt, Artificial Sequence
  Description of Artificial Sequence: Synthetic oligonucleotide
  Antisense strand to SEQ ID NO: 2146958
uccaucacugaacuccagc

SEQ ID NO: 2146960 - RNA, 19 nt, Artificial Sequence
  Description of Artificial Sequence: Synthetic oligonucleotide
  Sense strand starting at position 2975 of SEQ ID NO: 1882780
uuaauuugcugguaagaug

SEQ ID NO: 2146961 - RNA, 19 nt, Artificial Sequence
  Description of Artificial Sequence: Synthetic oligonucleotide
  Antisense strand to SEQ ID NO: 2146960
caucuuaccagcaaauuaa

SEQ ID NO: 2146962 - RNA, 19 nt, Artificial Sequence
  Description of Artificial Sequence: Synthetic oligonucleotide
  Sense strand starting at position 3073 of SEQ ID NO: 1882780
ggauuauaggcguaggcua

SEQ ID NO: 2146963 - RNA, 19 nt, Artificial Sequence
  Description of Artificial Sequence: Synthetic oligonucleotide
  Antisense strand to SEQ ID NO: 2146962
uagccuacgccuauaaucc

SEQ ID NO: 2146964 - RNA, 19 nt, Artificial Sequence
  Description of Artificial Sequence: Synthetic oligonucleotide
  Sense strand starting at position 3136 of SEQ ID NO: 1882780
acaugaaauuaggaggaua

SEQ ID NO: 2146965 - RNA, 19 nt, Artificial Sequence
  Description of Artificial Sequence: Synthetic oligonucleotide
  Antisense strand to SEQ ID NO: 2146964
uauccuccuaauuucaugu

SEQ ID NO: 2146966 - RNA, 19 nt, Artificial Sequence
  Description of Artificial Sequence: Synthetic oligonucleotide
  Sense strand starting at position 3428 of SEQ ID NO: 1882780
ggcagugagccugauugca

SEQ ID NO: 2146967 - RNA, 19 nt, Artificial Sequence
  Description of Artificial Sequence: Synthetic oligonucleotide
  Antisense strand to SEQ ID NO: 2146966
ugcaaucaggcucacugcc

SEQ ID NO: 2146968 - RNA, 19 nt, Artificial Sequence
  Description of Artificial Sequence: Synthetic oligonucleotide
  Sense strand starting at position 3515 of SEQ ID NO: 1882780
uguauaacagagugucauu

SEQ ID NO: 2146969 - RNA, 19 nt, Artificial Sequence
  Description of Artificial Sequence: Synthetic oligonucleotide
  Antisense strand to SEQ ID NO: 2146968
aaugacacucuguuauaca

SEQ ID NO: 2146970 - RNA, 19 nt, Artificial Sequence
  Description of Artificial Sequence: Synthetic oligonucleotide
  Sense strand starting at position 3520 of SEQ ID NO: 1882780
aacagagugucauugaauu

SEQ ID NO: 2146971 - RNA, 19 nt, Artificial Sequence
  Description of Artificial Sequence: Synthetic oligonucleotide
  Antisense strand to SEQ ID NO: 2146970
aauucaaugacacucuguu

SEQ ID NO: 2146972 - RNA, 19 nt, Artificial Sequence
  Description of Artificial Sequence: Synthetic oligonucleotide
  Sense strand starting at position 3537 of SEQ ID NO: 1882780
uuucuaaacguugaaagac

SEQ ID NO: 2146973 - RNA, 19 nt, Artificial Sequence
  Description of Artificial Sequence: Synthetic oligonucleotide
  Antisense strand to SEQ ID NO: 2146972
gucuuucaacguuuagaaa

SEQ ID NO: 2146974 - RNA, 19 nt, Artificial Sequence
  Description of Artificial Sequence: Synthetic oligonucleotide
  Sense strand starting at position 3631 of SEQ ID NO: 1882780
gaugcuguuuaugugacau

SEQ ID NO: 2146975 - RNA, 19 nt, Artificial Sequence
  Description of Artificial Sequence: Synthetic oligonucleotide
  Antisense strand to SEQ ID NO: 2146974
augucacauaaacagcauc

SEQ ID NO: 2146976 - RNA, 19 nt, Artificial Sequence
  Description of Artificial Sequence: Synthetic oligonucleotide
  Sense strand starting at position 3697 of SEQ ID NO: 1882780
cuuguuaggaguuaugacu

SEQ ID NO: 2146977 - RNA, 19 nt, Artificial Sequence
  Description of Artificial Sequence: Synthetic oligonucleotide
  Antisense strand to SEQ ID NO: 2146976
agucauaacuccuaacaag

SEQ ID NO: 2146978 - RNA, 19 nt, Artificial Sequence
  Description of Artificial Sequence: Synthetic oligonucleotide
  Sense strand starting at position 3773 of SEQ ID NO: 1882780
acguauauacaucaagugu

SEQ ID NO: 2146979 - RNA, 19 nt, Artificial Sequence
  Description of Artificial Sequence: Synthetic oligonucleotide
  Antisense strand to SEQ ID NO: 2146978
acacuugauguauauacgu

SEQ ID NO: 2146980 - RNA, 19 nt, Artificial Sequence
  Description of Artificial Sequence: Synthetic oligonucleotide
  Sense strand starting at position 3781 of SEQ ID NO: 1882780
acaucaaguguuuaucaag

SEQ ID NO: 2146981 - RNA, 19 nt, Artificial Sequence
  Description of Artificial Sequence: Synthetic oligonucleotide
  Antisense strand to SEQ ID NO: 2146980
cuugauaaacacuugaugu

SEQ ID NO: 2146982 - RNA, 19 nt, Artificial Sequence
  Description of Artificial Sequence: Synthetic oligonucleotide
  Sense strand starting at position 3793 of SEQ ID NO: 1882780
uaucaagcugugugguuaa

SEQ ID NO: 2146983 - RNA, 19 nt, Artificial Sequence
  Description of Artificial Sequence: Synthetic oligonucleotide
  Antisense strand to SEQ ID NO: 2146982
uuaaccacacagcuugaua

SEQ ID NO: 2146984 - RNA, 19 nt, Artificial Sequence
  Description of Artificial Sequence: Synthetic oligonucleotide
  Sense strand starting at position 3796 of SEQ ID NO: 1882780
caagcugugugguuaagau

SEQ ID NO: 2146985 - RNA, 19 nt, Artificial Sequence
  Description of Artificial Sequence: Synthetic oligonucleotide
  Antisense strand to SEQ ID NO: 2146984
aucuuaaccacacagcuug

SEQ ID NO: 2146986 - RNA, 19 nt, Artificial Sequence
  Description of Artificial Sequence: Synthetic oligonucleotide
  Sense strand starting at position 3806 of SEQ ID NO: 1882780
gguuaagauuugcacacuu

SEQ ID NO: 2146987 - RNA, 19 nt, Artificial Sequence
  Description of Artificial Sequence: Synthetic oligonucleotide
  Antisense strand to SEQ ID NO: 2146986
aagugugcaaaucuuaacc

SEQ ID NO: 2146988 - RNA, 19 nt, Artificial Sequence
  Description of Artificial Sequence: Synthetic oligonucleotide
  Sense strand starting at position 3816 of SEQ ID NO: 1882780
ugcacacuuguauauguua

SEQ ID NO: 2146989 - RNA, 19 nt, Artificial Sequence
  Description of Artificial Sequence: Synthetic oligonucleotide
  Antisense strand to SEQ ID NO: 2146988
uaacauauacaagugugca

SEQ ID NO: 2146990 - RNA, 19 nt, Artificial Sequence
  Description of Artificial Sequence: Synthetic oligonucleotide
  Sense strand starting at position 165 of SEQ ID NO: 1882782
caugauagguguuuguaag

SEQ ID NO: 2146991 - RNA, 19 nt, Artificial Sequence
  Description of Artificial Sequence: Synthetic oligonucleotide
  Antisense strand to SEQ ID NO: 2146990
cuuacaaacaccuaucaug

SEQ ID NO: 2146992 - RNA, 19 nt, Artificial Sequence
  Description of Artificial Sequence: Synthetic oligonucleotide
  Sense strand starting at position 166 of SEQ ID NO: 1882782
augauagguguuuguaaga

SEQ ID NO: 2146993 - RNA, 19 nt, Artificial Sequence
  Description of Artificial Sequence: Synthetic oligonucleotide
  Antisense strand to SEQ ID NO: 2146992
ucuuacaaacaccuaucau

SEQ ID NO: 2146994 - RNA, 19 nt, Artificial Sequence
  Description of Artificial Sequence: Synthetic oligonucleotide
  Sense strand starting at position 378 of SEQ ID NO: 1882782
aauuguacaucauugacga

SEQ ID NO: 2146995 - RNA, 19 nt, Artificial Sequence
  Description of Artificial Sequence: Synthetic oligonucleotide
  Antisense strand to SEQ ID NO: 2146994
ucgucaaugauguacaauu

SEQ ID NO: 2146996 - RNA, 19 nt, Artificial Sequence
  Description of Artificial Sequence: Synthetic oligonucleotide
  Sense strand starting at position 476 of SEQ ID NO: 1882782
agaguuuccacagggauca

SEQ ID NO: 2146997 - RNA, 19 nt, Artificial Sequence
  Description of Artificial Sequence: Synthetic oligonucleotide
  Antisense strand to SEQ ID NO: 2146996
ugaucccuguggaaacucu

SEQ ID NO: 2146998 - RNA, 19 nt, Artificial Sequence
  Description of Artificial Sequence: Synthetic oligonucleotide
  Sense strand starting at position 477 of SEQ ID NO: 1882782
gaguuuccacagggaucau

SEQ ID NO: 2146999 - RNA, 19 nt, Artificial Sequence
  Description of Artificial Sequence: Synthetic oligonucleotide
  Antisense strand to SEQ ID NO: 2146998
augaucccuguggaaacuc

SEQ ID NO: 2147000 - RNA, 19 nt, Artificial Sequence
  Description of Artificial Sequence: Synthetic oligonucleotide
  Sense strand starting at position 566 of SEQ ID NO: 1882782
guacacagagcuugaagau

SEQ ID NO: 2147001 - RNA, 19 nt, Artificial Sequence
  Description of Artificial Sequence: Synthetic oligonucleotide
  Antisense strand to SEQ ID NO: 2147000
aucuucaagcucuguguac

SEQ ID NO: 2147002 - RNA, 19 nt, Artificial Sequence
  Description of Artificial Sequence: Synthetic oligonucleotide
  Sense strand starting at position 595 of SEQ ID NO: 1882782
gaauuaagguggcugagaa

SEQ ID NO: 2147003 - RNA, 19 nt, Artificial Sequence
  Description of Artificial Sequence: Synthetic oligonucleotide
  Antisense strand to SEQ ID NO: 2147002
uucucagccaccuuaauuc

SEQ ID NO: 2147004 - RNA, 19 nt, Artificial Sequence
  Description of Artificial Sequence: Synthetic oligonucleotide
  Sense strand starting at position 684 of SEQ ID NO: 1882782
aucuguauuugggaaacau

SEQ ID NO: 2147005 - RNA, 19 nt, Artificial Sequence
  Description of Artificial Sequence: Synthetic oligonucleotide
  Antisense strand to SEQ ID NO: 2147004
auguuucccaaauacagau

SEQ ID NO: 2147006 - RNA, 19 nt, Artificial Sequence
  Description of Artificial Sequence: Synthetic oligonucleotide
  Sense strand starting at position 813 of SEQ ID NO: 1882782
caaagacagucgucuaaag

SEQ ID NO: 2147007 - RNA, 19 nt, Artificial Sequence
  Description of Artificial Sequence: Synthetic oligonucleotide
  Antisense strand to SEQ ID NO: 2147006
cuuuagacgacugucuuug

SEQ ID NO: 2147008 - RNA, 19 nt, Artificial Sequence
  Description of Artificial Sequence: Synthetic oligonucleotide
  Sense strand starting at position 815 of SEQ ID NO: 1882782
aagacagucgucuaaagcu

SEQ ID NO: 2147009 - RNA, 19 nt, Artificial Sequence
  Description of Artificial Sequence: Synthetic oligonucleotide
  Antisense strand to SEQ ID NO: 2147008
agcuuuagacgacugucuu

SEQ ID NO: 2147010 - RNA, 19 nt, Artificial Sequence
  Description of Artificial Sequence: Synthetic oligonucleotide
  Sense strand starting at position 880 of SEQ ID NO: 1882782
gcggguuucugaauuggca

SEQ ID NO: 2147011 - RNA, 19 nt, Artificial Sequence
  Description of Artificial Sequence: Synthetic oligonucleotide
  Antisense strand to SEQ ID NO: 2147010
ugccaauucagaaacccgc

SEQ ID NO: 2147012 - RNA, 19 nt, Artificial Sequence
  Description of Artificial Sequence: Synthetic oligonucleotide
  Sense strand starting at position 888 of SEQ ID NO: 1882782
cugaauuggcagggucauu

SEQ ID NO: 2147013 - RNA, 19 nt, Artificial Sequence
  Description of Artificial Sequence: Synthetic oligonucleotide
  Antisense strand to SEQ ID NO: 2147012
aaugacccugccaauucag

SEQ ID NO: 2147014 - RNA, 19 nt, Artificial Sequence
  Description of Artificial Sequence: Synthetic oligonucleotide
  Sense strand starting at position 966 of SEQ ID NO: 1882782
gcuugugcucuuguuugau

SEQ ID NO: 2147015 - RNA, 19 nt, Artificial Sequence
  Description of Artificial Sequence: Synthetic oligonucleotide
  Antisense strand to SEQ ID NO: 2147014
aucaaacaagagcacaagc

SEQ ID NO: 2147016 - RNA, 19 nt, Artificial Sequence
  Description of Artificial Sequence: Synthetic oligonucleotide
  Sense strand starting at position 968 of SEQ ID NO: 1882782
uugugcucuuguuugauuu

SEQ ID NO: 2147017 - RNA, 19 nt, Artificial Sequence
  Description of Artificial Sequence: Synthetic oligonucleotide
  Antisense strand to SEQ ID NO: 2147016
aaaucaaacaagagcacaa

SEQ ID NO: 2147018 - RNA, 19 nt, Artificial Sequence
  Description of Artificial Sequence: Synthetic oligonucleotide
  Sense strand starting at position 972 of SEQ ID NO: 1882782
gcucuuguuugauuugcau

SEQ ID NO: 2147019 - RNA, 19 nt, Artificial Sequence
  Description of Artificial Sequence: Synthetic oligonucleotide
  Antisense strand to SEQ ID NO: 2147018
augcaaaucaaacaagagc

SEQ ID NO: 2147020 - RNA, 19 nt, Artificial Sequence
  Description of Artificial Sequence: Synthetic oligonucleotide
  Sense strand starting at position 1022 of SEQ ID NO: 1882782
ccagguucuccuuagaaua

SEQ ID NO: 2147021 - RNA, 19 nt, Artificial Sequence
  Description of Artificial Sequence: Synthetic oligonucleotide
  Antisense strand to SEQ ID NO: 2147020
uauucuaaggagaaccugg

SEQ ID NO: 2147022 - RNA, 19 nt, Artificial Sequence
  Description of Artificial Sequence: Synthetic oligonucleotide
  Sense strand starting at position 1923 of SEQ ID NO: 1882782
cuguuagccagguguauuu

SEQ ID NO: 2147023 - RNA, 19 nt, Artificial Sequence
  Description of Artificial Sequence: Synthetic oligonucleotide
  Antisense strand to SEQ ID NO: 2147022
aaauacaccuggcuaacag

SEQ ID NO: 2147024 - RNA, 19 nt, Artificial Sequence
  Description of Artificial Sequence: Synthetic oligonucleotide
  Sense strand starting at position 1976 of SEQ ID NO: 1882782
cucaaagagcuuugggcaa

SEQ ID NO: 2147025 - RNA, 19 nt, Artificial Sequence
  Description of Artificial Sequence: Synthetic oligonucleotide
  Antisense strand to SEQ ID NO: 2147024
uugcccaaagcucuuugag

SEQ ID NO: 2147026 - RNA, 19 nt, Artificial Sequence
  Description of Artificial Sequence: Synthetic oligonucleotide
  Sense strand starting at position 2120 of SEQ ID NO: 1882782
aucaaauguccacgacaca

SEQ ID NO: 2147027 - RNA, 19 nt, Artificial Sequence
  Description of Artificial Sequence: Synthetic oligonucleotide
  Antisense strand to SEQ ID NO: 2147026
ugugucguggacauuugau

SEQ ID NO: 2147028 - RNA, 19 nt, Artificial Sequence
  Description of Artificial Sequence: Synthetic oligonucleotide
  Sense strand starting at position 2264 of SEQ ID NO: 1882782
aguuguaauggugauuaaa

SEQ ID NO: 2147029 - RNA, 19 nt, Artificial Sequence
  Description of Artificial Sequence: Synthetic oligonucleotide
  Antisense strand to SEQ ID NO: 2147028
uuuaaucaccauuacaacu

SEQ ID NO: 2147030 - RNA, 19 nt, Artificial Sequence
  Description of Artificial Sequence: Synthetic oligonucleotide
  Sense strand starting at position 2266 of SEQ ID NO: 1882782
uuguaauggugauuaaaug

SEQ ID NO: 2147031 - RNA, 19 nt, Artificial Sequence
  Description of Artificial Sequence: Synthetic oligonucleotide
  Antisense strand to SEQ ID NO: 2147030
cauuuaaucaccauuacaa

SEQ ID NO: 2147032 - RNA, 19 nt, Artificial Sequence
  Description of Artificial Sequence: Synthetic oligonucleotide
  Sense strand starting at position 2449 of SEQ ID NO: 1882782
uugagaaacuauguuauuc

SEQ ID NO: 2147033 - RNA, 19 nt, Artificial Sequence
  Description of Artificial Sequence: Synthetic oligonucleotide
  Antisense strand to SEQ ID NO: 2147032
gaauaacauaguuucucaa

SEQ ID NO: 2147034 - RNA, 19 nt, Artificial Sequence
  Description of Artificial Sequence: Synthetic oligonucleotide
  Sense strand starting at position 2457 of SEQ ID NO: 1882782
cuauguuauucccuugaua

SEQ ID NO: 2147035 - RNA, 19 nt, Artificial Sequence
  Description of Artificial Sequence: Synthetic oligonucleotide
  Antisense strand to SEQ ID NO: 2147034
uaucaagggaauaacauag

SEQ ID NO: 2147036 - RNA, 19 nt, Artificial Sequence
  Description of Artificial Sequence: Synthetic oligonucleotide
  Sense strand starting at position 2494 of SEQ ID NO: 1882782
ugaaucuauuaagugugau

SEQ ID NO: 2147037 - RNA, 19 nt, Artificial Sequence
  Description of Artificial Sequence: Synthetic oligonucleotide
  Antisense strand to SEQ ID NO: 2147036
aucacacuuaauagauuca

SEQ ID NO: 2147038 - RNA, 19 nt, Artificial Sequence
  Description of Artificial Sequence: Synthetic oligonucleotide
  Sense strand starting at position 2497 of SEQ ID NO: 1882782
aucuauuaagugugauaag

SEQ ID NO: 2147039 - RNA, 19 nt, Artificial Sequence
  Description of Artificial Sequence: Synthetic oligonucleotide
  Antisense strand to SEQ ID NO: 2147038
cuuaucacacuuaauagau

SEQ ID NO: 2147040 - RNA, 19 nt, Artificial Sequence
  Description of Artificial Sequence: Synthetic oligonucleotide
  Sense strand starting at position 2678 of SEQ ID NO: 1882782
uaggcaggauuugagauua

SEQ ID NO: 2147041 - RNA, 19 nt, Artificial Sequence
  Description of Artificial Sequence: Synthetic oligonucleotide
  Antisense strand to SEQ ID NO: 2147040
uaaucucaaauccugccua

SEQ ID NO: 2147042 - RNA, 19 nt, Artificial Sequence
  Description of Artificial Sequence: Synthetic oligonucleotide
  Sense strand starting at position 2686 of SEQ ID NO: 1882782
auuugagauuaccacaaug

SEQ ID NO: 2147043 - RNA, 19 nt, Artificial Sequence
  Description of Artificial Sequence: Synthetic oligonucleotide
  Antisense strand to SEQ ID NO: 2147042
cauugugguaaucucaaau

SEQ ID NO: 2147044 - RNA, 19 nt, Artificial Sequence
  Description of Artificial Sequence: Synthetic oligonucleotide
  Sense strand starting at position 3142 of SEQ ID NO: 1882782
cauguucuccuggagcuua

SEQ ID NO: 2147045 - RNA, 19 nt, Artificial Sequence
  Description of Artificial Sequence: Synthetic oligonucleotide
  Antisense strand to SEQ ID NO: 2147044
uaagcuccaggagaacaug

SEQ ID NO: 2147046 - RNA, 19 nt, Artificial Sequence
  Description of Artificial Sequence: Synthetic oligonucleotide
  Sense strand starting at position 3192 of SEQ ID NO: 1882782
guguaugcaaacgacaauu

SEQ ID NO: 2147047 - RNA, 19 nt, Artificial Sequence
  Description of Artificial Sequence: Synthetic oligonucleotide
  Antisense strand to SEQ ID NO: 2147046
aauugucguuugcauacac

SEQ ID NO: 2147048 - RNA, 19 nt, Artificial Sequence
  Description of Artificial Sequence: Synthetic oligonucleotide
  Sense strand starting at position 3234 of SEQ ID NO: 1882782
gaaauagaagugugucauc

SEQ ID NO: 2147049 - RNA, 19 nt, Artificial Sequence
  Description of Artificial Sequence: Synthetic oligonucleotide
  Antisense strand to SEQ ID NO: 2147048
gaugacacacuucuauuuc

SEQ ID NO: 2147050 - RNA, 19 nt, Artificial Sequence
  Description of Artificial Sequence: Synthetic oligonucleotide
  Sense strand starting at position 3243 of SEQ ID NO: 1882782
gugugucauccugugcaau

SEQ ID NO: 2147051 - RNA, 19 nt, Artificial Sequence
  Description of Artificial Sequence: Synthetic oligonucleotide
  Antisense strand to SEQ ID NO: 2147050
auugcacaggaugacacac

SEQ ID NO: 2147052 - RNA, 19 nt, Artificial Sequence
  Description of Artificial Sequence: Synthetic oligonucleotide
  Sense strand starting at position 3292 of SEQ ID NO: 1882782
gaugauuggugauauuuaa

SEQ ID NO: 2147053 - RNA, 19 nt, Artificial Sequence
  Description of Artificial Sequence: Synthetic oligonucleotide
  Antisense strand to SEQ ID NO: 2147052
uuaaauaucaccaaucauc

SEQ ID NO: 2147054 - RNA, 19 nt, Artificial Sequence
  Description of Artificial Sequence: Synthetic oligonucleotide
  Sense strand starting at position 3317 of SEQ ID NO: 1882782
ugaugaaguaggcauuagu

SEQ ID NO: 2147055 - RNA, 19 nt, Artificial Sequence
  Description of Artificial Sequence: Synthetic oligonucleotide
  Antisense strand to SEQ ID NO: 2147054
acuaaugccuacuucauca

SEQ ID NO: 2147056 - RNA, 19 nt, Artificial Sequence
  Description of Artificial Sequence: Synthetic oligonucleotide
  Sense strand starting at position 3324 of SEQ ID NO: 1882782
guaggcauuagucaggcaa

SEQ ID NO: 2147057 - RNA, 19 nt, Artificial Sequence
  Description of Artificial Sequence: Synthetic oligonucleotide
  Antisense strand to SEQ ID NO: 2147056
uugccugacuaaugccuac

SEQ ID NO: 2147058 - RNA, 19 nt, Artificial Sequence
  Description of Artificial Sequence: Synthetic oligonucleotide
  Sense strand starting at position 3420 of SEQ ID NO: 1882782
ggccuacucccagaacuga

SEQ ID NO: 2147059 - RNA, 19 nt, Artificial Sequence
  Description of Artificial Sequence: Synthetic oligonucleotide
  Antisense strand to SEQ ID NO: 2147058
ucaguucugggaguaggcc

SEQ ID NO: 2147060 - RNA, 19 nt, Artificial Sequence
  Description of Artificial Sequence: Synthetic oligonucleotide
  Sense strand starting at position 3505 of SEQ ID NO: 1882782
agggauaguucaucuguug

SEQ ID NO: 2147061 - RNA, 19 nt, Artificial Sequence
  Description of Artificial Sequence: Synthetic oligonucleotide
  Antisense strand to SEQ ID NO: 2147060
caacagaugaacuaucccu

SEQ ID NO: 2147062 - RNA, 19 nt, Artificial Sequence
  Description of Artificial Sequence: Synthetic oligonucleotide
  Sense strand starting at position 3682 of SEQ ID NO: 1882782
augguauugagccaugaug

SEQ ID NO: 2147063 - RNA, 19 nt, Artificial Sequence
  Description of Artificial Sequence: Synthetic oligonucleotide
  Antisense strand to SEQ ID NO: 2147062
caucauggcucaauaccau

SEQ ID NO: 2147064 - RNA, 19 nt, Artificial Sequence
  Description of Artificial Sequence: Synthetic oligonucleotide
  Sense strand starting at position 3795 of SEQ ID NO: 1882782
gagaguaaacguggagaaa

SEQ ID NO: 2147065 - RNA, 19 nt, Artificial Sequence
  Description of Artificial Sequence: Synthetic oligonucleotide
  Antisense strand to SEQ ID NO: 2147064
uuucuccacguuuacucuc

SEQ ID NO: 2147066 - RNA, 19 nt, Artificial Sequence
  Description of Artificial Sequence: Synthetic oligonucleotide
  Sense strand starting at position 3913 of SEQ ID NO: 1882782
gagacagagacaugugagu

SEQ ID NO: 2147067 - RNA, 19 nt, Artificial Sequence
  Description of Artificial Sequence: Synthetic oligonucleotide
  Antisense strand to SEQ ID NO: 2147066
acucacaugucucugucuc

SEQ ID NO: 2147068 - RNA, 19 nt, Artificial Sequence
  Description of Artificial Sequence: Synthetic oligonucleotide
  Sense strand starting at position 3915 of SEQ ID NO: 1882782
gacagagacaugugaguga

SEQ ID NO: 2147069 - RNA, 19 nt, Artificial Sequence
  Description of Artificial Sequence: Synthetic oligonucleotide
  Antisense strand to SEQ ID NO: 2147068
ucacucacaugucucuguc

SEQ ID NO: 2147070 - RNA, 19 nt, Artificial Sequence
  Description of Artificial Sequence: Synthetic oligonucleotide
  Sense strand starting at position 36 of SEQ ID NO: 1882781
gaacuuuggucccuaaaug

SEQ ID NO: 2147071 - RNA, 19 nt, Artificial Sequence
  Description of Artificial Sequence: Synthetic oligonucleotide
  Antisense strand to SEQ ID NO: 2147070
cauuuagggaccaaaguuc

SEQ ID NO: 2147072 - RNA, 19 nt, Artificial Sequence
  Description of Artificial Sequence: Synthetic oligonucleotide
  Sense strand starting at position 47 of SEQ ID NO: 1882781
ccuaaaugacaaugcugaa

SEQ ID NO: 2147073 - RNA, 19 nt, Artificial Sequence
  Description of Artificial Sequence: Synthetic oligonucleotide
  Antisense strand to SEQ ID NO: 2147072
uucagcauugucauuuagg

SEQ ID NO: 2147074 - RNA, 19 nt, Artificial Sequence
  Description of Artificial Sequence: Synthetic oligonucleotide
  Sense strand starting at position 79 of SEQ ID NO: 1882781
acaguaacaucugcaauag

SEQ ID NO: 2147075 - RNA, 19 nt, Artificial Sequence
  Description of Artificial Sequence: Synthetic oligonucleotide
  Antisense strand to SEQ ID NO: 2147074
cuauugcagauguuacugu

SEQ ID NO: 2147076 - RNA, 19 nt, Artificial Sequence
  Description of Artificial Sequence: Synthetic oligonucleotide
  Sense strand starting at position 220 of SEQ ID NO: 1882781
aucugagucuauguaaaua

SEQ ID NO: 2147077 - RNA, 19 nt, Artificial Sequence
  Description of Artificial Sequence: Synthetic oligonucleotide
  Antisense strand to SEQ ID NO: 2147076
uauuuacauagacucagau

SEQ ID NO: 2147078 - RNA, 19 nt, Artificial Sequence
  Description of Artificial Sequence: Synthetic oligonucleotide
  Sense strand starting at position 432 of SEQ ID NO: 1882781
auagccauuucugcaguau

SEQ ID NO: 2147079 - RNA, 19 nt, Artificial Sequence
  Description of Artificial Sequence: Synthetic oligonucleotide
  Antisense strand to SEQ ID NO: 2147078
auacugcagaaauggcuau

SEQ ID NO: 2147080 - RNA, 19 nt, Artificial Sequence
  Description of Artificial Sequence: Synthetic oligonucleotide
  Sense strand starting at position 436 of SEQ ID NO: 1882781
ccauuucugcaguauuguu

SEQ ID NO: 2147081 - RNA, 19 nt, Artificial Sequence
  Description of Artificial Sequence: Synthetic oligonucleotide
  Antisense strand to SEQ ID NO: 2147080
aacaauacugcagaaaugg

SEQ ID NO: 2147082 - RNA, 19 nt, Artificial Sequence
  Description of Artificial Sequence: Synthetic oligonucleotide
  Sense strand starting at position 731 of SEQ ID NO: 1882781
gggauagacagugaacguu

SEQ ID NO: 2147083 - RNA, 19 nt, Artificial Sequence
  Description of Artificial Sequence: Synthetic oligonucleotide
  Antisense strand to SEQ ID NO: 2147082
aacguucacugucuauccc

SEQ ID NO: 2147084 - RNA, 19 nt, Artificial Sequence
  Description of Artificial Sequence: Synthetic oligonucleotide
  Sense strand starting at position 800 of SEQ ID NO: 1882781
gcugaaucuccaggagaaa

SEQ ID NO: 2147085 - RNA, 19 nt, Artificial Sequence
  Description of Artificial Sequence: Synthetic oligonucleotide
  Antisense strand to SEQ ID NO: 2147084
uuucuccuggagauucagc

SEQ ID NO: 2147086 - RNA, 19 nt, Artificial Sequence
  Description of Artificial Sequence: Synthetic oligonucleotide
  Sense strand starting at position 1082 of SEQ ID NO: 1882781
caauuagcagguugaaaua

SEQ ID NO: 2147087 - RNA, 19 nt, Artificial Sequence
  Description of Artificial Sequence: Synthetic oligonucleotide
  Antisense strand to SEQ ID NO: 2147086
uauuucaaccugcuaauug

SEQ ID NO: 2147088 - RNA, 19 nt, Artificial Sequence
  Description of Artificial Sequence: Synthetic oligonucleotide
  Sense strand starting at position 1171 of SEQ ID NO: 1882781
uguguacgugacagaguau

SEQ ID NO: 2147089 - RNA, 19 nt, Artificial Sequence
  Description of Artificial Sequence: Synthetic oligonucleotide
  Antisense strand to SEQ ID NO: 2147088
auacucugucacguacaca

SEQ ID NO: 2147090 - RNA, 19 nt, Artificial Sequence
  Description of Artificial Sequence: Synthetic oligonucleotide
  Sense strand starting at position 1194 of SEQ ID NO: 1882781
ugaucuuggcaagaguaca

SEQ ID NO: 2147091 - RNA, 19 nt, Artificial Sequence
  Description of Artificial Sequence: Synthetic oligonucleotide
  Antisense strand to SEQ ID NO: 2147090
uguacucuugccaagauca

SEQ ID NO: 2147092 - RNA, 19 nt, Artificial Sequence
  Description of Artificial Sequence: Synthetic oligonucleotide
  Sense strand starting at position 1516 of SEQ ID NO: 1882781
auguauagacccuguaaga

SEQ ID NO: 2147093 - RNA, 19 nt, Artificial Sequence
  Description of Artificial Sequence: Synthetic oligonucleotide
  Antisense strand to SEQ ID NO: 2147092
ucuuacagggucuauacau

SEQ ID NO: 2147094 - RNA, 19 nt, Artificial Sequence
  Description of Artificial Sequence: Synthetic oligonucleotide
  Sense strand starting at position 1652 of SEQ ID NO: 1882781
ucauucuuuguggaaagua

SEQ ID NO: 2147095 - RNA, 19 nt, Artificial Sequence
  Description of Artificial Sequence: Synthetic oligonucleotide
  Antisense strand to SEQ ID NO: 2147094
uacuuuccacaaagaauga

SEQ ID NO: 2147096 - RNA, 19 nt, Artificial Sequence
  Description of Artificial Sequence: Synthetic oligonucleotide
  Sense strand starting at position 1746 of SEQ ID NO: 1882781
ugucauagauauuccaaug

SEQ ID NO: 2147097 - RNA, 19 nt, Artificial Sequence
  Description of Artificial Sequence: Synthetic oligonucleotide
  Antisense strand to SEQ ID NO: 2147096
cauuggaauaucuaugaca

SEQ ID NO: 2147098 - RNA, 19 nt, Artificial Sequence
  Description of Artificial Sequence: Synthetic oligonucleotide
  Sense strand starting at position 1882 of SEQ ID NO: 1882781
aggauauuguucuuaccaa

SEQ ID NO: 2147099 - RNA, 19 nt, Artificial Sequence
  Description of Artificial Sequence: Synthetic oligonucleotide
  Antisense strand to SEQ ID NO: 2147098
uugguaagaacaauauccu

SEQ ID NO: 2147100 - RNA, 19 nt, Artificial Sequence
  Description of Artificial Sequence: Synthetic oligonucleotide
  Sense strand starting at position 1896 of SEQ ID NO: 1882781
accaaugauuaucuguuga

SEQ ID NO: 2147101 - RNA, 19 nt, Artificial Sequence
  Description of Artificial Sequence: Synthetic oligonucleotide
  Antisense strand to SEQ ID NO: 2147100
ucaacagauaaucauuggu

SEQ ID NO: 2147102 - RNA, 19 nt, Artificial Sequence
  Description of Artificial Sequence: Synthetic oligonucleotide
  Sense strand starting at position 1904 of SEQ ID NO: 1882781
uuaucuguugagggaaauc

SEQ ID NO: 2147103 - RNA, 19 nt, Artificial Sequence
  Description of Artificial Sequence: Synthetic oligonucleotide
  Antisense strand to SEQ ID NO: 2147102
gauuucccucaacagauaa

SEQ ID NO: 2147104 - RNA, 19 nt, Artificial Sequence
  Description of Artificial Sequence: Synthetic oligonucleotide
  Sense strand starting at position 1914 of SEQ ID NO: 1882781
agggaaaucuggguuucuc

SEQ ID NO: 2147105 - RNA, 19 nt, Artificial Sequence
  Description of Artificial Sequence: Synthetic oligonucleotide
  Antisense strand to SEQ ID NO: 2147104
gagaaacccagauuucccu

SEQ ID NO: 2147106 - RNA, 19 nt, Artificial Sequence
  Description of Artificial Sequence: Synthetic oligonucleotide
  Sense strand starting at position 2058 of SEQ ID NO: 1882781
ggguucuaagaauguaaag

SEQ ID NO: 2147107 - RNA, 19 nt, Artificial Sequence
  Description of Artificial Sequence: Synthetic oligonucleotide
  Antisense strand to SEQ ID NO: 2147106
cuuuacauucuuagaaccc

SEQ ID NO: 2147108 - RNA, 19 nt, Artificial Sequence
  Description of Artificial Sequence: Synthetic oligonucleotide
  Sense strand starting at position 2068 of SEQ ID NO: 1882781
aauguaaaguagucauaga

SEQ ID NO: 2147109 - RNA, 19 nt, Artificial Sequence
  Description of Artificial Sequence: Synthetic oligonucleotide
  Antisense strand to SEQ ID NO: 2147108
ucuaugacuacuuuacauu

SEQ ID NO: 2147110 - RNA, 19 nt, Artificial Sequence
  Description of Artificial Sequence: Synthetic oligonucleotide
  Sense strand starting at position 2069 of SEQ ID NO: 1882781
auguaaaguagucauagac

SEQ ID NO: 2147111 - RNA, 19 nt, Artificial Sequence
  Description of Artificial Sequence: Synthetic oligonucleotide
  Antisense strand to SEQ ID NO: 2147110
gucuaugacuacuuuacau

SEQ ID NO: 2147112 - RNA, 19 nt, Artificial Sequence
  Description of Artificial Sequence: Synthetic oligonucleotide
  Sense strand starting at position 2131 of SEQ ID NO: 1882781
uaucgaaguuaucuggaaa

SEQ ID NO: 2147113 - RNA, 19 nt, Artificial Sequence
  Description of Artificial Sequence: Synthetic oligonucleotide
  Antisense strand to SEQ ID NO: 2147112
uuuccagauaacuucgaua

SEQ ID NO: 2147114 - RNA, 19 nt, Artificial Sequence
  Description of Artificial Sequence: Synthetic oligonucleotide
  Sense strand starting at position 2157 of SEQ ID NO: 1882781
agccaugguucuccaauuu

SEQ ID NO: 2147115 - RNA, 19 nt, Artificial Sequence
  Description of Artificial Sequence: Synthetic oligonucleotide
  Antisense strand to SEQ ID NO: 2147114
aaauuggagaaccauggcu

SEQ ID NO: 2147116 - RNA, 19 nt, Artificial Sequence
  Description of Artificial Sequence: Synthetic oligonucleotide
  Sense strand starting at position 2299 of SEQ ID NO: 1882781
agagaagacuaucuguauu

SEQ ID NO: 2147117 - RNA, 19 nt, Artificial Sequence
  Description of Artificial Sequence: Synthetic oligonucleotide
  Antisense strand to SEQ ID NO: 2147116
aauacagauagucuucucu

SEQ ID NO: 2147118 - RNA, 19 nt, Artificial Sequence
  Description of Artificial Sequence: Synthetic oligonucleotide
  Sense strand starting at position 2301 of SEQ ID NO: 1882781
agaagacuaucuguauucu

SEQ ID NO: 2147119 - RNA, 19 nt, Artificial Sequence
  Description of Artificial Sequence: Synthetic oligonucleotide
  Antisense strand to SEQ ID NO: 2147118
agaauacagauagucuucu

SEQ ID NO: 2147120 - RNA, 19 nt, Artificial Sequence
  Description of Artificial Sequence: Synthetic oligonucleotide
  Sense strand starting at position 2316 of SEQ ID NO: 1882781
uucuacuugggcuacauaa

SEQ ID NO: 2147121 - RNA, 19 nt, Artificial Sequence
  Description of Artificial Sequence: Synthetic oligonucleotide
  Antisense strand to SEQ ID NO: 2147120
uuauguagcccaaguagaa

SEQ ID NO: 2147122 - RNA, 19 nt, Artificial Sequence
  Description of Artificial Sequence: Synthetic oligonucleotide
  Sense strand starting at position 2318 of SEQ ID NO: 1882781
cuacuugggcuacauaauu

SEQ ID NO: 2147123 - RNA, 19 nt, Artificial Sequence
  Description of Artificial Sequence: Synthetic oligonucleotide
  Antisense strand to SEQ ID NO: 2147122
aauuauguagcccaaguag

SEQ ID NO: 2147124 - RNA, 19 nt, Artificial Sequence
  Description of Artificial Sequence: Synthetic oligonucleotide
  Sense strand starting at position 2846 of SEQ ID NO: 1882781
uuugguauggcuuauaaau

SEQ ID NO: 2147125 - RNA, 19 nt, Artificial Sequence
  Description of Artificial Sequence: Synthetic oligonucleotide
  Antisense strand to SEQ ID NO: 2147124
auuuauaagccauaccaaa

SEQ ID NO: 2147126 - RNA, 19 nt, Artificial Sequence
  Description of Artificial Sequence: Synthetic oligonucleotide
  Sense strand starting at position 3092 of SEQ ID NO: 1882781
gcacuuaagggaugaaugu

SEQ ID NO: 2147127 - RNA, 19 nt, Artificial Sequence
  Description of Artificial Sequence: Synthetic oligonucleotide
  Antisense strand to SEQ ID NO: 2147126
acauucaucccuuaagugc

SEQ ID NO: 2147128 - RNA, 19 nt, Artificial Sequence
  Description of Artificial Sequence: Synthetic oligonucleotide
  Sense strand starting at position 3254 of SEQ ID NO: 1882781
ugcuacuuugaugauuauu

SEQ ID NO: 2147129 - RNA, 19 nt, Artificial Sequence
  Description of Artificial Sequence: Synthetic oligonucleotide
  Antisense strand to SEQ ID NO: 2147128
aauaaucaucaaaguagca

SEQ ID NO: 2147130 - RNA, 19 nt, Artificial Sequence
  Description of Artificial Sequence: Synthetic oligonucleotide
  Sense strand starting at position 3262 of SEQ ID NO: 1882781
ugaugauuauuugcugcau

SEQ ID NO: 2147131 - RNA, 19 nt, Artificial Sequence
  Description of Artificial Sequence: Synthetic oligonucleotide
  Antisense strand to SEQ ID NO: 2147130
augcagcaaauaaucauca

SEQ ID NO: 2147132 - RNA, 19 nt, Artificial Sequence
  Description of Artificial Sequence: Synthetic oligonucleotide
  Sense strand starting at position 3414 of SEQ ID NO: 1882781
aguauaagacgaugaaugu

SEQ ID NO: 2147133 - RNA, 19 nt, Artificial Sequence
  Description of Artificial Sequence: Synthetic oligonucleotide
  Antisense strand to SEQ ID NO: 2147132
acauucaucgucuuauacu

SEQ ID NO: 2147134 - RNA, 19 nt, Artificial Sequence
  Description of Artificial Sequence: Synthetic oligonucleotide
  Sense strand starting at position 3500 of SEQ ID NO: 1882781
guacuuagugacuaauacu

SEQ ID NO: 2147135 - RNA, 19 nt, Artificial Sequence
  Description of Artificial Sequence: Synthetic oligonucleotide
  Antisense strand to SEQ ID NO: 2147134
aguauuagucacuaaguac

SEQ ID NO: 2147136 - RNA, 19 nt, Artificial Sequence
  Description of Artificial Sequence: Synthetic oligonucleotide
  Sense strand starting at position 3510 of SEQ ID NO: 1882781
acuaauacugagcaaucga

SEQ ID NO: 2147137 - RNA, 19 nt, Artificial Sequence
  Description of Artificial Sequence: Synthetic oligonucleotide
  Antisense strand to SEQ ID NO: 2147136
ucgauugcucaguauuagu

SEQ ID NO: 2147138 - RNA, 19 nt, Artificial Sequence
  Description of Artificial Sequence: Synthetic oligonucleotide
  Sense strand starting at position 3628 of SEQ ID NO: 1882781
ucagaauacuugucuuuga

SEQ ID NO: 2147139 - RNA, 19 nt, Artificial Sequence
  Description of Artificial Sequence: Synthetic oligonucleotide
  Antisense strand to SEQ ID NO: 2147138
ucaaagacaaguauucuga

SEQ ID NO: 2147140 - RNA, 19 nt, Artificial Sequence
  Description of Artificial Sequence: Synthetic oligonucleotide
  Sense strand starting at position 3817 of SEQ ID NO: 1882781
aaucgaagagucgaaacuu

SEQ ID NO: 2147141 - RNA, 19 nt, Artificial Sequence
  Description of Artificial Sequence: Synthetic oligonucleotide
  Antisense strand to SEQ ID NO: 2147140
aaguuucgacucuucgauu

SEQ ID NO: 2147142 - RNA, 19 nt, Artificial Sequence
  Description of Artificial Sequence: Synthetic oligonucleotide
  Sense strand starting at position 3823 of SEQ ID NO: 1882781
agagucgaaacuugguaaa

SEQ ID NO: 2147143 - RNA, 19 nt, Artificial Sequence
  Description of Artificial Sequence: Synthetic oligonucleotide
  Antisense strand to SEQ ID NO: 2147142
uuuaccaaguuucgacucu

SEQ ID NO: 2147144 - RNA, 19 nt, Artificial Sequence
  Description of Artificial Sequence: Synthetic oligonucleotide
  Sense strand starting at position 3825 of SEQ ID NO: 1882781
agucgaaacuugguaaaca

SEQ ID NO: 2147145 - RNA, 19 nt, Artificial Sequence
  Description of Artificial Sequence: Synthetic oligonucleotide
  Antisense strand to SEQ ID NO: 2147144
uguuuaccaaguuucgacu

SEQ ID NO: 2147146 - RNA, 19 nt, Artificial Sequence
  Description of Artificial Sequence: Synthetic oligonucleotide
  Sense strand starting at position 3860 of SEQ ID NO: 1882781
ugacuaaucuuagucacug

SEQ ID NO: 2147147 - RNA, 19 nt, Artificial Sequence
  Description of Artificial Sequence: Synthetic oligonucleotide
  Antisense strand to SEQ ID NO: 2147146
cagugacuaagauuaguca

SEQ ID NO: 2147148 - RNA, 19 nt, Artificial Sequence
  Description of Artificial Sequence: Synthetic oligonucleotide
  Sense strand starting at position 3950 of SEQ ID NO: 1882781
aacagugaccuugggauau

SEQ ID NO: 2147149 - RNA, 19 nt, Artificial Sequence
  Description of Artificial Sequence: Synthetic oligonucleotide
  Antisense strand to SEQ ID NO: 2147148
auaucccaaggucacuguu

SEQ ID NO: 2147150 - RNA, 19 nt, Artificial Sequence
  Description of Artificial Sequence: Synthetic oligonucleotide
  Sense strand starting at position 42 of SEQ ID NO: 1882783
ccggcaaucuaaugcauuu

SEQ ID NO: 2147151 - RNA, 19 nt, Artificial Sequence
  Description of Artificial Sequence: Synthetic oligonucleotide
  Antisense strand to SEQ ID NO: 2147150
aaaugcauuagauugccgg

SEQ ID NO: 2147152 - RNA, 19 nt, Artificial Sequence
  Description of Artificial Sequence: Synthetic oligonucleotide
  Sense strand starting at position 151 of SEQ ID NO: 1882783
ccaccuugaucguacaaau

SEQ ID NO: 2147153 - RNA, 19 nt, Artificial Sequence
  Description of Artificial Sequence: Synthetic oligonucleotide
  Antisense strand to SEQ ID NO: 2147152
auuuguacgaucaaggugg

SEQ ID NO: 2147154 - RNA, 19 nt, Artificial Sequence
  Description of Artificial Sequence: Synthetic oligonucleotide
  Sense strand starting at position 161 of SEQ ID NO: 1882783
cguacaaauuaagaaacua

SEQ ID NO: 2147155 - RNA, 19 nt, Artificial Sequence
  Description of Artificial Sequence: Synthetic oligonucleotide
  Antisense strand to SEQ ID NO: 2147154
uaguuucuuaauuuguacg

SEQ ID NO: 2147156 - RNA, 19 nt, Artificial Sequence
  Description of Artificial Sequence: Synthetic oligonucleotide
  Sense strand starting at position 589 of SEQ ID NO: 1882783
aaggaaucguuauagaaag

SEQ ID NO: 2147157 - RNA, 19 nt, Artificial Sequence
  Description of Artificial Sequence: Synthetic oligonucleotide
  Antisense strand to SEQ ID NO: 2147156
cuuucuauaacgauuccuu

SEQ ID NO: 2147158 - RNA, 19 nt, Artificial Sequence
  Description of Artificial Sequence: Synthetic oligonucleotide
  Sense strand starting at position 601 of SEQ ID NO: 1882783
uagaaaguacuauguagag

SEQ ID NO: 2147159 - RNA, 19 nt, Artificial Sequence
  Description of Artificial Sequence: Synthetic oligonucleotide
  Antisense strand to SEQ ID NO: 2147158
cucuacauaguacuuucua

SEQ ID NO: 2147160 - RNA, 19 nt, Artificial Sequence
  Description of Artificial Sequence: Synthetic oligonucleotide
  Sense strand starting at position 1378 of SEQ ID NO: 1882783
ggaauuaccgcgugagcca

SEQ ID NO: 2147161 - RNA, 19 nt, Artificial Sequence
  Description of Artificial Sequence: Synthetic oligonucleotide
  Antisense strand to SEQ ID NO: 2147160
uggcucacgcgguaauucc

SEQ ID NO: 2147162 - RNA, 19 nt, Artificial Sequence
  Description of Artificial Sequence: Synthetic oligonucleotide
  Sense strand starting at position 1404 of SEQ ID NO: 1882783
cggcccgacucccauaaau

SEQ ID NO: 2147163 - RNA, 19 nt, Artificial Sequence
  Description of Artificial Sequence: Synthetic oligonucleotide
  Antisense strand to SEQ ID NO: 2147162
auuuaugggagucgggccg

SEQ ID NO: 2147164 - RNA, 19 nt, Artificial Sequence
  Description of Artificial Sequence: Synthetic oligonucleotide
  Sense strand starting at position 1824 of SEQ ID NO: 1882783
gggugucugacccagcaga

SEQ ID NO: 2147165 - RNA, 19 nt, Artificial Sequence
  Description of Artificial Sequence: Synthetic oligonucleotide
  Antisense strand to SEQ ID NO: 2147164
ucugcugggucagacaccc

SEQ ID NO: 2147166 - RNA, 19 nt, Artificial Sequence
  Description of Artificial Sequence: Synthetic oligonucleotide
  Sense strand starting at position 2225 of SEQ ID NO: 1882783
ugcauuuaaccauguguaa

SEQ ID NO: 2147167 - RNA, 19 nt, Artificial Sequence
  Description of Artificial Sequence: Synthetic oligonucleotide
  Antisense strand to SEQ ID NO: 2147166
uuacacaugguuaaaugca

SEQ ID NO: 2147168 - RNA, 19 nt, Artificial Sequence
  Description of Artificial Sequence: Synthetic oligonucleotide
  Sense strand starting at position 2415 of SEQ ID NO: 1882783
gccacaugugaauacuaaa

SEQ ID NO: 2147169 - RNA, 19 nt, Artificial Sequence
  Description of Artificial Sequence: Synthetic oligonucleotide
  Antisense strand to SEQ ID NO: 2147168
uuuaguauucacauguggc

SEQ ID NO: 2147170 - RNA, 19 nt, Artificial Sequence
  Description of Artificial Sequence: Synthetic oligonucleotide
  Sense strand starting at position 3014 of SEQ ID NO: 1882783
uggagguucuagugagcga

SEQ ID NO: 2147171 - RNA, 19 nt, Artificial Sequence
  Description of Artificial Sequence: Synthetic oligonucleotide
  Antisense strand to SEQ ID NO: 2147170
ucgcucacuagaaccucca

SEQ ID NO: 2147172 - RNA, 19 nt, Artificial Sequence
  Description of Artificial Sequence: Synthetic oligonucleotide
  Sense strand starting at position 3017 of SEQ ID NO: 1882783
agguucuagugagcgagau

SEQ ID NO: 2147173 - RNA, 19 nt, Artificial Sequence
  Description of Artificial Sequence: Synthetic oligonucleotide
  Antisense strand to SEQ ID NO: 2147172
aucucgcucacuagaaccu

SEQ ID NO: 2147174 - RNA, 19 nt, Artificial Sequence
  Description of Artificial Sequence: Synthetic oligonucleotide
  Sense strand starting at position 3018 of SEQ ID NO: 1882783
gguucuagugagcgagauc

SEQ ID NO: 2147175 - RNA, 19 nt, Artificial Sequence
  Description of Artificial Sequence: Synthetic oligonucleotide
  Antisense strand to SEQ ID NO: 2147174
gaucucgcucacuagaacc

SEQ ID NO: 2147176 - RNA, 19 nt, Artificial Sequence
  Description of Artificial Sequence: Synthetic oligonucleotide
  Sense strand starting at position 3019 of SEQ ID NO: 1882783
guucuagugagcgagauca

SEQ ID NO: 2147177 - RNA, 19 nt, Artificial Sequence
  Description of Artificial Sequence: Synthetic oligonucleotide
  Antisense strand to SEQ ID NO: 2147176
ugaucucgcucacuagaac

SEQ ID NO: 2147178 - RNA, 19 nt, Artificial Sequence
  Description of Artificial Sequence: Synthetic oligonucleotide
  Sense strand starting at position 3252 of SEQ ID NO: 1882783
agucuugaccuccagugua

SEQ ID NO: 2147179 - RNA, 19 nt, Artificial Sequence
  Description of Artificial Sequence: Synthetic oligonucleotide
  Antisense strand to SEQ ID NO: 2147178
uacacuggaggucaagacu

SEQ ID NO: 2147180 - RNA, 19 nt, Artificial Sequence
  Description of Artificial Sequence: Synthetic oligonucleotide
  Sense strand starting at position 3255 of SEQ ID NO: 1882783
cuugaccuccaguguauaa

SEQ ID NO: 2147181 - RNA, 19 nt, Artificial Sequence
  Description of Artificial Sequence: Synthetic oligonucleotide
  Antisense strand to SEQ ID NO: 2147180
uuauacacuggaggucaag

SEQ ID NO: 2147182 - RNA, 19 nt, Artificial Sequence
  Description of Artificial Sequence: Synthetic oligonucleotide
  Sense strand starting at position 3257 of SEQ ID NO: 1882783
ugaccuccaguguauaaau

SEQ ID NO: 2147183 - RNA, 19 nt, Artificial Sequence
  Description of Artificial Sequence: Synthetic oligonucleotide
  Antisense strand to SEQ ID NO: 2147182
auuuauacacuggagguca

SEQ ID NO: 2147184 - RNA, 19 nt, Artificial Sequence
  Description of Artificial Sequence: Synthetic oligonucleotide
  Sense strand starting at position 3259 of SEQ ID NO: 1882783
accuccaguguauaaauau

SEQ ID NO: 2147185 - RNA, 19 nt, Artificial Sequence
  Description of Artificial Sequence: Synthetic oligonucleotide
  Antisense strand to SEQ ID NO: 2147184
auauuuauacacuggaggu

SEQ ID NO: 2147186 - RNA, 19 nt, Artificial Sequence
  Description of Artificial Sequence: Synthetic oligonucleotide
  Sense strand starting at position 3354 of SEQ ID NO: 1882783
ucuccugugguuuauggaa

SEQ ID NO: 2147187 - RNA, 19 nt, Artificial Sequence
  Description of Artificial Sequence: Synthetic oligonucleotide
  Antisense strand to SEQ ID NO: 2147186
uuccauaaaccacaggaga

SEQ ID NO: 2147188 - RNA, 19 nt, Artificial Sequence
  Description of Artificial Sequence: Synthetic oligonucleotide
  Sense strand starting at position 3356 of SEQ ID NO: 1882783
uccugugguuuauggaaau

SEQ ID NO: 2147189 - RNA, 19 nt, Artificial Sequence
  Description of Artificial Sequence: Synthetic oligonucleotide
  Antisense strand to SEQ ID NO: 2147188
auuuccauaaaccacagga

SEQ ID NO: 2147190 - RNA, 19 nt, Artificial Sequence
  Description of Artificial Sequence: Synthetic oligonucleotide
  Sense strand starting at position 3362 of SEQ ID NO: 1882783
gguuuauggaaauguguga

SEQ ID NO: 2147191 - RNA, 19 nt, Artificial Sequence
  Description of Artificial Sequence: Synthetic oligonucleotide
  Antisense strand to SEQ ID NO: 2147190
ucacacauuuccauaaacc

SEQ ID NO: 2147192 - RNA, 19 nt, Artificial Sequence
  Description of Artificial Sequence: Synthetic oligonucleotide
  Sense strand starting at position 3369 of SEQ ID NO: 1882783
ggaaaugugugaguauaag

SEQ ID NO: 2147193 - RNA, 19 nt, Artificial Sequence
  Description of Artificial Sequence: Synthetic oligonucleotide
  Antisense strand to SEQ ID NO: 2147192
cuuauacucacacauuucc

SEQ ID NO: 2147194 - RNA, 19 nt, Artificial Sequence
  Description of Artificial Sequence: Synthetic oligonucleotide
  Sense strand starting at position 3493 of SEQ ID NO: 1882783
acuguuagaacguaauuag

SEQ ID NO: 2147195 - RNA, 19 nt, Artificial Sequence
  Description of Artificial Sequence: Synthetic oligonucleotide
  Antisense strand to SEQ ID NO: 2147194
cuaauuacguucuaacagu

SEQ ID NO: 2147196 - RNA, 19 nt, Artificial Sequence
  Description of Artificial Sequence: Synthetic oligonucleotide
  Sense strand starting at position 3496 of SEQ ID NO: 1882783
guuagaacguaauuaguaa

SEQ ID NO: 2147197 - RNA, 19 nt, Artificial Sequence
  Description of Artificial Sequence: Synthetic oligonucleotide
  Antisense strand to SEQ ID NO: 2147196
uuacuaauuacguucuaac

SEQ ID NO: 2147198 - RNA, 19 nt, Artificial Sequence
  Description of Artificial Sequence: Synthetic oligonucleotide
  Sense strand starting at position 3503 of SEQ ID NO: 1882783
cguaauuaguaaucaacuu

SEQ ID NO: 2147199 - RNA, 19 nt, Artificial Sequence
  Description of Artificial Sequence: Synthetic oligonucleotide
  Antisense strand to SEQ ID NO: 2147198
aaguugauuacuaauuacg

SEQ ID NO: 2147200 - RNA, 19 nt, Artificial Sequence
  Description of Artificial Sequence: Synthetic oligonucleotide
  Sense strand starting at position 3556 of SEQ ID NO: 1882783
gcacguauuaguuagcucu

SEQ ID NO: 2147201 - RNA, 19 nt, Artificial Sequence
  Description of Artificial Sequence: Synthetic oligonucleotide
  Antisense strand to SEQ ID NO: 2147200
agagcuaacuaauacgugc

SEQ ID NO: 2147202 - RNA, 19 nt, Artificial Sequence
  Description of Artificial Sequence: Synthetic oligonucleotide
  Sense strand starting at position 3558 of SEQ ID NO: 1882783
acguauuaguuagcucuua

SEQ ID NO: 2147203 - RNA, 19 nt, Artificial Sequence
  Description of Artificial Sequence: Synthetic oligonucleotide
  Antisense strand to SEQ ID NO: 2147202
uaagagcuaacuaauacgu

SEQ ID NO: 2147204 - RNA, 19 nt, Artificial Sequence
  Description of Artificial Sequence: Synthetic oligonucleotide
  Sense strand starting at position 3563 of SEQ ID NO: 1882783
uuaguuagcucuuacagca

SEQ ID NO: 2147205 - RNA, 19 nt, Artificial Sequence
  Description of Artificial Sequence: Synthetic oligonucleotide
  Antisense strand to SEQ ID NO: 2147204
ugcuguaagagcuaacuaa

SEQ ID NO: 2147206 - RNA, 19 nt, Artificial Sequence
  Description of Artificial Sequence: Synthetic oligonucleotide
  Sense strand starting at position 3602 of SEQ ID NO: 1882783
cuuagcucauaauugugau

SEQ ID NO: 2147207 - RNA, 19 nt, Artificial Sequence
  Description of Artificial Sequence: Synthetic oligonucleotide
  Antisense strand to SEQ ID NO: 2147206
aucacaauuaugagcuaag

SEQ ID NO: 2147208 - RNA, 19 nt, Artificial Sequence
  Description of Artificial Sequence: Synthetic oligonucleotide
  Sense strand starting at position 3605 of SEQ ID NO: 1882783
agcucauaauugugauggu

SEQ ID NO: 2147209 - RNA, 19 nt, Artificial Sequence
  Description of Artificial Sequence: Synthetic oligonucleotide
  Antisense strand to SEQ ID NO: 2147208
accaucacaauuaugagcu

SEQ ID NO: 2147210 - RNA, 19 nt, Artificial Sequence
  Description of Artificial Sequence: Synthetic oligonucleotide
  Sense strand starting at position 3608 of SEQ ID NO: 1882783
ucauaauugugauggucag

SEQ ID NO: 2147211 - RNA, 19 nt, Artificial Sequence
  Description of Artificial Sequence: Synthetic oligonucleotide
  Antisense strand to SEQ ID NO: 2147210
cugaccaucacaauuauga

SEQ ID NO: 2147212 - RNA, 19 nt, Artificial Sequence
  Description of Artificial Sequence: Synthetic oligonucleotide
  Sense strand starting at position 3612 of SEQ ID NO: 1882783
aauugugauggucagccau

SEQ ID NO: 2147213 - RNA, 19 nt, Artificial Sequence
  Description of Artificial Sequence: Synthetic oligonucleotide
  Antisense strand to SEQ ID NO: 2147212
auggcugaccaucacaauu

SEQ ID NO: 2147214 - RNA, 19 nt, Artificial Sequence
  Description of Artificial Sequence: Synthetic oligonucleotide
  Sense strand starting at position 3614 of SEQ ID NO: 1882783
uugugauggucagccauuu

SEQ ID NO: 2147215 - RNA, 19 nt, Artificial Sequence
  Description of Artificial Sequence: Synthetic oligonucleotide
  Antisense strand to SEQ ID NO: 2147214
aaauggcugaccaucacaa

SEQ ID NO: 2147216 - RNA, 19 nt, Artificial Sequence
  Description of Artificial Sequence: Synthetic oligonucleotide
  Sense strand starting at position 3707 of SEQ ID NO: 1882783
agcuucugcuucugggauu

SEQ ID NO: 2147217 - RNA, 19 nt, Artificial Sequence
  Description of Artificial Sequence: Synthetic oligonucleotide
  Antisense strand to SEQ ID NO: 2147216
aaucccagaagcagaagcu

SEQ ID NO: 2147218 - RNA, 19 nt, Artificial Sequence
  Description of Artificial Sequence: Synthetic oligonucleotide
  Sense strand starting at position 3744 of SEQ ID NO: 1882783
gcuucuccucccuguugua

SEQ ID NO: 2147219 - RNA, 19 nt, Artificial Sequence
  Description of Artificial Sequence: Synthetic oligonucleotide
  Antisense strand to SEQ ID NO: 2147218
uacaacagggaggagaagc

SEQ ID NO: 2147220 - RNA, 19 nt, Artificial Sequence
  Description of Artificial Sequence: Synthetic oligonucleotide
  Sense strand starting at position 3756 of SEQ ID NO: 1882783
uguuguaucuuauccucca

SEQ ID NO: 2147221 - RNA, 19 nt, Artificial Sequence
  Description of Artificial Sequence: Synthetic oligonucleotide
  Antisense strand to SEQ ID NO: 2147220
uggaggauaagauacaaca

SEQ ID NO: 2147222 - RNA, 19 nt, Artificial Sequence
  Description of Artificial Sequence: Synthetic oligonucleotide
  Sense strand starting at position 3943 of SEQ ID NO: 1882783
ucuggaucuccaugggaac

SEQ ID NO: 2147223 - RNA, 19 nt, Artificial Sequence
  Description of Artificial Sequence: Synthetic oligonucleotide
  Antisense strand to SEQ ID NO: 2147222
guucccauggagauccaga

SEQ ID NO: 2147224 - RNA, 19 nt, Artificial Sequence
  Description of Artificial Sequence: Synthetic oligonucleotide
  Sense strand starting at position 72 of SEQ ID NO: 1882784
cucaauguccugggcacaa

SEQ ID NO: 2147225 - RNA, 19 nt, Artificial Sequence
  Description of Artificial Sequence: Synthetic oligonucleotide
  Antisense strand to SEQ ID NO: 2147224
uugugcccaggacauugag

SEQ ID NO: 2147226 - RNA, 19 nt, Artificial Sequence
  Description of Artificial Sequence: Synthetic oligonucleotide
  Sense strand starting at position 359 of SEQ ID NO: 1882784
aggcuuaaggcacgagaau

SEQ ID NO: 2147227 - RNA, 19 nt, Artificial Sequence
  Description of Artificial Sequence: Synthetic oligonucleotide
  Antisense strand to SEQ ID NO: 2147226
auucucgugccuuaagccu

SEQ ID NO: 2147228 - RNA, 19 nt, Artificial Sequence
  Description of Artificial Sequence: Synthetic oligonucleotide
  Sense strand starting at position 1101 of SEQ ID NO: 1882784
agguaaugguuaucuaccu

SEQ ID NO: 2147229 - RNA, 19 nt, Artificial Sequence
  Description of Artificial Sequence: Synthetic oligonucleotide
  Antisense strand to SEQ ID NO: 2147228
agguagauaaccauuaccu

SEQ ID NO: 2147230 - RNA, 19 nt, Artificial Sequence
  Description of Artificial Sequence: Synthetic oligonucleotide
  Sense strand starting at position 1102 of SEQ ID NO: 1882784
gguaaugguuaucuaccuu

SEQ ID NO: 2147231 - RNA, 19 nt, Artificial Sequence
  Description of Artificial Sequence: Synthetic oligonucleotide
  Antisense strand to SEQ ID NO: 2147230
aagguagauaaccauuacc

SEQ ID NO: 2147232 - RNA, 19 nt, Artificial Sequence
  Description of Artificial Sequence: Synthetic oligonucleotide
  Sense strand starting at position 1106 of SEQ ID NO: 1882784
augguuaucuaccuuuaag

SEQ ID NO: 2147233 - RNA, 19 nt, Artificial Sequence
  Description of Artificial Sequence: Synthetic oligonucleotide
  Antisense strand to SEQ ID NO: 2147232
cuuaaagguagauaaccau

SEQ ID NO: 2147234 - RNA, 19 nt, Artificial Sequence
  Description of Artificial Sequence: Synthetic oligonucleotide
  Sense strand starting at position 1109 of SEQ ID NO: 1882784
guuaucuaccuuuaaguuu

SEQ ID NO: 2147235 - RNA, 19 nt, Artificial Sequence
  Description of Artificial Sequence: Synthetic oligonucleotide
  Antisense strand to SEQ ID NO: 2147234
aaacuuaaagguagauaac

SEQ ID NO: 2147236 - RNA, 19 nt, Artificial Sequence
  Description of Artificial Sequence: Synthetic oligonucleotide
  Sense strand starting at position 1369 of SEQ ID NO: 1882784
uggcaaagcugaucuccaa

SEQ ID NO: 2147237 - RNA, 19 nt, Artificial Sequence
  Description of Artificial Sequence: Synthetic oligonucleotide
  Antisense strand to SEQ ID NO: 2147236
uuggagaucagcuuugcca

SEQ ID NO: 2147238 - RNA, 19 nt, Artificial Sequence
  Description of Artificial Sequence: Synthetic oligonucleotide
  Sense strand starting at position 1479 of SEQ ID NO: 1882784
auuauaucuugacuguuga

SEQ ID NO: 2147239 - RNA, 19 nt, Artificial Sequence
  Description of Artificial Sequence: Synthetic oligonucleotide
  Antisense strand to SEQ ID NO: 2147238
ucaacagucaagauauaau

SEQ ID NO: 2147240 - RNA, 19 nt, Artificial Sequence
  Description of Artificial Sequence: Synthetic oligonucleotide
  Sense strand starting at position 1480 of SEQ ID NO: 1882784
uuauaucuugacuguugau

SEQ ID NO: 2147241 - RNA, 19 nt, Artificial Sequence
  Description of Artificial Sequence: Synthetic oligonucleotide
  Antisense strand to SEQ ID NO: 2147240
aucaacagucaagauauaa

SEQ ID NO: 2147242 - RNA, 19 nt, Artificial Sequence
  Description of Artificial Sequence: Synthetic oligonucleotide
  Sense strand starting at position 1613 of SEQ ID NO: 1882784
agguuagagagcugagaga

SEQ ID NO: 2147243 - RNA, 19 nt, Artificial Sequence
  Description of Artificial Sequence: Synthetic oligonucleotide
  Antisense strand to SEQ ID NO: 2147242
ucucucagcucucuaaccu

SEQ ID NO: 2147244 - RNA, 19 nt, Artificial Sequence
  Description of Artificial Sequence: Synthetic oligonucleotide
  Sense strand starting at position 1633 of SEQ ID NO: 1882784
caggguuucccugggcaga

SEQ ID NO: 2147245 - RNA, 19 nt, Artificial Sequence
  Description of Artificial Sequence: Synthetic oligonucleotide
  Antisense strand to SEQ ID NO: 2147244
ucugcccagggaaacccug

SEQ ID NO: 2147246 - RNA, 19 nt, Artificial Sequence
  Description of Artificial Sequence: Synthetic oligonucleotide
  Sense strand starting at position 1776 of SEQ ID NO: 1882784
gaaacauuaggguguuaga

SEQ ID NO: 2147247 - RNA, 19 nt, Artificial Sequence
  Description of Artificial Sequence: Synthetic oligonucleotide
  Antisense strand to SEQ ID NO: 2147246
ucuaacacccuaauguuuc

SEQ ID NO: 2147248 - RNA, 19 nt, Artificial Sequence
  Description of Artificial Sequence: Synthetic oligonucleotide
  Sense strand starting at position 1841 of SEQ ID NO: 1882784
ccagcauuggcugaagcaa

SEQ ID NO: 2147249 - RNA, 19 nt, Artificial Sequence
  Description of Artificial Sequence: Synthetic oligonucleotide
  Antisense strand to SEQ ID NO: 2147248
uugcuucagccaaugcugg

SEQ ID NO: 2147250 - RNA, 19 nt, Artificial Sequence
  Description of Artificial Sequence: Synthetic oligonucleotide
  Sense strand starting at position 1960 of SEQ ID NO: 1882784
cucugaugcuccuuuggga

SEQ ID NO: 2147251 - RNA, 19 nt, Artificial Sequence
  Description of Artificial Sequence: Synthetic oligonucleotide
  Antisense strand to SEQ ID NO: 2147250
ucccaaaggagcaucagag

SEQ ID NO: 2147252 - RNA, 19 nt, Artificial Sequence
  Description of Artificial Sequence: Synthetic oligonucleotide
  Sense strand starting at position 1967 of SEQ ID NO: 1882784
gcuccuuugggagacugau

SEQ ID NO: 2147253 - RNA, 19 nt, Artificial Sequence
  Description of Artificial Sequence: Synthetic oligonucleotide
  Antisense strand to SEQ ID NO: 2147252
aucagucucccaaaggagc

SEQ ID NO: 2147254 - RNA, 19 nt, Artificial Sequence
  Description of Artificial Sequence: Synthetic oligonucleotide
  Sense strand starting at position 2140 of SEQ ID NO: 1882784
gcccuauauccauaugaag

SEQ ID NO: 2147255 - RNA, 19 nt, Artificial Sequence
  Description of Artificial Sequence: Synthetic oligonucleotide
  Antisense strand to SEQ ID NO: 2147254
cuucauauggauauagggc

SEQ ID NO: 2147256 - RNA, 19 nt, Artificial Sequence
  Description of Artificial Sequence: Synthetic oligonucleotide
  Sense strand starting at position 2268 of SEQ ID NO: 1882784
gcccgaugaauguggaaug

SEQ ID NO: 2147257 - RNA, 19 nt, Artificial Sequence
  Description of Artificial Sequence: Synthetic oligonucleotide
  Antisense strand to SEQ ID NO: 2147256
cauuccacauucaucgggc

SEQ ID NO: 2147258 - RNA, 19 nt, Artificial Sequence
  Description of Artificial Sequence: Synthetic oligonucleotide
  Sense strand starting at position 2291 of SEQ ID NO: 1882784
aaugaagugccucauguuu

SEQ ID NO: 2147259 - RNA, 19 nt, Artificial Sequence
  Description of Artificial Sequence: Synthetic oligonucleotide
  Antisense strand to SEQ ID NO: 2147258
aaacaugaggcacuucauu

SEQ ID NO: 2147260 - RNA, 19 nt, Artificial Sequence
  Description of Artificial Sequence: Synthetic oligonucleotide
  Sense strand starting at position 2336 of SEQ ID NO: 1882784
ucauuugauuuguauagca

SEQ ID NO: 2147261 - RNA, 19 nt, Artificial Sequence
  Description of Artificial Sequence: Synthetic oligonucleotide
  Antisense strand to SEQ ID NO: 2147260
ugcuauacaaaucaaauga

SEQ ID NO: 2147262 - RNA, 19 nt, Artificial Sequence
  Description of Artificial Sequence: Synthetic oligonucleotide
  Sense strand starting at position 2421 of SEQ ID NO: 1882784
gaggcaugcugagugacua

SEQ ID NO: 2147263 - RNA, 19 nt, Artificial Sequence
  Description of Artificial Sequence: Synthetic oligonucleotide
  Antisense strand to SEQ ID NO: 2147262
uagucacucagcaugccuc

SEQ ID NO: 2147264 - RNA, 19 nt, Artificial Sequence
  Description of Artificial Sequence: Synthetic oligonucleotide
  Sense strand starting at position 2422 of SEQ ID NO: 1882784
aggcaugcugagugacuaa

SEQ ID NO: 2147265 - RNA, 19 nt, Artificial Sequence
  Description of Artificial Sequence: Synthetic oligonucleotide
  Antisense strand to SEQ ID NO: 2147264
uuagucacucagcaugccu

SEQ ID NO: 2147266 - RNA, 19 nt, Artificial Sequence
  Description of Artificial Sequence: Synthetic oligonucleotide
  Sense strand starting at position 2465 of SEQ ID NO: 1882784
uuugauucuaagugaaagg

SEQ ID NO: 2147267 - RNA, 19 nt, Artificial Sequence
  Description of Artificial Sequence: Synthetic oligonucleotide
  Antisense strand to SEQ ID NO: 2147266
ccuuucacuuagaaucaaa

SEQ ID NO: 2147268 - RNA, 19 nt, Artificial Sequence
  Description of Artificial Sequence: Synthetic oligonucleotide
  Sense strand starting at position 2484 of SEQ ID NO: 1882784
cucuuucuggcauaaagua

SEQ ID NO: 2147269 - RNA, 19 nt, Artificial Sequence
  Description of Artificial Sequence: Synthetic oligonucleotide
  Antisense strand to SEQ ID NO: 2147268
uacuuuaugccagaaagag

SEQ ID NO: 2147270 - RNA, 19 nt, Artificial Sequence
  Description of Artificial Sequence: Synthetic oligonucleotide
  Sense strand starting at position 2499 of SEQ ID NO: 1882784
aguauugugacagguagga

SEQ ID NO: 2147271 - RNA, 19 nt, Artificial Sequence
  Description of Artificial Sequence: Synthetic oligonucleotide
  Antisense strand to SEQ ID NO: 2147270
uccuaccugucacaauacu

SEQ ID NO: 2147272 - RNA, 19 nt, Artificial Sequence
  Description of Artificial Sequence: Synthetic oligonucleotide
  Sense strand starting at position 2501 of SEQ ID NO: 1882784
uauugugacagguaggauu

SEQ ID NO: 2147273 - RNA, 19 nt, Artificial Sequence
  Description of Artificial Sequence: Synthetic oligonucleotide
  Antisense strand to SEQ ID NO: 2147272
aauccuaccugucacaaua

SEQ ID NO: 2147274 - RNA, 19 nt, Artificial Sequence
  Description of Artificial Sequence: Synthetic oligonucleotide
  Sense strand starting at position 2512 of SEQ ID NO: 1882784
guaggauucagcugggagu

SEQ ID NO: 2147275 - RNA, 19 nt, Artificial Sequence
  Description of Artificial Sequence: Synthetic oligonucleotide
  Antisense strand to SEQ ID NO: 2147274
acucccagcugaauccuac

SEQ ID NO: 2147276 - RNA, 19 nt, Artificial Sequence
  Description of Artificial Sequence: Synthetic oligonucleotide
  Sense strand starting at position 2652 of SEQ ID NO: 1882784
ucucaagcugauuguaaca

SEQ ID NO: 2147277 - RNA, 19 nt, Artificial Sequence
  Description of Artificial Sequence: Synthetic oligonucleotide
  Antisense strand to SEQ ID NO: 2147276
uguuacaaucagcuugaga

SEQ ID NO: 2147278 - RNA, 19 nt, Artificial Sequence
  Description of Artificial Sequence: Synthetic oligonucleotide
  Sense strand starting at position 2679 of SEQ ID NO: 1882784
accgauaguuauccaaaua

SEQ ID NO: 2147279 - RNA, 19 nt, Artificial Sequence
  Description of Artificial Sequence: Synthetic oligonucleotide
  Antisense strand to SEQ ID NO: 2147278
uauuuggauaacuaucggu

SEQ ID NO: 2147280 - RNA, 19 nt, Artificial Sequence
  Description of Artificial Sequence: Synthetic oligonucleotide
  Sense strand starting at position 3002 of SEQ ID NO: 1882784
ggaguauagguaugagcua

SEQ ID NO: 2147281 - RNA, 19 nt, Artificial Sequence
  Description of Artificial Sequence: Synthetic oligonucleotide
  Antisense strand to SEQ ID NO: 2147280
uagcucauaccuauacucc

SEQ ID NO: 2147282 - RNA, 19 nt, Artificial Sequence
  Description of Artificial Sequence: Synthetic oligonucleotide
  Sense strand starting at position 3096 of SEQ ID NO: 1882784
gacaaucuacuagguaaug

SEQ ID NO: 2147283 - RNA, 19 nt, Artificial Sequence
  Description of Artificial Sequence: Synthetic oligonucleotide
  Antisense strand to SEQ ID NO: 2147282
cauuaccuaguagauuguc

SEQ ID NO: 2147284 - RNA, 19 nt, Artificial Sequence
  Description of Artificial Sequence: Synthetic oligonucleotide
  Sense strand starting at position 3164 of SEQ ID NO: 1882784
cugauuggaucuuuguuua

SEQ ID NO: 2147285 - RNA, 19 nt, Artificial Sequence
  Description of Artificial Sequence: Synthetic oligonucleotide
  Antisense strand to SEQ ID NO: 2147284
uaaacaaagauccaaucag

SEQ ID NO: 2147286 - RNA, 19 nt, Artificial Sequence
  Description of Artificial Sequence: Synthetic oligonucleotide
  Sense strand starting at position 3188 of SEQ ID NO: 1882784
cuggaauaaugagaaauua

SEQ ID NO: 2147287 - RNA, 19 nt, Artificial Sequence
  Description of Artificial Sequence: Synthetic oligonucleotide
  Antisense strand to SEQ ID NO: 2147286
uaauuucucauuauuccag

SEQ ID NO: 2147288 - RNA, 19 nt, Artificial Sequence
  Description of Artificial Sequence: Synthetic oligonucleotide
  Sense strand starting at position 3274 of SEQ ID NO: 1882784
gaagaauauucuuaggaga

SEQ ID NO: 2147289 - RNA, 19 nt, Artificial Sequence
  Description of Artificial Sequence: Synthetic oligonucleotide
  Antisense strand to SEQ ID NO: 2147288
ucuccuaagaauauucuuc

SEQ ID NO: 2147290 - RNA, 19 nt, Artificial Sequence
  Description of Artificial Sequence: Synthetic oligonucleotide
  Sense strand starting at position 3285 of SEQ ID NO: 1882784
uuaggagauaagugcuaaa

SEQ ID NO: 2147291 - RNA, 19 nt, Artificial Sequence
  Description of Artificial Sequence: Synthetic oligonucleotide
  Antisense strand to SEQ ID NO: 2147290
uuuagcacuuaucuccuaa

SEQ ID NO: 2147292 - RNA, 19 nt, Artificial Sequence
  Description of Artificial Sequence: Synthetic oligonucleotide
  Sense strand starting at position 3312 of SEQ ID NO: 1882784
ggaugaagcaucuggaugu

SEQ ID NO: 2147293 - RNA, 19 nt, Artificial Sequence
  Description of Artificial Sequence: Synthetic oligonucleotide
  Antisense strand to SEQ ID NO: 2147292
acauccagaugcuucaucc

SEQ ID NO: 2147294 - RNA, 19 nt, Artificial Sequence
  Description of Artificial Sequence: Synthetic oligonucleotide
  Sense strand starting at position 3409 of SEQ ID NO: 1882784
cuaaguagaucacugguuu

SEQ ID NO: 2147295 - RNA, 19 nt, Artificial Sequence
  Description of Artificial Sequence: Synthetic oligonucleotide
  Antisense strand to SEQ ID NO: 2147294
aaaccagugaucuacuuag

SEQ ID NO: 2147296 - RNA, 19 nt, Artificial Sequence
  Description of Artificial Sequence: Synthetic oligonucleotide
  Sense strand starting at position 3552 of SEQ ID NO: 1882784
aguggaucacgugaguuca

SEQ ID NO: 2147297 - RNA, 19 nt, Artificial Sequence
  Description of Artificial Sequence: Synthetic oligonucleotide
  Antisense strand to SEQ ID NO: 2147296
ugaacucacgugauccacu

SEQ ID NO: 2147298 - RNA, 19 nt, Artificial Sequence
  Description of Artificial Sequence: Synthetic oligonucleotide
  Sense strand starting at position 3687 of SEQ ID NO: 1882784
cgagaauugcuuuaauccu

SEQ ID NO: 2147299 - RNA, 19 nt, Artificial Sequence
  Description of Artificial Sequence: Synthetic oligonucleotide
  Antisense strand to SEQ ID NO: 2147298
aggauuaaagcaauucucg

SEQ ID NO: 2147300 - RNA, 19 nt, Artificial Sequence
  Description of Artificial Sequence: Synthetic oligonucleotide
  Sense strand starting at position 3694 of SEQ ID NO: 1882784
ugcuuuaauccuggaagug

SEQ ID NO: 2147301 - RNA, 19 nt, Artificial Sequence
  Description of Artificial Sequence: Synthetic oligonucleotide
  Antisense strand to SEQ ID NO: 2147300
cacuuccaggauuaaagca

SEQ ID NO: 2147302 - RNA, 19 nt, Artificial Sequence
  Description of Artificial Sequence: Synthetic oligonucleotide
  Sense strand starting at position 3695 of SEQ ID NO: 1882784
gcuuuaauccuggaagugg

SEQ ID NO: 2147303 - RNA, 19 nt, Artificial Sequence
  Description of Artificial Sequence: Synthetic oligonucleotide
  Antisense strand to SEQ ID NO: 2147302
ccacuuccaggauuaaagc

SEQ ID NO: 2147304 - RNA, 19 nt, Artificial Sequence
  Description of Artificial Sequence: Synthetic oligonucleotide
  Sense strand starting at position 60 of SEQ ID NO: 1882785
gggugugucccuguuccga

SEQ ID NO: 2147305 - RNA, 19 nt, Artificial Sequence
  Description of Artificial Sequence: Synthetic oligonucleotide
  Antisense strand to SEQ ID NO: 2147304
ucggaacagggacacaccc

SEQ ID NO: 2147306 - RNA, 19 nt, Artificial Sequence
  Description of Artificial Sequence: Synthetic oligonucleotide
  Sense strand starting at position 175 of SEQ ID NO: 1882785
ugaugacggaaauguuauu

SEQ ID NO: 2147307 - RNA, 19 nt, Artificial Sequence
  Description of Artificial Sequence: Synthetic oligonucleotide
  Antisense strand to SEQ ID NO: 2147306
aauaacauuuccgucauca

SEQ ID NO: 2147308 - RNA, 19 nt, Artificial Sequence
  Description of Artificial Sequence: Synthetic oligonucleotide
  Sense strand starting at position 186 of SEQ ID NO: 1882785
auguuauuucugugccauc

SEQ ID NO: 2147309 - RNA, 19 nt, Artificial Sequence
  Description of Artificial Sequence: Synthetic oligonucleotide
  Antisense strand to SEQ ID NO: 2147308
gauggcacagaaauaacau

SEQ ID NO: 2147310 - RNA, 19 nt, Artificial Sequence
  Description of Artificial Sequence: Synthetic oligonucleotide
  Sense strand starting at position 919 of SEQ ID NO: 1882785
uaugaaguugccugaacuc

SEQ ID NO: 2147311 - RNA, 19 nt, Artificial Sequence
  Description of Artificial Sequence: Synthetic oligonucleotide
  Antisense strand to SEQ ID NO: 2147310
gaguucaggcaacuucaua

SEQ ID NO: 2147312 - RNA, 19 nt, Artificial Sequence
  Description of Artificial Sequence: Synthetic oligonucleotide
  Sense strand starting at position 1154 of SEQ ID NO: 1882785
ccggauguucugcauuaau

SEQ ID NO: 2147313 - RNA, 19 nt, Artificial Sequence
  Description of Artificial Sequence: Synthetic oligonucleotide
  Antisense strand to SEQ ID NO: 2147312
auuaaugcagaacauccgg

SEQ ID NO: 2147314 - RNA, 19 nt, Artificial Sequence
  Description of Artificial Sequence: Synthetic oligonucleotide
  Sense strand starting at position 1174 of SEQ ID NO: 1882785
uaucuaauccaagguagga

SEQ ID NO: 2147315 - RNA, 19 nt, Artificial Sequence
  Description of Artificial Sequence: Synthetic oligonucleotide
  Antisense strand to SEQ ID NO: 2147314
uccuaccuuggauuagaua

SEQ ID NO: 2147316 - RNA, 19 nt, Artificial Sequence
  Description of Artificial Sequence: Synthetic oligonucleotide
  Sense strand starting at position 1191 of SEQ ID NO: 1882785
gaaagugaaacgugggcua

SEQ ID NO: 2147317 - RNA, 19 nt, Artificial Sequence
  Description of Artificial Sequence: Synthetic oligonucleotide
  Antisense strand to SEQ ID NO: 2147316
uagcccacguuucacuuuc

SEQ ID NO: 2147318 - RNA, 19 nt, Artificial Sequence
  Description of Artificial Sequence: Synthetic oligonucleotide
  Sense strand starting at position 1194 of SEQ ID NO: 1882785
agugaaacgugggcuauga

SEQ ID NO: 2147319 - RNA, 19 nt, Artificial Sequence
  Description of Artificial Sequence: Synthetic oligonucleotide
  Antisense strand to SEQ ID NO: 2147318
ucauagcccacguuucacu

SEQ ID NO: 2147320 - RNA, 19 nt, Artificial Sequence
  Description of Artificial Sequence: Synthetic oligonucleotide
  Sense strand starting at position 1196 of SEQ ID NO: 1882785
ugaaacgugggcuaugaaa

SEQ ID NO: 2147321 - RNA, 19 nt, Artificial Sequence
  Description of Artificial Sequence: Synthetic oligonucleotide
  Antisense strand to SEQ ID NO: 2147320
uuucauagcccacguuuca

SEQ ID NO: 2147322 - RNA, 19 nt, Artificial Sequence
  Description of Artificial Sequence: Synthetic oligonucleotide
  Sense strand starting at position 1198 of SEQ ID NO: 1882785
aaacgugggcuaugaaaga

SEQ ID NO: 2147323 - RNA, 19 nt, Artificial Sequence
  Description of Artificial Sequence: Synthetic oligonucleotide
  Antisense strand to SEQ ID NO: 2147322
ucuuucauagcccacguuu

SEQ ID NO: 2147324 - RNA, 19 nt, Artificial Sequence
  Description of Artificial Sequence: Synthetic oligonucleotide
  Sense strand starting at position 1221 of SEQ ID NO: 1882785
agggaagucgggugauuca

SEQ ID NO: 2147325 - RNA, 19 nt, Artificial Sequence
  Description of Artificial Sequence: Synthetic oligonucleotide
  Antisense strand to SEQ ID NO: 2147324
ugaaucacccgacuucccu

SEQ ID NO: 2147326 - RNA, 19 nt, Artificial Sequence
  Description of Artificial Sequence: Synthetic oligonucleotide
  Sense strand starting at position 1304 of SEQ ID NO: 1882785
ggccguguuccagcuaaca

SEQ ID NO: 2147327 - RNA, 19 nt, Artificial Sequence
  Description of Artificial Sequence: Synthetic oligonucleotide
  Antisense strand to SEQ ID NO: 2147326
uguuagcuggaacacggcc

SEQ ID NO: 2147328 - RNA, 19 nt, Artificial Sequence
  Description of Artificial Sequence: Synthetic oligonucleotide
  Sense strand starting at position 1334 of SEQ ID NO: 1882785
uugcuuugacucugaacca

SEQ ID NO: 2147329 - RNA, 19 nt, Artificial Sequence
  Description of Artificial Sequence: Synthetic oligonucleotide
  Antisense strand to SEQ ID NO: 2147328
ugguucagagucaaagcaa

SEQ ID NO: 2147330 - RNA, 19 nt, Artificial Sequence
  Description of Artificial Sequence: Synthetic oligonucleotide
  Sense strand starting at position 1649 of SEQ ID NO: 1882785
ggagacauccucuggucca

SEQ ID NO: 2147331 - RNA, 19 nt, Artificial Sequence
  Description of Artificial Sequence: Synthetic oligonucleotide
  Antisense strand to SEQ ID NO: 2147330
uggaccagaggaugucucc

SEQ ID NO: 2147332 - RNA, 19 nt, Artificial Sequence
  Description of Artificial Sequence: Synthetic oligonucleotide
  Sense strand starting at position 1652 of SEQ ID NO: 1882785
gacauccucugguccagaa

SEQ ID NO: 2147333 - RNA, 19 nt, Artificial Sequence
  Description of Artificial Sequence: Synthetic oligonucleotide
  Antisense strand to SEQ ID NO: 2147332
uucuggaccagaggauguc

SEQ ID NO: 2147334 - RNA, 19 nt, Artificial Sequence
  Description of Artificial Sequence: Synthetic oligonucleotide
  Sense strand starting at position 1656 of SEQ ID NO: 1882785
uccucugguccagaauuga

SEQ ID NO: 2147335 - RNA, 19 nt, Artificial Sequence
  Description of Artificial Sequence: Synthetic oligonucleotide
  Antisense strand to SEQ ID NO: 2147334
ucaauucuggaccagagga

SEQ ID NO: 2147336 - RNA, 19 nt, Artificial Sequence
  Description of Artificial Sequence: Synthetic oligonucleotide
  Sense strand starting at position 1667 of SEQ ID NO: 1882785
agaauugauuccucuucug

SEQ ID NO: 2147337 - RNA, 19 nt, Artificial Sequence
  Description of Artificial Sequence: Synthetic oligonucleotide
  Antisense strand to SEQ ID NO: 2147336
cagaagaggaaucaauucu

SEQ ID NO: 2147338 - RNA, 19 nt, Artificial Sequence
  Description of Artificial Sequence: Synthetic oligonucleotide
  Sense strand starting at position 1748 of SEQ ID NO: 1882785
cugggagucuucuucccaa

SEQ ID NO: 2147339 - RNA, 19 nt, Artificial Sequence
  Description of Artificial Sequence: Synthetic oligonucleotide
  Antisense strand to SEQ ID NO: 2147338
uugggaagaagacucccag

SEQ ID NO: 2147340 - RNA, 19 nt, Artificial Sequence
  Description of Artificial Sequence: Synthetic oligonucleotide
  Sense strand starting at position 1807 of SEQ ID NO: 1882785
gugaaauccucuuccuaga

SEQ ID NO: 2147341 - RNA, 19 nt, Artificial Sequence
  Description of Artificial Sequence: Synthetic oligonucleotide
  Antisense strand to SEQ ID NO: 2147340
ucuaggaagaggauuucac

SEQ ID NO: 2147342 - RNA, 19 nt, Artificial Sequence
  Description of Artificial Sequence: Synthetic oligonucleotide
  Sense strand starting at position 1929 of SEQ ID NO: 1882785
ugucaaacucuguacuuga

SEQ ID NO: 2147343 - RNA, 19 nt, Artificial Sequence
  Description of Artificial Sequence: Synthetic oligonucleotide
  Antisense strand to SEQ ID NO: 2147342
ucaaguacagaguuugaca

SEQ ID NO: 2147344 - RNA, 19 nt, Artificial Sequence
  Description of Artificial Sequence: Synthetic oligonucleotide
  Sense strand starting at position 2016 of SEQ ID NO: 1882785
uuuagaaaucacgagagcu

SEQ ID NO: 2147345 - RNA, 19 nt, Artificial Sequence
  Description of Artificial Sequence: Synthetic oligonucleotide
  Antisense strand to SEQ ID NO: 2147344
agcucucgugauuucuaaa

SEQ ID NO: 2147346 - RNA, 19 nt, Artificial Sequence
  Description of Artificial Sequence: Synthetic oligonucleotide
  Sense strand starting at position 2018 of SEQ ID NO: 1882785
uagaaaucacgagagcucu

SEQ ID NO: 2147347 - RNA, 19 nt, Artificial Sequence
  Description of Artificial Sequence: Synthetic oligonucleotide
  Antisense strand to SEQ ID NO: 2147346
agagcucucgugauuucua

SEQ ID NO: 2147348 - RNA, 19 nt, Artificial Sequence
  Description of Artificial Sequence: Synthetic oligonucleotide
  Sense strand starting at position 2073 of SEQ ID NO: 1882785
gcgagaugugcucacagac

SEQ ID NO: 2147349 - RNA, 19 nt, Artificial Sequence
  Description of Artificial Sequence: Synthetic oligonucleotide
  Antisense strand to SEQ ID NO: 2147348
gucugugagcacaucucgc

SEQ ID NO: 2147350 - RNA, 19 nt, Artificial Sequence
  Description of Artificial Sequence: Synthetic oligonucleotide
  Sense strand starting at position 2120 of SEQ ID NO: 1882785
cugagaaccuaggcagaau

SEQ ID NO: 2147351 - RNA, 19 nt, Artificial Sequence
  Description of Artificial Sequence: Synthetic oligonucleotide
  Antisense strand to SEQ ID NO: 2147350
auucugccuagguucucag

SEQ ID NO: 2147352 - RNA, 19 nt, Artificial Sequence
  Description of Artificial Sequence: Synthetic oligonucleotide
  Sense strand starting at position 2152 of SEQ ID NO: 1882785
uauagaggauuugauguuu

SEQ ID NO: 2147353 - RNA, 19 nt, Artificial Sequence
  Description of Artificial Sequence: Synthetic oligonucleotide
  Antisense strand to SEQ ID NO: 2147352
aaacaucaaauccucuaua

SEQ ID NO: 2147354 - RNA, 19 nt, Artificial Sequence
  Description of Artificial Sequence: Synthetic oligonucleotide
  Sense strand starting at position 2165 of SEQ ID NO: 1882785
auguuuaacucaucaugga

SEQ ID NO: 2147355 - RNA, 19 nt, Artificial Sequence
  Description of Artificial Sequence: Synthetic oligonucleotide
  Antisense strand to SEQ ID NO: 2147354
uccaugaugaguuaaacau

SEQ ID NO: 2147356 - RNA, 19 nt, Artificial Sequence
  Description of Artificial Sequence: Synthetic oligonucleotide
  Sense strand starting at position 2190 of SEQ ID NO: 1882785
ccugaucucucccuggaga

SEQ ID NO: 2147357 - RNA, 19 nt, Artificial Sequence
  Description of Artificial Sequence: Synthetic oligonucleotide
  Antisense strand to SEQ ID NO: 2147356
ucuccagggagagaucagg

SEQ ID NO: 2147358 - RNA, 19 nt, Artificial Sequence
  Description of Artificial Sequence: Synthetic oligonucleotide
  Sense strand starting at position 2192 of SEQ ID NO: 1882785
ugaucucucccuggagaaa

SEQ ID NO: 2147359 - RNA, 19 nt, Artificial Sequence
  Description of Artificial Sequence: Synthetic oligonucleotide
  Antisense strand to SEQ ID NO: 2147358
uuucuccagggagagauca

SEQ ID NO: 2147360 - RNA, 19 nt, Artificial Sequence
  Description of Artificial Sequence: Synthetic oligonucleotide
  Sense strand starting at position 2251 of SEQ ID NO: 1882785
caugauguuggagggauca

SEQ ID NO: 2147361 - RNA, 19 nt, Artificial Sequence
  Description of Artificial Sequence: Synthetic oligonucleotide
  Antisense strand to SEQ ID NO: 2147360
ugaucccuccaacaucaug

SEQ ID NO: 2147362 - RNA, 19 nt, Artificial Sequence
  Description of Artificial Sequence: Synthetic oligonucleotide
  Sense strand starting at position 2318 of SEQ ID NO: 1882785
gacgguucuucccuuggga

SEQ ID NO: 2147363 - RNA, 19 nt, Artificial Sequence
  Description of Artificial Sequence: Synthetic oligonucleotide
  Antisense strand to SEQ ID NO: 2147362
ucccaagggaagaaccguc

SEQ ID NO: 2147364 - RNA, 19 nt, Artificial Sequence
  Description of Artificial Sequence: Synthetic oligonucleotide
  Sense strand starting at position 2321 of SEQ ID NO: 1882785
gguucuucccuugggaaua

SEQ ID NO: 2147365 - RNA, 19 nt, Artificial Sequence
  Description of Artificial Sequence: Synthetic oligonucleotide
  Antisense strand to SEQ ID NO: 2147364
uauucccaagggaagaacc

SEQ ID NO: 2147366 - RNA, 19 nt, Artificial Sequence
  Description of Artificial Sequence: Synthetic oligonucleotide
  Sense strand starting at position 2397 of SEQ ID NO: 1882785
guggguaucccuuaaacag

SEQ ID NO: 2147367 - RNA, 19 nt, Artificial Sequence
  Description of Artificial Sequence: Synthetic oligonucleotide
  Antisense strand to SEQ ID NO: 2147366
cuguuuaagggauacccac

SEQ ID NO: 2147368 - RNA, 19 nt, Artificial Sequence
  Description of Artificial Sequence: Synthetic oligonucleotide
  Sense strand starting at position 2968 of SEQ ID NO: 1882785
cucugacaucuggguggua

SEQ ID NO: 2147369 - RNA, 19 nt, Artificial Sequence
  Description of Artificial Sequence: Synthetic oligonucleotide
  Antisense strand to SEQ ID NO: 2147368
uaccacccagaugucagag

SEQ ID NO: 2147370 - RNA, 19 nt, Artificial Sequence
  Description of Artificial Sequence: Synthetic oligonucleotide
  Sense strand starting at position 3081 of SEQ ID NO: 1882785
gagagccacugagcuuaua

SEQ ID NO: 2147371 - RNA, 19 nt, Artificial Sequence
  Description of Artificial Sequence: Synthetic oligonucleotide
  Antisense strand to SEQ ID NO: 2147370
uauaagcucaguggcucuc

SEQ ID NO: 2147372 - RNA, 19 nt, Artificial Sequence
  Description of Artificial Sequence: Synthetic oligonucleotide
  Sense strand starting at position 3368 of SEQ ID NO: 1882785
uucgucauccugcaaauuu

SEQ ID NO: 2147373 - RNA, 19 nt, Artificial Sequence
  Description of Artificial Sequence: Synthetic oligonucleotide
  Antisense strand to SEQ ID NO: 2147372
aaauuugcaggaugacgaa

SEQ ID NO: 2147374 - RNA, 19 nt, Artificial Sequence
  Description of Artificial Sequence: Synthetic oligonucleotide
  Sense strand starting at position 3497 of SEQ ID NO: 1882785
aucugaggcauauagaguu

SEQ ID NO: 2147375 - RNA, 19 nt, Artificial Sequence
  Description of Artificial Sequence: Synthetic oligonucleotide
  Antisense strand to SEQ ID NO: 2147374
aacucuauaugccucagau

SEQ ID NO: 2147376 - RNA, 19 nt, Artificial Sequence
  Description of Artificial Sequence: Synthetic oligonucleotide
  Sense strand starting at position 3530 of SEQ ID NO: 1882785
gugugaauagguuaccuau

SEQ ID NO: 2147377 - RNA, 19 nt, Artificial Sequence
  Description of Artificial Sequence: Synthetic oligonucleotide
  Antisense strand to SEQ ID NO: 2147376
auagguaaccuauucacac

SEQ ID NO: 2147378 - RNA, 19 nt, Artificial Sequence
  Description of Artificial Sequence: Synthetic oligonucleotide
  Sense strand starting at position 3532 of SEQ ID NO: 1882785
gugaauagguuaccuauua

SEQ ID NO: 2147379 - RNA, 19 nt, Artificial Sequence
  Description of Artificial Sequence: Synthetic oligonucleotide
  Antisense strand to SEQ ID NO: 2147378
uaauagguaaccuauucac

SEQ ID NO: 2147380 - RNA, 19 nt, Artificial Sequence
  Description of Artificial Sequence: Synthetic oligonucleotide
  Sense strand starting at position 3588 of SEQ ID NO: 1882785
aggagggugcgaugguuaa

SEQ ID NO: 2147381 - RNA, 19 nt, Artificial Sequence
  Description of Artificial Sequence: Synthetic oligonucleotide
  Antisense strand to SEQ ID NO: 2147380
uuaaccaucgcacccuccu

SEQ ID NO: 2147382 - RNA, 19 nt, Artificial Sequence
  Description of Artificial Sequence: Synthetic oligonucleotide
  Sense strand starting at position 3592 of SEQ ID NO: 1882785
gggugcgaugguuaauacu

SEQ ID NO: 2147383 - RNA, 19 nt, Artificial Sequence
  Description of Artificial Sequence: Synthetic oligonucleotide
  Antisense strand to SEQ ID NO: 2147382
aguauuaaccaucgcaccc

SEQ ID NO: 2147384 - RNA, 19 nt, Artificial Sequence
  Description of Artificial Sequence: Synthetic oligonucleotide
  Sense strand starting at position 82 of SEQ ID NO: 1882786
guuugaaaucgugauauuc

SEQ ID NO: 2147385 - RNA, 19 nt, Artificial Sequence
  Description of Artificial Sequence: Synthetic oligonucleotide
  Antisense strand to SEQ ID NO: 2147384
gaauaucacgauuucaaac

SEQ ID NO: 2147386 - RNA, 19 nt, Artificial Sequence
  Description of Artificial Sequence: Synthetic oligonucleotide
  Sense strand starting at position 91 of SEQ ID NO: 1882786
cgugauauucuggagugau

SEQ ID NO: 2147387 - RNA, 19 nt, Artificial Sequence
  Description of Artificial Sequence: Synthetic oligonucleotide
  Antisense strand to SEQ ID NO: 2147386
aucacuccagaauaucacg

SEQ ID NO: 2147388 - RNA, 19 nt, Artificial Sequence
  Description of Artificial Sequence: Synthetic oligonucleotide
  Sense strand starting at position 94 of SEQ ID NO: 1882786
gauauucuggagugauaug

SEQ ID NO: 2147389 - RNA, 19 nt, Artificial Sequence
  Description of Artificial Sequence: Synthetic oligonucleotide
  Antisense strand to SEQ ID NO: 2147388
cauaucacuccagaauauc

SEQ ID NO: 2147390 - RNA, 19 nt, Artificial Sequence
  Description of Artificial Sequence: Synthetic oligonucleotide
  Sense strand starting at position 553 of SEQ ID NO: 1882786
gcugaagugguauaaacuu

SEQ ID NO: 2147391 - RNA, 19 nt, Artificial Sequence
  Description of Artificial Sequence: Synthetic oligonucleotide
  Antisense strand to SEQ ID NO: 2147390
aaguuuauaccacuucagc

SEQ ID NO: 2147392 - RNA, 19 nt, Artificial Sequence
  Description of Artificial Sequence: Synthetic oligonucleotide
  Sense strand starting at position 621 of SEQ ID NO: 1882786
acaugcauuggguauguca

SEQ ID NO: 2147393 - RNA, 19 nt, Artificial Sequence
  Description of Artificial Sequence: Synthetic oligonucleotide
  Antisense strand to SEQ ID NO: 2147392
ugacauacccaaugcaugu

SEQ ID NO: 2147394 - RNA, 19 nt, Artificial Sequence
  Description of Artificial Sequence: Synthetic oligonucleotide
  Sense strand starting at position 628 of SEQ ID NO: 1882786
uuggguaugucauccacaa

SEQ ID NO: 2147395 - RNA, 19 nt, Artificial Sequence
  Description of Artificial Sequence: Synthetic oligonucleotide
  Antisense strand to SEQ ID NO: 2147394
uuguggaugacauacccaa

SEQ ID NO: 2147396 - RNA, 19 nt, Artificial Sequence
  Description of Artificial Sequence: Synthetic oligonucleotide
  Sense strand starting at position 632 of SEQ ID NO: 1882786
guaugucauccacaaggac

SEQ ID NO: 2147397 - RNA, 19 nt, Artificial Sequence
  Description of Artificial Sequence: Synthetic oligonucleotide
  Antisense strand to SEQ ID NO: 2147396
guccuuguggaugacauac

SEQ ID NO: 2147398 - RNA, 19 nt, Artificial Sequence
  Description of Artificial Sequence: Synthetic oligonucleotide
  Sense strand starting at position 728 of SEQ ID NO: 1882786
aggucuguccaugaauggu

SEQ ID NO: 2147399 - RNA, 19 nt, Artificial Sequence
  Description of Artificial Sequence: Synthetic oligonucleotide
  Antisense strand to SEQ ID NO: 2147398
accauucauggacagaccu

SEQ ID NO: 2147400 - RNA, 19 nt, Artificial Sequence
  Description of Artificial Sequence: Synthetic oligonucleotide
  Sense strand starting at position 765 of SEQ ID NO: 1882786
ccugcuuugggugaaacaa

SEQ ID NO: 2147401 - RNA, 19 nt, Artificial Sequence
  Description of Artificial Sequence: Synthetic oligonucleotide
  Antisense strand to SEQ ID NO: 2147400
uuguuucacccaaagcagg

SEQ ID NO: 2147402 - RNA, 19 nt, Artificial Sequence
  Description of Artificial Sequence: Synthetic oligonucleotide
  Sense strand starting at position 866 of SEQ ID NO: 1882786
acugaagaaucccuguauu

SEQ ID NO: 2147403 - RNA, 19 nt, Artificial Sequence
  Description of Artificial Sequence: Synthetic oligonucleotide
  Antisense strand to SEQ ID NO: 2147402
aauacagggauucuucagu

SEQ ID NO: 2147404 - RNA, 19 nt, Artificial Sequence
  Description of Artificial Sequence: Synthetic oligonucleotide
  Sense strand starting at position 876 of SEQ ID NO: 1882786
cccuguauuugagcagugu

SEQ ID NO: 2147405 - RNA, 19 nt, Artificial Sequence
  Description of Artificial Sequence: Synthetic oligonucleotide
  Antisense strand to SEQ ID NO: 2147404
acacugcucaaauacaggg

SEQ ID NO: 2147406 - RNA, 19 nt, Artificial Sequence
  Description of Artificial Sequence: Synthetic oligonucleotide
  Sense strand starting at position 882 of SEQ ID NO: 1882786
auuugagcagugugcagau

SEQ ID NO: 2147407 - RNA, 19 nt, Artificial Sequence
  Description of Artificial Sequence: Synthetic oligonucleotide
  Antisense strand to SEQ ID NO: 2147406
aucugcacacugcucaaau

SEQ ID NO: 2147408 - RNA, 19 nt, Artificial Sequence
  Description of Artificial Sequence: Synthetic oligonucleotide
  Sense strand starting at position 1060 of SEQ ID NO: 1882786
uggucauagcaagagaugu

SEQ ID NO: 2147409 - RNA, 19 nt, Artificial Sequence
  Description of Artificial Sequence: Synthetic oligonucleotide
  Antisense strand to SEQ ID NO: 2147408
acaucucuugcuaugacca

SEQ ID NO: 2147410 - RNA, 19 nt, Artificial Sequence
  Description of Artificial Sequence: Synthetic oligonucleotide
  Sense strand starting at position 1070 of SEQ ID NO: 1882786
aagagaugucaagguguca

SEQ ID NO: 2147411 - RNA, 19 nt, Artificial Sequence
  Description of Artificial Sequence: Synthetic oligonucleotide
  Antisense strand to SEQ ID NO: 2147410
ugacaccuugacaucucuu

SEQ ID NO: 2147412 - RNA, 19 nt, Artificial Sequence
  Description of Artificial Sequence: Synthetic oligonucleotide
  Sense strand starting at position 1300 of SEQ ID NO: 1882786
uggugaugucaggagcaag

SEQ ID NO: 2147413 - RNA, 19 nt, Artificial Sequence
  Description of Artificial Sequence: Synthetic oligonucleotide
  Antisense strand to SEQ ID NO: 2147412
cuugcuccugacaucacca

SEQ ID NO: 2147414 - RNA, 19 nt, Artificial Sequence
  Description of Artificial Sequence: Synthetic oligonucleotide
  Sense strand starting at position 1461 of SEQ ID NO: 1882786
cuuuccaugugagcaaaga

SEQ ID NO: 2147415 - RNA, 19 nt, Artificial Sequence
  Description of Artificial Sequence: Synthetic oligonucleotide
  Antisense strand to SEQ ID NO: 2147414
ucuuugcucacauggaaag

SEQ ID NO: 2147416 - RNA, 19 nt, Artificial Sequence
  Description of Artificial Sequence: Synthetic oligonucleotide
  Sense strand starting at position 1462 of SEQ ID NO: 1882786
uuuccaugugagcaaagaa

SEQ ID NO: 2147417 - RNA, 19 nt, Artificial Sequence
  Description of Artificial Sequence: Synthetic oligonucleotide
  Antisense strand to SEQ ID NO: 2147416
uucuuugcucacauggaaa

SEQ ID NO: 2147418 - RNA, 19 nt, Artificial Sequence
  Description of Artificial Sequence: Synthetic oligonucleotide
  Sense strand starting at position 1609 of SEQ ID NO: 1882786
ucccuuaugauuggcagga

SEQ ID NO: 2147419 - RNA, 19 nt, Artificial Sequence
  Description of Artificial Sequence: Synthetic oligonucleotide
  Antisense strand to SEQ ID NO: 2147418
uccugccaaucauaaggga

SEQ ID NO: 2147420 - RNA, 19 nt, Artificial Sequence
  Description of Artificial Sequence: Synthetic oligonucleotide
  Sense strand starting at position 1850 of SEQ ID NO: 1882786
agagaaaguuuauuaaggu

SEQ ID NO: 2147421 - RNA, 19 nt, Artificial Sequence
  Description of Artificial Sequence: Synthetic oligonucleotide
  Antisense strand to SEQ ID NO: 2147420
accuuaauaaacuuucucu

SEQ ID NO: 2147422 - RNA, 19 nt, Artificial Sequence
  Description of Artificial Sequence: Synthetic oligonucleotide
  Sense strand starting at position 1856 of SEQ ID NO: 1882786
aguuuauuaaggugggaaa

SEQ ID NO: 2147423 - RNA, 19 nt, Artificial Sequence
  Description of Artificial Sequence: Synthetic oligonucleotide
  Antisense strand to SEQ ID NO: 2147422
uuucccaccuuaauaaacu

SEQ ID NO: 2147424 - RNA, 19 nt, Artificial Sequence
  Description of Artificial Sequence: Synthetic oligonucleotide
  Sense strand starting at position 1857 of SEQ ID NO: 1882786
guuuauuaaggugggaaac

SEQ ID NO: 2147425 - RNA, 19 nt, Artificial Sequence
  Description of Artificial Sequence: Synthetic oligonucleotide
  Antisense strand to SEQ ID NO: 2147424
guuucccaccuuaauaaac

SEQ ID NO: 2147426 - RNA, 19 nt, Artificial Sequence
  Description of Artificial Sequence: Synthetic oligonucleotide
  Sense strand starting at position 2024 of SEQ ID NO: 1882786
uggaguaaacauggacuuu

SEQ ID NO: 2147427 - RNA, 19 nt, Artificial Sequence
  Description of Artificial Sequence: Synthetic oligonucleotide
  Antisense strand to SEQ ID NO: 2147426
aaaguccauguuuacucca

SEQ ID NO: 2147428 - RNA, 19 nt, Artificial Sequence
  Description of Artificial Sequence: Synthetic oligonucleotide
  Sense strand starting at position 2082 of SEQ ID NO: 1882786
ggugauauagcuuagaugu

SEQ ID NO: 2147429 - RNA, 19 nt, Artificial Sequence
  Description of Artificial Sequence: Synthetic oligonucleotide
  Antisense strand to SEQ ID NO: 2147428
acaucuaagcuauaucacc

SEQ ID NO: 2147430 - RNA, 19 nt, Artificial Sequence
  Description of Artificial Sequence: Synthetic oligonucleotide
  Sense strand starting at position 2176 of SEQ ID NO: 1882786
cccuuuguggugagugagu

SEQ ID NO: 2147431 - RNA, 19 nt, Artificial Sequence
  Description of Artificial Sequence: Synthetic oligonucleotide
  Antisense strand to SEQ ID NO: 2147430
acucacucaccacaaaggg

SEQ ID NO: 2147432 - RNA, 19 nt, Artificial Sequence
  Description of Artificial Sequence: Synthetic oligonucleotide
  Sense strand starting at position 2519 of SEQ ID NO: 1882786
gaaugagaaugacauagga

SEQ ID NO: 2147433 - RNA, 19 nt, Artificial Sequence
  Description of Artificial Sequence: Synthetic oligonucleotide
  Antisense strand to SEQ ID NO: 2147432
uccuaugucauucucauuc

SEQ ID NO: 2147434 - RNA, 19 nt, Artificial Sequence
  Description of Artificial Sequence: Synthetic oligonucleotide
  Sense strand starting at position 2590 of SEQ ID NO: 1882786
agauuauuccugugaucca

SEQ ID NO: 2147435 - RNA, 19 nt, Artificial Sequence
  Description of Artificial Sequence: Synthetic oligonucleotide
  Antisense strand to SEQ ID NO: 2147434
uggaucacaggaauaaucu

SEQ ID NO: 2147436 - RNA, 19 nt, Artificial Sequence
  Description of Artificial Sequence: Synthetic oligonucleotide
  Sense strand starting at position 2603 of SEQ ID NO: 1882786
gauccauuggcugagaguu

SEQ ID NO: 2147437 - RNA, 19 nt, Artificial Sequence
  Description of Artificial Sequence: Synthetic oligonucleotide
  Antisense strand to SEQ ID NO: 2147436
aacucucagccaauggauc

SEQ ID NO: 2147438 - RNA, 19 nt, Artificial Sequence
  Description of Artificial Sequence: Synthetic oligonucleotide
  Sense strand starting at position 2729 of SEQ ID NO: 1882786
cagacagaaugguucuaac

SEQ ID NO: 2147439 - RNA, 19 nt, Artificial Sequence
  Description of Artificial Sequence: Synthetic oligonucleotide
  Antisense strand to SEQ ID NO: 2147438
guuagaaccauucugucug

SEQ ID NO: 2147440 - RNA, 19 nt, Artificial Sequence
  Description of Artificial Sequence: Synthetic oligonucleotide
  Sense strand starting at position 2780 of SEQ ID NO: 1882786
uuauccucagacugguaaa

SEQ ID NO: 2147441 - RNA, 19 nt, Artificial Sequence
  Description of Artificial Sequence: Synthetic oligonucleotide
  Antisense strand to SEQ ID NO: 2147440
uuuaccagucugaggauaa

SEQ ID NO: 2147442 - RNA, 19 nt, Artificial Sequence
  Description of Artificial Sequence: Synthetic oligonucleotide
  Sense strand starting at position 2797 of SEQ ID NO: 1882786
aagagauagcuacaguagu

SEQ ID NO: 2147443 - RNA, 19 nt, Artificial Sequence
  Description of Artificial Sequence: Synthetic oligonucleotide
  Antisense strand to SEQ ID NO: 2147442
acuacuguagcuaucucuu

SEQ ID NO: 2147444 - RNA, 19 nt, Artificial Sequence
  Description of Artificial Sequence: Synthetic oligonucleotide
  Sense strand starting at position 2879 of SEQ ID NO: 1882786
cucucuuaagagugaauaa

SEQ ID NO: 2147445 - RNA, 19 nt, Artificial Sequence
  Description of Artificial Sequence: Synthetic oligonucleotide
  Antisense strand to SEQ ID NO: 2147444
uuauucacucuuaagagag

SEQ ID NO: 2147446 - RNA, 19 nt, Artificial Sequence
  Description of Artificial Sequence: Synthetic oligonucleotide
  Sense strand starting at position 2904 of SEQ ID NO: 1882786
cccagaauuccuuggcaga

SEQ ID NO: 2147447 - RNA, 19 nt, Artificial Sequence
  Description of Artificial Sequence: Synthetic oligonucleotide
  Antisense strand to SEQ ID NO: 2147446
ucugccaaggaauucuggg

SEQ ID NO: 2147448 - RNA, 19 nt, Artificial Sequence
  Description of Artificial Sequence: Synthetic oligonucleotide
  Sense strand starting at position 2905 of SEQ ID NO: 1882786
ccagaauuccuuggcagac

SEQ ID NO: 2147449 - RNA, 19 nt, Artificial Sequence
  Description of Artificial Sequence: Synthetic oligonucleotide
  Antisense strand to SEQ ID NO: 2147448
gucugccaaggaauucugg

SEQ ID NO: 2147450 - RNA, 19 nt, Artificial Sequence
  Description of Artificial Sequence: Synthetic oligonucleotide
  Sense strand starting at position 2915 of SEQ ID NO: 1882786
uuggcagacuuccucaaau

SEQ ID NO: 2147451 - RNA, 19 nt, Artificial Sequence
  Description of Artificial Sequence: Synthetic oligonucleotide
  Antisense strand to SEQ ID NO: 2147450
auuugaggaagucugccaa

SEQ ID NO: 2147452 - RNA, 19 nt, Artificial Sequence
  Description of Artificial Sequence: Synthetic oligonucleotide
  Sense strand starting at position 2917 of SEQ ID NO: 1882786
ggcagacuuccucaaauug

SEQ ID NO: 2147453 - RNA, 19 nt, Artificial Sequence
  Description of Artificial Sequence: Synthetic oligonucleotide
  Antisense strand to SEQ ID NO: 2147452
caauuugaggaagucugcc

SEQ ID NO: 2147454 - RNA, 19 nt, Artificial Sequence
  Description of Artificial Sequence: Synthetic oligonucleotide
  Sense strand starting at position 2976 of SEQ ID NO: 1882786
ggauaauuaucauugccuu

SEQ ID NO: 2147455 - RNA, 19 nt, Artificial Sequence
  Description of Artificial Sequence: Synthetic oligonucleotide
  Antisense strand to SEQ ID NO: 2147454
aaggcaaugauaauuaucc

SEQ ID NO: 2147456 - RNA, 19 nt, Artificial Sequence
  Description of Artificial Sequence: Synthetic oligonucleotide
  Sense strand starting at position 3043 of SEQ ID NO: 1882786
auagcuauucuccaauggu

SEQ ID NO: 2147457 - RNA, 19 nt, Artificial Sequence
  Description of Artificial Sequence: Synthetic oligonucleotide
  Antisense strand to SEQ ID NO: 2147456
accauuggagaauagcuau

SEQ ID NO: 2147458 - RNA, 19 nt, Artificial Sequence
  Description of Artificial Sequence: Synthetic oligonucleotide
  Sense strand starting at position 3064 of SEQ ID NO: 1882786
aagaguaugcuggauguua

SEQ ID NO: 2147459 - RNA, 19 nt, Artificial Sequence
  Description of Artificial Sequence: Synthetic oligonucleotide
  Antisense strand to SEQ ID NO: 2147458
uaacauccagcauacucuu

SEQ ID NO: 2147460 - RNA, 19 nt, Artificial Sequence
  Description of Artificial Sequence: Synthetic oligonucleotide
  Sense strand starting at position 3250 of SEQ ID NO: 1882786
uggaacugauugguucuua

SEQ ID NO: 2147461 - RNA, 19 nt, Artificial Sequence
  Description of Artificial Sequence: Synthetic oligonucleotide
  Antisense strand to SEQ ID NO: 2147460
uaagaaccaaucaguucca

SEQ ID NO: 2147462 - RNA, 19 nt, Artificial Sequence
  Description of Artificial Sequence: Synthetic oligonucleotide
  Sense strand starting at position 3642 of SEQ ID NO: 1882786
guucucauuccauggacaa

SEQ ID NO: 2147463 - RNA, 19 nt, Artificial Sequence
  Description of Artificial Sequence: Synthetic oligonucleotide
  Antisense strand to SEQ ID NO: 2147462
uuguccauggaaugagaac

SEQ ID NO: 2147464 - RNA, 19 nt, Artificial Sequence
  Description of Artificial Sequence: Synthetic oligonucleotide
  Sense strand starting at position 246 of SEQ ID NO: 1882787
gacaguuacugugugguaa

SEQ ID NO: 2147465 - RNA, 19 nt, Artificial Sequence
  Description of Artificial Sequence: Synthetic oligonucleotide
  Antisense strand to SEQ ID NO: 2147464
uuaccacacaguaacuguc

SEQ ID NO: 2147466 - RNA, 19 nt, Artificial Sequence
  Description of Artificial Sequence: Synthetic oligonucleotide
  Sense strand starting at position 247 of SEQ ID NO: 1882787
acaguuacugugugguaau

SEQ ID NO: 2147467 - RNA, 19 nt, Artificial Sequence
  Description of Artificial Sequence: Synthetic oligonucleotide
  Antisense strand to SEQ ID NO: 2147466
auuaccacacaguaacugu

SEQ ID NO: 2147468 - RNA, 19 nt, Artificial Sequence
  Description of Artificial Sequence: Synthetic oligonucleotide
  Sense strand starting at position 248 of SEQ ID NO: 1882787
caguuacugugugguaauu

SEQ ID NO: 2147469 - RNA, 19 nt, Artificial Sequence
  Description of Artificial Sequence: Synthetic oligonucleotide
  Antisense strand to SEQ ID NO: 2147468
aauuaccacacaguaacug

SEQ ID NO: 2147470 - RNA, 19 nt, Artificial Sequence
  Description of Artificial Sequence: Synthetic oligonucleotide
  Sense strand starting at position 250 of SEQ ID NO: 1882787
guuacugugugguaauuug

SEQ ID NO: 2147471 - RNA, 19 nt, Artificial Sequence
  Description of Artificial Sequence: Synthetic oligonucleotide
  Antisense strand to SEQ ID NO: 2147470
caaauuaccacacaguaac

SEQ ID NO: 2147472 - RNA, 19 nt, Artificial Sequence
  Description of Artificial Sequence: Synthetic oligonucleotide
  Sense strand starting at position 279 of SEQ ID NO: 1882787
cacggaaacuaguauugua

SEQ ID NO: 2147473 - RNA, 19 nt, Artificial Sequence
  Description of Artificial Sequence: Synthetic oligonucleotide
  Antisense strand to SEQ ID NO: 2147472
uacaauacuaguuuccgug

SEQ ID NO: 2147474 - RNA, 19 nt, Artificial Sequence
  Description of Artificial Sequence: Synthetic oligonucleotide
  Sense strand starting at position 662 of SEQ ID NO: 1882787
guuggaaucccucacuacu

SEQ ID NO: 2147475 - RNA, 19 nt, Artificial Sequence
  Description of Artificial Sequence: Synthetic oligonucleotide
  Antisense strand to SEQ ID NO: 2147474
aguagugagggauuccaac

SEQ ID NO: 2147476 - RNA, 19 nt, Artificial Sequence
  Description of Artificial Sequence: Synthetic oligonucleotide
  Sense strand starting at position 705 of SEQ ID NO: 1882787
ccaaucucagcuugauaug

SEQ ID NO: 2147477 - RNA, 19 nt, Artificial Sequence
  Description of Artificial Sequence: Synthetic oligonucleotide
  Antisense strand to SEQ ID NO: 2147476
cauaucaagcugagauugg

SEQ ID NO: 2147478 - RNA, 19 nt, Artificial Sequence
  Description of Artificial Sequence: Synthetic oligonucleotide
  Sense strand starting at position 708 of SEQ ID NO: 1882787
aucucagcuugauaugauu

SEQ ID NO: 2147479 - RNA, 19 nt, Artificial Sequence
  Description of Artificial Sequence: Synthetic oligonucleotide
  Antisense strand to SEQ ID NO: 2147478
aaucauaucaagcugagau

SEQ ID NO: 2147480 - RNA, 19 nt, Artificial Sequence
  Description of Artificial Sequence: Synthetic oligonucleotide
  Sense strand starting at position 742 of SEQ ID NO: 1882787
cucauuaaaccuggcugau

SEQ ID NO: 2147481 - RNA, 19 nt, Artificial Sequence
  Description of Artificial Sequence: Synthetic oligonucleotide
  Antisense strand to SEQ ID NO: 2147480
aucagccagguuuaaugag

SEQ ID NO: 2147482 - RNA, 19 nt, Artificial Sequence
  Description of Artificial Sequence: Synthetic oligonucleotide
  Sense strand starting at position 883 of SEQ ID NO: 1882787
guguuaugguagcccaaga

SEQ ID NO: 2147483 - RNA, 19 nt, Artificial Sequence
  Description of Artificial Sequence: Synthetic oligonucleotide
  Antisense strand to SEQ ID NO: 2147482
ucuugggcuaccauaacac

SEQ ID NO: 2147484 - RNA, 19 nt, Artificial Sequence
  Description of Artificial Sequence: Synthetic oligonucleotide
  Sense strand starting at position 978 of SEQ ID NO: 1882787
aggagugcacccgagugau

SEQ ID NO: 2147485 - RNA, 19 nt, Artificial Sequence
  Description of Artificial Sequence: Synthetic oligonucleotide
  Antisense strand to SEQ ID NO: 2147484
aucacucgggugcacuccu

SEQ ID NO: 2147486 - RNA, 19 nt, Artificial Sequence
  Description of Artificial Sequence: Synthetic oligonucleotide
  Sense strand starting at position 1518 of SEQ ID NO: 1882787
cgaacacguucuuauucua

SEQ ID NO: 2147487 - RNA, 19 nt, Artificial Sequence
  Description of Artificial Sequence: Synthetic oligonucleotide
  Antisense strand to SEQ ID NO: 2147486
uagaauaagaacguguucg

SEQ ID NO: 2147488 - RNA, 19 nt, Artificial Sequence
  Description of Artificial Sequence: Synthetic oligonucleotide
  Sense strand starting at position 1521 of SEQ ID NO: 1882787
acacguucuuauucuauua

SEQ ID NO: 2147489 - RNA, 19 nt, Artificial Sequence
  Description of Artificial Sequence: Synthetic oligonucleotide
  Antisense strand to SEQ ID NO: 2147488
uaauagaauaagaacgugu

SEQ ID NO: 2147490 - RNA, 19 nt, Artificial Sequence
  Description of Artificial Sequence: Synthetic oligonucleotide
  Sense strand starting at position 1603 of SEQ ID NO: 1882787
aggugagaauaucaguaac

SEQ ID NO: 2147491 - RNA, 19 nt, Artificial Sequence
  Description of Artificial Sequence: Synthetic oligonucleotide
  Antisense strand to SEQ ID NO: 2147490
guuacugauauucucaccu

SEQ ID NO: 2147492 - RNA, 19 nt, Artificial Sequence
  Description of Artificial Sequence: Synthetic oligonucleotide
  Sense strand starting at position 1611 of SEQ ID NO: 1882787
auaucaguaacccggaguu

SEQ ID NO: 2147493 - RNA, 19 nt, Artificial Sequence
  Description of Artificial Sequence: Synthetic oligonucleotide
  Antisense strand to SEQ ID NO: 2147492
aacuccggguuacugauau

SEQ ID NO: 2147494 - RNA, 19 nt, Artificial Sequence
  Description of Artificial Sequence: Synthetic oligonucleotide
  Sense strand starting at position 1933 of SEQ ID NO: 1882787
ggaguguuguggugggauc

SEQ ID NO: 2147495 - RNA, 19 nt, Artificial Sequence
  Description of Artificial Sequence: Synthetic oligonucleotide
  Antisense strand to SEQ ID NO: 2147494
gaucccaccacaacacucc

SEQ ID NO: 2147496 - RNA, 19 nt, Artificial Sequence
  Description of Artificial Sequence: Synthetic oligonucleotide
  Sense strand starting at position 1934 of SEQ ID NO: 1882787
gaguguuguggugggauca

SEQ ID NO: 2147497 - RNA, 19 nt, Artificial Sequence
  Description of Artificial Sequence: Synthetic oligonucleotide
  Antisense strand to SEQ ID NO: 2147496
ugaucccaccacaacacuc

SEQ ID NO: 2147498 - RNA, 19 nt, Artificial Sequence
  Description of Artificial Sequence: Synthetic oligonucleotide
  Sense strand starting at position 1935 of SEQ ID NO: 1882787
aguguuguggugggaucau

SEQ ID NO: 2147499 - RNA, 19 nt, Artificial Sequence
  Description of Artificial Sequence: Synthetic oligonucleotide
  Antisense strand to SEQ ID NO: 2147498
augaucccaccacaacacu

SEQ ID NO: 2147500 - RNA, 19 nt, Artificial Sequence
  Description of Artificial Sequence: Synthetic oligonucleotide
  Sense strand starting at position 2041 of SEQ ID NO: 1882787
ggcugcucuuggcccgaaa

SEQ ID NO: 2147501 - RNA, 19 nt, Artificial Sequence
  Description of Artificial Sequence: Synthetic oligonucleotide
  Antisense strand to SEQ ID NO: 2147500
uuucgggccaagagcagcc

SEQ ID NO: 2147502 - RNA, 19 nt, Artificial Sequence
  Description of Artificial Sequence: Synthetic oligonucleotide
  Sense strand starting at position 2044 of SEQ ID NO: 1882787
ugcucuuggcccgaaagga

SEQ ID NO: 2147503 - RNA, 19 nt, Artificial Sequence
  Description of Artificial Sequence: Synthetic oligonucleotide
  Antisense strand to SEQ ID NO: 2147502
uccuuucgggccaagagca

SEQ ID NO: 2147504 - RNA, 19 nt, Artificial Sequence
  Description of Artificial Sequence: Synthetic oligonucleotide
  Sense strand starting at position 2128 of SEQ ID NO: 1882787
gugggaguuugucaacuac

SEQ ID NO: 2147505 - RNA, 19 nt, Artificial Sequence
  Description of Artificial Sequence: Synthetic oligonucleotide
  Antisense strand to SEQ ID NO: 2147504
guaguugacaaacucccac

SEQ ID NO: 2147506 - RNA, 19 nt, Artificial Sequence
  Description of Artificial Sequence: Synthetic oligonucleotide
  Sense strand starting at position 2199 of SEQ ID NO: 1882787
gcucgacucugaggagacu

SEQ ID NO: 2147507 - RNA, 19 nt, Artificial Sequence
  Description of Artificial Sequence: Synthetic oligonucleotide
  Antisense strand to SEQ ID NO: 2147506
agucuccucagagucgagc

SEQ ID NO: 2147508 - RNA, 19 nt, Artificial Sequence
  Description of Artificial Sequence: Synthetic oligonucleotide
  Sense strand starting at position 2290 of SEQ ID NO: 1882787
gcguguaugacguugucga

SEQ ID NO: 2147509 - RNA, 19 nt, Artificial Sequence
  Description of Artificial Sequence: Synthetic oligonucleotide
  Antisense strand to SEQ ID NO: 2147508
ucgacaacgucauacacgc

SEQ ID NO: 2147510 - RNA, 19 nt, Artificial Sequence
  Description of Artificial Sequence: Synthetic oligonucleotide
  Sense strand starting at position 2291 of SEQ ID NO: 1882787
cguguaugacguugucgaa

SEQ ID NO: 2147511 - RNA, 19 nt, Artificial Sequence
  Description of Artificial Sequence: Synthetic oligonucleotide
  Antisense strand to SEQ ID NO: 2147510
uucgacaacgucauacacg

SEQ ID NO: 2147512 - RNA, 19 nt, Artificial Sequence
  Description of Artificial Sequence: Synthetic oligonucleotide
  Sense strand starting at position 2598 of SEQ ID NO: 1882787
gcucucaggccuuaugacu

SEQ ID NO: 2147513 - RNA, 19 nt, Artificial Sequence
  Description of Artificial Sequence: Synthetic oligonucleotide
  Antisense strand to SEQ ID NO: 2147512
agucauaaggccugagagc

SEQ ID NO: 2147514 - RNA, 19 nt, Artificial Sequence
  Description of Artificial Sequence: Synthetic oligonucleotide
  Sense strand starting at position 2607 of SEQ ID NO: 1882787
ccuuaugacuccuaguuua

SEQ ID NO: 2147515 - RNA, 19 nt, Artificial Sequence
  Description of Artificial Sequence: Synthetic oligonucleotide
  Antisense strand to SEQ ID NO: 2147514
uaaacuaggagucauaagg

SEQ ID NO: 2147516 - RNA, 19 nt, Artificial Sequence
  Description of Artificial Sequence: Synthetic oligonucleotide
  Sense strand starting at position 2950 of SEQ ID NO: 1882787
uagagaugguuagccagau

SEQ ID NO: 2147517 - RNA, 19 nt, Artificial Sequence
  Description of Artificial Sequence: Synthetic oligonucleotide
  Antisense strand to SEQ ID NO: 2147516
aucuggcuaaccaucucua

SEQ ID NO: 2147518 - RNA, 19 nt, Artificial Sequence
  Description of Artificial Sequence: Synthetic oligonucleotide
  Sense strand starting at position 3220 of SEQ ID NO: 1882787
cgaggauugcuugaguccu

SEQ ID NO: 2147519 - RNA, 19 nt, Artificial Sequence
  Description of Artificial Sequence: Synthetic oligonucleotide
  Antisense strand to SEQ ID NO: 2147518
aggacucaagcaauccucg

SEQ ID NO: 2147520 - RNA, 19 nt, Artificial Sequence
  Description of Artificial Sequence: Synthetic oligonucleotide
  Sense strand starting at position 3260 of SEQ ID NO: 1882787
cuauaauugcgccauucca

SEQ ID NO: 2147521 - RNA, 19 nt, Artificial Sequence
  Description of Artificial Sequence: Synthetic oligonucleotide
  Antisense strand to SEQ ID NO: 2147520
uggaauggcgcaauuauag

SEQ ID NO: 2147522 - RNA, 19 nt, Artificial Sequence
  Description of Artificial Sequence: Synthetic oligonucleotide
  Sense strand starting at position 3421 of SEQ ID NO: 1882787
gggccugccucuccaagaa

SEQ ID NO: 2147523 - RNA, 19 nt, Artificial Sequence
  Description of Artificial Sequence: Synthetic oligonucleotide
  Antisense strand to SEQ ID NO: 2147522
uucuuggagaggcaggccc

SEQ ID NO: 2147524 - RNA, 19 nt, Artificial Sequence
  Description of Artificial Sequence: Synthetic oligonucleotide
  Sense strand starting at position 3560 of SEQ ID NO: 1882787
ggugguaucugguuccaug

SEQ ID NO: 2147525 - RNA, 19 nt, Artificial Sequence
  Description of Artificial Sequence: Synthetic oligonucleotide
  Antisense strand to SEQ ID NO: 2147524
cauggaaccagauaccacc

SEQ ID NO: 2147526 - RNA, 19 nt, Artificial Sequence
  Description of Artificial Sequence: Synthetic oligonucleotide
  Sense strand starting at position 3729 of SEQ ID NO: 1882787
gcuuaauaaucccuggauu

SEQ ID NO: 2147527 - RNA, 19 nt, Artificial Sequence
  Description of Artificial Sequence: Synthetic oligonucleotide
  Antisense strand to SEQ ID NO: 2147526
aauccagggauuauuaagc

SEQ ID NO: 2147528 - RNA, 19 nt, Artificial Sequence
  Description of Artificial Sequence: Synthetic oligonucleotide
  Sense strand starting at position 3819 of SEQ ID NO: 1882787
guggaacguuccucugcuu

SEQ ID NO: 2147529 - RNA, 19 nt, Artificial Sequence
  Description of Artificial Sequence: Synthetic oligonucleotide
  Antisense strand to SEQ ID NO: 2147528
aagcagaggaacguuccac

SEQ ID NO: 2147530 - RNA, 19 nt, Artificial Sequence
  Description of Artificial Sequence: Synthetic oligonucleotide
  Sense strand starting at position 3841 of SEQ ID NO: 1882787
ugugaucuggugugaauuu

SEQ ID NO: 2147531 - RNA, 19 nt, Artificial Sequence
  Description of Artificial Sequence: Synthetic oligonucleotide
  Antisense strand to SEQ ID NO: 2147530
aaauucacaccagaucaca

SEQ ID NO: 2147532 - RNA, 19 nt, Artificial Sequence
  Description of Artificial Sequence: Synthetic oligonucleotide
  Sense strand starting at position 3908 of SEQ ID NO: 1882787
agagcucagcccugacauu

SEQ ID NO: 2147533 - RNA, 19 nt, Artificial Sequence
  Description of Artificial Sequence: Synthetic oligonucleotide
  Antisense strand to SEQ ID NO: 2147532
aaugucagggcugagcucu

SEQ ID NO: 2147534 - RNA, 19 nt, Artificial Sequence
  Description of Artificial Sequence: Synthetic oligonucleotide
  Sense strand starting at position 3934 of SEQ ID NO: 1882787
agcugagacuggugagguu

SEQ ID NO: 2147535 - RNA, 19 nt, Artificial Sequence
  Description of Artificial Sequence: Synthetic oligonucleotide
  Antisense strand to SEQ ID NO: 2147534
aaccucaccagucucagcu

SEQ ID NO: 2147536 - RNA, 19 nt, Artificial Sequence
  Description of Artificial Sequence: Synthetic oligonucleotide
  Sense strand starting at position 3947 of SEQ ID NO: 1882787
gagguucucaccgggacuu

SEQ ID NO: 2147537 - RNA, 19 nt, Artificial Sequence
  Description of Artificial Sequence: Synthetic oligonucleotide
  Antisense strand to SEQ ID NO: 2147536
aagucccggugagaaccuc

SEQ ID NO: 2147538 - RNA, 19 nt, Artificial Sequence
  Description of Artificial Sequence: Synthetic oligonucleotide
  Sense strand starting at position 3980 of SEQ ID NO: 1882787
ggagaauucugaaggcggu

SEQ ID NO: 2147539 - RNA, 19 nt, Artificial Sequence
  Description of Artificial Sequence: Synthetic oligonucleotide
  Antisense strand to SEQ ID NO: 2147538
accgccuucagaauucucc

SEQ ID NO: 2147540 - RNA, 19 nt, Artificial Sequence
  Description of Artificial Sequence: Synthetic oligonucleotide
  Sense strand starting at position 3981 of SEQ ID NO: 1882787
gagaauucugaaggcggua

SEQ ID NO: 2147541 - RNA, 19 nt, Artificial Sequence
  Description of Artificial Sequence: Synthetic oligonucleotide
  Antisense strand to SEQ ID NO: 2147540
uaccgccuucagaauucuc

SEQ ID NO: 2147542 - RNA, 19 nt, Artificial Sequence
  Description of Artificial Sequence: Synthetic oligonucleotide
  Sense strand starting at position 136 of SEQ ID NO: 1882788
gguagacuaacacgugaug

SEQ ID NO: 2147543 - RNA, 19 nt, Artificial Sequence
  Description of Artificial Sequence: Synthetic oligonucleotide
  Antisense strand to SEQ ID NO: 2147542
caucacguguuagucuacc

SEQ ID NO: 2147544 - RNA, 19 nt, Artificial Sequence
  Description of Artificial Sequence: Synthetic oligonucleotide
  Sense strand starting at position 199 of SEQ ID NO: 1882788
ucuuucucaguggauguaa

SEQ ID NO: 2147545 - RNA, 19 nt, Artificial Sequence
  Description of Artificial Sequence: Synthetic oligonucleotide
  Antisense strand to SEQ ID NO: 2147544
uuacauccacugagaaaga

SEQ ID NO: 2147546 - RNA, 19 nt, Artificial Sequence
  Description of Artificial Sequence: Synthetic oligonucleotide
  Sense strand starting at position 291 of SEQ ID NO: 1882788
gagcgaguccugccuagca

SEQ ID NO: 2147547 - RNA, 19 nt, Artificial Sequence
  Description of Artificial Sequence: Synthetic oligonucleotide
  Antisense strand to SEQ ID NO: 2147546
ugcuaggcaggacucgcuc

SEQ ID NO: 2147548 - RNA, 19 nt, Artificial Sequence
  Description of Artificial Sequence: Synthetic oligonucleotide
  Sense strand starting at position 317 of SEQ ID NO: 1882788
ccugaaguucgagaucucu

SEQ ID NO: 2147549 - RNA, 19 nt, Artificial Sequence
  Description of Artificial Sequence: Synthetic oligonucleotide
  Antisense strand to SEQ ID NO: 2147548
agagaucucgaacuucagg

SEQ ID NO: 2147550 - RNA, 19 nt, Artificial Sequence
  Description of Artificial Sequence: Synthetic oligonucleotide
  Sense strand starting at position 514 of SEQ ID NO: 1882788
auguaaacuugagugagaa

SEQ ID NO: 2147551 - RNA, 19 nt, Artificial Sequence
  Description of Artificial Sequence: Synthetic oligonucleotide
  Antisense strand to SEQ ID NO: 2147550
uucucacucaaguuuacau

SEQ ID NO: 2147552 - RNA, 19 nt, Artificial Sequence
  Description of Artificial Sequence: Synthetic oligonucleotide
  Sense strand starting at position 515 of SEQ ID NO: 1882788
uguaaacuugagugagaaa

SEQ ID NO: 2147553 - RNA, 19 nt, Artificial Sequence
  Description of Artificial Sequence: Synthetic oligonucleotide
  Antisense strand to SEQ ID NO: 2147552
uuucucacucaaguuuaca

SEQ ID NO: 2147554 - RNA, 19 nt, Artificial Sequence
  Description of Artificial Sequence: Synthetic oligonucleotide
  Sense strand starting at position 1184 of SEQ ID NO: 1882788
ugcuguuuccuguuagccu

SEQ ID NO: 2147555 - RNA, 19 nt, Artificial Sequence
  Description of Artificial Sequence: Synthetic oligonucleotide
  Antisense strand to SEQ ID NO: 2147554
aggcuaacaggaaacagca

SEQ ID NO: 2147556 - RNA, 19 nt, Artificial Sequence
  Description of Artificial Sequence: Synthetic oligonucleotide
  Sense strand starting at position 1239 of SEQ ID NO: 1882788
uucucuaauuuguggauuu

SEQ ID NO: 2147557 - RNA, 19 nt, Artificial Sequence
  Description of Artificial Sequence: Synthetic oligonucleotide
  Antisense strand to SEQ ID NO: 2147556
aaauccacaaauuagagaa

SEQ ID NO: 2147558 - RNA, 19 nt, Artificial Sequence
  Description of Artificial Sequence: Synthetic oligonucleotide
  Sense strand starting at position 1281 of SEQ ID NO: 1882788
aggauauguauggguccau

SEQ ID NO: 2147559 - RNA, 19 nt, Artificial Sequence
  Description of Artificial Sequence: Synthetic oligonucleotide
  Antisense strand to SEQ ID NO: 2147558
auggacccauacauauccu

SEQ ID NO: 2147560 - RNA, 19 nt, Artificial Sequence
  Description of Artificial Sequence: Synthetic oligonucleotide
  Sense strand starting at position 1285 of SEQ ID NO: 1882788
uauguauggguccaugacu

SEQ ID NO: 2147561 - RNA, 19 nt, Artificial Sequence
  Description of Artificial Sequence: Synthetic oligonucleotide
  Antisense strand to SEQ ID NO: 2147560
agucauggacccauacaua

SEQ ID NO: 2147562 - RNA, 19 nt, Artificial Sequence
  Description of Artificial Sequence: Synthetic oligonucleotide
  Sense strand starting at position 1323 of SEQ ID NO: 1882788
ugaagauuauaccugucaa

SEQ ID NO: 2147563 - RNA, 19 nt, Artificial Sequence
  Description of Artificial Sequence: Synthetic oligonucleotide
  Antisense strand to SEQ ID NO: 2147562
uugacagguauaaucuuca

SEQ ID NO: 2147564 - RNA, 19 nt, Artificial Sequence
  Description of Artificial Sequence: Synthetic oligonucleotide
  Sense strand starting at position 1357 of SEQ ID NO: 1882788
gaagaagaguggcugaauu

SEQ ID NO: 2147565 - RNA, 19 nt, Artificial Sequence
  Description of Artificial Sequence: Synthetic oligonucleotide
  Antisense strand to SEQ ID NO: 2147564
aauucagccacucuucuuc

SEQ ID NO: 2147566 - RNA, 19 nt, Artificial Sequence
  Description of Artificial Sequence: Synthetic oligonucleotide
  Sense strand starting at position 1378 of SEQ ID NO: 1882788
gccugugcucugccugaaa

SEQ ID NO: 2147567 - RNA, 19 nt, Artificial Sequence
  Description of Artificial Sequence: Synthetic oligonucleotide
  Antisense strand to SEQ ID NO: 2147566
uuucaggcagagcacaggc

SEQ ID NO: 2147568 - RNA, 19 nt, Artificial Sequence
  Description of Artificial Sequence: Synthetic oligonucleotide
  Sense strand starting at position 1515 of SEQ ID NO: 1882788
gccagaugccuccagaaua

SEQ ID NO: 2147569 - RNA, 19 nt, Artificial Sequence
  Description of Artificial Sequence: Synthetic oligonucleotide
  Antisense strand to SEQ ID NO: 2147568
uauucuggaggcaucuggc

SEQ ID NO: 2147570 - RNA, 19 nt, Artificial Sequence
  Description of Artificial Sequence: Synthetic oligonucleotide
  Sense strand starting at position 1576 of SEQ ID NO: 1882788
cuggaacuacuuuguccaa

SEQ ID NO: 2147571 - RNA, 19 nt, Artificial Sequence
  Description of Artificial Sequence: Synthetic oligonucleotide
  Antisense strand to SEQ ID NO: 2147570
uuggacaaaguaguuccag

SEQ ID NO: 2147572 - RNA, 19 nt, Artificial Sequence
  Description of Artificial Sequence: Synthetic oligonucleotide
  Sense strand starting at position 1579 of SEQ ID NO: 1882788
gaacuacuuuguccaagga

SEQ ID NO: 2147573 - RNA, 19 nt, Artificial Sequence
  Description of Artificial Sequence: Synthetic oligonucleotide
  Antisense strand to SEQ ID NO: 2147572
uccuuggacaaaguaguuc

SEQ ID NO: 2147574 - RNA, 19 nt, Artificial Sequence
  Description of Artificial Sequence: Synthetic oligonucleotide
  Sense strand starting at position 1629 of SEQ ID NO: 1882788
ggagaauggugucuggaaa

SEQ ID NO: 2147575 - RNA, 19 nt, Artificial Sequence
  Description of Artificial Sequence: Synthetic oligonucleotide
  Antisense strand to SEQ ID NO: 2147574
uuuccagacaccauucucc

SEQ ID NO: 2147576 - RNA, 19 nt, Artificial Sequence
  Description of Artificial Sequence: Synthetic oligonucleotide
  Sense strand starting at position 1956 of SEQ ID NO: 1882788
uuucuuacucguuagaaag

SEQ ID NO: 2147577 - RNA, 19 nt, Artificial Sequence
  Description of Artificial Sequence: Synthetic oligonucleotide
  Antisense strand to SEQ ID NO: 2147576
cuuucuaacgaguaagaaa

SEQ ID NO: 2147578 - RNA, 19 nt, Artificial Sequence
  Description of Artificial Sequence: Synthetic oligonucleotide
  Sense strand starting at position 2044 of SEQ ID NO: 1882788
cgaccacaaugucuauaga

SEQ ID NO: 2147579 - RNA, 19 nt, Artificial Sequence
  Description of Artificial Sequence: Synthetic oligonucleotide
  Antisense strand to SEQ ID NO: 2147578
ucuauagacauuguggucg

SEQ ID NO: 2147580 - RNA, 19 nt, Artificial Sequence
  Description of Artificial Sequence: Synthetic oligonucleotide
  Sense strand starting at position 2055 of SEQ ID NO: 1882788
ucuauagauuuggaucaaa

SEQ ID NO: 2147581 - RNA, 19 nt, Artificial Sequence
  Description of Artificial Sequence: Synthetic oligonucleotide
  Antisense strand to SEQ ID NO: 2147580
uuugauccaaaucuauaga

SEQ ID NO: 2147582 - RNA, 19 nt, Artificial Sequence
  Description of Artificial Sequence: Synthetic oligonucleotide
  Sense strand starting at position 2134 of SEQ ID NO: 1882788
agauaugauuuguaaagag

SEQ ID NO: 2147583 - RNA, 19 nt, Artificial Sequence
  Description of Artificial Sequence: Synthetic oligonucleotide
  Antisense strand to SEQ ID NO: 2147582
cucuuuacaaaucauaucu

SEQ ID NO: 2147584 - RNA, 19 nt, Artificial Sequence
  Description of Artificial Sequence: Synthetic oligonucleotide
  Sense strand starting at position 2164 of SEQ ID NO: 1882788
cagucuugaccaggacagu

SEQ ID NO: 2147585 - RNA, 19 nt, Artificial Sequence
  Description of Artificial Sequence: Synthetic oligonucleotide
  Antisense strand to SEQ ID NO: 2147584
acuguccuggucaagacug

SEQ ID NO: 2147586 - RNA, 19 nt, Artificial Sequence
  Description of Artificial Sequence: Synthetic oligonucleotide
  Sense strand starting at position 2178 of SEQ ID NO: 1882788
acaguagauuucuauauug

SEQ ID NO: 2147587 - RNA, 19 nt, Artificial Sequence
  Description of Artificial Sequence: Synthetic oligonucleotide
  Antisense strand to SEQ ID NO: 2147586
caauauagaaaucuacugu

SEQ ID NO: 2147588 - RNA, 19 nt, Artificial Sequence
  Description of Artificial Sequence: Synthetic oligonucleotide
  Sense strand starting at position 2186 of SEQ ID NO: 1882788
uuucuauauugaguucuac

SEQ ID NO: 2147589 - RNA, 19 nt, Artificial Sequence
  Description of Artificial Sequence: Synthetic oligonucleotide
  Antisense strand to SEQ ID NO: 2147588
guagaacucaauauagaaa

SEQ ID NO: 2147590 - RNA, 19 nt, Artificial Sequence
  Description of Artificial Sequence: Synthetic oligonucleotide
  Sense strand starting at position 2219 of SEQ ID NO: 1882788
cuguguugaagucagauaa

SEQ ID NO: 2147591 - RNA, 19 nt, Artificial Sequence
  Description of Artificial Sequence: Synthetic oligonucleotide
  Antisense strand to SEQ ID NO: 2147590
uuaucugacuucaacacag

SEQ ID NO: 2147592 - RNA, 19 nt, Artificial Sequence
  Description of Artificial Sequence: Synthetic oligonucleotide
  Sense strand starting at position 2321 of SEQ ID NO: 1882788
ccuuuaguauguccaaaga

SEQ ID NO: 2147593 - RNA, 19 nt, Artificial Sequence
  Description of Artificial Sequence: Synthetic oligonucleotide
  Antisense strand to SEQ ID NO: 2147592
ucuuuggacauacuaaagg

SEQ ID NO: 2147594 - RNA, 19 nt, Artificial Sequence
  Description of Artificial Sequence: Synthetic oligonucleotide
  Sense strand starting at position 2464 of SEQ ID NO: 1882788
ggcugaaacuaguuguaga

SEQ ID NO: 2147595 - RNA, 19 nt, Artificial Sequence
  Description of Artificial Sequence: Synthetic oligonucleotide
  Antisense strand to SEQ ID NO: 2147594
ucuacaacuaguuucagcc

SEQ ID NO: 2147596 - RNA, 19 nt, Artificial Sequence
  Description of Artificial Sequence: Synthetic oligonucleotide
  Sense strand starting at position 2493 of SEQ ID NO: 1882788
gcuguuucuguagcuauua

SEQ ID NO: 2147597 - RNA, 19 nt, Artificial Sequence
  Description of Artificial Sequence: Synthetic oligonucleotide
  Antisense strand to SEQ ID NO: 2147596
uaauagcuacagaaacagc

SEQ ID NO: 2147598 - RNA, 19 nt, Artificial Sequence
  Description of Artificial Sequence: Synthetic oligonucleotide
  Sense strand starting at position 2586 of SEQ ID NO: 1882788
augauaugcccugagugca

SEQ ID NO: 2147599 - RNA, 19 nt, Artificial Sequence
  Description of Artificial Sequence: Synthetic oligonucleotide
  Antisense strand to SEQ ID NO: 2147598
ugcacucagggcauaucau

SEQ ID NO: 2147600 - RNA, 19 nt, Artificial Sequence
  Description of Artificial Sequence: Synthetic oligonucleotide
  Sense strand starting at position 2790 of SEQ ID NO: 1882788
gugaaauaaccaugcuuaa

SEQ ID NO: 2147601 - RNA, 19 nt, Artificial Sequence
  Description of Artificial Sequence: Synthetic oligonucleotide
  Antisense strand to SEQ ID NO: 2147600
uuaagcaugguuauuucac

SEQ ID NO: 2147602 - RNA, 19 nt, Artificial Sequence
  Description of Artificial Sequence: Synthetic oligonucleotide
  Sense strand starting at position 2846 of SEQ ID NO: 1882788
acaggcaugugacuuauca

SEQ ID NO: 2147603 - RNA, 19 nt, Artificial Sequence
  Description of Artificial Sequence: Synthetic oligonucleotide
  Antisense strand to SEQ ID NO: 2147602
ugauaagucacaugccugu

SEQ ID NO: 2147604 - RNA, 19 nt, Artificial Sequence
  Description of Artificial Sequence: Synthetic oligonucleotide
  Sense strand starting at position 2850 of SEQ ID NO: 1882788
gcaugugacuuaucaaaga

SEQ ID NO: 2147605 - RNA, 19 nt, Artificial Sequence
  Description of Artificial Sequence: Synthetic oligonucleotide
  Antisense strand to SEQ ID NO: 2147604
ucuuugauaagucacaugc

SEQ ID NO: 2147606 - RNA, 19 nt, Artificial Sequence
  Description of Artificial Sequence: Synthetic oligonucleotide
  Sense strand starting at position 3009 of SEQ ID NO: 1882788
cagagauggcuuugaacag

SEQ ID NO: 2147607 - RNA, 19 nt, Artificial Sequence
  Description of Artificial Sequence: Synthetic oligonucleotide
  Antisense strand to SEQ ID NO: 2147606
cuguucaaagccaucucug

SEQ ID NO: 2147608 - RNA, 19 nt, Artificial Sequence
  Description of Artificial Sequence: Synthetic oligonucleotide
  Sense strand starting at position 3013 of SEQ ID NO: 1882788
gauggcuuugaacagucau

SEQ ID NO: 2147609 - RNA, 19 nt, Artificial Sequence
  Description of Artificial Sequence: Synthetic oligonucleotide
  Antisense strand to SEQ ID NO: 2147608
augacuguucaaagccauc

SEQ ID NO: 2147610 - RNA, 19 nt, Artificial Sequence
  Description of Artificial Sequence: Synthetic oligonucleotide
  Sense strand starting at position 3112 of SEQ ID NO: 1882788
ccuugauuuauacguguag

SEQ ID NO: 2147611 - RNA, 19 nt, Artificial Sequence
  Description of Artificial Sequence: Synthetic oligonucleotide
  Antisense strand to SEQ ID NO: 2147610
cuacacguauaaaucaagg

SEQ ID NO: 2147612 - RNA, 19 nt, Artificial Sequence
  Description of Artificial Sequence: Synthetic oligonucleotide
  Sense strand starting at position 3233 of SEQ ID NO: 1882788
gaaguuaagugacuuaaag

SEQ ID NO: 2147613 - RNA, 19 nt, Artificial Sequence
  Description of Artificial Sequence: Synthetic oligonucleotide
  Antisense strand to SEQ ID NO: 2147612
cuuuaagucacuuaacuuc

SEQ ID NO: 2147614 - RNA, 19 nt, Artificial Sequence
  Description of Artificial Sequence: Synthetic oligonucleotide
  Sense strand starting at position 3408 of SEQ ID NO: 1882788
acccauagaguaugaguuu

SEQ ID NO: 2147615 - RNA, 19 nt, Artificial Sequence
  Description of Artificial Sequence: Synthetic oligonucleotide
  Antisense strand to SEQ ID NO: 2147614
aaacucauacucuaugggu

SEQ ID NO: 2147616 - RNA, 19 nt, Artificial Sequence
  Description of Artificial Sequence: Synthetic oligonucleotide
  Sense strand starting at position 3411 of SEQ ID NO: 1882788
cauagaguaugaguuuaca

SEQ ID NO: 2147617 - RNA, 19 nt, Artificial Sequence
  Description of Artificial Sequence: Synthetic oligonucleotide
  Antisense strand to SEQ ID NO: 2147616
uguaaacucauacucuaug

SEQ ID NO: 2147618 - RNA, 19 nt, Artificial Sequence
  Description of Artificial Sequence: Synthetic oligonucleotide
  Sense strand starting at position 3526 of SEQ ID NO: 1882788
ggaacuuugaucuggcaua

SEQ ID NO: 2147619 - RNA, 19 nt, Artificial Sequence
  Description of Artificial Sequence: Synthetic oligonucleotide
  Antisense strand to SEQ ID NO: 2147618
uaugccagaucaaaguucc

SEQ ID NO: 2147620 - RNA, 19 nt, Artificial Sequence
  Description of Artificial Sequence: Synthetic oligonucleotide
  Sense strand starting at position 3705 of SEQ ID NO: 1882788
gaaugaaugugauuguucu

SEQ ID NO: 2147621 - RNA, 19 nt, Artificial Sequence
  Description of Artificial Sequence: Synthetic oligonucleotide
  Antisense strand to SEQ ID NO: 2147620
agaacaaucacauucauuc

SEQ ID NO: 2147622 - RNA, 19 nt, Artificial Sequence
  Description of Artificial Sequence: Synthetic oligonucleotide
  Sense strand starting at position 884 of SEQ ID NO: 1882789
gaacuuaguuauuguggca

SEQ ID NO: 2147623 - RNA, 19 nt, Artificial Sequence
  Description of Artificial Sequence: Synthetic oligonucleotide
  Antisense strand to SEQ ID NO: 2147622
ugccacaauaacuaaguuc

SEQ ID NO: 2147624 - RNA, 19 nt, Artificial Sequence
  Description of Artificial Sequence: Synthetic oligonucleotide
  Sense strand starting at position 889 of SEQ ID NO: 1882789
uaguuauuguggcaccuaa

SEQ ID NO: 2147625 - RNA, 19 nt, Artificial Sequence
  Description of Artificial Sequence: Synthetic oligonucleotide
  Antisense strand to SEQ ID NO: 2147624
uuaggugccacaauaacua

SEQ ID NO: 2147626 - RNA, 19 nt, Artificial Sequence
  Description of Artificial Sequence: Synthetic oligonucleotide
  Sense strand starting at position 1161 of SEQ ID NO: 1882789
agaagugcugacggacauu

SEQ ID NO: 2147627 - RNA, 19 nt, Artificial Sequence
  Description of Artificial Sequence: Synthetic oligonucleotide
  Antisense strand to SEQ ID NO: 2147626
aauguccgucagcacuucu

SEQ ID NO: 2147628 - RNA, 19 nt, Artificial Sequence
  Description of Artificial Sequence: Synthetic oligonucleotide
  Sense strand starting at position 2344 of SEQ ID NO: 1882789
ccgaguuugccauaaggag

SEQ ID NO: 2147629 - RNA, 19 nt, Artificial Sequence
  Description of Artificial Sequence: Synthetic oligonucleotide
  Antisense strand to SEQ ID NO: 2147628
cuccuuauggcaaacucgg

SEQ ID NO: 2147630 - RNA, 19 nt, Artificial Sequence
  Description of Artificial Sequence: Synthetic oligonucleotide
  Sense strand starting at position 2561 of SEQ ID NO: 1882789
uagagaucaucguggccaa

SEQ ID NO: 2147631 - RNA, 19 nt, Artificial Sequence
  Description of Artificial Sequence: Synthetic oligonucleotide
  Antisense strand to SEQ ID NO: 2147630
uuggccacgaugaucucua

SEQ ID NO: 2147632 - RNA, 19 nt, Artificial Sequence
  Description of Artificial Sequence: Synthetic oligonucleotide
  Sense strand starting at position 3534 of SEQ ID NO: 1882789
aaguuugaguuaggauaag

SEQ ID NO: 2147633 - RNA, 19 nt, Artificial Sequence
  Description of Artificial Sequence: Synthetic oligonucleotide
  Antisense strand to SEQ ID NO: 2147632
cuuauccuaacucaaacuu

SEQ ID NO: 2147634 - RNA, 19 nt, Artificial Sequence
  Description of Artificial Sequence: Synthetic oligonucleotide
  Sense strand starting at position 35 of SEQ ID NO: 1882790
gugcccugccuauauuaua

SEQ ID NO: 2147635 - RNA, 19 nt, Artificial Sequence
  Description of Artificial Sequence: Synthetic oligonucleotide
  Antisense strand to SEQ ID NO: 2147634
uauaauauaggcagggcac

SEQ ID NO: 2147636 - RNA, 19 nt, Artificial Sequence
  Description of Artificial Sequence: Synthetic oligonucleotide
  Sense strand starting at position 88 of SEQ ID NO: 1882790
augaccuauguguggguaa

SEQ ID NO: 2147637 - RNA, 19 nt, Artificial Sequence
  Description of Artificial Sequence: Synthetic oligonucleotide
  Antisense strand to SEQ ID NO: 2147636
uuacccacacauaggucau

SEQ ID NO: 2147638 - RNA, 19 nt, Artificial Sequence
  Description of Artificial Sequence: Synthetic oligonucleotide
  Sense strand starting at position 99 of SEQ ID NO: 1882790
guggguaagaacugaauga

SEQ ID NO: 2147639 - RNA, 19 nt, Artificial Sequence
  Description of Artificial Sequence: Synthetic oligonucleotide
  Antisense strand to SEQ ID NO: 2147638
ucauucaguucuuacccac

SEQ ID NO: 2147640 - RNA, 19 nt, Artificial Sequence
  Description of Artificial Sequence: Synthetic oligonucleotide
  Sense strand starting at position 184 of SEQ ID NO: 1882790
guuuguaaacaguaacauc

SEQ ID NO: 2147641 - RNA, 19 nt, Artificial Sequence
  Description of Artificial Sequence: Synthetic oligonucleotide
  Antisense strand to SEQ ID NO: 2147640
gauguuacuguuuacaaac

SEQ ID NO: 2147642 - RNA, 19 nt, Artificial Sequence
  Description of Artificial Sequence: Synthetic oligonucleotide
  Sense strand starting at position 278 of SEQ ID NO: 1882790
ucaugagacgugugaggaa

SEQ ID NO: 2147643 - RNA, 19 nt, Artificial Sequence
  Description of Artificial Sequence: Synthetic oligonucleotide
  Antisense strand to SEQ ID NO: 2147642
uuccucacacgucucauga

SEQ ID NO: 2147644 - RNA, 19 nt, Artificial Sequence
  Description of Artificial Sequence: Synthetic oligonucleotide
  Sense strand starting at position 913 of SEQ ID NO: 1882790
guauuaaaggcagaugagu

SEQ ID NO: 2147645 - RNA, 19 nt, Artificial Sequence
  Description of Artificial Sequence: Synthetic oligonucleotide
  Antisense strand to SEQ ID NO: 2147644
acucaucugccuuuaauac

SEQ ID NO: 2147646 - RNA, 19 nt, Artificial Sequence
  Description of Artificial Sequence: Synthetic oligonucleotide
  Sense strand starting at position 915 of SEQ ID NO: 1882790
auuaaaggcagaugaguuu

SEQ ID NO: 2147647 - RNA, 19 nt, Artificial Sequence
  Description of Artificial Sequence: Synthetic oligonucleotide
  Antisense strand to SEQ ID NO: 2147646
aaacucaucugccuuuaau

SEQ ID NO: 2147648 - RNA, 19 nt, Artificial Sequence
  Description of Artificial Sequence: Synthetic oligonucleotide
  Sense strand starting at position 955 of SEQ ID NO: 1882790
agugucuuacuuuggaaau

SEQ ID NO: 2147649 - RNA, 19 nt, Artificial Sequence
  Description of Artificial Sequence: Synthetic oligonucleotide
  Antisense strand to SEQ ID NO: 2147648
auuuccaaaguaagacacu

SEQ ID NO: 2147650 - RNA, 19 nt, Artificial Sequence
  Description of Artificial Sequence: Synthetic oligonucleotide
  Sense strand starting at position 1091 of SEQ ID NO: 1882790
guuucauuagcguuuaguc

SEQ ID NO: 2147651 - RNA, 19 nt, Artificial Sequence
  Description of Artificial Sequence: Synthetic oligonucleotide
  Antisense strand to SEQ ID NO: 2147650
gacuaaacgcuaaugaaac

SEQ ID NO: 2147652 - RNA, 19 nt, Artificial Sequence
  Description of Artificial Sequence: Synthetic oligonucleotide
  Sense strand starting at position 1379 of SEQ ID NO: 1882790
ugcagugagccuggauuca

SEQ ID NO: 2147653 - RNA, 19 nt, Artificial Sequence
  Description of Artificial Sequence: Synthetic oligonucleotide
  Antisense strand to SEQ ID NO: 2147652
ugaauccaggcucacugca

SEQ ID NO: 2147654 - RNA, 19 nt, Artificial Sequence
  Description of Artificial Sequence: Synthetic oligonucleotide
  Sense strand starting at position 1501 of SEQ ID NO: 1882790
uacuaaacgugguuccaaa

SEQ ID NO: 2147655 - RNA, 19 nt, Artificial Sequence
  Description of Artificial Sequence: Synthetic oligonucleotide
  Antisense strand to SEQ ID NO: 2147654
uuuggaaccacguuuagua

SEQ ID NO: 2147656 - RNA, 19 nt, Artificial Sequence
  Description of Artificial Sequence: Synthetic oligonucleotide
  Sense strand starting at position 1508 of SEQ ID NO: 1882790
cgugguuccaaaggaauau

SEQ ID NO: 2147657 - RNA, 19 nt, Artificial Sequence
  Description of Artificial Sequence: Synthetic oligonucleotide
  Antisense strand to SEQ ID NO: 2147656
auauuccuuuggaaccacg

SEQ ID NO: 2147658 - RNA, 19 nt, Artificial Sequence
  Description of Artificial Sequence: Synthetic oligonucleotide
  Sense strand starting at position 1581 of SEQ ID NO: 1882790
gacacuguucgugaccuca

SEQ ID NO: 2147659 - RNA, 19 nt, Artificial Sequence
  Description of Artificial Sequence: Synthetic oligonucleotide
  Antisense strand to SEQ ID NO: 2147658
ugaggucacgaacaguguc

SEQ ID NO: 2147660 - RNA, 19 nt, Artificial Sequence
  Description of Artificial Sequence: Synthetic oligonucleotide
  Sense strand starting at position 1589 of SEQ ID NO: 1882790
ucgugaccucacuacagaa

SEQ ID NO: 2147661 - RNA, 19 nt, Artificial Sequence
  Description of Artificial Sequence: Synthetic oligonucleotide
  Antisense strand to SEQ ID NO: 2147660
uucuguagugaggucacga

SEQ ID NO: 2147662 - RNA, 19 nt, Artificial Sequence
  Description of Artificial Sequence: Synthetic oligonucleotide
  Sense strand starting at position 1662 of SEQ ID NO: 1882790
uaauuacuuccaggagguc

SEQ ID NO: 2147663 - RNA, 19 nt, Artificial Sequence
  Description of Artificial Sequence: Synthetic oligonucleotide
  Antisense strand to SEQ ID NO: 2147662
gaccuccuggaaguaauua

SEQ ID NO: 2147664 - RNA, 19 nt, Artificial Sequence
  Description of Artificial Sequence: Synthetic oligonucleotide
  Sense strand starting at position 1772 of SEQ ID NO: 1882790
gaggauuugugacagccca

SEQ ID NO: 2147665 - RNA, 19 nt, Artificial Sequence
  Description of Artificial Sequence: Synthetic oligonucleotide
  Antisense strand to SEQ ID NO: 2147664
ugggcugucacaaauccuc

SEQ ID NO: 2147666 - RNA, 19 nt, Artificial Sequence
  Description of Artificial Sequence: Synthetic oligonucleotide
  Sense strand starting at position 1839 of SEQ ID NO: 1882790
ggaaacauguaucuccauu

SEQ ID NO: 2147667 - RNA, 19 nt, Artificial Sequence
  Description of Artificial Sequence: Synthetic oligonucleotide
  Antisense strand to SEQ ID NO: 2147666
aauggagauacauguuucc

SEQ ID NO: 2147668 - RNA, 19 nt, Artificial Sequence
  Description of Artificial Sequence: Synthetic oligonucleotide
  Sense strand starting at position 1933 of SEQ ID NO: 1882790
ucagacaucuggccguuaa

SEQ ID NO: 2147669 - RNA, 19 nt, Artificial Sequence
  Description of Artificial Sequence: Synthetic oligonucleotide
  Antisense strand to SEQ ID NO: 2147668
uuaacggccagaugucuga

SEQ ID NO: 2147670 - RNA, 19 nt, Artificial Sequence
  Description of Artificial Sequence: Synthetic oligonucleotide
  Sense strand starting at position 1934 of SEQ ID NO: 1882790
cagacaucuggccguuaac

SEQ ID NO: 2147671 - RNA, 19 nt, Artificial Sequence
  Description of Artificial Sequence: Synthetic oligonucleotide
  Antisense strand to SEQ ID NO: 2147670
guuaacggccagaugucug

SEQ ID NO: 2147672 - RNA, 19 nt, Artificial Sequence
  Description of Artificial Sequence: Synthetic oligonucleotide
  Sense strand starting at position 2374 of SEQ ID NO: 1882790
gggagcuaagccuggcaua

SEQ ID NO: 2147673 - RNA, 19 nt, Artificial Sequence
  Description of Artificial Sequence: Synthetic oligonucleotide
  Antisense strand to SEQ ID NO: 2147672
uaugccaggcuuagcuccc

SEQ ID NO: 2147674 - RNA, 19 nt, Artificial Sequence
  Description of Artificial Sequence: Synthetic oligonucleotide
  Sense strand starting at position 3210 of SEQ ID NO: 1882790
uggccuguggcuucgugaa

SEQ ID NO: 2147675 - RNA, 19 nt, Artificial Sequence
  Description of Artificial Sequence: Synthetic oligonucleotide
  Antisense strand to SEQ ID NO: 2147674
uucacgaagccacaggcca

SEQ ID NO: 2147676 - RNA, 19 nt, Artificial Sequence
  Description of Artificial Sequence: Synthetic oligonucleotide
  Sense strand starting at position 3287 of SEQ ID NO: 1882790
uugguuuacgcaggagaug

SEQ ID NO: 2147677 - RNA, 19 nt, Artificial Sequence
  Description of Artificial Sequence: Synthetic oligonucleotide
  Antisense strand to SEQ ID NO: 2147676
caucuccugcguaaaccaa

SEQ ID NO: 2147678 - RNA, 19 nt, Artificial Sequence
  Description of Artificial Sequence: Synthetic oligonucleotide
  Sense strand starting at position 3390 of SEQ ID NO: 1882790
ccaaauggcuaccuaaaga

SEQ ID NO: 2147679 - RNA, 19 nt, Artificial Sequence
  Description of Artificial Sequence: Synthetic oligonucleotide
  Antisense strand to SEQ ID NO: 2147678
ucuuuagguagccauuugg

SEQ ID NO: 2147680 - RNA, 19 nt, Artificial Sequence
  Description of Artificial Sequence: Synthetic oligonucleotide
  Sense strand starting at position 3438 of SEQ ID NO: 1882790
cgucauuggccucaucuca

SEQ ID NO: 2147681 - RNA, 19 nt, Artificial Sequence
  Description of Artificial Sequence: Synthetic oligonucleotide
  Antisense strand to SEQ ID NO: 2147680
ugagaugaggccaaugacg

SEQ ID NO: 2147682 - RNA, 19 nt, Artificial Sequence
  Description of Artificial Sequence: Synthetic oligonucleotide
  Sense strand starting at position 3515 of SEQ ID NO: 1882790
cagauagugcuccagcuuu

SEQ ID NO: 2147683 - RNA, 19 nt, Artificial Sequence
  Description of Artificial Sequence: Synthetic oligonucleotide
  Antisense strand to SEQ ID NO: 2147682
aaagcuggagcacuaucug

SEQ ID NO: 2147684 - RNA, 19 nt, Artificial Sequence
  Description of Artificial Sequence: Synthetic oligonucleotide
  Sense strand starting at position 3572 of SEQ ID NO: 1882790
cuuugaaauuccuuaggcu

SEQ ID NO: 2147685 - RNA, 19 nt, Artificial Sequence
  Description of Artificial Sequence: Synthetic oligonucleotide
  Antisense strand to SEQ ID NO: 2147684
agccuaaggaauuucaaag

SEQ ID NO: 2147686 - RNA, 19 nt, Artificial Sequence
  Description of Artificial Sequence: Synthetic oligonucleotide
  Sense strand starting at position 3573 of SEQ ID NO: 1882790
uuugaaauuccuuaggcuu

SEQ ID NO: 2147687 - RNA, 19 nt, Artificial Sequence
  Description of Artificial Sequence: Synthetic oligonucleotide
  Antisense strand to SEQ ID NO: 2147686
aagccuaaggaauuucaaa

SEQ ID NO: 2147688 - RNA, 19 nt, Artificial Sequence
  Description of Artificial Sequence: Synthetic oligonucleotide
  Sense strand starting at position 3591 of SEQ ID NO: 1882790
ucaacaucuuugcugugaa

SEQ ID NO: 2147689 - RNA, 19 nt, Artificial Sequence
  Description of Artificial Sequence: Synthetic oligonucleotide
  Antisense strand to SEQ ID NO: 2147688
uucacagcaaagauguuga

SEQ ID NO: 2147690 - RNA, 19 nt, Artificial Sequence
  Description of Artificial Sequence: Synthetic oligonucleotide
  Sense strand starting at position 3594 of SEQ ID NO: 1882790
acaucuuugcugugaauag

SEQ ID NO: 2147691 - RNA, 19 nt, Artificial Sequence
  Description of Artificial Sequence: Synthetic oligonucleotide
  Antisense strand to SEQ ID NO: 2147690
cuauucacagcaaagaugu

SEQ ID NO: 2147692 - RNA, 19 nt, Artificial Sequence
  Description of Artificial Sequence: Synthetic oligonucleotide
  Sense strand starting at position 3656 of SEQ ID NO: 1882790
ucgggcugaucuguugaau

SEQ ID NO: 2147693 - RNA, 19 nt, Artificial Sequence
  Description of Artificial Sequence: Synthetic oligonucleotide
  Antisense strand to SEQ ID NO: 2147692
auucaacagaucagcccga

SEQ ID NO: 2147694 - RNA, 19 nt, Artificial Sequence
  Description of Artificial Sequence: Synthetic oligonucleotide
  Sense strand starting at position 3706 of SEQ ID NO: 1882790
gcacuucuaguuucgugua

SEQ ID NO: 2147695 - RNA, 19 nt, Artificial Sequence
  Description of Artificial Sequence: Synthetic oligonucleotide
  Antisense strand to SEQ ID NO: 2147694
uacacgaaacuagaagugc

SEQ ID NO: 2147696 - RNA, 19 nt, Artificial Sequence
  Description of Artificial Sequence: Synthetic oligonucleotide
  Sense strand starting at position 3718 of SEQ ID NO: 1882790
ucguguaccuuccuaauaa

SEQ ID NO: 2147697 - RNA, 19 nt, Artificial Sequence
  Description of Artificial Sequence: Synthetic oligonucleotide
  Antisense strand to SEQ ID NO: 2147696
uuauuaggaagguacacga

SEQ ID NO: 2147698 - RNA, 19 nt, Artificial Sequence
  Description of Artificial Sequence: Synthetic oligonucleotide
  Sense strand starting at position 3751 of SEQ ID NO: 1882790
uuccauauguccucaggga

SEQ ID NO: 2147699 - RNA, 19 nt, Artificial Sequence
  Description of Artificial Sequence: Synthetic oligonucleotide
  Antisense strand to SEQ ID NO: 2147698
ucccugaggacauauggaa

SEQ ID NO: 2147700 - RNA, 19 nt, Artificial Sequence
  Description of Artificial Sequence: Synthetic oligonucleotide
  Sense strand starting at position 3764 of SEQ ID NO: 1882790
cagggacaguugcuuugau

SEQ ID NO: 2147701 - RNA, 19 nt, Artificial Sequence
  Description of Artificial Sequence: Synthetic oligonucleotide
  Antisense strand to SEQ ID NO: 2147700
aucaaagcaacugucccug

SEQ ID NO: 2147702 - RNA, 19 nt, Artificial Sequence
  Description of Artificial Sequence: Synthetic oligonucleotide
  Sense strand starting at position 3765 of SEQ ID NO: 1882790
agggacaguugcuuugauu

SEQ ID NO: 2147703 - RNA, 19 nt, Artificial Sequence
  Description of Artificial Sequence: Synthetic oligonucleotide
  Antisense strand to SEQ ID NO: 2147702
aaucaaagcaacugucccu

SEQ ID NO: 2147704 - RNA, 19 nt, Artificial Sequence
  Description of Artificial Sequence: Synthetic oligonucleotide
  Sense strand starting at position 3895 of SEQ ID NO: 1882790
gugauuccugagugagggu

SEQ ID NO: 2147705 - RNA, 19 nt, Artificial Sequence
  Description of Artificial Sequence: Synthetic oligonucleotide
  Antisense strand to SEQ ID NO: 2147704
acccucacucaggaaucac

SEQ ID NO: 2147706 - RNA, 19 nt, Artificial Sequence
  Description of Artificial Sequence: Synthetic oligonucleotide
  Sense strand starting at position 3902 of SEQ ID NO: 1882790
cugagugaggguuacuaua

SEQ ID NO: 2147707 - RNA, 19 nt, Artificial Sequence
  Description of Artificial Sequence: Synthetic oligonucleotide
  Antisense strand to SEQ ID NO: 2147706
uauaguaacccucacucag

SEQ ID NO: 2147708 - RNA, 19 nt, Artificial Sequence
  Description of Artificial Sequence: Synthetic oligonucleotide
  Sense strand starting at position 3904 of SEQ ID NO: 1882790
gagugaggguuacuauaaa

SEQ ID NO: 2147709 - RNA, 19 nt, Artificial Sequence
  Description of Artificial Sequence: Synthetic oligonucleotide
  Antisense strand to SEQ ID NO: 2147708
uuuauaguaacccucacuc

SEQ ID NO: 2147710 - RNA, 19 nt, Artificial Sequence
  Description of Artificial Sequence: Synthetic oligonucleotide
  Sense strand starting at position 3949 of SEQ ID NO: 1882790
ggauauugacacuguuauu

SEQ ID NO: 2147711 - RNA, 19 nt, Artificial Sequence
  Description of Artificial Sequence: Synthetic oligonucleotide
  Antisense strand to SEQ ID NO: 2147710
aauaacagugucaauaucc

SEQ ID NO: 2147712 - RNA, 19 nt, Artificial Sequence
  Description of Artificial Sequence: Synthetic oligonucleotide
  Sense strand starting at position 3962 of SEQ ID NO: 1882790
guuauuguacuuugugaau

SEQ ID NO: 2147713 - RNA, 19 nt, Artificial Sequence
  Description of Artificial Sequence: Synthetic oligonucleotide
  Antisense strand to SEQ ID NO: 2147712
auucacaaaguacaauaac

SEQ ID NO: 2147714 - RNA, 19 nt, Artificial Sequence
  Description of Artificial Sequence: Synthetic oligonucleotide
  Sense strand starting at position 12 of SEQ ID NO: 1882791
aaggccugucagggaagau

SEQ ID NO: 2147715 - RNA, 19 nt, Artificial Sequence
  Description of Artificial Sequence: Synthetic oligonucleotide
  Antisense strand to SEQ ID NO: 2147714
aucuucccugacaggccuu

SEQ ID NO: 2147716 - RNA, 19 nt, Artificial Sequence
  Description of Artificial Sequence: Synthetic oligonucleotide
  Sense strand starting at position 32 of SEQ ID NO: 1882791
ggguuagaauccugaggau

SEQ ID NO: 2147717 - RNA, 19 nt, Artificial Sequence
  Description of Artificial Sequence: Synthetic oligonucleotide
  Antisense strand to SEQ ID NO: 2147716
auccucaggauucuaaccc

SEQ ID NO: 2147718 - RNA, 19 nt, Artificial Sequence
  Description of Artificial Sequence: Synthetic oligonucleotide
  Sense strand starting at position 143 of SEQ ID NO: 1882791
gaggccuaaucugcagaga

SEQ ID NO: 2147719 - RNA, 19 nt, Artificial Sequence
  Description of Artificial Sequence: Synthetic oligonucleotide
  Antisense strand to SEQ ID NO: 2147718
ucucugcagauuaggccuc

SEQ ID NO: 2147720 - RNA, 19 nt, Artificial Sequence
  Description of Artificial Sequence: Synthetic oligonucleotide
  Sense strand starting at position 144 of SEQ ID NO: 1882791
aggccuaaucugcagagaa

SEQ ID NO: 2147721 - RNA, 19 nt, Artificial Sequence
  Description of Artificial Sequence: Synthetic oligonucleotide
  Antisense strand to SEQ ID NO: 2147720
uucucugcagauuaggccu

SEQ ID NO: 2147722 - RNA, 19 nt, Artificial Sequence
  Description of Artificial Sequence: Synthetic oligonucleotide
  Sense strand starting at position 146 of SEQ ID NO: 1882791
gccuaaucugcagagaaag

SEQ ID NO: 2147723 - RNA, 19 nt, Artificial Sequence
  Description of Artificial Sequence: Synthetic oligonucleotide
  Antisense strand to SEQ ID NO: 2147722
cuuucucugcagauuaggc

SEQ ID NO: 2147724 - RNA, 19 nt, Artificial Sequence
  Description of Artificial Sequence: Synthetic oligonucleotide
  Sense strand starting at position 236 of SEQ ID NO: 1882791
acccgcauuucugcacaga

SEQ ID NO: 2147725 - RNA, 19 nt, Artificial Sequence
  Description of Artificial Sequence: Synthetic oligonucleotide
  Antisense strand to SEQ ID NO: 2147724
ucugugcagaaaugcgggu

SEQ ID NO: 2147726 - RNA, 19 nt, Artificial Sequence
  Description of Artificial Sequence: Synthetic oligonucleotide
  Sense strand starting at position 237 of SEQ ID NO: 1882791
cccgcauuucugcacagau

SEQ ID NO: 2147727 - RNA, 19 nt, Artificial Sequence
  Description of Artificial Sequence: Synthetic oligonucleotide
  Antisense strand to SEQ ID NO: 2147726
aucugugcagaaaugcggg

SEQ ID NO: 2147728 - RNA, 19 nt, Artificial Sequence
  Description of Artificial Sequence: Synthetic oligonucleotide
  Sense strand starting at position 252 of SEQ ID NO: 1882791
agaugcaucucccauaaag

SEQ ID NO: 2147729 - RNA, 19 nt, Artificial Sequence
  Description of Artificial Sequence: Synthetic oligonucleotide
  Antisense strand to SEQ ID NO: 2147728
cuuuaugggagaugcaucu

SEQ ID NO: 2147730 - RNA, 19 nt, Artificial Sequence
  Description of Artificial Sequence: Synthetic oligonucleotide
  Sense strand starting at position 467 of SEQ ID NO: 1882791
gucugaggcuuccucagaa

SEQ ID NO: 2147731 - RNA, 19 nt, Artificial Sequence
  Description of Artificial Sequence: Synthetic oligonucleotide
  Antisense strand to SEQ ID NO: 2147730
uucugaggaagccucagac

SEQ ID NO: 2147732 - RNA, 19 nt, Artificial Sequence
  Description of Artificial Sequence: Synthetic oligonucleotide
  Sense strand starting at position 474 of SEQ ID NO: 1882791
gcuuccucagaacauuaga

SEQ ID NO: 2147733 - RNA, 19 nt, Artificial Sequence
  Description of Artificial Sequence: Synthetic oligonucleotide
  Antisense strand to SEQ ID NO: 2147732
ucuaauguucugaggaagc

SEQ ID NO: 2147734 - RNA, 19 nt, Artificial Sequence
  Description of Artificial Sequence: Synthetic oligonucleotide
  Sense strand starting at position 620 of SEQ ID NO: 1882791
gggagauauuagcaaagua

SEQ ID NO: 2147735 - RNA, 19 nt, Artificial Sequence
  Description of Artificial Sequence: Synthetic oligonucleotide
  Antisense strand to SEQ ID NO: 2147734
uacuuugcuaauaucuccc

SEQ ID NO: 2147736 - RNA, 19 nt, Artificial Sequence
  Description of Artificial Sequence: Synthetic oligonucleotide
  Sense strand starting at position 628 of SEQ ID NO: 1882791
uuagcaaaguaucaugaga

SEQ ID NO: 2147737 - RNA, 19 nt, Artificial Sequence
  Description of Artificial Sequence: Synthetic oligonucleotide
  Antisense strand to SEQ ID NO: 2147736
ucucaugauacuuugcuaa

SEQ ID NO: 2147738 - RNA, 19 nt, Artificial Sequence
  Description of Artificial Sequence: Synthetic oligonucleotide
  Sense strand starting at position 633 of SEQ ID NO: 1882791
aaaguaucaugagagggau

SEQ ID NO: 2147739 - RNA, 19 nt, Artificial Sequence
  Description of Artificial Sequence: Synthetic oligonucleotide
  Antisense strand to SEQ ID NO: 2147738
aucccucucaugauacuuu

SEQ ID NO: 2147740 - RNA, 19 nt, Artificial Sequence
  Description of Artificial Sequence: Synthetic oligonucleotide
  Sense strand starting at position 650 of SEQ ID NO: 1882791
auuugaauuuccugguccu

SEQ ID NO: 2147741 - RNA, 19 nt, Artificial Sequence
  Description of Artificial Sequence: Synthetic oligonucleotide
  Antisense strand to SEQ ID NO: 2147740
aggaccaggaaauucaaau

SEQ ID NO: 2147742 - RNA, 19 nt, Artificial Sequence
  Description of Artificial Sequence: Synthetic oligonucleotide
  Sense strand starting at position 802 of SEQ ID NO: 1882791
augucagugggcugaugaa

SEQ ID NO: 2147743 - RNA, 19 nt, Artificial Sequence
  Description of Artificial Sequence: Synthetic oligonucleotide
  Antisense strand to SEQ ID NO: 2147742
uucaucagcccacugacau

SEQ ID NO: 2147744 - RNA, 19 nt, Artificial Sequence
  Description of Artificial Sequence: Synthetic oligonucleotide
  Sense strand starting at position 1281 of SEQ ID NO: 1882791
gcggcguuggguucugaau

SEQ ID NO: 2147745 - RNA, 19 nt, Artificial Sequence
  Description of Artificial Sequence: Synthetic oligonucleotide
  Antisense strand to SEQ ID NO: 2147744
auucagaacccaacgccgc

SEQ ID NO: 2147746 - RNA, 19 nt, Artificial Sequence
  Description of Artificial Sequence: Synthetic oligonucleotide
  Sense strand starting at position 1287 of SEQ ID NO: 1882791
uuggguucugaauguucca

SEQ ID NO: 2147747 - RNA, 19 nt, Artificial Sequence
  Description of Artificial Sequence: Synthetic oligonucleotide
  Antisense strand to SEQ ID NO: 2147746
uggaacauucagaacccaa

SEQ ID NO: 2147748 - RNA, 19 nt, Artificial Sequence
  Description of Artificial Sequence: Synthetic oligonucleotide
  Sense strand starting at position 1290 of SEQ ID NO: 1882791
gguucugaauguuccaguu

SEQ ID NO: 2147749 - RNA, 19 nt, Artificial Sequence
  Description of Artificial Sequence: Synthetic oligonucleotide
  Antisense strand to SEQ ID NO: 2147748
aacuggaacauucagaacc

SEQ ID NO: 2147750 - RNA, 19 nt, Artificial Sequence
  Description of Artificial Sequence: Synthetic oligonucleotide
  Sense strand starting at position 1403 of SEQ ID NO: 1882791
ucguauguuccauggacac

SEQ ID NO: 2147751 - RNA, 19 nt, Artificial Sequence
  Description of Artificial Sequence: Synthetic oligonucleotide
  Antisense strand to SEQ ID NO: 2147750
guguccauggaacauacga

SEQ ID NO: 2147752 - RNA, 19 nt, Artificial Sequence
  Description of Artificial Sequence: Synthetic oligonucleotide
  Sense strand starting at position 1488 of SEQ ID NO: 1882791
gguuagagagauugugcga

SEQ ID NO: 2147753 - RNA, 19 nt, Artificial Sequence
  Description of Artificial Sequence: Synthetic oligonucleotide
  Antisense strand to SEQ ID NO: 2147752
ucgcacaaucucucuaacc

SEQ ID NO: 2147754 - RNA, 19 nt, Artificial Sequence
  Description of Artificial Sequence: Synthetic oligonucleotide
  Sense strand starting at position 1491 of SEQ ID NO: 1882791
uagagagauugugcgagaa

SEQ ID NO: 2147755 - RNA, 19 nt, Artificial Sequence
  Description of Artificial Sequence: Synthetic oligonucleotide
  Antisense strand to SEQ ID NO: 2147754
uucucgcacaaucucucua

SEQ ID NO: 2147756 - RNA, 19 nt, Artificial Sequence
  Description of Artificial Sequence: Synthetic oligonucleotide
  Sense strand starting at position 1493 of SEQ ID NO: 1882791
gagagauugugcgagaaca

SEQ ID NO: 2147757 - RNA, 19 nt, Artificial Sequence
  Description of Artificial Sequence: Synthetic oligonucleotide
  Antisense strand to SEQ ID NO: 2147756
uguucucgcacaaucucuc

SEQ ID NO: 2147758 - RNA, 19 nt, Artificial Sequence
  Description of Artificial Sequence: Synthetic oligonucleotide
  Sense strand starting at position 1495 of SEQ ID NO: 1882791
gagauugugcgagaacaag

SEQ ID NO: 2147759 - RNA, 19 nt, Artificial Sequence
  Description of Artificial Sequence: Synthetic oligonucleotide
  Antisense strand to SEQ ID NO: 2147758
cuuguucucgcacaaucuc

SEQ ID NO: 2147760 - RNA, 19 nt, Artificial Sequence
  Description of Artificial Sequence: Synthetic oligonucleotide
  Sense strand starting at position 1992 of SEQ ID NO: 1882791
acaugauuccagcgcagaa

SEQ ID NO: 2147761 - RNA, 19 nt, Artificial Sequence
  Description of Artificial Sequence: Synthetic oligonucleotide
  Antisense strand to SEQ ID NO: 2147760
uucugcgcuggaaucaugu

SEQ ID NO: 2147762 - RNA, 19 nt, Artificial Sequence
  Description of Artificial Sequence: Synthetic oligonucleotide
  Sense strand starting at position 1994 of SEQ ID NO: 1882791
augauuccagcgcagaaau

SEQ ID NO: 2147763 - RNA, 19 nt, Artificial Sequence
  Description of Artificial Sequence: Synthetic oligonucleotide
  Antisense strand to SEQ ID NO: 2147762
auuucugcgcuggaaucau

SEQ ID NO: 2147764 - RNA, 19 nt, Artificial Sequence
  Description of Artificial Sequence: Synthetic oligonucleotide
  Sense strand starting at position 2105 of SEQ ID NO: 1882791
ccguggucuguacgugaca

SEQ ID NO: 2147765 - RNA, 19 nt, Artificial Sequence
  Description of Artificial Sequence: Synthetic oligonucleotide
  Antisense strand to SEQ ID NO: 2147764
ugucacguacagaccacgg

SEQ ID NO: 2147766 - RNA, 19 nt, Artificial Sequence
  Description of Artificial Sequence: Synthetic oligonucleotide
  Sense strand starting at position 2107 of SEQ ID NO: 1882791
guggucuguacgugacacu

SEQ ID NO: 2147767 - RNA, 19 nt, Artificial Sequence
  Description of Artificial Sequence: Synthetic oligonucleotide
  Antisense strand to SEQ ID NO: 2147766
agugucacguacagaccac

SEQ ID NO: 2147768 - RNA, 19 nt, Artificial Sequence
  Description of Artificial Sequence: Synthetic oligonucleotide
  Sense strand starting at position 2213 of SEQ ID NO: 1882791
gagcccugggccugugauu

SEQ ID NO: 2147769 - RNA, 19 nt, Artificial Sequence
  Description of Artificial Sequence: Synthetic oligonucleotide
  Antisense strand to SEQ ID NO: 2147768
aaucacaggcccagggcuc

SEQ ID NO: 2147770 - RNA, 19 nt, Artificial Sequence
  Description of Artificial Sequence: Synthetic oligonucleotide
  Sense strand starting at position 2932 of SEQ ID NO: 1882791
cuuugcauacuggaaauau

SEQ ID NO: 2147771 - RNA, 19 nt, Artificial Sequence
  Description of Artificial Sequence: Synthetic oligonucleotide
  Antisense strand to SEQ ID NO: 2147770
auauuuccaguaugcaaag

SEQ ID NO: 2147772 - RNA, 19 nt, Artificial Sequence
  Description of Artificial Sequence: Synthetic oligonucleotide
  Sense strand starting at position 3171 of SEQ ID NO: 1882791
aauauacgauaugugaguu

SEQ ID NO: 2147773 - RNA, 19 nt, Artificial Sequence
  Description of Artificial Sequence: Synthetic oligonucleotide
  Antisense strand to SEQ ID NO: 2147772
aacucacauaucguauauu

SEQ ID NO: 2147774 - RNA, 19 nt, Artificial Sequence
  Description of Artificial Sequence: Synthetic oligonucleotide
  Sense strand starting at position 3172 of SEQ ID NO: 1882791
auauacgauaugugaguua

SEQ ID NO: 2147775 - RNA, 19 nt, Artificial Sequence
  Description of Artificial Sequence: Synthetic oligonucleotide
  Antisense strand to SEQ ID NO: 2147774
uaacucacauaucguauau

SEQ ID NO: 2147776 - RNA, 19 nt, Artificial Sequence
  Description of Artificial Sequence: Synthetic oligonucleotide
  Sense strand starting at position 3175 of SEQ ID NO: 1882791
uacgauaugugaguuaauu

SEQ ID NO: 2147777 - RNA, 19 nt, Artificial Sequence
  Description of Artificial Sequence: Synthetic oligonucleotide
  Antisense strand to SEQ ID NO: 2147776
aauuaacucacauaucgua

SEQ ID NO: 2147778 - RNA, 19 nt, Artificial Sequence
  Description of Artificial Sequence: Synthetic oligonucleotide
  Sense strand starting at position 3177 of SEQ ID NO: 1882791
cgauaugugaguuaauuau

SEQ ID NO: 2147779 - RNA, 19 nt, Artificial Sequence
  Description of Artificial Sequence: Synthetic oligonucleotide
  Antisense strand to SEQ ID NO: 2147778
auaauuaacucacauaucg

SEQ ID NO: 2147780 - RNA, 19 nt, Artificial Sequence
  Description of Artificial Sequence: Synthetic oligonucleotide
  Sense strand starting at position 3202 of SEQ ID NO: 1882791
agacuacguugaugagaga

SEQ ID NO: 2147781 - RNA, 19 nt, Artificial Sequence
  Description of Artificial Sequence: Synthetic oligonucleotide
  Antisense strand to SEQ ID NO: 2147780
ucucucaucaacguagucu

SEQ ID NO: 2147782 - RNA, 19 nt, Artificial Sequence
  Description of Artificial Sequence: Synthetic oligonucleotide
  Sense strand starting at position 3205 of SEQ ID NO: 1882791
cuacguugaugagagaauu

SEQ ID NO: 2147783 - RNA, 19 nt, Artificial Sequence
  Description of Artificial Sequence: Synthetic oligonucleotide
  Antisense strand to SEQ ID NO: 2147782
aauucucucaucaacguag

SEQ ID NO: 2147784 - RNA, 19 nt, Artificial Sequence
  Description of Artificial Sequence: Synthetic oligonucleotide
  Sense strand starting at position 3329 of SEQ ID NO: 1882791
agaauagaaugacaaagaa

SEQ ID NO: 2147785 - RNA, 19 nt, Artificial Sequence
  Description of Artificial Sequence: Synthetic oligonucleotide
  Antisense strand to SEQ ID NO: 2147784
uucuuugucauucuauucu

SEQ ID NO: 2147786 - RNA, 19 nt, Artificial Sequence
  Description of Artificial Sequence: Synthetic oligonucleotide
  Sense strand starting at position 3452 of SEQ ID NO: 1882791
gacacugugccugaaagca

SEQ ID NO: 2147787 - RNA, 19 nt, Artificial Sequence
  Description of Artificial Sequence: Synthetic oligonucleotide
  Antisense strand to SEQ ID NO: 2147786
ugcuuucaggcacaguguc

SEQ ID NO: 2147788 - RNA, 19 nt, Artificial Sequence
  Description of Artificial Sequence: Synthetic oligonucleotide
  Sense strand starting at position 3748 of SEQ ID NO: 1882791
gcaagauuccgucaccaaa

SEQ ID NO: 2147789 - RNA, 19 nt, Artificial Sequence
  Description of Artificial Sequence: Synthetic oligonucleotide
  Antisense strand to SEQ ID NO: 2147788
uuuggugacggaaucuugc

SEQ ID NO: 2147790 - RNA, 19 nt, Artificial Sequence
  Description of Artificial Sequence: Synthetic oligonucleotide
  Sense strand starting at position 3751 of SEQ ID NO: 1882791
agauuccgucaccaaauua

SEQ ID NO: 2147791 - RNA, 19 nt, Artificial Sequence
  Description of Artificial Sequence: Synthetic oligonucleotide
  Antisense strand to SEQ ID NO: 2147790
uaauuuggugacggaaucu

SEQ ID NO: 2147792 - RNA, 19 nt, Artificial Sequence
  Description of Artificial Sequence: Synthetic oligonucleotide
  Sense strand starting at position 3889 of SEQ ID NO: 1882791
gugaaaucuccacagccca

SEQ ID NO: 2147793 - RNA, 19 nt, Artificial Sequence
  Description of Artificial Sequence: Synthetic oligonucleotide
  Antisense strand to SEQ ID NO: 2147792
ugggcuguggagauuucac

SEQ ID NO: 2147794 - RNA, 19 nt, Artificial Sequence
  Description of Artificial Sequence: Synthetic oligonucleotide
  Sense strand starting at position 12 of SEQ ID NO: 1882792
aaggccugucagggaagau

SEQ ID NO: 2147795 - RNA, 19 nt, Artificial Sequence
  Description of Artificial Sequence: Synthetic oligonucleotide
  Antisense strand to SEQ ID NO: 2147794
aucuucccugacaggccuu

SEQ ID NO: 2147796 - RNA, 19 nt, Artificial Sequence
  Description of Artificial Sequence: Synthetic oligonucleotide
  Sense strand starting at position 143 of SEQ ID NO: 1882792
gaggccuaaucugcagaga

SEQ ID NO: 2147797 - RNA, 19 nt, Artificial Sequence
  Description of Artificial Sequence: Synthetic oligonucleotide
  Antisense strand to SEQ ID NO: 2147796
ucucugcagauuaggccuc

SEQ ID NO: 2147798 - RNA, 19 nt, Artificial Sequence
  Description of Artificial Sequence: Synthetic oligonucleotide
  Sense strand starting at position 144 of SEQ ID NO: 1882792
aggccuaaucugcagagaa

SEQ ID NO: 2147799 - RNA, 19 nt, Artificial Sequence
  Description of Artificial Sequence: Synthetic oligonucleotide
  Antisense strand to SEQ ID NO: 2147798
uucucugcagauuaggccu

SEQ ID NO: 2147800 - RNA, 19 nt, Artificial Sequence
  Description of Artificial Sequence: Synthetic oligonucleotide
  Sense strand starting at position 146 of SEQ ID NO: 1882792
gccuaaucugcagagaaag

SEQ ID NO: 2147801 - RNA, 19 nt, Artificial Sequence
  Description of Artificial Sequence: Synthetic oligonucleotide
  Antisense strand to SEQ ID NO: 2147800
cuuucucugcagauuaggc

SEQ ID NO: 2147802 - RNA, 19 nt, Artificial Sequence
  Description of Artificial Sequence: Synthetic oligonucleotide
  Sense strand starting at position 236 of SEQ ID NO: 1882792
acccgcauuucugcacaga

SEQ ID NO: 2147803 - RNA, 19 nt, Artificial Sequence
  Description of Artificial Sequence: Synthetic oligonucleotide
  Antisense strand to SEQ ID NO: 2147802
ucugugcagaaaugcgggu

SEQ ID NO: 2147804 - RNA, 19 nt, Artificial Sequence
  Description of Artificial Sequence: Synthetic oligonucleotide
  Sense strand starting at position 237 of SEQ ID NO: 1882792
cccgcauuucugcacagau

SEQ ID NO: 2147805 - RNA, 19 nt, Artificial Sequence
  Description of Artificial Sequence: Synthetic oligonucleotide
  Antisense strand to SEQ ID NO: 2147804
aucugugcagaaaugcggg

SEQ ID NO: 2147806 - RNA, 19 nt, Artificial Sequence
  Description of Artificial Sequence: Synthetic oligonucleotide
  Sense strand starting at position 474 of SEQ ID NO: 1882792
gcuuccucagaacauuaga

SEQ ID NO: 2147807 - RNA, 19 nt, Artificial Sequence
  Description of Artificial Sequence: Synthetic oligonucleotide
  Antisense strand to SEQ ID NO: 2147806
ucuaauguucugaggaagc

SEQ ID NO: 2147808 - RNA, 19 nt, Artificial Sequence
  Description of Artificial Sequence: Synthetic oligonucleotide
  Sense strand starting at position 650 of SEQ ID NO: 1882792
auuugaauuuccugguccu

SEQ ID NO: 2147809 - RNA, 19 nt, Artificial Sequence
  Description of Artificial Sequence: Synthetic oligonucleotide
  Antisense strand to SEQ ID NO: 2147808
aggaccaggaaauucaaau

SEQ ID NO: 2147810 - RNA, 19 nt, Artificial Sequence
  Description of Artificial Sequence: Synthetic oligonucleotide
  Sense strand starting at position 1281 of SEQ ID NO: 1882792
gcggcguuggguucugaau

SEQ ID NO: 2147811 - RNA, 19 nt, Artificial Sequence
  Description of Artificial Sequence: Synthetic oligonucleotide
  Antisense strand to SEQ ID NO: 2147810
auucagaacccaacgccgc

SEQ ID NO: 2147812 - RNA, 19 nt, Artificial Sequence
  Description of Artificial Sequence: Synthetic oligonucleotide
  Sense strand starting at position 1491 of SEQ ID NO: 1882792
uagagagauugugcgagaa

SEQ ID NO: 2147813 - RNA, 19 nt, Artificial Sequence
  Description of Artificial Sequence: Synthetic oligonucleotide
  Antisense strand to SEQ ID NO: 2147812
uucucgcacaaucucucua

SEQ ID NO: 2147814 - RNA, 19 nt, Artificial Sequence
  Description of Artificial Sequence: Synthetic oligonucleotide
  Sense strand starting at position 1495 of SEQ ID NO: 1882792
gagauugugcgagaacaag

SEQ ID NO: 2147815 - RNA, 19 nt, Artificial Sequence
  Description of Artificial Sequence: Synthetic oligonucleotide
  Antisense strand to SEQ ID NO: 2147814
cuuguucucgcacaaucuc

SEQ ID NO: 2147816 - RNA, 19 nt, Artificial Sequence
  Description of Artificial Sequence: Synthetic oligonucleotide
  Sense strand starting at position 1994 of SEQ ID NO: 1882792
augauuccagcgcagaaau

SEQ ID NO: 2147817 - RNA, 19 nt, Artificial Sequence
  Description of Artificial Sequence: Synthetic oligonucleotide
  Antisense strand to SEQ ID NO: 2147816
auuucugcgcuggaaucau

SEQ ID NO: 2147818 - RNA, 19 nt, Artificial Sequence
  Description of Artificial Sequence: Synthetic oligonucleotide
  Sense strand starting at position 2932 of SEQ ID NO: 1882792
cuuugcauacuggaaauau

SEQ ID NO: 2147819 - RNA, 19 nt, Artificial Sequence
  Description of Artificial Sequence: Synthetic oligonucleotide
  Antisense strand to SEQ ID NO: 2147818
auauuuccaguaugcaaag

SEQ ID NO: 2147820 - RNA, 19 nt, Artificial Sequence
  Description of Artificial Sequence: Synthetic oligonucleotide
  Sense strand starting at position 3171 of SEQ ID NO: 1882792
aauauacgauaugugaguu

SEQ ID NO: 2147821 - RNA, 19 nt, Artificial Sequence
  Description of Artificial Sequence: Synthetic oligonucleotide
  Antisense strand to SEQ ID NO: 2147820
aacucacauaucguauauu

SEQ ID NO: 2147822 - RNA, 19 nt, Artificial Sequence
  Description of Artificial Sequence: Synthetic oligonucleotide
  Sense strand starting at position 3172 of SEQ ID NO: 1882792
auauacgauaugugaguua

SEQ ID NO: 2147823 - RNA, 19 nt, Artificial Sequence
  Description of Artificial Sequence: Synthetic oligonucleotide
  Antisense strand to SEQ ID NO: 2147822
uaacucacauaucguauau

SEQ ID NO: 2147824 - RNA, 19 nt, Artificial Sequence
  Description of Artificial Sequence: Synthetic oligonucleotide
  Sense strand starting at position 3175 of SEQ ID NO: 1882792
uacgauaugugaguuaauu

SEQ ID NO: 2147825 - RNA, 19 nt, Artificial Sequence
  Description of Artificial Sequence: Synthetic oligonucleotide
  Antisense strand to SEQ ID NO: 2147824
aauuaacucacauaucgua

SEQ ID NO: 2147826 - RNA, 19 nt, Artificial Sequence
  Description of Artificial Sequence: Synthetic oligonucleotide
  Sense strand starting at position 3177 of SEQ ID NO: 1882792
cgauaugugaguuaauuau

SEQ ID NO: 2147827 - RNA, 19 nt, Artificial Sequence
  Description of Artificial Sequence: Synthetic oligonucleotide
  Antisense strand to SEQ ID NO: 2147826
auaauuaacucacauaucg

SEQ ID NO: 2147828 - RNA, 19 nt, Artificial Sequence
  Description of Artificial Sequence: Synthetic oligonucleotide
  Sense strand starting at position 3329 of SEQ ID NO: 1882792
agaauagaaugacaaagaa

SEQ ID NO: 2147829 - RNA, 19 nt, Artificial Sequence
  Description of Artificial Sequence: Synthetic oligonucleotide
  Antisense strand to SEQ ID NO: 2147828
uucuuugucauucuauucu

SEQ ID NO: 2147830 - RNA, 19 nt, Artificial Sequence
  Description of Artificial Sequence: Synthetic oligonucleotide
  Sense strand starting at position 3452 of SEQ ID NO: 1882792
gacacugugccugaaagca

SEQ ID NO: 2147831 - RNA, 19 nt, Artificial Sequence
  Description of Artificial Sequence: Synthetic oligonucleotide
  Antisense strand to SEQ ID NO: 2147830
ugcuuucaggcacaguguc

SEQ ID NO: 2147832 - RNA, 19 nt, Artificial Sequence
  Description of Artificial Sequence: Synthetic oligonucleotide
  Sense strand starting at position 3748 of SEQ ID NO: 1882792
gcaagauuccgucaccaaa

SEQ ID NO: 2147833 - RNA, 19 nt, Artificial Sequence
  Description of Artificial Sequence: Synthetic oligonucleotide
  Antisense strand to SEQ ID NO: 2147832
uuuggugacggaaucuugc

SEQ ID NO: 2147834 - RNA, 19 nt, Artificial Sequence
  Description of Artificial Sequence: Synthetic oligonucleotide
  Sense strand starting at position 3751 of SEQ ID NO: 1882792
agauuccgucaccaaauua

SEQ ID NO: 2147835 - RNA, 19 nt, Artificial Sequence
  Description of Artificial Sequence: Synthetic oligonucleotide
  Antisense strand to SEQ ID NO: 2147834
uaauuuggugacggaaucu

SEQ ID NO: 2147836 - RNA, 19 nt, Artificial Sequence
  Description of Artificial Sequence: Synthetic oligonucleotide
  Sense strand starting at position 3889 of SEQ ID NO: 1882792
gugaaaucuccacagccca

SEQ ID NO: 2147837 - RNA, 19 nt, Artificial Sequence
  Description of Artificial Sequence: Synthetic oligonucleotide
  Antisense strand to SEQ ID NO: 2147836
ugggcuguggagauuucac

SEQ ID NO: 2147838 - RNA, 19 nt, Artificial Sequence
  Description of Artificial Sequence: Synthetic oligonucleotide
  Sense strand starting at position 145 of SEQ ID NO: 1882793
gaggccuaaucugcagaga

SEQ ID NO: 2147839 - RNA, 19 nt, Artificial Sequence
  Description of Artificial Sequence: Synthetic oligonucleotide
  Antisense strand to SEQ ID NO: 2147838
ucucugcagauuaggccuc

SEQ ID NO: 2147840 - RNA, 19 nt, Artificial Sequence
  Description of Artificial Sequence: Synthetic oligonucleotide
  Sense strand starting at position 238 of SEQ ID NO: 1882793
acccgcauuucugcacaga

SEQ ID NO: 2147841 - RNA, 19 nt, Artificial Sequence
  Description of Artificial Sequence: Synthetic oligonucleotide
  Antisense strand to SEQ ID NO: 2147840
ucugugcagaaaugcgggu

SEQ ID NO: 2147842 - RNA, 19 nt, Artificial Sequence
  Description of Artificial Sequence: Synthetic oligonucleotide
  Sense strand starting at position 239 of SEQ ID NO: 1882793
cccgcauuucugcacagau

SEQ ID NO: 2147843 - RNA, 19 nt, Artificial Sequence
  Description of Artificial Sequence: Synthetic oligonucleotide
  Antisense strand to SEQ ID NO: 2147842
aucugugcagaaaugcggg

SEQ ID NO: 2147844 - RNA, 19 nt, Artificial Sequence
  Description of Artificial Sequence: Synthetic oligonucleotide
  Sense strand starting at position 476 of SEQ ID NO: 1882793
gcuuccucagaacauuaga

SEQ ID NO: 2147845 - RNA, 19 nt, Artificial Sequence
  Description of Artificial Sequence: Synthetic oligonucleotide
  Antisense strand to SEQ ID NO: 2147844
ucuaauguucugaggaagc

SEQ ID NO: 2147846 - RNA, 19 nt, Artificial Sequence
  Description of Artificial Sequence: Synthetic oligonucleotide
  Sense strand starting at position 652 of SEQ ID NO: 1882793
auuugaauuuccugguccu

SEQ ID NO: 2147847 - RNA, 19 nt, Artificial Sequence
  Description of Artificial Sequence: Synthetic oligonucleotide
  Antisense strand to SEQ ID NO: 2147846
aggaccaggaaauucaaau

SEQ ID NO: 2147848 - RNA, 19 nt, Artificial Sequence
  Description of Artificial Sequence: Synthetic oligonucleotide
  Sense strand starting at position 1283 of SEQ ID NO: 1882793
gcggcguuggguucugaau

SEQ ID NO: 2147849 - RNA, 19 nt, Artificial Sequence
  Description of Artificial Sequence: Synthetic oligonucleotide
  Antisense strand to SEQ ID NO: 2147848
auucagaacccaacgccgc

SEQ ID NO: 2147850 - RNA, 19 nt, Artificial Sequence
  Description of Artificial Sequence: Synthetic oligonucleotide
  Sense strand starting at position 1493 of SEQ ID NO: 1882793
uagagagauugugcgagaa

SEQ ID NO: 2147851 - RNA, 19 nt, Artificial Sequence
  Description of Artificial Sequence: Synthetic oligonucleotide
  Antisense strand to SEQ ID NO: 2147850
uucucgcacaaucucucua

SEQ ID NO: 2147852 - RNA, 19 nt, Artificial Sequence
  Description of Artificial Sequence: Synthetic oligonucleotide
  Sense strand starting at position 1688 of SEQ ID NO: 1882793
gggaaacgcuccucuggau

SEQ ID NO: 2147853 - RNA, 19 nt, Artificial Sequence
  Description of Artificial Sequence: Synthetic oligonucleotide
  Antisense strand to SEQ ID NO: 2147852
auccagaggagcguuuccc

SEQ ID NO: 2147854 - RNA, 19 nt, Artificial Sequence
  Description of Artificial Sequence: Synthetic oligonucleotide
  Sense strand starting at position 1993 of SEQ ID NO: 1882793
augauuccagcgcagaaau

SEQ ID NO: 2147855 - RNA, 19 nt, Artificial Sequence
  Description of Artificial Sequence: Synthetic oligonucleotide
  Antisense strand to SEQ ID NO: 2147854
auuucugcgcuggaaucau

SEQ ID NO: 2147856 - RNA, 19 nt, Artificial Sequence
  Description of Artificial Sequence: Synthetic oligonucleotide
  Sense strand starting at position 3170 of SEQ ID NO: 1882793
aauauacgauaugugaguu

SEQ ID NO: 2147857 - RNA, 19 nt, Artificial Sequence
  Description of Artificial Sequence: Synthetic oligonucleotide
  Antisense strand to SEQ ID NO: 2147856
aacucacauaucguauauu

SEQ ID NO: 2147858 - RNA, 19 nt, Artificial Sequence
  Description of Artificial Sequence: Synthetic oligonucleotide
  Sense strand starting at position 3171 of SEQ ID NO: 1882793
auauacgauaugugaguua

SEQ ID NO: 2147859 - RNA, 19 nt, Artificial Sequence
  Description of Artificial Sequence: Synthetic oligonucleotide
  Antisense strand to SEQ ID NO: 2147858
uaacucacauaucguauau

SEQ ID NO: 2147860 - RNA, 19 nt, Artificial Sequence
  Description of Artificial Sequence: Synthetic oligonucleotide
  Sense strand starting at position 3174 of SEQ ID NO: 1882793
uacgauaugugaguuaauu

SEQ ID NO: 2147861 - RNA, 19 nt, Artificial Sequence
  Description of Artificial Sequence: Synthetic oligonucleotide
  Antisense strand to SEQ ID NO: 2147860
aauuaacucacauaucgua

SEQ ID NO: 2147862 - RNA, 19 nt, Artificial Sequence
  Description of Artificial Sequence: Synthetic oligonucleotide
  Sense strand starting at position 3176 of SEQ ID NO: 1882793
cgauaugugaguuaauuau

SEQ ID NO: 2147863 - RNA, 19 nt, Artificial Sequence
  Description of Artificial Sequence: Synthetic oligonucleotide
  Antisense strand to SEQ ID NO: 2147862
auaauuaacucacauaucg

SEQ ID NO: 2147864 - RNA, 19 nt, Artificial Sequence
  Description of Artificial Sequence: Synthetic oligonucleotide
  Sense strand starting at position 3328 of SEQ ID NO: 1882793
agaauagaaugacaaagaa

SEQ ID NO: 2147865 - RNA, 19 nt, Artificial Sequence
  Description of Artificial Sequence: Synthetic oligonucleotide
  Antisense strand to SEQ ID NO: 2147864
uucuuugucauucuauucu

SEQ ID NO: 2147866 - RNA, 19 nt, Artificial Sequence
  Description of Artificial Sequence: Synthetic oligonucleotide
  Sense strand starting at position 3451 of SEQ ID NO: 1882793
gacacugugccugaaagca

SEQ ID NO: 2147867 - RNA, 19 nt, Artificial Sequence
  Description of Artificial Sequence: Synthetic oligonucleotide
  Antisense strand to SEQ ID NO: 2147866
ugcuuucaggcacaguguc

SEQ ID NO: 2147868 - RNA, 19 nt, Artificial Sequence
  Description of Artificial Sequence: Synthetic oligonucleotide
  Sense strand starting at position 3747 of SEQ ID NO: 1882793
gcaagauuccgucaccaaa

SEQ ID NO: 2147869 - RNA, 19 nt, Artificial Sequence
  Description of Artificial Sequence: Synthetic oligonucleotide
  Antisense strand to SEQ ID NO: 2147868
uuuggugacggaaucuugc

SEQ ID NO: 2147870 - RNA, 19 nt, Artificial Sequence
  Description of Artificial Sequence: Synthetic oligonucleotide
  Sense strand starting at position 3750 of SEQ ID NO: 1882793
agauuccgucaccaaauua

SEQ ID NO: 2147871 - RNA, 19 nt, Artificial Sequence
  Description of Artificial Sequence: Synthetic oligonucleotide
  Antisense strand to SEQ ID NO: 2147870
uaauuuggugacggaaucu

SEQ ID NO: 2147872 - RNA, 19 nt, Artificial Sequence
  Description of Artificial Sequence: Synthetic oligonucleotide
  Sense strand starting at position 3888 of SEQ ID NO: 1882793
gugaaaucuccacagccca

SEQ ID NO: 2147873 - RNA, 19 nt, Artificial Sequence
  Description of Artificial Sequence: Synthetic oligonucleotide
  Antisense strand to SEQ ID NO: 2147872
ugggcuguggagauuucac

SEQ ID NO: 2147874 - RNA, 19 nt, Artificial Sequence
  Description of Artificial Sequence: Synthetic oligonucleotide
  Sense strand starting at position 549 of SEQ ID NO: 1882794
ggccauugugaauacucua

SEQ ID NO: 2147875 - RNA, 19 nt, Artificial Sequence
  Description of Artificial Sequence: Synthetic oligonucleotide
  Antisense strand to SEQ ID NO: 2147874
uagaguauucacaauggcc

SEQ ID NO: 2147876 - RNA, 19 nt, Artificial Sequence
  Description of Artificial Sequence: Synthetic oligonucleotide
  Sense strand starting at position 590 of SEQ ID NO: 1882794
ugagcugccagguacuaua

SEQ ID NO: 2147877 - RNA, 19 nt, Artificial Sequence
  Description of Artificial Sequence: Synthetic oligonucleotide
  Antisense strand to SEQ ID NO: 2147876
uauaguaccuggcagcuca

SEQ ID NO: 2147878 - RNA, 19 nt, Artificial Sequence
  Description of Artificial Sequence: Synthetic oligonucleotide
  Sense strand starting at position 610 of SEQ ID NO: 1882794
cagagugcuuccucagacu

SEQ ID NO: 2147879 - RNA, 19 nt, Artificial Sequence
  Description of Artificial Sequence: Synthetic oligonucleotide
  Antisense strand to SEQ ID NO: 2147878
agucugaggaagcacucug

SEQ ID NO: 2147880 - RNA, 19 nt, Artificial Sequence
  Description of Artificial Sequence: Synthetic oligonucleotide
  Sense strand starting at position 635 of SEQ ID NO: 1882794
ccagucugucugggugaaa

SEQ ID NO: 2147881 - RNA, 19 nt, Artificial Sequence
  Description of Artificial Sequence: Synthetic oligonucleotide
  Antisense strand to SEQ ID NO: 2147880
uuucacccagacagacugg

SEQ ID NO: 2147882 - RNA, 19 nt, Artificial Sequence
  Description of Artificial Sequence: Synthetic oligonucleotide
  Sense strand starting at position 636 of SEQ ID NO: 1882794
cagucugucugggugaaau

SEQ ID NO: 2147883 - RNA, 19 nt, Artificial Sequence
  Description of Artificial Sequence: Synthetic oligonucleotide
  Antisense strand to SEQ ID NO: 2147882
auuucacccagacagacug

SEQ ID NO: 2147884 - RNA, 19 nt, Artificial Sequence
  Description of Artificial Sequence: Synthetic oligonucleotide
  Sense strand starting at position 679 of SEQ ID NO: 1882794
ugugaucucaggcaagaca

SEQ ID NO: 2147885 - RNA, 19 nt, Artificial Sequence
  Description of Artificial Sequence: Synthetic oligonucleotide
  Antisense strand to SEQ ID NO: 2147884
ugucuugccugagaucaca

SEQ ID NO: 2147886 - RNA, 19 nt, Artificial Sequence
  Description of Artificial Sequence: Synthetic oligonucleotide
  Sense strand starting at position 739 of SEQ ID NO: 1882794
uaguaucuaccuuguggau

SEQ ID NO: 2147887 - RNA, 19 nt, Artificial Sequence
  Description of Artificial Sequence: Synthetic oligonucleotide
  Antisense strand to SEQ ID NO: 2147886
auccacaagguagauacua

SEQ ID NO: 2147888 - RNA, 19 nt, Artificial Sequence
  Description of Artificial Sequence: Synthetic oligonucleotide
  Sense strand starting at position 743 of SEQ ID NO: 1882794
aucuaccuuguggauuaua

SEQ ID NO: 2147889 - RNA, 19 nt, Artificial Sequence
  Description of Artificial Sequence: Synthetic oligonucleotide
  Antisense strand to SEQ ID NO: 2147888
uauaauccacaagguagau

SEQ ID NO: 2147890 - RNA, 19 nt, Artificial Sequence
  Description of Artificial Sequence: Synthetic oligonucleotide
  Sense strand starting at position 810 of SEQ ID NO: 1882794
gcacauggugaauaaaugu

SEQ ID NO: 2147891 - RNA, 19 nt, Artificial Sequence
  Description of Artificial Sequence: Synthetic oligonucleotide
  Antisense strand to SEQ ID NO: 2147890
acauuuauucaccaugugc

SEQ ID NO: 2147892 - RNA, 19 nt, Artificial Sequence
  Description of Artificial Sequence: Synthetic oligonucleotide
  Sense strand starting at position 857 of SEQ ID NO: 1882794
gaggaacuaucacuaguuu

SEQ ID NO: 2147893 - RNA, 19 nt, Artificial Sequence
  Description of Artificial Sequence: Synthetic oligonucleotide
  Antisense strand to SEQ ID NO: 2147892
aaacuagugauaguuccuc

SEQ ID NO: 2147894 - RNA, 19 nt, Artificial Sequence
  Description of Artificial Sequence: Synthetic oligonucleotide
  Sense strand starting at position 884 of SEQ ID NO: 1882794
ugaaguacugcaugaaauu

SEQ ID NO: 2147895 - RNA, 19 nt, Artificial Sequence
  Description of Artificial Sequence: Synthetic oligonucleotide
  Antisense strand to SEQ ID NO: 2147894
aauuucaugcaguacuuca

SEQ ID NO: 2147896 - RNA, 19 nt, Artificial Sequence
  Description of Artificial Sequence: Synthetic oligonucleotide
  Sense strand starting at position 1013 of SEQ ID NO: 1882794
ugcauauagugccugaaau

SEQ ID NO: 2147897 - RNA, 19 nt, Artificial Sequence
  Description of Artificial Sequence: Synthetic oligonucleotide
  Antisense strand to SEQ ID NO: 2147896
auuucaggcacuauaugca

SEQ ID NO: 2147898 - RNA, 19 nt, Artificial Sequence
  Description of Artificial Sequence: Synthetic oligonucleotide
  Sense strand starting at position 1072 of SEQ ID NO: 1882794
ccaauuugacauugugcuu

SEQ ID NO: 2147899 - RNA, 19 nt, Artificial Sequence
  Description of Artificial Sequence: Synthetic oligonucleotide
  Antisense strand to SEQ ID NO: 2147898
aagcacaaugucaaauugg

SEQ ID NO: 2147900 - RNA, 19 nt, Artificial Sequence
  Description of Artificial Sequence: Synthetic oligonucleotide
  Sense strand starting at position 1112 of SEQ ID NO: 1882794
uaaugaaaguuaucugaug

SEQ ID NO: 2147901 - RNA, 19 nt, Artificial Sequence
  Description of Artificial Sequence: Synthetic oligonucleotide
  Antisense strand to SEQ ID NO: 2147900
caucagauaacuuucauua

SEQ ID NO: 2147902 - RNA, 19 nt, Artificial Sequence
  Description of Artificial Sequence: Synthetic oligonucleotide
  Sense strand starting at position 1143 of SEQ ID NO: 1882794
uuaauugcucccgauuaag

SEQ ID NO: 2147903 - RNA, 19 nt, Artificial Sequence
  Description of Artificial Sequence: Synthetic oligonucleotide
  Antisense strand to SEQ ID NO: 2147902
cuuaaucgggagcaauuaa

SEQ ID NO: 2147904 - RNA, 19 nt, Artificial Sequence
  Description of Artificial Sequence: Synthetic oligonucleotide
  Sense strand starting at position 1351 of SEQ ID NO: 1882794
uaucuaacugaugguguaa

SEQ ID NO: 2147905 - RNA, 19 nt, Artificial Sequence
  Description of Artificial Sequence: Synthetic oligonucleotide
  Antisense strand to SEQ ID NO: 2147904
uuacaccaucaguuagaua

SEQ ID NO: 2147906 - RNA, 19 nt, Artificial Sequence
  Description of Artificial Sequence: Synthetic oligonucleotide
  Sense strand starting at position 1402 of SEQ ID NO: 1882794
caguguuauugucuuggaa

SEQ ID NO: 2147907 - RNA, 19 nt, Artificial Sequence
  Description of Artificial Sequence: Synthetic oligonucleotide
  Antisense strand to SEQ ID NO: 2147906
uuccaagacaauaacacug

SEQ ID NO: 2147908 - RNA, 19 nt, Artificial Sequence
  Description of Artificial Sequence: Synthetic oligonucleotide
  Sense strand starting at position 1405 of SEQ ID NO: 1882794
uguuauugucuuggaacau

SEQ ID NO: 2147909 - RNA, 19 nt, Artificial Sequence
  Description of Artificial Sequence: Synthetic oligonucleotide
  Antisense strand to SEQ ID NO: 2147908
auguuccaagacaauaaca

SEQ ID NO: 2147910 - RNA, 19 nt, Artificial Sequence
  Description of Artificial Sequence: Synthetic oligonucleotide
  Sense strand starting at position 1455 of SEQ ID NO: 1882794
uacaaauguuaggcuguaa

SEQ ID NO: 2147911 - RNA, 19 nt, Artificial Sequence
  Description of Artificial Sequence: Synthetic oligonucleotide
  Antisense strand to SEQ ID NO: 2147910
uuacagccuaacauuugua

SEQ ID NO: 2147912 - RNA, 19 nt, Artificial Sequence
  Description of Artificial Sequence: Synthetic oligonucleotide
  Sense strand starting at position 1459 of SEQ ID NO: 1882794
aauguuaggcuguaagagu

SEQ ID NO: 2147913 - RNA, 19 nt, Artificial Sequence
  Description of Artificial Sequence: Synthetic oligonucleotide
  Antisense strand to SEQ ID NO: 2147912
acucuuacagccuaacauu

SEQ ID NO: 2147914 - RNA, 19 nt, Artificial Sequence
  Description of Artificial Sequence: Synthetic oligonucleotide
  Sense strand starting at position 1511 of SEQ ID NO: 1882794
ucuccugaucaccagaagu

SEQ ID NO: 2147915 - RNA, 19 nt, Artificial Sequence
  Description of Artificial Sequence: Synthetic oligonucleotide
  Antisense strand to SEQ ID NO: 2147914
acuucuggugaucaggaga

SEQ ID NO: 2147916 - RNA, 19 nt, Artificial Sequence
  Description of Artificial Sequence: Synthetic oligonucleotide
  Sense strand starting at position 1513 of SEQ ID NO: 1882794
uccugaucaccagaaguuc

SEQ ID NO: 2147917 - RNA, 19 nt, Artificial Sequence
  Description of Artificial Sequence: Synthetic oligonucleotide
  Antisense strand to SEQ ID NO: 2147916
gaacuucuggugaucagga

SEQ ID NO: 2147918 - RNA, 19 nt, Artificial Sequence
  Description of Artificial Sequence: Synthetic oligonucleotide
  Sense strand starting at position 1543 of SEQ ID NO: 1882794
aaggcuacuggucacgaaa

SEQ ID NO: 2147919 - RNA, 19 nt, Artificial Sequence
  Description of Artificial Sequence: Synthetic oligonucleotide
  Antisense strand to SEQ ID NO: 2147918
uuucgugaccaguagccuu

SEQ ID NO: 2147920 - RNA, 19 nt, Artificial Sequence
  Description of Artificial Sequence: Synthetic oligonucleotide
  Sense strand starting at position 1578 of SEQ ID NO: 1882794
gagauccagucuucugguu

SEQ ID NO: 2147921 - RNA, 19 nt, Artificial Sequence
  Description of Artificial Sequence: Synthetic oligonucleotide
  Antisense strand to SEQ ID NO: 2147920
aaccagaagacuggaucuc

SEQ ID NO: 2147922 - RNA, 19 nt, Artificial Sequence
  Description of Artificial Sequence: Synthetic oligonucleotide
  Sense strand starting at position 1881 of SEQ ID NO: 1882794
gcaccauugucauuggaca

SEQ ID NO: 2147923 - RNA, 19 nt, Artificial Sequence
  Description of Artificial Sequence: Synthetic oligonucleotide
  Antisense strand to SEQ ID NO: 2147922
uguccaaugacaauggugc

SEQ ID NO: 2147924 - RNA, 19 nt, Artificial Sequence
  Description of Artificial Sequence: Synthetic oligonucleotide
  Sense strand starting at position 1952 of SEQ ID NO: 1882794
cgccuaagccaauggaaau

SEQ ID NO: 2147925 - RNA, 19 nt, Artificial Sequence
  Description of Artificial Sequence: Synthetic oligonucleotide
  Antisense strand to SEQ ID NO: 2147924
auuuccauuggcuuaggcg

SEQ ID NO: 2147926 - RNA, 19 nt, Artificial Sequence
  Description of Artificial Sequence: Synthetic oligonucleotide
  Sense strand starting at position 3148 of SEQ ID NO: 1882794
gugcauuaucgaaggugug

SEQ ID NO: 2147927 - RNA, 19 nt, Artificial Sequence
  Description of Artificial Sequence: Synthetic oligonucleotide
  Antisense strand to SEQ ID NO: 2147926
cacaccuucgauaaugcac

SEQ ID NO: 2147928 - RNA, 19 nt, Artificial Sequence
  Description of Artificial Sequence: Synthetic oligonucleotide
  Sense strand starting at position 3260 of SEQ ID NO: 1882794
cucagagucucucuuccau

SEQ ID NO: 2147929 - RNA, 19 nt, Artificial Sequence
  Description of Artificial Sequence: Synthetic oligonucleotide
  Antisense strand to SEQ ID NO: 2147928
auggaagagagacucugag

SEQ ID NO: 2147930 - RNA, 19 nt, Artificial Sequence
  Description of Artificial Sequence: Synthetic oligonucleotide
  Sense strand starting at position 3330 of SEQ ID NO: 1882794
guguguuugccguuuguag

SEQ ID NO: 2147931 - RNA, 19 nt, Artificial Sequence
  Description of Artificial Sequence: Synthetic oligonucleotide
  Antisense strand to SEQ ID NO: 2147930
cuacaaacggcaaacacac

SEQ ID NO: 2147932 - RNA, 19 nt, Artificial Sequence
  Description of Artificial Sequence: Synthetic oligonucleotide
  Sense strand starting at position 3469 of SEQ ID NO: 1882794
cuguaacuaccgggauagu

SEQ ID NO: 2147933 - RNA, 19 nt, Artificial Sequence
  Description of Artificial Sequence: Synthetic oligonucleotide
  Antisense strand to SEQ ID NO: 2147932
acuaucccgguaguuacag

SEQ ID NO: 2147934 - RNA, 19 nt, Artificial Sequence
  Description of Artificial Sequence: Synthetic oligonucleotide
  Sense strand starting at position 3470 of SEQ ID NO: 1882794
uguaacuaccgggauagua

SEQ ID NO: 2147935 - RNA, 19 nt, Artificial Sequence
  Description of Artificial Sequence: Synthetic oligonucleotide
  Antisense strand to SEQ ID NO: 2147934
uacuaucccgguaguuaca

SEQ ID NO: 2147936 - RNA, 19 nt, Artificial Sequence
  Description of Artificial Sequence: Synthetic oligonucleotide
  Sense strand starting at position 3472 of SEQ ID NO: 1882794
uaacuaccgggauaguauu

SEQ ID NO: 2147937 - RNA, 19 nt, Artificial Sequence
  Description of Artificial Sequence: Synthetic oligonucleotide
  Antisense strand to SEQ ID NO: 2147936
aauacuaucccgguaguua

SEQ ID NO: 2147938 - RNA, 19 nt, Artificial Sequence
  Description of Artificial Sequence: Synthetic oligonucleotide
  Sense strand starting at position 3515 of SEQ ID NO: 1882794
uuaguuucgauguaaggau

SEQ ID NO: 2147939 - RNA, 19 nt, Artificial Sequence
  Description of Artificial Sequence: Synthetic oligonucleotide
  Antisense strand to SEQ ID NO: 2147938
auccuuacaucgaaacuaa

SEQ ID NO: 2147940 - RNA, 19 nt, Artificial Sequence
  Description of Artificial Sequence: Synthetic oligonucleotide
  Sense strand starting at position 3528 of SEQ ID NO: 1882794
aaggauaucggcuggaugu

SEQ ID NO: 2147941 - RNA, 19 nt, Artificial Sequence
  Description of Artificial Sequence: Synthetic oligonucleotide
  Antisense strand to SEQ ID NO: 2147940
acauccagccgauauccuu

SEQ ID NO: 2147942 - RNA, 19 nt, Artificial Sequence
  Description of Artificial Sequence: Synthetic oligonucleotide
  Sense strand starting at position 3529 of SEQ ID NO: 1882794
aggauaucggcuggaugua

SEQ ID NO: 2147943 - RNA, 19 nt, Artificial Sequence
  Description of Artificial Sequence: Synthetic oligonucleotide
  Antisense strand to SEQ ID NO: 2147942
uacauccagccgauauccu

SEQ ID NO: 2147944 - RNA, 19 nt, Artificial Sequence
  Description of Artificial Sequence: Synthetic oligonucleotide
  Sense strand starting at position 3530 of SEQ ID NO: 1882794
ggauaucggcuggauguaa

SEQ ID NO: 2147945 - RNA, 19 nt, Artificial Sequence
  Description of Artificial Sequence: Synthetic oligonucleotide
  Antisense strand to SEQ ID NO: 2147944
uuacauccagccgauaucc

SEQ ID NO: 2147946 - RNA, 19 nt, Artificial Sequence
  Description of Artificial Sequence: Synthetic oligonucleotide
  Sense strand starting at position 3538 of SEQ ID NO: 1882794
gcuggauguaaugauaucu

SEQ ID NO: 2147947 - RNA, 19 nt, Artificial Sequence
  Description of Artificial Sequence: Synthetic oligonucleotide
  Antisense strand to SEQ ID NO: 2147946
agauaucauuacauccagc

SEQ ID NO: 2147948 - RNA, 19 nt, Artificial Sequence
  Description of Artificial Sequence: Synthetic oligonucleotide
  Sense strand starting at position 3827 of SEQ ID NO: 1882794
aguugagcuguucaaggau

SEQ ID NO: 2147949 - RNA, 19 nt, Artificial Sequence
  Description of Artificial Sequence: Synthetic oligonucleotide
  Antisense strand to SEQ ID NO: 2147948
auccuugaacagcucaacu

SEQ ID NO: 2147950 - RNA, 19 nt, Artificial Sequence
  Description of Artificial Sequence: Synthetic oligonucleotide
  Sense strand starting at position 3864 of SEQ ID NO: 1882794
uuaggugucaaagguaaug

SEQ ID NO: 2147951 - RNA, 19 nt, Artificial Sequence
  Description of Artificial Sequence: Synthetic oligonucleotide
  Antisense strand to SEQ ID NO: 2147950
cauuaccuuugacaccuaa

SEQ ID NO: 2147952 - RNA, 19 nt, Artificial Sequence
  Description of Artificial Sequence: Synthetic oligonucleotide
  Sense strand starting at position 3938 of SEQ ID NO: 1882794
uguuuaugucuagggacac

SEQ ID NO: 2147953 - RNA, 19 nt, Artificial Sequence
  Description of Artificial Sequence: Synthetic oligonucleotide
  Antisense strand to SEQ ID NO: 2147952
gugucccuagacauaaaca

SEQ ID NO: 2147954 - RNA, 19 nt, Artificial Sequence
  Description of Artificial Sequence: Synthetic oligonucleotide
  Sense strand starting at position 278 of SEQ ID NO: 1882795
gaugauaacgcucagucaa

SEQ ID NO: 2147955 - RNA, 19 nt, Artificial Sequence
  Description of Artificial Sequence: Synthetic oligonucleotide
  Antisense strand to SEQ ID NO: 2147954
uugacugagcguuaucauc

SEQ ID NO: 2147956 - RNA, 19 nt, Artificial Sequence
  Description of Artificial Sequence: Synthetic oligonucleotide
  Sense strand starting at position 400 of SEQ ID NO: 1882795
uuuacaguucuuggaauca

SEQ ID NO: 2147957 - RNA, 19 nt, Artificial Sequence
  Description of Artificial Sequence: Synthetic oligonucleotide
  Antisense strand to SEQ ID NO: 2147956
ugauuccaagaacuguaaa

SEQ ID NO: 2147958 - RNA, 19 nt, Artificial Sequence
  Description of Artificial Sequence: Synthetic oligonucleotide
  Sense strand starting at position 511 of SEQ ID NO: 1882795
uuggcuugcguuguuaaca

SEQ ID NO: 2147959 - RNA, 19 nt, Artificial Sequence
  Description of Artificial Sequence: Synthetic oligonucleotide
  Antisense strand to SEQ ID NO: 2147958
uguuaacaacgcaagccaa

SEQ ID NO: 2147960 - RNA, 19 nt, Artificial Sequence
  Description of Artificial Sequence: Synthetic oligonucleotide
  Sense strand starting at position 519 of SEQ ID NO: 1882795
cguuguuaacacguuaguu

SEQ ID NO: 2147961 - RNA, 19 nt, Artificial Sequence
  Description of Artificial Sequence: Synthetic oligonucleotide
  Antisense strand to SEQ ID NO: 2147960
aacuaacguguuaacaacg

SEQ ID NO: 2147962 - RNA, 19 nt, Artificial Sequence
  Description of Artificial Sequence: Synthetic oligonucleotide
  Sense strand starting at position 675 of SEQ ID NO: 1882795
aggagauguuuacucagcu

SEQ ID NO: 2147963 - RNA, 19 nt, Artificial Sequence
  Description of Artificial Sequence: Synthetic oligonucleotide
  Antisense strand to SEQ ID NO: 2147962
agcugaguaaacaucuccu

SEQ ID NO: 2147964 - RNA, 19 nt, Artificial Sequence
  Description of Artificial Sequence: Synthetic oligonucleotide
  Sense strand starting at position 676 of SEQ ID NO: 1882795
ggagauguuuacucagcuc

SEQ ID NO: 2147965 - RNA, 19 nt, Artificial Sequence
  Description of Artificial Sequence: Synthetic oligonucleotide
  Antisense strand to SEQ ID NO: 2147964
gagcugaguaaacaucucc

SEQ ID NO: 2147966 - RNA, 19 nt, Artificial Sequence
  Description of Artificial Sequence: Synthetic oligonucleotide
  Sense strand starting at position 701 of SEQ ID NO: 1882795
ucguguuaagacuaggaca

SEQ ID NO: 2147967 - RNA, 19 nt, Artificial Sequence
  Description of Artificial Sequence: Synthetic oligonucleotide
  Antisense strand to SEQ ID NO: 2147966
uguccuagucuuaacacga

SEQ ID NO: 2147968 - RNA, 19 nt, Artificial Sequence
  Description of Artificial Sequence: Synthetic oligonucleotide
  Sense strand starting at position 720 of SEQ ID NO: 1882795
ggcucaaaucuaugacaaa

SEQ ID NO: 2147969 - RNA, 19 nt, Artificial Sequence
  Description of Artificial Sequence: Synthetic oligonucleotide
  Antisense strand to SEQ ID NO: 2147968
uuugucauagauuugagcc

SEQ ID NO: 2147970 - RNA, 19 nt, Artificial Sequence
  Description of Artificial Sequence: Synthetic oligonucleotide
  Sense strand starting at position 781 of SEQ ID NO: 1882795
ggagguaucuuauuaucuu

SEQ ID NO: 2147971 - RNA, 19 nt, Artificial Sequence
  Description of Artificial Sequence: Synthetic oligonucleotide
  Antisense strand to SEQ ID NO: 2147970
aagauaauaagauaccucc

SEQ ID NO: 2147972 - RNA, 19 nt, Artificial Sequence
  Description of Artificial Sequence: Synthetic oligonucleotide
  Sense strand starting at position 852 of SEQ ID NO: 1882795
acaccaugcuaucuugaga

SEQ ID NO: 2147973 - RNA, 19 nt, Artificial Sequence
  Description of Artificial Sequence: Synthetic oligonucleotide
  Antisense strand to SEQ ID NO: 2147972
ucucaagauagcauggugu

SEQ ID NO: 2147974 - RNA, 19 nt, Artificial Sequence
  Description of Artificial Sequence: Synthetic oligonucleotide
  Sense strand starting at position 855 of SEQ ID NO: 1882795
ccaugcuaucuugagauua

SEQ ID NO: 2147975 - RNA, 19 nt, Artificial Sequence
  Description of Artificial Sequence: Synthetic oligonucleotide
  Antisense strand to SEQ ID NO: 2147974
uaaucucaagauagcaugg

SEQ ID NO: 2147976 - RNA, 19 nt, Artificial Sequence
  Description of Artificial Sequence: Synthetic oligonucleotide
  Sense strand starting at position 863 of SEQ ID NO: 1882795
ucuugagauuaagcuaagu

SEQ ID NO: 2147977 - RNA, 19 nt, Artificial Sequence
  Description of Artificial Sequence: Synthetic oligonucleotide
  Antisense strand to SEQ ID NO: 2147976
acuuagcuuaaucucaaga

SEQ ID NO: 2147978 - RNA, 19 nt, Artificial Sequence
  Description of Artificial Sequence: Synthetic oligonucleotide
  Sense strand starting at position 945 of SEQ ID NO: 1882795
aucugugaaaucgggauaa

SEQ ID NO: 2147979 - RNA, 19 nt, Artificial Sequence
  Description of Artificial Sequence: Synthetic oligonucleotide
  Antisense strand to SEQ ID NO: 2147978
uuaucccgauuucacagau

SEQ ID NO: 2147980 - RNA, 19 nt, Artificial Sequence
  Description of Artificial Sequence: Synthetic oligonucleotide
  Sense strand starting at position 987 of SEQ ID NO: 1882795
ugcuguaaggauuaaauau

SEQ ID NO: 2147981 - RNA, 19 nt, Artificial Sequence
  Description of Artificial Sequence: Synthetic oligonucleotide
  Antisense strand to SEQ ID NO: 2147980
auauuuaauccuuacagca

SEQ ID NO: 2147982 - RNA, 19 nt, Artificial Sequence
  Description of Artificial Sequence: Synthetic oligonucleotide
  Sense strand starting at position 1062 of SEQ ID NO: 1882795
auuucugauucgucagcau

SEQ ID NO: 2147983 - RNA, 19 nt, Artificial Sequence
  Description of Artificial Sequence: Synthetic oligonucleotide
  Antisense strand to SEQ ID NO: 2147982
augcugacgaaucagaaau

SEQ ID NO: 2147984 - RNA, 19 nt, Artificial Sequence
  Description of Artificial Sequence: Synthetic oligonucleotide
  Sense strand starting at position 1174 of SEQ ID NO: 1882795
gucauacuacauugagguu

SEQ ID NO: 2147985 - RNA, 19 nt, Artificial Sequence
  Description of Artificial Sequence: Synthetic oligonucleotide
  Antisense strand to SEQ ID NO: 2147984
aaccucaauguaguaugac

SEQ ID NO: 2147986 - RNA, 19 nt, Artificial Sequence
  Description of Artificial Sequence: Synthetic oligonucleotide
  Sense strand starting at position 1243 of SEQ ID NO: 1882795
uccugugaucuguauacug

SEQ ID NO: 2147987 - RNA, 19 nt, Artificial Sequence
  Description of Artificial Sequence: Synthetic oligonucleotide
  Antisense strand to SEQ ID NO: 2147986
caguauacagaucacagga

SEQ ID NO: 2147988 - RNA, 19 nt, Artificial Sequence
  Description of Artificial Sequence: Synthetic oligonucleotide
  Sense strand starting at position 1245 of SEQ ID NO: 1882795
cugugaucuguauacugca

SEQ ID NO: 2147989 - RNA, 19 nt, Artificial Sequence
  Description of Artificial Sequence: Synthetic oligonucleotide
  Antisense strand to SEQ ID NO: 2147988
ugcaguauacagaucacag

SEQ ID NO: 2147990 - RNA, 19 nt, Artificial Sequence
  Description of Artificial Sequence: Synthetic oligonucleotide
  Sense strand starting at position 1258 of SEQ ID NO: 1882795
acugcagggucucuagaaa

SEQ ID NO: 2147991 - RNA, 19 nt, Artificial Sequence
  Description of Artificial Sequence: Synthetic oligonucleotide
  Antisense strand to SEQ ID NO: 2147990
uuucuagagacccugcagu

SEQ ID NO: 2147992 - RNA, 19 nt, Artificial Sequence
  Description of Artificial Sequence: Synthetic oligonucleotide
  Sense strand starting at position 1273 of SEQ ID NO: 1882795
gaaacaaugguuugguucu

SEQ ID NO: 2147993 - RNA, 19 nt, Artificial Sequence
  Description of Artificial Sequence: Synthetic oligonucleotide
  Antisense strand to SEQ ID NO: 2147992
agaaccaaaccauuguuuc

SEQ ID NO: 2147994 - RNA, 19 nt, Artificial Sequence
  Description of Artificial Sequence: Synthetic oligonucleotide
  Sense strand starting at position 2550 of SEQ ID NO: 1882795
aggguugacuuguugacaa

SEQ ID NO: 2147995 - RNA, 19 nt, Artificial Sequence
  Description of Artificial Sequence: Synthetic oligonucleotide
  Antisense strand to SEQ ID NO: 2147994
uugucaacaagucaacccu

SEQ ID NO: 2147996 - RNA, 19 nt, Artificial Sequence
  Description of Artificial Sequence: Synthetic oligonucleotide
  Sense strand starting at position 2552 of SEQ ID NO: 1882795
gguugacuuguugacaagu

SEQ ID NO: 2147997 - RNA, 19 nt, Artificial Sequence
  Description of Artificial Sequence: Synthetic oligonucleotide
  Antisense strand to SEQ ID NO: 2147996
acuugucaacaagucaacc

SEQ ID NO: 2147998 - RNA, 19 nt, Artificial Sequence
  Description of Artificial Sequence: Synthetic oligonucleotide
  Sense strand starting at position 2650 of SEQ ID NO: 1882795
auggguaccucuuuauaac

SEQ ID NO: 2147999 - RNA, 19 nt, Artificial Sequence
  Description of Artificial Sequence: Synthetic oligonucleotide
  Antisense strand to SEQ ID NO: 2147998
guuauaaagagguacccau

SEQ ID NO: 2148000 - RNA, 19 nt, Artificial Sequence
  Description of Artificial Sequence: Synthetic oligonucleotide
  Sense strand starting at position 2840 of SEQ ID NO: 1882795
cugcuuccucuagaaacga

SEQ ID NO: 2148001 - RNA, 19 nt, Artificial Sequence
  Description of Artificial Sequence: Synthetic oligonucleotide
  Antisense strand to SEQ ID NO: 2148000
ucguuucuagaggaagcag

SEQ ID NO: 2148002 - RNA, 19 nt, Artificial Sequence
  Description of Artificial Sequence: Synthetic oligonucleotide
  Sense strand starting at position 2973 of SEQ ID NO: 1882795
aaaguaucgcgcccuuauu

SEQ ID NO: 2148003 - RNA, 19 nt, Artificial Sequence
  Description of Artificial Sequence: Synthetic oligonucleotide
  Antisense strand to SEQ ID NO: 2148002
aauaagggcgcgauacuuu

SEQ ID NO: 2148004 - RNA, 19 nt, Artificial Sequence
  Description of Artificial Sequence: Synthetic oligonucleotide
  Sense strand starting at position 3053 of SEQ ID NO: 1882795
ucauuuagauggcauuaaa

SEQ ID NO: 2148005 - RNA, 19 nt, Artificial Sequence
  Description of Artificial Sequence: Synthetic oligonucleotide
  Antisense strand to SEQ ID NO: 2148004
uuuaaugccaucuaaauga

SEQ ID NO: 2148006 - RNA, 19 nt, Artificial Sequence
  Description of Artificial Sequence: Synthetic oligonucleotide
  Sense strand starting at position 3101 of SEQ ID NO: 1882795
gaaucuuaguaaccgagau

SEQ ID NO: 2148007 - RNA, 19 nt, Artificial Sequence
  Description of Artificial Sequence: Synthetic oligonucleotide
  Antisense strand to SEQ ID NO: 2148006
aucucgguuacuaagauuc

SEQ ID NO: 2148008 - RNA, 19 nt, Artificial Sequence
  Description of Artificial Sequence: Synthetic oligonucleotide
  Sense strand starting at position 3116 of SEQ ID NO: 1882795
agaucugguaacgguauaa

SEQ ID NO: 2148009 - RNA, 19 nt, Artificial Sequence
  Description of Artificial Sequence: Synthetic oligonucleotide
  Antisense strand to SEQ ID NO: 2148008
uuauaccguuaccagaucu

SEQ ID NO: 2148010 - RNA, 19 nt, Artificial Sequence
  Description of Artificial Sequence: Synthetic oligonucleotide
  Sense strand starting at position 3177 of SEQ ID NO: 1882795
agugauacugaauguagga

SEQ ID NO: 2148011 - RNA, 19 nt, Artificial Sequence
  Description of Artificial Sequence: Synthetic oligonucleotide
  Antisense strand to SEQ ID NO: 2148010
uccuacauucaguaucacu

SEQ ID NO: 2148012 - RNA, 19 nt, Artificial Sequence
  Description of Artificial Sequence: Synthetic oligonucleotide
  Sense strand starting at position 3279 of SEQ ID NO: 1882795
agugaagucucuucggaaa

SEQ ID NO: 2148013 - RNA, 19 nt, Artificial Sequence
  Description of Artificial Sequence: Synthetic oligonucleotide
  Antisense strand to SEQ ID NO: 2148012
uuuccgaagagacuucacu

SEQ ID NO: 2148014 - RNA, 19 nt, Artificial Sequence
  Description of Artificial Sequence: Synthetic oligonucleotide
  Sense strand starting at position 3323 of SEQ ID NO: 1882795
cugguuugaaucugagauc

SEQ ID NO: 2148015 - RNA, 19 nt, Artificial Sequence
  Description of Artificial Sequence: Synthetic oligonucleotide
  Antisense strand to SEQ ID NO: 2148014
gaucucagauucaaaccag

SEQ ID NO: 2148016 - RNA, 19 nt, Artificial Sequence
  Description of Artificial Sequence: Synthetic oligonucleotide
  Sense strand starting at position 3353 of SEQ ID NO: 1882795
gugguuagggagugaaaua

SEQ ID NO: 2148017 - RNA, 19 nt, Artificial Sequence
  Description of Artificial Sequence: Synthetic oligonucleotide
  Antisense strand to SEQ ID NO: 2148016
uauuucacucccuaaccac

SEQ ID NO: 2148018 - RNA, 19 nt, Artificial Sequence
  Description of Artificial Sequence: Synthetic oligonucleotide
  Sense strand starting at position 3369 of SEQ ID NO: 1882795
auaagaaaugcuuaguuug

SEQ ID NO: 2148019 - RNA, 19 nt, Artificial Sequence
  Description of Artificial Sequence: Synthetic oligonucleotide
  Antisense strand to SEQ ID NO: 2148018
caaacuaagcauuucuuau

SEQ ID NO: 2148020 - RNA, 19 nt, Artificial Sequence
  Description of Artificial Sequence: Synthetic oligonucleotide
  Sense strand starting at position 3372 of SEQ ID NO: 1882795
agaaaugcuuaguuugaaa

SEQ ID NO: 2148021 - RNA, 19 nt, Artificial Sequence
  Description of Artificial Sequence: Synthetic oligonucleotide
  Antisense strand to SEQ ID NO: 2148020
uuucaaacuaagcauuucu

SEQ ID NO: 2148022 - RNA, 19 nt, Artificial Sequence
  Description of Artificial Sequence: Synthetic oligonucleotide
  Sense strand starting at position 3505 of SEQ ID NO: 1882795
gaaacacccuuuguagaga

SEQ ID NO: 2148023 - RNA, 19 nt, Artificial Sequence
  Description of Artificial Sequence: Synthetic oligonucleotide
  Antisense strand to SEQ ID NO: 2148022
ucucuacaaaggguguuuc

SEQ ID NO: 2148024 - RNA, 19 nt, Artificial Sequence
  Description of Artificial Sequence: Synthetic oligonucleotide
  Sense strand starting at position 3604 of SEQ ID NO: 1882795
aucuuaauugcaggagaug

SEQ ID NO: 2148025 - RNA, 19 nt, Artificial Sequence
  Description of Artificial Sequence: Synthetic oligonucleotide
  Antisense strand to SEQ ID NO: 2148024
caucuccugcaauuaagau

SEQ ID NO: 2148026 - RNA, 19 nt, Artificial Sequence
  Description of Artificial Sequence: Synthetic oligonucleotide
  Sense strand starting at position 3605 of SEQ ID NO: 1882795
ucuuaauugcaggagaugu

SEQ ID NO: 2148027 - RNA, 19 nt, Artificial Sequence
  Description of Artificial Sequence: Synthetic oligonucleotide
  Antisense strand to SEQ ID NO: 2148026
acaucuccugcaauuaaga

SEQ ID NO: 2148028 - RNA, 19 nt, Artificial Sequence
  Description of Artificial Sequence: Synthetic oligonucleotide
  Sense strand starting at position 3615 of SEQ ID NO: 1882795
aggagauguugcuuucuaa

SEQ ID NO: 2148029 - RNA, 19 nt, Artificial Sequence
  Description of Artificial Sequence: Synthetic oligonucleotide
  Antisense strand to SEQ ID NO: 2148028
uuagaaagcaacaucuccu

SEQ ID NO: 2148030 - RNA, 19 nt, Artificial Sequence
  Description of Artificial Sequence: Synthetic oligonucleotide
  Sense strand starting at position 3726 of SEQ ID NO: 1882795
uguggagagaccugauguu

SEQ ID NO: 2148031 - RNA, 19 nt, Artificial Sequence
  Description of Artificial Sequence: Synthetic oligonucleotide
  Antisense strand to SEQ ID NO: 2148030
aacaucaggucucuccaca

SEQ ID NO: 2148032 - RNA, 19 nt, Artificial Sequence
  Description of Artificial Sequence: Synthetic oligonucleotide
  Sense strand starting at position 3775 of SEQ ID NO: 1882795
uggaucauugagugcuaaa

SEQ ID NO: 2148033 - RNA, 19 nt, Artificial Sequence
  Description of Artificial Sequence: Synthetic oligonucleotide
  Antisense strand to SEQ ID NO: 2148032
uuuagcacucaaugaucca

SEQ ID NO: 2148034 - RNA, 19 nt, Artificial Sequence
  Description of Artificial Sequence: Synthetic oligonucleotide
  Sense strand starting at position 379 of SEQ ID NO: 1882796
aauaaaugguguuuggaca

SEQ ID NO: 2148035 - RNA, 19 nt, Artificial Sequence
  Description of Artificial Sequence: Synthetic oligonucleotide
  Antisense strand to SEQ ID NO: 2148034
uguccaaacaccauuuauu

SEQ ID NO: 2148036 - RNA, 19 nt, Artificial Sequence
  Description of Artificial Sequence: Synthetic oligonucleotide
  Sense strand starting at position 380 of SEQ ID NO: 1882796
auaaaugguguuuggacaa

SEQ ID NO: 2148037 - RNA, 19 nt, Artificial Sequence
  Description of Artificial Sequence: Synthetic oligonucleotide
  Antisense strand to SEQ ID NO: 2148036
uuguccaaacaccauuuau

SEQ ID NO: 2148038 - RNA, 19 nt, Artificial Sequence
  Description of Artificial Sequence: Synthetic oligonucleotide
  Sense strand starting at position 398 of SEQ ID NO: 1882796
acuggugaaauugggcaua

SEQ ID NO: 2148039 - RNA, 19 nt, Artificial Sequence
  Description of Artificial Sequence: Synthetic oligonucleotide
  Antisense strand to SEQ ID NO: 2148038
uaugcccaauuucaccagu

SEQ ID NO: 2148040 - RNA, 19 nt, Artificial Sequence
  Description of Artificial Sequence: Synthetic oligonucleotide
  Sense strand starting at position 400 of SEQ ID NO: 1882796
uggugaaauugggcauaug

SEQ ID NO: 2148041 - RNA, 19 nt, Artificial Sequence
  Description of Artificial Sequence: Synthetic oligonucleotide
  Antisense strand to SEQ ID NO: 2148040
cauaugcccaauuucacca

SEQ ID NO: 2148042 - RNA, 19 nt, Artificial Sequence
  Description of Artificial Sequence: Synthetic oligonucleotide
  Sense strand starting at position 560 of SEQ ID NO: 1882796
agauguagaaaguguaaac

SEQ ID NO: 2148043 - RNA, 19 nt, Artificial Sequence
  Description of Artificial Sequence: Synthetic oligonucleotide
  Antisense strand to SEQ ID NO: 2148042
guuuacacuuucuacaucu

SEQ ID NO: 2148044 - RNA, 19 nt, Artificial Sequence
  Description of Artificial Sequence: Synthetic oligonucleotide
  Sense strand starting at position 762 of SEQ ID NO: 1882796
guccuagugcaauaauaug

SEQ ID NO: 2148045 - RNA, 19 nt, Artificial Sequence
  Description of Artificial Sequence: Synthetic oligonucleotide
  Antisense strand to SEQ ID NO: 2148044
cauauuauugcacuaggac

SEQ ID NO: 2148046 - RNA, 19 nt, Artificial Sequence
  Description of Artificial Sequence: Synthetic oligonucleotide
  Sense strand starting at position 792 of SEQ ID NO: 1882796
gcuuuaagauauuccagga

SEQ ID NO: 2148047 - RNA, 19 nt, Artificial Sequence
  Description of Artificial Sequence: Synthetic oligonucleotide
  Antisense strand to SEQ ID NO: 2148046
uccuggaauaucuuaaagc

SEQ ID NO: 2148048 - RNA, 19 nt, Artificial Sequence
  Description of Artificial Sequence: Synthetic oligonucleotide
  Sense strand starting at position 826 of SEQ ID NO: 1882796
ggaaauacaugacaugaga

SEQ ID NO: 2148049 - RNA, 19 nt, Artificial Sequence
  Description of Artificial Sequence: Synthetic oligonucleotide
  Antisense strand to SEQ ID NO: 2148048
ucucaugucauguauuucc

SEQ ID NO: 2148050 - RNA, 19 nt, Artificial Sequence
  Description of Artificial Sequence: Synthetic oligonucleotide
  Sense strand starting at position 852 of SEQ ID NO: 1882796
acauguugauaacuacuga

SEQ ID NO: 2148051 - RNA, 19 nt, Artificial Sequence
  Description of Artificial Sequence: Synthetic oligonucleotide
  Antisense strand to SEQ ID NO: 2148050
ucaguaguuaucaacaugu

SEQ ID NO: 2148052 - RNA, 19 nt, Artificial Sequence
  Description of Artificial Sequence: Synthetic oligonucleotide
  Sense strand starting at position 869 of SEQ ID NO: 1882796
gaaacugggcaaugaguau

SEQ ID NO: 2148053 - RNA, 19 nt, Artificial Sequence
  Description of Artificial Sequence: Synthetic oligonucleotide
  Antisense strand to SEQ ID NO: 2148052
auacucauugcccaguuuc

SEQ ID NO: 2148054 - RNA, 19 nt, Artificial Sequence
  Description of Artificial Sequence: Synthetic oligonucleotide
  Sense strand starting at position 875 of SEQ ID NO: 1882796
gggcaaugaguauguggaa

SEQ ID NO: 2148055 - RNA, 19 nt, Artificial Sequence
  Description of Artificial Sequence: Synthetic oligonucleotide
  Antisense strand to SEQ ID NO: 2148054
uuccacauacucauugccc

SEQ ID NO: 2148056 - RNA, 19 nt, Artificial Sequence
  Description of Artificial Sequence: Synthetic oligonucleotide
  Sense strand starting at position 1048 of SEQ ID NO: 1882796
gguggaauuaaaggugcaa

SEQ ID NO: 2148057 - RNA, 19 nt, Artificial Sequence
  Description of Artificial Sequence: Synthetic oligonucleotide
  Antisense strand to SEQ ID NO: 2148056
uugcaccuuuaauuccacc

SEQ ID NO: 2148058 - RNA, 19 nt, Artificial Sequence
  Description of Artificial Sequence: Synthetic oligonucleotide
  Sense strand starting at position 1050 of SEQ ID NO: 1882796
uggaauuaaaggugcaaga

SEQ ID NO: 2148059 - RNA, 19 nt, Artificial Sequence
  Description of Artificial Sequence: Synthetic oligonucleotide
  Antisense strand to SEQ ID NO: 2148058
ucuugcaccuuuaauucca

SEQ ID NO: 2148060 - RNA, 19 nt, Artificial Sequence
  Description of Artificial Sequence: Synthetic oligonucleotide
  Sense strand starting at position 1298 of SEQ ID NO: 1882796
gcuaaugaaggaugucaac

SEQ ID NO: 2148061 - RNA, 19 nt, Artificial Sequence
  Description of Artificial Sequence: Synthetic oligonucleotide
  Antisense strand to SEQ ID NO: 2148060
guugacauccuucauuagc

SEQ ID NO: 2148062 - RNA, 19 nt, Artificial Sequence
  Description of Artificial Sequence: Synthetic oligonucleotide
  Sense strand starting at position 1331 of SEQ ID NO: 1882796
acaguagguucucucugaa

SEQ ID NO: 2148063 - RNA, 19 nt, Artificial Sequence
  Description of Artificial Sequence: Synthetic oligonucleotide
  Antisense strand to SEQ ID NO: 2148062
uucagagagaaccuacugu

SEQ ID NO: 2148064 - RNA, 19 nt, Artificial Sequence
  Description of Artificial Sequence: Synthetic oligonucleotide
  Sense strand starting at position 1698 of SEQ ID NO: 1882796
acuaauugccuugggaaau

SEQ ID NO: 2148065 - RNA, 19 nt, Artificial Sequence
  Description of Artificial Sequence: Synthetic oligonucleotide
  Antisense strand to SEQ ID NO: 2148064
auuucccaaggcaauuagu

SEQ ID NO: 2148066 - RNA, 19 nt, Artificial Sequence
  Description of Artificial Sequence: Synthetic oligonucleotide
  Sense strand starting at position 1711 of SEQ ID NO: 1882796
ggaaaucagugugucauua

SEQ ID NO: 2148067 - RNA, 19 nt, Artificial Sequence
  Description of Artificial Sequence: Synthetic oligonucleotide
  Antisense strand to SEQ ID NO: 2148066
uaaugacacacugauuucc

SEQ ID NO: 2148068 - RNA, 19 nt, Artificial Sequence
  Description of Artificial Sequence: Synthetic oligonucleotide
  Sense strand starting at position 1721 of SEQ ID NO: 1882796
gugucauuagcucacaaag

SEQ ID NO: 2148069 - RNA, 19 nt, Artificial Sequence
  Description of Artificial Sequence: Synthetic oligonucleotide
  Antisense strand to SEQ ID NO: 2148068
cuuugugagcuaaugacac

SEQ ID NO: 2148070 - RNA, 19 nt, Artificial Sequence
  Description of Artificial Sequence: Synthetic oligonucleotide
  Sense strand starting at position 1888 of SEQ ID NO: 1882796
augggucucccuggaacaa

SEQ ID NO: 2148071 - RNA, 19 nt, Artificial Sequence
  Description of Artificial Sequence: Synthetic oligonucleotide
  Antisense strand to SEQ ID NO: 2148070
uuguuccagggagacccau

SEQ ID NO: 2148072 - RNA, 19 nt, Artificial Sequence
  Description of Artificial Sequence: Synthetic oligonucleotide
  Sense strand starting at position 1913 of SEQ ID NO: 1882796
gguguuagccgacugcauu

SEQ ID NO: 2148073 - RNA, 19 nt, Artificial Sequence
  Description of Artificial Sequence: Synthetic oligonucleotide
  Antisense strand to SEQ ID NO: 2148072
aaugcagucggcuaacacc

SEQ ID NO: 2148074 - RNA, 19 nt, Artificial Sequence
  Description of Artificial Sequence: Synthetic oligonucleotide
  Sense strand starting at position 1950 of SEQ ID NO: 1882796
gagagaaucuguucccugu

SEQ ID NO: 2148075 - RNA, 19 nt, Artificial Sequence
  Description of Artificial Sequence: Synthetic oligonucleotide
  Antisense strand to SEQ ID NO: 2148074
acagggaacagauucucuc

SEQ ID NO: 2148076 - RNA, 19 nt, Artificial Sequence
  Description of Artificial Sequence: Synthetic oligonucleotide
  Sense strand starting at position 2183 of SEQ ID NO: 1882796
uuaaguacuugggugauua

SEQ ID NO: 2148077 - RNA, 19 nt, Artificial Sequence
  Description of Artificial Sequence: Synthetic oligonucleotide
  Antisense strand to SEQ ID NO: 2148076
uaaucacccaaguacuuaa

SEQ ID NO: 2148078 - RNA, 19 nt, Artificial Sequence
  Description of Artificial Sequence: Synthetic oligonucleotide
  Sense strand starting at position 2184 of SEQ ID NO: 1882796
uaaguacuugggugauuag

SEQ ID NO: 2148079 - RNA, 19 nt, Artificial Sequence
  Description of Artificial Sequence: Synthetic oligonucleotide
  Antisense strand to SEQ ID NO: 2148078
cuaaucacccaaguacuua

SEQ ID NO: 2148080 - RNA, 19 nt, Artificial Sequence
  Description of Artificial Sequence: Synthetic oligonucleotide
  Sense strand starting at position 2185 of SEQ ID NO: 1882796
aaguacuugggugauuagu

SEQ ID NO: 2148081 - RNA, 19 nt, Artificial Sequence
  Description of Artificial Sequence: Synthetic oligonucleotide
  Antisense strand to SEQ ID NO: 2148080
acuaaucacccaaguacuu

SEQ ID NO: 2148082 - RNA, 19 nt, Artificial Sequence
  Description of Artificial Sequence: Synthetic oligonucleotide
  Sense strand starting at position 2214 of SEQ ID NO: 1882796
cuggguaauccaggauaac

SEQ ID NO: 2148083 - RNA, 19 nt, Artificial Sequence
  Description of Artificial Sequence: Synthetic oligonucleotide
  Antisense strand to SEQ ID NO: 2148082
guuauccuggauuacccag

SEQ ID NO: 2148084 - RNA, 19 nt, Artificial Sequence
  Description of Artificial Sequence: Synthetic oligonucleotide
  Sense strand starting at position 2353 of SEQ ID NO: 1882796
ggccuaccacaucauugua

SEQ ID NO: 2148085 - RNA, 19 nt, Artificial Sequence
  Description of Artificial Sequence: Synthetic oligonucleotide
  Antisense strand to SEQ ID NO: 2148084
uacaaugaugugguaggcc

SEQ ID NO: 2148086 - RNA, 19 nt, Artificial Sequence
  Description of Artificial Sequence: Synthetic oligonucleotide
  Sense strand starting at position 2393 of SEQ ID NO: 1882796
ggauacaugguuuggaaug

SEQ ID NO: 2148087 - RNA, 19 nt, Artificial Sequence
  Description of Artificial Sequence: Synthetic oligonucleotide
  Antisense strand to SEQ ID NO: 2148086
cauuccaaaccauguaucc

SEQ ID NO: 2148088 - RNA, 19 nt, Artificial Sequence
  Description of Artificial Sequence: Synthetic oligonucleotide
  Sense strand starting at position 2419 of SEQ ID NO: 1882796
ccacauagugcauagacaa

SEQ ID NO: 2148089 - RNA, 19 nt, Artificial Sequence
  Description of Artificial Sequence: Synthetic oligonucleotide
  Antisense strand to SEQ ID NO: 2148088
uugucuaugcacuaugugg

SEQ ID NO: 2148090 - RNA, 19 nt, Artificial Sequence
  Description of Artificial Sequence: Synthetic oligonucleotide
  Sense strand starting at position 2469 of SEQ ID NO: 1882796
augguaggaugguugaaua

SEQ ID NO: 2148091 - RNA, 19 nt, Artificial Sequence
  Description of Artificial Sequence: Synthetic oligonucleotide
  Antisense strand to SEQ ID NO: 2148090
uauucaaccauccuaccau

SEQ ID NO: 2148092 - RNA, 19 nt, Artificial Sequence
  Description of Artificial Sequence: Synthetic oligonucleotide
  Sense strand starting at position 2871 of SEQ ID NO: 1882796
uggacaucccucuagcuuu

SEQ ID NO: 2148093 - RNA, 19 nt, Artificial Sequence
  Description of Artificial Sequence: Synthetic oligonucleotide
  Antisense strand to SEQ ID NO: 2148092
aaagcuagagggaugucca

SEQ ID NO: 2148094 - RNA, 19 nt, Artificial Sequence
  Description of Artificial Sequence: Synthetic oligonucleotide
  Sense strand starting at position 2961 of SEQ ID NO: 1882796
gggaaaugccuauauguua

SEQ ID NO: 2148095 - RNA, 19 nt, Artificial Sequence
  Description of Artificial Sequence: Synthetic oligonucleotide
  Antisense strand to SEQ ID NO: 2148094
uaacauauaggcauuuccc

SEQ ID NO: 2148096 - RNA, 19 nt, Artificial Sequence
  Description of Artificial Sequence: Synthetic oligonucleotide
  Sense strand starting at position 3024 of SEQ ID NO: 1882796
aagguauauuucccgccua

SEQ ID NO: 2148097 - RNA, 19 nt, Artificial Sequence
  Description of Artificial Sequence: Synthetic oligonucleotide
  Antisense strand to SEQ ID NO: 2148096
uaggcgggaaauauaccuu

SEQ ID NO: 2148098 - RNA, 19 nt, Artificial Sequence
  Description of Artificial Sequence: Synthetic oligonucleotide
  Sense strand starting at position 3076 of SEQ ID NO: 1882796
uguugaacucaacagcuaa

SEQ ID NO: 2148099 - RNA, 19 nt, Artificial Sequence
  Description of Artificial Sequence: Synthetic oligonucleotide
  Antisense strand to SEQ ID NO: 2148098
uuagcuguugaguucaaca

SEQ ID NO: 2148100 - RNA, 19 nt, Artificial Sequence
  Description of Artificial Sequence: Synthetic oligonucleotide
  Sense strand starting at position 3618 of SEQ ID NO: 1882796
cuaguaaggguaugaaaca

SEQ ID NO: 2148101 - RNA, 19 nt, Artificial Sequence
  Description of Artificial Sequence: Synthetic oligonucleotide
  Antisense strand to SEQ ID NO: 2148100
uguuucauacccuuacuag

SEQ ID NO: 2148102 - RNA, 19 nt, Artificial Sequence
  Description of Artificial Sequence: Synthetic oligonucleotide
  Sense strand starting at position 3673 of SEQ ID NO: 1882796
gcacuuaaucacuagcaag

SEQ ID NO: 2148103 - RNA, 19 nt, Artificial Sequence
  Description of Artificial Sequence: Synthetic oligonucleotide
  Antisense strand to SEQ ID NO: 2148102
cuugcuagugauuaagugc

SEQ ID NO: 2148104 - RNA, 19 nt, Artificial Sequence
  Description of Artificial Sequence: Synthetic oligonucleotide
  Sense strand starting at position 3720 of SEQ ID NO: 1882796
ggugaaauuaaauguggau

SEQ ID NO: 2148105 - RNA, 19 nt, Artificial Sequence
  Description of Artificial Sequence: Synthetic oligonucleotide
  Antisense strand to SEQ ID NO: 2148104
auccacauuuaauuucacc

SEQ ID NO: 2148106 - RNA, 19 nt, Artificial Sequence
  Description of Artificial Sequence: Synthetic oligonucleotide
  Sense strand starting at position 3818 of SEQ ID NO: 1882796
cuaggacucuuguucuuga

SEQ ID NO: 2148107 - RNA, 19 nt, Artificial Sequence
  Description of Artificial Sequence: Synthetic oligonucleotide
  Antisense strand to SEQ ID NO: 2148106
ucaagaacaagaguccuag

SEQ ID NO: 2148108 - RNA, 19 nt, Artificial Sequence
  Description of Artificial Sequence: Synthetic oligonucleotide
  Sense strand starting at position 3819 of SEQ ID NO: 1882796
uaggacucuuguucuugaa

SEQ ID NO: 2148109 - RNA, 19 nt, Artificial Sequence
  Description of Artificial Sequence: Synthetic oligonucleotide
  Antisense strand to SEQ ID NO: 2148108
uucaagaacaagaguccua

SEQ ID NO: 2148110 - RNA, 19 nt, Artificial Sequence
  Description of Artificial Sequence: Synthetic oligonucleotide
  Sense strand starting at position 3821 of SEQ ID NO: 1882796
ggacucuuguucuugaaag

SEQ ID NO: 2148111 - RNA, 19 nt, Artificial Sequence
  Description of Artificial Sequence: Synthetic oligonucleotide
  Antisense strand to SEQ ID NO: 2148110
cuuucaagaacaagagucc

SEQ ID NO: 2148112 - RNA, 19 nt, Artificial Sequence
  Description of Artificial Sequence: Synthetic oligonucleotide
  Sense strand starting at position 3903 of SEQ ID NO: 1882796
uugucuuaugccuaugaac

SEQ ID NO: 2148113 - RNA, 19 nt, Artificial Sequence
  Description of Artificial Sequence: Synthetic oligonucleotide
  Antisense strand to SEQ ID NO: 2148112
guucauaggcauaagacaa

SEQ ID NO: 2148114 - RNA, 19 nt, Artificial Sequence
  Description of Artificial Sequence: Synthetic oligonucleotide
  Sense strand starting at position 29 of SEQ ID NO: 1882797
uccgaaucauccuugaauc

SEQ ID NO: 2148115 - RNA, 19 nt, Artificial Sequence
  Description of Artificial Sequence: Synthetic oligonucleotide
  Antisense strand to SEQ ID NO: 2148114
gauucaaggaugauucgga

SEQ ID NO: 2148116 - RNA, 19 nt, Artificial Sequence
  Description of Artificial Sequence: Synthetic oligonucleotide
  Sense strand starting at position 30 of SEQ ID NO: 1882797
ccgaaucauccuugaaucu

SEQ ID NO: 2148117 - RNA, 19 nt, Artificial Sequence
  Description of Artificial Sequence: Synthetic oligonucleotide
  Antisense strand to SEQ ID NO: 2148116
agauucaaggaugauucgg

SEQ ID NO: 2148118 - RNA, 19 nt, Artificial Sequence
  Description of Artificial Sequence: Synthetic oligonucleotide
  Sense strand starting at position 139 of SEQ ID NO: 1882797
uagauagagccuugaugca

SEQ ID NO: 2148119 - RNA, 19 nt, Artificial Sequence
  Description of Artificial Sequence: Synthetic oligonucleotide
  Antisense strand to SEQ ID NO: 2148118
ugcaucaaggcucuaucua

SEQ ID NO: 2148120 - RNA, 19 nt, Artificial Sequence
  Description of Artificial Sequence: Synthetic oligonucleotide
  Sense strand starting at position 364 of SEQ ID NO: 1882797
ggcuguggucuagggacaa

SEQ ID NO: 2148121 - RNA, 19 nt, Artificial Sequence
  Description of Artificial Sequence: Synthetic oligonucleotide
  Antisense strand to SEQ ID NO: 2148120
uugucccuagaccacagcc

SEQ ID NO: 2148122 - RNA, 19 nt, Artificial Sequence
  Description of Artificial Sequence: Synthetic oligonucleotide
  Sense strand starting at position 397 of SEQ ID NO: 1882797
cugaguucuggguagaugu

SEQ ID NO: 2148123 - RNA, 19 nt, Artificial Sequence
  Description of Artificial Sequence: Synthetic oligonucleotide
  Antisense strand to SEQ ID NO: 2148122
acaucuacccagaacucag

SEQ ID NO: 2148124 - RNA, 19 nt, Artificial Sequence
  Description of Artificial Sequence: Synthetic oligonucleotide
  Sense strand starting at position 499 of SEQ ID NO: 1882797
uggagagaucucugaggua

SEQ ID NO: 2148125 - RNA, 19 nt, Artificial Sequence
  Description of Artificial Sequence: Synthetic oligonucleotide
  Antisense strand to SEQ ID NO: 2148124
uaccucagagaucucucca

SEQ ID NO: 2148126 - RNA, 19 nt, Artificial Sequence
  Description of Artificial Sequence: Synthetic oligonucleotide
  Sense strand starting at position 674 of SEQ ID NO: 1882797
uaugaugucguagaaacca

SEQ ID NO: 2148127 - RNA, 19 nt, Artificial Sequence
  Description of Artificial Sequence: Synthetic oligonucleotide
  Antisense strand to SEQ ID NO: 2148126
ugguuucuacgacaucaua

SEQ ID NO: 2148128 - RNA, 19 nt, Artificial Sequence
  Description of Artificial Sequence: Synthetic oligonucleotide
  Sense strand starting at position 697 of SEQ ID NO: 1882797
uagccuaagccugagaagu

SEQ ID NO: 2148129 - RNA, 19 nt, Artificial Sequence
  Description of Artificial Sequence: Synthetic oligonucleotide
  Antisense strand to SEQ ID NO: 2148128
acuucucaggcuuaggcua

SEQ ID NO: 2148130 - RNA, 19 nt, Artificial Sequence
  Description of Artificial Sequence: Synthetic oligonucleotide
  Sense strand starting at position 705 of SEQ ID NO: 1882797
gccugagaagucugggaau

SEQ ID NO: 2148131 - RNA, 19 nt, Artificial Sequence
  Description of Artificial Sequence: Synthetic oligonucleotide
  Antisense strand to SEQ ID NO: 2148130
auucccagacuucucaggc

SEQ ID NO: 2148132 - RNA, 19 nt, Artificial Sequence
  Description of Artificial Sequence: Synthetic oligonucleotide
  Sense strand starting at position 711 of SEQ ID NO: 1882797
gaagucugggaaugguaga

SEQ ID NO: 2148133 - RNA, 19 nt, Artificial Sequence
  Description of Artificial Sequence: Synthetic oligonucleotide
  Antisense strand to SEQ ID NO: 2148132
ucuaccauucccagacuuc

SEQ ID NO: 2148134 - RNA, 19 nt, Artificial Sequence
  Description of Artificial Sequence: Synthetic oligonucleotide
  Sense strand starting at position 718 of SEQ ID NO: 1882797
gggaaugguagaugguaua

SEQ ID NO: 2148135 - RNA, 19 nt, Artificial Sequence
  Description of Artificial Sequence: Synthetic oligonucleotide
  Antisense strand to SEQ ID NO: 2148134
uauaccaucuaccauuccc

SEQ ID NO: 2148136 - RNA, 19 nt, Artificial Sequence
  Description of Artificial Sequence: Synthetic oligonucleotide
  Sense strand starting at position 926 of SEQ ID NO: 1882797
agugcugcucacguaguaa

SEQ ID NO: 2148137 - RNA, 19 nt, Artificial Sequence
  Description of Artificial Sequence: Synthetic oligonucleotide
  Antisense strand to SEQ ID NO: 2148136
uuacuacgugagcagcacu

SEQ ID NO: 2148138 - RNA, 19 nt, Artificial Sequence
  Description of Artificial Sequence: Synthetic oligonucleotide
  Sense strand starting at position 989 of SEQ ID NO: 1882797
caaggugugggugaacuaa

SEQ ID NO: 2148139 - RNA, 19 nt, Artificial Sequence
  Description of Artificial Sequence: Synthetic oligonucleotide
  Antisense strand to SEQ ID NO: 2148138
uuaguucacccacaccuug

SEQ ID NO: 2148140 - RNA, 19 nt, Artificial Sequence
  Description of Artificial Sequence: Synthetic oligonucleotide
  Sense strand starting at position 1018 of SEQ ID NO: 1882797
ugagacuucccaugcagag

SEQ ID NO: 2148141 - RNA, 19 nt, Artificial Sequence
  Description of Artificial Sequence: Synthetic oligonucleotide
  Antisense strand to SEQ ID NO: 2148140
cucugcaugggaagucuca

SEQ ID NO: 2148142 - RNA, 19 nt, Artificial Sequence
  Description of Artificial Sequence: Synthetic oligonucleotide
  Sense strand starting at position 1049 of SEQ ID NO: 1882797
aaagguuacugcucuagaa

SEQ ID NO: 2148143 - RNA, 19 nt, Artificial Sequence
  Description of Artificial Sequence: Synthetic oligonucleotide
  Antisense strand to SEQ ID NO: 2148142
uucuagagcaguaaccuuu

SEQ ID NO: 2148144 - RNA, 19 nt, Artificial Sequence
  Description of Artificial Sequence: Synthetic oligonucleotide
  Sense strand starting at position 1051 of SEQ ID NO: 1882797
agguuacugcucuagaaga

SEQ ID NO: 2148145 - RNA, 19 nt, Artificial Sequence
  Description of Artificial Sequence: Synthetic oligonucleotide
  Antisense strand to SEQ ID NO: 2148144
ucuucuagagcaguaaccu

SEQ ID NO: 2148146 - RNA, 19 nt, Artificial Sequence
  Description of Artificial Sequence: Synthetic oligonucleotide
  Sense strand starting at position 1053 of SEQ ID NO: 1882797
guuacugcucuagaagaga

SEQ ID NO: 2148147 - RNA, 19 nt, Artificial Sequence
  Description of Artificial Sequence: Synthetic oligonucleotide
  Antisense strand to SEQ ID NO: 2148146
ucucuucuagagcaguaac

SEQ ID NO: 2148148 - RNA, 19 nt, Artificial Sequence
  Description of Artificial Sequence: Synthetic oligonucleotide
  Sense strand starting at position 1228 of SEQ ID NO: 1882797
guaacuucuuuaccacagu

SEQ ID NO: 2148149 - RNA, 19 nt, Artificial Sequence
  Description of Artificial Sequence: Synthetic oligonucleotide
  Antisense strand to SEQ ID NO: 2148148
acugugguaaagaaguuac

SEQ ID NO: 2148150 - RNA, 19 nt, Artificial Sequence
  Description of Artificial Sequence: Synthetic oligonucleotide
  Sense strand starting at position 1568 of SEQ ID NO: 1882797
cuggaaugucccuggaaga

SEQ ID NO: 2148151 - RNA, 19 nt, Artificial Sequence
  Description of Artificial Sequence: Synthetic oligonucleotide
  Antisense strand to SEQ ID NO: 2148150
ucuuccagggacauuccag

SEQ ID NO: 2148152 - RNA, 19 nt, Artificial Sequence
  Description of Artificial Sequence: Synthetic oligonucleotide
  Sense strand starting at position 1569 of SEQ ID NO: 1882797
uggaaugucccuggaagag

SEQ ID NO: 2148153 - RNA, 19 nt, Artificial Sequence
  Description of Artificial Sequence: Synthetic oligonucleotide
  Antisense strand to SEQ ID NO: 2148152
cucuuccagggacauucca

SEQ ID NO: 2148154 - RNA, 19 nt, Artificial Sequence
  Description of Artificial Sequence: Synthetic oligonucleotide
  Sense strand starting at position 1614 of SEQ ID NO: 1882797
agggaaguuaccugcuucu

SEQ ID NO: 2148155 - RNA, 19 nt, Artificial Sequence
  Description of Artificial Sequence: Synthetic oligonucleotide
  Antisense strand to SEQ ID NO: 2148154
agaagcagguaacuucccu

SEQ ID NO: 2148156 - RNA, 19 nt, Artificial Sequence
  Description of Artificial Sequence: Synthetic oligonucleotide
  Sense strand starting at position 1797 of SEQ ID NO: 1882797
uuuagugcucagcagagau

SEQ ID NO: 2148157 - RNA, 19 nt, Artificial Sequence
  Description of Artificial Sequence: Synthetic oligonucleotide
  Antisense strand to SEQ ID NO: 2148156
aucucugcugagcacuaaa

SEQ ID NO: 2148158 - RNA, 19 nt, Artificial Sequence
  Description of Artificial Sequence: Synthetic oligonucleotide
  Sense strand starting at position 1830 of SEQ ID NO: 1882797
aagucuuagcaccgaugau

SEQ ID NO: 2148159 - RNA, 19 nt, Artificial Sequence
  Description of Artificial Sequence: Synthetic oligonucleotide
  Antisense strand to SEQ ID NO: 2148158
aucaucggugcuaagacuu

SEQ ID NO: 2148160 - RNA, 19 nt, Artificial Sequence
  Description of Artificial Sequence: Synthetic oligonucleotide
  Sense strand starting at position 2051 of SEQ ID NO: 1882797
acagccauggcguguauuu

SEQ ID NO: 2148161 - RNA, 19 nt, Artificial Sequence
  Description of Artificial Sequence: Synthetic oligonucleotide
  Antisense strand to SEQ ID NO: 2148160
aaauacacgccauggcugu

SEQ ID NO: 2148162 - RNA, 19 nt, Artificial Sequence
  Description of Artificial Sequence: Synthetic oligonucleotide
  Sense strand starting at position 2058 of SEQ ID NO: 1882797
uggcguguauuugcugaua

SEQ ID NO: 2148163 - RNA, 19 nt, Artificial Sequence
  Description of Artificial Sequence: Synthetic oligonucleotide
  Antisense strand to SEQ ID NO: 2148162
uaucagcaaauacacgcca

SEQ ID NO: 2148164 - RNA, 19 nt, Artificial Sequence
  Description of Artificial Sequence: Synthetic oligonucleotide
  Sense strand starting at position 2061 of SEQ ID NO: 1882797
cguguauuugcugauaacu

SEQ ID NO: 2148165 - RNA, 19 nt, Artificial Sequence
  Description of Artificial Sequence: Synthetic oligonucleotide
  Antisense strand to SEQ ID NO: 2148164
aguuaucagcaaauacacg

SEQ ID NO: 2148166 - RNA, 19 nt, Artificial Sequence
  Description of Artificial Sequence: Synthetic oligonucleotide
  Sense strand starting at position 2205 of SEQ ID NO: 1882797
cuggauggauccuuccaua

SEQ ID NO: 2148167 - RNA, 19 nt, Artificial Sequence
  Description of Artificial Sequence: Synthetic oligonucleotide
  Antisense strand to SEQ ID NO: 2148166
uauggaaggauccauccag

SEQ ID NO: 2148168 - RNA, 19 nt, Artificial Sequence
  Description of Artificial Sequence: Synthetic oligonucleotide
  Sense strand starting at position 2235 of SEQ ID NO: 1882797
cagucacgucugcaaacau

SEQ ID NO: 2148169 - RNA, 19 nt, Artificial Sequence
  Description of Artificial Sequence: Synthetic oligonucleotide
  Antisense strand to SEQ ID NO: 2148168
auguuugcagacgugacug

SEQ ID NO: 2148170 - RNA, 19 nt, Artificial Sequence
  Description of Artificial Sequence: Synthetic oligonucleotide
  Sense strand starting at position 2274 of SEQ ID NO: 1882797
gcagauguaggucagaaua

SEQ ID NO: 2148171 - RNA, 19 nt, Artificial Sequence
  Description of Artificial Sequence: Synthetic oligonucleotide
  Antisense strand to SEQ ID NO: 2148170
uauucugaccuacaucugc

SEQ ID NO: 2148172 - RNA, 19 nt, Artificial Sequence
  Description of Artificial Sequence: Synthetic oligonucleotide
  Sense strand starting at position 2297 of SEQ ID NO: 1882797
gcagcagauguguagaaca

SEQ ID NO: 2148173 - RNA, 19 nt, Artificial Sequence
  Description of Artificial Sequence: Synthetic oligonucleotide
  Antisense strand to SEQ ID NO: 2148172
uguucuacacaucugcugc

SEQ ID NO: 2148174 - RNA, 19 nt, Artificial Sequence
  Description of Artificial Sequence: Synthetic oligonucleotide
  Sense strand starting at position 2646 of SEQ ID NO: 1882797
ugcuaugggaguugauaag

SEQ ID NO: 2148175 - RNA, 19 nt, Artificial Sequence
  Description of Artificial Sequence: Synthetic oligonucleotide
  Antisense strand to SEQ ID NO: 2148174
cuuaucaacucccauagca

SEQ ID NO: 2148176 - RNA, 19 nt, Artificial Sequence
  Description of Artificial Sequence: Synthetic oligonucleotide
  Sense strand starting at position 2822 of SEQ ID NO: 1882797
ucguacacaggauguauua

SEQ ID NO: 2148177 - RNA, 19 nt, Artificial Sequence
  Description of Artificial Sequence: Synthetic oligonucleotide
  Antisense strand to SEQ ID NO: 2148176
uaauacauccuguguacga

SEQ ID NO: 2148178 - RNA, 19 nt, Artificial Sequence
  Description of Artificial Sequence: Synthetic oligonucleotide
  Sense strand starting at position 3334 of SEQ ID NO: 1882797
uagauagaguuucugaucu

SEQ ID NO: 2148179 - RNA, 19 nt, Artificial Sequence
  Description of Artificial Sequence: Synthetic oligonucleotide
  Antisense strand to SEQ ID NO: 2148178
agaucagaaacucuaucua

SEQ ID NO: 2148180 - RNA, 19 nt, Artificial Sequence
  Description of Artificial Sequence: Synthetic oligonucleotide
  Sense strand starting at position 3341 of SEQ ID NO: 1882797
aguuucugaucucuuaagu

SEQ ID NO: 2148181 - RNA, 19 nt, Artificial Sequence
  Description of Artificial Sequence: Synthetic oligonucleotide
  Antisense strand to SEQ ID NO: 2148180
acuuaagagaucagaaacu

SEQ ID NO: 2148182 - RNA, 19 nt, Artificial Sequence
  Description of Artificial Sequence: Synthetic oligonucleotide
  Sense strand starting at position 3361 of SEQ ID NO: 1882797
ugcacuggagccugagaau

SEQ ID NO: 2148183 - RNA, 19 nt, Artificial Sequence
  Description of Artificial Sequence: Synthetic oligonucleotide
  Antisense strand to SEQ ID NO: 2148182
auucucaggcuccagugca

SEQ ID NO: 2148184 - RNA, 19 nt, Artificial Sequence
  Description of Artificial Sequence: Synthetic oligonucleotide
  Sense strand starting at position 3378 of SEQ ID NO: 1882797
auuugaauuucuuagcugu

SEQ ID NO: 2148185 - RNA, 19 nt, Artificial Sequence
  Description of Artificial Sequence: Synthetic oligonucleotide
  Antisense strand to SEQ ID NO: 2148184
acagcuaagaaauucaaau

SEQ ID NO: 2148186 - RNA, 19 nt, Artificial Sequence
  Description of Artificial Sequence: Synthetic oligonucleotide
  Sense strand starting at position 3470 of SEQ ID NO: 1882797
guacuaguacugcagagaa

SEQ ID NO: 2148187 - RNA, 19 nt, Artificial Sequence
  Description of Artificial Sequence: Synthetic oligonucleotide
  Antisense strand to SEQ ID NO: 2148186
uucucugcaguacuaguac

SEQ ID NO: 2148188 - RNA, 19 nt, Artificial Sequence
  Description of Artificial Sequence: Synthetic oligonucleotide
  Sense strand starting at position 3898 of SEQ ID NO: 1882797
gaggaaugcgcuuagaauu

SEQ ID NO: 2148189 - RNA, 19 nt, Artificial Sequence
  Description of Artificial Sequence: Synthetic oligonucleotide
  Antisense strand to SEQ ID NO: 2148188
aauucuaagcgcauuccuc

SEQ ID NO: 2148190 - RNA, 19 nt, Artificial Sequence
  Description of Artificial Sequence: Synthetic oligonucleotide
  Sense strand starting at position 3914 of SEQ ID NO: 1882797
auuccaugcggucaagaau

SEQ ID NO: 2148191 - RNA, 19 nt, Artificial Sequence
  Description of Artificial Sequence: Synthetic oligonucleotide
  Antisense strand to SEQ ID NO: 2148190
auucuugaccgcauggaau

SEQ ID NO: 2148192 - RNA, 19 nt, Artificial Sequence
  Description of Artificial Sequence: Synthetic oligonucleotide
  Sense strand starting at position 3923 of SEQ ID NO: 1882797
ggucaagaauucuucccuu

SEQ ID NO: 2148193 - RNA, 19 nt, Artificial Sequence
  Description of Artificial Sequence: Synthetic oligonucleotide
  Antisense strand to SEQ ID NO: 2148192
aagggaagaauucuugacc

SEQ ID NO: 2148194 - RNA, 19 nt, Artificial Sequence
  Description of Artificial Sequence: Synthetic oligonucleotide
  Sense strand starting at position 430 of SEQ ID NO: 1882798
uccaguggguguuugauca

SEQ ID NO: 2148195 - RNA, 19 nt, Artificial Sequence
  Description of Artificial Sequence: Synthetic oligonucleotide
  Antisense strand to SEQ ID NO: 2148194
ugaucaaacacccacugga

SEQ ID NO: 2148196 - RNA, 19 nt, Artificial Sequence
  Description of Artificial Sequence: Synthetic oligonucleotide
  Sense strand starting at position 720 of SEQ ID NO: 1882798
gggagugaguucucacagu

SEQ ID NO: 2148197 - RNA, 19 nt, Artificial Sequence
  Description of Artificial Sequence: Synthetic oligonucleotide
  Antisense strand to SEQ ID NO: 2148196
acugugagaacucacuccc

SEQ ID NO: 2148198 - RNA, 19 nt, Artificial Sequence
  Description of Artificial Sequence: Synthetic oligonucleotide
  Sense strand starting at position 728 of SEQ ID NO: 1882798
guucucacaguugaauaau

SEQ ID NO: 2148199 - RNA, 19 nt, Artificial Sequence
  Description of Artificial Sequence: Synthetic oligonucleotide
  Antisense strand to SEQ ID NO: 2148198
auuauucaacugugagaac

SEQ ID NO: 2148200 - RNA, 19 nt, Artificial Sequence
  Description of Artificial Sequence: Synthetic oligonucleotide
  Sense strand starting at position 1103 of SEQ ID NO: 1882798
uauggacgucuugauuguu

SEQ ID NO: 2148201 - RNA, 19 nt, Artificial Sequence
  Description of Artificial Sequence: Synthetic oligonucleotide
  Antisense strand to SEQ ID NO: 2148200
aacaaucaagacguccaua

SEQ ID NO: 2148202 - RNA, 19 nt, Artificial Sequence
  Description of Artificial Sequence: Synthetic oligonucleotide
  Sense strand starting at position 1106 of SEQ ID NO: 1882798
ggacgucuugauuguuaac

SEQ ID NO: 2148203 - RNA, 19 nt, Artificial Sequence
  Description of Artificial Sequence: Synthetic oligonucleotide
  Antisense strand to SEQ ID NO: 2148202
guuaacaaucaagacgucc

SEQ ID NO: 2148204 - RNA, 19 nt, Artificial Sequence
  Description of Artificial Sequence: Synthetic oligonucleotide
  Sense strand starting at position 1216 of SEQ ID NO: 1882798
ccauguaaauuguuucuaa

SEQ ID NO: 2148205 - RNA, 19 nt, Artificial Sequence
  Description of Artificial Sequence: Synthetic oligonucleotide
  Antisense strand to SEQ ID NO: 2148204
uuagaaacaauuuacaugg

SEQ ID NO: 2148206 - RNA, 19 nt, Artificial Sequence
  Description of Artificial Sequence: Synthetic oligonucleotide
  Sense strand starting at position 1322 of SEQ ID NO: 1882798
gucagaacgccucaccuaa

SEQ ID NO: 2148207 - RNA, 19 nt, Artificial Sequence
  Description of Artificial Sequence: Synthetic oligonucleotide
  Antisense strand to SEQ ID NO: 2148206
uuaggugaggcguucugac

SEQ ID NO: 2148208 - RNA, 19 nt, Artificial Sequence
  Description of Artificial Sequence: Synthetic oligonucleotide
  Sense strand starting at position 1353 of SEQ ID NO: 1882798
ccgauauggaaucaauguu

SEQ ID NO: 2148209 - RNA, 19 nt, Artificial Sequence
  Description of Artificial Sequence: Synthetic oligonucleotide
  Antisense strand to SEQ ID NO: 2148208
aacauugauuccauaucgg

SEQ ID NO: 2148210 - RNA, 19 nt, Artificial Sequence
  Description of Artificial Sequence: Synthetic oligonucleotide
  Sense strand starting at position 1518 of SEQ ID NO: 1882798
ggauuucguuucuuaaccu

SEQ ID NO: 2148211 - RNA, 19 nt, Artificial Sequence
  Description of Artificial Sequence: Synthetic oligonucleotide
  Antisense strand to SEQ ID NO: 2148210
agguuaagaaacgaaaucc

SEQ ID NO: 2148212 - RNA, 19 nt, Artificial Sequence
  Description of Artificial Sequence: Synthetic oligonucleotide
  Sense strand starting at position 2713 of SEQ ID NO: 1882798
gaucguacuuaccugugaa

SEQ ID NO: 2148213 - RNA, 19 nt, Artificial Sequence
  Description of Artificial Sequence: Synthetic oligonucleotide
  Antisense strand to SEQ ID NO: 2148212
uucacagguaaguacgauc

SEQ ID NO: 2148214 - RNA, 19 nt, Artificial Sequence
  Description of Artificial Sequence: Synthetic oligonucleotide
  Sense strand starting at position 2819 of SEQ ID NO: 1882798
guguccuauggguaggaga

SEQ ID NO: 2148215 - RNA, 19 nt, Artificial Sequence
  Description of Artificial Sequence: Synthetic oligonucleotide
  Antisense strand to SEQ ID NO: 2148214
ucuccuacccauaggacac

SEQ ID NO: 2148216 - RNA, 19 nt, Artificial Sequence
  Description of Artificial Sequence: Synthetic oligonucleotide
  Sense strand starting at position 2894 of SEQ ID NO: 1882798
uaggguggguguuuaagau

SEQ ID NO: 2148217 - RNA, 19 nt, Artificial Sequence
  Description of Artificial Sequence: Synthetic oligonucleotide
  Antisense strand to SEQ ID NO: 2148216
aucuuaaacacccacccua

SEQ ID NO: 2148218 - RNA, 19 nt, Artificial Sequence
  Description of Artificial Sequence: Synthetic oligonucleotide
  Sense strand starting at position 2917 of SEQ ID NO: 1882798
gggccauccugacagauuu

SEQ ID NO: 2148219 - RNA, 19 nt, Artificial Sequence
  Description of Artificial Sequence: Synthetic oligonucleotide
  Antisense strand to SEQ ID NO: 2148218
aaaucugucaggauggccc

SEQ ID NO: 2148220 - RNA, 19 nt, Artificial Sequence
  Description of Artificial Sequence: Synthetic oligonucleotide
  Sense strand starting at position 2925 of SEQ ID NO: 1882798
cugacagauuuagauugau

SEQ ID NO: 2148221 - RNA, 19 nt, Artificial Sequence
  Description of Artificial Sequence: Synthetic oligonucleotide
  Antisense strand to SEQ ID NO: 2148220
aucaaucuaaaucugucag

SEQ ID NO: 2148222 - RNA, 19 nt, Artificial Sequence
  Description of Artificial Sequence: Synthetic oligonucleotide
  Sense strand starting at position 3009 of SEQ ID NO: 1882798
caguuuggaaagugagauu

SEQ ID NO: 2148223 - RNA, 19 nt, Artificial Sequence
  Description of Artificial Sequence: Synthetic oligonucleotide
  Antisense strand to SEQ ID NO: 2148222
aaucucacuuuccaaacug

SEQ ID NO: 2148224 - RNA, 19 nt, Artificial Sequence
  Description of Artificial Sequence: Synthetic oligonucleotide
  Sense strand starting at position 3022 of SEQ ID NO: 1882798
gagauuucuugagaaaguc

SEQ ID NO: 2148225 - RNA, 19 nt, Artificial Sequence
  Description of Artificial Sequence: Synthetic oligonucleotide
  Antisense strand to SEQ ID NO: 2148224
gacuuucucaagaaaucuc

SEQ ID NO: 2148226 - RNA, 19 nt, Artificial Sequence
  Description of Artificial Sequence: Synthetic oligonucleotide
  Sense strand starting at position 3073 of SEQ ID NO: 1882798
guugucuaauaaccuguua

SEQ ID NO: 2148227 - RNA, 19 nt, Artificial Sequence
  Description of Artificial Sequence: Synthetic oligonucleotide
  Antisense strand to SEQ ID NO: 2148226
uaacagguuauuagacaac

SEQ ID NO: 2148228 - RNA, 19 nt, Artificial Sequence
  Description of Artificial Sequence: Synthetic oligonucleotide
  Sense strand starting at position 3137 of SEQ ID NO: 1882798
uuuagauacugagucaguu

SEQ ID NO: 2148229 - RNA, 19 nt, Artificial Sequence
  Description of Artificial Sequence: Synthetic oligonucleotide
  Antisense strand to SEQ ID NO: 2148228
aacugacucaguaucuaaa

SEQ ID NO: 2148230 - RNA, 19 nt, Artificial Sequence
  Description of Artificial Sequence: Synthetic oligonucleotide
  Sense strand starting at position 3146 of SEQ ID NO: 1882798
ugagucaguuccuuuggau

SEQ ID NO: 2148231 - RNA, 19 nt, Artificial Sequence
  Description of Artificial Sequence: Synthetic oligonucleotide
  Antisense strand to SEQ ID NO: 2148230
auccaaaggaacugacuca

SEQ ID NO: 2148232 - RNA, 19 nt, Artificial Sequence
  Description of Artificial Sequence: Synthetic oligonucleotide
  Sense strand starting at position 3359 of SEQ ID NO: 1882798
ugggauuaguucuuaccau

SEQ ID NO: 2148233 - RNA, 19 nt, Artificial Sequence
  Description of Artificial Sequence: Synthetic oligonucleotide
  Antisense strand to SEQ ID NO: 2148232
augguaagaacuaauccca

SEQ ID NO: 2148234 - RNA, 19 nt, Artificial Sequence
  Description of Artificial Sequence: Synthetic oligonucleotide
  Sense strand starting at position 3366 of SEQ ID NO: 1882798
aguucuuaccauugaaacg

SEQ ID NO: 2148235 - RNA, 19 nt, Artificial Sequence
  Description of Artificial Sequence: Synthetic oligonucleotide
  Antisense strand to SEQ ID NO: 2148234
cguuucaaugguaagaacu

SEQ ID NO: 2148236 - RNA, 19 nt, Artificial Sequence
  Description of Artificial Sequence: Synthetic oligonucleotide
  Sense strand starting at position 3397 of SEQ ID NO: 1882798
ucuaguguauacucgagaa

SEQ ID NO: 2148237 - RNA, 19 nt, Artificial Sequence
  Description of Artificial Sequence: Synthetic oligonucleotide
  Antisense strand to SEQ ID NO: 2148236
uucucgaguauacacuaga

SEQ ID NO: 2148238 - RNA, 19 nt, Artificial Sequence
  Description of Artificial Sequence: Synthetic oligonucleotide
  Sense strand starting at position 3399 of SEQ ID NO: 1882798
uaguguauacucgagaagu

SEQ ID NO: 2148239 - RNA, 19 nt, Artificial Sequence
  Description of Artificial Sequence: Synthetic oligonucleotide
  Antisense strand to SEQ ID NO: 2148238
acuucucgaguauacacua

SEQ ID NO: 2148240 - RNA, 19 nt, Artificial Sequence
  Description of Artificial Sequence: Synthetic oligonucleotide
  Sense strand starting at position 3401 of SEQ ID NO: 1882798
guguauacucgagaaguau

SEQ ID NO: 2148241 - RNA, 19 nt, Artificial Sequence
  Description of Artificial Sequence: Synthetic oligonucleotide
  Antisense strand to SEQ ID NO: 2148240
auacuucucgaguauacac

SEQ ID NO: 2148242 - RNA, 19 nt, Artificial Sequence
  Description of Artificial Sequence: Synthetic oligonucleotide
  Sense strand starting at position 3447 of SEQ ID NO: 1882798
cguuguuaucauccuguuu

SEQ ID NO: 2148243 - RNA, 19 nt, Artificial Sequence
  Description of Artificial Sequence: Synthetic oligonucleotide
  Antisense strand to SEQ ID NO: 2148242
aaacaggaugauaacaacg

SEQ ID NO: 2148244 - RNA, 19 nt, Artificial Sequence
  Description of Artificial Sequence: Synthetic oligonucleotide
  Sense strand starting at position 3452 of SEQ ID NO: 1882798
uuaucauccuguuuaggaa

SEQ ID NO: 2148245 - RNA, 19 nt, Artificial Sequence
  Description of Artificial Sequence: Synthetic oligonucleotide
  Antisense strand to SEQ ID NO: 2148244
uuccuaaacaggaugauaa

SEQ ID NO: 2148246 - RNA, 19 nt, Artificial Sequence
  Description of Artificial Sequence: Synthetic oligonucleotide
  Sense strand starting at position 3521 of SEQ ID NO: 1882798
agacuaaguguaggaaugu

SEQ ID NO: 2148247 - RNA, 19 nt, Artificial Sequence
  Description of Artificial Sequence: Synthetic oligonucleotide
  Antisense strand to SEQ ID NO: 2148246
acauuccuacacuuagucu

SEQ ID NO: 2148248 - RNA, 19 nt, Artificial Sequence
  Description of Artificial Sequence: Synthetic oligonucleotide
  Sense strand starting at position 3545 of SEQ ID NO: 1882798
cuggcaauuugguuugcua

SEQ ID NO: 2148249 - RNA, 19 nt, Artificial Sequence
  Description of Artificial Sequence: Synthetic oligonucleotide
  Antisense strand to SEQ ID NO: 2148248
uagcaaaccaaauugccag

SEQ ID NO: 2148250 - RNA, 19 nt, Artificial Sequence
  Description of Artificial Sequence: Synthetic oligonucleotide
  Sense strand starting at position 3547 of SEQ ID NO: 1882798
ggcaauuugguuugcuaua

SEQ ID NO: 2148251 - RNA, 19 nt, Artificial Sequence
  Description of Artificial Sequence: Synthetic oligonucleotide
  Antisense strand to SEQ ID NO: 2148250
uauagcaaaccaaauugcc

SEQ ID NO: 2148252 - RNA, 19 nt, Artificial Sequence
  Description of Artificial Sequence: Synthetic oligonucleotide
  Sense strand starting at position 3548 of SEQ ID NO: 1882798
gcaauuugguuugcuauau

SEQ ID NO: 2148253 - RNA, 19 nt, Artificial Sequence
  Description of Artificial Sequence: Synthetic oligonucleotide
  Antisense strand to SEQ ID NO: 2148252
auauagcaaaccaaauugc

SEQ ID NO: 2148254 - RNA, 19 nt, Artificial Sequence
  Description of Artificial Sequence: Synthetic oligonucleotide
  Sense strand starting at position 3593 of SEQ ID NO: 1882798
ugauguuugcguguuacau

SEQ ID NO: 2148255 - RNA, 19 nt, Artificial Sequence
  Description of Artificial Sequence: Synthetic oligonucleotide
  Antisense strand to SEQ ID NO: 2148254
auguaacacgcaaacauca

SEQ ID NO: 2148256 - RNA, 19 nt, Artificial Sequence
  Description of Artificial Sequence: Synthetic oligonucleotide
  Sense strand starting at position 3594 of SEQ ID NO: 1882798
gauguuugcguguuacauc

SEQ ID NO: 2148257 - RNA, 19 nt, Artificial Sequence
  Description of Artificial Sequence: Synthetic oligonucleotide
  Antisense strand to SEQ ID NO: 2148256
gauguaacacgcaaacauc

SEQ ID NO: 2148258 - RNA, 19 nt, Artificial Sequence
  Description of Artificial Sequence: Synthetic oligonucleotide
  Sense strand starting at position 3660 of SEQ ID NO: 1882798
gggucagaauuacuuguuu

SEQ ID NO: 2148259 - RNA, 19 nt, Artificial Sequence
  Description of Artificial Sequence: Synthetic oligonucleotide
  Antisense strand to SEQ ID NO: 2148258
aaacaaguaauucugaccc

SEQ ID NO: 2148260 - RNA, 19 nt, Artificial Sequence
  Description of Artificial Sequence: Synthetic oligonucleotide
  Sense strand starting at position 3699 of SEQ ID NO: 1882798
cugggaacucuugggugaa

SEQ ID NO: 2148261 - RNA, 19 nt, Artificial Sequence
  Description of Artificial Sequence: Synthetic oligonucleotide
  Antisense strand to SEQ ID NO: 2148260
uucacccaagaguucccag

SEQ ID NO: 2148262 - RNA, 19 nt, Artificial Sequence
  Description of Artificial Sequence: Synthetic oligonucleotide
  Sense strand starting at position 3702 of SEQ ID NO: 1882798
ggaacucuugggugaacac

SEQ ID NO: 2148263 - RNA, 19 nt, Artificial Sequence
  Description of Artificial Sequence: Synthetic oligonucleotide
  Antisense strand to SEQ ID NO: 2148262
guguucacccaagaguucc

SEQ ID NO: 2148264 - RNA, 19 nt, Artificial Sequence
  Description of Artificial Sequence: Synthetic oligonucleotide
  Sense strand starting at position 3799 of SEQ ID NO: 1882798
ggcugaauaacaugugaag

SEQ ID NO: 2148265 - RNA, 19 nt, Artificial Sequence
  Description of Artificial Sequence: Synthetic oligonucleotide
  Antisense strand to SEQ ID NO: 2148264
cuucacauguuauucagcc

SEQ ID NO: 2148266 - RNA, 19 nt, Artificial Sequence
  Description of Artificial Sequence: Synthetic oligonucleotide
  Sense strand starting at position 3805 of SEQ ID NO: 1882798
auaacaugugaagacguua

SEQ ID NO: 2148267 - RNA, 19 nt, Artificial Sequence
  Description of Artificial Sequence: Synthetic oligonucleotide
  Antisense strand to SEQ ID NO: 2148266
uaacgucuucacauguuau

SEQ ID NO: 2148268 - RNA, 19 nt, Artificial Sequence
  Description of Artificial Sequence: Synthetic oligonucleotide
  Sense strand starting at position 3837 of SEQ ID NO: 1882798
uggaauauaugcuugugua

SEQ ID NO: 2148269 - RNA, 19 nt, Artificial Sequence
  Description of Artificial Sequence: Synthetic oligonucleotide
  Antisense strand to SEQ ID NO: 2148268
uacacaagcauauauucca

SEQ ID NO: 2148270 - RNA, 19 nt, Artificial Sequence
  Description of Artificial Sequence: Synthetic oligonucleotide
  Sense strand starting at position 3838 of SEQ ID NO: 1882798
ggaauauaugcuuguguau

SEQ ID NO: 2148271 - RNA, 19 nt, Artificial Sequence
  Description of Artificial Sequence: Synthetic oligonucleotide
  Antisense strand to SEQ ID NO: 2148270
auacacaagcauauauucc

SEQ ID NO: 2148272 - RNA, 19 nt, Artificial Sequence
  Description of Artificial Sequence: Synthetic oligonucleotide
  Sense strand starting at position 3979 of SEQ ID NO: 1882798
gaagaauaaguaggcuuua

SEQ ID NO: 2148273 - RNA, 19 nt, Artificial Sequence
  Description of Artificial Sequence: Synthetic oligonucleotide
  Antisense strand to SEQ ID NO: 2148272
uaaagccuacuuauucuuc

SEQ ID NO: 2148274 - RNA, 19 nt, Artificial Sequence
  Description of Artificial Sequence: Synthetic oligonucleotide
  Sense strand starting at position 32 of SEQ ID NO: 1882799
gguaaugcuguuucgugua

SEQ ID NO: 2148275 - RNA, 19 nt, Artificial Sequence
  Description of Artificial Sequence: Synthetic oligonucleotide
  Antisense strand to SEQ ID NO: 2148274
uacacgaaacagcauuacc

SEQ ID NO: 2148276 - RNA, 19 nt, Artificial Sequence
  Description of Artificial Sequence: Synthetic oligonucleotide
  Sense strand starting at position 48 of SEQ ID NO: 1882799
guaguaaaugaucaguaua

SEQ ID NO: 2148277 - RNA, 19 nt, Artificial Sequence
  Description of Artificial Sequence: Synthetic oligonucleotide
  Antisense strand to SEQ ID NO: 2148276
uauacugaucauuuacuac

SEQ ID NO: 2148278 - RNA, 19 nt, Artificial Sequence
  Description of Artificial Sequence: Synthetic oligonucleotide
  Sense strand starting at position 253 of SEQ ID NO: 1882799
gcuucugagaguuaaauga

SEQ ID NO: 2148279 - RNA, 19 nt, Artificial Sequence
  Description of Artificial Sequence: Synthetic oligonucleotide
  Antisense strand to SEQ ID NO: 2148278
ucauuuaacucucagaagc

SEQ ID NO: 2148280 - RNA, 19 nt, Artificial Sequence
  Description of Artificial Sequence: Synthetic oligonucleotide
  Sense strand starting at position 298 of SEQ ID NO: 1882799
uuagguggguuaucagaaa

SEQ ID NO: 2148281 - RNA, 19 nt, Artificial Sequence
  Description of Artificial Sequence: Synthetic oligonucleotide
  Antisense strand to SEQ ID NO: 2148280
uuucugauaacccaccuaa

SEQ ID NO: 2148282 - RNA, 19 nt, Artificial Sequence
  Description of Artificial Sequence: Synthetic oligonucleotide
  Sense strand starting at position 323 of SEQ ID NO: 1882799
cuguuaauuuggcuggcaa

SEQ ID NO: 2148283 - RNA, 19 nt, Artificial Sequence
  Description of Artificial Sequence: Synthetic oligonucleotide
  Antisense strand to SEQ ID NO: 2148282
uugccagccaaauuaacag

SEQ ID NO: 2148284 - RNA, 19 nt, Artificial Sequence
  Description of Artificial Sequence: Synthetic oligonucleotide
  Sense strand starting at position 324 of SEQ ID NO: 1882799
uguuaauuuggcuggcaau

SEQ ID NO: 2148285 - RNA, 19 nt, Artificial Sequence
  Description of Artificial Sequence: Synthetic oligonucleotide
  Antisense strand to SEQ ID NO: 2148284
auugccagccaaauuaaca

SEQ ID NO: 2148286 - RNA, 19 nt, Artificial Sequence
  Description of Artificial Sequence: Synthetic oligonucleotide
  Sense strand starting at position 325 of SEQ ID NO: 1882799
guuaauuuggcuggcaaug

SEQ ID NO: 2148287 - RNA, 19 nt, Artificial Sequence
  Description of Artificial Sequence: Synthetic oligonucleotide
  Antisense strand to SEQ ID NO: 2148286
cauugccagccaaauuaac

SEQ ID NO: 2148288 - RNA, 19 nt, Artificial Sequence
  Description of Artificial Sequence: Synthetic oligonucleotide
  Sense strand starting at position 336 of SEQ ID NO: 1882799
uggcaaugggauugacagu

SEQ ID NO: 2148289 - RNA, 19 nt, Artificial Sequence
  Description of Artificial Sequence: Synthetic oligonucleotide
  Antisense strand to SEQ ID NO: 2148288
acugucaaucccauugcca

SEQ ID NO: 2148290 - RNA, 19 nt, Artificial Sequence
  Description of Artificial Sequence: Synthetic oligonucleotide
  Sense strand starting at position 425 of SEQ ID NO: 1882799
cugccagggauuuguguuu

SEQ ID NO: 2148291 - RNA, 19 nt, Artificial Sequence
  Description of Artificial Sequence: Synthetic oligonucleotide
  Antisense strand to SEQ ID NO: 2148290
aaacacaaaucccuggcag

SEQ ID NO: 2148292 - RNA, 19 nt, Artificial Sequence
  Description of Artificial Sequence: Synthetic oligonucleotide
  Sense strand starting at position 484 of SEQ ID NO: 1882799
agggacaaggcuggauauu

SEQ ID NO: 2148293 - RNA, 19 nt, Artificial Sequence
  Description of Artificial Sequence: Synthetic oligonucleotide
  Antisense strand to SEQ ID NO: 2148292
aauauccagccuugucccu

SEQ ID NO: 2148294 - RNA, 19 nt, Artificial Sequence
  Description of Artificial Sequence: Synthetic oligonucleotide
  Sense strand starting at position 543 of SEQ ID NO: 1882799
acuucugaauguuugagga

SEQ ID NO: 2148295 - RNA, 19 nt, Artificial Sequence
  Description of Artificial Sequence: Synthetic oligonucleotide
  Antisense strand to SEQ ID NO: 2148294
uccucaaacauucagaagu

SEQ ID NO: 2148296 - RNA, 19 nt, Artificial Sequence
  Description of Artificial Sequence: Synthetic oligonucleotide
  Sense strand starting at position 590 of SEQ ID NO: 1882799
aguguagacuggcuaaaga

SEQ ID NO: 2148297 - RNA, 19 nt, Artificial Sequence
  Description of Artificial Sequence: Synthetic oligonucleotide
  Antisense strand to SEQ ID NO: 2148296
ucuuuagccagucuacacu

SEQ ID NO: 2148298 - RNA, 19 nt, Artificial Sequence
  Description of Artificial Sequence: Synthetic oligonucleotide
  Sense strand starting at position 696 of SEQ ID NO: 1882799
agucuaagagcuggaaaug

SEQ ID NO: 2148299 - RNA, 19 nt, Artificial Sequence
  Description of Artificial Sequence: Synthetic oligonucleotide
  Antisense strand to SEQ ID NO: 2148298
cauuuccagcucuuagacu

SEQ ID NO: 2148300 - RNA, 19 nt, Artificial Sequence
  Description of Artificial Sequence: Synthetic oligonucleotide
  Sense strand starting at position 717 of SEQ ID NO: 1882799
acggcagaaucaucugaau

SEQ ID NO: 2148301 - RNA, 19 nt, Artificial Sequence
  Description of Artificial Sequence: Synthetic oligonucleotide
  Antisense strand to SEQ ID NO: 2148300
auucagaugauucugccgu

SEQ ID NO: 2148302 - RNA, 19 nt, Artificial Sequence
  Description of Artificial Sequence: Synthetic oligonucleotide
  Sense strand starting at position 1106 of SEQ ID NO: 1882799
cuacuauccuauguggaag

SEQ ID NO: 2148303 - RNA, 19 nt, Artificial Sequence
  Description of Artificial Sequence: Synthetic oligonucleotide
  Antisense strand to SEQ ID NO: 2148302
cuuccacauaggauaguag

SEQ ID NO: 2148304 - RNA, 19 nt, Artificial Sequence
  Description of Artificial Sequence: Synthetic oligonucleotide
  Sense strand starting at position 1303 of SEQ ID NO: 1882799
cuccgagugcuugcaauuc

SEQ ID NO: 2148305 - RNA, 19 nt, Artificial Sequence
  Description of Artificial Sequence: Synthetic oligonucleotide
  Antisense strand to SEQ ID NO: 2148304
gaauugcaagcacucggag

SEQ ID NO: 2148306 - RNA, 19 nt, Artificial Sequence
  Description of Artificial Sequence: Synthetic oligonucleotide
  Sense strand starting at position 1447 of SEQ ID NO: 1882799
uuuagauuccugcauaaga

SEQ ID NO: 2148307 - RNA, 19 nt, Artificial Sequence
  Description of Artificial Sequence: Synthetic oligonucleotide
  Antisense strand to SEQ ID NO: 2148306
ucuuaugcaggaaucuaaa

SEQ ID NO: 2148308 - RNA, 19 nt, Artificial Sequence
  Description of Artificial Sequence: Synthetic oligonucleotide
  Sense strand starting at position 1462 of SEQ ID NO: 1882799
aagagcucuggcgcguaaa

SEQ ID NO: 2148309 - RNA, 19 nt, Artificial Sequence
  Description of Artificial Sequence: Synthetic oligonucleotide
  Antisense strand to SEQ ID NO: 2148308
uuuacgcgccagagcucuu

SEQ ID NO: 2148310 - RNA, 19 nt, Artificial Sequence
  Description of Artificial Sequence: Synthetic oligonucleotide
  Sense strand starting at position 1542 of SEQ ID NO: 1882799
auggaaauguacuuacuac

SEQ ID NO: 2148311 - RNA, 19 nt, Artificial Sequence
  Description of Artificial Sequence: Synthetic oligonucleotide
  Antisense strand to SEQ ID NO: 2148310
guaguaaguacauuuccau

SEQ ID NO: 2148312 - RNA, 19 nt, Artificial Sequence
  Description of Artificial Sequence: Synthetic oligonucleotide
  Sense strand starting at position 1578 of SEQ ID NO: 1882799
gcagauugagagcagucua

SEQ ID NO: 2148313 - RNA, 19 nt, Artificial Sequence
  Description of Artificial Sequence: Synthetic oligonucleotide
  Antisense strand to SEQ ID NO: 2148312
uagacugcucucaaucugc

SEQ ID NO: 2148314 - RNA, 19 nt, Artificial Sequence
  Description of Artificial Sequence: Synthetic oligonucleotide
  Sense strand starting at position 1583 of SEQ ID NO: 1882799
uugagagcagucuaaauau

SEQ ID NO: 2148315 - RNA, 19 nt, Artificial Sequence
  Description of Artificial Sequence: Synthetic oligonucleotide
  Antisense strand to SEQ ID NO: 2148314
auauuuagacugcucucaa

SEQ ID NO: 2148316 - RNA, 19 nt, Artificial Sequence
  Description of Artificial Sequence: Synthetic oligonucleotide
  Sense strand starting at position 1703 of SEQ ID NO: 1882799
ugaggaagcucacuaugga

SEQ ID NO: 2148317 - RNA, 19 nt, Artificial Sequence
  Description of Artificial Sequence: Synthetic oligonucleotide
  Antisense strand to SEQ ID NO: 2148316
uccauagugagcuuccuca

SEQ ID NO: 2148318 - RNA, 19 nt, Artificial Sequence
  Description of Artificial Sequence: Synthetic oligonucleotide
  Sense strand starting at position 2433 of SEQ ID NO: 1882799
uguuaugcagaguaaacaa

SEQ ID NO: 2148319 - RNA, 19 nt, Artificial Sequence
  Description of Artificial Sequence: Synthetic oligonucleotide
  Antisense strand to SEQ ID NO: 2148318
uuguuuacucugcauaaca

SEQ ID NO: 2148320 - RNA, 19 nt, Artificial Sequence
  Description of Artificial Sequence: Synthetic oligonucleotide
  Sense strand starting at position 2503 of SEQ ID NO: 1882799
aaacuaguugacugaugau

SEQ ID NO: 2148321 - RNA, 19 nt, Artificial Sequence
  Description of Artificial Sequence: Synthetic oligonucleotide
  Antisense strand to SEQ ID NO: 2148320
aucaucagucaacuaguuu

SEQ ID NO: 2148322 - RNA, 19 nt, Artificial Sequence
  Description of Artificial Sequence: Synthetic oligonucleotide
  Sense strand starting at position 2626 of SEQ ID NO: 1882799
uuggcaagauuauugaaac

SEQ ID NO: 2148323 - RNA, 19 nt, Artificial Sequence
  Description of Artificial Sequence: Synthetic oligonucleotide
  Antisense strand to SEQ ID NO: 2148322
guuucaauaaucuugccaa

SEQ ID NO: 2148324 - RNA, 19 nt, Artificial Sequence
  Description of Artificial Sequence: Synthetic oligonucleotide
  Sense strand starting at position 2860 of SEQ ID NO: 1882799
uucuuugccuguccauuua

SEQ ID NO: 2148325 - RNA, 19 nt, Artificial Sequence
  Description of Artificial Sequence: Synthetic oligonucleotide
  Antisense strand to SEQ ID NO: 2148324
uaaauggacaggcaaagaa

SEQ ID NO: 2148326 - RNA, 19 nt, Artificial Sequence
  Description of Artificial Sequence: Synthetic oligonucleotide
  Sense strand starting at position 3015 of SEQ ID NO: 1882799
gagggcaaauauucuguga

SEQ ID NO: 2148327 - RNA, 19 nt, Artificial Sequence
  Description of Artificial Sequence: Synthetic oligonucleotide
  Antisense strand to SEQ ID NO: 2148326
ucacagaauauuugcccuc

SEQ ID NO: 2148328 - RNA, 19 nt, Artificial Sequence
  Description of Artificial Sequence: Synthetic oligonucleotide
  Sense strand starting at position 3022 of SEQ ID NO: 1882799
aauauucugugagugauau

SEQ ID NO: 2148329 - RNA, 19 nt, Artificial Sequence
  Description of Artificial Sequence: Synthetic oligonucleotide
  Antisense strand to SEQ ID NO: 2148328
auaucacucacagaauauu

SEQ ID NO: 2148330 - RNA, 19 nt, Artificial Sequence
  Description of Artificial Sequence: Synthetic oligonucleotide
  Sense strand starting at position 3098 of SEQ ID NO: 1882799
guguauccugacuaugaga

SEQ ID NO: 2148331 - RNA, 19 nt, Artificial Sequence
  Description of Artificial Sequence: Synthetic oligonucleotide
  Antisense strand to SEQ ID NO: 2148330
ucucauagucaggauacac

SEQ ID NO: 2148332 - RNA, 19 nt, Artificial Sequence
  Description of Artificial Sequence: Synthetic oligonucleotide
  Sense strand starting at position 3100 of SEQ ID NO: 1882799
guauccugacuaugagaga

SEQ ID NO: 2148333 - RNA, 19 nt, Artificial Sequence
  Description of Artificial Sequence: Synthetic oligonucleotide
  Antisense strand to SEQ ID NO: 2148332
ucucucauagucaggauac

SEQ ID NO: 2148334 - RNA, 19 nt, Artificial Sequence
  Description of Artificial Sequence: Synthetic oligonucleotide
  Sense strand starting at position 3152 of SEQ ID NO: 1882799
aucuacgugcaguaagaaa

SEQ ID NO: 2148335 - RNA, 19 nt, Artificial Sequence
  Description of Artificial Sequence: Synthetic oligonucleotide
  Antisense strand to SEQ ID NO: 2148334
uuucuuacugcacguagau

SEQ ID NO: 2148336 - RNA, 19 nt, Artificial Sequence
  Description of Artificial Sequence: Synthetic oligonucleotide
  Sense strand starting at position 3189 of SEQ ID NO: 1882799
aguuaucuuccagauggua

SEQ ID NO: 2148337 - RNA, 19 nt, Artificial Sequence
  Description of Artificial Sequence: Synthetic oligonucleotide
  Antisense strand to SEQ ID NO: 2148336
uaccaucuggaagauaacu

SEQ ID NO: 2148338 - RNA, 19 nt, Artificial Sequence
  Description of Artificial Sequence: Synthetic oligonucleotide
  Sense strand starting at position 3272 of SEQ ID NO: 1882799
aguacaugguaauccaaua

SEQ ID NO: 2148339 - RNA, 19 nt, Artificial Sequence
  Description of Artificial Sequence: Synthetic oligonucleotide
  Antisense strand to SEQ ID NO: 2148338
uauuggauuaccauguacu

SEQ ID NO: 2148340 - RNA, 19 nt, Artificial Sequence
  Description of Artificial Sequence: Synthetic oligonucleotide
  Sense strand starting at position 3359 of SEQ ID NO: 1882799
agaacuucuuuggucauaa

SEQ ID NO: 2148341 - RNA, 19 nt, Artificial Sequence
  Description of Artificial Sequence: Synthetic oligonucleotide
  Antisense strand to SEQ ID NO: 2148340
uuaugaccaaagaaguucu

SEQ ID NO: 2148342 - RNA, 19 nt, Artificial Sequence
  Description of Artificial Sequence: Synthetic oligonucleotide
  Sense strand starting at position 3370 of SEQ ID NO: 1882799
ggucauaaucaucaugcua

SEQ ID NO: 2148343 - RNA, 19 nt, Artificial Sequence
  Description of Artificial Sequence: Synthetic oligonucleotide
  Antisense strand to SEQ ID NO: 2148342
uagcaugaugauuaugacc

SEQ ID NO: 2148344 - RNA, 19 nt, Artificial Sequence
  Description of Artificial Sequence: Synthetic oligonucleotide
  Sense strand starting at position 3456 of SEQ ID NO: 1882799
acagcauauuuagaaauag

SEQ ID NO: 2148345 - RNA, 19 nt, Artificial Sequence
  Description of Artificial Sequence: Synthetic oligonucleotide
  Antisense strand to SEQ ID NO: 2148344
cuauuucuaaauaugcugu

SEQ ID NO: 2148346 - RNA, 19 nt, Artificial Sequence
  Description of Artificial Sequence: Synthetic oligonucleotide
  Sense strand starting at position 3710 of SEQ ID NO: 1882799
aauagugucuauucuagag

SEQ ID NO: 2148347 - RNA, 19 nt, Artificial Sequence
  Description of Artificial Sequence: Synthetic oligonucleotide
  Antisense strand to SEQ ID NO: 2148346
cucuagaauagacacuauu

SEQ ID NO: 2148348 - RNA, 19 nt, Artificial Sequence
  Description of Artificial Sequence: Synthetic oligonucleotide
  Sense strand starting at position 3714 of SEQ ID NO: 1882799
gugucuauucuagaggaca

SEQ ID NO: 2148349 - RNA, 19 nt, Artificial Sequence
  Description of Artificial Sequence: Synthetic oligonucleotide
  Antisense strand to SEQ ID NO: 2148348
uguccucuagaauagacac

SEQ ID NO: 2148350 - RNA, 19 nt, Artificial Sequence
  Description of Artificial Sequence: Synthetic oligonucleotide
  Sense strand starting at position 3837 of SEQ ID NO: 1882799
gucagcaaguuagucauuu

SEQ ID NO: 2148351 - RNA, 19 nt, Artificial Sequence
  Description of Artificial Sequence: Synthetic oligonucleotide
  Antisense strand to SEQ ID NO: 2148350
aaaugacuaacuugcugac

SEQ ID NO: 2148352 - RNA, 19 nt, Artificial Sequence
  Description of Artificial Sequence: Synthetic oligonucleotide
  Sense strand starting at position 3889 of SEQ ID NO: 1882799
ggaaguccacauuguugaa

SEQ ID NO: 2148353 - RNA, 19 nt, Artificial Sequence
  Description of Artificial Sequence: Synthetic oligonucleotide
  Antisense strand to SEQ ID NO: 2148352
uucaacaauguggacuucc

SEQ ID NO: 2148354 - RNA, 19 nt, Artificial Sequence
  Description of Artificial Sequence: Synthetic oligonucleotide
  Sense strand starting at position 27 of SEQ ID NO: 1882800
aguagaacugugugccaca

SEQ ID NO: 2148355 - RNA, 19 nt, Artificial Sequence
  Description of Artificial Sequence: Synthetic oligonucleotide
  Antisense strand to SEQ ID NO: 2148354
uguggcacacaguucuacu

SEQ ID NO: 2148356 - RNA, 19 nt, Artificial Sequence
  Description of Artificial Sequence: Synthetic oligonucleotide
  Sense strand starting at position 278 of SEQ ID NO: 1882800
uucauugccgugugaaaug

SEQ ID NO: 2148357 - RNA, 19 nt, Artificial Sequence
  Description of Artificial Sequence: Synthetic oligonucleotide
  Antisense strand to SEQ ID NO: 2148356
cauuucacacggcaaugaa

SEQ ID NO: 2148358 - RNA, 19 nt, Artificial Sequence
  Description of Artificial Sequence: Synthetic oligonucleotide
  Sense strand starting at position 303 of SEQ ID NO: 1882800
acaacugggucuccuauaa

SEQ ID NO: 2148359 - RNA, 19 nt, Artificial Sequence
  Description of Artificial Sequence: Synthetic oligonucleotide
  Antisense strand to SEQ ID NO: 2148358
uuauaggagacccaguugu

SEQ ID NO: 2148360 - RNA, 19 nt, Artificial Sequence
  Description of Artificial Sequence: Synthetic oligonucleotide
  Sense strand starting at position 307 of SEQ ID NO: 1882800
cugggucuccuauaaaguc

SEQ ID NO: 2148361 - RNA, 19 nt, Artificial Sequence
  Description of Artificial Sequence: Synthetic oligonucleotide
  Antisense strand to SEQ ID NO: 2148360
gacuuuauaggagacccag

SEQ ID NO: 2148362 - RNA, 19 nt, Artificial Sequence
  Description of Artificial Sequence: Synthetic oligonucleotide
  Sense strand starting at position 394 of SEQ ID NO: 1882800
aaauguuuccauggguuga

SEQ ID NO: 2148363 - RNA, 19 nt, Artificial Sequence
  Description of Artificial Sequence: Synthetic oligonucleotide
  Antisense strand to SEQ ID NO: 2148362
ucaacccauggaaacauuu

SEQ ID NO: 2148364 - RNA, 19 nt, Artificial Sequence
  Description of Artificial Sequence: Synthetic oligonucleotide
  Sense strand starting at position 398 of SEQ ID NO: 1882800
guuuccauggguugaacau

SEQ ID NO: 2148365 - RNA, 19 nt, Artificial Sequence
  Description of Artificial Sequence: Synthetic oligonucleotide
  Antisense strand to SEQ ID NO: 2148364
auguucaacccauggaaac

SEQ ID NO: 2148366 - RNA, 19 nt, Artificial Sequence
  Description of Artificial Sequence: Synthetic oligonucleotide
  Sense strand starting at position 444 of SEQ ID NO: 1882800
aagacaucccaccguguua

SEQ ID NO: 2148367 - RNA, 19 nt, Artificial Sequence
  Description of Artificial Sequence: Synthetic oligonucleotide
  Antisense strand to SEQ ID NO: 2148366
uaacacggugggaugucuu

SEQ ID NO: 2148368 - RNA, 19 nt, Artificial Sequence
  Description of Artificial Sequence: Synthetic oligonucleotide
  Sense strand starting at position 446 of SEQ ID NO: 1882800
gacaucccaccguguuaaa

SEQ ID NO: 2148369 - RNA, 19 nt, Artificial Sequence
  Description of Artificial Sequence: Synthetic oligonucleotide
  Antisense strand to SEQ ID NO: 2148368
uuuaacacggugggauguc

SEQ ID NO: 2148370 - RNA, 19 nt, Artificial Sequence
  Description of Artificial Sequence: Synthetic oligonucleotide
  Sense strand starting at position 715 of SEQ ID NO: 1882800
gguggcugucccugaaaua

SEQ ID NO: 2148371 - RNA, 19 nt, Artificial Sequence
  Description of Artificial Sequence: Synthetic oligonucleotide
  Antisense strand to SEQ ID NO: 2148370
uauuucagggacagccacc

SEQ ID NO: 2148372 - RNA, 19 nt, Artificial Sequence
  Description of Artificial Sequence: Synthetic oligonucleotide
  Sense strand starting at position 716 of SEQ ID NO: 1882800
guggcugucccugaaauaa

SEQ ID NO: 2148373 - RNA, 19 nt, Artificial Sequence
  Description of Artificial Sequence: Synthetic oligonucleotide
  Antisense strand to SEQ ID NO: 2148372
uuauuucagggacagccac

SEQ ID NO: 2148374 - RNA, 19 nt, Artificial Sequence
  Description of Artificial Sequence: Synthetic oligonucleotide
  Sense strand starting at position 769 of SEQ ID NO: 1882800
uaaaucauagagggcguua

SEQ ID NO: 2148375 - RNA, 19 nt, Artificial Sequence
  Description of Artificial Sequence: Synthetic oligonucleotide
  Antisense strand to SEQ ID NO: 2148374
uaacgcccucuaugauuua

SEQ ID NO: 2148376 - RNA, 19 nt, Artificial Sequence
  Description of Artificial Sequence: Synthetic oligonucleotide
  Sense strand starting at position 1032 of SEQ ID NO: 1882800
gagaauuacuuguaucaag

SEQ ID NO: 2148377 - RNA, 19 nt, Artificial Sequence
  Description of Artificial Sequence: Synthetic oligonucleotide
  Antisense strand to SEQ ID NO: 2148376
cuugauacaaguaauucuc

SEQ ID NO: 2148378 - RNA, 19 nt, Artificial Sequence
  Description of Artificial Sequence: Synthetic oligonucleotide
  Sense strand starting at position 1175 of SEQ ID NO: 1882800
uuuguuuguuguuuggaaa

SEQ ID NO: 2148379 - RNA, 19 nt, Artificial Sequence
  Description of Artificial Sequence: Synthetic oligonucleotide
  Antisense strand to SEQ ID NO: 2148378
uuuccaaacaacaaacaaa

SEQ ID NO: 2148380 - RNA, 19 nt, Artificial Sequence
  Description of Artificial Sequence: Synthetic oligonucleotide
  Sense strand starting at position 1176 of SEQ ID NO: 1882800
uuguuuguuguuuggaaac

SEQ ID NO: 2148381 - RNA, 19 nt, Artificial Sequence
  Description of Artificial Sequence: Synthetic oligonucleotide
  Antisense strand to SEQ ID NO: 2148380
guuuccaaacaacaaacaa

SEQ ID NO: 2148382 - RNA, 19 nt, Artificial Sequence
  Description of Artificial Sequence: Synthetic oligonucleotide
  Sense strand starting at position 1203 of SEQ ID NO: 1882800
aaauaaucguuauuaggug

SEQ ID NO: 2148383 - RNA, 19 nt, Artificial Sequence
  Description of Artificial Sequence: Synthetic oligonucleotide
  Antisense strand to SEQ ID NO: 2148382
caccuaauaacgauuauuu

SEQ ID NO: 2148384 - RNA, 19 nt, Artificial Sequence
  Description of Artificial Sequence: Synthetic oligonucleotide
  Sense strand starting at position 1225 of SEQ ID NO: 1882800
ccaggaaacuuguugcuca

SEQ ID NO: 2148385 - RNA, 19 nt, Artificial Sequence
  Description of Artificial Sequence: Synthetic oligonucleotide
  Antisense strand to SEQ ID NO: 2148384
ugagcaacaaguuuccugg

SEQ ID NO: 2148386 - RNA, 19 nt, Artificial Sequence
  Description of Artificial Sequence: Synthetic oligonucleotide
  Sense strand starting at position 1244 of SEQ ID NO: 1882800
gguguuugagucugucacu

SEQ ID NO: 2148387 - RNA, 19 nt, Artificial Sequence
  Description of Artificial Sequence: Synthetic oligonucleotide
  Antisense strand to SEQ ID NO: 2148386
agugacagacucaaacacc

SEQ ID NO: 2148388 - RNA, 19 nt, Artificial Sequence
  Description of Artificial Sequence: Synthetic oligonucleotide
  Sense strand starting at position 1249 of SEQ ID NO: 1882800
uugagucugucacuuaaga

SEQ ID NO: 2148389 - RNA, 19 nt, Artificial Sequence
  Description of Artificial Sequence: Synthetic oligonucleotide
  Antisense strand to SEQ ID NO: 2148388
ucuuaagugacagacucaa

SEQ ID NO: 2148390 - RNA, 19 nt, Artificial Sequence
  Description of Artificial Sequence: Synthetic oligonucleotide
  Sense strand starting at position 1251 of SEQ ID NO: 1882800
gagucugucacuuaagagg

SEQ ID NO: 2148391 - RNA, 19 nt, Artificial Sequence
  Description of Artificial Sequence: Synthetic oligonucleotide
  Antisense strand to SEQ ID NO: 2148390
ccucuuaagugacagacuc

SEQ ID NO: 2148392 - RNA, 19 nt, Artificial Sequence
  Description of Artificial Sequence: Synthetic oligonucleotide
  Sense strand starting at position 2253 of SEQ ID NO: 1882800
acugaagguuugucccaga

SEQ ID NO: 2148393 - RNA, 19 nt, Artificial Sequence
  Description of Artificial Sequence: Synthetic oligonucleotide
  Antisense strand to SEQ ID NO: 2148392
ucugggacaaaccuucagu

SEQ ID NO: 2148394 - RNA, 19 nt, Artificial Sequence
  Description of Artificial Sequence: Synthetic oligonucleotide
  Sense strand starting at position 2258 of SEQ ID NO: 1882800
agguuugucccagagcuga

SEQ ID NO: 2148395 - RNA, 19 nt, Artificial Sequence
  Description of Artificial Sequence: Synthetic oligonucleotide
  Antisense strand to SEQ ID NO: 2148394
ucagcucugggacaaaccu

SEQ ID NO: 2148396 - RNA, 19 nt, Artificial Sequence
  Description of Artificial Sequence: Synthetic oligonucleotide
  Sense strand starting at position 2525 of SEQ ID NO: 1882800
cugggaguccagggucaau

SEQ ID NO: 2148397 - RNA, 19 nt, Artificial Sequence
  Description of Artificial Sequence: Synthetic oligonucleotide
  Antisense strand to SEQ ID NO: 2148396
auugacccuggacucccag

SEQ ID NO: 2148398 - RNA, 19 nt, Artificial Sequence
  Description of Artificial Sequence: Synthetic oligonucleotide
  Sense strand starting at position 2576 of SEQ ID NO: 1882800
cggagaagaaucuguccca

SEQ ID NO: 2148399 - RNA, 19 nt, Artificial Sequence
  Description of Artificial Sequence: Synthetic oligonucleotide
  Antisense strand to SEQ ID NO: 2148398
ugggacagauucuucuccg

SEQ ID NO: 2148400 - RNA, 19 nt, Artificial Sequence
  Description of Artificial Sequence: Synthetic oligonucleotide
  Sense strand starting at position 2579 of SEQ ID NO: 1882800
agaagaaucugucccagau

SEQ ID NO: 2148401 - RNA, 19 nt, Artificial Sequence
  Description of Artificial Sequence: Synthetic oligonucleotide
  Antisense strand to SEQ ID NO: 2148400
aucugggacagauucuucu

SEQ ID NO: 2148402 - RNA, 19 nt, Artificial Sequence
  Description of Artificial Sequence: Synthetic oligonucleotide
  Sense strand starting at position 2664 of SEQ ID NO: 1882800
cgcaucuccgccuuugaua

SEQ ID NO: 2148403 - RNA, 19 nt, Artificial Sequence
  Description of Artificial Sequence: Synthetic oligonucleotide
  Antisense strand to SEQ ID NO: 2148402
uaucaaaggcggagaugcg

SEQ ID NO: 2148404 - RNA, 19 nt, Artificial Sequence
  Description of Artificial Sequence: Synthetic oligonucleotide
  Sense strand starting at position 2726 of SEQ ID NO: 1882800
auugaaacuuagccaguua

SEQ ID NO: 2148405 - RNA, 19 nt, Artificial Sequence
  Description of Artificial Sequence: Synthetic oligonucleotide
  Antisense strand to SEQ ID NO: 2148404
uaacuggcuaaguuucaau

SEQ ID NO: 2148406 - RNA, 19 nt, Artificial Sequence
  Description of Artificial Sequence: Synthetic oligonucleotide
  Sense strand starting at position 2737 of SEQ ID NO: 1882800
gccaguuaccuccacaaag

SEQ ID NO: 2148407 - RNA, 19 nt, Artificial Sequence
  Description of Artificial Sequence: Synthetic oligonucleotide
  Antisense strand to SEQ ID NO: 2148406
cuuuguggagguaacuggc

SEQ ID NO: 2148408 - RNA, 19 nt, Artificial Sequence
  Description of Artificial Sequence: Synthetic oligonucleotide
  Sense strand starting at position 2797 of SEQ ID NO: 1882800
uagggcuuggcaugcgaau

SEQ ID NO: 2148409 - RNA, 19 nt, Artificial Sequence
  Description of Artificial Sequence: Synthetic oligonucleotide
  Antisense strand to SEQ ID NO: 2148408
auucgcaugccaagcccua

SEQ ID NO: 2148410 - RNA, 19 nt, Artificial Sequence
  Description of Artificial Sequence: Synthetic oligonucleotide
  Sense strand starting at position 2799 of SEQ ID NO: 1882800
gggcuuggcaugcgaauuu

SEQ ID NO: 2148411 - RNA, 19 nt, Artificial Sequence
  Description of Artificial Sequence: Synthetic oligonucleotide
  Antisense strand to SEQ ID NO: 2148410
aaauucgcaugccaagccc

SEQ ID NO: 2148412 - RNA, 19 nt, Artificial Sequence
  Description of Artificial Sequence: Synthetic oligonucleotide
  Sense strand starting at position 2845 of SEQ ID NO: 1882800
gggaguaucucccucagac

SEQ ID NO: 2148413 - RNA, 19 nt, Artificial Sequence
  Description of Artificial Sequence: Synthetic oligonucleotide
  Antisense strand to SEQ ID NO: 2148412
gucugagggagauacuccc

SEQ ID NO: 2148414 - RNA, 19 nt, Artificial Sequence
  Description of Artificial Sequence: Synthetic oligonucleotide
  Sense strand starting at position 2904 of SEQ ID NO: 1882800
ucgguuauucuacaugaug

SEQ ID NO: 2148415 - RNA, 19 nt, Artificial Sequence
  Description of Artificial Sequence: Synthetic oligonucleotide
  Antisense strand to SEQ ID NO: 2148414
caucauguagaauaaccga

SEQ ID NO: 2148416 - RNA, 19 nt, Artificial Sequence
  Description of Artificial Sequence: Synthetic oligonucleotide
  Sense strand starting at position 2992 of SEQ ID NO: 1882800
aaggucaggcccugagaaa

SEQ ID NO: 2148417 - RNA, 19 nt, Artificial Sequence
  Description of Artificial Sequence: Synthetic oligonucleotide
  Antisense strand to SEQ ID NO: 2148416
uuucucagggccugaccuu

SEQ ID NO: 2148418 - RNA, 19 nt, Artificial Sequence
  Description of Artificial Sequence: Synthetic oligonucleotide
  Sense strand starting at position 3160 of SEQ ID NO: 1882800
caugguucuccaggguuua

SEQ ID NO: 2148419 - RNA, 19 nt, Artificial Sequence
  Description of Artificial Sequence: Synthetic oligonucleotide
  Antisense strand to SEQ ID NO: 2148418
uaaacccuggagaaccaug

SEQ ID NO: 2148420 - RNA, 19 nt, Artificial Sequence
  Description of Artificial Sequence: Synthetic oligonucleotide
  Sense strand starting at position 3161 of SEQ ID NO: 1882800
augguucuccaggguuuaa

SEQ ID NO: 2148421 - RNA, 19 nt, Artificial Sequence
  Description of Artificial Sequence: Synthetic oligonucleotide
  Antisense strand to SEQ ID NO: 2148420
uuaaacccuggagaaccau

SEQ ID NO: 2148422 - RNA, 19 nt, Artificial Sequence
  Description of Artificial Sequence: Synthetic oligonucleotide
  Sense strand starting at position 3259 of SEQ ID NO: 1882800
agaagaaggcucugaaguu

SEQ ID NO: 2148423 - RNA, 19 nt, Artificial Sequence
  Description of Artificial Sequence: Synthetic oligonucleotide
  Antisense strand to SEQ ID NO: 2148422
aacuucagagccuucuucu

SEQ ID NO: 2148424 - RNA, 19 nt, Artificial Sequence
  Description of Artificial Sequence: Synthetic oligonucleotide
  Sense strand starting at position 3374 of SEQ ID NO: 1882800
cuacaugacuccucggaau

SEQ ID NO: 2148425 - RNA, 19 nt, Artificial Sequence
  Description of Artificial Sequence: Synthetic oligonucleotide
  Antisense strand to SEQ ID NO: 2148424
auuccgaggagucauguag

SEQ ID NO: 2148426 - RNA, 19 nt, Artificial Sequence
  Description of Artificial Sequence: Synthetic oligonucleotide
  Sense strand starting at position 3415 of SEQ ID NO: 1882800
cagugagcugcuucuuguu

SEQ ID NO: 2148427 - RNA, 19 nt, Artificial Sequence
  Description of Artificial Sequence: Synthetic oligonucleotide
  Antisense strand to SEQ ID NO: 2148426
aacaagaagcagcucacug

SEQ ID NO: 2148428 - RNA, 19 nt, Artificial Sequence
  Description of Artificial Sequence: Synthetic oligonucleotide
  Sense strand starting at position 3451 of SEQ ID NO: 1882800
caucgcauccgugugagua

SEQ ID NO: 2148429 - RNA, 19 nt, Artificial Sequence
  Description of Artificial Sequence: Synthetic oligonucleotide
  Antisense strand to SEQ ID NO: 2148428
uacucacacggaugcgaug

SEQ ID NO: 2148430 - RNA, 19 nt, Artificial Sequence
  Description of Artificial Sequence: Synthetic oligonucleotide
  Sense strand starting at position 3721 of SEQ ID NO: 1882800
uugagagacuugcuguguu

SEQ ID NO: 2148431 - RNA, 19 nt, Artificial Sequence
  Description of Artificial Sequence: Synthetic oligonucleotide
  Antisense strand to SEQ ID NO: 2148430
aacacagcaagucucucaa

SEQ ID NO: 2148432 - RNA, 19 nt, Artificial Sequence
  Description of Artificial Sequence: Synthetic oligonucleotide
  Sense strand starting at position 3921 of SEQ ID NO: 1882800
gcaucuugaccucgugauc

SEQ ID NO: 2148433 - RNA, 19 nt, Artificial Sequence
  Description of Artificial Sequence: Synthetic oligonucleotide
  Antisense strand to SEQ ID NO: 2148432
gaucacgaggucaagaugc

SEQ ID NO: 2148434 - RNA, 19 nt, Artificial Sequence
  Description of Artificial Sequence: Synthetic oligonucleotide
  Sense strand starting at position 254 of SEQ ID NO: 1882801
aggcgaaauuauguaugga

SEQ ID NO: 2148435 - RNA, 19 nt, Artificial Sequence
  Description of Artificial Sequence: Synthetic oligonucleotide
  Antisense strand to SEQ ID NO: 2148434
uccauacauaauuucgccu

SEQ ID NO: 2148436 - RNA, 19 nt, Artificial Sequence
  Description of Artificial Sequence: Synthetic oligonucleotide
  Sense strand starting at position 255 of SEQ ID NO: 1882801
ggcgaaauuauguauggag

SEQ ID NO: 2148437 - RNA, 19 nt, Artificial Sequence
  Description of Artificial Sequence: Synthetic oligonucleotide
  Antisense strand to SEQ ID NO: 2148436
cuccauacauaauuucgcc

SEQ ID NO: 2148438 - RNA, 19 nt, Artificial Sequence
  Description of Artificial Sequence: Synthetic oligonucleotide
  Sense strand starting at position 257 of SEQ ID NO: 1882801
cgaaauuauguauggagau

SEQ ID NO: 2148439 - RNA, 19 nt, Artificial Sequence
  Description of Artificial Sequence: Synthetic oligonucleotide
  Antisense strand to SEQ ID NO: 2148438
aucuccauacauaauuucg

SEQ ID NO: 2148440 - RNA, 19 nt, Artificial Sequence
  Description of Artificial Sequence: Synthetic oligonucleotide
  Sense strand starting at position 419 of SEQ ID NO: 1882801
uguaaauggagcuaaguua

SEQ ID NO: 2148441 - RNA, 19 nt, Artificial Sequence
  Description of Artificial Sequence: Synthetic oligonucleotide
  Antisense strand to SEQ ID NO: 2148440
uaacuuagcuccauuuaca

SEQ ID NO: 2148442 - RNA, 19 nt, Artificial Sequence
  Description of Artificial Sequence: Synthetic oligonucleotide
  Sense strand starting at position 639 of SEQ ID NO: 1882801
auuucugcucucuguuaag

SEQ ID NO: 2148443 - RNA, 19 nt, Artificial Sequence
  Description of Artificial Sequence: Synthetic oligonucleotide
  Antisense strand to SEQ ID NO: 2148442
cuuaacagagagcagaaau

SEQ ID NO: 2148444 - RNA, 19 nt, Artificial Sequence
  Description of Artificial Sequence: Synthetic oligonucleotide
  Sense strand starting at position 913 of SEQ ID NO: 1882801
agguuaagugauggguuaa

SEQ ID NO: 2148445 - RNA, 19 nt, Artificial Sequence
  Description of Artificial Sequence: Synthetic oligonucleotide
  Antisense strand to SEQ ID NO: 2148444
uuaacccaucacuuaaccu

SEQ ID NO: 2148446 - RNA, 19 nt, Artificial Sequence
  Description of Artificial Sequence: Synthetic oligonucleotide
  Sense strand starting at position 914 of SEQ ID NO: 1882801
gguuaagugauggguuaaa

SEQ ID NO: 2148447 - RNA, 19 nt, Artificial Sequence
  Description of Artificial Sequence: Synthetic oligonucleotide
  Antisense strand to SEQ ID NO: 2148446
uuuaacccaucacuuaacc

SEQ ID NO: 2148448 - RNA, 19 nt, Artificial Sequence
  Description of Artificial Sequence: Synthetic oligonucleotide
  Sense strand starting at position 967 of SEQ ID NO: 1882801
uccuuccuagagugaaauu

SEQ ID NO: 2148449 - RNA, 19 nt, Artificial Sequence
  Description of Artificial Sequence: Synthetic oligonucleotide
  Antisense strand to SEQ ID NO: 2148448
aauuucacucuaggaagga

SEQ ID NO: 2148450 - RNA, 19 nt, Artificial Sequence
  Description of Artificial Sequence: Synthetic oligonucleotide
  Sense strand starting at position 992 of SEQ ID NO: 1882801
guacacaaguucuccugaa

SEQ ID NO: 2148451 - RNA, 19 nt, Artificial Sequence
  Description of Artificial Sequence: Synthetic oligonucleotide
  Antisense strand to SEQ ID NO: 2148450
uucaggagaacuuguguac

SEQ ID NO: 2148452 - RNA, 19 nt, Artificial Sequence
  Description of Artificial Sequence: Synthetic oligonucleotide
  Sense strand starting at position 1110 of SEQ ID NO: 1882801
cagagaaagcuguguauga

SEQ ID NO: 2148453 - RNA, 19 nt, Artificial Sequence
  Description of Artificial Sequence: Synthetic oligonucleotide
  Antisense strand to SEQ ID NO: 2148452
ucauacacagcuuucucug

SEQ ID NO: 2148454 - RNA, 19 nt, Artificial Sequence
  Description of Artificial Sequence: Synthetic oligonucleotide
  Sense strand starting at position 1111 of SEQ ID NO: 1882801
agagaaagcuguguaugac

SEQ ID NO: 2148455 - RNA, 19 nt, Artificial Sequence
  Description of Artificial Sequence: Synthetic oligonucleotide
  Antisense strand to SEQ ID NO: 2148454
gucauacacagcuuucucu

SEQ ID NO: 2148456 - RNA, 19 nt, Artificial Sequence
  Description of Artificial Sequence: Synthetic oligonucleotide
  Sense strand starting at position 1112 of SEQ ID NO: 1882801
gagaaagcuguguaugacu

SEQ ID NO: 2148457 - RNA, 19 nt, Artificial Sequence
  Description of Artificial Sequence: Synthetic oligonucleotide
  Antisense strand to SEQ ID NO: 2148456
agucauacacagcuuucuc

SEQ ID NO: 2148458 - RNA, 19 nt, Artificial Sequence
  Description of Artificial Sequence: Synthetic oligonucleotide
  Sense strand starting at position 1472 of SEQ ID NO: 1882801
aaugguuacgaugauguga

SEQ ID NO: 2148459 - RNA, 19 nt, Artificial Sequence
  Description of Artificial Sequence: Synthetic oligonucleotide
  Antisense strand to SEQ ID NO: 2148458
ucacaucaucguaaccauu

SEQ ID NO: 2148460 - RNA, 19 nt, Artificial Sequence
  Description of Artificial Sequence: Synthetic oligonucleotide
  Sense strand starting at position 1859 of SEQ ID NO: 1882801
gcucuaaaucaagaugcaa

SEQ ID NO: 2148461 - RNA, 19 nt, Artificial Sequence
  Description of Artificial Sequence: Synthetic oligonucleotide
  Antisense strand to SEQ ID NO: 2148460
uugcaucuugauuuagagc

SEQ ID NO: 2148462 - RNA, 19 nt, Artificial Sequence
  Description of Artificial Sequence: Synthetic oligonucleotide
  Sense strand starting at position 2101 of SEQ ID NO: 1882801
cuaggauuaucagugaccu

SEQ ID NO: 2148463 - RNA, 19 nt, Artificial Sequence
  Description of Artificial Sequence: Synthetic oligonucleotide
  Antisense strand to SEQ ID NO: 2148462
aggucacugauaauccuag

SEQ ID NO: 2148464 - RNA, 19 nt, Artificial Sequence
  Description of Artificial Sequence: Synthetic oligonucleotide
  Sense strand starting at position 2102 of SEQ ID NO: 1882801
uaggauuaucagugaccuu

SEQ ID NO: 2148465 - RNA, 19 nt, Artificial Sequence
  Description of Artificial Sequence: Synthetic oligonucleotide
  Antisense strand to SEQ ID NO: 2148464
aaggucacugauaauccua

SEQ ID NO: 2148466 - RNA, 19 nt, Artificial Sequence
  Description of Artificial Sequence: Synthetic oligonucleotide
  Sense strand starting at position 2131 of SEQ ID NO: 1882801
aguggagguuguguauuua

SEQ ID NO: 2148467 - RNA, 19 nt, Artificial Sequence
  Description of Artificial Sequence: Synthetic oligonucleotide
  Antisense strand to SEQ ID NO: 2148466
uaaauacacaaccuccacu

SEQ ID NO: 2148468 - RNA, 19 nt, Artificial Sequence
  Description of Artificial Sequence: Synthetic oligonucleotide
  Sense strand starting at position 2228 of SEQ ID NO: 1882801
gcucuagaaccuuggauaa

SEQ ID NO: 2148469 - RNA, 19 nt, Artificial Sequence
  Description of Artificial Sequence: Synthetic oligonucleotide
  Antisense strand to SEQ ID NO: 2148468
uuauccaagguucuagagc

SEQ ID NO: 2148470 - RNA, 19 nt, Artificial Sequence
  Description of Artificial Sequence: Synthetic oligonucleotide
  Sense strand starting at position 2460 of SEQ ID NO: 1882801
gacacagugaucuggaggu

SEQ ID NO: 2148471 - RNA, 19 nt, Artificial Sequence
  Description of Artificial Sequence: Synthetic oligonucleotide
  Antisense strand to SEQ ID NO: 2148470
accuccagaucacuguguc

SEQ ID NO: 2148472 - RNA, 19 nt, Artificial Sequence
  Description of Artificial Sequence: Synthetic oligonucleotide
  Sense strand starting at position 2462 of SEQ ID NO: 1882801
cacagugaucuggagguuu

SEQ ID NO: 2148473 - RNA, 19 nt, Artificial Sequence
  Description of Artificial Sequence: Synthetic oligonucleotide
  Antisense strand to SEQ ID NO: 2148472
aaaccuccagaucacugug

SEQ ID NO: 2148474 - RNA, 19 nt, Artificial Sequence
  Description of Artificial Sequence: Synthetic oligonucleotide
  Sense strand starting at position 2464 of SEQ ID NO: 1882801
cagugaucuggagguuuga

SEQ ID NO: 2148475 - RNA, 19 nt, Artificial Sequence
  Description of Artificial Sequence: Synthetic oligonucleotide
  Antisense strand to SEQ ID NO: 2148474
ucaaaccuccagaucacug

SEQ ID NO: 2148476 - RNA, 19 nt, Artificial Sequence
  Description of Artificial Sequence: Synthetic oligonucleotide
  Sense strand starting at position 2473 of SEQ ID NO: 1882801
ggagguuugacuggaauug

SEQ ID NO: 2148477 - RNA, 19 nt, Artificial Sequence
  Description of Artificial Sequence: Synthetic oligonucleotide
  Antisense strand to SEQ ID NO: 2148476
caauuccagucaaaccucc

SEQ ID NO: 2148478 - RNA, 19 nt, Artificial Sequence
  Description of Artificial Sequence: Synthetic oligonucleotide
  Sense strand starting at position 2530 of SEQ ID NO: 1882801
cugggacugucagcagaau

SEQ ID NO: 2148479 - RNA, 19 nt, Artificial Sequence
  Description of Artificial Sequence: Synthetic oligonucleotide
  Antisense strand to SEQ ID NO: 2148478
auucugcugacagucccag

SEQ ID NO: 2148480 - RNA, 19 nt, Artificial Sequence
  Description of Artificial Sequence: Synthetic oligonucleotide
  Sense strand starting at position 2541 of SEQ ID NO: 1882801
agcagaauaccucaguucu

SEQ ID NO: 2148481 - RNA, 19 nt, Artificial Sequence
  Description of Artificial Sequence: Synthetic oligonucleotide
  Antisense strand to SEQ ID NO: 2148480
agaacugagguauucugcu

SEQ ID NO: 2148482 - RNA, 19 nt, Artificial Sequence
  Description of Artificial Sequence: Synthetic oligonucleotide
  Sense strand starting at position 2582 of SEQ ID NO: 1882801
gagaccagguuucuuacau

SEQ ID NO: 2148483 - RNA, 19 nt, Artificial Sequence
  Description of Artificial Sequence: Synthetic oligonucleotide
  Antisense strand to SEQ ID NO: 2148482
auguaagaaaccuggucuc

SEQ ID NO: 2148484 - RNA, 19 nt, Artificial Sequence
  Description of Artificial Sequence: Synthetic oligonucleotide
  Sense strand starting at position 2666 of SEQ ID NO: 1882801
gucauauuggcugauaucu

SEQ ID NO: 2148485 - RNA, 19 nt, Artificial Sequence
  Description of Artificial Sequence: Synthetic oligonucleotide
  Antisense strand to SEQ ID NO: 2148484
agauaucagccaauaugac

SEQ ID NO: 2148486 - RNA, 19 nt, Artificial Sequence
  Description of Artificial Sequence: Synthetic oligonucleotide
  Sense strand starting at position 2678 of SEQ ID NO: 1882801
gauaucuuguuagucaaag

SEQ ID NO: 2148487 - RNA, 19 nt, Artificial Sequence
  Description of Artificial Sequence: Synthetic oligonucleotide
  Antisense strand to SEQ ID NO: 2148486
cuuugacuaacaagauauc

SEQ ID NO: 2148488 - RNA, 19 nt, Artificial Sequence
  Description of Artificial Sequence: Synthetic oligonucleotide
  Sense strand starting at position 2765 of SEQ ID NO: 1882801
auggaaucauuaguguaau

SEQ ID NO: 2148489 - RNA, 19 nt, Artificial Sequence
  Description of Artificial Sequence: Synthetic oligonucleotide
  Antisense strand to SEQ ID NO: 2148488
auuacacuaaugauuccau

SEQ ID NO: 2148490 - RNA, 19 nt, Artificial Sequence
  Description of Artificial Sequence: Synthetic oligonucleotide
  Sense strand starting at position 3081 of SEQ ID NO: 1882801
agaugugaagcuuggagaa

SEQ ID NO: 2148491 - RNA, 19 nt, Artificial Sequence
  Description of Artificial Sequence: Synthetic oligonucleotide
  Antisense strand to SEQ ID NO: 2148490
uucuccaagcuucacaucu

SEQ ID NO: 2148492 - RNA, 19 nt, Artificial Sequence
  Description of Artificial Sequence: Synthetic oligonucleotide
  Sense strand starting at position 3170 of SEQ ID NO: 1882801
auuggucauuccucagaac

SEQ ID NO: 2148493 - RNA, 19 nt, Artificial Sequence
  Description of Artificial Sequence: Synthetic oligonucleotide
  Antisense strand to SEQ ID NO: 2148492
guucugaggaaugaccaau

SEQ ID NO: 2148494 - RNA, 19 nt, Artificial Sequence
  Description of Artificial Sequence: Synthetic oligonucleotide
  Sense strand starting at position 3171 of SEQ ID NO: 1882801
uuggucauuccucagaaca

SEQ ID NO: 2148495 - RNA, 19 nt, Artificial Sequence
  Description of Artificial Sequence: Synthetic oligonucleotide
  Antisense strand to SEQ ID NO: 2148494
uguucugaggaaugaccaa

SEQ ID NO: 2148496 - RNA, 19 nt, Artificial Sequence
  Description of Artificial Sequence: Synthetic oligonucleotide
  Sense strand starting at position 3206 of SEQ ID NO: 1882801
gugaguuaauuugcaaguc

SEQ ID NO: 2148497 - RNA, 19 nt, Artificial Sequence
  Description of Artificial Sequence: Synthetic oligonucleotide
  Antisense strand to SEQ ID NO: 2148496
gacuugcaaauuaacucac

SEQ ID NO: 2148498 - RNA, 19 nt, Artificial Sequence
  Description of Artificial Sequence: Synthetic oligonucleotide
  Sense strand starting at position 3230 of SEQ ID NO: 1882801
gguagaggucaugagagcu

SEQ ID NO: 2148499 - RNA, 19 nt, Artificial Sequence
  Description of Artificial Sequence: Synthetic oligonucleotide
  Antisense strand to SEQ ID NO: 2148498
agcucucaugaccucuacc

SEQ ID NO: 2148500 - RNA, 19 nt, Artificial Sequence
  Description of Artificial Sequence: Synthetic oligonucleotide
  Sense strand starting at position 3286 of SEQ ID NO: 1882801
ugaggauccaucugaggca

SEQ ID NO: 2148501 - RNA, 19 nt, Artificial Sequence
  Description of Artificial Sequence: Synthetic oligonucleotide
  Antisense strand to SEQ ID NO: 2148500
ugccucagauggauccuca

SEQ ID NO: 2148502 - RNA, 19 nt, Artificial Sequence
  Description of Artificial Sequence: Synthetic oligonucleotide
  Sense strand starting at position 3434 of SEQ ID NO: 1882801
auaugaauuugggaguacu

SEQ ID NO: 2148503 - RNA, 19 nt, Artificial Sequence
  Description of Artificial Sequence: Synthetic oligonucleotide
  Antisense strand to SEQ ID NO: 2148502
aguacucccaaauucauau

SEQ ID NO: 2148504 - RNA, 19 nt, Artificial Sequence
  Description of Artificial Sequence: Synthetic oligonucleotide
  Sense strand starting at position 3724 of SEQ ID NO: 1882801
acacaaaugccugguagga

SEQ ID NO: 2148505 - RNA, 19 nt, Artificial Sequence
  Description of Artificial Sequence: Synthetic oligonucleotide
  Antisense strand to SEQ ID NO: 2148504
uccuaccaggcauuugugu

SEQ ID NO: 2148506 - RNA, 19 nt, Artificial Sequence
  Description of Artificial Sequence: Synthetic oligonucleotide
  Sense strand starting at position 3737 of SEQ ID NO: 1882801
guaggauauugguucucaa

SEQ ID NO: 2148507 - RNA, 19 nt, Artificial Sequence
  Description of Artificial Sequence: Synthetic oligonucleotide
  Antisense strand to SEQ ID NO: 2148506
uugagaaccaauauccuac

SEQ ID NO: 2148508 - RNA, 19 nt, Artificial Sequence
  Description of Artificial Sequence: Synthetic oligonucleotide
  Sense strand starting at position 3740 of SEQ ID NO: 1882801
ggauauugguucucaaaca

SEQ ID NO: 2148509 - RNA, 19 nt, Artificial Sequence
  Description of Artificial Sequence: Synthetic oligonucleotide
  Antisense strand to SEQ ID NO: 2148508
uguuugagaaccaauaucc

SEQ ID NO: 2148510 - RNA, 19 nt, Artificial Sequence
  Description of Artificial Sequence: Synthetic oligonucleotide
  Sense strand starting at position 3798 of SEQ ID NO: 1882801
cugagcuuaccucagagau

SEQ ID NO: 2148511 - RNA, 19 nt, Artificial Sequence
  Description of Artificial Sequence: Synthetic oligonucleotide
  Antisense strand to SEQ ID NO: 2148510
aucucugagguaagcucag

SEQ ID NO: 2148512 - RNA, 19 nt, Artificial Sequence
  Description of Artificial Sequence: Synthetic oligonucleotide
  Sense strand starting at position 3906 of SEQ ID NO: 1882801
augguacacauguaguuau

SEQ ID NO: 2148513 - RNA, 19 nt, Artificial Sequence
  Description of Artificial Sequence: Synthetic oligonucleotide
  Antisense strand to SEQ ID NO: 2148512
auaacuacauguguaccau

SEQ ID NO: 2148514 - RNA, 19 nt, Artificial Sequence
  Description of Artificial Sequence: Synthetic oligonucleotide
  Sense strand starting at position 6 of SEQ ID NO: 1882802
uuucuugaaucccugaaag

SEQ ID NO: 2148515 - RNA, 19 nt, Artificial Sequence
  Description of Artificial Sequence: Synthetic oligonucleotide
  Antisense strand to SEQ ID NO: 2148514
cuuucagggauucaagaaa

SEQ ID NO: 2148516 - RNA, 19 nt, Artificial Sequence
  Description of Artificial Sequence: Synthetic oligonucleotide
  Sense strand starting at position 153 of SEQ ID NO: 1882802
aaagccagugucuaggauu

SEQ ID NO: 2148517 - RNA, 19 nt, Artificial Sequence
  Description of Artificial Sequence: Synthetic oligonucleotide
  Antisense strand to SEQ ID NO: 2148516
aauccuagacacuggcuuu

SEQ ID NO: 2148518 - RNA, 19 nt, Artificial Sequence
  Description of Artificial Sequence: Synthetic oligonucleotide
  Sense strand starting at position 160 of SEQ ID NO: 1882802
gugucuaggauuuguuaua

SEQ ID NO: 2148519 - RNA, 19 nt, Artificial Sequence
  Description of Artificial Sequence: Synthetic oligonucleotide
  Antisense strand to SEQ ID NO: 2148518
uauaacaaauccuagacac

SEQ ID NO: 2148520 - RNA, 19 nt, Artificial Sequence
  Description of Artificial Sequence: Synthetic oligonucleotide
  Sense strand starting at position 174 of SEQ ID NO: 1882802
uuauacuggcacugagaca

SEQ ID NO: 2148521 - RNA, 19 nt, Artificial Sequence
  Description of Artificial Sequence: Synthetic oligonucleotide
  Antisense strand to SEQ ID NO: 2148520
ugucucagugccaguauaa

SEQ ID NO: 2148522 - RNA, 19 nt, Artificial Sequence
  Description of Artificial Sequence: Synthetic oligonucleotide
  Sense strand starting at position 764 of SEQ ID NO: 1882802
acagacuccuguucugaaa

SEQ ID NO: 2148523 - RNA, 19 nt, Artificial Sequence
  Description of Artificial Sequence: Synthetic oligonucleotide
  Antisense strand to SEQ ID NO: 2148522
uuucagaacaggagucugu

SEQ ID NO: 2148524 - RNA, 19 nt, Artificial Sequence
  Description of Artificial Sequence: Synthetic oligonucleotide
  Sense strand starting at position 1055 of SEQ ID NO: 1882802
cugggauucuggguauucu

SEQ ID NO: 2148525 - RNA, 19 nt, Artificial Sequence
  Description of Artificial Sequence: Synthetic oligonucleotide
  Antisense strand to SEQ ID NO: 2148524
agaauacccagaaucccag

SEQ ID NO: 2148526 - RNA, 19 nt, Artificial Sequence
  Description of Artificial Sequence: Synthetic oligonucleotide
  Sense strand starting at position 1056 of SEQ ID NO: 1882802
ugggauucuggguauucua

SEQ ID NO: 2148527 - RNA, 19 nt, Artificial Sequence
  Description of Artificial Sequence: Synthetic oligonucleotide
  Antisense strand to SEQ ID NO: 2148526
uagaauacccagaauccca

SEQ ID NO: 2148528 - RNA, 19 nt, Artificial Sequence
  Description of Artificial Sequence: Synthetic oligonucleotide
  Sense strand starting at position 1059 of SEQ ID NO: 1882802
gauucuggguauucuaacu

SEQ ID NO: 2148529 - RNA, 19 nt, Artificial Sequence
  Description of Artificial Sequence: Synthetic oligonucleotide
  Antisense strand to SEQ ID NO: 2148528
aguuagaauacccagaauc

SEQ ID NO: 2148530 - RNA, 19 nt, Artificial Sequence
  Description of Artificial Sequence: Synthetic oligonucleotide
  Sense strand starting at position 1064 of SEQ ID NO: 1882802
uggguauucuaacuuugaa

SEQ ID NO: 2148531 - RNA, 19 nt, Artificial Sequence
  Description of Artificial Sequence: Synthetic oligonucleotide
  Antisense strand to SEQ ID NO: 2148530
uucaaaguuagaauaccca

SEQ ID NO: 2148532 - RNA, 19 nt, Artificial Sequence
  Description of Artificial Sequence: Synthetic oligonucleotide
  Sense strand starting at position 1243 of SEQ ID NO: 1882802
cccagcuuauugcuaagau

SEQ ID NO: 2148533 - RNA, 19 nt, Artificial Sequence
  Description of Artificial Sequence: Synthetic oligonucleotide
  Antisense strand to SEQ ID NO: 2148532
aucuuagcaauaagcuggg

SEQ ID NO: 2148534 - RNA, 19 nt, Artificial Sequence
  Description of Artificial Sequence: Synthetic oligonucleotide
  Sense strand starting at position 1410 of SEQ ID NO: 1882802
gcuuuaagaugggugggaa

SEQ ID NO: 2148535 - RNA, 19 nt, Artificial Sequence
  Description of Artificial Sequence: Synthetic oligonucleotide
  Antisense strand to SEQ ID NO: 2148534
uucccacccaucuuaaagc

SEQ ID NO: 2148536 - RNA, 19 nt, Artificial Sequence
  Description of Artificial Sequence: Synthetic oligonucleotide
  Sense strand starting at position 1519 of SEQ ID NO: 1882802
cacagcacuguuugggaaa

SEQ ID NO: 2148537 - RNA, 19 nt, Artificial Sequence
  Description of Artificial Sequence: Synthetic oligonucleotide
  Antisense strand to SEQ ID NO: 2148536
uuucccaaacagugcugug

SEQ ID NO: 2148538 - RNA, 19 nt, Artificial Sequence
  Description of Artificial Sequence: Synthetic oligonucleotide
  Sense strand starting at position 1531 of SEQ ID NO: 1882802
ugggaaagauuagaaucaa

SEQ ID NO: 2148539 - RNA, 19 nt, Artificial Sequence
  Description of Artificial Sequence: Synthetic oligonucleotide
  Antisense strand to SEQ ID NO: 2148538
uugauucuaaucuuuccca

SEQ ID NO: 2148540 - RNA, 19 nt, Artificial Sequence
  Description of Artificial Sequence: Synthetic oligonucleotide
  Sense strand starting at position 2012 of SEQ ID NO: 1882802
gcugcuaagauggauugau

SEQ ID NO: 2148541 - RNA, 19 nt, Artificial Sequence
  Description of Artificial Sequence: Synthetic oligonucleotide
  Antisense strand to SEQ ID NO: 2148540
aucaauccaucuuagcagc

SEQ ID NO: 2148542 - RNA, 19 nt, Artificial Sequence
  Description of Artificial Sequence: Synthetic oligonucleotide
  Sense strand starting at position 2029 of SEQ ID NO: 1882802
auagaaacuuuggacaaau

SEQ ID NO: 2148543 - RNA, 19 nt, Artificial Sequence
  Description of Artificial Sequence: Synthetic oligonucleotide
  Antisense strand to SEQ ID NO: 2148542
auuuguccaaaguuucuau

SEQ ID NO: 2148544 - RNA, 19 nt, Artificial Sequence
  Description of Artificial Sequence: Synthetic oligonucleotide
  Sense strand starting at position 2060 of SEQ ID NO: 1882802
uuauguucucaugagacug

SEQ ID NO: 2148545 - RNA, 19 nt, Artificial Sequence
  Description of Artificial Sequence: Synthetic oligonucleotide
  Antisense strand to SEQ ID NO: 2148544
cagucucaugagaacauaa

SEQ ID NO: 2148546 - RNA, 19 nt, Artificial Sequence
  Description of Artificial Sequence: Synthetic oligonucleotide
  Sense strand starting at position 2065 of SEQ ID NO: 1882802
uucucaugagacuguugaa

SEQ ID NO: 2148547 - RNA, 19 nt, Artificial Sequence
  Description of Artificial Sequence: Synthetic oligonucleotide
  Antisense strand to SEQ ID NO: 2148546
uucaacagucucaugagaa

SEQ ID NO: 2148548 - RNA, 19 nt, Artificial Sequence
  Description of Artificial Sequence: Synthetic oligonucleotide
  Sense strand starting at position 2109 of SEQ ID NO: 1882802
aucaaauauucgcuagacu

SEQ ID NO: 2148549 - RNA, 19 nt, Artificial Sequence
  Description of Artificial Sequence: Synthetic oligonucleotide
  Antisense strand to SEQ ID NO: 2148548
agucuagcgaauauuugau

SEQ ID NO: 2148550 - RNA, 19 nt, Artificial Sequence
  Description of Artificial Sequence: Synthetic oligonucleotide
  Sense strand starting at position 2110 of SEQ ID NO: 1882802
ucaaauauucgcuagacuc

SEQ ID NO: 2148551 - RNA, 19 nt, Artificial Sequence
  Description of Artificial Sequence: Synthetic oligonucleotide
  Antisense strand to SEQ ID NO: 2148550
gagucuagcgaauauuuga

SEQ ID NO: 2148552 - RNA, 19 nt, Artificial Sequence
  Description of Artificial Sequence: Synthetic oligonucleotide
  Sense strand starting at position 2365 of SEQ ID NO: 1882802
ugugaacuugccgacuauu

SEQ ID NO: 2148553 - RNA, 19 nt, Artificial Sequence
  Description of Artificial Sequence: Synthetic oligonucleotide
  Antisense strand to SEQ ID NO: 2148552
aauagucggcaaguucaca

SEQ ID NO: 2148554 - RNA, 19 nt, Artificial Sequence
  Description of Artificial Sequence: Synthetic oligonucleotide
  Sense strand starting at position 2422 of SEQ ID NO: 1882802
agucuugacacauaugugu

SEQ ID NO: 2148555 - RNA, 19 nt, Artificial Sequence
  Description of Artificial Sequence: Synthetic oligonucleotide
  Antisense strand to SEQ ID NO: 2148554
acacauaugugucaagacu

SEQ ID NO: 2148556 - RNA, 19 nt, Artificial Sequence
  Description of Artificial Sequence: Synthetic oligonucleotide
  Sense strand starting at position 2506 of SEQ ID NO: 1882802
gguaguuauuuacacuaaa

SEQ ID NO: 2148557 - RNA, 19 nt, Artificial Sequence
  Description of Artificial Sequence: Synthetic oligonucleotide
  Antisense strand to SEQ ID NO: 2148556
uuuaguguaaauaacuacc

SEQ ID NO: 2148558 - RNA, 19 nt, Artificial Sequence
  Description of Artificial Sequence: Synthetic oligonucleotide
  Sense strand starting at position 2653 of SEQ ID NO: 1882802
cuuauuaaugugcaucagu

SEQ ID NO: 2148559 - RNA, 19 nt, Artificial Sequence
  Description of Artificial Sequence: Synthetic oligonucleotide
  Antisense strand to SEQ ID NO: 2148558
acugaugcacauuaauaag

SEQ ID NO: 2148560 - RNA, 19 nt, Artificial Sequence
  Description of Artificial Sequence: Synthetic oligonucleotide
  Sense strand starting at position 2656 of SEQ ID NO: 1882802
auuaaugugcaucaguuua

SEQ ID NO: 2148561 - RNA, 19 nt, Artificial Sequence
  Description of Artificial Sequence: Synthetic oligonucleotide
  Antisense strand to SEQ ID NO: 2148560
uaaacugaugcacauuaau

SEQ ID NO: 2148562 - RNA, 19 nt, Artificial Sequence
  Description of Artificial Sequence: Synthetic oligonucleotide
  Sense strand starting at position 3059 of SEQ ID NO: 1882802
auuguagaaugaguugaau

SEQ ID NO: 2148563 - RNA, 19 nt, Artificial Sequence
  Description of Artificial Sequence: Synthetic oligonucleotide
  Antisense strand to SEQ ID NO: 2148562
auucaacucauucuacaau

SEQ ID NO: 2148564 - RNA, 19 nt, Artificial Sequence
  Description of Artificial Sequence: Synthetic oligonucleotide
  Sense strand starting at position 3061 of SEQ ID NO: 1882802
uguagaaugaguugaaugu

SEQ ID NO: 2148565 - RNA, 19 nt, Artificial Sequence
  Description of Artificial Sequence: Synthetic oligonucleotide
  Antisense strand to SEQ ID NO: 2148564
acauucaacucauucuaca

SEQ ID NO: 2148566 - RNA, 19 nt, Artificial Sequence
  Description of Artificial Sequence: Synthetic oligonucleotide
  Sense strand starting at position 3070 of SEQ ID NO: 1882802
aguugaaugugggcauuau

SEQ ID NO: 2148567 - RNA, 19 nt, Artificial Sequence
  Description of Artificial Sequence: Synthetic oligonucleotide
  Antisense strand to SEQ ID NO: 2148566
auaaugcccacauucaacu

SEQ ID NO: 2148568 - RNA, 19 nt, Artificial Sequence
  Description of Artificial Sequence: Synthetic oligonucleotide
  Sense strand starting at position 3071 of SEQ ID NO: 1882802
guugaaugugggcauuauu

SEQ ID NO: 2148569 - RNA, 19 nt, Artificial Sequence
  Description of Artificial Sequence: Synthetic oligonucleotide
  Antisense strand to SEQ ID NO: 2148568
aauaaugcccacauucaac

SEQ ID NO: 2148570 - RNA, 19 nt, Artificial Sequence
  Description of Artificial Sequence: Synthetic oligonucleotide
  Sense strand starting at position 3074 of SEQ ID NO: 1882802
gaaugugggcauuauugau

SEQ ID NO: 2148571 - RNA, 19 nt, Artificial Sequence
  Description of Artificial Sequence: Synthetic oligonucleotide
  Antisense strand to SEQ ID NO: 2148570
aucaauaaugcccacauuc

SEQ ID NO: 2148572 - RNA, 19 nt, Artificial Sequence
  Description of Artificial Sequence: Synthetic oligonucleotide
  Sense strand starting at position 3086 of SEQ ID NO: 1882802
uauugauaccguuaaugau

SEQ ID NO: 2148573 - RNA, 19 nt, Artificial Sequence
  Description of Artificial Sequence: Synthetic oligonucleotide
  Antisense strand to SEQ ID NO: 2148572
aucauuaacgguaucaaua

SEQ ID NO: 2148574 - RNA, 19 nt, Artificial Sequence
  Description of Artificial Sequence: Synthetic oligonucleotide
  Sense strand starting at position 3096 of SEQ ID NO: 1882802
guuaaugauucuguaucac

SEQ ID NO: 2148575 - RNA, 19 nt, Artificial Sequence
  Description of Artificial Sequence: Synthetic oligonucleotide
  Antisense strand to SEQ ID NO: 2148574
gugauacagaaucauuaac

SEQ ID NO: 2148576 - RNA, 19 nt, Artificial Sequence
  Description of Artificial Sequence: Synthetic oligonucleotide
  Sense strand starting at position 3144 of SEQ ID NO: 1882802
ggcuuaaguugacuuacau

SEQ ID NO: 2148577 - RNA, 19 nt, Artificial Sequence
  Description of Artificial Sequence: Synthetic oligonucleotide
  Antisense strand to SEQ ID NO: 2148576
auguaagucaacuuaagcc

SEQ ID NO: 2148578 - RNA, 19 nt, Artificial Sequence
  Description of Artificial Sequence: Synthetic oligonucleotide
  Sense strand starting at position 3177 of SEQ ID NO: 1882802
uaaauugaugcuggaaagu

SEQ ID NO: 2148579 - RNA, 19 nt, Artificial Sequence
  Description of Artificial Sequence: Synthetic oligonucleotide
  Antisense strand to SEQ ID NO: 2148578
acuuuccagcaucaauuua

SEQ ID NO: 2148580 - RNA, 19 nt, Artificial Sequence
  Description of Artificial Sequence: Synthetic oligonucleotide
  Sense strand starting at position 3235 of SEQ ID NO: 1882802
gucuccuucuauccugaca

SEQ ID NO: 2148581 - RNA, 19 nt, Artificial Sequence
  Description of Artificial Sequence: Synthetic oligonucleotide
  Antisense strand to SEQ ID NO: 2148580
ugucaggauagaaggagac

SEQ ID NO: 2148582 - RNA, 19 nt, Artificial Sequence
  Description of Artificial Sequence: Synthetic oligonucleotide
  Sense strand starting at position 3249 of SEQ ID NO: 1882802
ugacaacuaccuuggcuua

SEQ ID NO: 2148583 - RNA, 19 nt, Artificial Sequence
  Description of Artificial Sequence: Synthetic oligonucleotide
  Antisense strand to SEQ ID NO: 2148582
uaagccaagguaguuguca

SEQ ID NO: 2148584 - RNA, 19 nt, Artificial Sequence
  Description of Artificial Sequence: Synthetic oligonucleotide
  Sense strand starting at position 3664 of SEQ ID NO: 1882802
uggacauggcacugauauu

SEQ ID NO: 2148585 - RNA, 19 nt, Artificial Sequence
  Description of Artificial Sequence: Synthetic oligonucleotide
  Antisense strand to SEQ ID NO: 2148584
aauaucagugccaugucca

SEQ ID NO: 2148586 - RNA, 19 nt, Artificial Sequence
  Description of Artificial Sequence: Synthetic oligonucleotide
  Sense strand starting at position 3691 of SEQ ID NO: 1882802
cugggacucuuccuuagag

SEQ ID NO: 2148587 - RNA, 19 nt, Artificial Sequence
  Description of Artificial Sequence: Synthetic oligonucleotide
  Antisense strand to SEQ ID NO: 2148586
cucuaaggaagagucccag

SEQ ID NO: 2148588 - RNA, 19 nt, Artificial Sequence
  Description of Artificial Sequence: Synthetic oligonucleotide
  Sense strand starting at position 3692 of SEQ ID NO: 1882802
ugggacucuuccuuagaga

SEQ ID NO: 2148589 - RNA, 19 nt, Artificial Sequence
  Description of Artificial Sequence: Synthetic oligonucleotide
  Antisense strand to SEQ ID NO: 2148588
ucucuaaggaagaguccca

SEQ ID NO: 2148590 - RNA, 19 nt, Artificial Sequence
  Description of Artificial Sequence: Synthetic oligonucleotide
  Sense strand starting at position 3887 of SEQ ID NO: 1882802
guuuaucuguccuccacaa

SEQ ID NO: 2148591 - RNA, 19 nt, Artificial Sequence
  Description of Artificial Sequence: Synthetic oligonucleotide
  Antisense strand to SEQ ID NO: 2148590
uuguggaggacagauaaac

SEQ ID NO: 2148592 - RNA, 19 nt, Artificial Sequence
  Description of Artificial Sequence: Synthetic oligonucleotide
  Sense strand starting at position 3980 of SEQ ID NO: 1882802
aguagaugugauuaguguu

SEQ ID NO: 2148593 - RNA, 19 nt, Artificial Sequence
  Description of Artificial Sequence: Synthetic oligonucleotide
  Antisense strand to SEQ ID NO: 2148592
aacacuaaucacaucuacu

SEQ ID NO: 2148594 - RNA, 19 nt, Artificial Sequence
  Description of Artificial Sequence: Synthetic oligonucleotide
  Sense strand starting at position 9 of SEQ ID NO: 1882803
cacugagagcugugaacuu

SEQ ID NO: 2148595 - RNA, 19 nt, Artificial Sequence
  Description of Artificial Sequence: Synthetic oligonucleotide
  Antisense strand to SEQ ID NO: 2148594
aaguucacagcucucagug

SEQ ID NO: 2148596 - RNA, 19 nt, Artificial Sequence
  Description of Artificial Sequence: Synthetic oligonucleotide
  Sense strand starting at position 28 of SEQ ID NO: 1882803
guguguauaccugacauag

SEQ ID NO: 2148597 - RNA, 19 nt, Artificial Sequence
  Description of Artificial Sequence: Synthetic oligonucleotide
  Antisense strand to SEQ ID NO: 2148596
cuaugucagguauacacac

SEQ ID NO: 2148598 - RNA, 19 nt, Artificial Sequence
  Description of Artificial Sequence: Synthetic oligonucleotide
  Sense strand starting at position 262 of SEQ ID NO: 1882803
auaagaucucgugggcaag

SEQ ID NO: 2148599 - RNA, 19 nt, Artificial Sequence
  Description of Artificial Sequence: Synthetic oligonucleotide
  Antisense strand to SEQ ID NO: 2148598
cuugcccacgagaucuuau

SEQ ID NO: 2148600 - RNA, 19 nt, Artificial Sequence
  Description of Artificial Sequence: Synthetic oligonucleotide
  Sense strand starting at position 293 of SEQ ID NO: 1882803
gacuauugcguaguguagu

SEQ ID NO: 2148601 - RNA, 19 nt, Artificial Sequence
  Description of Artificial Sequence: Synthetic oligonucleotide
  Antisense strand to SEQ ID NO: 2148600
acuacacuacgcaauaguc

SEQ ID NO: 2148602 - RNA, 19 nt, Artificial Sequence
  Description of Artificial Sequence: Synthetic oligonucleotide
  Sense strand starting at position 493 of SEQ ID NO: 1882803
aggcgucaucucuaccaaa

SEQ ID NO: 2148603 - RNA, 19 nt, Artificial Sequence
  Description of Artificial Sequence: Synthetic oligonucleotide
  Antisense strand to SEQ ID NO: 2148602
uuugguagagaugacgccu

SEQ ID NO: 2148604 - RNA, 19 nt, Artificial Sequence
  Description of Artificial Sequence: Synthetic oligonucleotide
  Sense strand starting at position 658 of SEQ ID NO: 1882803
aauaucaguuugguaaaga

SEQ ID NO: 2148605 - RNA, 19 nt, Artificial Sequence
  Description of Artificial Sequence: Synthetic oligonucleotide
  Antisense strand to SEQ ID NO: 2148604
ucuuuaccaaacugauauu

SEQ ID NO: 2148606 - RNA, 19 nt, Artificial Sequence
  Description of Artificial Sequence: Synthetic oligonucleotide
  Sense strand starting at position 663 of SEQ ID NO: 1882803
caguuugguaaagauggua

SEQ ID NO: 2148607 - RNA, 19 nt, Artificial Sequence
  Description of Artificial Sequence: Synthetic oligonucleotide
  Antisense strand to SEQ ID NO: 2148606
uaccaucuuuaccaaacug

SEQ ID NO: 2148608 - RNA, 19 nt, Artificial Sequence
  Description of Artificial Sequence: Synthetic oligonucleotide
  Sense strand starting at position 857 of SEQ ID NO: 1882803
ggcaaagugcugccguguu

SEQ ID NO: 2148609 - RNA, 19 nt, Artificial Sequence
  Description of Artificial Sequence: Synthetic oligonucleotide
  Antisense strand to SEQ ID NO: 2148608
aacacggcagcacuuugcc

SEQ ID NO: 2148610 - RNA, 19 nt, Artificial Sequence
  Description of Artificial Sequence: Synthetic oligonucleotide
  Sense strand starting at position 900 of SEQ ID NO: 1882803
gugugauaaauacaggugu

SEQ ID NO: 2148611 - RNA, 19 nt, Artificial Sequence
  Description of Artificial Sequence: Synthetic oligonucleotide
  Antisense strand to SEQ ID NO: 2148610
acaccuguauuuaucacac

SEQ ID NO: 2148612 - RNA, 19 nt, Artificial Sequence
  Description of Artificial Sequence: Synthetic oligonucleotide
  Sense strand starting at position 902 of SEQ ID NO: 1882803
gugauaaauacagguguga

SEQ ID NO: 2148613 - RNA, 19 nt, Artificial Sequence
  Description of Artificial Sequence: Synthetic oligonucleotide
  Antisense strand to SEQ ID NO: 2148612
ucacaccuguauuuaucac

SEQ ID NO: 2148614 - RNA, 19 nt, Artificial Sequence
  Description of Artificial Sequence: Synthetic oligonucleotide
  Sense strand starting at position 906 of SEQ ID NO: 1882803
uaaauacaggugugaaugu

SEQ ID NO: 2148615 - RNA, 19 nt, Artificial Sequence
  Description of Artificial Sequence: Synthetic oligonucleotide
  Antisense strand to SEQ ID NO: 2148614
acauucacaccuguauuua

SEQ ID NO: 2148616 - RNA, 19 nt, Artificial Sequence
  Description of Artificial Sequence: Synthetic oligonucleotide
  Sense strand starting at position 915 of SEQ ID NO: 1882803
gugugaaugugggugauuu

SEQ ID NO: 2148617 - RNA, 19 nt, Artificial Sequence
  Description of Artificial Sequence: Synthetic oligonucleotide
  Antisense strand to SEQ ID NO: 2148616
aaaucacccacauucacac

SEQ ID NO: 2148618 - RNA, 19 nt, Artificial Sequence
  Description of Artificial Sequence: Synthetic oligonucleotide
  Sense strand starting at position 1118 of SEQ ID NO: 1882803
gagcuuugucaccauugau

SEQ ID NO: 2148619 - RNA, 19 nt, Artificial Sequence
  Description of Artificial Sequence: Synthetic oligonucleotide
  Antisense strand to SEQ ID NO: 2148618
aucaauggugacaaagcuc

SEQ ID NO: 2148620 - RNA, 19 nt, Artificial Sequence
  Description of Artificial Sequence: Synthetic oligonucleotide
  Sense strand starting at position 1121 of SEQ ID NO: 1882803
cuuugucaccauugauacu

SEQ ID NO: 2148621 - RNA, 19 nt, Artificial Sequence
  Description of Artificial Sequence: Synthetic oligonucleotide
  Antisense strand to SEQ ID NO: 2148620
aguaucaauggugacaaag

SEQ ID NO: 2148622 - RNA, 19 nt, Artificial Sequence
  Description of Artificial Sequence: Synthetic oligonucleotide
  Sense strand starting at position 1130 of SEQ ID NO: 1882803
cauugauacucuguaaggu

SEQ ID NO: 2148623 - RNA, 19 nt, Artificial Sequence
  Description of Artificial Sequence: Synthetic oligonucleotide
  Antisense strand to SEQ ID NO: 2148622
accuuacagaguaucaaug

SEQ ID NO: 2148624 - RNA, 19 nt, Artificial Sequence
  Description of Artificial Sequence: Synthetic oligonucleotide
  Sense strand starting at position 1138 of SEQ ID NO: 1882803
cucuguaaggugggaugaa

SEQ ID NO: 2148625 - RNA, 19 nt, Artificial Sequence
  Description of Artificial Sequence: Synthetic oligonucleotide
  Antisense strand to SEQ ID NO: 2148624
uucaucccaccuuacagag

SEQ ID NO: 2148626 - RNA, 19 nt, Artificial Sequence
  Description of Artificial Sequence: Synthetic oligonucleotide
  Sense strand starting at position 1147 of SEQ ID NO: 1882803
gugggaugaaagcaaguuu

SEQ ID NO: 2148627 - RNA, 19 nt, Artificial Sequence
  Description of Artificial Sequence: Synthetic oligonucleotide
  Antisense strand to SEQ ID NO: 2148626
aaacuugcuuucaucccac

SEQ ID NO: 2148628 - RNA, 19 nt, Artificial Sequence
  Description of Artificial Sequence: Synthetic oligonucleotide
  Sense strand starting at position 1231 of SEQ ID NO: 1882803
ggcuacagccuagagaaau

SEQ ID NO: 2148629 - RNA, 19 nt, Artificial Sequence
  Description of Artificial Sequence: Synthetic oligonucleotide
  Antisense strand to SEQ ID NO: 2148628
auuucucuaggcuguagcc

SEQ ID NO: 2148630 - RNA, 19 nt, Artificial Sequence
  Description of Artificial Sequence: Synthetic oligonucleotide
  Sense strand starting at position 1314 of SEQ ID NO: 1882803
ucggcugcucuguuaaugu

SEQ ID NO: 2148631 - RNA, 19 nt, Artificial Sequence
  Description of Artificial Sequence: Synthetic oligonucleotide
  Antisense strand to SEQ ID NO: 2148630
acauuaacagagcagccga

SEQ ID NO: 2148632 - RNA, 19 nt, Artificial Sequence
  Description of Artificial Sequence: Synthetic oligonucleotide
  Sense strand starting at position 1327 of SEQ ID NO: 1882803
uaaugugacugggucucau

SEQ ID NO: 2148633 - RNA, 19 nt, Artificial Sequence
  Description of Artificial Sequence: Synthetic oligonucleotide
  Antisense strand to SEQ ID NO: 2148632
augagacccagucacauua

SEQ ID NO: 2148634 - RNA, 19 nt, Artificial Sequence
  Description of Artificial Sequence: Synthetic oligonucleotide
  Sense strand starting at position 1507 of SEQ ID NO: 1882803
uucucuuuccuugaagggu

SEQ ID NO: 2148635 - RNA, 19 nt, Artificial Sequence
  Description of Artificial Sequence: Synthetic oligonucleotide
  Antisense strand to SEQ ID NO: 2148634
acccuucaaggaaagagaa

SEQ ID NO: 2148636 - RNA, 19 nt, Artificial Sequence
  Description of Artificial Sequence: Synthetic oligonucleotide
  Sense strand starting at position 1522 of SEQ ID NO: 1882803
ggguuaaugcuccaaccag

SEQ ID NO: 2148637 - RNA, 19 nt, Artificial Sequence
  Description of Artificial Sequence: Synthetic oligonucleotide
  Antisense strand to SEQ ID NO: 2148636
cugguuggagcauuaaccc

SEQ ID NO: 2148638 - RNA, 19 nt, Artificial Sequence
  Description of Artificial Sequence: Synthetic oligonucleotide
  Sense strand starting at position 1703 of SEQ ID NO: 1882803
cgugucuggucaacaguga

SEQ ID NO: 2148639 - RNA, 19 nt, Artificial Sequence
  Description of Artificial Sequence: Synthetic oligonucleotide
  Antisense strand to SEQ ID NO: 2148638
ucacuguugaccagacacg

SEQ ID NO: 2148640 - RNA, 19 nt, Artificial Sequence
  Description of Artificial Sequence: Synthetic oligonucleotide
  Sense strand starting at position 2210 of SEQ ID NO: 1882803
uggaaugaacguugugaaa

SEQ ID NO: 2148641 - RNA, 19 nt, Artificial Sequence
  Description of Artificial Sequence: Synthetic oligonucleotide
  Antisense strand to SEQ ID NO: 2148640
uuucacaacguucauucca

SEQ ID NO: 2148642 - RNA, 19 nt, Artificial Sequence
  Description of Artificial Sequence: Synthetic oligonucleotide
  Sense strand starting at position 2433 of SEQ ID NO: 1882803
aguucuuggaaguauggau

SEQ ID NO: 2148643 - RNA, 19 nt, Artificial Sequence
  Description of Artificial Sequence: Synthetic oligonucleotide
  Antisense strand to SEQ ID NO: 2148642
auccauacuuccaagaacu

SEQ ID NO: 2148644 - RNA, 19 nt, Artificial Sequence
  Description of Artificial Sequence: Synthetic oligonucleotide
  Sense strand starting at position 2464 of SEQ ID NO: 1882803
gcuggugauuuccuaagca

SEQ ID NO: 2148645 - RNA, 19 nt, Artificial Sequence
  Description of Artificial Sequence: Synthetic oligonucleotide
  Antisense strand to SEQ ID NO: 2148644
ugcuuaggaaaucaccagc

SEQ ID NO: 2148646 - RNA, 19 nt, Artificial Sequence
  Description of Artificial Sequence: Synthetic oligonucleotide
  Sense strand starting at position 2485 of SEQ ID NO: 1882803
ggucgcuaacuacaagaaa

SEQ ID NO: 2148647 - RNA, 19 nt, Artificial Sequence
  Description of Artificial Sequence: Synthetic oligonucleotide
  Antisense strand to SEQ ID NO: 2148646
uuucuuguaguuagcgacc

SEQ ID NO: 2148648 - RNA, 19 nt, Artificial Sequence
  Description of Artificial Sequence: Synthetic oligonucleotide
  Sense strand starting at position 2526 of SEQ ID NO: 1882803
guacuuucugaagauuauu

SEQ ID NO: 2148649 - RNA, 19 nt, Artificial Sequence
  Description of Artificial Sequence: Synthetic oligonucleotide
  Antisense strand to SEQ ID NO: 2148648
aauaaucuucagaaaguac

SEQ ID NO: 2148650 - RNA, 19 nt, Artificial Sequence
  Description of Artificial Sequence: Synthetic oligonucleotide
  Sense strand starting at position 2531 of SEQ ID NO: 1882803
uucugaagauuauugguaa

SEQ ID NO: 2148651 - RNA, 19 nt, Artificial Sequence
  Description of Artificial Sequence: Synthetic oligonucleotide
  Antisense strand to SEQ ID NO: 2148650
uuaccaauaaucuucagaa

SEQ ID NO: 2148652 - RNA, 19 nt, Artificial Sequence
  Description of Artificial Sequence: Synthetic oligonucleotide
  Sense strand starting at position 2553 of SEQ ID NO: 1882803
aguguuggucgucuugagu

SEQ ID NO: 2148653 - RNA, 19 nt, Artificial Sequence
  Description of Artificial Sequence: Synthetic oligonucleotide
  Antisense strand to SEQ ID NO: 2148652
acucaagacgaccaacacu

SEQ ID NO: 2148654 - RNA, 19 nt, Artificial Sequence
  Description of Artificial Sequence: Synthetic oligonucleotide
  Sense strand starting at position 2688 of SEQ ID NO: 1882803
uugaauaaucagugaaucu

SEQ ID NO: 2148655 - RNA, 19 nt, Artificial Sequence
  Description of Artificial Sequence: Synthetic oligonucleotide
  Antisense strand to SEQ ID NO: 2148654
agauucacugauuauucaa

SEQ ID NO: 2148656 - RNA, 19 nt, Artificial Sequence
  Description of Artificial Sequence: Synthetic oligonucleotide
  Sense strand starting at position 3084 of SEQ ID NO: 1882803
gggaguguagcucaaggaa

SEQ ID NO: 2148657 - RNA, 19 nt, Artificial Sequence
  Description of Artificial Sequence: Synthetic oligonucleotide
  Antisense strand to SEQ ID NO: 2148656
uuccuugagcuacacuccc

SEQ ID NO: 2148658 - RNA, 19 nt, Artificial Sequence
  Description of Artificial Sequence: Synthetic oligonucleotide
  Sense strand starting at position 3120 of SEQ ID NO: 1882803
uggauaaguuguuugaccu

SEQ ID NO: 2148659 - RNA, 19 nt, Artificial Sequence
  Description of Artificial Sequence: Synthetic oligonucleotide
  Antisense strand to SEQ ID NO: 2148658
aggucaaacaacuuaucca

SEQ ID NO: 2148660 - RNA, 19 nt, Artificial Sequence
  Description of Artificial Sequence: Synthetic oligonucleotide
  Sense strand starting at position 3121 of SEQ ID NO: 1882803
ggauaaguuguuugaccua

SEQ ID NO: 2148661 - RNA, 19 nt, Artificial Sequence
  Description of Artificial Sequence: Synthetic oligonucleotide
  Antisense strand to SEQ ID NO: 2148660
uaggucaaacaacuuaucc

SEQ ID NO: 2148662 - RNA, 19 nt, Artificial Sequence
  Description of Artificial Sequence: Synthetic oligonucleotide
  Sense strand starting at position 3186 of SEQ ID NO: 1882803
auuguuaguccuggaggau

SEQ ID NO: 2148663 - RNA, 19 nt, Artificial Sequence
  Description of Artificial Sequence: Synthetic oligonucleotide
  Antisense strand to SEQ ID NO: 2148662
auccuccaggacuaacaau

SEQ ID NO: 2148664 - RNA, 19 nt, Artificial Sequence
  Description of Artificial Sequence: Synthetic oligonucleotide
  Sense strand starting at position 3187 of SEQ ID NO: 1882803
uuguuaguccuggaggauu

SEQ ID NO: 2148665 - RNA, 19 nt, Artificial Sequence
  Description of Artificial Sequence: Synthetic oligonucleotide
  Antisense strand to SEQ ID NO: 2148664
aauccuccaggacuaacaa

SEQ ID NO: 2148666 - RNA, 19 nt, Artificial Sequence
  Description of Artificial Sequence: Synthetic oligonucleotide
  Sense strand starting at position 3301 of SEQ ID NO: 1882803
cucugcuuccaggacaagu

SEQ ID NO: 2148667 - RNA, 19 nt, Artificial Sequence
  Description of Artificial Sequence: Synthetic oligonucleotide
  Antisense strand to SEQ ID NO: 2148666
acuuguccuggaagcagag

SEQ ID NO: 2148668 - RNA, 19 nt, Artificial Sequence
  Description of Artificial Sequence: Synthetic oligonucleotide
  Sense strand starting at position 3413 of SEQ ID NO: 1882803
uggugcuuugucuagggaa

SEQ ID NO: 2148669 - RNA, 19 nt, Artificial Sequence
  Description of Artificial Sequence: Synthetic oligonucleotide
  Antisense strand to SEQ ID NO: 2148668
uucccuagacaaagcacca

SEQ ID NO: 2148670 - RNA, 19 nt, Artificial Sequence
  Description of Artificial Sequence: Synthetic oligonucleotide
  Sense strand starting at position 3492 of SEQ ID NO: 1882803
aaauacuguggaugugaua

SEQ ID NO: 2148671 - RNA, 19 nt, Artificial Sequence
  Description of Artificial Sequence: Synthetic oligonucleotide
  Antisense strand to SEQ ID NO: 2148670
uaucacauccacaguauuu

SEQ ID NO: 2148672 - RNA, 19 nt, Artificial Sequence
  Description of Artificial Sequence: Synthetic oligonucleotide
  Sense strand starting at position 3783 of SEQ ID NO: 1882803
gguucucaaccaggguuau

SEQ ID NO: 2148673 - RNA, 19 nt, Artificial Sequence
  Description of Artificial Sequence: Synthetic oligonucleotide
  Antisense strand to SEQ ID NO: 2148672
auaacccugguugagaacc

SEQ ID NO: 2148674 - RNA, 19 nt, Artificial Sequence
  Description of Artificial Sequence: Synthetic oligonucleotide
  Sense strand starting at position 279 of SEQ ID NO: 1882804
uugagaaagcacugcucua

SEQ ID NO: 2148675 - RNA, 19 nt, Artificial Sequence
  Description of Artificial Sequence: Synthetic oligonucleotide
  Antisense strand to SEQ ID NO: 2148674
uagagcagugcuuucucaa

SEQ ID NO: 2148676 - RNA, 19 nt, Artificial Sequence
  Description of Artificial Sequence: Synthetic oligonucleotide
  Sense strand starting at position 333 of SEQ ID NO: 1882804
ggccacuuuguguuagcuu

SEQ ID NO: 2148677 - RNA, 19 nt, Artificial Sequence
  Description of Artificial Sequence: Synthetic oligonucleotide
  Antisense strand to SEQ ID NO: 2148676
aagcuaacacaaaguggcc

SEQ ID NO: 2148678 - RNA, 19 nt, Artificial Sequence
  Description of Artificial Sequence: Synthetic oligonucleotide
  Sense strand starting at position 404 of SEQ ID NO: 1882804
gcgugguuucuggcaugga

SEQ ID NO: 2148679 - RNA, 19 nt, Artificial Sequence
  Description of Artificial Sequence: Synthetic oligonucleotide
  Antisense strand to SEQ ID NO: 2148678
uccaugccagaaaccacgc

SEQ ID NO: 2148680 - RNA, 19 nt, Artificial Sequence
  Description of Artificial Sequence: Synthetic oligonucleotide
  Sense strand starting at position 561 of SEQ ID NO: 1882804
acauaagagugccugaugu

SEQ ID NO: 2148681 - RNA, 19 nt, Artificial Sequence
  Description of Artificial Sequence: Synthetic oligonucleotide
  Antisense strand to SEQ ID NO: 2148680
acaucaggcacucuuaugu

SEQ ID NO: 2148682 - RNA, 19 nt, Artificial Sequence
  Description of Artificial Sequence: Synthetic oligonucleotide
  Sense strand starting at position 625 of SEQ ID NO: 1882804
caccaacgugaugauauua

SEQ ID NO: 2148683 - RNA, 19 nt, Artificial Sequence
  Description of Artificial Sequence: Synthetic oligonucleotide
  Antisense strand to SEQ ID NO: 2148682
uaauaucaucacguuggug

SEQ ID NO: 2148684 - RNA, 19 nt, Artificial Sequence
  Description of Artificial Sequence: Synthetic oligonucleotide
  Sense strand starting at position 682 of SEQ ID NO: 1882804
cagagucaugaaugggagu

SEQ ID NO: 2148685 - RNA, 19 nt, Artificial Sequence
  Description of Artificial Sequence: Synthetic oligonucleotide
  Antisense strand to SEQ ID NO: 2148684
acucccauucaugacucug

SEQ ID NO: 2148686 - RNA, 19 nt, Artificial Sequence
  Description of Artificial Sequence: Synthetic oligonucleotide
  Sense strand starting at position 683 of SEQ ID NO: 1882804
agagucaugaaugggagua

SEQ ID NO: 2148687 - RNA, 19 nt, Artificial Sequence
  Description of Artificial Sequence: Synthetic oligonucleotide
  Antisense strand to SEQ ID NO: 2148686
uacucccauucaugacucu

SEQ ID NO: 2148688 - RNA, 19 nt, Artificial Sequence
  Description of Artificial Sequence: Synthetic oligonucleotide
  Sense strand starting at position 684 of SEQ ID NO: 1882804
gagucaugaaugggaguaa

SEQ ID NO: 2148689 - RNA, 19 nt, Artificial Sequence
  Description of Artificial Sequence: Synthetic oligonucleotide
  Antisense strand to SEQ ID NO: 2148688
uuacucccauucaugacuc

SEQ ID NO: 2148690 - RNA, 19 nt, Artificial Sequence
  Description of Artificial Sequence: Synthetic oligonucleotide
  Sense strand starting at position 726 of SEQ ID NO: 1882804
gagugaguuugcccacuag

SEQ ID NO: 2148691 - RNA, 19 nt, Artificial Sequence
  Description of Artificial Sequence: Synthetic oligonucleotide
  Antisense strand to SEQ ID NO: 2148690
cuagugggcaaacucacuc

SEQ ID NO: 2148692 - RNA, 19 nt, Artificial Sequence
  Description of Artificial Sequence: Synthetic oligonucleotide
  Sense strand starting at position 808 of SEQ ID NO: 1882804
acaauucuccuaggaggca

SEQ ID NO: 2148693 - RNA, 19 nt, Artificial Sequence
  Description of Artificial Sequence: Synthetic oligonucleotide
  Antisense strand to SEQ ID NO: 2148692
ugccuccuaggagaauugu

SEQ ID NO: 2148694 - RNA, 19 nt, Artificial Sequence
  Description of Artificial Sequence: Synthetic oligonucleotide
  Sense strand starting at position 910 of SEQ ID NO: 1882804
guauuucuguaggccuaga

SEQ ID NO: 2148695 - RNA, 19 nt, Artificial Sequence
  Description of Artificial Sequence: Synthetic oligonucleotide
  Antisense strand to SEQ ID NO: 2148694
ucuaggccuacagaaauac

SEQ ID NO: 2148696 - RNA, 19 nt, Artificial Sequence
  Description of Artificial Sequence: Synthetic oligonucleotide
  Sense strand starting at position 1063 of SEQ ID NO: 1882804
gaaagucaugccuguaauc

SEQ ID NO: 2148697 - RNA, 19 nt, Artificial Sequence
  Description of Artificial Sequence: Synthetic oligonucleotide
  Antisense strand to SEQ ID NO: 2148696
gauuacaggcaugacuuuc

SEQ ID NO: 2148698 - RNA, 19 nt, Artificial Sequence
  Description of Artificial Sequence: Synthetic oligonucleotide
  Sense strand starting at position 1355 of SEQ ID NO: 1882804
aagugaggcguuugggaaa

SEQ ID NO: 2148699 - RNA, 19 nt, Artificial Sequence
  Description of Artificial Sequence: Synthetic oligonucleotide
  Antisense strand to SEQ ID NO: 2148698
uuucccaaacgccucacuu

SEQ ID NO: 2148700 - RNA, 19 nt, Artificial Sequence
  Description of Artificial Sequence: Synthetic oligonucleotide
  Sense strand starting at position 1395 of SEQ ID NO: 1882804
caccuuugugaaugggauc

SEQ ID NO: 2148701 - RNA, 19 nt, Artificial Sequence
  Description of Artificial Sequence: Synthetic oligonucleotide
  Antisense strand to SEQ ID NO: 2148700
gaucccauucacaaaggug

SEQ ID NO: 2148702 - RNA, 19 nt, Artificial Sequence
  Description of Artificial Sequence: Synthetic oligonucleotide
  Sense strand starting at position 1396 of SEQ ID NO: 1882804
accuuugugaaugggauca

SEQ ID NO: 2148703 - RNA, 19 nt, Artificial Sequence
  Description of Artificial Sequence: Synthetic oligonucleotide
  Antisense strand to SEQ ID NO: 2148702
ugaucccauucacaaaggu

SEQ ID NO: 2148704 - RNA, 19 nt, Artificial Sequence
  Description of Artificial Sequence: Synthetic oligonucleotide
  Sense strand starting at position 1487 of SEQ ID NO: 1882804
ccgcaagguguccaucuua

SEQ ID NO: 2148705 - RNA, 19 nt, Artificial Sequence
  Description of Artificial Sequence: Synthetic oligonucleotide
  Antisense strand to SEQ ID NO: 2148704
uaagauggacaccuugcgg

SEQ ID NO: 2148706 - RNA, 19 nt, Artificial Sequence
  Description of Artificial Sequence: Synthetic oligonucleotide
  Sense strand starting at position 1610 of SEQ ID NO: 1882804
uuacucaagccaugguauu

SEQ ID NO: 2148707 - RNA, 19 nt, Artificial Sequence
  Description of Artificial Sequence: Synthetic oligonucleotide
  Antisense strand to SEQ ID NO: 2148706
aauaccauggcuugaguaa

SEQ ID NO: 2148708 - RNA, 19 nt, Artificial Sequence
  Description of Artificial Sequence: Synthetic oligonucleotide
  Sense strand starting at position 1629 of SEQ ID NO: 1882804
uuguuauagccacaggaau

SEQ ID NO: 2148709 - RNA, 19 nt, Artificial Sequence
  Description of Artificial Sequence: Synthetic oligonucleotide
  Antisense strand to SEQ ID NO: 2148708
auuccuguggcuauaacaa

SEQ ID NO: 2148710 - RNA, 19 nt, Artificial Sequence
  Description of Artificial Sequence: Synthetic oligonucleotide
  Sense strand starting at position 1631 of SEQ ID NO: 1882804
guuauagccacaggaauga

SEQ ID NO: 2148711 - RNA, 19 nt, Artificial Sequence
  Description of Artificial Sequence: Synthetic oligonucleotide
  Antisense strand to SEQ ID NO: 2148710
ucauuccuguggcuauaac

SEQ ID NO: 2148712 - RNA, 19 nt, Artificial Sequence
  Description of Artificial Sequence: Synthetic oligonucleotide
  Sense strand starting at position 1734 of SEQ ID NO: 1882804
ugaagaacuuacuuuaagu

SEQ ID NO: 2148713 - RNA, 19 nt, Artificial Sequence
  Description of Artificial Sequence: Synthetic oligonucleotide
  Antisense strand to SEQ ID NO: 2148712
acuuaaaguaaguucuuca

SEQ ID NO: 2148714 - RNA, 19 nt, Artificial Sequence
  Description of Artificial Sequence: Synthetic oligonucleotide
  Sense strand starting at position 1763 of SEQ ID NO: 1882804
aaguaaugaccaggugagu

SEQ ID NO: 2148715 - RNA, 19 nt, Artificial Sequence
  Description of Artificial Sequence: Synthetic oligonucleotide
  Antisense strand to SEQ ID NO: 2148714
acucaccuggucauuacuu

SEQ ID NO: 2148716 - RNA, 19 nt, Artificial Sequence
  Description of Artificial Sequence: Synthetic oligonucleotide
  Sense strand starting at position 1776 of SEQ ID NO: 1882804
gugagucucggugcaguua

SEQ ID NO: 2148717 - RNA, 19 nt, Artificial Sequence
  Description of Artificial Sequence: Synthetic oligonucleotide
  Antisense strand to SEQ ID NO: 2148716
uaacugcaccgagacucac

SEQ ID NO: 2148718 - RNA, 19 nt, Artificial Sequence
  Description of Artificial Sequence: Synthetic oligonucleotide
  Sense strand starting at position 1789 of SEQ ID NO: 1882804
caguuaguccacugaguuc

SEQ ID NO: 2148719 - RNA, 19 nt, Artificial Sequence
  Description of Artificial Sequence: Synthetic oligonucleotide
  Antisense strand to SEQ ID NO: 2148718
gaacucaguggacuaacug

SEQ ID NO: 2148720 - RNA, 19 nt, Artificial Sequence
  Description of Artificial Sequence: Synthetic oligonucleotide
  Sense strand starting at position 1864 of SEQ ID NO: 1882804
uuugcuucccaagacaguu

SEQ ID NO: 2148721 - RNA, 19 nt, Artificial Sequence
  Description of Artificial Sequence: Synthetic oligonucleotide
  Antisense strand to SEQ ID NO: 2148720
aacugucuugggaagcaaa

SEQ ID NO: 2148722 - RNA, 19 nt, Artificial Sequence
  Description of Artificial Sequence: Synthetic oligonucleotide
  Sense strand starting at position 1989 of SEQ ID NO: 1882804
ucaugaaggcuggagguua

SEQ ID NO: 2148723 - RNA, 19 nt, Artificial Sequence
  Description of Artificial Sequence: Synthetic oligonucleotide
  Antisense strand to SEQ ID NO: 2148722
uaaccuccagccuucauga

SEQ ID NO: 2148724 - RNA, 19 nt, Artificial Sequence
  Description of Artificial Sequence: Synthetic oligonucleotide
  Sense strand starting at position 2078 of SEQ ID NO: 1882804
gcaggaguucuagacacca

SEQ ID NO: 2148725 - RNA, 19 nt, Artificial Sequence
  Description of Artificial Sequence: Synthetic oligonucleotide
  Antisense strand to SEQ ID NO: 2148724
uggugucuagaacuccugc

SEQ ID NO: 2148726 - RNA, 19 nt, Artificial Sequence
  Description of Artificial Sequence: Synthetic oligonucleotide
  Sense strand starting at position 2267 of SEQ ID NO: 1882804
aaugcuggccuugguauaa

SEQ ID NO: 2148727 - RNA, 19 nt, Artificial Sequence
  Description of Artificial Sequence: Synthetic oligonucleotide
  Antisense strand to SEQ ID NO: 2148726
uuauaccaaggccagcauu

SEQ ID NO: 2148728 - RNA, 19 nt, Artificial Sequence
  Description of Artificial Sequence: Synthetic oligonucleotide
  Sense strand starting at position 2446 of SEQ ID NO: 1882804
guaguucugcuuguuuguu

SEQ ID NO: 2148729 - RNA, 19 nt, Artificial Sequence
  Description of Artificial Sequence: Synthetic oligonucleotide
  Antisense strand to SEQ ID NO: 2148728
aacaaacaagcagaacuac

SEQ ID NO: 2148730 - RNA, 19 nt, Artificial Sequence
  Description of Artificial Sequence: Synthetic oligonucleotide
  Sense strand starting at position 2863 of SEQ ID NO: 1882804
gagacaaugucagaagaga

SEQ ID NO: 2148731 - RNA, 19 nt, Artificial Sequence
  Description of Artificial Sequence: Synthetic oligonucleotide
  Antisense strand to SEQ ID NO: 2148730
ucucuucugacauugucuc

SEQ ID NO: 2148732 - RNA, 19 nt, Artificial Sequence
  Description of Artificial Sequence: Synthetic oligonucleotide
  Sense strand starting at position 2964 of SEQ ID NO: 1882804
aagugaagacauuagcuuu

SEQ ID NO: 2148733 - RNA, 19 nt, Artificial Sequence
  Description of Artificial Sequence: Synthetic oligonucleotide
  Antisense strand to SEQ ID NO: 2148732
aaagcuaaugucuucacuu

SEQ ID NO: 2148734 - RNA, 19 nt, Artificial Sequence
  Description of Artificial Sequence: Synthetic oligonucleotide
  Sense strand starting at position 2967 of SEQ ID NO: 1882804
ugaagacauuagcuuugaa

SEQ ID NO: 2148735 - RNA, 19 nt, Artificial Sequence
  Description of Artificial Sequence: Synthetic oligonucleotide
  Antisense strand to SEQ ID NO: 2148734
uucaaagcuaaugucuuca

SEQ ID NO: 2148736 - RNA, 19 nt, Artificial Sequence
  Description of Artificial Sequence: Synthetic oligonucleotide
  Sense strand starting at position 2970 of SEQ ID NO: 1882804
agacauuagcuuugaaaga

SEQ ID NO: 2148737 - RNA, 19 nt, Artificial Sequence
  Description of Artificial Sequence: Synthetic oligonucleotide
  Antisense strand to SEQ ID NO: 2148736
ucuuucaaagcuaaugucu

SEQ ID NO: 2148738 - RNA, 19 nt, Artificial Sequence
  Description of Artificial Sequence: Synthetic oligonucleotide
  Sense strand starting at position 3144 of SEQ ID NO: 1882804
auaaauggcaaguguagau

SEQ ID NO: 2148739 - RNA, 19 nt, Artificial Sequence
  Description of Artificial Sequence: Synthetic oligonucleotide
  Antisense strand to SEQ ID NO: 2148738
aucuacacuugccauuuau

SEQ ID NO: 2148740 - RNA, 19 nt, Artificial Sequence
  Description of Artificial Sequence: Synthetic oligonucleotide
  Sense strand starting at position 3212 of SEQ ID NO: 1882804
gagggagaggcuggugaua

SEQ ID NO: 2148741 - RNA, 19 nt, Artificial Sequence
  Description of Artificial Sequence: Synthetic oligonucleotide
  Antisense strand to SEQ ID NO: 2148740
uaucaccagccucucccuc

SEQ ID NO: 2148742 - RNA, 19 nt, Artificial Sequence
  Description of Artificial Sequence: Synthetic oligonucleotide
  Sense strand starting at position 3406 of SEQ ID NO: 1882804
augagugaugccuaaggca

SEQ ID NO: 2148743 - RNA, 19 nt, Artificial Sequence
  Description of Artificial Sequence: Synthetic oligonucleotide
  Antisense strand to SEQ ID NO: 2148742
ugccuuaggcaucacucau

SEQ ID NO: 2148744 - RNA, 19 nt, Artificial Sequence
  Description of Artificial Sequence: Synthetic oligonucleotide
  Sense strand starting at position 3486 of SEQ ID NO: 1882804
uggaaugggugguucucaa

SEQ ID NO: 2148745 - RNA, 19 nt, Artificial Sequence
  Description of Artificial Sequence: Synthetic oligonucleotide
  Antisense strand to SEQ ID NO: 2148744
uugagaaccacccauucca

SEQ ID NO: 2148746 - RNA, 19 nt, Artificial Sequence
  Description of Artificial Sequence: Synthetic oligonucleotide
  Sense strand starting at position 3490 of SEQ ID NO: 1882804
augggugguucucaaauuu

SEQ ID NO: 2148747 - RNA, 19 nt, Artificial Sequence
  Description of Artificial Sequence: Synthetic oligonucleotide
  Antisense strand to SEQ ID NO: 2148746
aaauuugagaaccacccau

SEQ ID NO: 2148748 - RNA, 19 nt, Artificial Sequence
  Description of Artificial Sequence: Synthetic oligonucleotide
  Sense strand starting at position 3563 of SEQ ID NO: 1882804
agagucugaucuccaggua

SEQ ID NO: 2148749 - RNA, 19 nt, Artificial Sequence
  Description of Artificial Sequence: Synthetic oligonucleotide
  Antisense strand to SEQ ID NO: 2148748
uaccuggagaucagacucu

SEQ ID NO: 2148750 - RNA, 19 nt, Artificial Sequence
  Description of Artificial Sequence: Synthetic oligonucleotide
  Sense strand starting at position 3566 of SEQ ID NO: 1882804
gucugaucuccagguaccu

SEQ ID NO: 2148751 - RNA, 19 nt, Artificial Sequence
  Description of Artificial Sequence: Synthetic oligonucleotide
  Antisense strand to SEQ ID NO: 2148750
agguaccuggagaucagac

SEQ ID NO: 2148752 - RNA, 19 nt, Artificial Sequence
  Description of Artificial Sequence: Synthetic oligonucleotide
  Sense strand starting at position 3825 of SEQ ID NO: 1882804
ggcaguaacacugaguaaa

SEQ ID NO: 2148753 - RNA, 19 nt, Artificial Sequence
  Description of Artificial Sequence: Synthetic oligonucleotide
  Antisense strand to SEQ ID NO: 2148752
uuuacucaguguuacugcc

SEQ ID NO: 2148754 - RNA, 19 nt, Artificial Sequence
  Description of Artificial Sequence: Synthetic oligonucleotide
  Sense strand starting at position 18 of SEQ ID NO: 1882805
uggacaauaugcuuaacuu

SEQ ID NO: 2148755 - RNA, 19 nt, Artificial Sequence
  Description of Artificial Sequence: Synthetic oligonucleotide
  Antisense strand to SEQ ID NO: 2148754
aaguuaagcauauugucca

SEQ ID NO: 2148756 - RNA, 19 nt, Artificial Sequence
  Description of Artificial Sequence: Synthetic oligonucleotide
  Sense strand starting at position 19 of SEQ ID NO: 1882805
ggacaauaugcuuaacuuu

SEQ ID NO: 2148757 - RNA, 19 nt, Artificial Sequence
  Description of Artificial Sequence: Synthetic oligonucleotide
  Antisense strand to SEQ ID NO: 2148756
aaaguuaagcauauugucc

SEQ ID NO: 2148758 - RNA, 19 nt, Artificial Sequence
  Description of Artificial Sequence: Synthetic oligonucleotide
  Sense strand starting at position 301 of SEQ ID NO: 1882805
uugcuaauuccagggaaga

SEQ ID NO: 2148759 - RNA, 19 nt, Artificial Sequence
  Description of Artificial Sequence: Synthetic oligonucleotide
  Antisense strand to SEQ ID NO: 2148758
ucuucccuggaauuagcaa

SEQ ID NO: 2148760 - RNA, 19 nt, Artificial Sequence
  Description of Artificial Sequence: Synthetic oligonucleotide
  Sense strand starting at position 302 of SEQ ID NO: 1882805
ugcuaauuccagggaagau

SEQ ID NO: 2148761 - RNA, 19 nt, Artificial Sequence
  Description of Artificial Sequence: Synthetic oligonucleotide
  Antisense strand to SEQ ID NO: 2148760
aucuucccuggaauuagca

SEQ ID NO: 2148762 - RNA, 19 nt, Artificial Sequence
  Description of Artificial Sequence: Synthetic oligonucleotide
  Sense strand starting at position 311 of SEQ ID NO: 1882805
cagggaagauuauauugaa

SEQ ID NO: 2148763 - RNA, 19 nt, Artificial Sequence
  Description of Artificial Sequence: Synthetic oligonucleotide
  Antisense strand to SEQ ID NO: 2148762
uucaauauaaucuucccug

SEQ ID NO: 2148764 - RNA, 19 nt, Artificial Sequence
  Description of Artificial Sequence: Synthetic oligonucleotide
  Sense strand starting at position 526 of SEQ ID NO: 1882805
cccaaaguuguugaaaggu

SEQ ID NO: 2148765 - RNA, 19 nt, Artificial Sequence
  Description of Artificial Sequence: Synthetic oligonucleotide
  Antisense strand to SEQ ID NO: 2148764
accuuucaacaacuuuggg

SEQ ID NO: 2148766 - RNA, 19 nt, Artificial Sequence
  Description of Artificial Sequence: Synthetic oligonucleotide
  Sense strand starting at position 535 of SEQ ID NO: 1882805
guugaaaggugacuguaau

SEQ ID NO: 2148767 - RNA, 19 nt, Artificial Sequence
  Description of Artificial Sequence: Synthetic oligonucleotide
  Antisense strand to SEQ ID NO: 2148766
auuacagucaccuuucaac

SEQ ID NO: 2148768 - RNA, 19 nt, Artificial Sequence
  Description of Artificial Sequence: Synthetic oligonucleotide
  Sense strand starting at position 536 of SEQ ID NO: 1882805
uugaaaggugacuguaauu

SEQ ID NO: 2148769 - RNA, 19 nt, Artificial Sequence
  Description of Artificial Sequence: Synthetic oligonucleotide
  Antisense strand to SEQ ID NO: 2148768
aauuacagucaccuuucaa

SEQ ID NO: 2148770 - RNA, 19 nt, Artificial Sequence
  Description of Artificial Sequence: Synthetic oligonucleotide
  Sense strand starting at position 548 of SEQ ID NO: 1882805
uguaauugcaucguuaguu

SEQ ID NO: 2148771 - RNA, 19 nt, Artificial Sequence
  Description of Artificial Sequence: Synthetic oligonucleotide
  Antisense strand to SEQ ID NO: 2148770
aacuaacgaugcaauuaca

SEQ ID NO: 2148772 - RNA, 19 nt, Artificial Sequence
  Description of Artificial Sequence: Synthetic oligonucleotide
  Sense strand starting at position 564 of SEQ ID NO: 1882805
guucuuagcuuuccuggaa

SEQ ID NO: 2148773 - RNA, 19 nt, Artificial Sequence
  Description of Artificial Sequence: Synthetic oligonucleotide
  Antisense strand to SEQ ID NO: 2148772
uuccaggaaagcuaagaac

SEQ ID NO: 2148774 - RNA, 19 nt, Artificial Sequence
  Description of Artificial Sequence: Synthetic oligonucleotide
  Sense strand starting at position 565 of SEQ ID NO: 1882805
uucuuagcuuuccuggaau

SEQ ID NO: 2148775 - RNA, 19 nt, Artificial Sequence
  Description of Artificial Sequence: Synthetic oligonucleotide
  Antisense strand to SEQ ID NO: 2148774
auuccaggaaagcuaagaa

SEQ ID NO: 2148776 - RNA, 19 nt, Artificial Sequence
  Description of Artificial Sequence: Synthetic oligonucleotide
  Sense strand starting at position 567 of SEQ ID NO: 1882805
cuuagcuuuccuggaaucu

SEQ ID NO: 2148777 - RNA, 19 nt, Artificial Sequence
  Description of Artificial Sequence: Synthetic oligonucleotide
  Antisense strand to SEQ ID NO: 2148776
agauuccaggaaagcuaag

SEQ ID NO: 2148778 - RNA, 19 nt, Artificial Sequence
  Description of Artificial Sequence: Synthetic oligonucleotide
  Sense strand starting at position 671 of SEQ ID NO: 1882805
guaggaugagcuugauaac

SEQ ID NO: 2148779 - RNA, 19 nt, Artificial Sequence
  Description of Artificial Sequence: Synthetic oligonucleotide
  Antisense strand to SEQ ID NO: 2148778
guuaucaagcucauccuac

SEQ ID NO: 2148780 - RNA, 19 nt, Artificial Sequence
  Description of Artificial Sequence: Synthetic oligonucleotide
  Sense strand starting at position 683 of SEQ ID NO: 1882805
ugauaaccucagcguggau

SEQ ID NO: 2148781 - RNA, 19 nt, Artificial Sequence
  Description of Artificial Sequence: Synthetic oligonucleotide
  Antisense strand to SEQ ID NO: 2148780
auccacgcugagguuauca

SEQ ID NO: 2148782 - RNA, 19 nt, Artificial Sequence
  Description of Artificial Sequence: Synthetic oligonucleotide
  Sense strand starting at position 797 of SEQ ID NO: 1882805
caguccucuuagguaagua

SEQ ID NO: 2148783 - RNA, 19 nt, Artificial Sequence
  Description of Artificial Sequence: Synthetic oligonucleotide
  Antisense strand to SEQ ID NO: 2148782
uacuuaccuaagaggacug

SEQ ID NO: 2148784 - RNA, 19 nt, Artificial Sequence
  Description of Artificial Sequence: Synthetic oligonucleotide
  Sense strand starting at position 828 of SEQ ID NO: 1882805
ggcacuguguuccuaauaa

SEQ ID NO: 2148785 - RNA, 19 nt, Artificial Sequence
  Description of Artificial Sequence: Synthetic oligonucleotide
  Antisense strand to SEQ ID NO: 2148784
uuauuaggaacacagugcc

SEQ ID NO: 2148786 - RNA, 19 nt, Artificial Sequence
  Description of Artificial Sequence: Synthetic oligonucleotide
  Sense strand starting at position 849 of SEQ ID NO: 1882805
ugaaucagaucccuuaggu

SEQ ID NO: 2148787 - RNA, 19 nt, Artificial Sequence
  Description of Artificial Sequence: Synthetic oligonucleotide
  Antisense strand to SEQ ID NO: 2148786
accuaagggaucugauuca

SEQ ID NO: 2148788 - RNA, 19 nt, Artificial Sequence
  Description of Artificial Sequence: Synthetic oligonucleotide
  Sense strand starting at position 859 of SEQ ID NO: 1882805
cccuuagguuagucacuau

SEQ ID NO: 2148789 - RNA, 19 nt, Artificial Sequence
  Description of Artificial Sequence: Synthetic oligonucleotide
  Antisense strand to SEQ ID NO: 2148788
auagugacuaaccuaaggg

SEQ ID NO: 2148790 - RNA, 19 nt, Artificial Sequence
  Description of Artificial Sequence: Synthetic oligonucleotide
  Sense strand starting at position 862 of SEQ ID NO: 1882805
uuagguuagucacuauucu

SEQ ID NO: 2148791 - RNA, 19 nt, Artificial Sequence
  Description of Artificial Sequence: Synthetic oligonucleotide
  Antisense strand to SEQ ID NO: 2148790
agaauagugacuaaccuaa

SEQ ID NO: 2148792 - RNA, 19 nt, Artificial Sequence
  Description of Artificial Sequence: Synthetic oligonucleotide
  Sense strand starting at position 866 of SEQ ID NO: 1882805
guuagucacuauucuuaag

SEQ ID NO: 2148793 - RNA, 19 nt, Artificial Sequence
  Description of Artificial Sequence: Synthetic oligonucleotide
  Antisense strand to SEQ ID NO: 2148792
cuuaagaauagugacuaac

SEQ ID NO: 2148794 - RNA, 19 nt, Artificial Sequence
  Description of Artificial Sequence: Synthetic oligonucleotide
  Sense strand starting at position 904 of SEQ ID NO: 1882805
cuugaagucaucuguugag

SEQ ID NO: 2148795 - RNA, 19 nt, Artificial Sequence
  Description of Artificial Sequence: Synthetic oligonucleotide
  Antisense strand to SEQ ID NO: 2148794
cucaacagaugacuucaag

SEQ ID NO: 2148796 - RNA, 19 nt, Artificial Sequence
  Description of Artificial Sequence: Synthetic oligonucleotide
  Sense strand starting at position 972 of SEQ ID NO: 1882805
cucuuugauuuacagauga

SEQ ID NO: 2148797 - RNA, 19 nt, Artificial Sequence
  Description of Artificial Sequence: Synthetic oligonucleotide
  Antisense strand to SEQ ID NO: 2148796
ucaucuguaaaucaaagag

SEQ ID NO: 2148798 - RNA, 19 nt, Artificial Sequence
  Description of Artificial Sequence: Synthetic oligonucleotide
  Sense strand starting at position 1049 of SEQ ID NO: 1882805
gcauaaagcucaucuguca

SEQ ID NO: 2148799 - RNA, 19 nt, Artificial Sequence
  Description of Artificial Sequence: Synthetic oligonucleotide
  Antisense strand to SEQ ID NO: 2148798
ugacagaugagcuuuaugc

SEQ ID NO: 2148800 - RNA, 19 nt, Artificial Sequence
  Description of Artificial Sequence: Synthetic oligonucleotide
  Sense strand starting at position 1233 of SEQ ID NO: 1882805
uaggaauuauaagacgaga

SEQ ID NO: 2148801 - RNA, 19 nt, Artificial Sequence
  Description of Artificial Sequence: Synthetic oligonucleotide
  Antisense strand to SEQ ID NO: 2148800
ucucgucuuauaauuccua

SEQ ID NO: 2148802 - RNA, 19 nt, Artificial Sequence
  Description of Artificial Sequence: Synthetic oligonucleotide
  Sense strand starting at position 1248 of SEQ ID NO: 1882805
gagagaggcuugccugcua

SEQ ID NO: 2148803 - RNA, 19 nt, Artificial Sequence
  Description of Artificial Sequence: Synthetic oligonucleotide
  Antisense strand to SEQ ID NO: 2148802
uagcaggcaagccucucuc

SEQ ID NO: 2148804 - RNA, 19 nt, Artificial Sequence
  Description of Artificial Sequence: Synthetic oligonucleotide
  Sense strand starting at position 1341 of SEQ ID NO: 1882805
ccugguaaggccuaauaau

SEQ ID NO: 2148805 - RNA, 19 nt, Artificial Sequence
  Description of Artificial Sequence: Synthetic oligonucleotide
  Antisense strand to SEQ ID NO: 2148804
auuauuaggccuuaccagg

SEQ ID NO: 2148806 - RNA, 19 nt, Artificial Sequence
  Description of Artificial Sequence: Synthetic oligonucleotide
  Sense strand starting at position 1350 of SEQ ID NO: 1882805
gccuaauaauuguuaaaug

SEQ ID NO: 2148807 - RNA, 19 nt, Artificial Sequence
  Description of Artificial Sequence: Synthetic oligonucleotide
  Antisense strand to SEQ ID NO: 2148806
cauuuaacaauuauuaggc

SEQ ID NO: 2148808 - RNA, 19 nt, Artificial Sequence
  Description of Artificial Sequence: Synthetic oligonucleotide
  Sense strand starting at position 1474 of SEQ ID NO: 1882805
acauuuguauucuaaagag

SEQ ID NO: 2148809 - RNA, 19 nt, Artificial Sequence
  Description of Artificial Sequence: Synthetic oligonucleotide
  Antisense strand to SEQ ID NO: 2148808
cucuuuagaauacaaaugu

SEQ ID NO: 2148810 - RNA, 19 nt, Artificial Sequence
  Description of Artificial Sequence: Synthetic oligonucleotide
  Sense strand starting at position 1480 of SEQ ID NO: 1882805
guauucuaaagaggugaaa

SEQ ID NO: 2148811 - RNA, 19 nt, Artificial Sequence
  Description of Artificial Sequence: Synthetic oligonucleotide
  Antisense strand to SEQ ID NO: 2148810
uuucaccucuuuagaauac

SEQ ID NO: 2148812 - RNA, 19 nt, Artificial Sequence
  Description of Artificial Sequence: Synthetic oligonucleotide
  Sense strand starting at position 1529 of SEQ ID NO: 1882805
ggcccauuguaauuaauac

SEQ ID NO: 2148813 - RNA, 19 nt, Artificial Sequence
  Description of Artificial Sequence: Synthetic oligonucleotide
  Antisense strand to SEQ ID NO: 2148812
guauuaauuacaaugggcc

SEQ ID NO: 2148814 - RNA, 19 nt, Artificial Sequence
  Description of Artificial Sequence: Synthetic oligonucleotide
  Sense strand starting at position 1620 of SEQ ID NO: 1882805
uguuuaugugccuggacag

SEQ ID NO: 2148815 - RNA, 19 nt, Artificial Sequence
  Description of Artificial Sequence: Synthetic oligonucleotide
  Antisense strand to SEQ ID NO: 2148814
cuguccaggcacauaaaca

SEQ ID NO: 2148816 - RNA, 19 nt, Artificial Sequence
  Description of Artificial Sequence: Synthetic oligonucleotide
  Sense strand starting at position 1621 of SEQ ID NO: 1882805
guuuaugugccuggacaga

SEQ ID NO: 2148817 - RNA, 19 nt, Artificial Sequence
  Description of Artificial Sequence: Synthetic oligonucleotide
  Antisense strand to SEQ ID NO: 2148816
ucuguccaggcacauaaac

SEQ ID NO: 2148818 - RNA, 19 nt, Artificial Sequence
  Description of Artificial Sequence: Synthetic oligonucleotide
  Sense strand starting at position 1638 of SEQ ID NO: 1882805
gaaagugaagcguauccaa

SEQ ID NO: 2148819 - RNA, 19 nt, Artificial Sequence
  Description of Artificial Sequence: Synthetic oligonucleotide
  Antisense strand to SEQ ID NO: 2148818
uuggauacgcuucacuuuc

SEQ ID NO: 2148820 - RNA, 19 nt, Artificial Sequence
  Description of Artificial Sequence: Synthetic oligonucleotide
  Sense strand starting at position 1681 of SEQ ID NO: 1882805
gucuuucugauccguauag

SEQ ID NO: 2148821 - RNA, 19 nt, Artificial Sequence
  Description of Artificial Sequence: Synthetic oligonucleotide
  Antisense strand to SEQ ID NO: 2148820
cuauacggaucagaaagac

SEQ ID NO: 2148822 - RNA, 19 nt, Artificial Sequence
  Description of Artificial Sequence: Synthetic oligonucleotide
  Sense strand starting at position 1682 of SEQ ID NO: 1882805
ucuuucugauccguauaga

SEQ ID NO: 2148823 - RNA, 19 nt, Artificial Sequence
  Description of Artificial Sequence: Synthetic oligonucleotide
  Antisense strand to SEQ ID NO: 2148822
ucuauacggaucagaaaga

SEQ ID NO: 2148824 - RNA, 19 nt, Artificial Sequence
  Description of Artificial Sequence: Synthetic oligonucleotide
  Sense strand starting at position 1683 of SEQ ID NO: 1882805
cuuucugauccguauagau

SEQ ID NO: 2148825 - RNA, 19 nt, Artificial Sequence
  Description of Artificial Sequence: Synthetic oligonucleotide
  Antisense strand to SEQ ID NO: 2148824
aucuauacggaucagaaag

SEQ ID NO: 2148826 - RNA, 19 nt, Artificial Sequence
  Description of Artificial Sequence: Synthetic oligonucleotide
  Sense strand starting at position 1685 of SEQ ID NO: 1882805
uucugauccguauagauca

SEQ ID NO: 2148827 - RNA, 19 nt, Artificial Sequence
  Description of Artificial Sequence: Synthetic oligonucleotide
  Antisense strand to SEQ ID NO: 2148826
ugaucuauacggaucagaa

SEQ ID NO: 2148828 - RNA, 19 nt, Artificial Sequence
  Description of Artificial Sequence: Synthetic oligonucleotide
  Sense strand starting at position 1774 of SEQ ID NO: 1882805
ggcugcagucagcucuuua

SEQ ID NO: 2148829 - RNA, 19 nt, Artificial Sequence
  Description of Artificial Sequence: Synthetic oligonucleotide
  Antisense strand to SEQ ID NO: 2148828
uaaagagcugacugcagcc

SEQ ID NO: 2148830 - RNA, 19 nt, Artificial Sequence
  Description of Artificial Sequence: Synthetic oligonucleotide
  Sense strand starting at position 1778 of SEQ ID NO: 1882805
gcagucagcucuuuaauac

SEQ ID NO: 2148831 - RNA, 19 nt, Artificial Sequence
  Description of Artificial Sequence: Synthetic oligonucleotide
  Antisense strand to SEQ ID NO: 2148830
guauuaaagagcugacugc

SEQ ID NO: 2148832 - RNA, 19 nt, Artificial Sequence
  Description of Artificial Sequence: Synthetic oligonucleotide
  Sense strand starting at position 3192 of SEQ ID NO: 1882805
ugcuuuccucaucgacuga

SEQ ID NO: 2148833 - RNA, 19 nt, Artificial Sequence
  Description of Artificial Sequence: Synthetic oligonucleotide
  Antisense strand to SEQ ID NO: 2148832
ucagucgaugaggaaagca

SEQ ID NO: 2148834 - RNA, 19 nt, Artificial Sequence
  Description of Artificial Sequence: Synthetic oligonucleotide
  Sense strand starting at position 41 of SEQ ID NO: 1882806
gccaauagaaucugagugu

SEQ ID NO: 2148835 - RNA, 19 nt, Artificial Sequence
  Description of Artificial Sequence: Synthetic oligonucleotide
  Antisense strand to SEQ ID NO: 2148834
acacucagauucuauuggc

SEQ ID NO: 2148836 - RNA, 19 nt, Artificial Sequence
  Description of Artificial Sequence: Synthetic oligonucleotide
  Sense strand starting at position 44 of SEQ ID NO: 1882806
aauagaaucugagugugcu

SEQ ID NO: 2148837 - RNA, 19 nt, Artificial Sequence
  Description of Artificial Sequence: Synthetic oligonucleotide
  Antisense strand to SEQ ID NO: 2148836
agcacacucagauucuauu

SEQ ID NO: 2148838 - RNA, 19 nt, Artificial Sequence
  Description of Artificial Sequence: Synthetic oligonucleotide
  Sense strand starting at position 45 of SEQ ID NO: 1882806
auagaaucugagugugcua

SEQ ID NO: 2148839 - RNA, 19 nt, Artificial Sequence
  Description of Artificial Sequence: Synthetic oligonucleotide
  Antisense strand to SEQ ID NO: 2148838
uagcacacucagauucuau

SEQ ID NO: 2148840 - RNA, 19 nt, Artificial Sequence
  Description of Artificial Sequence: Synthetic oligonucleotide
  Sense strand starting at position 47 of SEQ ID NO: 1882806
agaaucugagugugcuaaa

SEQ ID NO: 2148841 - RNA, 19 nt, Artificial Sequence
  Description of Artificial Sequence: Synthetic oligonucleotide
  Antisense strand to SEQ ID NO: 2148840
uuuagcacacucagauucu

SEQ ID NO: 2148842 - RNA, 19 nt, Artificial Sequence
  Description of Artificial Sequence: Synthetic oligonucleotide
  Sense strand starting at position 68 of SEQ ID NO: 1882806
cucuauuagccgggacuga

SEQ ID NO: 2148843 - RNA, 19 nt, Artificial Sequence
  Description of Artificial Sequence: Synthetic oligonucleotide
  Antisense strand to SEQ ID NO: 2148842
ucagucccggcuaauagag

SEQ ID NO: 2148844 - RNA, 19 nt, Artificial Sequence
  Description of Artificial Sequence: Synthetic oligonucleotide
  Sense strand starting at position 69 of SEQ ID NO: 1882806
ucuauuagccgggacugau

SEQ ID NO: 2148845 - RNA, 19 nt, Artificial Sequence
  Description of Artificial Sequence: Synthetic oligonucleotide
  Antisense strand to SEQ ID NO: 2148844
aucagucccggcuaauaga

SEQ ID NO: 2148846 - RNA, 19 nt, Artificial Sequence
  Description of Artificial Sequence: Synthetic oligonucleotide
  Sense strand starting at position 420 of SEQ ID NO: 1882806
gcagcaauaucaucgauaa

SEQ ID NO: 2148847 - RNA, 19 nt, Artificial Sequence
  Description of Artificial Sequence: Synthetic oligonucleotide
  Antisense strand to SEQ ID NO: 2148846
uuaucgaugauauugcugc

SEQ ID NO: 2148848 - RNA, 19 nt, Artificial Sequence
  Description of Artificial Sequence: Synthetic oligonucleotide
  Sense strand starting at position 464 of SEQ ID NO: 1882806
guguucugggacugguuca

SEQ ID NO: 2148849 - RNA, 19 nt, Artificial Sequence
  Description of Artificial Sequence: Synthetic oligonucleotide
  Antisense strand to SEQ ID NO: 2148848
ugaaccagucccagaacac

SEQ ID NO: 2148850 - RNA, 19 nt, Artificial Sequence
  Description of Artificial Sequence: Synthetic oligonucleotide
  Sense strand starting at position 789 of SEQ ID NO: 1882806
gccgguuucggccgauuua

SEQ ID NO: 2148851 - RNA, 19 nt, Artificial Sequence
  Description of Artificial Sequence: Synthetic oligonucleotide
  Antisense strand to SEQ ID NO: 2148850
uaaaucggccgaaaccggc

SEQ ID NO: 2148852 - RNA, 19 nt, Artificial Sequence
  Description of Artificial Sequence: Synthetic oligonucleotide
  Sense strand starting at position 846 of SEQ ID NO: 1882806
acucuuggucccugaucaa

SEQ ID NO: 2148853 - RNA, 19 nt, Artificial Sequence
  Description of Artificial Sequence: Synthetic oligonucleotide
  Antisense strand to SEQ ID NO: 2148852
uugaucagggaccaagagu

SEQ ID NO: 2148854 - RNA, 19 nt, Artificial Sequence
  Description of Artificial Sequence: Synthetic oligonucleotide
  Sense strand starting at position 849 of SEQ ID NO: 1882806
cuuggucccugaucaaagu

SEQ ID NO: 2148855 - RNA, 19 nt, Artificial Sequence
  Description of Artificial Sequence: Synthetic oligonucleotide
  Antisense strand to SEQ ID NO: 2148854
acuuugaucagggaccaag

SEQ ID NO: 2148856 - RNA, 19 nt, Artificial Sequence
  Description of Artificial Sequence: Synthetic oligonucleotide
  Sense strand starting at position 2095 of SEQ ID NO: 1882806
uggcgcucgcgccuuuaaa

SEQ ID NO: 2148857 - RNA, 19 nt, Artificial Sequence
  Description of Artificial Sequence: Synthetic oligonucleotide
  Antisense strand to SEQ ID NO: 2148856
uuuaaaggcgcgagcgcca

SEQ ID NO: 2148858 - RNA, 19 nt, Artificial Sequence
  Description of Artificial Sequence: Synthetic oligonucleotide
  Sense strand starting at position 2105 of SEQ ID NO: 1882806
gccuuuaaaccugaagcca

SEQ ID NO: 2148859 - RNA, 19 nt, Artificial Sequence
  Description of Artificial Sequence: Synthetic oligonucleotide
  Antisense strand to SEQ ID NO: 2148858
uggcuucagguuuaaaggc

SEQ ID NO: 2148860 - RNA, 19 nt, Artificial Sequence
  Description of Artificial Sequence: Synthetic oligonucleotide
  Sense strand starting at position 2680 of SEQ ID NO: 1882806
gaccguguucucccgccua

SEQ ID NO: 2148861 - RNA, 19 nt, Artificial Sequence
  Description of Artificial Sequence: Synthetic oligonucleotide
  Antisense strand to SEQ ID NO: 2148860
uaggcgggagaacacgguc

SEQ ID NO: 2148862 - RNA, 19 nt, Artificial Sequence
  Description of Artificial Sequence: Synthetic oligonucleotide
  Sense strand starting at position 2749 of SEQ ID NO: 1882806
caggaaguguccuuuaauu

SEQ ID NO: 2148863 - RNA, 19 nt, Artificial Sequence
  Description of Artificial Sequence: Synthetic oligonucleotide
  Antisense strand to SEQ ID NO: 2148862
aauuaaaggacacuuccug

SEQ ID NO: 2148864 - RNA, 19 nt, Artificial Sequence
  Description of Artificial Sequence: Synthetic oligonucleotide
  Sense strand starting at position 2751 of SEQ ID NO: 1882806
ggaaguguccuuuaauuac

SEQ ID NO: 2148865 - RNA, 19 nt, Artificial Sequence
  Description of Artificial Sequence: Synthetic oligonucleotide
  Antisense strand to SEQ ID NO: 2148864
guaauuaaaggacacuucc

SEQ ID NO: 2148866 - RNA, 19 nt, Artificial Sequence
  Description of Artificial Sequence: Synthetic oligonucleotide
  Sense strand starting at position 2760 of SEQ ID NO: 1882806
cuuuaauuacuccaguguu

SEQ ID NO: 2148867 - RNA, 19 nt, Artificial Sequence
  Description of Artificial Sequence: Synthetic oligonucleotide
  Antisense strand to SEQ ID NO: 2148866
aacacuggaguaauuaaag

SEQ ID NO: 2148868 - RNA, 19 nt, Artificial Sequence
  Description of Artificial Sequence: Synthetic oligonucleotide
  Sense strand starting at position 2952 of SEQ ID NO: 1882806
augguuauguuguuguuau

SEQ ID NO: 2148869 - RNA, 19 nt, Artificial Sequence
  Description of Artificial Sequence: Synthetic oligonucleotide
  Antisense strand to SEQ ID NO: 2148868
auaacaacaacauaaccau

SEQ ID NO: 2148870 - RNA, 19 nt, Artificial Sequence
  Description of Artificial Sequence: Synthetic oligonucleotide
  Sense strand starting at position 3184 of SEQ ID NO: 1882806
cuggguaagaauugcugaa

SEQ ID NO: 2148871 - RNA, 19 nt, Artificial Sequence
  Description of Artificial Sequence: Synthetic oligonucleotide
  Antisense strand to SEQ ID NO: 2148870
uucagcaauucuuacccag

SEQ ID NO: 2148872 - RNA, 19 nt, Artificial Sequence
  Description of Artificial Sequence: Synthetic oligonucleotide
  Sense strand starting at position 3186 of SEQ ID NO: 1882806
ggguaagaauugcugaaac

SEQ ID NO: 2148873 - RNA, 19 nt, Artificial Sequence
  Description of Artificial Sequence: Synthetic oligonucleotide
  Antisense strand to SEQ ID NO: 2148872
guuucagcaauucuuaccc

SEQ ID NO: 2148874 - RNA, 19 nt, Artificial Sequence
  Description of Artificial Sequence: Synthetic oligonucleotide
  Sense strand starting at position 3188 of SEQ ID NO: 1882806
guaagaauugcugaaacuu

SEQ ID NO: 2148875 - RNA, 19 nt, Artificial Sequence
  Description of Artificial Sequence: Synthetic oligonucleotide
  Antisense strand to SEQ ID NO: 2148874
aaguuucagcaauucuuac

SEQ ID NO: 2148876 - RNA, 19 nt, Artificial Sequence
  Description of Artificial Sequence: Synthetic oligonucleotide
  Sense strand starting at position 3259 of SEQ ID NO: 1882806
uuaauugaauaccgaggaa

SEQ ID NO: 2148877 - RNA, 19 nt, Artificial Sequence
  Description of Artificial Sequence: Synthetic oligonucleotide
  Antisense strand to SEQ ID NO: 2148876
uuccucgguauucaauuaa

SEQ ID NO: 2148878 - RNA, 19 nt, Artificial Sequence
  Description of Artificial Sequence: Synthetic oligonucleotide
  Sense strand starting at position 3288 of SEQ ID NO: 1882806
agguuugcauacuuaauca

SEQ ID NO: 2148879 - RNA, 19 nt, Artificial Sequence
  Description of Artificial Sequence: Synthetic oligonucleotide
  Antisense strand to SEQ ID NO: 2148878
ugauuaaguaugcaaaccu

SEQ ID NO: 2148880 - RNA, 19 nt, Artificial Sequence
  Description of Artificial Sequence: Synthetic oligonucleotide
  Sense strand starting at position 3381 of SEQ ID NO: 1882806
aucaguuauccaugcuaug

SEQ ID NO: 2148881 - RNA, 19 nt, Artificial Sequence
  Description of Artificial Sequence: Synthetic oligonucleotide
  Antisense strand to SEQ ID NO: 2148880
cauagcauggauaacugau

SEQ ID NO: 2148882 - RNA, 19 nt, Artificial Sequence
  Description of Artificial Sequence: Synthetic oligonucleotide
  Sense strand starting at position 3432 of SEQ ID NO: 1882806
aggacauaaguccgauguu

SEQ ID NO: 2148883 - RNA, 19 nt, Artificial Sequence
  Description of Artificial Sequence: Synthetic oligonucleotide
  Antisense strand to SEQ ID NO: 2148882
aacaucggacuuauguccu

SEQ ID NO: 2148884 - RNA, 19 nt, Artificial Sequence
  Description of Artificial Sequence: Synthetic oligonucleotide
  Sense strand starting at position 3435 of SEQ ID NO: 1882806
acauaaguccgauguuaag

SEQ ID NO: 2148885 - RNA, 19 nt, Artificial Sequence
  Description of Artificial Sequence: Synthetic oligonucleotide
  Antisense strand to SEQ ID NO: 2148884
cuuaacaucggacuuaugu

SEQ ID NO: 2148886 - RNA, 19 nt, Artificial Sequence
  Description of Artificial Sequence: Synthetic oligonucleotide
  Sense strand starting at position 3486 of SEQ ID NO: 1882806
uguccuucgugaguccuua

SEQ ID NO: 2148887 - RNA, 19 nt, Artificial Sequence
  Description of Artificial Sequence: Synthetic oligonucleotide
  Antisense strand to SEQ ID NO: 2148886
uaaggacucacgaaggaca

SEQ ID NO: 2148888 - RNA, 19 nt, Artificial Sequence
  Description of Artificial Sequence: Synthetic oligonucleotide
  Sense strand starting at position 3490 of SEQ ID NO: 1882806
cuucgugaguccuuaaagc

SEQ ID NO: 2148889 - RNA, 19 nt, Artificial Sequence
  Description of Artificial Sequence: Synthetic oligonucleotide
  Antisense strand to SEQ ID NO: 2148888
gcuuuaaggacucacgaag

SEQ ID NO: 2148890 - RNA, 19 nt, Artificial Sequence
  Description of Artificial Sequence: Synthetic oligonucleotide
  Sense strand starting at position 3584 of SEQ ID NO: 1882806
uggugacuuacagauuguu

SEQ ID NO: 2148891 - RNA, 19 nt, Artificial Sequence
  Description of Artificial Sequence: Synthetic oligonucleotide
  Antisense strand to SEQ ID NO: 2148890
aacaaucuguaagucacca

SEQ ID NO: 2148892 - RNA, 19 nt, Artificial Sequence
  Description of Artificial Sequence: Synthetic oligonucleotide
  Sense strand starting at position 3587 of SEQ ID NO: 1882806
ugacuuacagauuguuaaa

SEQ ID NO: 2148893 - RNA, 19 nt, Artificial Sequence
  Description of Artificial Sequence: Synthetic oligonucleotide
  Antisense strand to SEQ ID NO: 2148892
uuuaacaaucuguaaguca

SEQ ID NO: 2148894 - RNA, 19 nt, Artificial Sequence
  Description of Artificial Sequence: Synthetic oligonucleotide
  Sense strand starting at position 3636 of SEQ ID NO: 1882806
acccauacuccugggaagu

SEQ ID NO: 2148895 - RNA, 19 nt, Artificial Sequence
  Description of Artificial Sequence: Synthetic oligonucleotide
  Antisense strand to SEQ ID NO: 2148894
acuucccaggaguaugggu

SEQ ID NO: 2148896 - RNA, 19 nt, Artificial Sequence
  Description of Artificial Sequence: Synthetic oligonucleotide
  Sense strand starting at position 3637 of SEQ ID NO: 1882806
cccauacuccugggaaguc

SEQ ID NO: 2148897 - RNA, 19 nt, Artificial Sequence
  Description of Artificial Sequence: Synthetic oligonucleotide
  Antisense strand to SEQ ID NO: 2148896
gacuucccaggaguauggg

SEQ ID NO: 2148898 - RNA, 19 nt, Artificial Sequence
  Description of Artificial Sequence: Synthetic oligonucleotide
  Sense strand starting at position 3638 of SEQ ID NO: 1882806
ccauacuccugggaaguca

SEQ ID NO: 2148899 - RNA, 19 nt, Artificial Sequence
  Description of Artificial Sequence: Synthetic oligonucleotide
  Antisense strand to SEQ ID NO: 2148898
ugacuucccaggaguaugg

SEQ ID NO: 2148900 - RNA, 19 nt, Artificial Sequence
  Description of Artificial Sequence: Synthetic oligonucleotide
  Sense strand starting at position 3735 of SEQ ID NO: 1882806
caauguauguguucugguu

SEQ ID NO: 2148901 - RNA, 19 nt, Artificial Sequence
  Description of Artificial Sequence: Synthetic oligonucleotide
  Antisense strand to SEQ ID NO: 2148900
aaccagaacacauacauug

SEQ ID NO: 2148902 - RNA, 19 nt, Artificial Sequence
  Description of Artificial Sequence: Synthetic oligonucleotide
  Sense strand starting at position 3741 of SEQ ID NO: 1882806
auguguucugguuguacua

SEQ ID NO: 2148903 - RNA, 19 nt, Artificial Sequence
  Description of Artificial Sequence: Synthetic oligonucleotide
  Antisense strand to SEQ ID NO: 2148902
uaguacaaccagaacacau

SEQ ID NO: 2148904 - RNA, 19 nt, Artificial Sequence
  Description of Artificial Sequence: Synthetic oligonucleotide
  Sense strand starting at position 3792 of SEQ ID NO: 1882806
acaguagauuacuauguau

SEQ ID NO: 2148905 - RNA, 19 nt, Artificial Sequence
  Description of Artificial Sequence: Synthetic oligonucleotide
  Antisense strand to SEQ ID NO: 2148904
auacauaguaaucuacugu

SEQ ID NO: 2148906 - RNA, 19 nt, Artificial Sequence
  Description of Artificial Sequence: Synthetic oligonucleotide
  Sense strand starting at position 3794 of SEQ ID NO: 1882806
aguagauuacuauguauca

SEQ ID NO: 2148907 - RNA, 19 nt, Artificial Sequence
  Description of Artificial Sequence: Synthetic oligonucleotide
  Antisense strand to SEQ ID NO: 2148906
ugauacauaguaaucuacu

SEQ ID NO: 2148908 - RNA, 19 nt, Artificial Sequence
  Description of Artificial Sequence: Synthetic oligonucleotide
  Sense strand starting at position 3795 of SEQ ID NO: 1882806
guagauuacuauguaucag

SEQ ID NO: 2148909 - RNA, 19 nt, Artificial Sequence
  Description of Artificial Sequence: Synthetic oligonucleotide
  Antisense strand to SEQ ID NO: 2148908
cugauacauaguaaucuac

SEQ ID NO: 2148910 - RNA, 19 nt, Artificial Sequence
  Description of Artificial Sequence: Synthetic oligonucleotide
  Sense strand starting at position 3801 of SEQ ID NO: 1882806
uacuauguaucaguguauu

SEQ ID NO: 2148911 - RNA, 19 nt, Artificial Sequence
  Description of Artificial Sequence: Synthetic oligonucleotide
  Antisense strand to SEQ ID NO: 2148910
aauacacugauacauagua

SEQ ID NO: 2148912 - RNA, 19 nt, Artificial Sequence
  Description of Artificial Sequence: Synthetic oligonucleotide
  Sense strand starting at position 3926 of SEQ ID NO: 1882806
uggcaucaucacugcaaca

SEQ ID NO: 2148913 - RNA, 19 nt, Artificial Sequence
  Description of Artificial Sequence: Synthetic oligonucleotide
  Antisense strand to SEQ ID NO: 2148912
uguugcagugaugaugcca

SEQ ID NO: 2148914 - RNA, 19 nt, Artificial Sequence
  Description of Artificial Sequence: Synthetic oligonucleotide
  Sense strand starting at position 437 of SEQ ID NO: 1882807
gugguuuguuuguugagac

SEQ ID NO: 2148915 - RNA, 19 nt, Artificial Sequence
  Description of Artificial Sequence: Synthetic oligonucleotide
  Antisense strand to SEQ ID NO: 2148914
gucucaacaaacaaaccac

SEQ ID NO: 2148916 - RNA, 19 nt, Artificial Sequence
  Description of Artificial Sequence: Synthetic oligonucleotide
  Sense strand starting at position 2273 of SEQ ID NO: 1882807
ggcuaugagcuuuggcaac

SEQ ID NO: 2148917 - RNA, 19 nt, Artificial Sequence
  Description of Artificial Sequence: Synthetic oligonucleotide
  Antisense strand to SEQ ID NO: 2148916
guugccaaagcucauagcc

SEQ ID NO: 2148918 - RNA, 19 nt, Artificial Sequence
  Description of Artificial Sequence: Synthetic oligonucleotide
  Sense strand starting at position 290 of SEQ ID NO: 1882808
gugccucuugaacacagau

SEQ ID NO: 2148919 - RNA, 19 nt, Artificial Sequence
  Description of Artificial Sequence: Synthetic oligonucleotide
  Antisense strand to SEQ ID NO: 2148918
aucuguguucaagaggcac

SEQ ID NO: 2148920 - RNA, 19 nt, Artificial Sequence
  Description of Artificial Sequence: Synthetic oligonucleotide
  Sense strand starting at position 326 of SEQ ID NO: 1882808
ucaucuuuaaggugacgga

SEQ ID NO: 2148921 - RNA, 19 nt, Artificial Sequence
  Description of Artificial Sequence: Synthetic oligonucleotide
  Antisense strand to SEQ ID NO: 2148920
uccgucaccuuaaagauga

SEQ ID NO: 2148922 - RNA, 19 nt, Artificial Sequence
  Description of Artificial Sequence: Synthetic oligonucleotide
  Sense strand starting at position 431 of SEQ ID NO: 1882808
agaguagaaugagaauauu

SEQ ID NO: 2148923 - RNA, 19 nt, Artificial Sequence
  Description of Artificial Sequence: Synthetic oligonucleotide
  Antisense strand to SEQ ID NO: 2148922
aauauucucauucuacucu

SEQ ID NO: 2148924 - RNA, 19 nt, Artificial Sequence
  Description of Artificial Sequence: Synthetic oligonucleotide
  Sense strand starting at position 594 of SEQ ID NO: 1882808
gcugaugagcccgugugua

SEQ ID NO: 2148925 - RNA, 19 nt, Artificial Sequence
  Description of Artificial Sequence: Synthetic oligonucleotide
  Antisense strand to SEQ ID NO: 2148924
uacacacgggcucaucagc

SEQ ID NO: 2148926 - RNA, 19 nt, Artificial Sequence
  Description of Artificial Sequence: Synthetic oligonucleotide
  Sense strand starting at position 606 of SEQ ID NO: 1882808
guguguaauugauccugaa

SEQ ID NO: 2148927 - RNA, 19 nt, Artificial Sequence
  Description of Artificial Sequence: Synthetic oligonucleotide
  Antisense strand to SEQ ID NO: 2148926
uucaggaucaauuacacac

SEQ ID NO: 2148928 - RNA, 19 nt, Artificial Sequence
  Description of Artificial Sequence: Synthetic oligonucleotide
  Sense strand starting at position 719 of SEQ ID NO: 1882808
agaaaugaagccuguugga

SEQ ID NO: 2148929 - RNA, 19 nt, Artificial Sequence
  Description of Artificial Sequence: Synthetic oligonucleotide
  Antisense strand to SEQ ID NO: 2148928
uccaacaggcuucauuucu

SEQ ID NO: 2148930 - RNA, 19 nt, Artificial Sequence
  Description of Artificial Sequence: Synthetic oligonucleotide
  Sense strand starting at position 874 of SEQ ID NO: 1882808
aucaauuauuaggaagcua

SEQ ID NO: 2148931 - RNA, 19 nt, Artificial Sequence
  Description of Artificial Sequence: Synthetic oligonucleotide
  Antisense strand to SEQ ID NO: 2148930
uagcuuccuaauaauugau

SEQ ID NO: 2148932 - RNA, 19 nt, Artificial Sequence
  Description of Artificial Sequence: Synthetic oligonucleotide
  Sense strand starting at position 1051 of SEQ ID NO: 1882808
agugcucuauaccuugaaa

SEQ ID NO: 2148933 - RNA, 19 nt, Artificial Sequence
  Description of Artificial Sequence: Synthetic oligonucleotide
  Antisense strand to SEQ ID NO: 2148932
uuucaagguauagagcacu

SEQ ID NO: 2148934 - RNA, 19 nt, Artificial Sequence
  Description of Artificial Sequence: Synthetic oligonucleotide
  Sense strand starting at position 1053 of SEQ ID NO: 1882808
ugcucuauaccuugaaagu

SEQ ID NO: 2148935 - RNA, 19 nt, Artificial Sequence
  Description of Artificial Sequence: Synthetic oligonucleotide
  Antisense strand to SEQ ID NO: 2148934
acuuucaagguauagagca

SEQ ID NO: 2148936 - RNA, 19 nt, Artificial Sequence
  Description of Artificial Sequence: Synthetic oligonucleotide
  Sense strand starting at position 1054 of SEQ ID NO: 1882808
gcucuauaccuugaaaguc

SEQ ID NO: 2148937 - RNA, 19 nt, Artificial Sequence
  Description of Artificial Sequence: Synthetic oligonucleotide
  Antisense strand to SEQ ID NO: 2148936
gacuuucaagguauagagc

SEQ ID NO: 2148938 - RNA, 19 nt, Artificial Sequence
  Description of Artificial Sequence: Synthetic oligonucleotide
  Sense strand starting at position 1064 of SEQ ID NO: 1882808
uugaaagucgcucacacaa

SEQ ID NO: 2148939 - RNA, 19 nt, Artificial Sequence
  Description of Artificial Sequence: Synthetic oligonucleotide
  Antisense strand to SEQ ID NO: 2148938
uugugugagcgacuuucaa

SEQ ID NO: 2148940 - RNA, 19 nt, Artificial Sequence
  Description of Artificial Sequence: Synthetic oligonucleotide
  Sense strand starting at position 1093 of SEQ ID NO: 1882808
ccaccuguuccugagaauc

SEQ ID NO: 2148941 - RNA, 19 nt, Artificial Sequence
  Description of Artificial Sequence: Synthetic oligonucleotide
  Antisense strand to SEQ ID NO: 2148940
gauucucaggaacaggugg

SEQ ID NO: 2148942 - RNA, 19 nt, Artificial Sequence
  Description of Artificial Sequence: Synthetic oligonucleotide
  Sense strand starting at position 1104 of SEQ ID NO: 1882808
ugagaaucagguugccauu

SEQ ID NO: 2148943 - RNA, 19 nt, Artificial Sequence
  Description of Artificial Sequence: Synthetic oligonucleotide
  Antisense strand to SEQ ID NO: 2148942
aauggcaaccugauucuca

SEQ ID NO: 2148944 - RNA, 19 nt, Artificial Sequence
  Description of Artificial Sequence: Synthetic oligonucleotide
  Sense strand starting at position 1117 of SEQ ID NO: 1882808
gccauugugucuuugagac

SEQ ID NO: 2148945 - RNA, 19 nt, Artificial Sequence
  Description of Artificial Sequence: Synthetic oligonucleotide
  Antisense strand to SEQ ID NO: 2148944
gucucaaagacacaauggc

SEQ ID NO: 2148946 - RNA, 19 nt, Artificial Sequence
  Description of Artificial Sequence: Synthetic oligonucleotide
  Sense strand starting at position 1272 of SEQ ID NO: 1882808
acgccugggaugugagauu

SEQ ID NO: 2148947 - RNA, 19 nt, Artificial Sequence
  Description of Artificial Sequence: Synthetic oligonucleotide
  Antisense strand to SEQ ID NO: 2148946
aaucucacaucccaggcgu

SEQ ID NO: 2148948 - RNA, 19 nt, Artificial Sequence
  Description of Artificial Sequence: Synthetic oligonucleotide
  Sense strand starting at position 1593 of SEQ ID NO: 1882808
aggcgugauguccaggaaa

SEQ ID NO: 2148949 - RNA, 19 nt, Artificial Sequence
  Description of Artificial Sequence: Synthetic oligonucleotide
  Antisense strand to SEQ ID NO: 2148948
uuuccuggacaucacgccu

SEQ ID NO: 2148950 - RNA, 19 nt, Artificial Sequence
  Description of Artificial Sequence: Synthetic oligonucleotide
  Sense strand starting at position 1595 of SEQ ID NO: 1882808
gcgugauguccaggaaaga

SEQ ID NO: 2148951 - RNA, 19 nt, Artificial Sequence
  Description of Artificial Sequence: Synthetic oligonucleotide
  Antisense strand to SEQ ID NO: 2148950
ucuuuccuggacaucacgc

SEQ ID NO: 2148952 - RNA, 19 nt, Artificial Sequence
  Description of Artificial Sequence: Synthetic oligonucleotide
  Sense strand starting at position 1596 of SEQ ID NO: 1882808
cgugauguccaggaaagac

SEQ ID NO: 2148953 - RNA, 19 nt, Artificial Sequence
  Description of Artificial Sequence: Synthetic oligonucleotide
  Antisense strand to SEQ ID NO: 2148952
gucuuuccuggacaucacg

SEQ ID NO: 2148954 - RNA, 19 nt, Artificial Sequence
  Description of Artificial Sequence: Synthetic oligonucleotide
  Sense strand starting at position 2369 of SEQ ID NO: 1882808
gcuugucuuaucguguaau

SEQ ID NO: 2148955 - RNA, 19 nt, Artificial Sequence
  Description of Artificial Sequence: Synthetic oligonucleotide
  Antisense strand to SEQ ID NO: 2148954
auuacacgauaagacaagc

SEQ ID NO: 2148956 - RNA, 19 nt, Artificial Sequence
  Description of Artificial Sequence: Synthetic oligonucleotide
  Sense strand starting at position 2372 of SEQ ID NO: 1882808
ugucuuaucguguaauuau

SEQ ID NO: 2148957 - RNA, 19 nt, Artificial Sequence
  Description of Artificial Sequence: Synthetic oligonucleotide
  Antisense strand to SEQ ID NO: 2148956
auaauuacacgauaagaca

SEQ ID NO: 2148958 - RNA, 19 nt, Artificial Sequence
  Description of Artificial Sequence: Synthetic oligonucleotide
  Sense strand starting at position 2379 of SEQ ID NO: 1882808
ucguguaauuaugucacua

SEQ ID NO: 2148959 - RNA, 19 nt, Artificial Sequence
  Description of Artificial Sequence: Synthetic oligonucleotide
  Antisense strand to SEQ ID NO: 2148958
uagugacauaauuacacga

SEQ ID NO: 2148960 - RNA, 19 nt, Artificial Sequence
  Description of Artificial Sequence: Synthetic oligonucleotide
  Sense strand starting at position 2426 of SEQ ID NO: 1882808
ucgucauugccagaaguuu

SEQ ID NO: 2148961 - RNA, 19 nt, Artificial Sequence
  Description of Artificial Sequence: Synthetic oligonucleotide
  Antisense strand to SEQ ID NO: 2148960
aaacuucuggcaaugacga

SEQ ID NO: 2148962 - RNA, 19 nt, Artificial Sequence
  Description of Artificial Sequence: Synthetic oligonucleotide
  Sense strand starting at position 2649 of SEQ ID NO: 1882808
gggcuaaucgccagguguc

SEQ ID NO: 2148963 - RNA, 19 nt, Artificial Sequence
  Description of Artificial Sequence: Synthetic oligonucleotide
  Antisense strand to SEQ ID NO: 2148962
gacaccuggcgauuagccc

SEQ ID NO: 2148964 - RNA, 19 nt, Artificial Sequence
  Description of Artificial Sequence: Synthetic oligonucleotide
  Sense strand starting at position 2665 of SEQ ID NO: 1882808
gucugacuguucuccgacu

SEQ ID NO: 2148965 - RNA, 19 nt, Artificial Sequence
  Description of Artificial Sequence: Synthetic oligonucleotide
  Antisense strand to SEQ ID NO: 2148964
agucggagaacagucagac

SEQ ID NO: 2148966 - RNA, 19 nt, Artificial Sequence
  Description of Artificial Sequence: Synthetic oligonucleotide
  Sense strand starting at position 2729 of SEQ ID NO: 1882808
guccguucgcugccagaaa

SEQ ID NO: 2148967 - RNA, 19 nt, Artificial Sequence
  Description of Artificial Sequence: Synthetic oligonucleotide
  Antisense strand to SEQ ID NO: 2148966
uuucuggcagcgaacggac

SEQ ID NO: 2148968 - RNA, 19 nt, Artificial Sequence
  Description of Artificial Sequence: Synthetic oligonucleotide
  Sense strand starting at position 2737 of SEQ ID NO: 1882808
gcugccagaaauggauaua

SEQ ID NO: 2148969 - RNA, 19 nt, Artificial Sequence
  Description of Artificial Sequence: Synthetic oligonucleotide
  Antisense strand to SEQ ID NO: 2148968
uauauccauuucuggcagc

SEQ ID NO: 2148970 - RNA, 19 nt, Artificial Sequence
  Description of Artificial Sequence: Synthetic oligonucleotide
  Sense strand starting at position 2751 of SEQ ID NO: 1882808
auauaugcguucccugaua

SEQ ID NO: 2148971 - RNA, 19 nt, Artificial Sequence
  Description of Artificial Sequence: Synthetic oligonucleotide
  Antisense strand to SEQ ID NO: 2148970
uaucagggaacgcauauau

SEQ ID NO: 2148972 - RNA, 19 nt, Artificial Sequence
  Description of Artificial Sequence: Synthetic oligonucleotide
  Sense strand starting at position 2753 of SEQ ID NO: 1882808
auaugcguucccugauaac

SEQ ID NO: 2148973 - RNA, 19 nt, Artificial Sequence
  Description of Artificial Sequence: Synthetic oligonucleotide
  Antisense strand to SEQ ID NO: 2148972
guuaucagggaacgcauau

SEQ ID NO: 2148974 - RNA, 19 nt, Artificial Sequence
  Description of Artificial Sequence: Synthetic oligonucleotide
  Sense strand starting at position 3161 of SEQ ID NO: 1882808
uggugaggucaugaacagu

SEQ ID NO: 2148975 - RNA, 19 nt, Artificial Sequence
  Description of Artificial Sequence: Synthetic oligonucleotide
  Antisense strand to SEQ ID NO: 2148974
acuguucaugaccucacca

SEQ ID NO: 2148976 - RNA, 19 nt, Artificial Sequence
  Description of Artificial Sequence: Synthetic oligonucleotide
  Sense strand starting at position 3183 of SEQ ID NO: 1882808
ugcguuucugcugugaaua

SEQ ID NO: 2148977 - RNA, 19 nt, Artificial Sequence
  Description of Artificial Sequence: Synthetic oligonucleotide
  Antisense strand to SEQ ID NO: 2148976
uauucacagcagaaacgca

SEQ ID NO: 2148978 - RNA, 19 nt, Artificial Sequence
  Description of Artificial Sequence: Synthetic oligonucleotide
  Sense strand starting at position 3246 of SEQ ID NO: 1882808
uggaaccacguuuaauaau

SEQ ID NO: 2148979 - RNA, 19 nt, Artificial Sequence
  Description of Artificial Sequence: Synthetic oligonucleotide
  Antisense strand to SEQ ID NO: 2148978
auuauuaaacgugguucca

SEQ ID NO: 2148980 - RNA, 19 nt, Artificial Sequence
  Description of Artificial Sequence: Synthetic oligonucleotide
  Sense strand starting at position 3657 of SEQ ID NO: 1882808
acgacuacacgcuaaugaa

SEQ ID NO: 2148981 - RNA, 19 nt, Artificial Sequence
  Description of Artificial Sequence: Synthetic oligonucleotide
  Antisense strand to SEQ ID NO: 2148980
uucauuagcguguagucgu

SEQ ID NO: 2148982 - RNA, 19 nt, Artificial Sequence
  Description of Artificial Sequence: Synthetic oligonucleotide
  Sense strand starting at position 3801 of SEQ ID NO: 1882808
aacguaagacacuggaaau

SEQ ID NO: 2148983 - RNA, 19 nt, Artificial Sequence
  Description of Artificial Sequence: Synthetic oligonucleotide
  Antisense strand to SEQ ID NO: 2148982
auuuccagugucuuacguu

SEQ ID NO: 2148984 - RNA, 19 nt, Artificial Sequence
  Description of Artificial Sequence: Synthetic oligonucleotide
  Sense strand starting at position 3802 of SEQ ID NO: 1882808
acguaagacacuggaaauu

SEQ ID NO: 2148985 - RNA, 19 nt, Artificial Sequence
  Description of Artificial Sequence: Synthetic oligonucleotide
  Antisense strand to SEQ ID NO: 2148984
aauuuccagugucuuacgu

SEQ ID NO: 2148986 - RNA, 19 nt, Artificial Sequence
  Description of Artificial Sequence: Synthetic oligonucleotide
  Sense strand starting at position 3830 of SEQ ID NO: 1882808
gcuggaaagucauuggccu

SEQ ID NO: 2148987 - RNA, 19 nt, Artificial Sequence
  Description of Artificial Sequence: Synthetic oligonucleotide
  Antisense strand to SEQ ID NO: 2148986
aggccaaugacuuuccagc

SEQ ID NO: 2148988 - RNA, 19 nt, Artificial Sequence
  Description of Artificial Sequence: Synthetic oligonucleotide
  Sense strand starting at position 3831 of SEQ ID NO: 1882808
cuggaaagucauuggccuu

SEQ ID NO: 2148989 - RNA, 19 nt, Artificial Sequence
  Description of Artificial Sequence: Synthetic oligonucleotide
  Antisense strand to SEQ ID NO: 2148988
aaggccaaugacuuuccag

SEQ ID NO: 2148990 - RNA, 19 nt, Artificial Sequence
  Description of Artificial Sequence: Synthetic oligonucleotide
  Sense strand starting at position 3832 of SEQ ID NO: 1882808
uggaaagucauuggccuuu

SEQ ID NO: 2148991 - RNA, 19 nt, Artificial Sequence
  Description of Artificial Sequence: Synthetic oligonucleotide
  Antisense strand to SEQ ID NO: 2148990
aaaggccaaugacuuucca

SEQ ID NO: 2148992 - RNA, 19 nt, Artificial Sequence
  Description of Artificial Sequence: Synthetic oligonucleotide
  Sense strand starting at position 3834 of SEQ ID NO: 1882808
gaaagucauuggccuuuaa

SEQ ID NO: 2148993 - RNA, 19 nt, Artificial Sequence
  Description of Artificial Sequence: Synthetic oligonucleotide
  Antisense strand to SEQ ID NO: 2148992
uuaaaggccaaugacuuuc

SEQ ID NO: 2148994 - RNA, 19 nt, Artificial Sequence
  Description of Artificial Sequence: Synthetic oligonucleotide
  Sense strand starting at position 3838 of SEQ ID NO: 1882808
gucauuggccuuuaauaac

SEQ ID NO: 2148995 - RNA, 19 nt, Artificial Sequence
  Description of Artificial Sequence: Synthetic oligonucleotide
  Antisense strand to SEQ ID NO: 2148994
guuauuaaaggccaaugac

SEQ ID NO: 2148996 - RNA, 19 nt, Artificial Sequence
  Description of Artificial Sequence: Synthetic oligonucleotide
  Sense strand starting at position 3930 of SEQ ID NO: 1882808
ucauucuucuaaguaguua

SEQ ID NO: 2148997 - RNA, 19 nt, Artificial Sequence
  Description of Artificial Sequence: Synthetic oligonucleotide
  Antisense strand to SEQ ID NO: 2148996
uaacuacuuagaagaauga

SEQ ID NO: 2148998 - RNA, 19 nt, Artificial Sequence
  Description of Artificial Sequence: Synthetic oligonucleotide
  Sense strand starting at position 8 of SEQ ID NO: 1882809
acaguuucucaggaggcaa

SEQ ID NO: 2148999 - RNA, 19 nt, Artificial Sequence
  Description of Artificial Sequence: Synthetic oligonucleotide
  Antisense strand to SEQ ID NO: 2148998
uugccuccugagaaacugu

SEQ ID NO: 2149000 - RNA, 19 nt, Artificial Sequence
  Description of Artificial Sequence: Synthetic oligonucleotide
  Sense strand starting at position 10 of SEQ ID NO: 1882809
aguuucucaggaggcaaua

SEQ ID NO: 2149001 - RNA, 19 nt, Artificial Sequence
  Description of Artificial Sequence: Synthetic oligonucleotide
  Antisense strand to SEQ ID NO: 2149000
uauugccuccugagaaacu

SEQ ID NO: 2149002 - RNA, 19 nt, Artificial Sequence
  Description of Artificial Sequence: Synthetic oligonucleotide
  Sense strand starting at position 46 of SEQ ID NO: 1882809
aucugaaauccacgucaag

SEQ ID NO: 2149003 - RNA, 19 nt, Artificial Sequence
  Description of Artificial Sequence: Synthetic oligonucleotide
  Antisense strand to SEQ ID NO: 2149002
cuugacguggauuucagau

SEQ ID NO: 2149004 - RNA, 19 nt, Artificial Sequence
  Description of Artificial Sequence: Synthetic oligonucleotide
  Sense strand starting at position 424 of SEQ ID NO: 1882809
gagaauugcccuugaggua

SEQ ID NO: 2149005 - RNA, 19 nt, Artificial Sequence
  Description of Artificial Sequence: Synthetic oligonucleotide
  Antisense strand to SEQ ID NO: 2149004
uaccucaagggcaauucuc

SEQ ID NO: 2149006 - RNA, 19 nt, Artificial Sequence
  Description of Artificial Sequence: Synthetic oligonucleotide
  Sense strand starting at position 429 of SEQ ID NO: 1882809
uugcccuugagguaguaaa

SEQ ID NO: 2149007 - RNA, 19 nt, Artificial Sequence
  Description of Artificial Sequence: Synthetic oligonucleotide
  Antisense strand to SEQ ID NO: 2149006
uuuacuaccucaagggcaa

SEQ ID NO: 2149008 - RNA, 19 nt, Artificial Sequence
  Description of Artificial Sequence: Synthetic oligonucleotide
  Sense strand starting at position 526 of SEQ ID NO: 1882809
gucucauaucucuacugca

SEQ ID NO: 2149009 - RNA, 19 nt, Artificial Sequence
  Description of Artificial Sequence: Synthetic oligonucleotide
  Antisense strand to SEQ ID NO: 2149008
ugcaguagagauaugagac

SEQ ID NO: 2149010 - RNA, 19 nt, Artificial Sequence
  Description of Artificial Sequence: Synthetic oligonucleotide
  Sense strand starting at position 734 of SEQ ID NO: 1882809
ccuuuauaccaucaguguu

SEQ ID NO: 2149011 - RNA, 19 nt, Artificial Sequence
  Description of Artificial Sequence: Synthetic oligonucleotide
  Antisense strand to SEQ ID NO: 2149010
aacacugaugguauaaagg

SEQ ID NO: 2149012 - RNA, 19 nt, Artificial Sequence
  Description of Artificial Sequence: Synthetic oligonucleotide
  Sense strand starting at position 1287 of SEQ ID NO: 1882809
cguuaacauuucuuaagca

SEQ ID NO: 2149013 - RNA, 19 nt, Artificial Sequence
  Description of Artificial Sequence: Synthetic oligonucleotide
  Antisense strand to SEQ ID NO: 2149012
ugcuuaagaaauguuaacg

SEQ ID NO: 2149014 - RNA, 19 nt, Artificial Sequence
  Description of Artificial Sequence: Synthetic oligonucleotide
  Sense strand starting at position 1339 of SEQ ID NO: 1882809
ugacaugaauuagcacauu

SEQ ID NO: 2149015 - RNA, 19 nt, Artificial Sequence
  Description of Artificial Sequence: Synthetic oligonucleotide
  Antisense strand to SEQ ID NO: 2149014
aaugugcuaauucauguca

SEQ ID NO: 2149016 - RNA, 19 nt, Artificial Sequence
  Description of Artificial Sequence: Synthetic oligonucleotide
  Sense strand starting at position 1390 of SEQ ID NO: 1882809
uacuuugauuaggcagaga

SEQ ID NO: 2149017 - RNA, 19 nt, Artificial Sequence
  Description of Artificial Sequence: Synthetic oligonucleotide
  Antisense strand to SEQ ID NO: 2149016
ucucugccuaaucaaagua

SEQ ID NO: 2149018 - RNA, 19 nt, Artificial Sequence
  Description of Artificial Sequence: Synthetic oligonucleotide
  Sense strand starting at position 1404 of SEQ ID NO: 1882809
agagaaagaugagaguaaa

SEQ ID NO: 2149019 - RNA, 19 nt, Artificial Sequence
  Description of Artificial Sequence: Synthetic oligonucleotide
  Antisense strand to SEQ ID NO: 2149018
uuuacucucaucuuucucu

SEQ ID NO: 2149020 - RNA, 19 nt, Artificial Sequence
  Description of Artificial Sequence: Synthetic oligonucleotide
  Sense strand starting at position 1505 of SEQ ID NO: 1882809
aggcgaugaucucuaaauu

SEQ ID NO: 2149021 - RNA, 19 nt, Artificial Sequence
  Description of Artificial Sequence: Synthetic oligonucleotide
  Antisense strand to SEQ ID NO: 2149020
aauuuagagaucaucgccu

SEQ ID NO: 2149022 - RNA, 19 nt, Artificial Sequence
  Description of Artificial Sequence: Synthetic oligonucleotide
  Sense strand starting at position 1506 of SEQ ID NO: 1882809
ggcgaugaucucuaaauuc

SEQ ID NO: 2149023 - RNA, 19 nt, Artificial Sequence
  Description of Artificial Sequence: Synthetic oligonucleotide
  Antisense strand to SEQ ID NO: 2149022
gaauuuagagaucaucgcc

SEQ ID NO: 2149024 - RNA, 19 nt, Artificial Sequence
  Description of Artificial Sequence: Synthetic oligonucleotide
  Sense strand starting at position 1554 of SEQ ID NO: 1882809
cagcguugagaugagaaau

SEQ ID NO: 2149025 - RNA, 19 nt, Artificial Sequence
  Description of Artificial Sequence: Synthetic oligonucleotide
  Antisense strand to SEQ ID NO: 2149024
auuucucaucucaacgcug

SEQ ID NO: 2149026 - RNA, 19 nt, Artificial Sequence
  Description of Artificial Sequence: Synthetic oligonucleotide
  Sense strand starting at position 1707 of SEQ ID NO: 1882809
ggcaauagaugguuguuua

SEQ ID NO: 2149027 - RNA, 19 nt, Artificial Sequence
  Description of Artificial Sequence: Synthetic oligonucleotide
  Antisense strand to SEQ ID NO: 2149026
uaaacaaccaucuauugcc

SEQ ID NO: 2149028 - RNA, 19 nt, Artificial Sequence
  Description of Artificial Sequence: Synthetic oligonucleotide
  Sense strand starting at position 2156 of SEQ ID NO: 1882809
aaagaugucuaacuugaug

SEQ ID NO: 2149029 - RNA, 19 nt, Artificial Sequence
  Description of Artificial Sequence: Synthetic oligonucleotide
  Antisense strand to SEQ ID NO: 2149028
caucaaguuagacaucuuu

SEQ ID NO: 2149030 - RNA, 19 nt, Artificial Sequence
  Description of Artificial Sequence: Synthetic oligonucleotide
  Sense strand starting at position 2158 of SEQ ID NO: 1882809
agaugucuaacuugauggu

SEQ ID NO: 2149031 - RNA, 19 nt, Artificial Sequence
  Description of Artificial Sequence: Synthetic oligonucleotide
  Antisense strand to SEQ ID NO: 2149030
accaucaaguuagacaucu

SEQ ID NO: 2149032 - RNA, 19 nt, Artificial Sequence
  Description of Artificial Sequence: Synthetic oligonucleotide
  Sense strand starting at position 2174 of SEQ ID NO: 1882809
gguccuguuggaggugaua

SEQ ID NO: 2149033 - RNA, 19 nt, Artificial Sequence
  Description of Artificial Sequence: Synthetic oligonucleotide
  Antisense strand to SEQ ID NO: 2149032
uaucaccuccaacaggacc

SEQ ID NO: 2149034 - RNA, 19 nt, Artificial Sequence
  Description of Artificial Sequence: Synthetic oligonucleotide
  Sense strand starting at position 2230 of SEQ ID NO: 1882809
ggaccagugcuugccguua

SEQ ID NO: 2149035 - RNA, 19 nt, Artificial Sequence
  Description of Artificial Sequence: Synthetic oligonucleotide
  Antisense strand to SEQ ID NO: 2149034
uaacggcaagcacuggucc

SEQ ID NO: 2149036 - RNA, 19 nt, Artificial Sequence
  Description of Artificial Sequence: Synthetic oligonucleotide
  Sense strand starting at position 2234 of SEQ ID NO: 1882809
cagugcuugccguuauucu

SEQ ID NO: 2149037 - RNA, 19 nt, Artificial Sequence
  Description of Artificial Sequence: Synthetic oligonucleotide
  Antisense strand to SEQ ID NO: 2149036
agaauaacggcaagcacug

SEQ ID NO: 2149038 - RNA, 19 nt, Artificial Sequence
  Description of Artificial Sequence: Synthetic oligonucleotide
  Sense strand starting at position 2406 of SEQ ID NO: 1882809
ucauccugugacuauguua

SEQ ID NO: 2149039 - RNA, 19 nt, Artificial Sequence
  Description of Artificial Sequence: Synthetic oligonucleotide
  Antisense strand to SEQ ID NO: 2149038
uaacauagucacaggauga

SEQ ID NO: 2149040 - RNA, 19 nt, Artificial Sequence
  Description of Artificial Sequence: Synthetic oligonucleotide
  Sense strand starting at position 2409 of SEQ ID NO: 1882809
uccugugacuauguuaaua

SEQ ID NO: 2149041 - RNA, 19 nt, Artificial Sequence
  Description of Artificial Sequence: Synthetic oligonucleotide
  Antisense strand to SEQ ID NO: 2149040
uauuaacauagucacagga

SEQ ID NO: 2149042 - RNA, 19 nt, Artificial Sequence
  Description of Artificial Sequence: Synthetic oligonucleotide
  Sense strand starting at position 2539 of SEQ ID NO: 1882809
augucuuaacaugguacau

SEQ ID NO: 2149043 - RNA, 19 nt, Artificial Sequence
  Description of Artificial Sequence: Synthetic oligonucleotide
  Antisense strand to SEQ ID NO: 2149042
auguaccauguuaagacau

SEQ ID NO: 2149044 - RNA, 19 nt, Artificial Sequence
  Description of Artificial Sequence: Synthetic oligonucleotide
  Sense strand starting at position 2563 of SEQ ID NO: 1882809
ucagacuuucuggaacugu

SEQ ID NO: 2149045 - RNA, 19 nt, Artificial Sequence
  Description of Artificial Sequence: Synthetic oligonucleotide
  Antisense strand to SEQ ID NO: 2149044
acaguuccagaaagucuga

SEQ ID NO: 2149046 - RNA, 19 nt, Artificial Sequence
  Description of Artificial Sequence: Synthetic oligonucleotide
  Sense strand starting at position 2962 of SEQ ID NO: 1882809
ucucacugugguuggagaa

SEQ ID NO: 2149047 - RNA, 19 nt, Artificial Sequence
  Description of Artificial Sequence: Synthetic oligonucleotide
  Antisense strand to SEQ ID NO: 2149046
uucuccaaccacagugaga

SEQ ID NO: 2149048 - RNA, 19 nt, Artificial Sequence
  Description of Artificial Sequence: Synthetic oligonucleotide
  Sense strand starting at position 2963 of SEQ ID NO: 1882809
cucacugugguuggagaaa

SEQ ID NO: 2149049 - RNA, 19 nt, Artificial Sequence
  Description of Artificial Sequence: Synthetic oligonucleotide
  Antisense strand to SEQ ID NO: 2149048
uuucuccaaccacagugag

SEQ ID NO: 2149050 - RNA, 19 nt, Artificial Sequence
  Description of Artificial Sequence: Synthetic oligonucleotide
  Sense strand starting at position 3232 of SEQ ID NO: 1882809
cccauugcucaagauguca

SEQ ID NO: 2149051 - RNA, 19 nt, Artificial Sequence
  Description of Artificial Sequence: Synthetic oligonucleotide
  Antisense strand to SEQ ID NO: 2149050
ugacaucuugagcaauggg

SEQ ID NO: 2149052 - RNA, 19 nt, Artificial Sequence
  Description of Artificial Sequence: Synthetic oligonucleotide
  Sense strand starting at position 3368 of SEQ ID NO: 1882809
cccagacuucuuuagagcu

SEQ ID NO: 2149053 - RNA, 19 nt, Artificial Sequence
  Description of Artificial Sequence: Synthetic oligonucleotide
  Antisense strand to SEQ ID NO: 2149052
agcucuaaagaagucuggg

SEQ ID NO: 2149054 - RNA, 19 nt, Artificial Sequence
  Description of Artificial Sequence: Synthetic oligonucleotide
  Sense strand starting at position 3437 of SEQ ID NO: 1882809
cuaucaccuuugguguaaa

SEQ ID NO: 2149055 - RNA, 19 nt, Artificial Sequence
  Description of Artificial Sequence: Synthetic oligonucleotide
  Antisense strand to SEQ ID NO: 2149054
uuuacaccaaaggugauag

SEQ ID NO: 2149056 - RNA, 19 nt, Artificial Sequence
  Description of Artificial Sequence: Synthetic oligonucleotide
  Sense strand starting at position 3590 of SEQ ID NO: 1882809
ggcagacuccaauacuugu

SEQ ID NO: 2149057 - RNA, 19 nt, Artificial Sequence
  Description of Artificial Sequence: Synthetic oligonucleotide
  Antisense strand to SEQ ID NO: 2149056
acaaguauuggagucugcc

SEQ ID NO: 2149058 - RNA, 19 nt, Artificial Sequence
  Description of Artificial Sequence: Synthetic oligonucleotide
  Sense strand starting at position 3638 of SEQ ID NO: 1882809
gaucacaauugcuugugaa

SEQ ID NO: 2149059 - RNA, 19 nt, Artificial Sequence
  Description of Artificial Sequence: Synthetic oligonucleotide
  Antisense strand to SEQ ID NO: 2149058
uucacaagcaauugugauc

SEQ ID NO: 2149060 - RNA, 19 nt, Artificial Sequence
  Description of Artificial Sequence: Synthetic oligonucleotide
  Sense strand starting at position 3639 of SEQ ID NO: 1882809
aucacaauugcuugugaac

SEQ ID NO: 2149061 - RNA, 19 nt, Artificial Sequence
  Description of Artificial Sequence: Synthetic oligonucleotide
  Antisense strand to SEQ ID NO: 2149060
guucacaagcaauugugau

SEQ ID NO: 2149062 - RNA, 19 nt, Artificial Sequence
  Description of Artificial Sequence: Synthetic oligonucleotide
  Sense strand starting at position 3645 of SEQ ID NO: 1882809
auugcuugugaacaggaau

SEQ ID NO: 2149063 - RNA, 19 nt, Artificial Sequence
  Description of Artificial Sequence: Synthetic oligonucleotide
  Antisense strand to SEQ ID NO: 2149062
auuccuguucacaagcaau

SEQ ID NO: 2149064 - RNA, 19 nt, Artificial Sequence
  Description of Artificial Sequence: Synthetic oligonucleotide
  Sense strand starting at position 3648 of SEQ ID NO: 1882809
gcuugugaacaggaaugua

SEQ ID NO: 2149065 - RNA, 19 nt, Artificial Sequence
  Description of Artificial Sequence: Synthetic oligonucleotide
  Antisense strand to SEQ ID NO: 2149064
uacauuccuguucacaagc

SEQ ID NO: 2149066 - RNA, 19 nt, Artificial Sequence
  Description of Artificial Sequence: Synthetic oligonucleotide
  Sense strand starting at position 3662 of SEQ ID NO: 1882809
auguaaacauuccugcaga

SEQ ID NO: 2149067 - RNA, 19 nt, Artificial Sequence
  Description of Artificial Sequence: Synthetic oligonucleotide
  Antisense strand to SEQ ID NO: 2149066
ucugcaggaauguuuacau

SEQ ID NO: 2149068 - RNA, 19 nt, Artificial Sequence
  Description of Artificial Sequence: Synthetic oligonucleotide
  Sense strand starting at position 3684 of SEQ ID NO: 1882809
uggagaaguuagguuuaau

SEQ ID NO: 2149069 - RNA, 19 nt, Artificial Sequence
  Description of Artificial Sequence: Synthetic oligonucleotide
  Antisense strand to SEQ ID NO: 2149068
auuaaaccuaacuucucca

SEQ ID NO: 2149070 - RNA, 19 nt, Artificial Sequence
  Description of Artificial Sequence: Synthetic oligonucleotide
  Sense strand starting at position 3687 of SEQ ID NO: 1882809
agaaguuagguuuaauguu

SEQ ID NO: 2149071 - RNA, 19 nt, Artificial Sequence
  Description of Artificial Sequence: Synthetic oligonucleotide
  Antisense strand to SEQ ID NO: 2149070
aacauuaaaccuaacuucu

SEQ ID NO: 2149072 - RNA, 19 nt, Artificial Sequence
  Description of Artificial Sequence: Synthetic oligonucleotide
  Sense strand starting at position 3694 of SEQ ID NO: 1882809
agguuuaauguuggacaua

SEQ ID NO: 2149073 - RNA, 19 nt, Artificial Sequence
  Description of Artificial Sequence: Synthetic oligonucleotide
  Antisense strand to SEQ ID NO: 2149072
uauguccaacauuaaaccu

SEQ ID NO: 2149074 - RNA, 19 nt, Artificial Sequence
  Description of Artificial Sequence: Synthetic oligonucleotide
  Sense strand starting at position 3703 of SEQ ID NO: 1882809
guuggacauagauggcaaa

SEQ ID NO: 2149075 - RNA, 19 nt, Artificial Sequence
  Description of Artificial Sequence: Synthetic oligonucleotide
  Antisense strand to SEQ ID NO: 2149074
uuugccaucuauguccaac

SEQ ID NO: 2149076 - RNA, 19 nt, Artificial Sequence
  Description of Artificial Sequence: Synthetic oligonucleotide
  Sense strand starting at position 3738 of SEQ ID NO: 1882809
acauuagagucucuuacac

SEQ ID NO: 2149077 - RNA, 19 nt, Artificial Sequence
  Description of Artificial Sequence: Synthetic oligonucleotide
  Antisense strand to SEQ ID NO: 2149076
guguaagagacucuaaugu

SEQ ID NO: 2149078 - RNA, 19 nt, Artificial Sequence
  Description of Artificial Sequence: Synthetic oligonucleotide
  Sense strand starting at position 52 of SEQ ID NO: 1882810
agccuaagcuucuagaucu

SEQ ID NO: 2149079 - RNA, 19 nt, Artificial Sequence
  Description of Artificial Sequence: Synthetic oligonucleotide
  Antisense strand to SEQ ID NO: 2149078
agaucuagaagcuuaggcu

SEQ ID NO: 2149080 - RNA, 19 nt, Artificial Sequence
  Description of Artificial Sequence: Synthetic oligonucleotide
  Sense strand starting at position 638 of SEQ ID NO: 1882810
ggcuaacuucuagagagua

SEQ ID NO: 2149081 - RNA, 19 nt, Artificial Sequence
  Description of Artificial Sequence: Synthetic oligonucleotide
  Antisense strand to SEQ ID NO: 2149080
uacucucuagaaguuagcc

SEQ ID NO: 2149082 - RNA, 19 nt, Artificial Sequence
  Description of Artificial Sequence: Synthetic oligonucleotide
  Sense strand starting at position 706 of SEQ ID NO: 1882810
cuuaauccugcagauauga

SEQ ID NO: 2149083 - RNA, 19 nt, Artificial Sequence
  Description of Artificial Sequence: Synthetic oligonucleotide
  Antisense strand to SEQ ID NO: 2149082
ucauaucugcaggauuaag

SEQ ID NO: 2149084 - RNA, 19 nt, Artificial Sequence
  Description of Artificial Sequence: Synthetic oligonucleotide
  Sense strand starting at position 846 of SEQ ID NO: 1882810
caguuaaagcugcgcgaua

SEQ ID NO: 2149085 - RNA, 19 nt, Artificial Sequence
  Description of Artificial Sequence: Synthetic oligonucleotide
  Antisense strand to SEQ ID NO: 2149084
uaucgcgcagcuuuaacug

SEQ ID NO: 2149086 - RNA, 19 nt, Artificial Sequence
  Description of Artificial Sequence: Synthetic oligonucleotide
  Sense strand starting at position 859 of SEQ ID NO: 1882810
gcgauagcugacgccuaua

SEQ ID NO: 2149087 - RNA, 19 nt, Artificial Sequence
  Description of Artificial Sequence: Synthetic oligonucleotide
  Antisense strand to SEQ ID NO: 2149086
uauaggcgucagcuaucgc

SEQ ID NO: 2149088 - RNA, 19 nt, Artificial Sequence
  Description of Artificial Sequence: Synthetic oligonucleotide
  Sense strand starting at position 862 of SEQ ID NO: 1882810
auagcugacgccuauaauc

SEQ ID NO: 2149089 - RNA, 19 nt, Artificial Sequence
  Description of Artificial Sequence: Synthetic oligonucleotide
  Antisense strand to SEQ ID NO: 2149088
gauuauaggcgucagcuau

SEQ ID NO: 2149090 - RNA, 19 nt, Artificial Sequence
  Description of Artificial Sequence: Synthetic oligonucleotide
  Sense strand starting at position 1221 of SEQ ID NO: 1882810
ccuaaacugccgugaugga

SEQ ID NO: 2149091 - RNA, 19 nt, Artificial Sequence
  Description of Artificial Sequence: Synthetic oligonucleotide
  Antisense strand to SEQ ID NO: 2149090
uccaucacggcaguuuagg

SEQ ID NO: 2149092 - RNA, 19 nt, Artificial Sequence
  Description of Artificial Sequence: Synthetic oligonucleotide
  Sense strand starting at position 1463 of SEQ ID NO: 1882810
gcgcguuccagagagguca

SEQ ID NO: 2149093 - RNA, 19 nt, Artificial Sequence
  Description of Artificial Sequence: Synthetic oligonucleotide
  Antisense strand to SEQ ID NO: 2149092
ugaccucucuggaacgcgc

SEQ ID NO: 2149094 - RNA, 19 nt, Artificial Sequence
  Description of Artificial Sequence: Synthetic oligonucleotide
  Sense strand starting at position 1464 of SEQ ID NO: 1882810
cgcguuccagagaggucau

SEQ ID NO: 2149095 - RNA, 19 nt, Artificial Sequence
  Description of Artificial Sequence: Synthetic oligonucleotide
  Antisense strand to SEQ ID NO: 2149094
augaccucucuggaacgcg

SEQ ID NO: 2149096 - RNA, 19 nt, Artificial Sequence
  Description of Artificial Sequence: Synthetic oligonucleotide
  Sense strand starting at position 1505 of SEQ ID NO: 1882810
aaauguugcuucggagcca

SEQ ID NO: 2149097 - RNA, 19 nt, Artificial Sequence
  Description of Artificial Sequence: Synthetic oligonucleotide
  Antisense strand to SEQ ID NO: 2149096
uggcuccgaagcaacauuu

SEQ ID NO: 2149098 - RNA, 19 nt, Artificial Sequence
  Description of Artificial Sequence: Synthetic oligonucleotide
  Sense strand starting at position 1583 of SEQ ID NO: 1882810
cgggaaaugcuccgcguca

SEQ ID NO: 2149099 - RNA, 19 nt, Artificial Sequence
  Description of Artificial Sequence: Synthetic oligonucleotide
  Antisense strand to SEQ ID NO: 2149098
ugacgcggagcauuucccg

SEQ ID NO: 2149100 - RNA, 19 nt, Artificial Sequence
  Description of Artificial Sequence: Synthetic oligonucleotide
  Sense strand starting at position 2066 of SEQ ID NO: 1882810
ggcucuucaccggaggaaa

SEQ ID NO: 2149101 - RNA, 19 nt, Artificial Sequence
  Description of Artificial Sequence: Synthetic oligonucleotide
  Antisense strand to SEQ ID NO: 2149100
uuuccuccggugaagagcc

SEQ ID NO: 2149102 - RNA, 19 nt, Artificial Sequence
  Description of Artificial Sequence: Synthetic oligonucleotide
  Sense strand starting at position 2078 of SEQ ID NO: 1882810
gaggaaaugugagccggau

SEQ ID NO: 2149103 - RNA, 19 nt, Artificial Sequence
  Description of Artificial Sequence: Synthetic oligonucleotide
  Antisense strand to SEQ ID NO: 2149102
auccggcucacauuuccuc

SEQ ID NO: 2149104 - RNA, 19 nt, Artificial Sequence
  Description of Artificial Sequence: Synthetic oligonucleotide
  Sense strand starting at position 2082 of SEQ ID NO: 1882810
aaaugugagccggauccaa

SEQ ID NO: 2149105 - RNA, 19 nt, Artificial Sequence
  Description of Artificial Sequence: Synthetic oligonucleotide
  Antisense strand to SEQ ID NO: 2149104
uuggauccggcucacauuu

SEQ ID NO: 2149106 - RNA, 19 nt, Artificial Sequence
  Description of Artificial Sequence: Synthetic oligonucleotide
  Sense strand starting at position 2126 of SEQ ID NO: 1882810
cgugacgucuaagagcaaa

SEQ ID NO: 2149107 - RNA, 19 nt, Artificial Sequence
  Description of Artificial Sequence: Synthetic oligonucleotide
  Antisense strand to SEQ ID NO: 2149106
uuugcucuuagacgucacg

SEQ ID NO: 2149108 - RNA, 19 nt, Artificial Sequence
  Description of Artificial Sequence: Synthetic oligonucleotide
  Sense strand starting at position 3045 of SEQ ID NO: 1882810
gcaauaaauuagccagugu

SEQ ID NO: 2149109 - RNA, 19 nt, Artificial Sequence
  Description of Artificial Sequence: Synthetic oligonucleotide
  Antisense strand to SEQ ID NO: 2149108
acacuggcuaauuuauugc

SEQ ID NO: 2149110 - RNA, 19 nt, Artificial Sequence
  Description of Artificial Sequence: Synthetic oligonucleotide
  Sense strand starting at position 3094 of SEQ ID NO: 1882810
gaauccuguugacgugauu

SEQ ID NO: 2149111 - RNA, 19 nt, Artificial Sequence
  Description of Artificial Sequence: Synthetic oligonucleotide
  Antisense strand to SEQ ID NO: 2149110
aaucacgucaacaggauuc

SEQ ID NO: 2149112 - RNA, 19 nt, Artificial Sequence
  Description of Artificial Sequence: Synthetic oligonucleotide
  Sense strand starting at position 3103 of SEQ ID NO: 1882810
ugacgugauucccauguaa

SEQ ID NO: 2149113 - RNA, 19 nt, Artificial Sequence
  Description of Artificial Sequence: Synthetic oligonucleotide
  Antisense strand to SEQ ID NO: 2149112
uuacaugggaaucacguca

SEQ ID NO: 2149114 - RNA, 19 nt, Artificial Sequence
  Description of Artificial Sequence: Synthetic oligonucleotide
  Sense strand starting at position 3114 of SEQ ID NO: 1882810
ccauguaaggaaugugaaa

SEQ ID NO: 2149115 - RNA, 19 nt, Artificial Sequence
  Description of Artificial Sequence: Synthetic oligonucleotide
  Antisense strand to SEQ ID NO: 2149114
uuucacauuccuuacaugg

SEQ ID NO: 2149116 - RNA, 19 nt, Artificial Sequence
  Description of Artificial Sequence: Synthetic oligonucleotide
  Sense strand starting at position 3167 of SEQ ID NO: 1882810
gaugccaucuauggcguaa

SEQ ID NO: 2149117 - RNA, 19 nt, Artificial Sequence
  Description of Artificial Sequence: Synthetic oligonucleotide
  Antisense strand to SEQ ID NO: 2149116
uuacgccauagauggcauc

SEQ ID NO: 2149118 - RNA, 19 nt, Artificial Sequence
  Description of Artificial Sequence: Synthetic oligonucleotide
  Sense strand starting at position 3262 of SEQ ID NO: 1882810
ugcuaauuaucgcugcugu

SEQ ID NO: 2149119 - RNA, 19 nt, Artificial Sequence
  Description of Artificial Sequence: Synthetic oligonucleotide
  Antisense strand to SEQ ID NO: 2149118
acagcagcgauaauuagca

SEQ ID NO: 2149120 - RNA, 19 nt, Artificial Sequence
  Description of Artificial Sequence: Synthetic oligonucleotide
  Sense strand starting at position 3264 of SEQ ID NO: 1882810
cuaauuaucgcugcugugu

SEQ ID NO: 2149121 - RNA, 19 nt, Artificial Sequence
  Description of Artificial Sequence: Synthetic oligonucleotide
  Antisense strand to SEQ ID NO: 2149120
acacagcagcgauaauuag

SEQ ID NO: 2149122 - RNA, 19 nt, Artificial Sequence
  Description of Artificial Sequence: Synthetic oligonucleotide
  Sense strand starting at position 3265 of SEQ ID NO: 1882810
uaauuaucgcugcuguguu

SEQ ID NO: 2149123 - RNA, 19 nt, Artificial Sequence
  Description of Artificial Sequence: Synthetic oligonucleotide
  Antisense strand to SEQ ID NO: 2149122
aacacagcagcgauaauua

SEQ ID NO: 2149124 - RNA, 19 nt, Artificial Sequence
  Description of Artificial Sequence: Synthetic oligonucleotide
  Sense strand starting at position 3330 of SEQ ID NO: 1882810
cgcuuuguggcccauacua

SEQ ID NO: 2149125 - RNA, 19 nt, Artificial Sequence
  Description of Artificial Sequence: Synthetic oligonucleotide
  Antisense strand to SEQ ID NO: 2149124
uaguaugggccacaaagcg

SEQ ID NO: 2149126 - RNA, 19 nt, Artificial Sequence
  Description of Artificial Sequence: Synthetic oligonucleotide
  Sense strand starting at position 3332 of SEQ ID NO: 1882810
cuuuguggcccauacuaga

SEQ ID NO: 2149127 - RNA, 19 nt, Artificial Sequence
  Description of Artificial Sequence: Synthetic oligonucleotide
  Antisense strand to SEQ ID NO: 2149126
ucuaguaugggccacaaag

SEQ ID NO: 2149128 - RNA, 19 nt, Artificial Sequence
  Description of Artificial Sequence: Synthetic oligonucleotide
  Sense strand starting at position 3510 of SEQ ID NO: 1882810
uucgaauucugaccucaac

SEQ ID NO: 2149129 - RNA, 19 nt, Artificial Sequence
  Description of Artificial Sequence: Synthetic oligonucleotide
  Antisense strand to SEQ ID NO: 2149128
guugaggucagaauucgaa

SEQ ID NO: 2149130 - RNA, 19 nt, Artificial Sequence
  Description of Artificial Sequence: Synthetic oligonucleotide
  Sense strand starting at position 3894 of SEQ ID NO: 1882810
ucucuuuguuucuuuguau

SEQ ID NO: 2149131 - RNA, 19 nt, Artificial Sequence
  Description of Artificial Sequence: Synthetic oligonucleotide
  Antisense strand to SEQ ID NO: 2149130
auacaaagaaacaaagaga

SEQ ID NO: 2149132 - RNA, 19 nt, Artificial Sequence
  Description of Artificial Sequence: Synthetic oligonucleotide
  Sense strand starting at position 3897 of SEQ ID NO: 1882810
cuuuguuucuuuguaucua

SEQ ID NO: 2149133 - RNA, 19 nt, Artificial Sequence
  Description of Artificial Sequence: Synthetic oligonucleotide
  Antisense strand to SEQ ID NO: 2149132
uagauacaaagaaacaaag

SEQ ID NO: 2149134 - RNA, 19 nt, Artificial Sequence
  Description of Artificial Sequence: Synthetic oligonucleotide
  Sense strand starting at position 3901 of SEQ ID NO: 1882810
guuucuuuguaucuaaagu

SEQ ID NO: 2149135 - RNA, 19 nt, Artificial Sequence
  Description of Artificial Sequence: Synthetic oligonucleotide
  Antisense strand to SEQ ID NO: 2149134
acuuuagauacaaagaaac

SEQ ID NO: 2149136 - RNA, 19 nt, Artificial Sequence
  Description of Artificial Sequence: Synthetic oligonucleotide
  Sense strand starting at position 3934 of SEQ ID NO: 1882810
caguauauggauggaucau

SEQ ID NO: 2149137 - RNA, 19 nt, Artificial Sequence
  Description of Artificial Sequence: Synthetic oligonucleotide
  Antisense strand to SEQ ID NO: 2149136
augauccauccauauacug

SEQ ID NO: 2149138 - RNA, 19 nt, Artificial Sequence
  Description of Artificial Sequence: Synthetic oligonucleotide
  Sense strand starting at position 3940 of SEQ ID NO: 1882810
auggauggaucauguugua

SEQ ID NO: 2149139 - RNA, 19 nt, Artificial Sequence
  Description of Artificial Sequence: Synthetic oligonucleotide
  Antisense strand to SEQ ID NO: 2149138
uacaacaugauccauccau

SEQ ID NO: 2149140 - RNA, 19 nt, Artificial Sequence
  Description of Artificial Sequence: Synthetic oligonucleotide
  Sense strand starting at position 3943 of SEQ ID NO: 1882810
gauggaucauguuguauuu

SEQ ID NO: 2149141 - RNA, 19 nt, Artificial Sequence
  Description of Artificial Sequence: Synthetic oligonucleotide
  Antisense strand to SEQ ID NO: 2149140
aaauacaacaugauccauc

SEQ ID NO: 2149142 - RNA, 19 nt, Artificial Sequence
  Description of Artificial Sequence: Synthetic oligonucleotide
  Sense strand starting at position 49 of SEQ ID NO: 1882811
ucaauaaaguuacuacgaa

SEQ ID NO: 2149143 - RNA, 19 nt, Artificial Sequence
  Description of Artificial Sequence: Synthetic oligonucleotide
  Antisense strand to SEQ ID NO: 2149142
uucguaguaacuuuauuga

SEQ ID NO: 2149144 - RNA, 19 nt, Artificial Sequence
  Description of Artificial Sequence: Synthetic oligonucleotide
  Sense strand starting at position 127 of SEQ ID NO: 1882811
auuggaauuguggagccau

SEQ ID NO: 2149145 - RNA, 19 nt, Artificial Sequence
  Description of Artificial Sequence: Synthetic oligonucleotide
  Antisense strand to SEQ ID NO: 2149144
auggcuccacaauuccaau

SEQ ID NO: 2149146 - RNA, 19 nt, Artificial Sequence
  Description of Artificial Sequence: Synthetic oligonucleotide
  Sense strand starting at position 233 of SEQ ID NO: 1882811
auuagaguucuagaguucu

SEQ ID NO: 2149147 - RNA, 19 nt, Artificial Sequence
  Description of Artificial Sequence: Synthetic oligonucleotide
  Antisense strand to SEQ ID NO: 2149146
agaacucuagaacucuaau

SEQ ID NO: 2149148 - RNA, 19 nt, Artificial Sequence
  Description of Artificial Sequence: Synthetic oligonucleotide
  Sense strand starting at position 268 of SEQ ID NO: 1882811
ugcacagauuugcuguuau

SEQ ID NO: 2149149 - RNA, 19 nt, Artificial Sequence
  Description of Artificial Sequence: Synthetic oligonucleotide
  Antisense strand to SEQ ID NO: 2149148
auaacagcaaaucugugca

SEQ ID NO: 2149150 - RNA, 19 nt, Artificial Sequence
  Description of Artificial Sequence: Synthetic oligonucleotide
  Sense strand starting at position 278 of SEQ ID NO: 1882811
ugcuguuaucagccuguuu

SEQ ID NO: 2149151 - RNA, 19 nt, Artificial Sequence
  Description of Artificial Sequence: Synthetic oligonucleotide
  Antisense strand to SEQ ID NO: 2149150
aaacaggcugauaacagca

SEQ ID NO: 2149152 - RNA, 19 nt, Artificial Sequence
  Description of Artificial Sequence: Synthetic oligonucleotide
  Sense strand starting at position 524 of SEQ ID NO: 1882811
ccgaaaucaggugaguaga

SEQ ID NO: 2149153 - RNA, 19 nt, Artificial Sequence
  Description of Artificial Sequence: Synthetic oligonucleotide
  Antisense strand to SEQ ID NO: 2149152
ucuacucaccugauuucgg

SEQ ID NO: 2149154 - RNA, 19 nt, Artificial Sequence
  Description of Artificial Sequence: Synthetic oligonucleotide
  Sense strand starting at position 721 of SEQ ID NO: 1882811
ugaacuugccaacauguga

SEQ ID NO: 2149155 - RNA, 19 nt, Artificial Sequence
  Description of Artificial Sequence: Synthetic oligonucleotide
  Antisense strand to SEQ ID NO: 2149154
ucacauguuggcaaguuca

SEQ ID NO: 2149156 - RNA, 19 nt, Artificial Sequence
  Description of Artificial Sequence: Synthetic oligonucleotide
  Sense strand starting at position 786 of SEQ ID NO: 1882811
gagcauuuacuguguuuag

SEQ ID NO: 2149157 - RNA, 19 nt, Artificial Sequence
  Description of Artificial Sequence: Synthetic oligonucleotide
  Antisense strand to SEQ ID NO: 2149156
cuaaacacaguaaaugcuc

SEQ ID NO: 2149158 - RNA, 19 nt, Artificial Sequence
  Description of Artificial Sequence: Synthetic oligonucleotide
  Sense strand starting at position 798 of SEQ ID NO: 1882811
uguuuagcacuuuacuaga

SEQ ID NO: 2149159 - RNA, 19 nt, Artificial Sequence
  Description of Artificial Sequence: Synthetic oligonucleotide
  Antisense strand to SEQ ID NO: 2149158
ucuaguaaagugcuaaaca

SEQ ID NO: 2149160 - RNA, 19 nt, Artificial Sequence
  Description of Artificial Sequence: Synthetic oligonucleotide
  Sense strand starting at position 803 of SEQ ID NO: 1882811
agcacuuuacuagaugcua

SEQ ID NO: 2149161 - RNA, 19 nt, Artificial Sequence
  Description of Artificial Sequence: Synthetic oligonucleotide
  Antisense strand to SEQ ID NO: 2149160
uagcaucuaguaaagugcu

SEQ ID NO: 2149162 - RNA, 19 nt, Artificial Sequence
  Description of Artificial Sequence: Synthetic oligonucleotide
  Sense strand starting at position 837 of SEQ ID NO: 1882811
gagcuuauggucuaguaag

SEQ ID NO: 2149163 - RNA, 19 nt, Artificial Sequence
  Description of Artificial Sequence: Synthetic oligonucleotide
  Antisense strand to SEQ ID NO: 2149162
cuuacuagaccauaagcuc

SEQ ID NO: 2149164 - RNA, 19 nt, Artificial Sequence
  Description of Artificial Sequence: Synthetic oligonucleotide
  Sense strand starting at position 964 of SEQ ID NO: 1882811
gauagacaggauugccuua

SEQ ID NO: 2149165 - RNA, 19 nt, Artificial Sequence
  Description of Artificial Sequence: Synthetic oligonucleotide
  Antisense strand to SEQ ID NO: 2149164
uaaggcaauccugucuauc

SEQ ID NO: 2149166 - RNA, 19 nt, Artificial Sequence
  Description of Artificial Sequence: Synthetic oligonucleotide
  Sense strand starting at position 977 of SEQ ID NO: 1882811
gccuuagauggucacuaua

SEQ ID NO: 2149167 - RNA, 19 nt, Artificial Sequence
  Description of Artificial Sequence: Synthetic oligonucleotide
  Antisense strand to SEQ ID NO: 2149166
uauagugaccaucuaaggc

SEQ ID NO: 2149168 - RNA, 19 nt, Artificial Sequence
  Description of Artificial Sequence: Synthetic oligonucleotide
  Sense strand starting at position 1020 of SEQ ID NO: 1882811
gcugaagucccagggauga

SEQ ID NO: 2149169 - RNA, 19 nt, Artificial Sequence
  Description of Artificial Sequence: Synthetic oligonucleotide
  Antisense strand to SEQ ID NO: 2149168
ucaucccugggacuucagc

SEQ ID NO: 2149170 - RNA, 19 nt, Artificial Sequence
  Description of Artificial Sequence: Synthetic oligonucleotide
  Sense strand starting at position 1237 of SEQ ID NO: 1882811
ucaguuacugaagaaguuu

SEQ ID NO: 2149171 - RNA, 19 nt, Artificial Sequence
  Description of Artificial Sequence: Synthetic oligonucleotide
  Antisense strand to SEQ ID NO: 2149170
aaacuucuucaguaacuga

SEQ ID NO: 2149172 - RNA, 19 nt, Artificial Sequence
  Description of Artificial Sequence: Synthetic oligonucleotide
  Sense strand starting at position 1550 of SEQ ID NO: 1882811
ugaccacucccguaaccaa

SEQ ID NO: 2149173 - RNA, 19 nt, Artificial Sequence
  Description of Artificial Sequence: Synthetic oligonucleotide
  Antisense strand to SEQ ID NO: 2149172
uugguuacgggagugguca

SEQ ID NO: 2149174 - RNA, 19 nt, Artificial Sequence
  Description of Artificial Sequence: Synthetic oligonucleotide
  Sense strand starting at position 2549 of SEQ ID NO: 1882811
gugguuuaaagugagagca

SEQ ID NO: 2149175 - RNA, 19 nt, Artificial Sequence
  Description of Artificial Sequence: Synthetic oligonucleotide
  Antisense strand to SEQ ID NO: 2149174
ugcucucacuuuaaaccac

SEQ ID NO: 2149176 - RNA, 19 nt, Artificial Sequence
  Description of Artificial Sequence: Synthetic oligonucleotide
  Sense strand starting at position 2562 of SEQ ID NO: 1882811
agagcauuggucuagaguc

SEQ ID NO: 2149177 - RNA, 19 nt, Artificial Sequence
  Description of Artificial Sequence: Synthetic oligonucleotide
  Antisense strand to SEQ ID NO: 2149176
gacucuagaccaaugcucu

SEQ ID NO: 2149178 - RNA, 19 nt, Artificial Sequence
  Description of Artificial Sequence: Synthetic oligonucleotide
  Sense strand starting at position 2577 of SEQ ID NO: 1882811
agucuaguucgagagauca

SEQ ID NO: 2149179 - RNA, 19 nt, Artificial Sequence
  Description of Artificial Sequence: Synthetic oligonucleotide
  Antisense strand to SEQ ID NO: 2149178
ugaucucucgaacuagacu

SEQ ID NO: 2149180 - RNA, 19 nt, Artificial Sequence
  Description of Artificial Sequence: Synthetic oligonucleotide
  Sense strand starting at position 2579 of SEQ ID NO: 1882811
ucuaguucgagagaucaua

SEQ ID NO: 2149181 - RNA, 19 nt, Artificial Sequence
  Description of Artificial Sequence: Synthetic oligonucleotide
  Antisense strand to SEQ ID NO: 2149180
uaugaucucucgaacuaga

SEQ ID NO: 2149182 - RNA, 19 nt, Artificial Sequence
  Description of Artificial Sequence: Synthetic oligonucleotide
  Sense strand starting at position 2587 of SEQ ID NO: 1882811
gagagaucauaguugguuu

SEQ ID NO: 2149183 - RNA, 19 nt, Artificial Sequence
  Description of Artificial Sequence: Synthetic oligonucleotide
  Antisense strand to SEQ ID NO: 2149182
aaaccaacuaugaucucuc

SEQ ID NO: 2149184 - RNA, 19 nt, Artificial Sequence
  Description of Artificial Sequence: Synthetic oligonucleotide
  Sense strand starting at position 2708 of SEQ ID NO: 1882811
guuuaagcccuuuggauuu

SEQ ID NO: 2149185 - RNA, 19 nt, Artificial Sequence
  Description of Artificial Sequence: Synthetic oligonucleotide
  Antisense strand to SEQ ID NO: 2149184
aaauccaaagggcuuaaac

SEQ ID NO: 2149186 - RNA, 19 nt, Artificial Sequence
  Description of Artificial Sequence: Synthetic oligonucleotide
  Sense strand starting at position 2730 of SEQ ID NO: 1882811
gagcaaaguugagugaaau

SEQ ID NO: 2149187 - RNA, 19 nt, Artificial Sequence
  Description of Artificial Sequence: Synthetic oligonucleotide
  Antisense strand to SEQ ID NO: 2149186
auuucacucaacuuugcuc

SEQ ID NO: 2149188 - RNA, 19 nt, Artificial Sequence
  Description of Artificial Sequence: Synthetic oligonucleotide
  Sense strand starting at position 2731 of SEQ ID NO: 1882811
agcaaaguugagugaaaua

SEQ ID NO: 2149189 - RNA, 19 nt, Artificial Sequence
  Description of Artificial Sequence: Synthetic oligonucleotide
  Antisense strand to SEQ ID NO: 2149188
uauuucacucaacuuugcu

SEQ ID NO: 2149190 - RNA, 19 nt, Artificial Sequence
  Description of Artificial Sequence: Synthetic oligonucleotide
  Sense strand starting at position 2915 of SEQ ID NO: 1882811
cacuguucugaguacugga

SEQ ID NO: 2149191 - RNA, 19 nt, Artificial Sequence
  Description of Artificial Sequence: Synthetic oligonucleotide
  Antisense strand to SEQ ID NO: 2149190
uccaguacucagaacagug

SEQ ID NO: 2149192 - RNA, 19 nt, Artificial Sequence
  Description of Artificial Sequence: Synthetic oligonucleotide
  Sense strand starting at position 2991 of SEQ ID NO: 1882811
caaagcuaagaucggauaa

SEQ ID NO: 2149193 - RNA, 19 nt, Artificial Sequence
  Description of Artificial Sequence: Synthetic oligonucleotide
  Antisense strand to SEQ ID NO: 2149192
uuauccgaucuuagcuuug

SEQ ID NO: 2149194 - RNA, 19 nt, Artificial Sequence
  Description of Artificial Sequence: Synthetic oligonucleotide
  Sense strand starting at position 3037 of SEQ ID NO: 1882811
aaagaaccuguaugguaaa

SEQ ID NO: 2149195 - RNA, 19 nt, Artificial Sequence
  Description of Artificial Sequence: Synthetic oligonucleotide
  Antisense strand to SEQ ID NO: 2149194
uuuaccauacagguucuuu

SEQ ID NO: 2149196 - RNA, 19 nt, Artificial Sequence
  Description of Artificial Sequence: Synthetic oligonucleotide
  Sense strand starting at position 3126 of SEQ ID NO: 1882811
gaauuugcgucuuccuuua

SEQ ID NO: 2149197 - RNA, 19 nt, Artificial Sequence
  Description of Artificial Sequence: Synthetic oligonucleotide
  Antisense strand to SEQ ID NO: 2149196
uaaaggaagacgcaaauuc

SEQ ID NO: 2149198 - RNA, 19 nt, Artificial Sequence
  Description of Artificial Sequence: Synthetic oligonucleotide
  Sense strand starting at position 3130 of SEQ ID NO: 1882811
uugcgucuuccuuuagcca

SEQ ID NO: 2149199 - RNA, 19 nt, Artificial Sequence
  Description of Artificial Sequence: Synthetic oligonucleotide
  Antisense strand to SEQ ID NO: 2149198
uggcuaaaggaagacgcaa

SEQ ID NO: 2149200 - RNA, 19 nt, Artificial Sequence
  Description of Artificial Sequence: Synthetic oligonucleotide
  Sense strand starting at position 3273 of SEQ ID NO: 1882811
ggcuucugcguaguuuaaa

SEQ ID NO: 2149201 - RNA, 19 nt, Artificial Sequence
  Description of Artificial Sequence: Synthetic oligonucleotide
  Antisense strand to SEQ ID NO: 2149200
uuuaaacuacgcagaagcc

SEQ ID NO: 2149202 - RNA, 19 nt, Artificial Sequence
  Description of Artificial Sequence: Synthetic oligonucleotide
  Sense strand starting at position 3299 of SEQ ID NO: 1882811
auggaaaguaauuguugga

SEQ ID NO: 2149203 - RNA, 19 nt, Artificial Sequence
  Description of Artificial Sequence: Synthetic oligonucleotide
  Antisense strand to SEQ ID NO: 2149202
uccaacaauuacuuuccau

SEQ ID NO: 2149204 - RNA, 19 nt, Artificial Sequence
  Description of Artificial Sequence: Synthetic oligonucleotide
  Sense strand starting at position 3324 of SEQ ID NO: 1882811
cacugaugguuccuuagga

SEQ ID NO: 2149205 - RNA, 19 nt, Artificial Sequence
  Description of Artificial Sequence: Synthetic oligonucleotide
  Antisense strand to SEQ ID NO: 2149204
uccuaaggaaccaucagug

SEQ ID NO: 2149206 - RNA, 19 nt, Artificial Sequence
  Description of Artificial Sequence: Synthetic oligonucleotide
  Sense strand starting at position 3375 of SEQ ID NO: 1882811
gggacugcagagugagaaa

SEQ ID NO: 2149207 - RNA, 19 nt, Artificial Sequence
  Description of Artificial Sequence: Synthetic oligonucleotide
  Antisense strand to SEQ ID NO: 2149206
uuucucacucugcaguccc

SEQ ID NO: 2149208 - RNA, 19 nt, Artificial Sequence
  Description of Artificial Sequence: Synthetic oligonucleotide
  Sense strand starting at position 3474 of SEQ ID NO: 1882811
uuugucagugaagauauca

SEQ ID NO: 2149209 - RNA, 19 nt, Artificial Sequence
  Description of Artificial Sequence: Synthetic oligonucleotide
  Antisense strand to SEQ ID NO: 2149208
ugauaucuucacugacaaa

SEQ ID NO: 2149210 - RNA, 19 nt, Artificial Sequence
  Description of Artificial Sequence: Synthetic oligonucleotide
  Sense strand starting at position 3598 of SEQ ID NO: 1882811
guggaauugacccauguua

SEQ ID NO: 2149211 - RNA, 19 nt, Artificial Sequence
  Description of Artificial Sequence: Synthetic oligonucleotide
  Antisense strand to SEQ ID NO: 2149210
uaacaugggucaauuccac

SEQ ID NO: 2149212 - RNA, 19 nt, Artificial Sequence
  Description of Artificial Sequence: Synthetic oligonucleotide
  Sense strand starting at position 3600 of SEQ ID NO: 1882811
ggaauugacccauguuaga

SEQ ID NO: 2149213 - RNA, 19 nt, Artificial Sequence
  Description of Artificial Sequence: Synthetic oligonucleotide
  Antisense strand to SEQ ID NO: 2149212
ucuaacaugggucaauucc

SEQ ID NO: 2149214 - RNA, 19 nt, Artificial Sequence
  Description of Artificial Sequence: Synthetic oligonucleotide
  Sense strand starting at position 3720 of SEQ ID NO: 1882811
gcagucauggaucagguaa

SEQ ID NO: 2149215 - RNA, 19 nt, Artificial Sequence
  Description of Artificial Sequence: Synthetic oligonucleotide
  Antisense strand to SEQ ID NO: 2149214
uuaccugauccaugacugc

SEQ ID NO: 2149216 - RNA, 19 nt, Artificial Sequence
  Description of Artificial Sequence: Synthetic oligonucleotide
  Sense strand starting at position 3816 of SEQ ID NO: 1882811
aaagguaauugcuugacua

SEQ ID NO: 2149217 - RNA, 19 nt, Artificial Sequence
  Description of Artificial Sequence: Synthetic oligonucleotide
  Antisense strand to SEQ ID NO: 2149216
uagucaagcaauuaccuuu

SEQ ID NO: 2149218 - RNA, 19 nt, Artificial Sequence
  Description of Artificial Sequence: Synthetic oligonucleotide
  Sense strand starting at position 3818 of SEQ ID NO: 1882811
agguaauugcuugacuaug

SEQ ID NO: 2149219 - RNA, 19 nt, Artificial Sequence
  Description of Artificial Sequence: Synthetic oligonucleotide
  Antisense strand to SEQ ID NO: 2149218
cauagucaagcaauuaccu

SEQ ID NO: 2149220 - RNA, 19 nt, Artificial Sequence
  Description of Artificial Sequence: Synthetic oligonucleotide
  Sense strand starting at position 3823 of SEQ ID NO: 1882811
auugcuugacuaugagaga

SEQ ID NO: 2149221 - RNA, 19 nt, Artificial Sequence
  Description of Artificial Sequence: Synthetic oligonucleotide
  Antisense strand to SEQ ID NO: 2149220
ucucucauagucaagcaau

SEQ ID NO: 2149222 - RNA, 19 nt, Artificial Sequence
  Description of Artificial Sequence: Synthetic oligonucleotide
  Sense strand starting at position 2141 of SEQ ID NO: 1882812
guauccucauaggugaagu

SEQ ID NO: 2149223 - RNA, 19 nt, Artificial Sequence
  Description of Artificial Sequence: Synthetic oligonucleotide
  Antisense strand to SEQ ID NO: 2149222
acuucaccuaugaggauac

SEQ ID NO: 2149224 - RNA, 19 nt, Artificial Sequence
  Description of Artificial Sequence: Synthetic oligonucleotide
  Sense strand starting at position 2314 of SEQ ID NO: 1882812
ccugucuuccuuuaugguu

SEQ ID NO: 2149225 - RNA, 19 nt, Artificial Sequence
  Description of Artificial Sequence: Synthetic oligonucleotide
  Antisense strand to SEQ ID NO: 2149224
aaccauaaaggaagacagg

SEQ ID NO: 2149226 - RNA, 19 nt, Artificial Sequence
  Description of Artificial Sequence: Synthetic oligonucleotide
  Sense strand starting at position 2319 of SEQ ID NO: 1882812
cuuccuuuaugguuaaaug

SEQ ID NO: 2149227 - RNA, 19 nt, Artificial Sequence
  Description of Artificial Sequence: Synthetic oligonucleotide
  Antisense strand to SEQ ID NO: 2149226
cauuuaaccauaaaggaag

SEQ ID NO: 2149228 - RNA, 19 nt, Artificial Sequence
  Description of Artificial Sequence: Synthetic oligonucleotide
  Sense strand starting at position 2320 of SEQ ID NO: 1882812
uuccuuuaugguuaaauga

SEQ ID NO: 2149229 - RNA, 19 nt, Artificial Sequence
  Description of Artificial Sequence: Synthetic oligonucleotide
  Antisense strand to SEQ ID NO: 2149228
ucauuuaaccauaaaggaa

SEQ ID NO: 2149230 - RNA, 19 nt, Artificial Sequence
  Description of Artificial Sequence: Synthetic oligonucleotide
  Sense strand starting at position 2393 of SEQ ID NO: 1882812
auagauuguugugugagau

SEQ ID NO: 2149231 - RNA, 19 nt, Artificial Sequence
  Description of Artificial Sequence: Synthetic oligonucleotide
  Antisense strand to SEQ ID NO: 2149230
aucucacacaacaaucuau

SEQ ID NO: 2149232 - RNA, 19 nt, Artificial Sequence
  Description of Artificial Sequence: Synthetic oligonucleotide
  Sense strand starting at position 2394 of SEQ ID NO: 1882812
uagauuguugugugagauu

SEQ ID NO: 2149233 - RNA, 19 nt, Artificial Sequence
  Description of Artificial Sequence: Synthetic oligonucleotide
  Antisense strand to SEQ ID NO: 2149232
aaucucacacaacaaucua

SEQ ID NO: 2149234 - RNA, 19 nt, Artificial Sequence
  Description of Artificial Sequence: Synthetic oligonucleotide
  Sense strand starting at position 2610 of SEQ ID NO: 1882812
cgcuuuauacuagaguuau

SEQ ID NO: 2149235 - RNA, 19 nt, Artificial Sequence
  Description of Artificial Sequence: Synthetic oligonucleotide
  Antisense strand to SEQ ID NO: 2149234
auaacucuaguauaaagcg

SEQ ID NO: 2149236 - RNA, 19 nt, Artificial Sequence
  Description of Artificial Sequence: Synthetic oligonucleotide
  Sense strand starting at position 2656 of SEQ ID NO: 1882812
acuagcauauucuggauuu

SEQ ID NO: 2149237 - RNA, 19 nt, Artificial Sequence
  Description of Artificial Sequence: Synthetic oligonucleotide
  Antisense strand to SEQ ID NO: 2149236
aaauccagaauaugcuagu

SEQ ID NO: 2149238 - RNA, 19 nt, Artificial Sequence
  Description of Artificial Sequence: Synthetic oligonucleotide
  Sense strand starting at position 2657 of SEQ ID NO: 1882812
cuagcauauucuggauuua

SEQ ID NO: 2149239 - RNA, 19 nt, Artificial Sequence
  Description of Artificial Sequence: Synthetic oligonucleotide
  Antisense strand to SEQ ID NO: 2149238
uaaauccagaauaugcuag

SEQ ID NO: 2149240 - RNA, 19 nt, Artificial Sequence
  Description of Artificial Sequence: Synthetic oligonucleotide
  Sense strand starting at position 3074 of SEQ ID NO: 1882812
ccggcagcauuucuuguaa

SEQ ID NO: 2149241 - RNA, 19 nt, Artificial Sequence
  Description of Artificial Sequence: Synthetic oligonucleotide
  Antisense strand to SEQ ID NO: 2149240
uuacaagaaaugcugccgg

SEQ ID NO: 2149242 - RNA, 19 nt, Artificial Sequence
  Description of Artificial Sequence: Synthetic oligonucleotide
  Sense strand starting at position 3076 of SEQ ID NO: 1882812
ggcagcauuucuuguaaga

SEQ ID NO: 2149243 - RNA, 19 nt, Artificial Sequence
  Description of Artificial Sequence: Synthetic oligonucleotide
  Antisense strand to SEQ ID NO: 2149242
ucuuacaagaaaugcugcc

SEQ ID NO: 2149244 - RNA, 19 nt, Artificial Sequence
  Description of Artificial Sequence: Synthetic oligonucleotide
  Sense strand starting at position 3078 of SEQ ID NO: 1882812
cagcauuucuuguaagaug

SEQ ID NO: 2149245 - RNA, 19 nt, Artificial Sequence
  Description of Artificial Sequence: Synthetic oligonucleotide
  Antisense strand to SEQ ID NO: 2149244
caucuuacaagaaaugcug

SEQ ID NO: 2149246 - RNA, 19 nt, Artificial Sequence
  Description of Artificial Sequence: Synthetic oligonucleotide
  Sense strand starting at position 3081 of SEQ ID NO: 1882812
cauuucuuguaagauggau

SEQ ID NO: 2149247 - RNA, 19 nt, Artificial Sequence
  Description of Artificial Sequence: Synthetic oligonucleotide
  Antisense strand to SEQ ID NO: 2149246
auccaucuuacaagaaaug

SEQ ID NO: 2149248 - RNA, 19 nt, Artificial Sequence
  Description of Artificial Sequence: Synthetic oligonucleotide
  Sense strand starting at position 3146 of SEQ ID NO: 1882812
gauuacuucugguuccagu

SEQ ID NO: 2149249 - RNA, 19 nt, Artificial Sequence
  Description of Artificial Sequence: Synthetic oligonucleotide
  Antisense strand to SEQ ID NO: 2149248
acuggaaccagaaguaauc

SEQ ID NO: 2149250 - RNA, 19 nt, Artificial Sequence
  Description of Artificial Sequence: Synthetic oligonucleotide
  Sense strand starting at position 3160 of SEQ ID NO: 1882812
ccaguauacuuggauggca

SEQ ID NO: 2149251 - RNA, 19 nt, Artificial Sequence
  Description of Artificial Sequence: Synthetic oligonucleotide
  Antisense strand to SEQ ID NO: 2149250
ugccauccaaguauacugg

SEQ ID NO: 2149252 - RNA, 19 nt, Artificial Sequence
  Description of Artificial Sequence: Synthetic oligonucleotide
  Sense strand starting at position 3227 of SEQ ID NO: 1882812
gccuauaugguuuguugag

SEQ ID NO: 2149253 - RNA, 19 nt, Artificial Sequence
  Description of Artificial Sequence: Synthetic oligonucleotide
  Antisense strand to SEQ ID NO: 2149252
cucaacaaaccauauaggc

SEQ ID NO: 2149254 - RNA, 19 nt, Artificial Sequence
  Description of Artificial Sequence: Synthetic oligonucleotide
  Sense strand starting at position 3228 of SEQ ID NO: 1882812
ccuauaugguuuguugaga

SEQ ID NO: 2149255 - RNA, 19 nt, Artificial Sequence
  Description of Artificial Sequence: Synthetic oligonucleotide
  Antisense strand to SEQ ID NO: 2149254
ucucaacaaaccauauagg

SEQ ID NO: 2149256 - RNA, 19 nt, Artificial Sequence
  Description of Artificial Sequence: Synthetic oligonucleotide
  Sense strand starting at position 3229 of SEQ ID NO: 1882812
cuauaugguuuguugagaa

SEQ ID NO: 2149257 - RNA, 19 nt, Artificial Sequence
  Description of Artificial Sequence: Synthetic oligonucleotide
  Antisense strand to SEQ ID NO: 2149256
uucucaacaaaccauauag

SEQ ID NO: 2149258 - RNA, 19 nt, Artificial Sequence
  Description of Artificial Sequence: Synthetic oligonucleotide
  Sense strand starting at position 3233 of SEQ ID NO: 1882812
augguuuguugagaagucu

SEQ ID NO: 2149259 - RNA, 19 nt, Artificial Sequence
  Description of Artificial Sequence: Synthetic oligonucleotide
  Antisense strand to SEQ ID NO: 2149258
agacuucucaacaaaccau

SEQ ID NO: 2149260 - RNA, 19 nt, Artificial Sequence
  Description of Artificial Sequence: Synthetic oligonucleotide
  Sense strand starting at position 3265 of SEQ ID NO: 1882812
cuggaacuccuuuauguua

SEQ ID NO: 2149261 - RNA, 19 nt, Artificial Sequence
  Description of Artificial Sequence: Synthetic oligonucleotide
  Antisense strand to SEQ ID NO: 2149260
uaacauaaaggaguuccag

SEQ ID NO: 2149262 - RNA, 19 nt, Artificial Sequence
  Description of Artificial Sequence: Synthetic oligonucleotide
  Sense strand starting at position 3345 of SEQ ID NO: 1882812
uuauuaaugccuuguggua

SEQ ID NO: 2149263 - RNA, 19 nt, Artificial Sequence
  Description of Artificial Sequence: Synthetic oligonucleotide
  Antisense strand to SEQ ID NO: 2149262
uaccacaaggcauuaauaa

SEQ ID NO: 2149264 - RNA, 19 nt, Artificial Sequence
  Description of Artificial Sequence: Synthetic oligonucleotide
  Sense strand starting at position 3357 of SEQ ID NO: 1882812
ugugguaaucuuuguauug

SEQ ID NO: 2149265 - RNA, 19 nt, Artificial Sequence
  Description of Artificial Sequence: Synthetic oligonucleotide
  Antisense strand to SEQ ID NO: 2149264
caauacaaagauuaccaca

SEQ ID NO: 2149266 - RNA, 19 nt, Artificial Sequence
  Description of Artificial Sequence: Synthetic oligonucleotide
  Sense strand starting at position 3358 of SEQ ID NO: 1882812
gugguaaucuuuguauuga

SEQ ID NO: 2149267 - RNA, 19 nt, Artificial Sequence
  Description of Artificial Sequence: Synthetic oligonucleotide
  Antisense strand to SEQ ID NO: 2149266
ucaauacaaagauuaccac

SEQ ID NO: 2149268 - RNA, 19 nt, Artificial Sequence
  Description of Artificial Sequence: Synthetic oligonucleotide
  Sense strand starting at position 3359 of SEQ ID NO: 1882812
ugguaaucuuuguauugaa

SEQ ID NO: 2149269 - RNA, 19 nt, Artificial Sequence
  Description of Artificial Sequence: Synthetic oligonucleotide
  Antisense strand to SEQ ID NO: 2149268
uucaauacaaagauuacca

SEQ ID NO: 2149270 - RNA, 19 nt, Artificial Sequence
  Description of Artificial Sequence: Synthetic oligonucleotide
  Sense strand starting at position 3371 of SEQ ID NO: 1882812
uauugaaucuguuuggugu

SEQ ID NO: 2149271 - RNA, 19 nt, Artificial Sequence
  Description of Artificial Sequence: Synthetic oligonucleotide
  Antisense strand to SEQ ID NO: 2149270
acaccaaacagauucaaua

SEQ ID NO: 2149272 - RNA, 19 nt, Artificial Sequence
  Description of Artificial Sequence: Synthetic oligonucleotide
  Sense strand starting at position 3378 of SEQ ID NO: 1882812
ucuguuugguguucccuaa

SEQ ID NO: 2149273 - RNA, 19 nt, Artificial Sequence
  Description of Artificial Sequence: Synthetic oligonucleotide
  Antisense strand to SEQ ID NO: 2149272
uuagggaacaccaaacaga

SEQ ID NO: 2149274 - RNA, 19 nt, Artificial Sequence
  Description of Artificial Sequence: Synthetic oligonucleotide
  Sense strand starting at position 3382 of SEQ ID NO: 1882812
uuugguguucccuaaccuu

SEQ ID NO: 2149275 - RNA, 19 nt, Artificial Sequence
  Description of Artificial Sequence: Synthetic oligonucleotide
  Antisense strand to SEQ ID NO: 2149274
aagguuagggaacaccaaa

SEQ ID NO: 2149276 - RNA, 19 nt, Artificial Sequence
  Description of Artificial Sequence: Synthetic oligonucleotide
  Sense strand starting at position 3400 of SEQ ID NO: 1882812
uccgguaccuggguauuua

SEQ ID NO: 2149277 - RNA, 19 nt, Artificial Sequence
  Description of Artificial Sequence: Synthetic oligonucleotide
  Antisense strand to SEQ ID NO: 2149276
uaaauacccagguaccgga

SEQ ID NO: 2149278 - RNA, 19 nt, Artificial Sequence
  Description of Artificial Sequence: Synthetic oligonucleotide
  Sense strand starting at position 3511 of SEQ ID NO: 1882812
uuggucuuuggagguaauu

SEQ ID NO: 2149279 - RNA, 19 nt, Artificial Sequence
  Description of Artificial Sequence: Synthetic oligonucleotide
  Antisense strand to SEQ ID NO: 2149278
aauuaccuccaaagaccaa

SEQ ID NO: 2149280 - RNA, 19 nt, Artificial Sequence
  Description of Artificial Sequence: Synthetic oligonucleotide
  Sense strand starting at position 3530 of SEQ ID NO: 1882812
uucuauaucuucuagguga

SEQ ID NO: 2149281 - RNA, 19 nt, Artificial Sequence
  Description of Artificial Sequence: Synthetic oligonucleotide
  Antisense strand to SEQ ID NO: 2149280
ucaccuagaagauauagaa

SEQ ID NO: 2149282 - RNA, 19 nt, Artificial Sequence
  Description of Artificial Sequence: Synthetic oligonucleotide
  Sense strand starting at position 3532 of SEQ ID NO: 1882812
cuauaucuucuaggugauu

SEQ ID NO: 2149283 - RNA, 19 nt, Artificial Sequence
  Description of Artificial Sequence: Synthetic oligonucleotide
  Antisense strand to SEQ ID NO: 2149282
aaucaccuagaagauauag

SEQ ID NO: 2149284 - RNA, 19 nt, Artificial Sequence
  Description of Artificial Sequence: Synthetic oligonucleotide
  Sense strand starting at position 3743 of SEQ ID NO: 1882812
uugauaaguuucugaauug

SEQ ID NO: 2149285 - RNA, 19 nt, Artificial Sequence
  Description of Artificial Sequence: Synthetic oligonucleotide
  Antisense strand to SEQ ID NO: 2149284
caauucagaaacuuaucaa

SEQ ID NO: 2149286 - RNA, 19 nt, Artificial Sequence
  Description of Artificial Sequence: Synthetic oligonucleotide
  Sense strand starting at position 3744 of SEQ ID NO: 1882812
ugauaaguuucugaauugu

SEQ ID NO: 2149287 - RNA, 19 nt, Artificial Sequence
  Description of Artificial Sequence: Synthetic oligonucleotide
  Antisense strand to SEQ ID NO: 2149286
acaauucagaaacuuauca

SEQ ID NO: 2149288 - RNA, 19 nt, Artificial Sequence
  Description of Artificial Sequence: Synthetic oligonucleotide
  Sense strand starting at position 3767 of SEQ ID NO: 1882812
cuguguuaucucggagauc

SEQ ID NO: 2149289 - RNA, 19 nt, Artificial Sequence
  Description of Artificial Sequence: Synthetic oligonucleotide
  Antisense strand to SEQ ID NO: 2149288
gaucuccgagauaacacag

SEQ ID NO: 2149290 - RNA, 19 nt, Artificial Sequence
  Description of Artificial Sequence: Synthetic oligonucleotide
  Sense strand starting at position 3776 of SEQ ID NO: 1882812
cucggagaucccugaguuu

SEQ ID NO: 2149291 - RNA, 19 nt, Artificial Sequence
  Description of Artificial Sequence: Synthetic oligonucleotide
  Antisense strand to SEQ ID NO: 2149290
aaacucagggaucuccgag

SEQ ID NO: 2149292 - RNA, 19 nt, Artificial Sequence
  Description of Artificial Sequence: Synthetic oligonucleotide
  Sense strand starting at position 3779 of SEQ ID NO: 1882812
ggagaucccugaguuucuu

SEQ ID NO: 2149293 - RNA, 19 nt, Artificial Sequence
  Description of Artificial Sequence: Synthetic oligonucleotide
  Antisense strand to SEQ ID NO: 2149292
aagaaacucagggaucucc

SEQ ID NO: 2149294 - RNA, 19 nt, Artificial Sequence
  Description of Artificial Sequence: Synthetic oligonucleotide
  Sense strand starting at position 3811 of SEQ ID NO: 1882812
uuuaauucuugguuagaga

SEQ ID NO: 2149295 - RNA, 19 nt, Artificial Sequence
  Description of Artificial Sequence: Synthetic oligonucleotide
  Antisense strand to SEQ ID NO: 2149294
ucucuaaccaagaauuaaa

SEQ ID NO: 2149296 - RNA, 19 nt, Artificial Sequence
  Description of Artificial Sequence: Synthetic oligonucleotide
  Sense strand starting at position 3855 of SEQ ID NO: 1882812
gucaguuacugaggaaaca

SEQ ID NO: 2149297 - RNA, 19 nt, Artificial Sequence
  Description of Artificial Sequence: Synthetic oligonucleotide
  Antisense strand to SEQ ID NO: 2149296
uguuuccucaguaacugac

SEQ ID NO: 2149298 - RNA, 19 nt, Artificial Sequence
  Description of Artificial Sequence: Synthetic oligonucleotide
  Sense strand starting at position 3961 of SEQ ID NO: 1882812
agaucaagauaggugcaaa

SEQ ID NO: 2149299 - RNA, 19 nt, Artificial Sequence
  Description of Artificial Sequence: Synthetic oligonucleotide
  Antisense strand to SEQ ID NO: 2149298
uuugcaccuaucuugaucu

SEQ ID NO: 2149300 - RNA, 19 nt, Artificial Sequence
  Description of Artificial Sequence: Synthetic oligonucleotide
  Sense strand starting at position 3983 of SEQ ID NO: 1882812
uuccauaaguaauggugaa

SEQ ID NO: 2149301 - RNA, 19 nt, Artificial Sequence
  Description of Artificial Sequence: Synthetic oligonucleotide
  Antisense strand to SEQ ID NO: 2149300
uucaccauuacuuauggaa

SEQ ID NO: 2149302 - RNA, 19 nt, Artificial Sequence
  Description of Artificial Sequence: Synthetic oligonucleotide
  Sense strand starting at position 40 of SEQ ID NO: 1882813
ugccgauagauagauaguu

SEQ ID NO: 2149303 - RNA, 19 nt, Artificial Sequence
  Description of Artificial Sequence: Synthetic oligonucleotide
  Antisense strand to SEQ ID NO: 2149302
aacuaucuaucuaucggca

SEQ ID NO: 2149304 - RNA, 19 nt, Artificial Sequence
  Description of Artificial Sequence: Synthetic oligonucleotide
  Sense strand starting at position 123 of SEQ ID NO: 1882813
uuuauagcgucauuaguug

SEQ ID NO: 2149305 - RNA, 19 nt, Artificial Sequence
  Description of Artificial Sequence: Synthetic oligonucleotide
  Antisense strand to SEQ ID NO: 2149304
caacuaaugacgcuauaaa

SEQ ID NO: 2149306 - RNA, 19 nt, Artificial Sequence
  Description of Artificial Sequence: Synthetic oligonucleotide
  Sense strand starting at position 129 of SEQ ID NO: 1882813
gcgucauuaguuguuacua

SEQ ID NO: 2149307 - RNA, 19 nt, Artificial Sequence
  Description of Artificial Sequence: Synthetic oligonucleotide
  Antisense strand to SEQ ID NO: 2149306
uaguaacaacuaaugacgc

SEQ ID NO: 2149308 - RNA, 19 nt, Artificial Sequence
  Description of Artificial Sequence: Synthetic oligonucleotide
  Sense strand starting at position 130 of SEQ ID NO: 1882813
cgucauuaguuguuacuau

SEQ ID NO: 2149309 - RNA, 19 nt, Artificial Sequence
  Description of Artificial Sequence: Synthetic oligonucleotide
  Antisense strand to SEQ ID NO: 2149308
auaguaacaacuaaugacg

SEQ ID NO: 2149310 - RNA, 19 nt, Artificial Sequence
  Description of Artificial Sequence: Synthetic oligonucleotide
  Sense strand starting at position 137 of SEQ ID NO: 1882813
aguuguuacuaugauuaug

SEQ ID NO: 2149311 - RNA, 19 nt, Artificial Sequence
  Description of Artificial Sequence: Synthetic oligonucleotide
  Antisense strand to SEQ ID NO: 2149310
cauaaucauaguaacaacu

SEQ ID NO: 2149312 - RNA, 19 nt, Artificial Sequence
  Description of Artificial Sequence: Synthetic oligonucleotide
  Sense strand starting at position 184 of SEQ ID NO: 1882813
gcacuucugucuuucuaag

SEQ ID NO: 2149313 - RNA, 19 nt, Artificial Sequence
  Description of Artificial Sequence: Synthetic oligonucleotide
  Antisense strand to SEQ ID NO: 2149312
cuuagaaagacagaagugc

SEQ ID NO: 2149314 - RNA, 19 nt, Artificial Sequence
  Description of Artificial Sequence: Synthetic oligonucleotide
  Sense strand starting at position 276 of SEQ ID NO: 1882813
cggccagccagucaauaau

SEQ ID NO: 2149315 - RNA, 19 nt, Artificial Sequence
  Description of Artificial Sequence: Synthetic oligonucleotide
  Antisense strand to SEQ ID NO: 2149314
auuauugacuggcuggccg

SEQ ID NO: 2149316 - RNA, 19 nt, Artificial Sequence
  Description of Artificial Sequence: Synthetic oligonucleotide
  Sense strand starting at position 302 of SEQ ID NO: 1882813
cacuguuggccuuagagga

SEQ ID NO: 2149317 - RNA, 19 nt, Artificial Sequence
  Description of Artificial Sequence: Synthetic oligonucleotide
  Antisense strand to SEQ ID NO: 2149316
uccucuaaggccaacagug

SEQ ID NO: 2149318 - RNA, 19 nt, Artificial Sequence
  Description of Artificial Sequence: Synthetic oligonucleotide
  Sense strand starting at position 444 of SEQ ID NO: 1882813
cgggcaacaucguauauua

SEQ ID NO: 2149319 - RNA, 19 nt, Artificial Sequence
  Description of Artificial Sequence: Synthetic oligonucleotide
  Antisense strand to SEQ ID NO: 2149318
uaauauacgauguugcccg

SEQ ID NO: 2149320 - RNA, 19 nt, Artificial Sequence
  Description of Artificial Sequence: Synthetic oligonucleotide
  Sense strand starting at position 451 of SEQ ID NO: 1882813
caucguauauuaggccaaa

SEQ ID NO: 2149321 - RNA, 19 nt, Artificial Sequence
  Description of Artificial Sequence: Synthetic oligonucleotide
  Antisense strand to SEQ ID NO: 2149320
uuuggccuaauauacgaug

SEQ ID NO: 2149322 - RNA, 19 nt, Artificial Sequence
  Description of Artificial Sequence: Synthetic oligonucleotide
  Sense strand starting at position 452 of SEQ ID NO: 1882813
aucguauauuaggccaaau

SEQ ID NO: 2149323 - RNA, 19 nt, Artificial Sequence
  Description of Artificial Sequence: Synthetic oligonucleotide
  Antisense strand to SEQ ID NO: 2149322
auuuggccuaauauacgau

SEQ ID NO: 2149324 - RNA, 19 nt, Artificial Sequence
  Description of Artificial Sequence: Synthetic oligonucleotide
  Sense strand starting at position 477 of SEQ ID NO: 1882813
uucuuaccuuuaugagaag

SEQ ID NO: 2149325 - RNA, 19 nt, Artificial Sequence
  Description of Artificial Sequence: Synthetic oligonucleotide
  Antisense strand to SEQ ID NO: 2149324
cuucucauaaagguaagaa

SEQ ID NO: 2149326 - RNA, 19 nt, Artificial Sequence
  Description of Artificial Sequence: Synthetic oligonucleotide
  Sense strand starting at position 500 of SEQ ID NO: 1882813
cucguagucuaguggaguu

SEQ ID NO: 2149327 - RNA, 19 nt, Artificial Sequence
  Description of Artificial Sequence: Synthetic oligonucleotide
  Antisense strand to SEQ ID NO: 2149326
aacuccacuagacuacgag

SEQ ID NO: 2149328 - RNA, 19 nt, Artificial Sequence
  Description of Artificial Sequence: Synthetic oligonucleotide
  Sense strand starting at position 542 of SEQ ID NO: 1882813
cugugcucuccagagauac

SEQ ID NO: 2149329 - RNA, 19 nt, Artificial Sequence
  Description of Artificial Sequence: Synthetic oligonucleotide
  Antisense strand to SEQ ID NO: 2149328
guaucucuggagagcacag

SEQ ID NO: 2149330 - RNA, 19 nt, Artificial Sequence
  Description of Artificial Sequence: Synthetic oligonucleotide
  Sense strand starting at position 640 of SEQ ID NO: 1882813
aagauagugucuuguacuu

SEQ ID NO: 2149331 - RNA, 19 nt, Artificial Sequence
  Description of Artificial Sequence: Synthetic oligonucleotide
  Antisense strand to SEQ ID NO: 2149330
aaguacaagacacuaucuu

SEQ ID NO: 2149332 - RNA, 19 nt, Artificial Sequence
  Description of Artificial Sequence: Synthetic oligonucleotide
  Sense strand starting at position 642 of SEQ ID NO: 1882813
gauagugucuuguacuuga

SEQ ID NO: 2149333 - RNA, 19 nt, Artificial Sequence
  Description of Artificial Sequence: Synthetic oligonucleotide
  Antisense strand to SEQ ID NO: 2149332
ucaaguacaagacacuauc

SEQ ID NO: 2149334 - RNA, 19 nt, Artificial Sequence
  Description of Artificial Sequence: Synthetic oligonucleotide
  Sense strand starting at position 646 of SEQ ID NO: 1882813
gugucuuguacuugaguga

SEQ ID NO: 2149335 - RNA, 19 nt, Artificial Sequence
  Description of Artificial Sequence: Synthetic oligonucleotide
  Antisense strand to SEQ ID NO: 2149334
ucacucaaguacaagacac

SEQ ID NO: 2149336 - RNA, 19 nt, Artificial Sequence
  Description of Artificial Sequence: Synthetic oligonucleotide
  Sense strand starting at position 647 of SEQ ID NO: 1882813
ugucuuguacuugagugau

SEQ ID NO: 2149337 - RNA, 19 nt, Artificial Sequence
  Description of Artificial Sequence: Synthetic oligonucleotide
  Antisense strand to SEQ ID NO: 2149336
aucacucaaguacaagaca

SEQ ID NO: 2149338 - RNA, 19 nt, Artificial Sequence
  Description of Artificial Sequence: Synthetic oligonucleotide
  Sense strand starting at position 650 of SEQ ID NO: 1882813
cuuguacuugagugaucuu

SEQ ID NO: 2149339 - RNA, 19 nt, Artificial Sequence
  Description of Artificial Sequence: Synthetic oligonucleotide
  Antisense strand to SEQ ID NO: 2149338
aagaucacucaaguacaag

SEQ ID NO: 2149340 - RNA, 19 nt, Artificial Sequence
  Description of Artificial Sequence: Synthetic oligonucleotide
  Sense strand starting at position 670 of SEQ ID NO: 1882813
uuucuaugauacugucuuu

SEQ ID NO: 2149341 - RNA, 19 nt, Artificial Sequence
  Description of Artificial Sequence: Synthetic oligonucleotide
  Antisense strand to SEQ ID NO: 2149340
aaagacaguaucauagaaa

SEQ ID NO: 2149342 - RNA, 19 nt, Artificial Sequence
  Description of Artificial Sequence: Synthetic oligonucleotide
  Sense strand starting at position 766 of SEQ ID NO: 1882813
uauagaugauguuugagca

SEQ ID NO: 2149343 - RNA, 19 nt, Artificial Sequence
  Description of Artificial Sequence: Synthetic oligonucleotide
  Antisense strand to SEQ ID NO: 2149342
ugcucaaacaucaucuaua

SEQ ID NO: 2149344 - RNA, 19 nt, Artificial Sequence
  Description of Artificial Sequence: Synthetic oligonucleotide
  Sense strand starting at position 770 of SEQ ID NO: 1882813
gaugauguuugagcagcaa

SEQ ID NO: 2149345 - RNA, 19 nt, Artificial Sequence
  Description of Artificial Sequence: Synthetic oligonucleotide
  Antisense strand to SEQ ID NO: 2149344
uugcugcucaaacaucauc

SEQ ID NO: 2149346 - RNA, 19 nt, Artificial Sequence
  Description of Artificial Sequence: Synthetic oligonucleotide
  Sense strand starting at position 774 of SEQ ID NO: 1882813
auguuugagcagcaauauu

SEQ ID NO: 2149347 - RNA, 19 nt, Artificial Sequence
  Description of Artificial Sequence: Synthetic oligonucleotide
  Antisense strand to SEQ ID NO: 2149346
aauauugcugcucaaacau

SEQ ID NO: 2149348 - RNA, 19 nt, Artificial Sequence
  Description of Artificial Sequence: Synthetic oligonucleotide
  Sense strand starting at position 841 of SEQ ID NO: 1882813
gcugauaugacccagaugu

SEQ ID NO: 2149349 - RNA, 19 nt, Artificial Sequence
  Description of Artificial Sequence: Synthetic oligonucleotide
  Antisense strand to SEQ ID NO: 2149348
acaucugggucauaucagc

SEQ ID NO: 2149350 - RNA, 19 nt, Artificial Sequence
  Description of Artificial Sequence: Synthetic oligonucleotide
  Sense strand starting at position 848 of SEQ ID NO: 1882813
ugacccagaugucucuaau

SEQ ID NO: 2149351 - RNA, 19 nt, Artificial Sequence
  Description of Artificial Sequence: Synthetic oligonucleotide
  Antisense strand to SEQ ID NO: 2149350
auuagagacaucuggguca

SEQ ID NO: 2149352 - RNA, 19 nt, Artificial Sequence
  Description of Artificial Sequence: Synthetic oligonucleotide
  Sense strand starting at position 899 of SEQ ID NO: 1882813
gagugaguuccugguguau

SEQ ID NO: 2149353 - RNA, 19 nt, Artificial Sequence
  Description of Artificial Sequence: Synthetic oligonucleotide
  Antisense strand to SEQ ID NO: 2149352
auacaccaggaacucacuc

SEQ ID NO: 2149354 - RNA, 19 nt, Artificial Sequence
  Description of Artificial Sequence: Synthetic oligonucleotide
  Sense strand starting at position 912 of SEQ ID NO: 1882813
guguauccacaaggaaaug

SEQ ID NO: 2149355 - RNA, 19 nt, Artificial Sequence
  Description of Artificial Sequence: Synthetic oligonucleotide
  Antisense strand to SEQ ID NO: 2149354
cauuuccuuguggauacac

SEQ ID NO: 2149356 - RNA, 19 nt, Artificial Sequence
  Description of Artificial Sequence: Synthetic oligonucleotide
  Sense strand starting at position 962 of SEQ ID NO: 1882813
gugcgcugugcuugaauag

SEQ ID NO: 2149357 - RNA, 19 nt, Artificial Sequence
  Description of Artificial Sequence: Synthetic oligonucleotide
  Antisense strand to SEQ ID NO: 2149356
cuauucaagcacagcgcac

SEQ ID NO: 2149358 - RNA, 19 nt, Artificial Sequence
  Description of Artificial Sequence: Synthetic oligonucleotide
  Sense strand starting at position 977 of SEQ ID NO: 1882813
auagcugacugcuccuuua

SEQ ID NO: 2149359 - RNA, 19 nt, Artificial Sequence
  Description of Artificial Sequence: Synthetic oligonucleotide
  Antisense strand to SEQ ID NO: 2149358
uaaaggagcagucagcuau

SEQ ID NO: 2149360 - RNA, 19 nt, Artificial Sequence
  Description of Artificial Sequence: Synthetic oligonucleotide
  Sense strand starting at position 980 of SEQ ID NO: 1882813
gcugacugcuccuuuauac

SEQ ID NO: 2149361 - RNA, 19 nt, Artificial Sequence
  Description of Artificial Sequence: Synthetic oligonucleotide
  Antisense strand to SEQ ID NO: 2149360
guauaaaggagcagucagc

SEQ ID NO: 2149362 - RNA, 19 nt, Artificial Sequence
  Description of Artificial Sequence: Synthetic oligonucleotide
  Sense strand starting at position 1004 of SEQ ID NO: 1882813
cucugugcugacugaauca

SEQ ID NO: 2149363 - RNA, 19 nt, Artificial Sequence
  Description of Artificial Sequence: Synthetic oligonucleotide
  Antisense strand to SEQ ID NO: 2149362
ugauucagucagcacagag

SEQ ID NO: 2149364 - RNA, 19 nt, Artificial Sequence
  Description of Artificial Sequence: Synthetic oligonucleotide
  Sense strand starting at position 2473 of SEQ ID NO: 1882813
aauauucuacugugucgua

SEQ ID NO: 2149365 - RNA, 19 nt, Artificial Sequence
  Description of Artificial Sequence: Synthetic oligonucleotide
  Antisense strand to SEQ ID NO: 2149364
uacgacacaguagaauauu

SEQ ID NO: 2149366 - RNA, 19 nt, Artificial Sequence
  Description of Artificial Sequence: Synthetic oligonucleotide
  Sense strand starting at position 2488 of SEQ ID NO: 1882813
cguagucacaaugauugga

SEQ ID NO: 2149367 - RNA, 19 nt, Artificial Sequence
  Description of Artificial Sequence: Synthetic oligonucleotide
  Antisense strand to SEQ ID NO: 2149366
uccaaucauugugacuacg

SEQ ID NO: 2149368 - RNA, 19 nt, Artificial Sequence
  Description of Artificial Sequence: Synthetic oligonucleotide
  Sense strand starting at position 3722 of SEQ ID NO: 1882813
acugacaguuucuguuaau

SEQ ID NO: 2149369 - RNA, 19 nt, Artificial Sequence
  Description of Artificial Sequence: Synthetic oligonucleotide
  Antisense strand to SEQ ID NO: 2149368
auuaacagaaacugucagu

SEQ ID NO: 2149370 - RNA, 19 nt, Artificial Sequence
  Description of Artificial Sequence: Synthetic oligonucleotide
  Sense strand starting at position 3723 of SEQ ID NO: 1882813
cugacaguuucuguuaauc

SEQ ID NO: 2149371 - RNA, 19 nt, Artificial Sequence
  Description of Artificial Sequence: Synthetic oligonucleotide
  Antisense strand to SEQ ID NO: 2149370
gauuaacagaaacugucag

SEQ ID NO: 2149372 - RNA, 19 nt, Artificial Sequence
  Description of Artificial Sequence: Synthetic oligonucleotide
  Sense strand starting at position 3834 of SEQ ID NO: 1882813
ucugcauugcaguaguaca

SEQ ID NO: 2149373 - RNA, 19 nt, Artificial Sequence
  Description of Artificial Sequence: Synthetic oligonucleotide
  Antisense strand to SEQ ID NO: 2149372
uguacuacugcaaugcaga

SEQ ID NO: 2149374 - RNA, 19 nt, Artificial Sequence
  Description of Artificial Sequence: Synthetic oligonucleotide
  Sense strand starting at position 65 of SEQ ID NO: 1882814
cgagcuauuucgaggucug

SEQ ID NO: 2149375 - RNA, 19 nt, Artificial Sequence
  Description of Artificial Sequence: Synthetic oligonucleotide
  Antisense strand to SEQ ID NO: 2149374
cagaccucgaaauagcucg

SEQ ID NO: 2149376 - RNA, 19 nt, Artificial Sequence
  Description of Artificial Sequence: Synthetic oligonucleotide
  Sense strand starting at position 178 of SEQ ID NO: 1882814
cgcgcuguguuucugggaa

SEQ ID NO: 2149377 - RNA, 19 nt, Artificial Sequence
  Description of Artificial Sequence: Synthetic oligonucleotide
  Antisense strand to SEQ ID NO: 2149376
uucccagaaacacagcgcg

SEQ ID NO: 2149378 - RNA, 19 nt, Artificial Sequence
  Description of Artificial Sequence: Synthetic oligonucleotide
  Sense strand starting at position 566 of SEQ ID NO: 1882814
gcuggcuuugcuucgaguu

SEQ ID NO: 2149379 - RNA, 19 nt, Artificial Sequence
  Description of Artificial Sequence: Synthetic oligonucleotide
  Antisense strand to SEQ ID NO: 2149378
aacucgaagcaaagccagc

SEQ ID NO: 2149380 - RNA, 19 nt, Artificial Sequence
  Description of Artificial Sequence: Synthetic oligonucleotide
  Sense strand starting at position 567 of SEQ ID NO: 1882814
cuggcuuugcuucgaguuu

SEQ ID NO: 2149381 - RNA, 19 nt, Artificial Sequence
  Description of Artificial Sequence: Synthetic oligonucleotide
  Antisense strand to SEQ ID NO: 2149380
aaacucgaagcaaagccag

SEQ ID NO: 2149382 - RNA, 19 nt, Artificial Sequence
  Description of Artificial Sequence: Synthetic oligonucleotide
  Sense strand starting at position 568 of SEQ ID NO: 1882814
uggcuuugcuucgaguuua

SEQ ID NO: 2149383 - RNA, 19 nt, Artificial Sequence
  Description of Artificial Sequence: Synthetic oligonucleotide
  Antisense strand to SEQ ID NO: 2149382
uaaacucgaagcaaagcca

SEQ ID NO: 2149384 - RNA, 19 nt, Artificial Sequence
  Description of Artificial Sequence: Synthetic oligonucleotide
  Sense strand starting at position 1523 of SEQ ID NO: 1882814
gcggcugggcuuugauaga

SEQ ID NO: 2149385 - RNA, 19 nt, Artificial Sequence
  Description of Artificial Sequence: Synthetic oligonucleotide
  Antisense strand to SEQ ID NO: 2149384
ucuaucaaagcccagccgc

SEQ ID NO: 2149386 - RNA, 19 nt, Artificial Sequence
  Description of Artificial Sequence: Synthetic oligonucleotide
  Sense strand starting at position 1996 of SEQ ID NO: 1882814
ccgugccauuuccauauua

SEQ ID NO: 2149387 - RNA, 19 nt, Artificial Sequence
  Description of Artificial Sequence: Synthetic oligonucleotide
  Antisense strand to SEQ ID NO: 2149386
uaauauggaaauggcacgg

SEQ ID NO: 2149388 - RNA, 19 nt, Artificial Sequence
  Description of Artificial Sequence: Synthetic oligonucleotide
  Sense strand starting at position 2332 of SEQ ID NO: 1882814
ggaucaggucccugucuuu

SEQ ID NO: 2149389 - RNA, 19 nt, Artificial Sequence
  Description of Artificial Sequence: Synthetic oligonucleotide
  Antisense strand to SEQ ID NO: 2149388
aaagacagggaccugaucc

SEQ ID NO: 2149390 - RNA, 19 nt, Artificial Sequence
  Description of Artificial Sequence: Synthetic oligonucleotide
  Sense strand starting at position 2498 of SEQ ID NO: 1882814
ucuggacucagugaggcau

SEQ ID NO: 2149391 - RNA, 19 nt, Artificial Sequence
  Description of Artificial Sequence: Synthetic oligonucleotide
  Antisense strand to SEQ ID NO: 2149390
augccucacugaguccaga

SEQ ID NO: 2149392 - RNA, 19 nt, Artificial Sequence
  Description of Artificial Sequence: Synthetic oligonucleotide
  Sense strand starting at position 2833 of SEQ ID NO: 1882814
ugaggucacccucguguaa

SEQ ID NO: 2149393 - RNA, 19 nt, Artificial Sequence
  Description of Artificial Sequence: Synthetic oligonucleotide
  Antisense strand to SEQ ID NO: 2149392
uuacacgagggugaccuca

SEQ ID NO: 2149394 - RNA, 19 nt, Artificial Sequence
  Description of Artificial Sequence: Synthetic oligonucleotide
  Sense strand starting at position 2835 of SEQ ID NO: 1882814
aggucacccucguguaacu

SEQ ID NO: 2149395 - RNA, 19 nt, Artificial Sequence
  Description of Artificial Sequence: Synthetic oligonucleotide
  Antisense strand to SEQ ID NO: 2149394
aguuacacgagggugaccu

SEQ ID NO: 2149396 - RNA, 19 nt, Artificial Sequence
  Description of Artificial Sequence: Synthetic oligonucleotide
  Sense strand starting at position 2866 of SEQ ID NO: 1882814
auauauuguccuggcaaau

SEQ ID NO: 2149397 - RNA, 19 nt, Artificial Sequence
  Description of Artificial Sequence: Synthetic oligonucleotide
  Antisense strand to SEQ ID NO: 2149396
auuugccaggacaauauau

SEQ ID NO: 2149398 - RNA, 19 nt, Artificial Sequence
  Description of Artificial Sequence: Synthetic oligonucleotide
  Sense strand starting at position 3336 of SEQ ID NO: 1882814
aucaaaggaugcucaguaa

SEQ ID NO: 2149399 - RNA, 19 nt, Artificial Sequence
  Description of Artificial Sequence: Synthetic oligonucleotide
  Antisense strand to SEQ ID NO: 2149398
uuacugagcauccuuugau

SEQ ID NO: 2149400 - RNA, 19 nt, Artificial Sequence
  Description of Artificial Sequence: Synthetic oligonucleotide
  Sense strand starting at position 3339 of SEQ ID NO: 1882814
aaaggaugcucaguaagga

SEQ ID NO: 2149401 - RNA, 19 nt, Artificial Sequence
  Description of Artificial Sequence: Synthetic oligonucleotide
  Antisense strand to SEQ ID NO: 2149400
uccuuacugagcauccuuu

SEQ ID NO: 2149402 - RNA, 19 nt, Artificial Sequence
  Description of Artificial Sequence: Synthetic oligonucleotide
  Sense strand starting at position 3390 of SEQ ID NO: 1882814
ccgggugaguuaugggcau

SEQ ID NO: 2149403 - RNA, 19 nt, Artificial Sequence
  Description of Artificial Sequence: Synthetic oligonucleotide
  Antisense strand to SEQ ID NO: 2149402
augcccauaacucacccgg

SEQ ID NO: 2149404 - RNA, 19 nt, Artificial Sequence
  Description of Artificial Sequence: Synthetic oligonucleotide
  Sense strand starting at position 3391 of SEQ ID NO: 1882814
cgggugaguuaugggcaua

SEQ ID NO: 2149405 - RNA, 19 nt, Artificial Sequence
  Description of Artificial Sequence: Synthetic oligonucleotide
  Antisense strand to SEQ ID NO: 2149404
uaugcccauaacucacccg

SEQ ID NO: 2149406 - RNA, 19 nt, Artificial Sequence
  Description of Artificial Sequence: Synthetic oligonucleotide
  Sense strand starting at position 3392 of SEQ ID NO: 1882814
gggugaguuaugggcauau

SEQ ID NO: 2149407 - RNA, 19 nt, Artificial Sequence
  Description of Artificial Sequence: Synthetic oligonucleotide
  Antisense strand to SEQ ID NO: 2149406
auaugcccauaacucaccc

SEQ ID NO: 2149408 - RNA, 19 nt, Artificial Sequence
  Description of Artificial Sequence: Synthetic oligonucleotide
  Sense strand starting at position 3394 of SEQ ID NO: 1882814
gugaguuaugggcauaugu

SEQ ID NO: 2149409 - RNA, 19 nt, Artificial Sequence
  Description of Artificial Sequence: Synthetic oligonucleotide
  Antisense strand to SEQ ID NO: 2149408
acauaugcccauaacucac

SEQ ID NO: 2149410 - RNA, 19 nt, Artificial Sequence
  Description of Artificial Sequence: Synthetic oligonucleotide
  Sense strand starting at position 3396 of SEQ ID NO: 1882814
gaguuaugggcauauguau

SEQ ID NO: 2149411 - RNA, 19 nt, Artificial Sequence
  Description of Artificial Sequence: Synthetic oligonucleotide
  Antisense strand to SEQ ID NO: 2149410
auacauaugcccauaacuc

SEQ ID NO: 2149412 - RNA, 19 nt, Artificial Sequence
  Description of Artificial Sequence: Synthetic oligonucleotide
  Sense strand starting at position 3403 of SEQ ID NO: 1882814
gggcauauguauuauaaua

SEQ ID NO: 2149413 - RNA, 19 nt, Artificial Sequence
  Description of Artificial Sequence: Synthetic oligonucleotide
  Antisense strand to SEQ ID NO: 2149412
uauuauaauacauaugccc

SEQ ID NO: 2149414 - RNA, 19 nt, Artificial Sequence
  Description of Artificial Sequence: Synthetic oligonucleotide
  Sense strand starting at position 3514 of SEQ ID NO: 1882814
guuugcugguuucuguaaa

SEQ ID NO: 2149415 - RNA, 19 nt, Artificial Sequence
  Description of Artificial Sequence: Synthetic oligonucleotide
  Antisense strand to SEQ ID NO: 2149414
uuuacagaaaccagcaaac

SEQ ID NO: 2149416 - RNA, 19 nt, Artificial Sequence
  Description of Artificial Sequence: Synthetic oligonucleotide
  Sense strand starting at position 3515 of SEQ ID NO: 1882814
uuugcugguuucuguaaau

SEQ ID NO: 2149417 - RNA, 19 nt, Artificial Sequence
  Description of Artificial Sequence: Synthetic oligonucleotide
  Antisense strand to SEQ ID NO: 2149416
auuuacagaaaccagcaaa

SEQ ID NO: 2149418 - RNA, 19 nt, Artificial Sequence
  Description of Artificial Sequence: Synthetic oligonucleotide
  Sense strand starting at position 3544 of SEQ ID NO: 1882814
gggcaaugggauggaugua

SEQ ID NO: 2149419 - RNA, 19 nt, Artificial Sequence
  Description of Artificial Sequence: Synthetic oligonucleotide
  Antisense strand to SEQ ID NO: 2149418
uacauccaucccauugccc

SEQ ID NO: 2149420 - RNA, 19 nt, Artificial Sequence
  Description of Artificial Sequence: Synthetic oligonucleotide
  Sense strand starting at position 3663 of SEQ ID NO: 1882814
ggccguuugccguggguau

SEQ ID NO: 2149421 - RNA, 19 nt, Artificial Sequence
  Description of Artificial Sequence: Synthetic oligonucleotide
  Antisense strand to SEQ ID NO: 2149420
auacccacggcaaacggcc

SEQ ID NO: 2149422 - RNA, 19 nt, Artificial Sequence
  Description of Artificial Sequence: Synthetic oligonucleotide
  Sense strand starting at position 3664 of SEQ ID NO: 1882814
gccguuugccguggguauu

SEQ ID NO: 2149423 - RNA, 19 nt, Artificial Sequence
  Description of Artificial Sequence: Synthetic oligonucleotide
  Antisense strand to SEQ ID NO: 2149422
aauacccacggcaaacggc

SEQ ID NO: 2149424 - RNA, 19 nt, Artificial Sequence
  Description of Artificial Sequence: Synthetic oligonucleotide
  Sense strand starting at position 3667 of SEQ ID NO: 1882814
guuugccguggguauuuaa

SEQ ID NO: 2149425 - RNA, 19 nt, Artificial Sequence
  Description of Artificial Sequence: Synthetic oligonucleotide
  Antisense strand to SEQ ID NO: 2149424
uuaaauacccacggcaaac

SEQ ID NO: 2149426 - RNA, 19 nt, Artificial Sequence
  Description of Artificial Sequence: Synthetic oligonucleotide
  Sense strand starting at position 3917 of SEQ ID NO: 1882814
guguguugccaagagcuau

SEQ ID NO: 2149427 - RNA, 19 nt, Artificial Sequence
  Description of Artificial Sequence: Synthetic oligonucleotide
  Antisense strand to SEQ ID NO: 2149426
auagcucuuggcaacacac

SEQ ID NO: 2149428 - RNA, 19 nt, Artificial Sequence
  Description of Artificial Sequence: Synthetic oligonucleotide
  Sense strand starting at position 3923 of SEQ ID NO: 1882814
ugccaagagcuauaaucca

SEQ ID NO: 2149429 - RNA, 19 nt, Artificial Sequence
  Description of Artificial Sequence: Synthetic oligonucleotide
  Antisense strand to SEQ ID NO: 2149428
uggauuauagcucuuggca

SEQ ID NO: 2149430 - RNA, 19 nt, Artificial Sequence
  Description of Artificial Sequence: Synthetic oligonucleotide
  Sense strand starting at position 84 of SEQ ID NO: 1882815
uggugcagccucugggaaa

SEQ ID NO: 2149431 - RNA, 19 nt, Artificial Sequence
  Description of Artificial Sequence: Synthetic oligonucleotide
  Antisense strand to SEQ ID NO: 2149430
uuucccagaggcugcacca

SEQ ID NO: 2149432 - RNA, 19 nt, Artificial Sequence
  Description of Artificial Sequence: Synthetic oligonucleotide
  Sense strand starting at position 110 of SEQ ID NO: 1882815
cuaggaguuuguuucccuu

SEQ ID NO: 2149433 - RNA, 19 nt, Artificial Sequence
  Description of Artificial Sequence: Synthetic oligonucleotide
  Antisense strand to SEQ ID NO: 2149432
aagggaaacaaacuccuag

SEQ ID NO: 2149434 - RNA, 19 nt, Artificial Sequence
  Description of Artificial Sequence: Synthetic oligonucleotide
  Sense strand starting at position 113 of SEQ ID NO: 1882815
ggaguuuguuucccuuuga

SEQ ID NO: 2149435 - RNA, 19 nt, Artificial Sequence
  Description of Artificial Sequence: Synthetic oligonucleotide
  Antisense strand to SEQ ID NO: 2149434
ucaaagggaaacaaacucc

SEQ ID NO: 2149436 - RNA, 19 nt, Artificial Sequence
  Description of Artificial Sequence: Synthetic oligonucleotide
  Sense strand starting at position 114 of SEQ ID NO: 1882815
gaguuuguuucccuuugaa

SEQ ID NO: 2149437 - RNA, 19 nt, Artificial Sequence
  Description of Artificial Sequence: Synthetic oligonucleotide
  Antisense strand to SEQ ID NO: 2149436
uucaaagggaaacaaacuc

SEQ ID NO: 2149438 - RNA, 19 nt, Artificial Sequence
  Description of Artificial Sequence: Synthetic oligonucleotide
  Sense strand starting at position 162 of SEQ ID NO: 1882815
gaaggaccucagugacauc

SEQ ID NO: 2149439 - RNA, 19 nt, Artificial Sequence
  Description of Artificial Sequence: Synthetic oligonucleotide
  Antisense strand to SEQ ID NO: 2149438
gaugucacugagguccuuc

SEQ ID NO: 2149440 - RNA, 19 nt, Artificial Sequence
  Description of Artificial Sequence: Synthetic oligonucleotide
  Sense strand starting at position 281 of SEQ ID NO: 1882815
ucugcucucugcuaaaugu

SEQ ID NO: 2149441 - RNA, 19 nt, Artificial Sequence
  Description of Artificial Sequence: Synthetic oligonucleotide
  Antisense strand to SEQ ID NO: 2149440
acauuuagcagagagcaga

SEQ ID NO: 2149442 - RNA, 19 nt, Artificial Sequence
  Description of Artificial Sequence: Synthetic oligonucleotide
  Sense strand starting at position 483 of SEQ ID NO: 1882815
ggcugagucuucucugggu

SEQ ID NO: 2149443 - RNA, 19 nt, Artificial Sequence
  Description of Artificial Sequence: Synthetic oligonucleotide
  Antisense strand to SEQ ID NO: 2149442
acccagagaagacucagcc

SEQ ID NO: 2149444 - RNA, 19 nt, Artificial Sequence
  Description of Artificial Sequence: Synthetic oligonucleotide
  Sense strand starting at position 618 of SEQ ID NO: 1882815
cgagcuauuucgaggucug

SEQ ID NO: 2149445 - RNA, 19 nt, Artificial Sequence
  Description of Artificial Sequence: Synthetic oligonucleotide
  Antisense strand to SEQ ID NO: 2149444
cagaccucgaaauagcucg

SEQ ID NO: 2149446 - RNA, 19 nt, Artificial Sequence
  Description of Artificial Sequence: Synthetic oligonucleotide
  Sense strand starting at position 731 of SEQ ID NO: 1882815
cgcgcuguguuucugggaa

SEQ ID NO: 2149447 - RNA, 19 nt, Artificial Sequence
  Description of Artificial Sequence: Synthetic oligonucleotide
  Antisense strand to SEQ ID NO: 2149446
uucccagaaacacagcgcg

SEQ ID NO: 2149448 - RNA, 19 nt, Artificial Sequence
  Description of Artificial Sequence: Synthetic oligonucleotide
  Sense strand starting at position 1119 of SEQ ID NO: 1882815
gcuggcuuugcuucgaguu

SEQ ID NO: 2149449 - RNA, 19 nt, Artificial Sequence
  Description of Artificial Sequence: Synthetic oligonucleotide
  Antisense strand to SEQ ID NO: 2149448
aacucgaagcaaagccagc

SEQ ID NO: 2149450 - RNA, 19 nt, Artificial Sequence
  Description of Artificial Sequence: Synthetic oligonucleotide
  Sense strand starting at position 1120 of SEQ ID NO: 1882815
cuggcuuugcuucgaguuu

SEQ ID NO: 2149451 - RNA, 19 nt, Artificial Sequence
  Description of Artificial Sequence: Synthetic oligonucleotide
  Antisense strand to SEQ ID NO: 2149450
aaacucgaagcaaagccag

SEQ ID NO: 2149452 - RNA, 19 nt, Artificial Sequence
  Description of Artificial Sequence: Synthetic oligonucleotide
  Sense strand starting at position 1121 of SEQ ID NO: 1882815
uggcuuugcuucgaguuua

SEQ ID NO: 2149453 - RNA, 19 nt, Artificial Sequence
  Description of Artificial Sequence: Synthetic oligonucleotide
  Antisense strand to SEQ ID NO: 2149452
uaaacucgaagcaaagcca

SEQ ID NO: 2149454 - RNA, 19 nt, Artificial Sequence
  Description of Artificial Sequence: Synthetic oligonucleotide
  Sense strand starting at position 2076 of SEQ ID NO: 1882815
gcggcugggcuuugauaga

SEQ ID NO: 2149455 - RNA, 19 nt, Artificial Sequence
  Description of Artificial Sequence: Synthetic oligonucleotide
  Antisense strand to SEQ ID NO: 2149454
ucuaucaaagcccagccgc

SEQ ID NO: 2149456 - RNA, 19 nt, Artificial Sequence
  Description of Artificial Sequence: Synthetic oligonucleotide
  Sense strand starting at position 2549 of SEQ ID NO: 1882815
ccgugccauuuccauauua

SEQ ID NO: 2149457 - RNA, 19 nt, Artificial Sequence
  Description of Artificial Sequence: Synthetic oligonucleotide
  Antisense strand to SEQ ID NO: 2149456
uaauauggaaauggcacgg

SEQ ID NO: 2149458 - RNA, 19 nt, Artificial Sequence
  Description of Artificial Sequence: Synthetic oligonucleotide
  Sense strand starting at position 2885 of SEQ ID NO: 1882815
ggaucaggucccugucuuu

SEQ ID NO: 2149459 - RNA, 19 nt, Artificial Sequence
  Description of Artificial Sequence: Synthetic oligonucleotide
  Antisense strand to SEQ ID NO: 2149458
aaagacagggaccugaucc

SEQ ID NO: 2149460 - RNA, 19 nt, Artificial Sequence
  Description of Artificial Sequence: Synthetic oligonucleotide
  Sense strand starting at position 3051 of SEQ ID NO: 1882815
ucuggacucagugaggcau

SEQ ID NO: 2149461 - RNA, 19 nt, Artificial Sequence
  Description of Artificial Sequence: Synthetic oligonucleotide
  Antisense strand to SEQ ID NO: 2149460
augccucacugaguccaga

SEQ ID NO: 2149462 - RNA, 19 nt, Artificial Sequence
  Description of Artificial Sequence: Synthetic oligonucleotide
  Sense strand starting at position 3386 of SEQ ID NO: 1882815
ugaggucacccucguguaa

SEQ ID NO: 2149463 - RNA, 19 nt, Artificial Sequence
  Description of Artificial Sequence: Synthetic oligonucleotide
  Antisense strand to SEQ ID NO: 2149462
uuacacgagggugaccuca

SEQ ID NO: 2149464 - RNA, 19 nt, Artificial Sequence
  Description of Artificial Sequence: Synthetic oligonucleotide
  Sense strand starting at position 3388 of SEQ ID NO: 1882815
aggucacccucguguaacu

SEQ ID NO: 2149465 - RNA, 19 nt, Artificial Sequence
  Description of Artificial Sequence: Synthetic oligonucleotide
  Antisense strand to SEQ ID NO: 2149464
aguuacacgagggugaccu

SEQ ID NO: 2149466 - RNA, 19 nt, Artificial Sequence
  Description of Artificial Sequence: Synthetic oligonucleotide
  Sense strand starting at position 3419 of SEQ ID NO: 1882815
auauauuguccuggcaaau

SEQ ID NO: 2149467 - RNA, 19 nt, Artificial Sequence
  Description of Artificial Sequence: Synthetic oligonucleotide
  Antisense strand to SEQ ID NO: 2149466
auuugccaggacaauauau

SEQ ID NO: 2149468 - RNA, 19 nt, Artificial Sequence
  Description of Artificial Sequence: Synthetic oligonucleotide
  Sense strand starting at position 3889 of SEQ ID NO: 1882815
aucaaaggaugcucaguaa

SEQ ID NO: 2149469 - RNA, 19 nt, Artificial Sequence
  Description of Artificial Sequence: Synthetic oligonucleotide
  Antisense strand to SEQ ID NO: 2149468
uuacugagcauccuuugau

SEQ ID NO: 2149470 - RNA, 19 nt, Artificial Sequence
  Description of Artificial Sequence: Synthetic oligonucleotide
  Sense strand starting at position 3892 of SEQ ID NO: 1882815
aaaggaugcucaguaagga

SEQ ID NO: 2149471 - RNA, 19 nt, Artificial Sequence
  Description of Artificial Sequence: Synthetic oligonucleotide
  Antisense strand to SEQ ID NO: 2149470
uccuuacugagcauccuuu

SEQ ID NO: 2149472 - RNA, 19 nt, Artificial Sequence
  Description of Artificial Sequence: Synthetic oligonucleotide
  Sense strand starting at position 3943 of SEQ ID NO: 1882815
ccgggugaguuaugggcau

SEQ ID NO: 2149473 - RNA, 19 nt, Artificial Sequence
  Description of Artificial Sequence: Synthetic oligonucleotide
  Antisense strand to SEQ ID NO: 2149472
augcccauaacucacccgg

SEQ ID NO: 2149474 - RNA, 19 nt, Artificial Sequence
  Description of Artificial Sequence: Synthetic oligonucleotide
  Sense strand starting at position 3944 of SEQ ID NO: 1882815
cgggugaguuaugggcaua

SEQ ID NO: 2149475 - RNA, 19 nt, Artificial Sequence
  Description of Artificial Sequence: Synthetic oligonucleotide
  Antisense strand to SEQ ID NO: 2149474
uaugcccauaacucacccg

SEQ ID NO: 2149476 - RNA, 19 nt, Artificial Sequence
  Description of Artificial Sequence: Synthetic oligonucleotide
  Sense strand starting at position 3945 of SEQ ID NO: 1882815
gggugaguuaugggcauau

SEQ ID NO: 2149477 - RNA, 19 nt, Artificial Sequence
  Description of Artificial Sequence: Synthetic oligonucleotide
  Antisense strand to SEQ ID NO: 2149476
auaugcccauaacucaccc

SEQ ID NO: 2149478 - RNA, 19 nt, Artificial Sequence
  Description of Artificial Sequence: Synthetic oligonucleotide
  Sense strand starting at position 3947 of SEQ ID NO: 1882815
gugaguuaugggcauaugu

SEQ ID NO: 2149479 - RNA, 19 nt, Artificial Sequence
  Description of Artificial Sequence: Synthetic oligonucleotide
  Antisense strand to SEQ ID NO: 2149478
acauaugcccauaacucac

SEQ ID NO: 2149480 - RNA, 19 nt, Artificial Sequence
  Description of Artificial Sequence: Synthetic oligonucleotide
  Sense strand starting at position 3949 of SEQ ID NO: 1882815
gaguuaugggcauauguau

SEQ ID NO: 2149481 - RNA, 19 nt, Artificial Sequence
  Description of Artificial Sequence: Synthetic oligonucleotide
  Antisense strand to SEQ ID NO: 2149480
auacauaugcccauaacuc

SEQ ID NO: 2149482 - RNA, 19 nt, Artificial Sequence
  Description of Artificial Sequence: Synthetic oligonucleotide
  Sense strand starting at position 3956 of SEQ ID NO: 1882815
gggcauauguauuauaaua

SEQ ID NO: 2149483 - RNA, 19 nt, Artificial Sequence
  Description of Artificial Sequence: Synthetic oligonucleotide
  Antisense strand to SEQ ID NO: 2149482
uauuauaauacauaugccc

SEQ ID NO: 2149484 - RNA, 19 nt, Artificial Sequence
  Description of Artificial Sequence: Synthetic oligonucleotide
  Sense strand starting at position 13 of SEQ ID NO: 1882816
ccuugaguucucuggugaa

SEQ ID NO: 2149485 - RNA, 19 nt, Artificial Sequence
  Description of Artificial Sequence: Synthetic oligonucleotide
  Antisense strand to SEQ ID NO: 2149484
uucaccagagaacucaagg

SEQ ID NO: 2149486 - RNA, 19 nt, Artificial Sequence
  Description of Artificial Sequence: Synthetic oligonucleotide
  Sense strand starting at position 67 of SEQ ID NO: 1882816
aguggcucauguucuguaa

SEQ ID NO: 2149487 - RNA, 19 nt, Artificial Sequence
  Description of Artificial Sequence: Synthetic oligonucleotide
  Antisense strand to SEQ ID NO: 2149486
uuacagaacaugagccacu

SEQ ID NO: 2149488 - RNA, 19 nt, Artificial Sequence
  Description of Artificial Sequence: Synthetic oligonucleotide
  Sense strand starting at position 674 of SEQ ID NO: 1882816
cugguugugucuguccuua

SEQ ID NO: 2149489 - RNA, 19 nt, Artificial Sequence
  Description of Artificial Sequence: Synthetic oligonucleotide
  Antisense strand to SEQ ID NO: 2149488
uaaggacagacacaaccag

SEQ ID NO: 2149490 - RNA, 19 nt, Artificial Sequence
  Description of Artificial Sequence: Synthetic oligonucleotide
  Sense strand starting at position 1154 of SEQ ID NO: 1882816
uugagaauguaccuuauga

SEQ ID NO: 2149491 - RNA, 19 nt, Artificial Sequence
  Description of Artificial Sequence: Synthetic oligonucleotide
  Antisense strand to SEQ ID NO: 2149490
ucauaagguacauucucaa

SEQ ID NO: 2149492 - RNA, 19 nt, Artificial Sequence
  Description of Artificial Sequence: Synthetic oligonucleotide
  Sense strand starting at position 1158 of SEQ ID NO: 1882816
gaauguaccuuaugagauc

SEQ ID NO: 2149493 - RNA, 19 nt, Artificial Sequence
  Description of Artificial Sequence: Synthetic oligonucleotide
  Antisense strand to SEQ ID NO: 2149492
gaucucauaagguacauuc

SEQ ID NO: 2149494 - RNA, 19 nt, Artificial Sequence
  Description of Artificial Sequence: Synthetic oligonucleotide
  Sense strand starting at position 1288 of SEQ ID NO: 1882816
gcugcacccgggugaaaua

SEQ ID NO: 2149495 - RNA, 19 nt, Artificial Sequence
  Description of Artificial Sequence: Synthetic oligonucleotide
  Antisense strand to SEQ ID NO: 2149494
uauuucacccgggugcagc

SEQ ID NO: 2149496 - RNA, 19 nt, Artificial Sequence
  Description of Artificial Sequence: Synthetic oligonucleotide
  Sense strand starting at position 1432 of SEQ ID NO: 1882816
gugcaccguccggcuaaua

SEQ ID NO: 2149497 - RNA, 19 nt, Artificial Sequence
  Description of Artificial Sequence: Synthetic oligonucleotide
  Antisense strand to SEQ ID NO: 2149496
uauuagccggacggugcac

SEQ ID NO: 2149498 - RNA, 19 nt, Artificial Sequence
  Description of Artificial Sequence: Synthetic oligonucleotide
  Sense strand starting at position 1712 of SEQ ID NO: 1882816
cgguauuauucuugaagcu

SEQ ID NO: 2149499 - RNA, 19 nt, Artificial Sequence
  Description of Artificial Sequence: Synthetic oligonucleotide
  Antisense strand to SEQ ID NO: 2149498
agcuucaagaauaauaccg

SEQ ID NO: 2149500 - RNA, 19 nt, Artificial Sequence
  Description of Artificial Sequence: Synthetic oligonucleotide
  Sense strand starting at position 1713 of SEQ ID NO: 1882816
gguauuauucuugaagcuu

SEQ ID NO: 2149501 - RNA, 19 nt, Artificial Sequence
  Description of Artificial Sequence: Synthetic oligonucleotide
  Antisense strand to SEQ ID NO: 2149500
aagcuucaagaauaauacc

SEQ ID NO: 2149502 - RNA, 19 nt, Artificial Sequence
  Description of Artificial Sequence: Synthetic oligonucleotide
  Sense strand starting at position 2292 of SEQ ID NO: 1882816
gccagugucgagguucuuu

SEQ ID NO: 2149503 - RNA, 19 nt, Artificial Sequence
  Description of Artificial Sequence: Synthetic oligonucleotide
  Antisense strand to SEQ ID NO: 2149502
aaagaaccucgacacuggc

SEQ ID NO: 2149504 - RNA, 19 nt, Artificial Sequence
  Description of Artificial Sequence: Synthetic oligonucleotide
  Sense strand starting at position 2347 of SEQ ID NO: 1882816
accugaguuuacgucucuu

SEQ ID NO: 2149505 - RNA, 19 nt, Artificial Sequence
  Description of Artificial Sequence: Synthetic oligonucleotide
  Antisense strand to SEQ ID NO: 2149504
aagagacguaaacucaggu

SEQ ID NO: 2149506 - RNA, 19 nt, Artificial Sequence
  Description of Artificial Sequence: Synthetic oligonucleotide
  Sense strand starting at position 2351 of SEQ ID NO: 1882816
gaguuuacgucucuuccau

SEQ ID NO: 2149507 - RNA, 19 nt, Artificial Sequence
  Description of Artificial Sequence: Synthetic oligonucleotide
  Antisense strand to SEQ ID NO: 2149506
auggaagagacguaaacuc

SEQ ID NO: 2149508 - RNA, 19 nt, Artificial Sequence
  Description of Artificial Sequence: Synthetic oligonucleotide
  Sense strand starting at position 2998 of SEQ ID NO: 1882816
gagugacagccacguagau

SEQ ID NO: 2149509 - RNA, 19 nt, Artificial Sequence
  Description of Artificial Sequence: Synthetic oligonucleotide
  Antisense strand to SEQ ID NO: 2149508
aucuacguggcugucacuc

SEQ ID NO: 2149510 - RNA, 19 nt, Artificial Sequence
  Description of Artificial Sequence: Synthetic oligonucleotide
  Sense strand starting at position 3054 of SEQ ID NO: 1882816
ggguguugguuuccuagga

SEQ ID NO: 2149511 - RNA, 19 nt, Artificial Sequence
  Description of Artificial Sequence: Synthetic oligonucleotide
  Antisense strand to SEQ ID NO: 2149510
uccuaggaaaccaacaccc

SEQ ID NO: 2149512 - RNA, 19 nt, Artificial Sequence
  Description of Artificial Sequence: Synthetic oligonucleotide
  Sense strand starting at position 3074 of SEQ ID NO: 1882816
gggugcugugcguccagaa

SEQ ID NO: 2149513 - RNA, 19 nt, Artificial Sequence
  Description of Artificial Sequence: Synthetic oligonucleotide
  Antisense strand to SEQ ID NO: 2149512
uucuggacgcacagcaccc

SEQ ID NO: 2149514 - RNA, 19 nt, Artificial Sequence
  Description of Artificial Sequence: Synthetic oligonucleotide
  Sense strand starting at position 3121 of SEQ ID NO: 1882816
ucuugugaauuccuugaac

SEQ ID NO: 2149515 - RNA, 19 nt, Artificial Sequence
  Description of Artificial Sequence: Synthetic oligonucleotide
  Antisense strand to SEQ ID NO: 2149514
guucaaggaauucacaaga

SEQ ID NO: 2149516 - RNA, 19 nt, Artificial Sequence
  Description of Artificial Sequence: Synthetic oligonucleotide
  Sense strand starting at position 3123 of SEQ ID NO: 1882816
uugugaauuccuugaacaa

SEQ ID NO: 2149517 - RNA, 19 nt, Artificial Sequence
  Description of Artificial Sequence: Synthetic oligonucleotide
  Antisense strand to SEQ ID NO: 2149516
uuguucaaggaauucacaa

SEQ ID NO: 2149518 - RNA, 19 nt, Artificial Sequence
  Description of Artificial Sequence: Synthetic oligonucleotide
  Sense strand starting at position 3259 of SEQ ID NO: 1882816
guagcgggcguguaacaua

SEQ ID NO: 2149519 - RNA, 19 nt, Artificial Sequence
  Description of Artificial Sequence: Synthetic oligonucleotide
  Antisense strand to SEQ ID NO: 2149518
uauguuacacgcccgcuac

SEQ ID NO: 2149520 - RNA, 19 nt, Artificial Sequence
  Description of Artificial Sequence: Synthetic oligonucleotide
  Sense strand starting at position 3266 of SEQ ID NO: 1882816
gcguguaacauagagggaa

SEQ ID NO: 2149521 - RNA, 19 nt, Artificial Sequence
  Description of Artificial Sequence: Synthetic oligonucleotide
  Antisense strand to SEQ ID NO: 2149520
uucccucuauguuacacgc

SEQ ID NO: 2149522 - RNA, 19 nt, Artificial Sequence
  Description of Artificial Sequence: Synthetic oligonucleotide
  Sense strand starting at position 3332 of SEQ ID NO: 1882816
agacguuugccaugggcga

SEQ ID NO: 2149523 - RNA, 19 nt, Artificial Sequence
  Description of Artificial Sequence: Synthetic oligonucleotide
  Antisense strand to SEQ ID NO: 2149522
ucgcccauggcaaacgucu

SEQ ID NO: 2149524 - RNA, 19 nt, Artificial Sequence
  Description of Artificial Sequence: Synthetic oligonucleotide
  Sense strand starting at position 3357 of SEQ ID NO: 1882816
uccagucuuaggcgacagu

SEQ ID NO: 2149525 - RNA, 19 nt, Artificial Sequence
  Description of Artificial Sequence: Synthetic oligonucleotide
  Antisense strand to SEQ ID NO: 2149524
acugucgccuaagacugga

SEQ ID NO: 2149526 - RNA, 19 nt, Artificial Sequence
  Description of Artificial Sequence: Synthetic oligonucleotide
  Sense strand starting at position 3360 of SEQ ID NO: 1882816
agucuuaggcgacagucua

SEQ ID NO: 2149527 - RNA, 19 nt, Artificial Sequence
  Description of Artificial Sequence: Synthetic oligonucleotide
  Antisense strand to SEQ ID NO: 2149526
uagacugucgccuaagacu

SEQ ID NO: 2149528 - RNA, 19 nt, Artificial Sequence
  Description of Artificial Sequence: Synthetic oligonucleotide
  Sense strand starting at position 3439 of SEQ ID NO: 1882816
gcuggugaguacuagauga

SEQ ID NO: 2149529 - RNA, 19 nt, Artificial Sequence
  Description of Artificial Sequence: Synthetic oligonucleotide
  Antisense strand to SEQ ID NO: 2149528
ucaucuaguacucaccagc

SEQ ID NO: 2149530 - RNA, 19 nt, Artificial Sequence
  Description of Artificial Sequence: Synthetic oligonucleotide
  Sense strand starting at position 3603 of SEQ ID NO: 1882816
ugcgcuucucccugaucaa

SEQ ID NO: 2149531 - RNA, 19 nt, Artificial Sequence
  Description of Artificial Sequence: Synthetic oligonucleotide
  Antisense strand to SEQ ID NO: 2149530
uugaucagggagaagcgca

SEQ ID NO: 2149532 - RNA, 19 nt, Artificial Sequence
  Description of Artificial Sequence: Synthetic oligonucleotide
  Sense strand starting at position 3604 of SEQ ID NO: 1882816
gcgcuucucccugaucaac

SEQ ID NO: 2149533 - RNA, 19 nt, Artificial Sequence
  Description of Artificial Sequence: Synthetic oligonucleotide
  Antisense strand to SEQ ID NO: 2149532
guugaucagggagaagcgc

SEQ ID NO: 2149534 - RNA, 19 nt, Artificial Sequence
  Description of Artificial Sequence: Synthetic oligonucleotide
  Sense strand starting at position 3615 of SEQ ID NO: 1882816
ugaucaacuccagguugau

SEQ ID NO: 2149535 - RNA, 19 nt, Artificial Sequence
  Description of Artificial Sequence: Synthetic oligonucleotide
  Antisense strand to SEQ ID NO: 2149534
aucaaccuggaguugauca

SEQ ID NO: 2149536 - RNA, 19 nt, Artificial Sequence
  Description of Artificial Sequence: Synthetic oligonucleotide
  Sense strand starting at position 3627 of SEQ ID NO: 1882816
gguugaugucaucgaggaa

SEQ ID NO: 2149537 - RNA, 19 nt, Artificial Sequence
  Description of Artificial Sequence: Synthetic oligonucleotide
  Antisense strand to SEQ ID NO: 2149536
uuccucgaugacaucaacc

SEQ ID NO: 2149538 - RNA, 19 nt, Artificial Sequence
  Description of Artificial Sequence: Synthetic oligonucleotide
  Sense strand starting at position 3628 of SEQ ID NO: 1882816
guugaugucaucgaggaau

SEQ ID NO: 2149539 - RNA, 19 nt, Artificial Sequence
  Description of Artificial Sequence: Synthetic oligonucleotide
  Antisense strand to SEQ ID NO: 2149538
auuccucgaugacaucaac

SEQ ID NO: 2149540 - RNA, 19 nt, Artificial Sequence
  Description of Artificial Sequence: Synthetic oligonucleotide
  Sense strand starting at position 3630 of SEQ ID NO: 1882816
ugaugucaucgaggaauaa

SEQ ID NO: 2149541 - RNA, 19 nt, Artificial Sequence
  Description of Artificial Sequence: Synthetic oligonucleotide
  Antisense strand to SEQ ID NO: 2149540
uuauuccucgaugacauca

SEQ ID NO: 2149542 - RNA, 19 nt, Artificial Sequence
  Description of Artificial Sequence: Synthetic oligonucleotide
  Sense strand starting at position 3702 of SEQ ID NO: 1882816
aguuaaaucuucucuggau

SEQ ID NO: 2149543 - RNA, 19 nt, Artificial Sequence
  Description of Artificial Sequence: Synthetic oligonucleotide
  Antisense strand to SEQ ID NO: 2149542
auccagagaagauuuaacu

SEQ ID NO: 2149544 - RNA, 19 nt, Artificial Sequence
  Description of Artificial Sequence: Synthetic oligonucleotide
  Sense strand starting at position 3703 of SEQ ID NO: 1882816
guuaaaucuucucuggaua

SEQ ID NO: 2149545 - RNA, 19 nt, Artificial Sequence
  Description of Artificial Sequence: Synthetic oligonucleotide
  Antisense strand to SEQ ID NO: 2149544
uauccagagaagauuuaac

SEQ ID NO: 2149546 - RNA, 19 nt, Artificial Sequence
  Description of Artificial Sequence: Synthetic oligonucleotide
  Sense strand starting at position 3724 of SEQ ID NO: 1882816
ggagucaacugaugugauu

SEQ ID NO: 2149547 - RNA, 19 nt, Artificial Sequence
  Description of Artificial Sequence: Synthetic oligonucleotide
  Antisense strand to SEQ ID NO: 2149546
aaucacaucaguugacucc

SEQ ID NO: 2149548 - RNA, 19 nt, Artificial Sequence
  Description of Artificial Sequence: Synthetic oligonucleotide
  Sense strand starting at position 3764 of SEQ ID NO: 1882816
uguuuaugugaacaaguau

SEQ ID NO: 2149549 - RNA, 19 nt, Artificial Sequence
  Description of Artificial Sequence: Synthetic oligonucleotide
  Antisense strand to SEQ ID NO: 2149548
auacuuguucacauaaaca

SEQ ID NO: 2149550 - RNA, 19 nt, Artificial Sequence
  Description of Artificial Sequence: Synthetic oligonucleotide
  Sense strand starting at position 3775 of SEQ ID NO: 1882816
acaaguauauuccauggau

SEQ ID NO: 2149551 - RNA, 19 nt, Artificial Sequence
  Description of Artificial Sequence: Synthetic oligonucleotide
  Antisense strand to SEQ ID NO: 2149550
auccauggaauauacuugu

SEQ ID NO: 2149552 - RNA, 19 nt, Artificial Sequence
  Description of Artificial Sequence: Synthetic oligonucleotide
  Sense strand starting at position 3812 of SEQ ID NO: 1882816
ucaccaaagucguaaucau

SEQ ID NO: 2149553 - RNA, 19 nt, Artificial Sequence
  Description of Artificial Sequence: Synthetic oligonucleotide
  Antisense strand to SEQ ID NO: 2149552
augauuacgacuuugguga

SEQ ID NO: 2149554 - RNA, 19 nt, Artificial Sequence
  Description of Artificial Sequence: Synthetic oligonucleotide
  Sense strand starting at position 3832 of SEQ ID NO: 1882816
acuggcagcugugugaauu

SEQ ID NO: 2149555 - RNA, 19 nt, Artificial Sequence
  Description of Artificial Sequence: Synthetic oligonucleotide
  Antisense strand to SEQ ID NO: 2149554
aauucacacagcugccagu

SEQ ID NO: 2149556 - RNA, 19 nt, Artificial Sequence
  Description of Artificial Sequence: Synthetic oligonucleotide
  Sense strand starting at position 3833 of SEQ ID NO: 1882816
cuggcagcugugugaauua

SEQ ID NO: 2149557 - RNA, 19 nt, Artificial Sequence
  Description of Artificial Sequence: Synthetic oligonucleotide
  Antisense strand to SEQ ID NO: 2149556
uaauucacacagcugccag

SEQ ID NO: 2149558 - RNA, 19 nt, Artificial Sequence
  Description of Artificial Sequence: Synthetic oligonucleotide
  Sense strand starting at position 3861 of SEQ ID NO: 1882816
cccucagugugaguuuaaa

SEQ ID NO: 2149559 - RNA, 19 nt, Artificial Sequence
  Description of Artificial Sequence: Synthetic oligonucleotide
  Antisense strand to SEQ ID NO: 2149558
uuuaaacucacacugaggg

SEQ ID NO: 2149560 - RNA, 19 nt, Artificial Sequence
  Description of Artificial Sequence: Synthetic oligonucleotide
  Sense strand starting at position 3934 of SEQ ID NO: 1882816
aggaguccgugucucuuaa

SEQ ID NO: 2149561 - RNA, 19 nt, Artificial Sequence
  Description of Artificial Sequence: Synthetic oligonucleotide
  Antisense strand to SEQ ID NO: 2149560
uuaagagacacggacuccu

SEQ ID NO: 2149562 - RNA, 19 nt, Artificial Sequence
  Description of Artificial Sequence: Synthetic oligonucleotide
  Sense strand starting at position 3936 of SEQ ID NO: 1882816
gaguccgugucucuuaaug

SEQ ID NO: 2149563 - RNA, 19 nt, Artificial Sequence
  Description of Artificial Sequence: Synthetic oligonucleotide
  Antisense strand to SEQ ID NO: 2149562
cauuaagagacacggacuc

SEQ ID NO: 2149564 - RNA, 19 nt, Artificial Sequence
  Description of Artificial Sequence: Synthetic oligonucleotide
  Sense strand starting at position 424 of SEQ ID NO: 1882817
ccuugaguucucuggugaa

SEQ ID NO: 2149565 - RNA, 19 nt, Artificial Sequence
  Description of Artificial Sequence: Synthetic oligonucleotide
  Antisense strand to SEQ ID NO: 2149564
uucaccagagaacucaagg

SEQ ID NO: 2149566 - RNA, 19 nt, Artificial Sequence
  Description of Artificial Sequence: Synthetic oligonucleotide
  Sense strand starting at position 478 of SEQ ID NO: 1882817
aguggcucauguucuguaa

SEQ ID NO: 2149567 - RNA, 19 nt, Artificial Sequence
  Description of Artificial Sequence: Synthetic oligonucleotide
  Antisense strand to SEQ ID NO: 2149566
uuacagaacaugagccacu

SEQ ID NO: 2149568 - RNA, 19 nt, Artificial Sequence
  Description of Artificial Sequence: Synthetic oligonucleotide
  Sense strand starting at position 1085 of SEQ ID NO: 1882817
cugguugugucuguccuua

SEQ ID NO: 2149569 - RNA, 19 nt, Artificial Sequence
  Description of Artificial Sequence: Synthetic oligonucleotide
  Antisense strand to SEQ ID NO: 2149568
uaaggacagacacaaccag

SEQ ID NO: 2149570 - RNA, 19 nt, Artificial Sequence
  Description of Artificial Sequence: Synthetic oligonucleotide
  Sense strand starting at position 1565 of SEQ ID NO: 1882817
uugagaauguaccuuauga

SEQ ID NO: 2149571 - RNA, 19 nt, Artificial Sequence
  Description of Artificial Sequence: Synthetic oligonucleotide
  Antisense strand to SEQ ID NO: 2149570
ucauaagguacauucucaa

SEQ ID NO: 2149572 - RNA, 19 nt, Artificial Sequence
  Description of Artificial Sequence: Synthetic oligonucleotide
  Sense strand starting at position 1569 of SEQ ID NO: 1882817
gaauguaccuuaugagauc

SEQ ID NO: 2149573 - RNA, 19 nt, Artificial Sequence
  Description of Artificial Sequence: Synthetic oligonucleotide
  Antisense strand to SEQ ID NO: 2149572
gaucucauaagguacauuc

SEQ ID NO: 2149574 - RNA, 19 nt, Artificial Sequence
  Description of Artificial Sequence: Synthetic oligonucleotide
  Sense strand starting at position 1699 of SEQ ID NO: 1882817
gcugcacccgggugaaaua

SEQ ID NO: 2149575 - RNA, 19 nt, Artificial Sequence
  Description of Artificial Sequence: Synthetic oligonucleotide
  Antisense strand to SEQ ID NO: 2149574
uauuucacccgggugcagc

SEQ ID NO: 2149576 - RNA, 19 nt, Artificial Sequence
  Description of Artificial Sequence: Synthetic oligonucleotide
  Sense strand starting at position 1843 of SEQ ID NO: 1882817
gugcaccguccggcuaaua

SEQ ID NO: 2149577 - RNA, 19 nt, Artificial Sequence
  Description of Artificial Sequence: Synthetic oligonucleotide
  Antisense strand to SEQ ID NO: 2149576
uauuagccggacggugcac

SEQ ID NO: 2149578 - RNA, 19 nt, Artificial Sequence
  Description of Artificial Sequence: Synthetic oligonucleotide
  Sense strand starting at position 2123 of SEQ ID NO: 1882817
cgguauuauucuugaagcu

SEQ ID NO: 2149579 - RNA, 19 nt, Artificial Sequence
  Description of Artificial Sequence: Synthetic oligonucleotide
  Antisense strand to SEQ ID NO: 2149578
agcuucaagaauaauaccg

SEQ ID NO: 2149580 - RNA, 19 nt, Artificial Sequence
  Description of Artificial Sequence: Synthetic oligonucleotide
  Sense strand starting at position 2124 of SEQ ID NO: 1882817
gguauuauucuugaagcuu

SEQ ID NO: 2149581 - RNA, 19 nt, Artificial Sequence
  Description of Artificial Sequence: Synthetic oligonucleotide
  Antisense strand to SEQ ID NO: 2149580
aagcuucaagaauaauacc

SEQ ID NO: 2149582 - RNA, 19 nt, Artificial Sequence
  Description of Artificial Sequence: Synthetic oligonucleotide
  Sense strand starting at position 2703 of SEQ ID NO: 1882817
gccagugucgagguucuuu

SEQ ID NO: 2149583 - RNA, 19 nt, Artificial Sequence
  Description of Artificial Sequence: Synthetic oligonucleotide
  Antisense strand to SEQ ID NO: 2149582
aaagaaccucgacacuggc

SEQ ID NO: 2149584 - RNA, 19 nt, Artificial Sequence
  Description of Artificial Sequence: Synthetic oligonucleotide
  Sense strand starting at position 2758 of SEQ ID NO: 1882817
accugaguuuacgucucuu

SEQ ID NO: 2149585 - RNA, 19 nt, Artificial Sequence
  Description of Artificial Sequence: Synthetic oligonucleotide
  Antisense strand to SEQ ID NO: 2149584
aagagacguaaacucaggu

SEQ ID NO: 2149586 - RNA, 19 nt, Artificial Sequence
  Description of Artificial Sequence: Synthetic oligonucleotide
  Sense strand starting at position 2762 of SEQ ID NO: 1882817
gaguuuacgucucuuccau

SEQ ID NO: 2149587 - RNA, 19 nt, Artificial Sequence
  Description of Artificial Sequence: Synthetic oligonucleotide
  Antisense strand to SEQ ID NO: 2149586
auggaagagacguaaacuc

SEQ ID NO: 2149588 - RNA, 19 nt, Artificial Sequence
  Description of Artificial Sequence: Synthetic oligonucleotide
  Sense strand starting at position 2897 of SEQ ID NO: 1882817
cggccugucugcuaggagu

SEQ ID NO: 2149589 - RNA, 19 nt, Artificial Sequence
  Description of Artificial Sequence: Synthetic oligonucleotide
  Antisense strand to SEQ ID NO: 2149588
acuccuagcagacaggccg

SEQ ID NO: 2149590 - RNA, 19 nt, Artificial Sequence
  Description of Artificial Sequence: Synthetic oligonucleotide
  Sense strand starting at position 3409 of SEQ ID NO: 1882817
gagugacagccacguagau

SEQ ID NO: 2149591 - RNA, 19 nt, Artificial Sequence
  Description of Artificial Sequence: Synthetic oligonucleotide
  Antisense strand to SEQ ID NO: 2149590
aucuacguggcugucacuc

SEQ ID NO: 2149592 - RNA, 19 nt, Artificial Sequence
  Description of Artificial Sequence: Synthetic oligonucleotide
  Sense strand starting at position 3465 of SEQ ID NO: 1882817
ggguguugguuuccuagga

SEQ ID NO: 2149593 - RNA, 19 nt, Artificial Sequence
  Description of Artificial Sequence: Synthetic oligonucleotide
  Antisense strand to SEQ ID NO: 2149592
uccuaggaaaccaacaccc

SEQ ID NO: 2149594 - RNA, 19 nt, Artificial Sequence
  Description of Artificial Sequence: Synthetic oligonucleotide
  Sense strand starting at position 3485 of SEQ ID NO: 1882817
gggugcugugcguccagaa

SEQ ID NO: 2149595 - RNA, 19 nt, Artificial Sequence
  Description of Artificial Sequence: Synthetic oligonucleotide
  Antisense strand to SEQ ID NO: 2149594
uucuggacgcacagcaccc

SEQ ID NO: 2149596 - RNA, 19 nt, Artificial Sequence
  Description of Artificial Sequence: Synthetic oligonucleotide
  Sense strand starting at position 3532 of SEQ ID NO: 1882817
ucuugugaauuccuugaac

SEQ ID NO: 2149597 - RNA, 19 nt, Artificial Sequence
  Description of Artificial Sequence: Synthetic oligonucleotide
  Antisense strand to SEQ ID NO: 2149596
guucaaggaauucacaaga

SEQ ID NO: 2149598 - RNA, 19 nt, Artificial Sequence
  Description of Artificial Sequence: Synthetic oligonucleotide
  Sense strand starting at position 3534 of SEQ ID NO: 1882817
uugugaauuccuugaacaa

SEQ ID NO: 2149599 - RNA, 19 nt, Artificial Sequence
  Description of Artificial Sequence: Synthetic oligonucleotide
  Antisense strand to SEQ ID NO: 2149598
uuguucaaggaauucacaa

SEQ ID NO: 2149600 - RNA, 19 nt, Artificial Sequence
  Description of Artificial Sequence: Synthetic oligonucleotide
  Sense strand starting at position 3670 of SEQ ID NO: 1882817
guagcgggcguguaacaua

SEQ ID NO: 2149601 - RNA, 19 nt, Artificial Sequence
  Description of Artificial Sequence: Synthetic oligonucleotide
  Antisense strand to SEQ ID NO: 2149600
uauguuacacgcccgcuac

SEQ ID NO: 2149602 - RNA, 19 nt, Artificial Sequence
  Description of Artificial Sequence: Synthetic oligonucleotide
  Sense strand starting at position 3677 of SEQ ID NO: 1882817
gcguguaacauagagggaa

SEQ ID NO: 2149603 - RNA, 19 nt, Artificial Sequence
  Description of Artificial Sequence: Synthetic oligonucleotide
  Antisense strand to SEQ ID NO: 2149602
uucccucuauguuacacgc

SEQ ID NO: 2149604 - RNA, 19 nt, Artificial Sequence
  Description of Artificial Sequence: Synthetic oligonucleotide
  Sense strand starting at position 3743 of SEQ ID NO: 1882817
agacguuugccaugggcga

SEQ ID NO: 2149605 - RNA, 19 nt, Artificial Sequence
  Description of Artificial Sequence: Synthetic oligonucleotide
  Antisense strand to SEQ ID NO: 2149604
ucgcccauggcaaacgucu

SEQ ID NO: 2149606 - RNA, 19 nt, Artificial Sequence
  Description of Artificial Sequence: Synthetic oligonucleotide
  Sense strand starting at position 3758 of SEQ ID NO: 1882817
gcgagaguguuccagucuu

SEQ ID NO: 2149607 - RNA, 19 nt, Artificial Sequence
  Description of Artificial Sequence: Synthetic oligonucleotide
  Antisense strand to SEQ ID NO: 2149606
aagacuggaacacucucgc

SEQ ID NO: 2149608 - RNA, 19 nt, Artificial Sequence
  Description of Artificial Sequence: Synthetic oligonucleotide
  Sense strand starting at position 3766 of SEQ ID NO: 1882817
guuccagucuuaggcgaca

SEQ ID NO: 2149609 - RNA, 19 nt, Artificial Sequence
  Description of Artificial Sequence: Synthetic oligonucleotide
  Antisense strand to SEQ ID NO: 2149608
ugucgccuaagacuggaac

SEQ ID NO: 2149610 - RNA, 19 nt, Artificial Sequence
  Description of Artificial Sequence: Synthetic oligonucleotide
  Sense strand starting at position 3768 of SEQ ID NO: 1882817
uccagucuuaggcgacagu

SEQ ID NO: 2149611 - RNA, 19 nt, Artificial Sequence
  Description of Artificial Sequence: Synthetic oligonucleotide
  Antisense strand to SEQ ID NO: 2149610
acugucgccuaagacugga

SEQ ID NO: 2149612 - RNA, 19 nt, Artificial Sequence
  Description of Artificial Sequence: Synthetic oligonucleotide
  Sense strand starting at position 3771 of SEQ ID NO: 1882817
agucuuaggcgacagucua

SEQ ID NO: 2149613 - RNA, 19 nt, Artificial Sequence
  Description of Artificial Sequence: Synthetic oligonucleotide
  Antisense strand to SEQ ID NO: 2149612
uagacugucgccuaagacu

SEQ ID NO: 2149614 - RNA, 19 nt, Artificial Sequence
  Description of Artificial Sequence: Synthetic oligonucleotide
  Sense strand starting at position 3850 of SEQ ID NO: 1882817
gcuggugaguacuagauga

SEQ ID NO: 2149615 - RNA, 19 nt, Artificial Sequence
  Description of Artificial Sequence: Synthetic oligonucleotide
  Antisense strand to SEQ ID NO: 2149614
ucaucuaguacucaccagc

SEQ ID NO: 2149616 - RNA, 19 nt, Artificial Sequence
  Description of Artificial Sequence: Synthetic oligonucleotide
  Sense strand starting at position 403 of SEQ ID NO: 1882818
gugaaaugguaucccaaua

SEQ ID NO: 2149617 - RNA, 19 nt, Artificial Sequence
  Description of Artificial Sequence: Synthetic oligonucleotide
  Antisense strand to SEQ ID NO: 2149616
uauugggauaccauuucac

SEQ ID NO: 2149618 - RNA, 19 nt, Artificial Sequence
  Description of Artificial Sequence: Synthetic oligonucleotide
  Sense strand starting at position 455 of SEQ ID NO: 1882818
guaagaacauguuucuaaa

SEQ ID NO: 2149619 - RNA, 19 nt, Artificial Sequence
  Description of Artificial Sequence: Synthetic oligonucleotide
  Antisense strand to SEQ ID NO: 2149618
uuuagaaacauguucuuac

SEQ ID NO: 2149620 - RNA, 19 nt, Artificial Sequence
  Description of Artificial Sequence: Synthetic oligonucleotide
  Sense strand starting at position 497 of SEQ ID NO: 1882818
ucauguccacgugaacagu

SEQ ID NO: 2149621 - RNA, 19 nt, Artificial Sequence
  Description of Artificial Sequence: Synthetic oligonucleotide
  Antisense strand to SEQ ID NO: 2149620
acuguucacguggacauga

SEQ ID NO: 2149622 - RNA, 19 nt, Artificial Sequence
  Description of Artificial Sequence: Synthetic oligonucleotide
  Sense strand starting at position 602 of SEQ ID NO: 1882818
aguugugugcgagucuaga

SEQ ID NO: 2149623 - RNA, 19 nt, Artificial Sequence
  Description of Artificial Sequence: Synthetic oligonucleotide
  Antisense strand to SEQ ID NO: 2149622
ucuagacucgcacacaacu

SEQ ID NO: 2149624 - RNA, 19 nt, Artificial Sequence
  Description of Artificial Sequence: Synthetic oligonucleotide
  Sense strand starting at position 616 of SEQ ID NO: 1882818
cuagauccuguaugugaaa

SEQ ID NO: 2149625 - RNA, 19 nt, Artificial Sequence
  Description of Artificial Sequence: Synthetic oligonucleotide
  Antisense strand to SEQ ID NO: 2149624
uuucacauacaggaucuag

SEQ ID NO: 2149626 - RNA, 19 nt, Artificial Sequence
  Description of Artificial Sequence: Synthetic oligonucleotide
  Sense strand starting at position 623 of SEQ ID NO: 1882818
cuguaugugaaacgcuaga

SEQ ID NO: 2149627 - RNA, 19 nt, Artificial Sequence
  Description of Artificial Sequence: Synthetic oligonucleotide
  Antisense strand to SEQ ID NO: 2149626
ucuagcguuucacauacag

SEQ ID NO: 2149628 - RNA, 19 nt, Artificial Sequence
  Description of Artificial Sequence: Synthetic oligonucleotide
  Sense strand starting at position 838 of SEQ ID NO: 1882818
gccagaaccucuucccaga

SEQ ID NO: 2149629 - RNA, 19 nt, Artificial Sequence
  Description of Artificial Sequence: Synthetic oligonucleotide
  Antisense strand to SEQ ID NO: 2149628
ucugggaagagguucuggc

SEQ ID NO: 2149630 - RNA, 19 nt, Artificial Sequence
  Description of Artificial Sequence: Synthetic oligonucleotide
  Sense strand starting at position 912 of SEQ ID NO: 1882818
ucccguaucaaccauggga

SEQ ID NO: 2149631 - RNA, 19 nt, Artificial Sequence
  Description of Artificial Sequence: Synthetic oligonucleotide
  Antisense strand to SEQ ID NO: 2149630
ucccaugguugauacggga

SEQ ID NO: 2149632 - RNA, 19 nt, Artificial Sequence
  Description of Artificial Sequence: Synthetic oligonucleotide
  Sense strand starting at position 914 of SEQ ID NO: 1882818
ccguaucaaccaugggaca

SEQ ID NO: 2149633 - RNA, 19 nt, Artificial Sequence
  Description of Artificial Sequence: Synthetic oligonucleotide
  Antisense strand to SEQ ID NO: 2149632
ugucccaugguugauacgg

SEQ ID NO: 2149634 - RNA, 19 nt, Artificial Sequence
  Description of Artificial Sequence: Synthetic oligonucleotide
  Sense strand starting at position 1118 of SEQ ID NO: 1882818
guuaauuacguccaugcaa

SEQ ID NO: 2149635 - RNA, 19 nt, Artificial Sequence
  Description of Artificial Sequence: Synthetic oligonucleotide
  Antisense strand to SEQ ID NO: 2149634
uugcauggacguaauuaac

SEQ ID NO: 2149636 - RNA, 19 nt, Artificial Sequence
  Description of Artificial Sequence: Synthetic oligonucleotide
  Sense strand starting at position 1153 of SEQ ID NO: 1882818
ugauauucuuagguuuggu

SEQ ID NO: 2149637 - RNA, 19 nt, Artificial Sequence
  Description of Artificial Sequence: Synthetic oligonucleotide
  Antisense strand to SEQ ID NO: 2149636
accaaaccuaagaauauca

SEQ ID NO: 2149638 - RNA, 19 nt, Artificial Sequence
  Description of Artificial Sequence: Synthetic oligonucleotide
  Sense strand starting at position 1158 of SEQ ID NO: 1882818
uucuuagguuugguaggau

SEQ ID NO: 2149639 - RNA, 19 nt, Artificial Sequence
  Description of Artificial Sequence: Synthetic oligonucleotide
  Antisense strand to SEQ ID NO: 2149638
auccuaccaaaccuaagaa

SEQ ID NO: 2149640 - RNA, 19 nt, Artificial Sequence
  Description of Artificial Sequence: Synthetic oligonucleotide
  Sense strand starting at position 1161 of SEQ ID NO: 1882818
uuagguuugguaggauaga

SEQ ID NO: 2149641 - RNA, 19 nt, Artificial Sequence
  Description of Artificial Sequence: Synthetic oligonucleotide
  Antisense strand to SEQ ID NO: 2149640
ucuauccuaccaaaccuaa

SEQ ID NO: 2149642 - RNA, 19 nt, Artificial Sequence
  Description of Artificial Sequence: Synthetic oligonucleotide
  Sense strand starting at position 1181 of SEQ ID NO: 1882818
gaggauguguggcuuauaa

SEQ ID NO: 2149643 - RNA, 19 nt, Artificial Sequence
  Description of Artificial Sequence: Synthetic oligonucleotide
  Antisense strand to SEQ ID NO: 2149642
uuauaagccacacauccuc

SEQ ID NO: 2149644 - RNA, 19 nt, Artificial Sequence
  Description of Artificial Sequence: Synthetic oligonucleotide
  Sense strand starting at position 1183 of SEQ ID NO: 1882818
ggauguguggcuuauaaau

SEQ ID NO: 2149645 - RNA, 19 nt, Artificial Sequence
  Description of Artificial Sequence: Synthetic oligonucleotide
  Antisense strand to SEQ ID NO: 2149644
auuuauaagccacacaucc

SEQ ID NO: 2149646 - RNA, 19 nt, Artificial Sequence
  Description of Artificial Sequence: Synthetic oligonucleotide
  Sense strand starting at position 1189 of SEQ ID NO: 1882818
guggcuuauaaauaaguga

SEQ ID NO: 2149647 - RNA, 19 nt, Artificial Sequence
  Description of Artificial Sequence: Synthetic oligonucleotide
  Antisense strand to SEQ ID NO: 2149646
ucacuuauuuauaagccac

SEQ ID NO: 2149648 - RNA, 19 nt, Artificial Sequence
  Description of Artificial Sequence: Synthetic oligonucleotide
  Sense strand starting at position 1499 of SEQ ID NO: 1882818
aacauucugccgcagggaa

SEQ ID NO: 2149649 - RNA, 19 nt, Artificial Sequence
  Description of Artificial Sequence: Synthetic oligonucleotide
  Antisense strand to SEQ ID NO: 2149648
uucccugcggcagaauguu

SEQ ID NO: 2149650 - RNA, 19 nt, Artificial Sequence
  Description of Artificial Sequence: Synthetic oligonucleotide
  Sense strand starting at position 2052 of SEQ ID NO: 1882818
cugauuccuaaguggcaga

SEQ ID NO: 2149651 - RNA, 19 nt, Artificial Sequence
  Description of Artificial Sequence: Synthetic oligonucleotide
  Antisense strand to SEQ ID NO: 2149650
ucugccacuuaggaaucag

SEQ ID NO: 2149652 - RNA, 19 nt, Artificial Sequence
  Description of Artificial Sequence: Synthetic oligonucleotide
  Sense strand starting at position 2063 of SEQ ID NO: 1882818
guggcagagcuagguuaaa

SEQ ID NO: 2149653 - RNA, 19 nt, Artificial Sequence
  Description of Artificial Sequence: Synthetic oligonucleotide
  Antisense strand to SEQ ID NO: 2149652
uuuaaccuagcucugccac

SEQ ID NO: 2149654 - RNA, 19 nt, Artificial Sequence
  Description of Artificial Sequence: Synthetic oligonucleotide
  Sense strand starting at position 2126 of SEQ ID NO: 1882818
cagaccucaccgggaagau

SEQ ID NO: 2149655 - RNA, 19 nt, Artificial Sequence
  Description of Artificial Sequence: Synthetic oligonucleotide
  Antisense strand to SEQ ID NO: 2149654
aucuucccggugaggucug

SEQ ID NO: 2149656 - RNA, 19 nt, Artificial Sequence
  Description of Artificial Sequence: Synthetic oligonucleotide
  Sense strand starting at position 2270 of SEQ ID NO: 1882818
uuguaaguaucagcgaaug

SEQ ID NO: 2149657 - RNA, 19 nt, Artificial Sequence
  Description of Artificial Sequence: Synthetic oligonucleotide
  Antisense strand to SEQ ID NO: 2149656
cauucgcugauacuuacaa

SEQ ID NO: 2149658 - RNA, 19 nt, Artificial Sequence
  Description of Artificial Sequence: Synthetic oligonucleotide
  Sense strand starting at position 2272 of SEQ ID NO: 1882818
guaaguaucagcgaaugaa

SEQ ID NO: 2149659 - RNA, 19 nt, Artificial Sequence
  Description of Artificial Sequence: Synthetic oligonucleotide
  Antisense strand to SEQ ID NO: 2149658
uucauucgcugauacuuac

SEQ ID NO: 2149660 - RNA, 19 nt, Artificial Sequence
  Description of Artificial Sequence: Synthetic oligonucleotide
  Sense strand starting at position 2275 of SEQ ID NO: 1882818
aguaucagcgaaugaagaa

SEQ ID NO: 2149661 - RNA, 19 nt, Artificial Sequence
  Description of Artificial Sequence: Synthetic oligonucleotide
  Antisense strand to SEQ ID NO: 2149660
uucuucauucgcugauacu

SEQ ID NO: 2149662 - RNA, 19 nt, Artificial Sequence
  Description of Artificial Sequence: Synthetic oligonucleotide
  Sense strand starting at position 2290 of SEQ ID NO: 1882818
agaagcaugagaugcuuua

SEQ ID NO: 2149663 - RNA, 19 nt, Artificial Sequence
  Description of Artificial Sequence: Synthetic oligonucleotide
  Antisense strand to SEQ ID NO: 2149662
uaaagcaucucaugcuucu

SEQ ID NO: 2149664 - RNA, 19 nt, Artificial Sequence
  Description of Artificial Sequence: Synthetic oligonucleotide
  Sense strand starting at position 2346 of SEQ ID NO: 1882818
gcaagucacaccuguguca

SEQ ID NO: 2149665 - RNA, 19 nt, Artificial Sequence
  Description of Artificial Sequence: Synthetic oligonucleotide
  Antisense strand to SEQ ID NO: 2149664
ugacacaggugugacuugc

SEQ ID NO: 2149666 - RNA, 19 nt, Artificial Sequence
  Description of Artificial Sequence: Synthetic oligonucleotide
  Sense strand starting at position 2349 of SEQ ID NO: 1882818
agucacaccugugucaaau

SEQ ID NO: 2149667 - RNA, 19 nt, Artificial Sequence
  Description of Artificial Sequence: Synthetic oligonucleotide
  Antisense strand to SEQ ID NO: 2149666
auuugacacaggugugacu

SEQ ID NO: 2149668 - RNA, 19 nt, Artificial Sequence
  Description of Artificial Sequence: Synthetic oligonucleotide
  Sense strand starting at position 2550 of SEQ ID NO: 1882818
uucucaugacugugcucaa

SEQ ID NO: 2149669 - RNA, 19 nt, Artificial Sequence
  Description of Artificial Sequence: Synthetic oligonucleotide
  Antisense strand to SEQ ID NO: 2149668
uugagcacagucaugagaa

SEQ ID NO: 2149670 - RNA, 19 nt, Artificial Sequence
  Description of Artificial Sequence: Synthetic oligonucleotide
  Sense strand starting at position 2551 of SEQ ID NO: 1882818
ucucaugacugugcucaaa

SEQ ID NO: 2149671 - RNA, 19 nt, Artificial Sequence
  Description of Artificial Sequence: Synthetic oligonucleotide
  Antisense strand to SEQ ID NO: 2149670
uuugagcacagucaugaga

SEQ ID NO: 2149672 - RNA, 19 nt, Artificial Sequence
  Description of Artificial Sequence: Synthetic oligonucleotide
  Sense strand starting at position 2553 of SEQ ID NO: 1882818
ucaugacugugcucaaagu

SEQ ID NO: 2149673 - RNA, 19 nt, Artificial Sequence
  Description of Artificial Sequence: Synthetic oligonucleotide
  Antisense strand to SEQ ID NO: 2149672
acuuugagcacagucauga

SEQ ID NO: 2149674 - RNA, 19 nt, Artificial Sequence
  Description of Artificial Sequence: Synthetic oligonucleotide
  Sense strand starting at position 2636 of SEQ ID NO: 1882818
ccaguuguacgaugccaau

SEQ ID NO: 2149675 - RNA, 19 nt, Artificial Sequence
  Description of Artificial Sequence: Synthetic oligonucleotide
  Antisense strand to SEQ ID NO: 2149674
auuggcaucguacaacugg

SEQ ID NO: 2149676 - RNA, 19 nt, Artificial Sequence
  Description of Artificial Sequence: Synthetic oligonucleotide
  Sense strand starting at position 2674 of SEQ ID NO: 1882818
ugcuguguuucaguggaaa

SEQ ID NO: 2149677 - RNA, 19 nt, Artificial Sequence
  Description of Artificial Sequence: Synthetic oligonucleotide
  Antisense strand to SEQ ID NO: 2149676
uuuccacugaaacacagca

SEQ ID NO: 2149678 - RNA, 19 nt, Artificial Sequence
  Description of Artificial Sequence: Synthetic oligonucleotide
  Sense strand starting at position 3060 of SEQ ID NO: 1882818
gguucugacauucgucuga

SEQ ID NO: 2149679 - RNA, 19 nt, Artificial Sequence
  Description of Artificial Sequence: Synthetic oligonucleotide
  Antisense strand to SEQ ID NO: 2149678
ucagacgaaugucagaacc

SEQ ID NO: 2149680 - RNA, 19 nt, Artificial Sequence
  Description of Artificial Sequence: Synthetic oligonucleotide
  Sense strand starting at position 3062 of SEQ ID NO: 1882818
uucugacauucgucugaac

SEQ ID NO: 2149681 - RNA, 19 nt, Artificial Sequence
  Description of Artificial Sequence: Synthetic oligonucleotide
  Antisense strand to SEQ ID NO: 2149680
guucagacgaaugucagaa

SEQ ID NO: 2149682 - RNA, 19 nt, Artificial Sequence
  Description of Artificial Sequence: Synthetic oligonucleotide
  Sense strand starting at position 3064 of SEQ ID NO: 1882818
cugacauucgucugaacau

SEQ ID NO: 2149683 - RNA, 19 nt, Artificial Sequence
  Description of Artificial Sequence: Synthetic oligonucleotide
  Antisense strand to SEQ ID NO: 2149682
auguucagacgaaugucag

SEQ ID NO: 2149684 - RNA, 19 nt, Artificial Sequence
  Description of Artificial Sequence: Synthetic oligonucleotide
  Sense strand starting at position 3292 of SEQ ID NO: 1882818
auuauuccgccucagaaag

SEQ ID NO: 2149685 - RNA, 19 nt, Artificial Sequence
  Description of Artificial Sequence: Synthetic oligonucleotide
  Antisense strand to SEQ ID NO: 2149684
cuuucugaggcggaauaau

SEQ ID NO: 2149686 - RNA, 19 nt, Artificial Sequence
  Description of Artificial Sequence: Synthetic oligonucleotide
  Sense strand starting at position 3356 of SEQ ID NO: 1882818
cauugcaugaggugaagua

SEQ ID NO: 2149687 - RNA, 19 nt, Artificial Sequence
  Description of Artificial Sequence: Synthetic oligonucleotide
  Antisense strand to SEQ ID NO: 2149686
uacuucaccucaugcaaug

SEQ ID NO: 2149688 - RNA, 19 nt, Artificial Sequence
  Description of Artificial Sequence: Synthetic oligonucleotide
  Sense strand starting at position 3389 of SEQ ID NO: 1882818
ggaccaauacugugugacu

SEQ ID NO: 2149689 - RNA, 19 nt, Artificial Sequence
  Description of Artificial Sequence: Synthetic oligonucleotide
  Antisense strand to SEQ ID NO: 2149688
agucacacaguauuggucc

SEQ ID NO: 2149690 - RNA, 19 nt, Artificial Sequence
  Description of Artificial Sequence: Synthetic oligonucleotide
  Sense strand starting at position 3548 of SEQ ID NO: 1882818
cgacaauacgaaugugcuu

SEQ ID NO: 2149691 - RNA, 19 nt, Artificial Sequence
  Description of Artificial Sequence: Synthetic oligonucleotide
  Antisense strand to SEQ ID NO: 2149690
aagcacauucguauugucg

SEQ ID NO: 2149692 - RNA, 19 nt, Artificial Sequence
  Description of Artificial Sequence: Synthetic oligonucleotide
  Sense strand starting at position 3597 of SEQ ID NO: 1882818
uuaagaugguacguuuaaa

SEQ ID NO: 2149693 - RNA, 19 nt, Artificial Sequence
  Description of Artificial Sequence: Synthetic oligonucleotide
  Antisense strand to SEQ ID NO: 2149692
uuuaaacguaccaucuuaa

SEQ ID NO: 2149694 - RNA, 19 nt, Artificial Sequence
  Description of Artificial Sequence: Synthetic oligonucleotide
  Sense strand starting at position 3983 of SEQ ID NO: 1882818
gcaggaggugucuaacaca

SEQ ID NO: 2149695 - RNA, 19 nt, Artificial Sequence
  Description of Artificial Sequence: Synthetic oligonucleotide
  Antisense strand to SEQ ID NO: 2149694
uguguuagacaccuccugc

SEQ ID NO: 2149696 - RNA, 19 nt, Artificial Sequence
  Description of Artificial Sequence: Synthetic oligonucleotide
  Sense strand starting at position 7 of SEQ ID NO: 1882819
cccagaugacgucaauaca

SEQ ID NO: 2149697 - RNA, 19 nt, Artificial Sequence
  Description of Artificial Sequence: Synthetic oligonucleotide
  Antisense strand to SEQ ID NO: 2149696
uguauugacgucaucuggg

SEQ ID NO: 2149698 - RNA, 19 nt, Artificial Sequence
  Description of Artificial Sequence: Synthetic oligonucleotide
  Sense strand starting at position 10 of SEQ ID NO: 1882819
agaugacgucaauacaagu

SEQ ID NO: 2149699 - RNA, 19 nt, Artificial Sequence
  Description of Artificial Sequence: Synthetic oligonucleotide
  Antisense strand to SEQ ID NO: 2149698
acuuguauugacgucaucu

SEQ ID NO: 2149700 - RNA, 19 nt, Artificial Sequence
  Description of Artificial Sequence: Synthetic oligonucleotide
  Sense strand starting at position 185 of SEQ ID NO: 1882819
gucucaaggcaucaaauga

SEQ ID NO: 2149701 - RNA, 19 nt, Artificial Sequence
  Description of Artificial Sequence: Synthetic oligonucleotide
  Antisense strand to SEQ ID NO: 2149700
ucauuugaugccuugagac

SEQ ID NO: 2149702 - RNA, 19 nt, Artificial Sequence
  Description of Artificial Sequence: Synthetic oligonucleotide
  Sense strand starting at position 308 of SEQ ID NO: 1882819
guugcuacucauuaccuua

SEQ ID NO: 2149703 - RNA, 19 nt, Artificial Sequence
  Description of Artificial Sequence: Synthetic oligonucleotide
  Antisense strand to SEQ ID NO: 2149702
uaagguaaugaguagcaac

SEQ ID NO: 2149704 - RNA, 19 nt, Artificial Sequence
  Description of Artificial Sequence: Synthetic oligonucleotide
  Sense strand starting at position 362 of SEQ ID NO: 1882819
ggcgaauaggcccaagaga

SEQ ID NO: 2149705 - RNA, 19 nt, Artificial Sequence
  Description of Artificial Sequence: Synthetic oligonucleotide
  Antisense strand to SEQ ID NO: 2149704
ucucuugggccuauucgcc

SEQ ID NO: 2149706 - RNA, 19 nt, Artificial Sequence
  Description of Artificial Sequence: Synthetic oligonucleotide
  Sense strand starting at position 462 of SEQ ID NO: 1882819
aguggaggcacuuguagaa

SEQ ID NO: 2149707 - RNA, 19 nt, Artificial Sequence
  Description of Artificial Sequence: Synthetic oligonucleotide
  Antisense strand to SEQ ID NO: 2149706
uucuacaagugccuccacu

SEQ ID NO: 2149708 - RNA, 19 nt, Artificial Sequence
  Description of Artificial Sequence: Synthetic oligonucleotide
  Sense strand starting at position 1368 of SEQ ID NO: 1882819
gggcuuugccaagacagga

SEQ ID NO: 2149709 - RNA, 19 nt, Artificial Sequence
  Description of Artificial Sequence: Synthetic oligonucleotide
  Antisense strand to SEQ ID NO: 2149708
uccugucuuggcaaagccc

SEQ ID NO: 2149710 - RNA, 19 nt, Artificial Sequence
  Description of Artificial Sequence: Synthetic oligonucleotide
  Sense strand starting at position 1411 of SEQ ID NO: 1882819
gagaaagaauccgugacca

SEQ ID NO: 2149711 - RNA, 19 nt, Artificial Sequence
  Description of Artificial Sequence: Synthetic oligonucleotide
  Antisense strand to SEQ ID NO: 2149710
uggucacggauucuuucuc

SEQ ID NO: 2149712 - RNA, 19 nt, Artificial Sequence
  Description of Artificial Sequence: Synthetic oligonucleotide
  Sense strand starting at position 1472 of SEQ ID NO: 1882819
ccacauuugcgagacgugu

SEQ ID NO: 2149713 - RNA, 19 nt, Artificial Sequence
  Description of Artificial Sequence: Synthetic oligonucleotide
  Antisense strand to SEQ ID NO: 2149712
acacgucucgcaaaugugg

SEQ ID NO: 2149714 - RNA, 19 nt, Artificial Sequence
  Description of Artificial Sequence: Synthetic oligonucleotide
  Sense strand starting at position 1478 of SEQ ID NO: 1882819
uugcgagacguguuuaugu

SEQ ID NO: 2149715 - RNA, 19 nt, Artificial Sequence
  Description of Artificial Sequence: Synthetic oligonucleotide
  Antisense strand to SEQ ID NO: 2149714
acauaaacacgucucgcaa

SEQ ID NO: 2149716 - RNA, 19 nt, Artificial Sequence
  Description of Artificial Sequence: Synthetic oligonucleotide
  Sense strand starting at position 1690 of SEQ ID NO: 1882819
uugguaagggagugaaagu

SEQ ID NO: 2149717 - RNA, 19 nt, Artificial Sequence
  Description of Artificial Sequence: Synthetic oligonucleotide
  Antisense strand to SEQ ID NO: 2149716
acuuucacucccuuaccaa

SEQ ID NO: 2149718 - RNA, 19 nt, Artificial Sequence
  Description of Artificial Sequence: Synthetic oligonucleotide
  Sense strand starting at position 1716 of SEQ ID NO: 1882819
gagccuucccagcacugau

SEQ ID NO: 2149719 - RNA, 19 nt, Artificial Sequence
  Description of Artificial Sequence: Synthetic oligonucleotide
  Antisense strand to SEQ ID NO: 2149718
aucagugcugggaaggcuc

SEQ ID NO: 2149720 - RNA, 19 nt, Artificial Sequence
  Description of Artificial Sequence: Synthetic oligonucleotide
  Sense strand starting at position 1995 of SEQ ID NO: 1882819
cuccuaugacuauagcgaa

SEQ ID NO: 2149721 - RNA, 19 nt, Artificial Sequence
  Description of Artificial Sequence: Synthetic oligonucleotide
  Antisense strand to SEQ ID NO: 2149720
uucgcuauagucauaggag

SEQ ID NO: 2149722 - RNA, 19 nt, Artificial Sequence
  Description of Artificial Sequence: Synthetic oligonucleotide
  Sense strand starting at position 2008 of SEQ ID NO: 1882819
agcgaaauuauuuguaggu

SEQ ID NO: 2149723 - RNA, 19 nt, Artificial Sequence
  Description of Artificial Sequence: Synthetic oligonucleotide
  Antisense strand to SEQ ID NO: 2149722
accuacaaauaauuucgcu

SEQ ID NO: 2149724 - RNA, 19 nt, Artificial Sequence
  Description of Artificial Sequence: Synthetic oligonucleotide
  Sense strand starting at position 2009 of SEQ ID NO: 1882819
gcgaaauuauuuguagguu

SEQ ID NO: 2149725 - RNA, 19 nt, Artificial Sequence
  Description of Artificial Sequence: Synthetic oligonucleotide
  Antisense strand to SEQ ID NO: 2149724
aaccuacaaauaauuucgc

SEQ ID NO: 2149726 - RNA, 19 nt, Artificial Sequence
  Description of Artificial Sequence: Synthetic oligonucleotide
  Sense strand starting at position 2030 of SEQ ID NO: 1882819
cuuggcuuggaauauuauu

SEQ ID NO: 2149727 - RNA, 19 nt, Artificial Sequence
  Description of Artificial Sequence: Synthetic oligonucleotide
  Antisense strand to SEQ ID NO: 2149726
aauaauauuccaagccaag

SEQ ID NO: 2149728 - RNA, 19 nt, Artificial Sequence
  Description of Artificial Sequence: Synthetic oligonucleotide
  Sense strand starting at position 2038 of SEQ ID NO: 1882819
ggaauauuauuagcuccaa

SEQ ID NO: 2149729 - RNA, 19 nt, Artificial Sequence
  Description of Artificial Sequence: Synthetic oligonucleotide
  Antisense strand to SEQ ID NO: 2149728
uuggagcuaauaauauucc

SEQ ID NO: 2149730 - RNA, 19 nt, Artificial Sequence
  Description of Artificial Sequence: Synthetic oligonucleotide
  Sense strand starting at position 2475 of SEQ ID NO: 1882819
ggugucugcaaaugagaag

SEQ ID NO: 2149731 - RNA, 19 nt, Artificial Sequence
  Description of Artificial Sequence: Synthetic oligonucleotide
  Antisense strand to SEQ ID NO: 2149730
cuucucauuugcagacacc

SEQ ID NO: 2149732 - RNA, 19 nt, Artificial Sequence
  Description of Artificial Sequence: Synthetic oligonucleotide
  Sense strand starting at position 2476 of SEQ ID NO: 1882819
gugucugcaaaugagaagu

SEQ ID NO: 2149733 - RNA, 19 nt, Artificial Sequence
  Description of Artificial Sequence: Synthetic oligonucleotide
  Antisense strand to SEQ ID NO: 2149732
acuucucauuugcagacac

SEQ ID NO: 2149734 - RNA, 19 nt, Artificial Sequence
  Description of Artificial Sequence: Synthetic oligonucleotide
  Sense strand starting at position 2487 of SEQ ID NO: 1882819
ugagaaguuagaugagugu

SEQ ID NO: 2149735 - RNA, 19 nt, Artificial Sequence
  Description of Artificial Sequence: Synthetic oligonucleotide
  Antisense strand to SEQ ID NO: 2149734
acacucaucuaacuucuca

SEQ ID NO: 2149736 - RNA, 19 nt, Artificial Sequence
  Description of Artificial Sequence: Synthetic oligonucleotide
  Sense strand starting at position 2490 of SEQ ID NO: 1882819
gaaguuagaugagugugaa

SEQ ID NO: 2149737 - RNA, 19 nt, Artificial Sequence
  Description of Artificial Sequence: Synthetic oligonucleotide
  Antisense strand to SEQ ID NO: 2149736
uucacacucaucuaacuuc

SEQ ID NO: 2149738 - RNA, 19 nt, Artificial Sequence
  Description of Artificial Sequence: Synthetic oligonucleotide
  Sense strand starting at position 2491 of SEQ ID NO: 1882819
aaguuagaugagugugaaa

SEQ ID NO: 2149739 - RNA, 19 nt, Artificial Sequence
  Description of Artificial Sequence: Synthetic oligonucleotide
  Antisense strand to SEQ ID NO: 2149738
uuucacacucaucuaacuu

SEQ ID NO: 2149740 - RNA, 19 nt, Artificial Sequence
  Description of Artificial Sequence: Synthetic oligonucleotide
  Sense strand starting at position 2493 of SEQ ID NO: 1882819
guuagaugagugugaaaug

SEQ ID NO: 2149741 - RNA, 19 nt, Artificial Sequence
  Description of Artificial Sequence: Synthetic oligonucleotide
  Antisense strand to SEQ ID NO: 2149740
cauuucacacucaucuaac

SEQ ID NO: 2149742 - RNA, 19 nt, Artificial Sequence
  Description of Artificial Sequence: Synthetic oligonucleotide
  Sense strand starting at position 2503 of SEQ ID NO: 1882819
ugugaaaugccacagucuu

SEQ ID NO: 2149743 - RNA, 19 nt, Artificial Sequence
  Description of Artificial Sequence: Synthetic oligonucleotide
  Antisense strand to SEQ ID NO: 2149742
aagacuguggcauuucaca

SEQ ID NO: 2149744 - RNA, 19 nt, Artificial Sequence
  Description of Artificial Sequence: Synthetic oligonucleotide
  Sense strand starting at position 2533 of SEQ ID NO: 1882819
augugugucgugcuugaaa

SEQ ID NO: 2149745 - RNA, 19 nt, Artificial Sequence
  Description of Artificial Sequence: Synthetic oligonucleotide
  Antisense strand to SEQ ID NO: 2149744
uuucaagcacgacacacau

SEQ ID NO: 2149746 - RNA, 19 nt, Artificial Sequence
  Description of Artificial Sequence: Synthetic oligonucleotide
  Sense strand starting at position 2720 of SEQ ID NO: 1882819
cagagcaaauaucuuggua

SEQ ID NO: 2149747 - RNA, 19 nt, Artificial Sequence
  Description of Artificial Sequence: Synthetic oligonucleotide
  Antisense strand to SEQ ID NO: 2149746
uaccaagauauuugcucug

SEQ ID NO: 2149748 - RNA, 19 nt, Artificial Sequence
  Description of Artificial Sequence: Synthetic oligonucleotide
  Sense strand starting at position 2723 of SEQ ID NO: 1882819
agcaaauaucuugguaaga

SEQ ID NO: 2149749 - RNA, 19 nt, Artificial Sequence
  Description of Artificial Sequence: Synthetic oligonucleotide
  Antisense strand to SEQ ID NO: 2149748
ucuuaccaagauauuugcu

SEQ ID NO: 2149750 - RNA, 19 nt, Artificial Sequence
  Description of Artificial Sequence: Synthetic oligonucleotide
  Sense strand starting at position 2724 of SEQ ID NO: 1882819
gcaaauaucuugguaagau

SEQ ID NO: 2149751 - RNA, 19 nt, Artificial Sequence
  Description of Artificial Sequence: Synthetic oligonucleotide
  Antisense strand to SEQ ID NO: 2149750
aucuuaccaagauauuugc

SEQ ID NO: 2149752 - RNA, 19 nt, Artificial Sequence
  Description of Artificial Sequence: Synthetic oligonucleotide
  Sense strand starting at position 2843 of SEQ ID NO: 1882819
auagcaguggcagggaaau

SEQ ID NO: 2149753 - RNA, 19 nt, Artificial Sequence
  Description of Artificial Sequence: Synthetic oligonucleotide
  Antisense strand to SEQ ID NO: 2149752
auuucccugccacugcuau

SEQ ID NO: 2149754 - RNA, 19 nt, Artificial Sequence
  Description of Artificial Sequence: Synthetic oligonucleotide
  Sense strand starting at position 2907 of SEQ ID NO: 1882819
uguggaaaucauuauccuu

SEQ ID NO: 2149755 - RNA, 19 nt, Artificial Sequence
  Description of Artificial Sequence: Synthetic oligonucleotide
  Antisense strand to SEQ ID NO: 2149754
aaggauaaugauuuccaca

SEQ ID NO: 2149756 - RNA, 19 nt, Artificial Sequence
  Description of Artificial Sequence: Synthetic oligonucleotide
  Sense strand starting at position 3117 of SEQ ID NO: 1882819
ggcugagucagccauggaa

SEQ ID NO: 2149757 - RNA, 19 nt, Artificial Sequence
  Description of Artificial Sequence: Synthetic oligonucleotide
  Antisense strand to SEQ ID NO: 2149756
uuccauggcugacucagcc

SEQ ID NO: 2149758 - RNA, 19 nt, Artificial Sequence
  Description of Artificial Sequence: Synthetic oligonucleotide
  Sense strand starting at position 3119 of SEQ ID NO: 1882819
cugagucagccauggaaau

SEQ ID NO: 2149759 - RNA, 19 nt, Artificial Sequence
  Description of Artificial Sequence: Synthetic oligonucleotide
  Antisense strand to SEQ ID NO: 2149758
auuuccauggcugacucag

SEQ ID NO: 2149760 - RNA, 19 nt, Artificial Sequence
  Description of Artificial Sequence: Synthetic oligonucleotide
  Sense strand starting at position 3120 of SEQ ID NO: 1882819
ugagucagccauggaaauu

SEQ ID NO: 2149761 - RNA, 19 nt, Artificial Sequence
  Description of Artificial Sequence: Synthetic oligonucleotide
  Antisense strand to SEQ ID NO: 2149760
aauuuccauggcugacuca

SEQ ID NO: 2149762 - RNA, 19 nt, Artificial Sequence
  Description of Artificial Sequence: Synthetic oligonucleotide
  Sense strand starting at position 3310 of SEQ ID NO: 1882819
gguagcuguaaaugauaaa

SEQ ID NO: 2149763 - RNA, 19 nt, Artificial Sequence
  Description of Artificial Sequence: Synthetic oligonucleotide
  Antisense strand to SEQ ID NO: 2149762
uuuaucauuuacagcuacc

SEQ ID NO: 2149764 - RNA, 19 nt, Artificial Sequence
  Description of Artificial Sequence: Synthetic oligonucleotide
  Sense strand starting at position 3385 of SEQ ID NO: 1882819
gagcaaugucaagacucuu

SEQ ID NO: 2149765 - RNA, 19 nt, Artificial Sequence
  Description of Artificial Sequence: Synthetic oligonucleotide
  Antisense strand to SEQ ID NO: 2149764
aagagucuugacauugcuc

SEQ ID NO: 2149766 - RNA, 19 nt, Artificial Sequence
  Description of Artificial Sequence: Synthetic oligonucleotide
  Sense strand starting at position 3556 of SEQ ID NO: 1882819
gccugugaacuuuaaacau

SEQ ID NO: 2149767 - RNA, 19 nt, Artificial Sequence
  Description of Artificial Sequence: Synthetic oligonucleotide
  Antisense strand to SEQ ID NO: 2149766
auguuuaaaguucacaggc

SEQ ID NO: 2149768 - RNA, 19 nt, Artificial Sequence
  Description of Artificial Sequence: Synthetic oligonucleotide
  Sense strand starting at position 3607 of SEQ ID NO: 1882819
ucaauauugugagauuuac

SEQ ID NO: 2149769 - RNA, 19 nt, Artificial Sequence
  Description of Artificial Sequence: Synthetic oligonucleotide
  Antisense strand to SEQ ID NO: 2149768
guaaaucucacaauauuga

SEQ ID NO: 2149770 - RNA, 19 nt, Artificial Sequence
  Description of Artificial Sequence: Synthetic oligonucleotide
  Sense strand starting at position 3645 of SEQ ID NO: 1882819
gcagguuauuaauuuguau

SEQ ID NO: 2149771 - RNA, 19 nt, Artificial Sequence
  Description of Artificial Sequence: Synthetic oligonucleotide
  Antisense strand to SEQ ID NO: 2149770
auacaaauuaauaaccugc

SEQ ID NO: 2149772 - RNA, 19 nt, Artificial Sequence
  Description of Artificial Sequence: Synthetic oligonucleotide
  Sense strand starting at position 3690 of SEQ ID NO: 1882819
gugugaauucaacacgaug

SEQ ID NO: 2149773 - RNA, 19 nt, Artificial Sequence
  Description of Artificial Sequence: Synthetic oligonucleotide
  Antisense strand to SEQ ID NO: 2149772
caucguguugaauucacac

SEQ ID NO: 2149774 - RNA, 19 nt, Artificial Sequence
  Description of Artificial Sequence: Synthetic oligonucleotide
  Sense strand starting at position 3859 of SEQ ID NO: 1882819
ggguauggaccacgugaaa

SEQ ID NO: 2149775 - RNA, 19 nt, Artificial Sequence
  Description of Artificial Sequence: Synthetic oligonucleotide
  Antisense strand to SEQ ID NO: 2149774
uuucacgugguccauaccc

SEQ ID NO: 2149776 - RNA, 19 nt, Artificial Sequence
  Description of Artificial Sequence: Synthetic oligonucleotide
  Sense strand starting at position 203 of SEQ ID NO: 1882820
uaacucaagucugugaaag

SEQ ID NO: 2149777 - RNA, 19 nt, Artificial Sequence
  Description of Artificial Sequence: Synthetic oligonucleotide
  Antisense strand to SEQ ID NO: 2149776
cuuucacagacuugaguua

SEQ ID NO: 2149778 - RNA, 19 nt, Artificial Sequence
  Description of Artificial Sequence: Synthetic oligonucleotide
  Sense strand starting at position 204 of SEQ ID NO: 1882820
aacucaagucugugaaaga

SEQ ID NO: 2149779 - RNA, 19 nt, Artificial Sequence
  Description of Artificial Sequence: Synthetic oligonucleotide
  Antisense strand to SEQ ID NO: 2149778
ucuuucacagacuugaguu

SEQ ID NO: 2149780 - RNA, 19 nt, Artificial Sequence
  Description of Artificial Sequence: Synthetic oligonucleotide
  Sense strand starting at position 273 of SEQ ID NO: 1882820
ugaugacuauuugacaaac

SEQ ID NO: 2149781 - RNA, 19 nt, Artificial Sequence
  Description of Artificial Sequence: Synthetic oligonucleotide
  Antisense strand to SEQ ID NO: 2149780
guuugucaaauagucauca

SEQ ID NO: 2149782 - RNA, 19 nt, Artificial Sequence
  Description of Artificial Sequence: Synthetic oligonucleotide
  Sense strand starting at position 304 of SEQ ID NO: 1882820
gcguaaacaguucaggaua

SEQ ID NO: 2149783 - RNA, 19 nt, Artificial Sequence
  Description of Artificial Sequence: Synthetic oligonucleotide
  Antisense strand to SEQ ID NO: 2149782
uauccugaacuguuuacgc

SEQ ID NO: 2149784 - RNA, 19 nt, Artificial Sequence
  Description of Artificial Sequence: Synthetic oligonucleotide
  Sense strand starting at position 381 of SEQ ID NO: 1882820
uucccagugcaugaaagau

SEQ ID NO: 2149785 - RNA, 19 nt, Artificial Sequence
  Description of Artificial Sequence: Synthetic oligonucleotide
  Antisense strand to SEQ ID NO: 2149784
aucuuucaugcacugggaa

SEQ ID NO: 2149786 - RNA, 19 nt, Artificial Sequence
  Description of Artificial Sequence: Synthetic oligonucleotide
  Sense strand starting at position 707 of SEQ ID NO: 1882820
uacgcucgugagcuugaau

SEQ ID NO: 2149787 - RNA, 19 nt, Artificial Sequence
  Description of Artificial Sequence: Synthetic oligonucleotide
  Antisense strand to SEQ ID NO: 2149786
auucaagcucacgagcgua

SEQ ID NO: 2149788 - RNA, 19 nt, Artificial Sequence
  Description of Artificial Sequence: Synthetic oligonucleotide
  Sense strand starting at position 718 of SEQ ID NO: 1882820
gcuugaaugccguuucuuu

SEQ ID NO: 2149789 - RNA, 19 nt, Artificial Sequence
  Description of Artificial Sequence: Synthetic oligonucleotide
  Antisense strand to SEQ ID NO: 2149788
aaagaaacggcauucaagc

SEQ ID NO: 2149790 - RNA, 19 nt, Artificial Sequence
  Description of Artificial Sequence: Synthetic oligonucleotide
  Sense strand starting at position 827 of SEQ ID NO: 1882820
cauguaagguuucugaauc

SEQ ID NO: 2149791 - RNA, 19 nt, Artificial Sequence
  Description of Artificial Sequence: Synthetic oligonucleotide
  Antisense strand to SEQ ID NO: 2149790
gauucagaaaccuuacaug

SEQ ID NO: 2149792 - RNA, 19 nt, Artificial Sequence
  Description of Artificial Sequence: Synthetic oligonucleotide
  Sense strand starting at position 987 of SEQ ID NO: 1882820
augaaauugcuguaucauu

SEQ ID NO: 2149793 - RNA, 19 nt, Artificial Sequence
  Description of Artificial Sequence: Synthetic oligonucleotide
  Antisense strand to SEQ ID NO: 2149792
aaugauacagcaauuucau

SEQ ID NO: 2149794 - RNA, 19 nt, Artificial Sequence
  Description of Artificial Sequence: Synthetic oligonucleotide
  Sense strand starting at position 1019 of SEQ ID NO: 1882820
aguuauugucaucaacaau

SEQ ID NO: 2149795 - RNA, 19 nt, Artificial Sequence
  Description of Artificial Sequence: Synthetic oligonucleotide
  Antisense strand to SEQ ID NO: 2149794
auuguugaugacaauaacu

SEQ ID NO: 2149796 - RNA, 19 nt, Artificial Sequence
  Description of Artificial Sequence: Synthetic oligonucleotide
  Sense strand starting at position 1132 of SEQ ID NO: 1882820
cugucuuauguauauauga

SEQ ID NO: 2149797 - RNA, 19 nt, Artificial Sequence
  Description of Artificial Sequence: Synthetic oligonucleotide
  Antisense strand to SEQ ID NO: 2149796
ucauauauacauaagacag

SEQ ID NO: 2149798 - RNA, 19 nt, Artificial Sequence
  Description of Artificial Sequence: Synthetic oligonucleotide
  Sense strand starting at position 1154 of SEQ ID NO: 1882820
agagauaucugagcacauc

SEQ ID NO: 2149799 - RNA, 19 nt, Artificial Sequence
  Description of Artificial Sequence: Synthetic oligonucleotide
  Antisense strand to SEQ ID NO: 2149798
gaugugcucagauaucucu

SEQ ID NO: 2149800 - RNA, 19 nt, Artificial Sequence
  Description of Artificial Sequence: Synthetic oligonucleotide
  Sense strand starting at position 1205 of SEQ ID NO: 1882820
ggauuugccguaggcaauu

SEQ ID NO: 2149801 - RNA, 19 nt, Artificial Sequence
  Description of Artificial Sequence: Synthetic oligonucleotide
  Antisense strand to SEQ ID NO: 2149800
aauugccuacggcaaaucc

SEQ ID NO: 2149802 - RNA, 19 nt, Artificial Sequence
  Description of Artificial Sequence: Synthetic oligonucleotide
  Sense strand starting at position 1278 of SEQ ID NO: 1882820
ccagguagcaaugauugau

SEQ ID NO: 2149803 - RNA, 19 nt, Artificial Sequence
  Description of Artificial Sequence: Synthetic oligonucleotide
  Antisense strand to SEQ ID NO: 2149802
aucaaucauugcuaccugg

SEQ ID NO: 2149804 - RNA, 19 nt, Artificial Sequence
  Description of Artificial Sequence: Synthetic oligonucleotide
  Sense strand starting at position 1373 of SEQ ID NO: 1882820
ucacaaagucucugacuga

SEQ ID NO: 2149805 - RNA, 19 nt, Artificial Sequence
  Description of Artificial Sequence: Synthetic oligonucleotide
  Antisense strand to SEQ ID NO: 2149804
ucagucagagacuuuguga

SEQ ID NO: 2149806 - RNA, 19 nt, Artificial Sequence
  Description of Artificial Sequence: Synthetic oligonucleotide
  Sense strand starting at position 1376 of SEQ ID NO: 1882820
caaagucucugacugaaug

SEQ ID NO: 2149807 - RNA, 19 nt, Artificial Sequence
  Description of Artificial Sequence: Synthetic oligonucleotide
  Antisense strand to SEQ ID NO: 2149806
cauucagucagagacuuug

SEQ ID NO: 2149808 - RNA, 19 nt, Artificial Sequence
  Description of Artificial Sequence: Synthetic oligonucleotide
  Sense strand starting at position 1377 of SEQ ID NO: 1882820
aaagucucugacugaaugu

SEQ ID NO: 2149809 - RNA, 19 nt, Artificial Sequence
  Description of Artificial Sequence: Synthetic oligonucleotide
  Antisense strand to SEQ ID NO: 2149808
acauucagucagagacuuu

SEQ ID NO: 2149810 - RNA, 19 nt, Artificial Sequence
  Description of Artificial Sequence: Synthetic oligonucleotide
  Sense strand starting at position 1449 of SEQ ID NO: 1882820
ucaaaucagcuguaucagu

SEQ ID NO: 2149811 - RNA, 19 nt, Artificial Sequence
  Description of Artificial Sequence: Synthetic oligonucleotide
  Antisense strand to SEQ ID NO: 2149810
acugauacagcugauuuga

SEQ ID NO: 2149812 - RNA, 19 nt, Artificial Sequence
  Description of Artificial Sequence: Synthetic oligonucleotide
  Sense strand starting at position 1607 of SEQ ID NO: 1882820
uuagcacuacauugagaau

SEQ ID NO: 2149813 - RNA, 19 nt, Artificial Sequence
  Description of Artificial Sequence: Synthetic oligonucleotide
  Antisense strand to SEQ ID NO: 2149812
auucucaauguagugcuaa

SEQ ID NO: 2149814 - RNA, 19 nt, Artificial Sequence
  Description of Artificial Sequence: Synthetic oligonucleotide
  Sense strand starting at position 1726 of SEQ ID NO: 1882820
agaugccacuucucugaua

SEQ ID NO: 2149815 - RNA, 19 nt, Artificial Sequence
  Description of Artificial Sequence: Synthetic oligonucleotide
  Antisense strand to SEQ ID NO: 2149814
uaucagagaaguggcaucu

SEQ ID NO: 2149816 - RNA, 19 nt, Artificial Sequence
  Description of Artificial Sequence: Synthetic oligonucleotide
  Sense strand starting at position 2016 of SEQ ID NO: 1882820
gcuuuccuaguuuaugaau

SEQ ID NO: 2149817 - RNA, 19 nt, Artificial Sequence
  Description of Artificial Sequence: Synthetic oligonucleotide
  Antisense strand to SEQ ID NO: 2149816
auucauaaacuaggaaagc

SEQ ID NO: 2149818 - RNA, 19 nt, Artificial Sequence
  Description of Artificial Sequence: Synthetic oligonucleotide
  Sense strand starting at position 2112 of SEQ ID NO: 1882820
caggcucuggcagaacauu

SEQ ID NO: 2149819 - RNA, 19 nt, Artificial Sequence
  Description of Artificial Sequence: Synthetic oligonucleotide
  Antisense strand to SEQ ID NO: 2149818
aauguucugccagagccug

SEQ ID NO: 2149820 - RNA, 19 nt, Artificial Sequence
  Description of Artificial Sequence: Synthetic oligonucleotide
  Sense strand starting at position 2263 of SEQ ID NO: 1882820
aauacaugugcaugauaug

SEQ ID NO: 2149821 - RNA, 19 nt, Artificial Sequence
  Description of Artificial Sequence: Synthetic oligonucleotide
  Antisense strand to SEQ ID NO: 2149820
cauaucaugcacauguauu

SEQ ID NO: 2149822 - RNA, 19 nt, Artificial Sequence
  Description of Artificial Sequence: Synthetic oligonucleotide
  Sense strand starting at position 2264 of SEQ ID NO: 1882820
auacaugugcaugauauga

SEQ ID NO: 2149823 - RNA, 19 nt, Artificial Sequence
  Description of Artificial Sequence: Synthetic oligonucleotide
  Antisense strand to SEQ ID NO: 2149822
ucauaucaugcacauguau

SEQ ID NO: 2149824 - RNA, 19 nt, Artificial Sequence
  Description of Artificial Sequence: Synthetic oligonucleotide
  Sense strand starting at position 2305 of SEQ ID NO: 1882820
ugaauauuucguggcuguu

SEQ ID NO: 2149825 - RNA, 19 nt, Artificial Sequence
  Description of Artificial Sequence: Synthetic oligonucleotide
  Antisense strand to SEQ ID NO: 2149824
aacagccacgaaauauuca

SEQ ID NO: 2149826 - RNA, 19 nt, Artificial Sequence
  Description of Artificial Sequence: Synthetic oligonucleotide
  Sense strand starting at position 2317 of SEQ ID NO: 1882820
ggcuguugugaauagaaag

SEQ ID NO: 2149827 - RNA, 19 nt, Artificial Sequence
  Description of Artificial Sequence: Synthetic oligonucleotide
  Antisense strand to SEQ ID NO: 2149826
cuuucuauucacaacagcc

SEQ ID NO: 2149828 - RNA, 19 nt, Artificial Sequence
  Description of Artificial Sequence: Synthetic oligonucleotide
  Sense strand starting at position 2327 of SEQ ID NO: 1882820
aauagaaaguugcucuuga

SEQ ID NO: 2149829 - RNA, 19 nt, Artificial Sequence
  Description of Artificial Sequence: Synthetic oligonucleotide
  Antisense strand to SEQ ID NO: 2149828
ucaagagcaacuuucuauu

SEQ ID NO: 2149830 - RNA, 19 nt, Artificial Sequence
  Description of Artificial Sequence: Synthetic oligonucleotide
  Sense strand starting at position 2328 of SEQ ID NO: 1882820
auagaaaguugcucuugau

SEQ ID NO: 2149831 - RNA, 19 nt, Artificial Sequence
  Description of Artificial Sequence: Synthetic oligonucleotide
  Antisense strand to SEQ ID NO: 2149830
aucaagagcaacuuucuau

SEQ ID NO: 2149832 - RNA, 19 nt, Artificial Sequence
  Description of Artificial Sequence: Synthetic oligonucleotide
  Sense strand starting at position 2332 of SEQ ID NO: 1882820
aaaguugcucuugauaaug

SEQ ID NO: 2149833 - RNA, 19 nt, Artificial Sequence
  Description of Artificial Sequence: Synthetic oligonucleotide
  Antisense strand to SEQ ID NO: 2149832
cauuaucaagagcaacuuu

SEQ ID NO: 2149834 - RNA, 19 nt, Artificial Sequence
  Description of Artificial Sequence: Synthetic oligonucleotide
  Sense strand starting at position 2412 of SEQ ID NO: 1882820
gugagaaggguuuauuauu

SEQ ID NO: 2149835 - RNA, 19 nt, Artificial Sequence
  Description of Artificial Sequence: Synthetic oligonucleotide
  Antisense strand to SEQ ID NO: 2149834
aauaauaaacccuucucac

SEQ ID NO: 2149836 - RNA, 19 nt, Artificial Sequence
  Description of Artificial Sequence: Synthetic oligonucleotide
  Sense strand starting at position 2540 of SEQ ID NO: 1882820
aguuaauuuguauggguuu

SEQ ID NO: 2149837 - RNA, 19 nt, Artificial Sequence
  Description of Artificial Sequence: Synthetic oligonucleotide
  Antisense strand to SEQ ID NO: 2149836
aaacccauacaaauuaacu

SEQ ID NO: 2149838 - RNA, 19 nt, Artificial Sequence
  Description of Artificial Sequence: Synthetic oligonucleotide
  Sense strand starting at position 2576 of SEQ ID NO: 1882820
gagacaugagaaugccacu

SEQ ID NO: 2149839 - RNA, 19 nt, Artificial Sequence
  Description of Artificial Sequence: Synthetic oligonucleotide
  Antisense strand to SEQ ID NO: 2149838
aguggcauucucaugucuc

SEQ ID NO: 2149840 - RNA, 19 nt, Artificial Sequence
  Description of Artificial Sequence: Synthetic oligonucleotide
  Sense strand starting at position 2609 of SEQ ID NO: 1882820
auggucacauggucauuaa

SEQ ID NO: 2149841 - RNA, 19 nt, Artificial Sequence
  Description of Artificial Sequence: Synthetic oligonucleotide
  Antisense strand to SEQ ID NO: 2149840
uuaaugaccaugugaccau

SEQ ID NO: 2149842 - RNA, 19 nt, Artificial Sequence
  Description of Artificial Sequence: Synthetic oligonucleotide
  Sense strand starting at position 2610 of SEQ ID NO: 1882820
uggucacauggucauuaau

SEQ ID NO: 2149843 - RNA, 19 nt, Artificial Sequence
  Description of Artificial Sequence: Synthetic oligonucleotide
  Antisense strand to SEQ ID NO: 2149842
auuaaugaccaugugacca

SEQ ID NO: 2149844 - RNA, 19 nt, Artificial Sequence
  Description of Artificial Sequence: Synthetic oligonucleotide
  Sense strand starting at position 2612 of SEQ ID NO: 1882820
gucacauggucauuaauua

SEQ ID NO: 2149845 - RNA, 19 nt, Artificial Sequence
  Description of Artificial Sequence: Synthetic oligonucleotide
  Antisense strand to SEQ ID NO: 2149844
uaauuaaugaccaugugac

SEQ ID NO: 2149846 - RNA, 19 nt, Artificial Sequence
  Description of Artificial Sequence: Synthetic oligonucleotide
  Sense strand starting at position 2619 of SEQ ID NO: 1882820
ggucauuaauuaucuuaug

SEQ ID NO: 2149847 - RNA, 19 nt, Artificial Sequence
  Description of Artificial Sequence: Synthetic oligonucleotide
  Antisense strand to SEQ ID NO: 2149846
cauaagauaauuaaugacc

SEQ ID NO: 2149848 - RNA, 19 nt, Artificial Sequence
  Description of Artificial Sequence: Synthetic oligonucleotide
  Sense strand starting at position 2692 of SEQ ID NO: 1882820
aggugagagccucacuuga

SEQ ID NO: 2149849 - RNA, 19 nt, Artificial Sequence
  Description of Artificial Sequence: Synthetic oligonucleotide
  Antisense strand to SEQ ID NO: 2149848
ucaagugaggcucucaccu

SEQ ID NO: 2149850 - RNA, 19 nt, Artificial Sequence
  Description of Artificial Sequence: Synthetic oligonucleotide
  Sense strand starting at position 2995 of SEQ ID NO: 1882820
ccauaagaaguaugugaaa

SEQ ID NO: 2149851 - RNA, 19 nt, Artificial Sequence
  Description of Artificial Sequence: Synthetic oligonucleotide
  Antisense strand to SEQ ID NO: 2149850
uuucacauacuucuuaugg

SEQ ID NO: 2149852 - RNA, 19 nt, Artificial Sequence
  Description of Artificial Sequence: Synthetic oligonucleotide
  Sense strand starting at position 3588 of SEQ ID NO: 1882820
aggguacuugugcaagaug

SEQ ID NO: 2149853 - RNA, 19 nt, Artificial Sequence
  Description of Artificial Sequence: Synthetic oligonucleotide
  Antisense strand to SEQ ID NO: 2149852
caucuugcacaaguacccu

SEQ ID NO: 2149854 - RNA, 19 nt, Artificial Sequence
  Description of Artificial Sequence: Synthetic oligonucleotide
  Sense strand starting at position 3603 of SEQ ID NO: 1882820
gauguuacauagguaaaug

SEQ ID NO: 2149855 - RNA, 19 nt, Artificial Sequence
  Description of Artificial Sequence: Synthetic oligonucleotide
  Antisense strand to SEQ ID NO: 2149854
cauuuaccuauguaacauc

SEQ ID NO: 2149856 - RNA, 19 nt, Artificial Sequence
  Description of Artificial Sequence: Synthetic oligonucleotide
  Sense strand starting at position 119 of SEQ ID NO: 1882821
ccaguaaugcuggaaagca

SEQ ID NO: 2149857 - RNA, 19 nt, Artificial Sequence
  Description of Artificial Sequence: Synthetic oligonucleotide
  Antisense strand to SEQ ID NO: 2149856
ugcuuuccagcauuacugg

SEQ ID NO: 2149858 - RNA, 19 nt, Artificial Sequence
  Description of Artificial Sequence: Synthetic oligonucleotide
  Sense strand starting at position 150 of SEQ ID NO: 1882821
ugccaugauauguagcaga

SEQ ID NO: 2149859 - RNA, 19 nt, Artificial Sequence
  Description of Artificial Sequence: Synthetic oligonucleotide
  Antisense strand to SEQ ID NO: 2149858
ucugcuacauaucauggca

SEQ ID NO: 2149860 - RNA, 19 nt, Artificial Sequence
  Description of Artificial Sequence: Synthetic oligonucleotide
  Sense strand starting at position 155 of SEQ ID NO: 1882821
ugauauguagcagaaucca

SEQ ID NO: 2149861 - RNA, 19 nt, Artificial Sequence
  Description of Artificial Sequence: Synthetic oligonucleotide
  Antisense strand to SEQ ID NO: 2149860
uggauucugcuacauauca

SEQ ID NO: 2149862 - RNA, 19 nt, Artificial Sequence
  Description of Artificial Sequence: Synthetic oligonucleotide
  Sense strand starting at position 185 of SEQ ID NO: 1882821
guacgaaauguuuaaguag

SEQ ID NO: 2149863 - RNA, 19 nt, Artificial Sequence
  Description of Artificial Sequence: Synthetic oligonucleotide
  Antisense strand to SEQ ID NO: 2149862
cuacuuaaacauuucguac

SEQ ID NO: 2149864 - RNA, 19 nt, Artificial Sequence
  Description of Artificial Sequence: Synthetic oligonucleotide
  Sense strand starting at position 509 of SEQ ID NO: 1882821
uaaauaaaccuugguguga

SEQ ID NO: 2149865 - RNA, 19 nt, Artificial Sequence
  Description of Artificial Sequence: Synthetic oligonucleotide
  Antisense strand to SEQ ID NO: 2149864
ucacaccaagguuuauuua

SEQ ID NO: 2149866 - RNA, 19 nt, Artificial Sequence
  Description of Artificial Sequence: Synthetic oligonucleotide
  Sense strand starting at position 843 of SEQ ID NO: 1882821
ugaguaguaguauaaggua

SEQ ID NO: 2149867 - RNA, 19 nt, Artificial Sequence
  Description of Artificial Sequence: Synthetic oligonucleotide
  Antisense strand to SEQ ID NO: 2149866
uaccuuauacuacuacuca

SEQ ID NO: 2149868 - RNA, 19 nt, Artificial Sequence
  Description of Artificial Sequence: Synthetic oligonucleotide
  Sense strand starting at position 848 of SEQ ID NO: 1882821
aguaguauaagguaguaca

SEQ ID NO: 2149869 - RNA, 19 nt, Artificial Sequence
  Description of Artificial Sequence: Synthetic oligonucleotide
  Antisense strand to SEQ ID NO: 2149868
uguacuaccuuauacuacu

SEQ ID NO: 2149870 - RNA, 19 nt, Artificial Sequence
  Description of Artificial Sequence: Synthetic oligonucleotide
  Sense strand starting at position 869 of SEQ ID NO: 1882821
acaguuuaagaaggcaauu

SEQ ID NO: 2149871 - RNA, 19 nt, Artificial Sequence
  Description of Artificial Sequence: Synthetic oligonucleotide
  Antisense strand to SEQ ID NO: 2149870
aauugccuucuuaaacugu

SEQ ID NO: 2149872 - RNA, 19 nt, Artificial Sequence
  Description of Artificial Sequence: Synthetic oligonucleotide
  Sense strand starting at position 931 of SEQ ID NO: 1882821
agcaauuacuugcuaggaa

SEQ ID NO: 2149873 - RNA, 19 nt, Artificial Sequence
  Description of Artificial Sequence: Synthetic oligonucleotide
  Antisense strand to SEQ ID NO: 2149872
uuccuagcaaguaauugcu

SEQ ID NO: 2149874 - RNA, 19 nt, Artificial Sequence
  Description of Artificial Sequence: Synthetic oligonucleotide
  Sense strand starting at position 1033 of SEQ ID NO: 1882821
ucaauagaggaauggcuua

SEQ ID NO: 2149875 - RNA, 19 nt, Artificial Sequence
  Description of Artificial Sequence: Synthetic oligonucleotide
  Antisense strand to SEQ ID NO: 2149874
uaagccauuccucuauuga

SEQ ID NO: 2149876 - RNA, 19 nt, Artificial Sequence
  Description of Artificial Sequence: Synthetic oligonucleotide
  Sense strand starting at position 1144 of SEQ ID NO: 1882821
gaaugauguguuuaguuug

SEQ ID NO: 2149877 - RNA, 19 nt, Artificial Sequence
  Description of Artificial Sequence: Synthetic oligonucleotide
  Antisense strand to SEQ ID NO: 2149876
caaacuaaacacaucauuc

SEQ ID NO: 2149878 - RNA, 19 nt, Artificial Sequence
  Description of Artificial Sequence: Synthetic oligonucleotide
  Sense strand starting at position 1155 of SEQ ID NO: 1882821
uuaguuuggaaaugaguac

SEQ ID NO: 2149879 - RNA, 19 nt, Artificial Sequence
  Description of Artificial Sequence: Synthetic oligonucleotide
  Antisense strand to SEQ ID NO: 2149878
guacucauuuccaaacuaa

SEQ ID NO: 2149880 - RNA, 19 nt, Artificial Sequence
  Description of Artificial Sequence: Synthetic oligonucleotide
  Sense strand starting at position 1168 of SEQ ID NO: 1882821
gaguacaguucuguuauuu

SEQ ID NO: 2149881 - RNA, 19 nt, Artificial Sequence
  Description of Artificial Sequence: Synthetic oligonucleotide
  Antisense strand to SEQ ID NO: 2149880
aaauaacagaacuguacuc

SEQ ID NO: 2149882 - RNA, 19 nt, Artificial Sequence
  Description of Artificial Sequence: Synthetic oligonucleotide
  Sense strand starting at position 1189 of SEQ ID NO: 1882821
uguuuauggcuggacaaag

SEQ ID NO: 2149883 - RNA, 19 nt, Artificial Sequence
  Description of Artificial Sequence: Synthetic oligonucleotide
  Antisense strand to SEQ ID NO: 2149882
cuuuguccagccauaaaca

SEQ ID NO: 2149884 - RNA, 19 nt, Artificial Sequence
  Description of Artificial Sequence: Synthetic oligonucleotide
  Sense strand starting at position 1477 of SEQ ID NO: 1882821
acugacugcaccugggaaa

SEQ ID NO: 2149885 - RNA, 19 nt, Artificial Sequence
  Description of Artificial Sequence: Synthetic oligonucleotide
  Antisense strand to SEQ ID NO: 2149884
uuucccaggugcagucagu

SEQ ID NO: 2149886 - RNA, 19 nt, Artificial Sequence
  Description of Artificial Sequence: Synthetic oligonucleotide
  Sense strand starting at position 1804 of SEQ ID NO: 1882821
aaaccaugagccuggugaa

SEQ ID NO: 2149887 - RNA, 19 nt, Artificial Sequence
  Description of Artificial Sequence: Synthetic oligonucleotide
  Antisense strand to SEQ ID NO: 2149886
uucaccaggcucaugguuu

SEQ ID NO: 2149888 - RNA, 19 nt, Artificial Sequence
  Description of Artificial Sequence: Synthetic oligonucleotide
  Sense strand starting at position 1805 of SEQ ID NO: 1882821
aaccaugagccuggugaaa

SEQ ID NO: 2149889 - RNA, 19 nt, Artificial Sequence
  Description of Artificial Sequence: Synthetic oligonucleotide
  Antisense strand to SEQ ID NO: 2149888
uuucaccaggcucaugguu

SEQ ID NO: 2149890 - RNA, 19 nt, Artificial Sequence
  Description of Artificial Sequence: Synthetic oligonucleotide
  Sense strand starting at position 2055 of SEQ ID NO: 1882821
augucuaauggucacugua

SEQ ID NO: 2149891 - RNA, 19 nt, Artificial Sequence
  Description of Artificial Sequence: Synthetic oligonucleotide
  Antisense strand to SEQ ID NO: 2149890
uacagugaccauuagacau

SEQ ID NO: 2149892 - RNA, 19 nt, Artificial Sequence
  Description of Artificial Sequence: Synthetic oligonucleotide
  Sense strand starting at position 2152 of SEQ ID NO: 1882821
ucuggacuguauucuccaa

SEQ ID NO: 2149893 - RNA, 19 nt, Artificial Sequence
  Description of Artificial Sequence: Synthetic oligonucleotide
  Antisense strand to SEQ ID NO: 2149892
uuggagaauacaguccaga

SEQ ID NO: 2149894 - RNA, 19 nt, Artificial Sequence
  Description of Artificial Sequence: Synthetic oligonucleotide
  Sense strand starting at position 2200 of SEQ ID NO: 1882821
guaugauacguggaguuca

SEQ ID NO: 2149895 - RNA, 19 nt, Artificial Sequence
  Description of Artificial Sequence: Synthetic oligonucleotide
  Antisense strand to SEQ ID NO: 2149894
ugaacuccacguaucauac

SEQ ID NO: 2149896 - RNA, 19 nt, Artificial Sequence
  Description of Artificial Sequence: Synthetic oligonucleotide
  Sense strand starting at position 2252 of SEQ ID NO: 1882821
ggagucccuccauaucuau

SEQ ID NO: 2149897 - RNA, 19 nt, Artificial Sequence
  Description of Artificial Sequence: Synthetic oligonucleotide
  Antisense strand to SEQ ID NO: 2149896
auagauauggagggacucc

SEQ ID NO: 2149898 - RNA, 19 nt, Artificial Sequence
  Description of Artificial Sequence: Synthetic oligonucleotide
  Sense strand starting at position 2351 of SEQ ID NO: 1882821
gugaaaggaugcucaccau

SEQ ID NO: 2149899 - RNA, 19 nt, Artificial Sequence
  Description of Artificial Sequence: Synthetic oligonucleotide
  Antisense strand to SEQ ID NO: 2149898
auggugagcauccuuucac

SEQ ID NO: 2149900 - RNA, 19 nt, Artificial Sequence
  Description of Artificial Sequence: Synthetic oligonucleotide
  Sense strand starting at position 2442 of SEQ ID NO: 1882821
auaguaaucguauaguaac

SEQ ID NO: 2149901 - RNA, 19 nt, Artificial Sequence
  Description of Artificial Sequence: Synthetic oligonucleotide
  Antisense strand to SEQ ID NO: 2149900
guuacuauacgauuacuau

SEQ ID NO: 2149902 - RNA, 19 nt, Artificial Sequence
  Description of Artificial Sequence: Synthetic oligonucleotide
  Sense strand starting at position 2567 of SEQ ID NO: 1882821
acacauggcuuuguuauuu

SEQ ID NO: 2149903 - RNA, 19 nt, Artificial Sequence
  Description of Artificial Sequence: Synthetic oligonucleotide
  Antisense strand to SEQ ID NO: 2149902
aaauaacaaagccaugugu

SEQ ID NO: 2149904 - RNA, 19 nt, Artificial Sequence
  Description of Artificial Sequence: Synthetic oligonucleotide
  Sense strand starting at position 2666 of SEQ ID NO: 1882821
uuaggaucguuccuagaau

SEQ ID NO: 2149905 - RNA, 19 nt, Artificial Sequence
  Description of Artificial Sequence: Synthetic oligonucleotide
  Antisense strand to SEQ ID NO: 2149904
auucuaggaacgauccuaa

SEQ ID NO: 2149906 - RNA, 19 nt, Artificial Sequence
  Description of Artificial Sequence: Synthetic oligonucleotide
  Sense strand starting at position 2712 of SEQ ID NO: 1882821
ggaccaaauaugugaguuc

SEQ ID NO: 2149907 - RNA, 19 nt, Artificial Sequence
  Description of Artificial Sequence: Synthetic oligonucleotide
  Antisense strand to SEQ ID NO: 2149906
gaacucacauauuuggucc

SEQ ID NO: 2149908 - RNA, 19 nt, Artificial Sequence
  Description of Artificial Sequence: Synthetic oligonucleotide
  Sense strand starting at position 2715 of SEQ ID NO: 1882821
ccaaauaugugaguucuau

SEQ ID NO: 2149909 - RNA, 19 nt, Artificial Sequence
  Description of Artificial Sequence: Synthetic oligonucleotide
  Antisense strand to SEQ ID NO: 2149908
auagaacucacauauuugg

SEQ ID NO: 2149910 - RNA, 19 nt, Artificial Sequence
  Description of Artificial Sequence: Synthetic oligonucleotide
  Sense strand starting at position 2736 of SEQ ID NO: 1882821
agcaguacaaugggucaaa

SEQ ID NO: 2149911 - RNA, 19 nt, Artificial Sequence
  Description of Artificial Sequence: Synthetic oligonucleotide
  Antisense strand to SEQ ID NO: 2149910
uuugacccauuguacugcu

SEQ ID NO: 2149912 - RNA, 19 nt, Artificial Sequence
  Description of Artificial Sequence: Synthetic oligonucleotide
  Sense strand starting at position 2912 of SEQ ID NO: 1882821
cuaugaugugauuauuacu

SEQ ID NO: 2149913 - RNA, 19 nt, Artificial Sequence
  Description of Artificial Sequence: Synthetic oligonucleotide
  Antisense strand to SEQ ID NO: 2149912
aguaauaaucacaucauag

SEQ ID NO: 2149914 - RNA, 19 nt, Artificial Sequence
  Description of Artificial Sequence: Synthetic oligonucleotide
  Sense strand starting at position 3108 of SEQ ID NO: 1882821
cuggcauuauuugugucau

SEQ ID NO: 2149915 - RNA, 19 nt, Artificial Sequence
  Description of Artificial Sequence: Synthetic oligonucleotide
  Antisense strand to SEQ ID NO: 2149914
augacacaaauaaugccag

SEQ ID NO: 2149916 - RNA, 19 nt, Artificial Sequence
  Description of Artificial Sequence: Synthetic oligonucleotide
  Sense strand starting at position 3147 of SEQ ID NO: 1882821
cuagaucuguuucugaauc

SEQ ID NO: 2149917 - RNA, 19 nt, Artificial Sequence
  Description of Artificial Sequence: Synthetic oligonucleotide
  Antisense strand to SEQ ID NO: 2149916
gauucagaaacagaucuag

SEQ ID NO: 2149918 - RNA, 19 nt, Artificial Sequence
  Description of Artificial Sequence: Synthetic oligonucleotide
  Sense strand starting at position 3197 of SEQ ID NO: 1882821
ucuagaaaucaguaguccu

SEQ ID NO: 2149919 - RNA, 19 nt, Artificial Sequence
  Description of Artificial Sequence: Synthetic oligonucleotide
  Antisense strand to SEQ ID NO: 2149918
aggacuacugauuucuaga

SEQ ID NO: 2149920 - RNA, 19 nt, Artificial Sequence
  Description of Artificial Sequence: Synthetic oligonucleotide
  Sense strand starting at position 3200 of SEQ ID NO: 1882821
agaaaucaguaguccuaua

SEQ ID NO: 2149921 - RNA, 19 nt, Artificial Sequence
  Description of Artificial Sequence: Synthetic oligonucleotide
  Antisense strand to SEQ ID NO: 2149920
uauaggacuacugauuucu

SEQ ID NO: 2149922 - RNA, 19 nt, Artificial Sequence
  Description of Artificial Sequence: Synthetic oligonucleotide
  Sense strand starting at position 3235 of SEQ ID NO: 1882821
ggcucagugucuucuauuu

SEQ ID NO: 2149923 - RNA, 19 nt, Artificial Sequence
  Description of Artificial Sequence: Synthetic oligonucleotide
  Antisense strand to SEQ ID NO: 2149922
aaauagaagacacugagcc

SEQ ID NO: 2149924 - RNA, 19 nt, Artificial Sequence
  Description of Artificial Sequence: Synthetic oligonucleotide
  Sense strand starting at position 3417 of SEQ ID NO: 1882821
cuuuguaugggucaacuau

SEQ ID NO: 2149925 - RNA, 19 nt, Artificial Sequence
  Description of Artificial Sequence: Synthetic oligonucleotide
  Antisense strand to SEQ ID NO: 2149924
auaguugacccauacaaag

SEQ ID NO: 2149926 - RNA, 19 nt, Artificial Sequence
  Description of Artificial Sequence: Synthetic oligonucleotide
  Sense strand starting at position 3548 of SEQ ID NO: 1882821
ccaaaucagcuuugagauc

SEQ ID NO: 2149927 - RNA, 19 nt, Artificial Sequence
  Description of Artificial Sequence: Synthetic oligonucleotide
  Antisense strand to SEQ ID NO: 2149926
gaucucaaagcugauuugg

SEQ ID NO: 2149928 - RNA, 19 nt, Artificial Sequence
  Description of Artificial Sequence: Synthetic oligonucleotide
  Sense strand starting at position 3596 of SEQ ID NO: 1882821
ucuacugcugcuuaagaau

SEQ ID NO: 2149929 - RNA, 19 nt, Artificial Sequence
  Description of Artificial Sequence: Synthetic oligonucleotide
  Antisense strand to SEQ ID NO: 2149928
auucuuaagcagcaguaga

SEQ ID NO: 2149930 - RNA, 19 nt, Artificial Sequence
  Description of Artificial Sequence: Synthetic oligonucleotide
  Sense strand starting at position 3607 of SEQ ID NO: 1882821
uuaagaaugucuguggaca

SEQ ID NO: 2149931 - RNA, 19 nt, Artificial Sequence
  Description of Artificial Sequence: Synthetic oligonucleotide
  Antisense strand to SEQ ID NO: 2149930
uguccacagacauucuuaa

SEQ ID NO: 2149932 - RNA, 19 nt, Artificial Sequence
  Description of Artificial Sequence: Synthetic oligonucleotide
  Sense strand starting at position 3608 of SEQ ID NO: 1882821
uaagaaugucuguggacau

SEQ ID NO: 2149933 - RNA, 19 nt, Artificial Sequence
  Description of Artificial Sequence: Synthetic oligonucleotide
  Antisense strand to SEQ ID NO: 2149932
auguccacagacauucuua

SEQ ID NO: 2149934 - RNA, 19 nt, Artificial Sequence
  Description of Artificial Sequence: Synthetic oligonucleotide
  Sense strand starting at position 3852 of SEQ ID NO: 1882821
uugacaucauaucuauguu

SEQ ID NO: 2149935 - RNA, 19 nt, Artificial Sequence
  Description of Artificial Sequence: Synthetic oligonucleotide
  Antisense strand to SEQ ID NO: 2149934
aacauagauaugaugucaa

SEQ ID NO: 2149936 - RNA, 19 nt, Artificial Sequence
  Description of Artificial Sequence: Synthetic oligonucleotide
  Sense strand starting at position 136 of SEQ ID NO: 1882822
cuuuccugacaugaaaguu

SEQ ID NO: 2149937 - RNA, 19 nt, Artificial Sequence
  Description of Artificial Sequence: Synthetic oligonucleotide
  Antisense strand to SEQ ID NO: 2149936
aacuuucaugucaggaaag

SEQ ID NO: 2149938 - RNA, 19 nt, Artificial Sequence
  Description of Artificial Sequence: Synthetic oligonucleotide
  Sense strand starting at position 304 of SEQ ID NO: 1882822
cuuggaguucagugauaug

SEQ ID NO: 2149939 - RNA, 19 nt, Artificial Sequence
  Description of Artificial Sequence: Synthetic oligonucleotide
  Antisense strand to SEQ ID NO: 2149938
cauaucacugaacuccaag

SEQ ID NO: 2149940 - RNA, 19 nt, Artificial Sequence
  Description of Artificial Sequence: Synthetic oligonucleotide
  Sense strand starting at position 558 of SEQ ID NO: 1882822
gucacauagugauccaaag

SEQ ID NO: 2149941 - RNA, 19 nt, Artificial Sequence
  Description of Artificial Sequence: Synthetic oligonucleotide
  Antisense strand to SEQ ID NO: 2149940
cuuuggaucacuaugugac

SEQ ID NO: 2149942 - RNA, 19 nt, Artificial Sequence
  Description of Artificial Sequence: Synthetic oligonucleotide
  Sense strand starting at position 700 of SEQ ID NO: 1882822
cugguaagguucuuacuga

SEQ ID NO: 2149943 - RNA, 19 nt, Artificial Sequence
  Description of Artificial Sequence: Synthetic oligonucleotide
  Antisense strand to SEQ ID NO: 2149942
ucaguaagaaccuuaccag

SEQ ID NO: 2149944 - RNA, 19 nt, Artificial Sequence
  Description of Artificial Sequence: Synthetic oligonucleotide
  Sense strand starting at position 725 of SEQ ID NO: 1882822
aaaugacauuaggaggaaa

SEQ ID NO: 2149945 - RNA, 19 nt, Artificial Sequence
  Description of Artificial Sequence: Synthetic oligonucleotide
  Antisense strand to SEQ ID NO: 2149944
uuuccuccuaaugucauuu

SEQ ID NO: 2149946 - RNA, 19 nt, Artificial Sequence
  Description of Artificial Sequence: Synthetic oligonucleotide
  Sense strand starting at position 736 of SEQ ID NO: 1882822
ggaggaaauguugguucua

SEQ ID NO: 2149947 - RNA, 19 nt, Artificial Sequence
  Description of Artificial Sequence: Synthetic oligonucleotide
  Antisense strand to SEQ ID NO: 2149946
uagaaccaacauuuccucc

SEQ ID NO: 2149948 - RNA, 19 nt, Artificial Sequence
  Description of Artificial Sequence: Synthetic oligonucleotide
  Sense strand starting at position 737 of SEQ ID NO: 1882822
gaggaaauguugguucuaa

SEQ ID NO: 2149949 - RNA, 19 nt, Artificial Sequence
  Description of Artificial Sequence: Synthetic oligonucleotide
  Antisense strand to SEQ ID NO: 2149948
uuagaaccaacauuuccuc

SEQ ID NO: 2149950 - RNA, 19 nt, Artificial Sequence
  Description of Artificial Sequence: Synthetic oligonucleotide
  Sense strand starting at position 738 of SEQ ID NO: 1882822
aggaaauguugguucuaaa

SEQ ID NO: 2149951 - RNA, 19 nt, Artificial Sequence
  Description of Artificial Sequence: Synthetic oligonucleotide
  Antisense strand to SEQ ID NO: 2149950
uuuagaaccaacauuuccu

SEQ ID NO: 2149952 - RNA, 19 nt, Artificial Sequence
  Description of Artificial Sequence: Synthetic oligonucleotide
  Sense strand starting at position 862 of SEQ ID NO: 1882822
augauaaagugauccucau

SEQ ID NO: 2149953 - RNA, 19 nt, Artificial Sequence
  Description of Artificial Sequence: Synthetic oligonucleotide
  Antisense strand to SEQ ID NO: 2149952
augaggaucacuuuaucau

SEQ ID NO: 2149954 - RNA, 19 nt, Artificial Sequence
  Description of Artificial Sequence: Synthetic oligonucleotide
  Sense strand starting at position 1056 of SEQ ID NO: 1882822
guggguugugguuaagaaa

SEQ ID NO: 2149955 - RNA, 19 nt, Artificial Sequence
  Description of Artificial Sequence: Synthetic oligonucleotide
  Antisense strand to SEQ ID NO: 2149954
uuucuuaaccacaacccac

SEQ ID NO: 2149956 - RNA, 19 nt, Artificial Sequence
  Description of Artificial Sequence: Synthetic oligonucleotide
  Sense strand starting at position 1090 of SEQ ID NO: 1882822
cugauauuaguguaagauu

SEQ ID NO: 2149957 - RNA, 19 nt, Artificial Sequence
  Description of Artificial Sequence: Synthetic oligonucleotide
  Antisense strand to SEQ ID NO: 2149956
aaucuuacacuaauaucag

SEQ ID NO: 2149958 - RNA, 19 nt, Artificial Sequence
  Description of Artificial Sequence: Synthetic oligonucleotide
  Sense strand starting at position 1380 of SEQ ID NO: 1882822
ugcaguacucaggaguaga

SEQ ID NO: 2149959 - RNA, 19 nt, Artificial Sequence
  Description of Artificial Sequence: Synthetic oligonucleotide
  Antisense strand to SEQ ID NO: 2149958
ucuacuccugaguacugca

SEQ ID NO: 2149960 - RNA, 19 nt, Artificial Sequence
  Description of Artificial Sequence: Synthetic oligonucleotide
  Sense strand starting at position 1383 of SEQ ID NO: 1882822
aguacucaggaguagagua

SEQ ID NO: 2149961 - RNA, 19 nt, Artificial Sequence
  Description of Artificial Sequence: Synthetic oligonucleotide
  Antisense strand to SEQ ID NO: 2149960
uacucuacuccugaguacu

SEQ ID NO: 2149962 - RNA, 19 nt, Artificial Sequence
  Description of Artificial Sequence: Synthetic oligonucleotide
  Sense strand starting at position 1438 of SEQ ID NO: 1882822
ucaaguugggcccaaauga

SEQ ID NO: 2149963 - RNA, 19 nt, Artificial Sequence
  Description of Artificial Sequence: Synthetic oligonucleotide
  Antisense strand to SEQ ID NO: 2149962
ucauuugggcccaacuuga

SEQ ID NO: 2149964 - RNA, 19 nt, Artificial Sequence
  Description of Artificial Sequence: Synthetic oligonucleotide
  Sense strand starting at position 1537 of SEQ ID NO: 1882822
uaugguaugcaguauaaau

SEQ ID NO: 2149965 - RNA, 19 nt, Artificial Sequence
  Description of Artificial Sequence: Synthetic oligonucleotide
  Antisense strand to SEQ ID NO: 2149964
auuuauacugcauaccaua

SEQ ID NO: 2149966 - RNA, 19 nt, Artificial Sequence
  Description of Artificial Sequence: Synthetic oligonucleotide
  Sense strand starting at position 1787 of SEQ ID NO: 1882822
uaauguucuugguuaggac

SEQ ID NO: 2149967 - RNA, 19 nt, Artificial Sequence
  Description of Artificial Sequence: Synthetic oligonucleotide
  Antisense strand to SEQ ID NO: 2149966
guccuaaccaagaacauua

SEQ ID NO: 2149968 - RNA, 19 nt, Artificial Sequence
  Description of Artificial Sequence: Synthetic oligonucleotide
  Sense strand starting at position 1816 of SEQ ID NO: 1882822
ccaacaugugucuaucacu

SEQ ID NO: 2149969 - RNA, 19 nt, Artificial Sequence
  Description of Artificial Sequence: Synthetic oligonucleotide
  Antisense strand to SEQ ID NO: 2149968
agugauagacacauguugg

SEQ ID NO: 2149970 - RNA, 19 nt, Artificial Sequence
  Description of Artificial Sequence: Synthetic oligonucleotide
  Sense strand starting at position 1993 of SEQ ID NO: 1882822
agaauaaguguugagcgaa

SEQ ID NO: 2149971 - RNA, 19 nt, Artificial Sequence
  Description of Artificial Sequence: Synthetic oligonucleotide
  Antisense strand to SEQ ID NO: 2149970
uucgcucaacacuuauucu

SEQ ID NO: 2149972 - RNA, 19 nt, Artificial Sequence
  Description of Artificial Sequence: Synthetic oligonucleotide
  Sense strand starting at position 2489 of SEQ ID NO: 1882822
ggaaucacuauucgugaga

SEQ ID NO: 2149973 - RNA, 19 nt, Artificial Sequence
  Description of Artificial Sequence: Synthetic oligonucleotide
  Antisense strand to SEQ ID NO: 2149972
ucucacgaauagugauucc

SEQ ID NO: 2149974 - RNA, 19 nt, Artificial Sequence
  Description of Artificial Sequence: Synthetic oligonucleotide
  Sense strand starting at position 2490 of SEQ ID NO: 1882822
gaaucacuauucgugagaa

SEQ ID NO: 2149975 - RNA, 19 nt, Artificial Sequence
  Description of Artificial Sequence: Synthetic oligonucleotide
  Antisense strand to SEQ ID NO: 2149974
uucucacgaauagugauuc

SEQ ID NO: 2149976 - RNA, 19 nt, Artificial Sequence
  Description of Artificial Sequence: Synthetic oligonucleotide
  Sense strand starting at position 2642 of SEQ ID NO: 1882822
agcaaacucugacuugaaa

SEQ ID NO: 2149977 - RNA, 19 nt, Artificial Sequence
  Description of Artificial Sequence: Synthetic oligonucleotide
  Antisense strand to SEQ ID NO: 2149976
uuucaagucagaguuugcu

SEQ ID NO: 2149978 - RNA, 19 nt, Artificial Sequence
  Description of Artificial Sequence: Synthetic oligonucleotide
  Sense strand starting at position 2671 of SEQ ID NO: 1882822
uuugacuaaucuguaugga

SEQ ID NO: 2149979 - RNA, 19 nt, Artificial Sequence
  Description of Artificial Sequence: Synthetic oligonucleotide
  Antisense strand to SEQ ID NO: 2149978
uccauacagauuagucaaa

SEQ ID NO: 2149980 - RNA, 19 nt, Artificial Sequence
  Description of Artificial Sequence: Synthetic oligonucleotide
  Sense strand starting at position 2674 of SEQ ID NO: 1882822
gacuaaucuguauggauuc

SEQ ID NO: 2149981 - RNA, 19 nt, Artificial Sequence
  Description of Artificial Sequence: Synthetic oligonucleotide
  Antisense strand to SEQ ID NO: 2149980
gaauccauacagauuaguc

SEQ ID NO: 2149982 - RNA, 19 nt, Artificial Sequence
  Description of Artificial Sequence: Synthetic oligonucleotide
  Sense strand starting at position 2716 of SEQ ID NO: 1882822
ugauuaauaggauggcauu

SEQ ID NO: 2149983 - RNA, 19 nt, Artificial Sequence
  Description of Artificial Sequence: Synthetic oligonucleotide
  Antisense strand to SEQ ID NO: 2149982
aaugccauccuauuaauca

SEQ ID NO: 2149984 - RNA, 19 nt, Artificial Sequence
  Description of Artificial Sequence: Synthetic oligonucleotide
  Sense strand starting at position 2717 of SEQ ID NO: 1882822
gauuaauaggauggcauua

SEQ ID NO: 2149985 - RNA, 19 nt, Artificial Sequence
  Description of Artificial Sequence: Synthetic oligonucleotide
  Antisense strand to SEQ ID NO: 2149984
uaaugccauccuauuaauc

SEQ ID NO: 2149986 - RNA, 19 nt, Artificial Sequence
  Description of Artificial Sequence: Synthetic oligonucleotide
  Sense strand starting at position 2862 of SEQ ID NO: 1882822
uucugaagagcguaacauu

SEQ ID NO: 2149987 - RNA, 19 nt, Artificial Sequence
  Description of Artificial Sequence: Synthetic oligonucleotide
  Antisense strand to SEQ ID NO: 2149986
aauguuacgcucuucagaa

SEQ ID NO: 2149988 - RNA, 19 nt, Artificial Sequence
  Description of Artificial Sequence: Synthetic oligonucleotide
  Sense strand starting at position 2894 of SEQ ID NO: 1882822
ccagauaugcaguaucaau

SEQ ID NO: 2149989 - RNA, 19 nt, Artificial Sequence
  Description of Artificial Sequence: Synthetic oligonucleotide
  Antisense strand to SEQ ID NO: 2149988
auugauacugcauaucugg

SEQ ID NO: 2149990 - RNA, 19 nt, Artificial Sequence
  Description of Artificial Sequence: Synthetic oligonucleotide
  Sense strand starting at position 2905 of SEQ ID NO: 1882822
guaucaauagaauguuucu

SEQ ID NO: 2149991 - RNA, 19 nt, Artificial Sequence
  Description of Artificial Sequence: Synthetic oligonucleotide
  Antisense strand to SEQ ID NO: 2149990
agaaacauucuauugauac

SEQ ID NO: 2149992 - RNA, 19 nt, Artificial Sequence
  Description of Artificial Sequence: Synthetic oligonucleotide
  Sense strand starting at position 3070 of SEQ ID NO: 1882822
cccugauauuaggugaacu

SEQ ID NO: 2149993 - RNA, 19 nt, Artificial Sequence
  Description of Artificial Sequence: Synthetic oligonucleotide
  Antisense strand to SEQ ID NO: 2149992
aguucaccuaauaucaggg

SEQ ID NO: 2149994 - RNA, 19 nt, Artificial Sequence
  Description of Artificial Sequence: Synthetic oligonucleotide
  Sense strand starting at position 3081 of SEQ ID NO: 1882822
ggugaacuaucacuaugaa

SEQ ID NO: 2149995 - RNA, 19 nt, Artificial Sequence
  Description of Artificial Sequence: Synthetic oligonucleotide
  Antisense strand to SEQ ID NO: 2149994
uucauagugauaguucacc

SEQ ID NO: 2149996 - RNA, 19 nt, Artificial Sequence
  Description of Artificial Sequence: Synthetic oligonucleotide
  Sense strand starting at position 3116 of SEQ ID NO: 1882822
ggguuacugaaaugcauac

SEQ ID NO: 2149997 - RNA, 19 nt, Artificial Sequence
  Description of Artificial Sequence: Synthetic oligonucleotide
  Antisense strand to SEQ ID NO: 2149996
guaugcauuucaguaaccc

SEQ ID NO: 2149998 - RNA, 19 nt, Artificial Sequence
  Description of Artificial Sequence: Synthetic oligonucleotide
  Sense strand starting at position 3137 of SEQ ID NO: 1882822
gcuguugacuauuugugua

SEQ ID NO: 2149999 - RNA, 19 nt, Artificial Sequence
  Description of Artificial Sequence: Synthetic oligonucleotide
  Antisense strand to SEQ ID NO: 2149998
uacacaaauagucaacagc

SEQ ID NO: 2150000 - RNA, 19 nt, Artificial Sequence
  Description of Artificial Sequence: Synthetic oligonucleotide
  Sense strand starting at position 3141 of SEQ ID NO: 1882822
uugacuauuuguguaagcu

SEQ ID NO: 2150001 - RNA, 19 nt, Artificial Sequence
  Description of Artificial Sequence: Synthetic oligonucleotide
  Antisense strand to SEQ ID NO: 2150000
agcuuacacaaauagucaa

SEQ ID NO: 2150002 - RNA, 19 nt, Artificial Sequence
  Description of Artificial Sequence: Synthetic oligonucleotide
  Sense strand starting at position 3145 of SEQ ID NO: 1882822
cuauuuguguaagcugauu

SEQ ID NO: 2150003 - RNA, 19 nt, Artificial Sequence
  Description of Artificial Sequence: Synthetic oligonucleotide
  Antisense strand to SEQ ID NO: 2150002
aaucagcuuacacaaauag

SEQ ID NO: 2150004 - RNA, 19 nt, Artificial Sequence
  Description of Artificial Sequence: Synthetic oligonucleotide
  Sense strand starting at position 3421 of SEQ ID NO: 1882822
ggaacugggacuugucauu

SEQ ID NO: 2150005 - RNA, 19 nt, Artificial Sequence
  Description of Artificial Sequence: Synthetic oligonucleotide
  Antisense strand to SEQ ID NO: 2150004
aaugacaagucccaguucc

SEQ ID NO: 2150006 - RNA, 19 nt, Artificial Sequence
  Description of Artificial Sequence: Synthetic oligonucleotide
  Sense strand starting at position 3549 of SEQ ID NO: 1882822
guugaagcucaacauggau

SEQ ID NO: 2150007 - RNA, 19 nt, Artificial Sequence
  Description of Artificial Sequence: Synthetic oligonucleotide
  Antisense strand to SEQ ID NO: 2150006
auccauguugagcuucaac

SEQ ID NO: 2150008 - RNA, 19 nt, Artificial Sequence
  Description of Artificial Sequence: Synthetic oligonucleotide
  Sense strand starting at position 3643 of SEQ ID NO: 1882822
gcgauaaccaccugggaaa

SEQ ID NO: 2150009 - RNA, 19 nt, Artificial Sequence
  Description of Artificial Sequence: Synthetic oligonucleotide
  Antisense strand to SEQ ID NO: 2150008
uuucccaggugguuaucgc

SEQ ID NO: 2150010 - RNA, 19 nt, Artificial Sequence
  Description of Artificial Sequence: Synthetic oligonucleotide
  Sense strand starting at position 3815 of SEQ ID NO: 1882822
ugagcuauuaauggaguuu

SEQ ID NO: 2150011 - RNA, 19 nt, Artificial Sequence
  Description of Artificial Sequence: Synthetic oligonucleotide
  Antisense strand to SEQ ID NO: 2150010
aaacuccauuaauagcuca

SEQ ID NO: 2150012 - RNA, 19 nt, Artificial Sequence
  Description of Artificial Sequence: Synthetic oligonucleotide
  Sense strand starting at position 3863 of SEQ ID NO: 1882822
ggcgauguuuguaucaggu

SEQ ID NO: 2150013 - RNA, 19 nt, Artificial Sequence
  Description of Artificial Sequence: Synthetic oligonucleotide
  Antisense strand to SEQ ID NO: 2150012
accugauacaaacaucgcc

SEQ ID NO: 2150014 - RNA, 19 nt, Artificial Sequence
  Description of Artificial Sequence: Synthetic oligonucleotide
  Sense strand starting at position 3949 of SEQ ID NO: 1882822
acuuaaggaucugauuuaa

SEQ ID NO: 2150015 - RNA, 19 nt, Artificial Sequence
  Description of Artificial Sequence: Synthetic oligonucleotide
  Antisense strand to SEQ ID NO: 2150014
uuaaaucagauccuuaagu

SEQ ID NO: 2150016 - RNA, 19 nt, Artificial Sequence
  Description of Artificial Sequence: Synthetic oligonucleotide
  Sense strand starting at position 8 of SEQ ID NO: 1882823
uggauuauauggucacaag

SEQ ID NO: 2150017 - RNA, 19 nt, Artificial Sequence
  Description of Artificial Sequence: Synthetic oligonucleotide
  Antisense strand to SEQ ID NO: 2150016
cuugugaccauauaaucca

SEQ ID NO: 2150018 - RNA, 19 nt, Artificial Sequence
  Description of Artificial Sequence: Synthetic oligonucleotide
  Sense strand starting at position 66 of SEQ ID NO: 1882823
auaaauggauuauccugua

SEQ ID NO: 2150019 - RNA, 19 nt, Artificial Sequence
  Description of Artificial Sequence: Synthetic oligonucleotide
  Antisense strand to SEQ ID NO: 2150018
uacaggauaauccauuuau

SEQ ID NO: 2150020 - RNA, 19 nt, Artificial Sequence
  Description of Artificial Sequence: Synthetic oligonucleotide
  Sense strand starting at position 302 of SEQ ID NO: 1882823
caggaaaugaugugaugua

SEQ ID NO: 2150021 - RNA, 19 nt, Artificial Sequence
  Description of Artificial Sequence: Synthetic oligonucleotide
  Antisense strand to SEQ ID NO: 2150020
uacaucacaucauuuccug

SEQ ID NO: 2150022 - RNA, 19 nt, Artificial Sequence
  Description of Artificial Sequence: Synthetic oligonucleotide
  Sense strand starting at position 373 of SEQ ID NO: 1882823
uggacccucuaguugauaa

SEQ ID NO: 2150023 - RNA, 19 nt, Artificial Sequence
  Description of Artificial Sequence: Synthetic oligonucleotide
  Antisense strand to SEQ ID NO: 2150022
uuaucaacuagagggucca

SEQ ID NO: 2150024 - RNA, 19 nt, Artificial Sequence
  Description of Artificial Sequence: Synthetic oligonucleotide
  Sense strand starting at position 445 of SEQ ID NO: 1882823
uucuguugugaacauaaac

SEQ ID NO: 2150025 - RNA, 19 nt, Artificial Sequence
  Description of Artificial Sequence: Synthetic oligonucleotide
  Antisense strand to SEQ ID NO: 2150024
guuuauguucacaacagaa

SEQ ID NO: 2150026 - RNA, 19 nt, Artificial Sequence
  Description of Artificial Sequence: Synthetic oligonucleotide
  Sense strand starting at position 553 of SEQ ID NO: 1882823
uuauauugaaggugagagu

SEQ ID NO: 2150027 - RNA, 19 nt, Artificial Sequence
  Description of Artificial Sequence: Synthetic oligonucleotide
  Antisense strand to SEQ ID NO: 2150026
acucucaccuucaauauaa

SEQ ID NO: 2150028 - RNA, 19 nt, Artificial Sequence
  Description of Artificial Sequence: Synthetic oligonucleotide
  Sense strand starting at position 669 of SEQ ID NO: 1882823
ccaguaaucucuuuggaaa

SEQ ID NO: 2150029 - RNA, 19 nt, Artificial Sequence
  Description of Artificial Sequence: Synthetic oligonucleotide
  Antisense strand to SEQ ID NO: 2150028
uuuccaaagagauuacugg

SEQ ID NO: 2150030 - RNA, 19 nt, Artificial Sequence
  Description of Artificial Sequence: Synthetic oligonucleotide
  Sense strand starting at position 689 of SEQ ID NO: 1882823
uagucuuaagcagaauuga

SEQ ID NO: 2150031 - RNA, 19 nt, Artificial Sequence
  Description of Artificial Sequence: Synthetic oligonucleotide
  Antisense strand to SEQ ID NO: 2150030
ucaauucugcuuaagacua

SEQ ID NO: 2150032 - RNA, 19 nt, Artificial Sequence
  Description of Artificial Sequence: Synthetic oligonucleotide
  Sense strand starting at position 768 of SEQ ID NO: 1882823
gcccacuccuggucuauuu

SEQ ID NO: 2150033 - RNA, 19 nt, Artificial Sequence
  Description of Artificial Sequence: Synthetic oligonucleotide
  Antisense strand to SEQ ID NO: 2150032
aaauagaccaggagugggc

SEQ ID NO: 2150034 - RNA, 19 nt, Artificial Sequence
  Description of Artificial Sequence: Synthetic oligonucleotide
  Sense strand starting at position 811 of SEQ ID NO: 1882823
acuccauuaucggcagaga

SEQ ID NO: 2150035 - RNA, 19 nt, Artificial Sequence
  Description of Artificial Sequence: Synthetic oligonucleotide
  Antisense strand to SEQ ID NO: 2150034
ucucugccgauaauggagu

SEQ ID NO: 2150036 - RNA, 19 nt, Artificial Sequence
  Description of Artificial Sequence: Synthetic oligonucleotide
  Sense strand starting at position 812 of SEQ ID NO: 1882823
cuccauuaucggcagagau

SEQ ID NO: 2150037 - RNA, 19 nt, Artificial Sequence
  Description of Artificial Sequence: Synthetic oligonucleotide
  Antisense strand to SEQ ID NO: 2150036
aucucugccgauaauggag

SEQ ID NO: 2150038 - RNA, 19 nt, Artificial Sequence
  Description of Artificial Sequence: Synthetic oligonucleotide
  Sense strand starting at position 880 of SEQ ID NO: 1882823
agaguauauuccuccucac

SEQ ID NO: 2150039 - RNA, 19 nt, Artificial Sequence
  Description of Artificial Sequence: Synthetic oligonucleotide
  Antisense strand to SEQ ID NO: 2150038
gugaggaggaauauacucu

SEQ ID NO: 2150040 - RNA, 19 nt, Artificial Sequence
  Description of Artificial Sequence: Synthetic oligonucleotide
  Sense strand starting at position 972 of SEQ ID NO: 1882823
auggaauggucuuucucca

SEQ ID NO: 2150041 - RNA, 19 nt, Artificial Sequence
  Description of Artificial Sequence: Synthetic oligonucleotide
  Antisense strand to SEQ ID NO: 2150040
uggagaaagaccauuccau

SEQ ID NO: 2150042 - RNA, 19 nt, Artificial Sequence
  Description of Artificial Sequence: Synthetic oligonucleotide
  Sense strand starting at position 996 of SEQ ID NO: 1882823
cugacaaaguagucaagga

SEQ ID NO: 2150043 - RNA, 19 nt, Artificial Sequence
  Description of Artificial Sequence: Synthetic oligonucleotide
  Antisense strand to SEQ ID NO: 2150042
uccuugacuacuuugucag

SEQ ID NO: 2150044 - RNA, 19 nt, Artificial Sequence
  Description of Artificial Sequence: Synthetic oligonucleotide
  Sense strand starting at position 1103 of SEQ ID NO: 1882823
uguagaaugcuccauuauc

SEQ ID NO: 2150045 - RNA, 19 nt, Artificial Sequence
  Description of Artificial Sequence: Synthetic oligonucleotide
  Antisense strand to SEQ ID NO: 2150044
gauaauggagcauucuaca

SEQ ID NO: 2150046 - RNA, 19 nt, Artificial Sequence
  Description of Artificial Sequence: Synthetic oligonucleotide
  Sense strand starting at position 1165 of SEQ ID NO: 1882823
agaaguagaaguugauauu

SEQ ID NO: 2150047 - RNA, 19 nt, Artificial Sequence
  Description of Artificial Sequence: Synthetic oligonucleotide
  Antisense strand to SEQ ID NO: 2150046
aauaucaacuucuacuucu

SEQ ID NO: 2150048 - RNA, 19 nt, Artificial Sequence
  Description of Artificial Sequence: Synthetic oligonucleotide
  Sense strand starting at position 1171 of SEQ ID NO: 1882823
agaaguugauauucuggau

SEQ ID NO: 2150049 - RNA, 19 nt, Artificial Sequence
  Description of Artificial Sequence: Synthetic oligonucleotide
  Antisense strand to SEQ ID NO: 2150048
auccagaauaucaacuucu

SEQ ID NO: 2150050 - RNA, 19 nt, Artificial Sequence
  Description of Artificial Sequence: Synthetic oligonucleotide
  Sense strand starting at position 1191 of SEQ ID NO: 1882823
acaggaaagcaguguuaaa

SEQ ID NO: 2150051 - RNA, 19 nt, Artificial Sequence
  Description of Artificial Sequence: Synthetic oligonucleotide
  Antisense strand to SEQ ID NO: 2150050
uuuaacacugcuuuccugu

SEQ ID NO: 2150052 - RNA, 19 nt, Artificial Sequence
  Description of Artificial Sequence: Synthetic oligonucleotide
  Sense strand starting at position 1279 of SEQ ID NO: 1882823
ugucauagucaugaucuaa

SEQ ID NO: 2150053 - RNA, 19 nt, Artificial Sequence
  Description of Artificial Sequence: Synthetic oligonucleotide
  Antisense strand to SEQ ID NO: 2150052
uuagaucaugacuaugaca

SEQ ID NO: 2150054 - RNA, 19 nt, Artificial Sequence
  Description of Artificial Sequence: Synthetic oligonucleotide
  Sense strand starting at position 1299 of SEQ ID NO: 1882823
gaaggccaggccuaugaau

SEQ ID NO: 2150055 - RNA, 19 nt, Artificial Sequence
  Description of Artificial Sequence: Synthetic oligonucleotide
  Antisense strand to SEQ ID NO: 2150054
auucauaggccuggccuuc

SEQ ID NO: 2150056 - RNA, 19 nt, Artificial Sequence
  Description of Artificial Sequence: Synthetic oligonucleotide
  Sense strand starting at position 1301 of SEQ ID NO: 1882823
aggccaggccuaugaauaa

SEQ ID NO: 2150057 - RNA, 19 nt, Artificial Sequence
  Description of Artificial Sequence: Synthetic oligonucleotide
  Antisense strand to SEQ ID NO: 2150056
uuauucauaggccuggccu

SEQ ID NO: 2150058 - RNA, 19 nt, Artificial Sequence
  Description of Artificial Sequence: Synthetic oligonucleotide
  Sense strand starting at position 1487 of SEQ ID NO: 1882823
aggugacauugggcaaauu

SEQ ID NO: 2150059 - RNA, 19 nt, Artificial Sequence
  Description of Artificial Sequence: Synthetic oligonucleotide
  Antisense strand to SEQ ID NO: 2150058
aauuugcccaaugucaccu

SEQ ID NO: 2150060 - RNA, 19 nt, Artificial Sequence
  Description of Artificial Sequence: Synthetic oligonucleotide
  Sense strand starting at position 1710 of SEQ ID NO: 1882823
gcauguuuaagucauggaa

SEQ ID NO: 2150061 - RNA, 19 nt, Artificial Sequence
  Description of Artificial Sequence: Synthetic oligonucleotide
  Antisense strand to SEQ ID NO: 2150060
uuccaugacuuaaacaugc

SEQ ID NO: 2150062 - RNA, 19 nt, Artificial Sequence
  Description of Artificial Sequence: Synthetic oligonucleotide
  Sense strand starting at position 1713 of SEQ ID NO: 1882823
uguuuaagucauggaauua

SEQ ID NO: 2150063 - RNA, 19 nt, Artificial Sequence
  Description of Artificial Sequence: Synthetic oligonucleotide
  Antisense strand to SEQ ID NO: 2150062
uaauuccaugacuuaaaca

SEQ ID NO: 2150064 - RNA, 19 nt, Artificial Sequence
  Description of Artificial Sequence: Synthetic oligonucleotide
  Sense strand starting at position 1724 of SEQ ID NO: 1882823
uggaauuauuugcaaacua

SEQ ID NO: 2150065 - RNA, 19 nt, Artificial Sequence
  Description of Artificial Sequence: Synthetic oligonucleotide
  Antisense strand to SEQ ID NO: 2150064
uaguuugcaaauaauucca

SEQ ID NO: 2150066 - RNA, 19 nt, Artificial Sequence
  Description of Artificial Sequence: Synthetic oligonucleotide
  Sense strand starting at position 1787 of SEQ ID NO: 1882823
ucagaaauaaggugucaga

SEQ ID NO: 2150067 - RNA, 19 nt, Artificial Sequence
  Description of Artificial Sequence: Synthetic oligonucleotide
  Antisense strand to SEQ ID NO: 2150066
ucugacaccuuauuucuga

SEQ ID NO: 2150068 - RNA, 19 nt, Artificial Sequence
  Description of Artificial Sequence: Synthetic oligonucleotide
  Sense strand starting at position 1796 of SEQ ID NO: 1882823
aggugucagagcuauuaaa

SEQ ID NO: 2150069 - RNA, 19 nt, Artificial Sequence
  Description of Artificial Sequence: Synthetic oligonucleotide
  Antisense strand to SEQ ID NO: 2150068
uuuaauagcucugacaccu

SEQ ID NO: 2150070 - RNA, 19 nt, Artificial Sequence
  Description of Artificial Sequence: Synthetic oligonucleotide
  Sense strand starting at position 2040 of SEQ ID NO: 1882823
guuaaugaguuaucugaau

SEQ ID NO: 2150071 - RNA, 19 nt, Artificial Sequence
  Description of Artificial Sequence: Synthetic oligonucleotide
  Antisense strand to SEQ ID NO: 2150070
auucagauaacucauuaac

SEQ ID NO: 2150072 - RNA, 19 nt, Artificial Sequence
  Description of Artificial Sequence: Synthetic oligonucleotide
  Sense strand starting at position 2451 of SEQ ID NO: 1882823
ugguauuugccaugucuug

SEQ ID NO: 2150073 - RNA, 19 nt, Artificial Sequence
  Description of Artificial Sequence: Synthetic oligonucleotide
  Antisense strand to SEQ ID NO: 2150072
caagacauggcaaauacca

SEQ ID NO: 2150074 - RNA, 19 nt, Artificial Sequence
  Description of Artificial Sequence: Synthetic oligonucleotide
  Sense strand starting at position 2570 of SEQ ID NO: 1882823
cguuuaaauuugucauuga

SEQ ID NO: 2150075 - RNA, 19 nt, Artificial Sequence
  Description of Artificial Sequence: Synthetic oligonucleotide
  Antisense strand to SEQ ID NO: 2150074
ucaaugacaaauuuaaacg

SEQ ID NO: 2150076 - RNA, 19 nt, Artificial Sequence
  Description of Artificial Sequence: Synthetic oligonucleotide
  Sense strand starting at position 2795 of SEQ ID NO: 1882823
uauugugugcaccaugaca

SEQ ID NO: 2150077 - RNA, 19 nt, Artificial Sequence
  Description of Artificial Sequence: Synthetic oligonucleotide
  Antisense strand to SEQ ID NO: 2150076
ugucauggugcacacaaua

SEQ ID NO: 2150078 - RNA, 19 nt, Artificial Sequence
  Description of Artificial Sequence: Synthetic oligonucleotide
  Sense strand starting at position 2833 of SEQ ID NO: 1882823
cccaaagacgauuggugau

SEQ ID NO: 2150079 - RNA, 19 nt, Artificial Sequence
  Description of Artificial Sequence: Synthetic oligonucleotide
  Antisense strand to SEQ ID NO: 2150078
aucaccaaucgucuuuggg

SEQ ID NO: 2150080 - RNA, 19 nt, Artificial Sequence
  Description of Artificial Sequence: Synthetic oligonucleotide
  Sense strand starting at position 2864 of SEQ ID NO: 1882823
ggagauauuacugguagcu

SEQ ID NO: 2150081 - RNA, 19 nt, Artificial Sequence
  Description of Artificial Sequence: Synthetic oligonucleotide
  Antisense strand to SEQ ID NO: 2150080
agcuaccaguaauaucucc

SEQ ID NO: 2150082 - RNA, 19 nt, Artificial Sequence
  Description of Artificial Sequence: Synthetic oligonucleotide
  Sense strand starting at position 3078 of SEQ ID NO: 1882823
ucugucaugcaguaauaaa

SEQ ID NO: 2150083 - RNA, 19 nt, Artificial Sequence
  Description of Artificial Sequence: Synthetic oligonucleotide
  Antisense strand to SEQ ID NO: 2150082
uuuauuacugcaugacaga

SEQ ID NO: 2150084 - RNA, 19 nt, Artificial Sequence
  Description of Artificial Sequence: Synthetic oligonucleotide
  Sense strand starting at position 3193 of SEQ ID NO: 1882823
uuaccuaucggguaguaau

SEQ ID NO: 2150085 - RNA, 19 nt, Artificial Sequence
  Description of Artificial Sequence: Synthetic oligonucleotide
  Antisense strand to SEQ ID NO: 2150084
auuacuacccgauagguaa

SEQ ID NO: 2150086 - RNA, 19 nt, Artificial Sequence
  Description of Artificial Sequence: Synthetic oligonucleotide
  Sense strand starting at position 3204 of SEQ ID NO: 1882823
guaguaaugauccagaagc

SEQ ID NO: 2150087 - RNA, 19 nt, Artificial Sequence
  Description of Artificial Sequence: Synthetic oligonucleotide
  Antisense strand to SEQ ID NO: 2150086
gcuucuggaucauuacuac

SEQ ID NO: 2150088 - RNA, 19 nt, Artificial Sequence
  Description of Artificial Sequence: Synthetic oligonucleotide
  Sense strand starting at position 3206 of SEQ ID NO: 1882823
aguaaugauccagaagcuu

SEQ ID NO: 2150089 - RNA, 19 nt, Artificial Sequence
  Description of Artificial Sequence: Synthetic oligonucleotide
  Antisense strand to SEQ ID NO: 2150088
aagcuucuggaucauuacu

SEQ ID NO: 2150090 - RNA, 19 nt, Artificial Sequence
  Description of Artificial Sequence: Synthetic oligonucleotide
  Sense strand starting at position 3416 of SEQ ID NO: 1882823
guauaugguaaaugcauga

SEQ ID NO: 2150091 - RNA, 19 nt, Artificial Sequence
  Description of Artificial Sequence: Synthetic oligonucleotide
  Antisense strand to SEQ ID NO: 2150090
ucaugcauuuaccauauac

SEQ ID NO: 2150092 - RNA, 19 nt, Artificial Sequence
  Description of Artificial Sequence: Synthetic oligonucleotide
  Sense strand starting at position 3420 of SEQ ID NO: 1882823
augguaaaugcaugacauu

SEQ ID NO: 2150093 - RNA, 19 nt, Artificial Sequence
  Description of Artificial Sequence: Synthetic oligonucleotide
  Antisense strand to SEQ ID NO: 2150092
aaugucaugcauuuaccau

SEQ ID NO: 2150094 - RNA, 19 nt, Artificial Sequence
  Description of Artificial Sequence: Synthetic oligonucleotide
  Sense strand starting at position 3808 of SEQ ID NO: 1882823
uggauugcaucauuaggua

SEQ ID NO: 2150095 - RNA, 19 nt, Artificial Sequence
  Description of Artificial Sequence: Synthetic oligonucleotide
  Antisense strand to SEQ ID NO: 2150094
uaccuaaugaugcaaucca

SEQ ID NO: 2150096 - RNA, 19 nt, Artificial Sequence
  Description of Artificial Sequence: Synthetic oligonucleotide
  Sense strand starting at position 193 of SEQ ID NO: 1882824
gaaugucaugucuaaguag

SEQ ID NO: 2150097 - RNA, 19 nt, Artificial Sequence
  Description of Artificial Sequence: Synthetic oligonucleotide
  Antisense strand to SEQ ID NO: 2150096
cuacuuagacaugacauuc

SEQ ID NO: 2150098 - RNA, 19 nt, Artificial Sequence
  Description of Artificial Sequence: Synthetic oligonucleotide
  Sense strand starting at position 335 of SEQ ID NO: 1882824
uaaagagauggcgacguau

SEQ ID NO: 2150099 - RNA, 19 nt, Artificial Sequence
  Description of Artificial Sequence: Synthetic oligonucleotide
  Antisense strand to SEQ ID NO: 2150098
auacgucgccaucucuuua

SEQ ID NO: 2150100 - RNA, 19 nt, Artificial Sequence
  Description of Artificial Sequence: Synthetic oligonucleotide
  Sense strand starting at position 398 of SEQ ID NO: 1882824
auagguagucagugacaag

SEQ ID NO: 2150101 - RNA, 19 nt, Artificial Sequence
  Description of Artificial Sequence: Synthetic oligonucleotide
  Antisense strand to SEQ ID NO: 2150100
cuugucacugacuaccuau

SEQ ID NO: 2150102 - RNA, 19 nt, Artificial Sequence
  Description of Artificial Sequence: Synthetic oligonucleotide
  Sense strand starting at position 399 of SEQ ID NO: 1882824
uagguagucagugacaagu

SEQ ID NO: 2150103 - RNA, 19 nt, Artificial Sequence
  Description of Artificial Sequence: Synthetic oligonucleotide
  Antisense strand to SEQ ID NO: 2150102
acuugucacugacuaccua

SEQ ID NO: 2150104 - RNA, 19 nt, Artificial Sequence
  Description of Artificial Sequence: Synthetic oligonucleotide
  Sense strand starting at position 435 of SEQ ID NO: 1882824
gggagaguaugagucaugu

SEQ ID NO: 2150105 - RNA, 19 nt, Artificial Sequence
  Description of Artificial Sequence: Synthetic oligonucleotide
  Antisense strand to SEQ ID NO: 2150104
acaugacucauacucuccc

SEQ ID NO: 2150106 - RNA, 19 nt, Artificial Sequence
  Description of Artificial Sequence: Synthetic oligonucleotide
  Sense strand starting at position 437 of SEQ ID NO: 1882824
gagaguaugagucauguag

SEQ ID NO: 2150107 - RNA, 19 nt, Artificial Sequence
  Description of Artificial Sequence: Synthetic oligonucleotide
  Antisense strand to SEQ ID NO: 2150106
cuacaugacucauacucuc

SEQ ID NO: 2150108 - RNA, 19 nt, Artificial Sequence
  Description of Artificial Sequence: Synthetic oligonucleotide
  Sense strand starting at position 588 of SEQ ID NO: 1882824
gugaaugagacaugucaag

SEQ ID NO: 2150109 - RNA, 19 nt, Artificial Sequence
  Description of Artificial Sequence: Synthetic oligonucleotide
  Antisense strand to SEQ ID NO: 2150108
cuugacaugucucauucac

SEQ ID NO: 2150110 - RNA, 19 nt, Artificial Sequence
  Description of Artificial Sequence: Synthetic oligonucleotide
  Sense strand starting at position 643 of SEQ ID NO: 1882824
ugaagcuuuggccauugaa

SEQ ID NO: 2150111 - RNA, 19 nt, Artificial Sequence
  Description of Artificial Sequence: Synthetic oligonucleotide
  Antisense strand to SEQ ID NO: 2150110
uucaauggccaaagcuuca

SEQ ID NO: 2150112 - RNA, 19 nt, Artificial Sequence
  Description of Artificial Sequence: Synthetic oligonucleotide
  Sense strand starting at position 699 of SEQ ID NO: 1882824
ggcaguuucguggcauggu

SEQ ID NO: 2150113 - RNA, 19 nt, Artificial Sequence
  Description of Artificial Sequence: Synthetic oligonucleotide
  Antisense strand to SEQ ID NO: 2150112
accaugccacgaaacugcc

SEQ ID NO: 2150114 - RNA, 19 nt, Artificial Sequence
  Description of Artificial Sequence: Synthetic oligonucleotide
  Sense strand starting at position 812 of SEQ ID NO: 1882824
ggaauaacuugaguaugug

SEQ ID NO: 2150115 - RNA, 19 nt, Artificial Sequence
  Description of Artificial Sequence: Synthetic oligonucleotide
  Antisense strand to SEQ ID NO: 2150114
cacauacucaaguuauucc

SEQ ID NO: 2150116 - RNA, 19 nt, Artificial Sequence
  Description of Artificial Sequence: Synthetic oligonucleotide
  Sense strand starting at position 813 of SEQ ID NO: 1882824
gaauaacuugaguaugugu

SEQ ID NO: 2150117 - RNA, 19 nt, Artificial Sequence
  Description of Artificial Sequence: Synthetic oligonucleotide
  Antisense strand to SEQ ID NO: 2150116
acacauacucaaguuauuc

SEQ ID NO: 2150118 - RNA, 19 nt, Artificial Sequence
  Description of Artificial Sequence: Synthetic oligonucleotide
  Sense strand starting at position 821 of SEQ ID NO: 1882824
ugaguauguguugaaagua

SEQ ID NO: 2150119 - RNA, 19 nt, Artificial Sequence
  Description of Artificial Sequence: Synthetic oligonucleotide
  Antisense strand to SEQ ID NO: 2150118
uacuuucaacacauacuca

SEQ ID NO: 2150120 - RNA, 19 nt, Artificial Sequence
  Description of Artificial Sequence: Synthetic oligonucleotide
  Sense strand starting at position 861 of SEQ ID NO: 1882824
ggcaaagauacauggaagu

SEQ ID NO: 2150121 - RNA, 19 nt, Artificial Sequence
  Description of Artificial Sequence: Synthetic oligonucleotide
  Antisense strand to SEQ ID NO: 2150120
acuuccauguaucuuugcc

SEQ ID NO: 2150122 - RNA, 19 nt, Artificial Sequence
  Description of Artificial Sequence: Synthetic oligonucleotide
  Sense strand starting at position 876 of SEQ ID NO: 1882824
aagugaaguaauugauggu

SEQ ID NO: 2150123 - RNA, 19 nt, Artificial Sequence
  Description of Artificial Sequence: Synthetic oligonucleotide
  Antisense strand to SEQ ID NO: 2150122
accaucaauuacuucacuu

SEQ ID NO: 2150124 - RNA, 19 nt, Artificial Sequence
  Description of Artificial Sequence: Synthetic oligonucleotide
  Sense strand starting at position 971 of SEQ ID NO: 1882824
agugaaucaagauguugga

SEQ ID NO: 2150125 - RNA, 19 nt, Artificial Sequence
  Description of Artificial Sequence: Synthetic oligonucleotide
  Antisense strand to SEQ ID NO: 2150124
uccaacaucuugauucacu

SEQ ID NO: 2150126 - RNA, 19 nt, Artificial Sequence
  Description of Artificial Sequence: Synthetic oligonucleotide
  Sense strand starting at position 1130 of SEQ ID NO: 1882824
ggaagagauuuguauugau

SEQ ID NO: 2150127 - RNA, 19 nt, Artificial Sequence
  Description of Artificial Sequence: Synthetic oligonucleotide
  Antisense strand to SEQ ID NO: 2150126
aucaauacaaaucucuucc

SEQ ID NO: 2150128 - RNA, 19 nt, Artificial Sequence
  Description of Artificial Sequence: Synthetic oligonucleotide
  Sense strand starting at position 1209 of SEQ ID NO: 1882824
aguguuugaagugaugaau

SEQ ID NO: 2150129 - RNA, 19 nt, Artificial Sequence
  Description of Artificial Sequence: Synthetic oligonucleotide
  Antisense strand to SEQ ID NO: 2150128
auucaucacuucaaacacu

SEQ ID NO: 2150130 - RNA, 19 nt, Artificial Sequence
  Description of Artificial Sequence: Synthetic oligonucleotide
  Sense strand starting at position 1236 of SEQ ID NO: 1882824
gucuccucucaguaauaca

SEQ ID NO: 2150131 - RNA, 19 nt, Artificial Sequence
  Description of Artificial Sequence: Synthetic oligonucleotide
  Antisense strand to SEQ ID NO: 2150130
uguauuacugagaggagac

SEQ ID NO: 2150132 - RNA, 19 nt, Artificial Sequence
  Description of Artificial Sequence: Synthetic oligonucleotide
  Sense strand starting at position 1771 of SEQ ID NO: 1882824
gcaucacgaggucaagaaa

SEQ ID NO: 2150133 - RNA, 19 nt, Artificial Sequence
  Description of Artificial Sequence: Synthetic oligonucleotide
  Antisense strand to SEQ ID NO: 2150132
uuucuugaccucgugaugc

SEQ ID NO: 2150134 - RNA, 19 nt, Artificial Sequence
  Description of Artificial Sequence: Synthetic oligonucleotide
  Sense strand starting at position 2047 of SEQ ID NO: 1882824
uuucgaugacucuaacauu

SEQ ID NO: 2150135 - RNA, 19 nt, Artificial Sequence
  Description of Artificial Sequence: Synthetic oligonucleotide
  Antisense strand to SEQ ID NO: 2150134
aauguuagagucaucgaaa

SEQ ID NO: 2150136 - RNA, 19 nt, Artificial Sequence
  Description of Artificial Sequence: Synthetic oligonucleotide
  Sense strand starting at position 2304 of SEQ ID NO: 1882824
ccuagugguccuuaaggaa

SEQ ID NO: 2150137 - RNA, 19 nt, Artificial Sequence
  Description of Artificial Sequence: Synthetic oligonucleotide
  Antisense strand to SEQ ID NO: 2150136
uuccuuaaggaccacuagg

SEQ ID NO: 2150138 - RNA, 19 nt, Artificial Sequence
  Description of Artificial Sequence: Synthetic oligonucleotide
  Sense strand starting at position 2402 of SEQ ID NO: 1882824
gccuguuuccugccggaac

SEQ ID NO: 2150139 - RNA, 19 nt, Artificial Sequence
  Description of Artificial Sequence: Synthetic oligonucleotide
  Antisense strand to SEQ ID NO: 2150138
guuccggcaggaaacaggc

SEQ ID NO: 2150140 - RNA, 19 nt, Artificial Sequence
  Description of Artificial Sequence: Synthetic oligonucleotide
  Sense strand starting at position 2461 of SEQ ID NO: 1882824
cacagugcuggguacauaa

SEQ ID NO: 2150141 - RNA, 19 nt, Artificial Sequence
  Description of Artificial Sequence: Synthetic oligonucleotide
  Antisense strand to SEQ ID NO: 2150140
uuauguacccagcacugug

SEQ ID NO: 2150142 - RNA, 19 nt, Artificial Sequence
  Description of Artificial Sequence: Synthetic oligonucleotide
  Sense strand starting at position 2479 of SEQ ID NO: 1882824
acaggugcucaagacaagu

SEQ ID NO: 2150143 - RNA, 19 nt, Artificial Sequence
  Description of Artificial Sequence: Synthetic oligonucleotide
  Antisense strand to SEQ ID NO: 2150142
acuugucuugagcaccugu

SEQ ID NO: 2150144 - RNA, 19 nt, Artificial Sequence
  Description of Artificial Sequence: Synthetic oligonucleotide
  Sense strand starting at position 2481 of SEQ ID NO: 1882824
aggugcucaagacaaguuu

SEQ ID NO: 2150145 - RNA, 19 nt, Artificial Sequence
  Description of Artificial Sequence: Synthetic oligonucleotide
  Antisense strand to SEQ ID NO: 2150144
aaacuugucuugagcaccu

SEQ ID NO: 2150146 - RNA, 19 nt, Artificial Sequence
  Description of Artificial Sequence: Synthetic oligonucleotide
  Sense strand starting at position 2487 of SEQ ID NO: 1882824
ucaagacaaguuuguggaa

SEQ ID NO: 2150147 - RNA, 19 nt, Artificial Sequence
  Description of Artificial Sequence: Synthetic oligonucleotide
  Antisense strand to SEQ ID NO: 2150146
uuccacaaacuugucuuga

SEQ ID NO: 2150148 - RNA, 19 nt, Artificial Sequence
  Description of Artificial Sequence: Synthetic oligonucleotide
  Sense strand starting at position 2488 of SEQ ID NO: 1882824
caagacaaguuuguggaau

SEQ ID NO: 2150149 - RNA, 19 nt, Artificial Sequence
  Description of Artificial Sequence: Synthetic oligonucleotide
  Antisense strand to SEQ ID NO: 2150148
auuccacaaacuugucuug

SEQ ID NO: 2150150 - RNA, 19 nt, Artificial Sequence
  Description of Artificial Sequence: Synthetic oligonucleotide
  Sense strand starting at position 2494 of SEQ ID NO: 1882824
aaguuuguggaaugacuaa

SEQ ID NO: 2150151 - RNA, 19 nt, Artificial Sequence
  Description of Artificial Sequence: Synthetic oligonucleotide
  Antisense strand to SEQ ID NO: 2150150
uuagucauuccacaaacuu

SEQ ID NO: 2150152 - RNA, 19 nt, Artificial Sequence
  Description of Artificial Sequence: Synthetic oligonucleotide
  Sense strand starting at position 3073 of SEQ ID NO: 1882824
gagauagccuaguugaaag

SEQ ID NO: 2150153 - RNA, 19 nt, Artificial Sequence
  Description of Artificial Sequence: Synthetic oligonucleotide
  Antisense strand to SEQ ID NO: 2150152
cuuucaacuaggcuaucuc

SEQ ID NO: 2150154 - RNA, 19 nt, Artificial Sequence
  Description of Artificial Sequence: Synthetic oligonucleotide
  Sense strand starting at position 3418 of SEQ ID NO: 1882824
cggugagcucuguucucuu

SEQ ID NO: 2150155 - RNA, 19 nt, Artificial Sequence
  Description of Artificial Sequence: Synthetic oligonucleotide
  Antisense strand to SEQ ID NO: 2150154
aagagaacagagcucaccg

SEQ ID NO: 2150156 - RNA, 19 nt, Artificial Sequence
  Description of Artificial Sequence: Synthetic oligonucleotide
  Sense strand starting at position 3434 of SEQ ID NO: 1882824
cuucucauaugaguaauga

SEQ ID NO: 2150157 - RNA, 19 nt, Artificial Sequence
  Description of Artificial Sequence: Synthetic oligonucleotide
  Antisense strand to SEQ ID NO: 2150156
ucauuacucauaugagaag

SEQ ID NO: 2150158 - RNA, 19 nt, Artificial Sequence
  Description of Artificial Sequence: Synthetic oligonucleotide
  Sense strand starting at position 3490 of SEQ ID NO: 1882824
gacuuugcugaauagguua

SEQ ID NO: 2150159 - RNA, 19 nt, Artificial Sequence
  Description of Artificial Sequence: Synthetic oligonucleotide
  Antisense strand to SEQ ID NO: 2150158
uaaccuauucagcaaaguc

SEQ ID NO: 2150160 - RNA, 19 nt, Artificial Sequence
  Description of Artificial Sequence: Synthetic oligonucleotide
  Sense strand starting at position 3495 of SEQ ID NO: 1882824
ugcugaauagguuagcaaa

SEQ ID NO: 2150161 - RNA, 19 nt, Artificial Sequence
  Description of Artificial Sequence: Synthetic oligonucleotide
  Antisense strand to SEQ ID NO: 2150160
uuugcuaaccuauucagca

SEQ ID NO: 2150162 - RNA, 19 nt, Artificial Sequence
  Description of Artificial Sequence: Synthetic oligonucleotide
  Sense strand starting at position 3611 of SEQ ID NO: 1882824
guaauuugccacgguaaga

SEQ ID NO: 2150163 - RNA, 19 nt, Artificial Sequence
  Description of Artificial Sequence: Synthetic oligonucleotide
  Antisense strand to SEQ ID NO: 2150162
ucuuaccguggcaaauuac

SEQ ID NO: 2150164 - RNA, 19 nt, Artificial Sequence
  Description of Artificial Sequence: Synthetic oligonucleotide
  Sense strand starting at position 3670 of SEQ ID NO: 1882824
uuguacacugaguaguauu

SEQ ID NO: 2150165 - RNA, 19 nt, Artificial Sequence
  Description of Artificial Sequence: Synthetic oligonucleotide
  Antisense strand to SEQ ID NO: 2150164
aauacuacucaguguacaa

SEQ ID NO: 2150166 - RNA, 19 nt, Artificial Sequence
  Description of Artificial Sequence: Synthetic oligonucleotide
  Sense strand starting at position 3717 of SEQ ID NO: 1882824
gccacaugggauugagaug

SEQ ID NO: 2150167 - RNA, 19 nt, Artificial Sequence
  Description of Artificial Sequence: Synthetic oligonucleotide
  Antisense strand to SEQ ID NO: 2150166
caucucaaucccauguggc

SEQ ID NO: 2150168 - RNA, 19 nt, Artificial Sequence
  Description of Artificial Sequence: Synthetic oligonucleotide
  Sense strand starting at position 3722 of SEQ ID NO: 1882824
augggauugagaugugcua

SEQ ID NO: 2150169 - RNA, 19 nt, Artificial Sequence
  Description of Artificial Sequence: Synthetic oligonucleotide
  Antisense strand to SEQ ID NO: 2150168
uagcacaucucaaucccau

SEQ ID NO: 2150170 - RNA, 19 nt, Artificial Sequence
  Description of Artificial Sequence: Synthetic oligonucleotide
  Sense strand starting at position 3724 of SEQ ID NO: 1882824
gggauugagaugugcuaua

SEQ ID NO: 2150171 - RNA, 19 nt, Artificial Sequence
  Description of Artificial Sequence: Synthetic oligonucleotide
  Antisense strand to SEQ ID NO: 2150170
uauagcacaucucaauccc

SEQ ID NO: 2150172 - RNA, 19 nt, Artificial Sequence
  Description of Artificial Sequence: Synthetic oligonucleotide
  Sense strand starting at position 3832 of SEQ ID NO: 1882824
gauaaugcuguugauaugu

SEQ ID NO: 2150173 - RNA, 19 nt, Artificial Sequence
  Description of Artificial Sequence: Synthetic oligonucleotide
  Antisense strand to SEQ ID NO: 2150172
acauaucaacagcauuauc

SEQ ID NO: 2150174 - RNA, 19 nt, Artificial Sequence
  Description of Artificial Sequence: Synthetic oligonucleotide
  Sense strand starting at position 3843 of SEQ ID NO: 1882824
ugauauguuggcuaaauaa

SEQ ID NO: 2150175 - RNA, 19 nt, Artificial Sequence
  Description of Artificial Sequence: Synthetic oligonucleotide
  Antisense strand to SEQ ID NO: 2150174
uuauuuagccaacauauca

SEQ ID NO: 2150176 - RNA, 19 nt, Artificial Sequence
  Description of Artificial Sequence: Synthetic oligonucleotide
  Sense strand starting at position 61 of SEQ ID NO: 1882825
uauguuauugcaugugaua

SEQ ID NO: 2150177 - RNA, 19 nt, Artificial Sequence
  Description of Artificial Sequence: Synthetic oligonucleotide
  Antisense strand to SEQ ID NO: 2150176
uaucacaugcaauaacaua

SEQ ID NO: 2150178 - RNA, 19 nt, Artificial Sequence
  Description of Artificial Sequence: Synthetic oligonucleotide
  Sense strand starting at position 152 of SEQ ID NO: 1882825
ucaugugaccaaugauucu

SEQ ID NO: 2150179 - RNA, 19 nt, Artificial Sequence
  Description of Artificial Sequence: Synthetic oligonucleotide
  Antisense strand to SEQ ID NO: 2150178
agaaucauuggucacauga

SEQ ID NO: 2150180 - RNA, 19 nt, Artificial Sequence
  Description of Artificial Sequence: Synthetic oligonucleotide
  Sense strand starting at position 159 of SEQ ID NO: 1882825
accaaugauucugaaacug

SEQ ID NO: 2150181 - RNA, 19 nt, Artificial Sequence
  Description of Artificial Sequence: Synthetic oligonucleotide
  Antisense strand to SEQ ID NO: 2150180
caguuucagaaucauuggu

SEQ ID NO: 2150182 - RNA, 19 nt, Artificial Sequence
  Description of Artificial Sequence: Synthetic oligonucleotide
  Sense strand starting at position 222 of SEQ ID NO: 1882825
ugacccuuauggucuuaaa

SEQ ID NO: 2150183 - RNA, 19 nt, Artificial Sequence
  Description of Artificial Sequence: Synthetic oligonucleotide
  Antisense strand to SEQ ID NO: 2150182
uuuaagaccauaaggguca

SEQ ID NO: 2150184 - RNA, 19 nt, Artificial Sequence
  Description of Artificial Sequence: Synthetic oligonucleotide
  Sense strand starting at position 261 of SEQ ID NO: 1882825
uuaugugaguuccucagga

SEQ ID NO: 2150185 - RNA, 19 nt, Artificial Sequence
  Description of Artificial Sequence: Synthetic oligonucleotide
  Antisense strand to SEQ ID NO: 2150184
uccugaggaacucacauaa

SEQ ID NO: 2150186 - RNA, 19 nt, Artificial Sequence
  Description of Artificial Sequence: Synthetic oligonucleotide
  Sense strand starting at position 460 of SEQ ID NO: 1882825
gguaucaugcaccgauagu

SEQ ID NO: 2150187 - RNA, 19 nt, Artificial Sequence
  Description of Artificial Sequence: Synthetic oligonucleotide
  Antisense strand to SEQ ID NO: 2150186
acuaucggugcaugauacc

SEQ ID NO: 2150188 - RNA, 19 nt, Artificial Sequence
  Description of Artificial Sequence: Synthetic oligonucleotide
  Sense strand starting at position 461 of SEQ ID NO: 1882825
guaucaugcaccgauaguc

SEQ ID NO: 2150189 - RNA, 19 nt, Artificial Sequence
  Description of Artificial Sequence: Synthetic oligonucleotide
  Antisense strand to SEQ ID NO: 2150188
gacuaucggugcaugauac

SEQ ID NO: 2150190 - RNA, 19 nt, Artificial Sequence
  Description of Artificial Sequence: Synthetic oligonucleotide
  Sense strand starting at position 718 of SEQ ID NO: 1882825
uuauguuucuuuccugcua

SEQ ID NO: 2150191 - RNA, 19 nt, Artificial Sequence
  Description of Artificial Sequence: Synthetic oligonucleotide
  Antisense strand to SEQ ID NO: 2150190
uagcaggaaagaaacauaa

SEQ ID NO: 2150192 - RNA, 19 nt, Artificial Sequence
  Description of Artificial Sequence: Synthetic oligonucleotide
  Sense strand starting at position 823 of SEQ ID NO: 1882825
cuuccuuggcaauaaugau

SEQ ID NO: 2150193 - RNA, 19 nt, Artificial Sequence
  Description of Artificial Sequence: Synthetic oligonucleotide
  Antisense strand to SEQ ID NO: 2150192
aucauuauugccaaggaag

SEQ ID NO: 2150194 - RNA, 19 nt, Artificial Sequence
  Description of Artificial Sequence: Synthetic oligonucleotide
  Sense strand starting at position 829 of SEQ ID NO: 1882825
uggcaauaaugauugucuu

SEQ ID NO: 2150195 - RNA, 19 nt, Artificial Sequence
  Description of Artificial Sequence: Synthetic oligonucleotide
  Antisense strand to SEQ ID NO: 2150194
aagacaaucauuauugcca

SEQ ID NO: 2150196 - RNA, 19 nt, Artificial Sequence
  Description of Artificial Sequence: Synthetic oligonucleotide
  Sense strand starting at position 830 of SEQ ID NO: 1882825
ggcaauaaugauugucuua

SEQ ID NO: 2150197 - RNA, 19 nt, Artificial Sequence
  Description of Artificial Sequence: Synthetic oligonucleotide
  Antisense strand to SEQ ID NO: 2150196
uaagacaaucauuauugcc

SEQ ID NO: 2150198 - RNA, 19 nt, Artificial Sequence
  Description of Artificial Sequence: Synthetic oligonucleotide
  Sense strand starting at position 1375 of SEQ ID NO: 1882825
uuuggaaccuucccagacu

SEQ ID NO: 2150199 - RNA, 19 nt, Artificial Sequence
  Description of Artificial Sequence: Synthetic oligonucleotide
  Antisense strand to SEQ ID NO: 2150198
agucugggaagguuccaaa

SEQ ID NO: 2150200 - RNA, 19 nt, Artificial Sequence
  Description of Artificial Sequence: Synthetic oligonucleotide
  Sense strand starting at position 1420 of SEQ ID NO: 1882825
gguccugaucuauauccuu

SEQ ID NO: 2150201 - RNA, 19 nt, Artificial Sequence
  Description of Artificial Sequence: Synthetic oligonucleotide
  Antisense strand to SEQ ID NO: 2150200
aaggauauagaucaggacc

SEQ ID NO: 2150202 - RNA, 19 nt, Artificial Sequence
  Description of Artificial Sequence: Synthetic oligonucleotide
  Sense strand starting at position 1467 of SEQ ID NO: 1882825
uccugaguucugcaaguca

SEQ ID NO: 2150203 - RNA, 19 nt, Artificial Sequence
  Description of Artificial Sequence: Synthetic oligonucleotide
  Antisense strand to SEQ ID NO: 2150202
ugacuugcagaacucagga

SEQ ID NO: 2150204 - RNA, 19 nt, Artificial Sequence
  Description of Artificial Sequence: Synthetic oligonucleotide
  Sense strand starting at position 1576 of SEQ ID NO: 1882825
gcuugcaacuaguuucuga

SEQ ID NO: 2150205 - RNA, 19 nt, Artificial Sequence
  Description of Artificial Sequence: Synthetic oligonucleotide
  Antisense strand to SEQ ID NO: 2150204
ucagaaacuaguugcaagc

SEQ ID NO: 2150206 - RNA, 19 nt, Artificial Sequence
  Description of Artificial Sequence: Synthetic oligonucleotide
  Sense strand starting at position 1584 of SEQ ID NO: 1882825
cuaguuucugaagguguua

SEQ ID NO: 2150207 - RNA, 19 nt, Artificial Sequence
  Description of Artificial Sequence: Synthetic oligonucleotide
  Antisense strand to SEQ ID NO: 2150206
uaacaccuucagaaacuag

SEQ ID NO: 2150208 - RNA, 19 nt, Artificial Sequence
  Description of Artificial Sequence: Synthetic oligonucleotide
  Sense strand starting at position 1593 of SEQ ID NO: 1882825
gaagguguuacugguggaa

SEQ ID NO: 2150209 - RNA, 19 nt, Artificial Sequence
  Description of Artificial Sequence: Synthetic oligonucleotide
  Antisense strand to SEQ ID NO: 2150208
uuccaccaguaacaccuuc

SEQ ID NO: 2150210 - RNA, 19 nt, Artificial Sequence
  Description of Artificial Sequence: Synthetic oligonucleotide
  Sense strand starting at position 1596 of SEQ ID NO: 1882825
gguguuacugguggaagau

SEQ ID NO: 2150211 - RNA, 19 nt, Artificial Sequence
  Description of Artificial Sequence: Synthetic oligonucleotide
  Antisense strand to SEQ ID NO: 2150210
aucuuccaccaguaacacc

SEQ ID NO: 2150212 - RNA, 19 nt, Artificial Sequence
  Description of Artificial Sequence: Synthetic oligonucleotide
  Sense strand starting at position 1597 of SEQ ID NO: 1882825
guguuacugguggaagaua

SEQ ID NO: 2150213 - RNA, 19 nt, Artificial Sequence
  Description of Artificial Sequence: Synthetic oligonucleotide
  Antisense strand to SEQ ID NO: 2150212
uaucuuccaccaguaacac

SEQ ID NO: 2150214 - RNA, 19 nt, Artificial Sequence
  Description of Artificial Sequence: Synthetic oligonucleotide
  Sense strand starting at position 1608 of SEQ ID NO: 1882825
ggaagauauuguguccgga

SEQ ID NO: 2150215 - RNA, 19 nt, Artificial Sequence
  Description of Artificial Sequence: Synthetic oligonucleotide
  Antisense strand to SEQ ID NO: 2150214
uccggacacaauaucuucc

SEQ ID NO: 2150216 - RNA, 19 nt, Artificial Sequence
  Description of Artificial Sequence: Synthetic oligonucleotide
  Sense strand starting at position 2585 of SEQ ID NO: 1882825
cggcgagaaaucgagugua

SEQ ID NO: 2150217 - RNA, 19 nt, Artificial Sequence
  Description of Artificial Sequence: Synthetic oligonucleotide
  Antisense strand to SEQ ID NO: 2150216
uacacucgauuucucgccg

SEQ ID NO: 2150218 - RNA, 19 nt, Artificial Sequence
  Description of Artificial Sequence: Synthetic oligonucleotide
  Sense strand starting at position 2974 of SEQ ID NO: 1882825
gucaccucucaguaucuga

SEQ ID NO: 2150219 - RNA, 19 nt, Artificial Sequence
  Description of Artificial Sequence: Synthetic oligonucleotide
  Antisense strand to SEQ ID NO: 2150218
ucagauacugagaggugac

SEQ ID NO: 2150220 - RNA, 19 nt, Artificial Sequence
  Description of Artificial Sequence: Synthetic oligonucleotide
  Sense strand starting at position 2981 of SEQ ID NO: 1882825
cucaguaucugaguuacca

SEQ ID NO: 2150221 - RNA, 19 nt, Artificial Sequence
  Description of Artificial Sequence: Synthetic oligonucleotide
  Antisense strand to SEQ ID NO: 2150220
ugguaacucagauacugag

SEQ ID NO: 2150222 - RNA, 19 nt, Artificial Sequence
  Description of Artificial Sequence: Synthetic oligonucleotide
  Sense strand starting at position 2989 of SEQ ID NO: 1882825
cugaguuaccagcgaugaa

SEQ ID NO: 2150223 - RNA, 19 nt, Artificial Sequence
  Description of Artificial Sequence: Synthetic oligonucleotide
  Antisense strand to SEQ ID NO: 2150222
uucaucgcugguaacucag

SEQ ID NO: 2150224 - RNA, 19 nt, Artificial Sequence
  Description of Artificial Sequence: Synthetic oligonucleotide
  Sense strand starting at position 2990 of SEQ ID NO: 1882825
ugaguuaccagcgaugaau

SEQ ID NO: 2150225 - RNA, 19 nt, Artificial Sequence
  Description of Artificial Sequence: Synthetic oligonucleotide
  Antisense strand to SEQ ID NO: 2150224
auucaucgcugguaacuca

SEQ ID NO: 2150226 - RNA, 19 nt, Artificial Sequence
  Description of Artificial Sequence: Synthetic oligonucleotide
  Sense strand starting at position 3115 of SEQ ID NO: 1882825
aguggaaguuuauuaagaa

SEQ ID NO: 2150227 - RNA, 19 nt, Artificial Sequence
  Description of Artificial Sequence: Synthetic oligonucleotide
  Antisense strand to SEQ ID NO: 2150226
uucuuaauaaacuuccacu

SEQ ID NO: 2150228 - RNA, 19 nt, Artificial Sequence
  Description of Artificial Sequence: Synthetic oligonucleotide
  Sense strand starting at position 3116 of SEQ ID NO: 1882825
guggaaguuuauuaagaag

SEQ ID NO: 2150229 - RNA, 19 nt, Artificial Sequence
  Description of Artificial Sequence: Synthetic oligonucleotide
  Antisense strand to SEQ ID NO: 2150228
cuucuuaauaaacuuccac

SEQ ID NO: 2150230 - RNA, 19 nt, Artificial Sequence
  Description of Artificial Sequence: Synthetic oligonucleotide
  Sense strand starting at position 3119 of SEQ ID NO: 1882825
gaaguuuauuaagaaggca

SEQ ID NO: 2150231 - RNA, 19 nt, Artificial Sequence
  Description of Artificial Sequence: Synthetic oligonucleotide
  Antisense strand to SEQ ID NO: 2150230
ugccuucuuaauaaacuuc

SEQ ID NO: 2150232 - RNA, 19 nt, Artificial Sequence
  Description of Artificial Sequence: Synthetic oligonucleotide
  Sense strand starting at position 3122 of SEQ ID NO: 1882825
guuuauuaagaaggcauua

SEQ ID NO: 2150233 - RNA, 19 nt, Artificial Sequence
  Description of Artificial Sequence: Synthetic oligonucleotide
  Antisense strand to SEQ ID NO: 2150232
uaaugccuucuuaauaaac

SEQ ID NO: 2150234 - RNA, 19 nt, Artificial Sequence
  Description of Artificial Sequence: Synthetic oligonucleotide
  Sense strand starting at position 3195 of SEQ ID NO: 1882825
gaacaagugcagugcuuua

SEQ ID NO: 2150235 - RNA, 19 nt, Artificial Sequence
  Description of Artificial Sequence: Synthetic oligonucleotide
  Antisense strand to SEQ ID NO: 2150234
uaaagcacugcacuuguuc

SEQ ID NO: 2150236 - RNA, 19 nt, Artificial Sequence
  Description of Artificial Sequence: Synthetic oligonucleotide
  Sense strand starting at position 3202 of SEQ ID NO: 1882825
ugcagugcuuuaccuugau

SEQ ID NO: 2150237 - RNA, 19 nt, Artificial Sequence
  Description of Artificial Sequence: Synthetic oligonucleotide
  Antisense strand to SEQ ID NO: 2150236
aucaagguaaagcacugca

SEQ ID NO: 2150238 - RNA, 19 nt, Artificial Sequence
  Description of Artificial Sequence: Synthetic oligonucleotide
  Sense strand starting at position 3206 of SEQ ID NO: 1882825
gugcuuuaccuugauccua

SEQ ID NO: 2150239 - RNA, 19 nt, Artificial Sequence
  Description of Artificial Sequence: Synthetic oligonucleotide
  Antisense strand to SEQ ID NO: 2150238
uaggaucaagguaaagcac

SEQ ID NO: 2150240 - RNA, 19 nt, Artificial Sequence
  Description of Artificial Sequence: Synthetic oligonucleotide
  Sense strand starting at position 3291 of SEQ ID NO: 1882825
cacuccuugugcuugggaa

SEQ ID NO: 2150241 - RNA, 19 nt, Artificial Sequence
  Description of Artificial Sequence: Synthetic oligonucleotide
  Antisense strand to SEQ ID NO: 2150240
uucccaagcacaaggagug

SEQ ID NO: 2150242 - RNA, 19 nt, Artificial Sequence
  Description of Artificial Sequence: Synthetic oligonucleotide
  Sense strand starting at position 3293 of SEQ ID NO: 1882825
cuccuugugcuugggaagu

SEQ ID NO: 2150243 - RNA, 19 nt, Artificial Sequence
  Description of Artificial Sequence: Synthetic oligonucleotide
  Antisense strand to SEQ ID NO: 2150242
acuucccaagcacaaggag

SEQ ID NO: 2150244 - RNA, 19 nt, Artificial Sequence
  Description of Artificial Sequence: Synthetic oligonucleotide
  Sense strand starting at position 3316 of SEQ ID NO: 1882825
gugcgugguguguuuaguu

SEQ ID NO: 2150245 - RNA, 19 nt, Artificial Sequence
  Description of Artificial Sequence: Synthetic oligonucleotide
  Antisense strand to SEQ ID NO: 2150244
aacuaaacacaccacgcac

SEQ ID NO: 2150246 - RNA, 19 nt, Artificial Sequence
  Description of Artificial Sequence: Synthetic oligonucleotide
  Sense strand starting at position 3414 of SEQ ID NO: 1882825
uaaugugcaugcucaguaa

SEQ ID NO: 2150247 - RNA, 19 nt, Artificial Sequence
  Description of Artificial Sequence: Synthetic oligonucleotide
  Antisense strand to SEQ ID NO: 2150246
uuacugagcaugcacauua

SEQ ID NO: 2150248 - RNA, 19 nt, Artificial Sequence
  Description of Artificial Sequence: Synthetic oligonucleotide
  Sense strand starting at position 3418 of SEQ ID NO: 1882825
gugcaugcucaguaaguuc

SEQ ID NO: 2150249 - RNA, 19 nt, Artificial Sequence
  Description of Artificial Sequence: Synthetic oligonucleotide
  Antisense strand to SEQ ID NO: 2150248
gaacuuacugagcaugcac

SEQ ID NO: 2150250 - RNA, 19 nt, Artificial Sequence
  Description of Artificial Sequence: Synthetic oligonucleotide
  Sense strand starting at position 3646 of SEQ ID NO: 1882825
gcucuuauggaagacugua

SEQ ID NO: 2150251 - RNA, 19 nt, Artificial Sequence
  Description of Artificial Sequence: Synthetic oligonucleotide
  Antisense strand to SEQ ID NO: 2150250
uacagucuuccauaagagc

SEQ ID NO: 2150252 - RNA, 19 nt, Artificial Sequence
  Description of Artificial Sequence: Synthetic oligonucleotide
  Sense strand starting at position 3654 of SEQ ID NO: 1882825
ggaagacuguacccuuaac

SEQ ID NO: 2150253 - RNA, 19 nt, Artificial Sequence
  Description of Artificial Sequence: Synthetic oligonucleotide
  Antisense strand to SEQ ID NO: 2150252
guuaaggguacagucuucc

SEQ ID NO: 2150254 - RNA, 19 nt, Artificial Sequence
  Description of Artificial Sequence: Synthetic oligonucleotide
  Sense strand starting at position 3726 of SEQ ID NO: 1882825
ggcacauugucagcaaguu

SEQ ID NO: 2150255 - RNA, 19 nt, Artificial Sequence
  Description of Artificial Sequence: Synthetic oligonucleotide
  Antisense strand to SEQ ID NO: 2150254
aacuugcugacaaugugcc

SEQ ID NO: 2150256 - RNA, 19 nt, Artificial Sequence
  Description of Artificial Sequence: Synthetic oligonucleotide
  Sense strand starting at position 11 of SEQ ID NO: 1882826
uuccuauuugcuggcaauu

SEQ ID NO: 2150257 - RNA, 19 nt, Artificial Sequence
  Description of Artificial Sequence: Synthetic oligonucleotide
  Antisense strand to SEQ ID NO: 2150256
aauugccagcaaauaggaa

SEQ ID NO: 2150258 - RNA, 19 nt, Artificial Sequence
  Description of Artificial Sequence: Synthetic oligonucleotide
  Sense strand starting at position 51 of SEQ ID NO: 1882826
guuaauuaccagcaaguaa

SEQ ID NO: 2150259 - RNA, 19 nt, Artificial Sequence
  Description of Artificial Sequence: Synthetic oligonucleotide
  Antisense strand to SEQ ID NO: 2150258
uuacuugcugguaauuaac

SEQ ID NO: 2150260 - RNA, 19 nt, Artificial Sequence
  Description of Artificial Sequence: Synthetic oligonucleotide
  Sense strand starting at position 84 of SEQ ID NO: 1882826
ggcaaaugauaagugugaa

SEQ ID NO: 2150261 - RNA, 19 nt, Artificial Sequence
  Description of Artificial Sequence: Synthetic oligonucleotide
  Antisense strand to SEQ ID NO: 2150260
uucacacuuaucauuugcc

SEQ ID NO: 2150262 - RNA, 19 nt, Artificial Sequence
  Description of Artificial Sequence: Synthetic oligonucleotide
  Sense strand starting at position 85 of SEQ ID NO: 1882826
gcaaaugauaagugugaac

SEQ ID NO: 2150263 - RNA, 19 nt, Artificial Sequence
  Description of Artificial Sequence: Synthetic oligonucleotide
  Antisense strand to SEQ ID NO: 2150262
guucacacuuaucauuugc

SEQ ID NO: 2150264 - RNA, 19 nt, Artificial Sequence
  Description of Artificial Sequence: Synthetic oligonucleotide
  Sense strand starting at position 138 of SEQ ID NO: 1882826
uggcuuaaagucuaauuag

SEQ ID NO: 2150265 - RNA, 19 nt, Artificial Sequence
  Description of Artificial Sequence: Synthetic oligonucleotide
  Antisense strand to SEQ ID NO: 2150264
cuaauuagacuuuaagcca

SEQ ID NO: 2150266 - RNA, 19 nt, Artificial Sequence
  Description of Artificial Sequence: Synthetic oligonucleotide
  Sense strand starting at position 141 of SEQ ID NO: 1882826
cuuaaagucuaauuaguga

SEQ ID NO: 2150267 - RNA, 19 nt, Artificial Sequence
  Description of Artificial Sequence: Synthetic oligonucleotide
  Antisense strand to SEQ ID NO: 2150266
ucacuaauuagacuuuaag

SEQ ID NO: 2150268 - RNA, 19 nt, Artificial Sequence
  Description of Artificial Sequence: Synthetic oligonucleotide
  Sense strand starting at position 146 of SEQ ID NO: 1882826
agucuaauuagugacuugu

SEQ ID NO: 2150269 - RNA, 19 nt, Artificial Sequence
  Description of Artificial Sequence: Synthetic oligonucleotide
  Antisense strand to SEQ ID NO: 2150268
acaagucacuaauuagacu

SEQ ID NO: 2150270 - RNA, 19 nt, Artificial Sequence
  Description of Artificial Sequence: Synthetic oligonucleotide
  Sense strand starting at position 156 of SEQ ID NO: 1882826
gugacuuguagugauccaa

SEQ ID NO: 2150271 - RNA, 19 nt, Artificial Sequence
  Description of Artificial Sequence: Synthetic oligonucleotide
  Antisense strand to SEQ ID NO: 2150270
uuggaucacuacaagucac

SEQ ID NO: 2150272 - RNA, 19 nt, Artificial Sequence
  Description of Artificial Sequence: Synthetic oligonucleotide
  Sense strand starting at position 485 of SEQ ID NO: 1882826
uugauuuacugugagauua

SEQ ID NO: 2150273 - RNA, 19 nt, Artificial Sequence
  Description of Artificial Sequence: Synthetic oligonucleotide
  Antisense strand to SEQ ID NO: 2150272
uaaucucacaguaaaucaa

SEQ ID NO: 2150274 - RNA, 19 nt, Artificial Sequence
  Description of Artificial Sequence: Synthetic oligonucleotide
  Sense strand starting at position 487 of SEQ ID NO: 1882826
gauuuacugugagauuagu

SEQ ID NO: 2150275 - RNA, 19 nt, Artificial Sequence
  Description of Artificial Sequence: Synthetic oligonucleotide
  Antisense strand to SEQ ID NO: 2150274
acuaaucucacaguaaauc

SEQ ID NO: 2150276 - RNA, 19 nt, Artificial Sequence
  Description of Artificial Sequence: Synthetic oligonucleotide
  Sense strand starting at position 794 of SEQ ID NO: 1882826
aaggguuucucagcaggua

SEQ ID NO: 2150277 - RNA, 19 nt, Artificial Sequence
  Description of Artificial Sequence: Synthetic oligonucleotide
  Antisense strand to SEQ ID NO: 2150276
uaccugcugagaaacccuu

SEQ ID NO: 2150278 - RNA, 19 nt, Artificial Sequence
  Description of Artificial Sequence: Synthetic oligonucleotide
  Sense strand starting at position 795 of SEQ ID NO: 1882826
aggguuucucagcagguaa

SEQ ID NO: 2150279 - RNA, 19 nt, Artificial Sequence
  Description of Artificial Sequence: Synthetic oligonucleotide
  Antisense strand to SEQ ID NO: 2150278
uuaccugcugagaaacccu

SEQ ID NO: 2150280 - RNA, 19 nt, Artificial Sequence
  Description of Artificial Sequence: Synthetic oligonucleotide
  Sense strand starting at position 797 of SEQ ID NO: 1882826
gguuucucagcagguaaag

SEQ ID NO: 2150281 - RNA, 19 nt, Artificial Sequence
  Description of Artificial Sequence: Synthetic oligonucleotide
  Antisense strand to SEQ ID NO: 2150280
cuuuaccugcugagaaacc

SEQ ID NO: 2150282 - RNA, 19 nt, Artificial Sequence
  Description of Artificial Sequence: Synthetic oligonucleotide
  Sense strand starting at position 883 of SEQ ID NO: 1882826
uuguguauguaucuacuau

SEQ ID NO: 2150283 - RNA, 19 nt, Artificial Sequence
  Description of Artificial Sequence: Synthetic oligonucleotide
  Antisense strand to SEQ ID NO: 2150282
auaguagauacauacacaa

SEQ ID NO: 2150284 - RNA, 19 nt, Artificial Sequence
  Description of Artificial Sequence: Synthetic oligonucleotide
  Sense strand starting at position 946 of SEQ ID NO: 1882826
ucugaaauacguuagugaa

SEQ ID NO: 2150285 - RNA, 19 nt, Artificial Sequence
  Description of Artificial Sequence: Synthetic oligonucleotide
  Antisense strand to SEQ ID NO: 2150284
uucacuaacguauuucaga

SEQ ID NO: 2150286 - RNA, 19 nt, Artificial Sequence
  Description of Artificial Sequence: Synthetic oligonucleotide
  Sense strand starting at position 959 of SEQ ID NO: 1882826
agugaacccucagcaguua

SEQ ID NO: 2150287 - RNA, 19 nt, Artificial Sequence
  Description of Artificial Sequence: Synthetic oligonucleotide
  Antisense strand to SEQ ID NO: 2150286
uaacugcugaggguucacu

SEQ ID NO: 2150288 - RNA, 19 nt, Artificial Sequence
  Description of Artificial Sequence: Synthetic oligonucleotide
  Sense strand starting at position 1013 of SEQ ID NO: 1882826
ucaaguagaucguuaacca

SEQ ID NO: 2150289 - RNA, 19 nt, Artificial Sequence
  Description of Artificial Sequence: Synthetic oligonucleotide
  Antisense strand to SEQ ID NO: 2150288
ugguuaacgaucuacuuga

SEQ ID NO: 2150290 - RNA, 19 nt, Artificial Sequence
  Description of Artificial Sequence: Synthetic oligonucleotide
  Sense strand starting at position 1014 of SEQ ID NO: 1882826
caaguagaucguuaaccau

SEQ ID NO: 2150291 - RNA, 19 nt, Artificial Sequence
  Description of Artificial Sequence: Synthetic oligonucleotide
  Antisense strand to SEQ ID NO: 2150290
augguuaacgaucuacuug

SEQ ID NO: 2150292 - RNA, 19 nt, Artificial Sequence
  Description of Artificial Sequence: Synthetic oligonucleotide
  Sense strand starting at position 1017 of SEQ ID NO: 1882826
guagaucguuaaccauaag

SEQ ID NO: 2150293 - RNA, 19 nt, Artificial Sequence
  Description of Artificial Sequence: Synthetic oligonucleotide
  Antisense strand to SEQ ID NO: 2150292
cuuaugguuaacgaucuac

SEQ ID NO: 2150294 - RNA, 19 nt, Artificial Sequence
  Description of Artificial Sequence: Synthetic oligonucleotide
  Sense strand starting at position 1020 of SEQ ID NO: 1882826
gaucguuaaccauaagagu

SEQ ID NO: 2150295 - RNA, 19 nt, Artificial Sequence
  Description of Artificial Sequence: Synthetic oligonucleotide
  Antisense strand to SEQ ID NO: 2150294
acucuuaugguuaacgauc

SEQ ID NO: 2150296 - RNA, 19 nt, Artificial Sequence
  Description of Artificial Sequence: Synthetic oligonucleotide
  Sense strand starting at position 1029 of SEQ ID NO: 1882826
ccauaagagugccugacaa

SEQ ID NO: 2150297 - RNA, 19 nt, Artificial Sequence
  Description of Artificial Sequence: Synthetic oligonucleotide
  Antisense strand to SEQ ID NO: 2150296
uugucaggcacucuuaugg

SEQ ID NO: 2150298 - RNA, 19 nt, Artificial Sequence
  Description of Artificial Sequence: Synthetic oligonucleotide
  Sense strand starting at position 1031 of SEQ ID NO: 1882826
auaagagugccugacaauu

SEQ ID NO: 2150299 - RNA, 19 nt, Artificial Sequence
  Description of Artificial Sequence: Synthetic oligonucleotide
  Antisense strand to SEQ ID NO: 2150298
aauugucaggcacucuuau

SEQ ID NO: 2150300 - RNA, 19 nt, Artificial Sequence
  Description of Artificial Sequence: Synthetic oligonucleotide
  Sense strand starting at position 1086 of SEQ ID NO: 1882826
ggcuuugugaggcagaaag

SEQ ID NO: 2150301 - RNA, 19 nt, Artificial Sequence
  Description of Artificial Sequence: Synthetic oligonucleotide
  Antisense strand to SEQ ID NO: 2150300
cuuucugccucacaaagcc

SEQ ID NO: 2150302 - RNA, 19 nt, Artificial Sequence
  Description of Artificial Sequence: Synthetic oligonucleotide
  Sense strand starting at position 2133 of SEQ ID NO: 1882826
ggaccuguguuuccuugga

SEQ ID NO: 2150303 - RNA, 19 nt, Artificial Sequence
  Description of Artificial Sequence: Synthetic oligonucleotide
  Antisense strand to SEQ ID NO: 2150302
uccaaggaaacacaggucc

SEQ ID NO: 2150304 - RNA, 19 nt, Artificial Sequence
  Description of Artificial Sequence: Synthetic oligonucleotide
  Sense strand starting at position 2135 of SEQ ID NO: 1882826
accuguguuuccuuggaau

SEQ ID NO: 2150305 - RNA, 19 nt, Artificial Sequence
  Description of Artificial Sequence: Synthetic oligonucleotide
  Antisense strand to SEQ ID NO: 2150304
auuccaaggaaacacaggu

SEQ ID NO: 2150306 - RNA, 19 nt, Artificial Sequence
  Description of Artificial Sequence: Synthetic oligonucleotide
  Sense strand starting at position 2148 of SEQ ID NO: 1882826
uggaaucggcuuugguuaa

SEQ ID NO: 2150307 - RNA, 19 nt, Artificial Sequence
  Description of Artificial Sequence: Synthetic oligonucleotide
  Antisense strand to SEQ ID NO: 2150306
uuaaccaaagccgauucca

SEQ ID NO: 2150308 - RNA, 19 nt, Artificial Sequence
  Description of Artificial Sequence: Synthetic oligonucleotide
  Sense strand starting at position 2178 of SEQ ID NO: 1882826
cugagacgggauugguuau

SEQ ID NO: 2150309 - RNA, 19 nt, Artificial Sequence
  Description of Artificial Sequence: Synthetic oligonucleotide
  Antisense strand to SEQ ID NO: 2150308
auaaccaaucccgucucag

SEQ ID NO: 2150310 - RNA, 19 nt, Artificial Sequence
  Description of Artificial Sequence: Synthetic oligonucleotide
  Sense strand starting at position 2215 of SEQ ID NO: 1882826
gcuagaggauucuccuuau

SEQ ID NO: 2150311 - RNA, 19 nt, Artificial Sequence
  Description of Artificial Sequence: Synthetic oligonucleotide
  Antisense strand to SEQ ID NO: 2150310
auaaggagaauccucuagc

SEQ ID NO: 2150312 - RNA, 19 nt, Artificial Sequence
  Description of Artificial Sequence: Synthetic oligonucleotide
  Sense strand starting at position 2218 of SEQ ID NO: 1882826
agaggauucuccuuaucug

SEQ ID NO: 2150313 - RNA, 19 nt, Artificial Sequence
  Description of Artificial Sequence: Synthetic oligonucleotide
  Antisense strand to SEQ ID NO: 2150312
cagauaaggagaauccucu

SEQ ID NO: 2150314 - RNA, 19 nt, Artificial Sequence
  Description of Artificial Sequence: Synthetic oligonucleotide
  Sense strand starting at position 2221 of SEQ ID NO: 1882826
ggauucuccuuaucugaug

SEQ ID NO: 2150315 - RNA, 19 nt, Artificial Sequence
  Description of Artificial Sequence: Synthetic oligonucleotide
  Antisense strand to SEQ ID NO: 2150314
caucagauaaggagaaucc

SEQ ID NO: 2150316 - RNA, 19 nt, Artificial Sequence
  Description of Artificial Sequence: Synthetic oligonucleotide
  Sense strand starting at position 2418 of SEQ ID NO: 1882826
ggacuccaugcuggagaau

SEQ ID NO: 2150317 - RNA, 19 nt, Artificial Sequence
  Description of Artificial Sequence: Synthetic oligonucleotide
  Antisense strand to SEQ ID NO: 2150316
auucuccagcauggagucc

SEQ ID NO: 2150318 - RNA, 19 nt, Artificial Sequence
  Description of Artificial Sequence: Synthetic oligonucleotide
  Sense strand starting at position 2541 of SEQ ID NO: 1882826
gggcguguuauacacagaa

SEQ ID NO: 2150319 - RNA, 19 nt, Artificial Sequence
  Description of Artificial Sequence: Synthetic oligonucleotide
  Antisense strand to SEQ ID NO: 2150318
uucuguguauaacacgccc

SEQ ID NO: 2150320 - RNA, 19 nt, Artificial Sequence
  Description of Artificial Sequence: Synthetic oligonucleotide
  Sense strand starting at position 2896 of SEQ ID NO: 1882826
uuuguagucgcggaggaau

SEQ ID NO: 2150321 - RNA, 19 nt, Artificial Sequence
  Description of Artificial Sequence: Synthetic oligonucleotide
  Antisense strand to SEQ ID NO: 2150320
auuccuccgcgacuacaaa

SEQ ID NO: 2150322 - RNA, 19 nt, Artificial Sequence
  Description of Artificial Sequence: Synthetic oligonucleotide
  Sense strand starting at position 2923 of SEQ ID NO: 1882826
guugaagcacuaugucaaa

SEQ ID NO: 2150323 - RNA, 19 nt, Artificial Sequence
  Description of Artificial Sequence: Synthetic oligonucleotide
  Antisense strand to SEQ ID NO: 2150322
uuugacauagugcuucaac

SEQ ID NO: 2150324 - RNA, 19 nt, Artificial Sequence
  Description of Artificial Sequence: Synthetic oligonucleotide
  Sense strand starting at position 3327 of SEQ ID NO: 1882826
gaaaguucugaauguagug

SEQ ID NO: 2150325 - RNA, 19 nt, Artificial Sequence
  Description of Artificial Sequence: Synthetic oligonucleotide
  Antisense strand to SEQ ID NO: 2150324
cacuacauucagaacuuuc

SEQ ID NO: 2150326 - RNA, 19 nt, Artificial Sequence
  Description of Artificial Sequence: Synthetic oligonucleotide
  Sense strand starting at position 3336 of SEQ ID NO: 1882826
gaauguagugagugccaga

SEQ ID NO: 2150327 - RNA, 19 nt, Artificial Sequence
  Description of Artificial Sequence: Synthetic oligonucleotide
  Antisense strand to SEQ ID NO: 2150326
ucuggcacucacuacauuc

SEQ ID NO: 2150328 - RNA, 19 nt, Artificial Sequence
  Description of Artificial Sequence: Synthetic oligonucleotide
  Sense strand starting at position 3408 of SEQ ID NO: 1882826
uuuguuuaauuccuggcaa

SEQ ID NO: 2150329 - RNA, 19 nt, Artificial Sequence
  Description of Artificial Sequence: Synthetic oligonucleotide
  Antisense strand to SEQ ID NO: 2150328
uugccaggaauuaaacaaa

SEQ ID NO: 2150330 - RNA, 19 nt, Artificial Sequence
  Description of Artificial Sequence: Synthetic oligonucleotide
  Sense strand starting at position 3553 of SEQ ID NO: 1882826
gucccagauagcugcugaa

SEQ ID NO: 2150331 - RNA, 19 nt, Artificial Sequence
  Description of Artificial Sequence: Synthetic oligonucleotide
  Antisense strand to SEQ ID NO: 2150330
uucagcagcuaucugggac

SEQ ID NO: 2150332 - RNA, 19 nt, Artificial Sequence
  Description of Artificial Sequence: Synthetic oligonucleotide
  Sense strand starting at position 3833 of SEQ ID NO: 1882826
ucaggucgaaaucaguuua

SEQ ID NO: 2150333 - RNA, 19 nt, Artificial Sequence
  Description of Artificial Sequence: Synthetic oligonucleotide
  Antisense strand to SEQ ID NO: 2150332
uaaacugauuucgaccuga

SEQ ID NO: 2150334 - RNA, 19 nt, Artificial Sequence
  Description of Artificial Sequence: Synthetic oligonucleotide
  Sense strand starting at position 3890 of SEQ ID NO: 1882826
ugaaguuauucuuuaagga

SEQ ID NO: 2150335 - RNA, 19 nt, Artificial Sequence
  Description of Artificial Sequence: Synthetic oligonucleotide
  Antisense strand to SEQ ID NO: 2150334
uccuuaaagaauaacuuca

SEQ ID NO: 2150336 - RNA, 19 nt, Artificial Sequence
  Description of Artificial Sequence: Synthetic oligonucleotide
  Sense strand starting at position 14 of SEQ ID NO: 1882827
gggauugaguguuuaauga

SEQ ID NO: 2150337 - RNA, 19 nt, Artificial Sequence
  Description of Artificial Sequence: Synthetic oligonucleotide
  Antisense strand to SEQ ID NO: 2150336
ucauuaaacacucaauccc

SEQ ID NO: 2150338 - RNA, 19 nt, Artificial Sequence
  Description of Artificial Sequence: Synthetic oligonucleotide
  Sense strand starting at position 18 of SEQ ID NO: 1882827
uugaguguuuaaugaggac

SEQ ID NO: 2150339 - RNA, 19 nt, Artificial Sequence
  Description of Artificial Sequence: Synthetic oligonucleotide
  Antisense strand to SEQ ID NO: 2150338
guccucauuaaacacucaa

SEQ ID NO: 2150340 - RNA, 19 nt, Artificial Sequence
  Description of Artificial Sequence: Synthetic oligonucleotide
  Sense strand starting at position 80 of SEQ ID NO: 1882827
gcuggugauugcugcacaa

SEQ ID NO: 2150341 - RNA, 19 nt, Artificial Sequence
  Description of Artificial Sequence: Synthetic oligonucleotide
  Antisense strand to SEQ ID NO: 2150340
uugugcagcaaucaccagc

SEQ ID NO: 2150342 - RNA, 19 nt, Artificial Sequence
  Description of Artificial Sequence: Synthetic oligonucleotide
  Sense strand starting at position 84 of SEQ ID NO: 1882827
gugauugcugcacaacgaa

SEQ ID NO: 2150343 - RNA, 19 nt, Artificial Sequence
  Description of Artificial Sequence: Synthetic oligonucleotide
  Antisense strand to SEQ ID NO: 2150342
uucguugugcagcaaucac

SEQ ID NO: 2150344 - RNA, 19 nt, Artificial Sequence
  Description of Artificial Sequence: Synthetic oligonucleotide
  Sense strand starting at position 186 of SEQ ID NO: 1882827
aaagaagucugaucauagc

SEQ ID NO: 2150345 - RNA, 19 nt, Artificial Sequence
  Description of Artificial Sequence: Synthetic oligonucleotide
  Antisense strand to SEQ ID NO: 2150344
gcuaugaucagacuucuuu

SEQ ID NO: 2150346 - RNA, 19 nt, Artificial Sequence
  Description of Artificial Sequence: Synthetic oligonucleotide
  Sense strand starting at position 189 of SEQ ID NO: 1882827
gaagucugaucauagcacu

SEQ ID NO: 2150347 - RNA, 19 nt, Artificial Sequence
  Description of Artificial Sequence: Synthetic oligonucleotide
  Antisense strand to SEQ ID NO: 2150346
agugcuaugaucagacuuc

SEQ ID NO: 2150348 - RNA, 19 nt, Artificial Sequence
  Description of Artificial Sequence: Synthetic oligonucleotide
  Sense strand starting at position 3113 of SEQ ID NO: 1882827
cgagacgacuuguguuuaa

SEQ ID NO: 2150349 - RNA, 19 nt, Artificial Sequence
  Description of Artificial Sequence: Synthetic oligonucleotide
  Antisense strand to SEQ ID NO: 2150348
uuaaacacaagucgucucg

SEQ ID NO: 2150350 - RNA, 19 nt, Artificial Sequence
  Description of Artificial Sequence: Synthetic oligonucleotide
  Sense strand starting at position 3116 of SEQ ID NO: 1882827
gacgacuuguguuuaacca

SEQ ID NO: 2150351 - RNA, 19 nt, Artificial Sequence
  Description of Artificial Sequence: Synthetic oligonucleotide
  Antisense strand to SEQ ID NO: 2150350
ugguuaaacacaagucguc

SEQ ID NO: 2150352 - RNA, 19 nt, Artificial Sequence
  Description of Artificial Sequence: Synthetic oligonucleotide
  Sense strand starting at position 3117 of SEQ ID NO: 1882827
acgacuuguguuuaaccaa

SEQ ID NO: 2150353 - RNA, 19 nt, Artificial Sequence
  Description of Artificial Sequence: Synthetic oligonucleotide
  Antisense strand to SEQ ID NO: 2150352
uugguuaaacacaagucgu

SEQ ID NO: 2150354 - RNA, 19 nt, Artificial Sequence
  Description of Artificial Sequence: Synthetic oligonucleotide
  Sense strand starting at position 3120 of SEQ ID NO: 1882827
acuuguguuuaaccaagaa

SEQ ID NO: 2150355 - RNA, 19 nt, Artificial Sequence
  Description of Artificial Sequence: Synthetic oligonucleotide
  Antisense strand to SEQ ID NO: 2150354
uucuugguuaaacacaagu

SEQ ID NO: 2150356 - RNA, 19 nt, Artificial Sequence
  Description of Artificial Sequence: Synthetic oligonucleotide
  Sense strand starting at position 3302 of SEQ ID NO: 1882827
gccagaaggccucaguguu

SEQ ID NO: 2150357 - RNA, 19 nt, Artificial Sequence
  Description of Artificial Sequence: Synthetic oligonucleotide
  Antisense strand to SEQ ID NO: 2150356
aacacugaggccuucuggc

SEQ ID NO: 2150358 - RNA, 19 nt, Artificial Sequence
  Description of Artificial Sequence: Synthetic oligonucleotide
  Sense strand starting at position 3366 of SEQ ID NO: 1882827
ggcccaaucuguuuauuug

SEQ ID NO: 2150359 - RNA, 19 nt, Artificial Sequence
  Description of Artificial Sequence: Synthetic oligonucleotide
  Antisense strand to SEQ ID NO: 2150358
caaauaaacagauugggcc

SEQ ID NO: 2150360 - RNA, 19 nt, Artificial Sequence
  Description of Artificial Sequence: Synthetic oligonucleotide
  Sense strand starting at position 3367 of SEQ ID NO: 1882827
gcccaaucuguuuauuugu

SEQ ID NO: 2150361 - RNA, 19 nt, Artificial Sequence
  Description of Artificial Sequence: Synthetic oligonucleotide
  Antisense strand to SEQ ID NO: 2150360
acaaauaaacagauugggc

SEQ ID NO: 2150362 - RNA, 19 nt, Artificial Sequence
  Description of Artificial Sequence: Synthetic oligonucleotide
  Sense strand starting at position 3593 of SEQ ID NO: 1882827
cuagccugcgccugugaua

SEQ ID NO: 2150363 - RNA, 19 nt, Artificial Sequence
  Description of Artificial Sequence: Synthetic oligonucleotide
  Antisense strand to SEQ ID NO: 2150362
uaucacaggcgcaggcuag

SEQ ID NO: 2150364 - RNA, 19 nt, Artificial Sequence
  Description of Artificial Sequence: Synthetic oligonucleotide
  Sense strand starting at position 3813 of SEQ ID NO: 1882827
guuugccaguguccuaaau

SEQ ID NO: 2150365 - RNA, 19 nt, Artificial Sequence
  Description of Artificial Sequence: Synthetic oligonucleotide
  Antisense strand to SEQ ID NO: 2150364
auuuaggacacuggcaaac

SEQ ID NO: 2150366 - RNA, 19 nt, Artificial Sequence
  Description of Artificial Sequence: Synthetic oligonucleotide
  Sense strand starting at position 3815 of SEQ ID NO: 1882827
uugccaguguccuaaauuu

SEQ ID NO: 2150367 - RNA, 19 nt, Artificial Sequence
  Description of Artificial Sequence: Synthetic oligonucleotide
  Antisense strand to SEQ ID NO: 2150366
aaauuuaggacacuggcaa

SEQ ID NO: 2150368 - RNA, 19 nt, Artificial Sequence
  Description of Artificial Sequence: Synthetic oligonucleotide
  Sense strand starting at position 3866 of SEQ ID NO: 1882827
aggcgaugucacgaggaga

SEQ ID NO: 2150369 - RNA, 19 nt, Artificial Sequence
  Description of Artificial Sequence: Synthetic oligonucleotide
  Antisense strand to SEQ ID NO: 2150368
ucuccucgugacaucgccu

SEQ ID NO: 2150370 - RNA, 19 nt, Artificial Sequence
  Description of Artificial Sequence: Synthetic oligonucleotide
  Sense strand starting at position 3882 of SEQ ID NO: 1882827
agaggaucuggcuguucaa

SEQ ID NO: 2150371 - RNA, 19 nt, Artificial Sequence
  Description of Artificial Sequence: Synthetic oligonucleotide
  Antisense strand to SEQ ID NO: 2150370
uugaacagccagauccucu

SEQ ID NO: 2150372 - RNA, 19 nt, Artificial Sequence
  Description of Artificial Sequence: Synthetic oligonucleotide
  Sense strand starting at position 3903 of SEQ ID NO: 1882827
cagguuaccugagcgaucu

SEQ ID NO: 2150373 - RNA, 19 nt, Artificial Sequence
  Description of Artificial Sequence: Synthetic oligonucleotide
  Antisense strand to SEQ ID NO: 2150372
agaucgcucagguaaccug

SEQ ID NO: 2150374 - RNA, 19 nt, Artificial Sequence
  Description of Artificial Sequence: Synthetic oligonucleotide
  Sense strand starting at position 249 of SEQ ID NO: 1882828
cagugauaucuuugagaau

SEQ ID NO: 2150375 - RNA, 19 nt, Artificial Sequence
  Description of Artificial Sequence: Synthetic oligonucleotide
  Antisense strand to SEQ ID NO: 2150374
auucucaaagauaucacug

SEQ ID NO: 2150376 - RNA, 19 nt, Artificial Sequence
  Description of Artificial Sequence: Synthetic oligonucleotide
  Sense strand starting at position 358 of SEQ ID NO: 1882828
uugugugucgagagagucu

SEQ ID NO: 2150377 - RNA, 19 nt, Artificial Sequence
  Description of Artificial Sequence: Synthetic oligonucleotide
  Antisense strand to SEQ ID NO: 2150376
agacucucucgacacacaa

SEQ ID NO: 2150378 - RNA, 19 nt, Artificial Sequence
  Description of Artificial Sequence: Synthetic oligonucleotide
  Sense strand starting at position 360 of SEQ ID NO: 1882828
gugugucgagagagucuua

SEQ ID NO: 2150379 - RNA, 19 nt, Artificial Sequence
  Description of Artificial Sequence: Synthetic oligonucleotide
  Antisense strand to SEQ ID NO: 2150378
uaagacucucucgacacac

SEQ ID NO: 2150380 - RNA, 19 nt, Artificial Sequence
  Description of Artificial Sequence: Synthetic oligonucleotide
  Sense strand starting at position 514 of SEQ ID NO: 1882828
ggaaauaacuuugauuucu

SEQ ID NO: 2150381 - RNA, 19 nt, Artificial Sequence
  Description of Artificial Sequence: Synthetic oligonucleotide
  Antisense strand to SEQ ID NO: 2150380
agaaaucaaaguuauuucc

SEQ ID NO: 2150382 - RNA, 19 nt, Artificial Sequence
  Description of Artificial Sequence: Synthetic oligonucleotide
  Sense strand starting at position 646 of SEQ ID NO: 1882828
gcaagaagcaauugagaag

SEQ ID NO: 2150383 - RNA, 19 nt, Artificial Sequence
  Description of Artificial Sequence: Synthetic oligonucleotide
  Antisense strand to SEQ ID NO: 2150382
cuucucaauugcuucuugc

SEQ ID NO: 2150384 - RNA, 19 nt, Artificial Sequence
  Description of Artificial Sequence: Synthetic oligonucleotide
  Sense strand starting at position 662 of SEQ ID NO: 1882828
aaggacuuccucuguggga

SEQ ID NO: 2150385 - RNA, 19 nt, Artificial Sequence
  Description of Artificial Sequence: Synthetic oligonucleotide
  Antisense strand to SEQ ID NO: 2150384
ucccacagaggaaguccuu

SEQ ID NO: 2150386 - RNA, 19 nt, Artificial Sequence
  Description of Artificial Sequence: Synthetic oligonucleotide
  Sense strand starting at position 669 of SEQ ID NO: 1882828
uccucugugggauaaauuc

SEQ ID NO: 2150387 - RNA, 19 nt, Artificial Sequence
  Description of Artificial Sequence: Synthetic oligonucleotide
  Antisense strand to SEQ ID NO: 2150386
gaauuuaucccacagagga

SEQ ID NO: 2150388 - RNA, 19 nt, Artificial Sequence
  Description of Artificial Sequence: Synthetic oligonucleotide
  Sense strand starting at position 676 of SEQ ID NO: 1882828
ugggauaaauucuugguaa

SEQ ID NO: 2150389 - RNA, 19 nt, Artificial Sequence
  Description of Artificial Sequence: Synthetic oligonucleotide
  Antisense strand to SEQ ID NO: 2150388
uuaccaagaauuuauccca

SEQ ID NO: 2150390 - RNA, 19 nt, Artificial Sequence
  Description of Artificial Sequence: Synthetic oligonucleotide
  Sense strand starting at position 678 of SEQ ID NO: 1882828
ggauaaauucuugguaauu

SEQ ID NO: 2150391 - RNA, 19 nt, Artificial Sequence
  Description of Artificial Sequence: Synthetic oligonucleotide
  Antisense strand to SEQ ID NO: 2150390
aauuaccaagaauuuaucc

SEQ ID NO: 2150392 - RNA, 19 nt, Artificial Sequence
  Description of Artificial Sequence: Synthetic oligonucleotide
  Sense strand starting at position 902 of SEQ ID NO: 1882828
cgcugaagaguugacaaga

SEQ ID NO: 2150393 - RNA, 19 nt, Artificial Sequence
  Description of Artificial Sequence: Synthetic oligonucleotide
  Antisense strand to SEQ ID NO: 2150392
ucuugucaacucuucagcg

SEQ ID NO: 2150394 - RNA, 19 nt, Artificial Sequence
  Description of Artificial Sequence: Synthetic oligonucleotide
  Sense strand starting at position 1146 of SEQ ID NO: 1882828
ggaguaguaaaucaagcau

SEQ ID NO: 2150395 - RNA, 19 nt, Artificial Sequence
  Description of Artificial Sequence: Synthetic oligonucleotide
  Antisense strand to SEQ ID NO: 2150394
augcuugauuuacuacucc

SEQ ID NO: 2150396 - RNA, 19 nt, Artificial Sequence
  Description of Artificial Sequence: Synthetic oligonucleotide
  Sense strand starting at position 1152 of SEQ ID NO: 1882828
guaaaucaagcaugauaaa

SEQ ID NO: 2150397 - RNA, 19 nt, Artificial Sequence
  Description of Artificial Sequence: Synthetic oligonucleotide
  Antisense strand to SEQ ID NO: 2150396
uuuaucaugcuugauuuac

SEQ ID NO: 2150398 - RNA, 19 nt, Artificial Sequence
  Description of Artificial Sequence: Synthetic oligonucleotide
  Sense strand starting at position 1209 of SEQ ID NO: 1882828
uuaagaaucgugcacaaug

SEQ ID NO: 2150399 - RNA, 19 nt, Artificial Sequence
  Description of Artificial Sequence: Synthetic oligonucleotide
  Antisense strand to SEQ ID NO: 2150398
cauugugcacgauucuuaa

SEQ ID NO: 2150400 - RNA, 19 nt, Artificial Sequence
  Description of Artificial Sequence: Synthetic oligonucleotide
  Sense strand starting at position 1211 of SEQ ID NO: 1882828
aagaaucgugcacaaugau

SEQ ID NO: 2150401 - RNA, 19 nt, Artificial Sequence
  Description of Artificial Sequence: Synthetic oligonucleotide
  Antisense strand to SEQ ID NO: 2150400
aucauugugcacgauucuu

SEQ ID NO: 2150402 - RNA, 19 nt, Artificial Sequence
  Description of Artificial Sequence: Synthetic oligonucleotide
  Sense strand starting at position 1304 of SEQ ID NO: 1882828
caacuagucugauuaaugg

SEQ ID NO: 2150403 - RNA, 19 nt, Artificial Sequence
  Description of Artificial Sequence: Synthetic oligonucleotide
  Antisense strand to SEQ ID NO: 2150402
ccauuaaucagacuaguug

SEQ ID NO: 2150404 - RNA, 19 nt, Artificial Sequence
  Description of Artificial Sequence: Synthetic oligonucleotide
  Sense strand starting at position 1310 of SEQ ID NO: 1882828
gucugauuaaugggaucug

SEQ ID NO: 2150405 - RNA, 19 nt, Artificial Sequence
  Description of Artificial Sequence: Synthetic oligonucleotide
  Antisense strand to SEQ ID NO: 2150404
cagaucccauuaaucagac

SEQ ID NO: 2150406 - RNA, 19 nt, Artificial Sequence
  Description of Artificial Sequence: Synthetic oligonucleotide
  Sense strand starting at position 1453 of SEQ ID NO: 1882828
ggaacuugucucgaaauua

SEQ ID NO: 2150407 - RNA, 19 nt, Artificial Sequence
  Description of Artificial Sequence: Synthetic oligonucleotide
  Antisense strand to SEQ ID NO: 2150406
uaauuucgagacaaguucc

SEQ ID NO: 2150408 - RNA, 19 nt, Artificial Sequence
  Description of Artificial Sequence: Synthetic oligonucleotide
  Sense strand starting at position 1492 of SEQ ID NO: 1882828
gucagaugccaauauucua

SEQ ID NO: 2150409 - RNA, 19 nt, Artificial Sequence
  Description of Artificial Sequence: Synthetic oligonucleotide
  Antisense strand to SEQ ID NO: 2150408
uagaauauuggcaucugac

SEQ ID NO: 2150410 - RNA, 19 nt, Artificial Sequence
  Description of Artificial Sequence: Synthetic oligonucleotide
  Sense strand starting at position 1534 of SEQ ID NO: 1882828
cagacuccugguuaucgaa

SEQ ID NO: 2150411 - RNA, 19 nt, Artificial Sequence
  Description of Artificial Sequence: Synthetic oligonucleotide
  Antisense strand to SEQ ID NO: 2150410
uucgauaaccaggagucug

SEQ ID NO: 2150412 - RNA, 19 nt, Artificial Sequence
  Description of Artificial Sequence: Synthetic oligonucleotide
  Sense strand starting at position 1541 of SEQ ID NO: 1882828
cugguuaucgaagaguuga

SEQ ID NO: 2150413 - RNA, 19 nt, Artificial Sequence
  Description of Artificial Sequence: Synthetic oligonucleotide
  Antisense strand to SEQ ID NO: 2150412
ucaacucuucgauaaccag

SEQ ID NO: 2150414 - RNA, 19 nt, Artificial Sequence
  Description of Artificial Sequence: Synthetic oligonucleotide
  Sense strand starting at position 1554 of SEQ ID NO: 1882828
aguugaaacuagucagaua

SEQ ID NO: 2150415 - RNA, 19 nt, Artificial Sequence
  Description of Artificial Sequence: Synthetic oligonucleotide
  Antisense strand to SEQ ID NO: 2150414
uaucugacuaguuucaacu

SEQ ID NO: 2150416 - RNA, 19 nt, Artificial Sequence
  Description of Artificial Sequence: Synthetic oligonucleotide
  Sense strand starting at position 1764 of SEQ ID NO: 1882828
auaauuauccaggguauuc

SEQ ID NO: 2150417 - RNA, 19 nt, Artificial Sequence
  Description of Artificial Sequence: Synthetic oligonucleotide
  Antisense strand to SEQ ID NO: 2150416
gaauacccuggauaauuau

SEQ ID NO: 2150418 - RNA, 19 nt, Artificial Sequence
  Description of Artificial Sequence: Synthetic oligonucleotide
  Sense strand starting at position 1793 of SEQ ID NO: 1882828
ccagguauuuaugccucua

SEQ ID NO: 2150419 - RNA, 19 nt, Artificial Sequence
  Description of Artificial Sequence: Synthetic oligonucleotide
  Antisense strand to SEQ ID NO: 2150418
uagaggcauaaauaccugg

SEQ ID NO: 2150420 - RNA, 19 nt, Artificial Sequence
  Description of Artificial Sequence: Synthetic oligonucleotide
  Sense strand starting at position 2011 of SEQ ID NO: 1882828
ccauuucuguugucugauu

SEQ ID NO: 2150421 - RNA, 19 nt, Artificial Sequence
  Description of Artificial Sequence: Synthetic oligonucleotide
  Antisense strand to SEQ ID NO: 2150420
aaucagacaacagaaaugg

SEQ ID NO: 2150422 - RNA, 19 nt, Artificial Sequence
  Description of Artificial Sequence: Synthetic oligonucleotide
  Sense strand starting at position 2066 of SEQ ID NO: 1882828
acaguuucucaacauuagu

SEQ ID NO: 2150423 - RNA, 19 nt, Artificial Sequence
  Description of Artificial Sequence: Synthetic oligonucleotide
  Antisense strand to SEQ ID NO: 2150422
acuaauguugagaaacugu

SEQ ID NO: 2150424 - RNA, 19 nt, Artificial Sequence
  Description of Artificial Sequence: Synthetic oligonucleotide
  Sense strand starting at position 2069 of SEQ ID NO: 1882828
guuucucaacauuaguuaa

SEQ ID NO: 2150425 - RNA, 19 nt, Artificial Sequence
  Description of Artificial Sequence: Synthetic oligonucleotide
  Antisense strand to SEQ ID NO: 2150424
uuaacuaauguugagaaac

SEQ ID NO: 2150426 - RNA, 19 nt, Artificial Sequence
  Description of Artificial Sequence: Synthetic oligonucleotide
  Sense strand starting at position 2128 of SEQ ID NO: 1882828
uuuaaaguuguacaaggua

SEQ ID NO: 2150427 - RNA, 19 nt, Artificial Sequence
  Description of Artificial Sequence: Synthetic oligonucleotide
  Antisense strand to SEQ ID NO: 2150426
uaccuuguacaacuuuaaa

SEQ ID NO: 2150428 - RNA, 19 nt, Artificial Sequence
  Description of Artificial Sequence: Synthetic oligonucleotide
  Sense strand starting at position 2131 of SEQ ID NO: 1882828
aaaguuguacaagguaaau

SEQ ID NO: 2150429 - RNA, 19 nt, Artificial Sequence
  Description of Artificial Sequence: Synthetic oligonucleotide
  Antisense strand to SEQ ID NO: 2150428
auuuaccuuguacaacuuu

SEQ ID NO: 2150430 - RNA, 19 nt, Artificial Sequence
  Description of Artificial Sequence: Synthetic oligonucleotide
  Sense strand starting at position 2314 of SEQ ID NO: 1882828
uccacagguccuugaauaa

SEQ ID NO: 2150431 - RNA, 19 nt, Artificial Sequence
  Description of Artificial Sequence: Synthetic oligonucleotide
  Antisense strand to SEQ ID NO: 2150430
uuauucaaggaccugugga

SEQ ID NO: 2150432 - RNA, 19 nt, Artificial Sequence
  Description of Artificial Sequence: Synthetic oligonucleotide
  Sense strand starting at position 2336 of SEQ ID NO: 1882828
guuccaugucuccagauaa

SEQ ID NO: 2150433 - RNA, 19 nt, Artificial Sequence
  Description of Artificial Sequence: Synthetic oligonucleotide
  Antisense strand to SEQ ID NO: 2150432
uuaucuggagacauggaac

SEQ ID NO: 2150434 - RNA, 19 nt, Artificial Sequence
  Description of Artificial Sequence: Synthetic oligonucleotide
  Sense strand starting at position 2655 of SEQ ID NO: 1882828
gggauagagcucugaugau

SEQ ID NO: 2150435 - RNA, 19 nt, Artificial Sequence
  Description of Artificial Sequence: Synthetic oligonucleotide
  Antisense strand to SEQ ID NO: 2150434
aucaucagagcucuauccc

SEQ ID NO: 2150436 - RNA, 19 nt, Artificial Sequence
  Description of Artificial Sequence: Synthetic oligonucleotide
  Sense strand starting at position 2662 of SEQ ID NO: 1882828
agcucugaugaugggauau

SEQ ID NO: 2150437 - RNA, 19 nt, Artificial Sequence
  Description of Artificial Sequence: Synthetic oligonucleotide
  Antisense strand to SEQ ID NO: 2150436
auaucccaucaucagagcu

SEQ ID NO: 2150438 - RNA, 19 nt, Artificial Sequence
  Description of Artificial Sequence: Synthetic oligonucleotide
  Sense strand starting at position 3024 of SEQ ID NO: 1882828
uggagaauauauucuguuu

SEQ ID NO: 2150439 - RNA, 19 nt, Artificial Sequence
  Description of Artificial Sequence: Synthetic oligonucleotide
  Antisense strand to SEQ ID NO: 2150438
aaacagaauauauucucca

SEQ ID NO: 2150440 - RNA, 19 nt, Artificial Sequence
  Description of Artificial Sequence: Synthetic oligonucleotide
  Sense strand starting at position 3027 of SEQ ID NO: 1882828
agaauauauucuguuugac

SEQ ID NO: 2150441 - RNA, 19 nt, Artificial Sequence
  Description of Artificial Sequence: Synthetic oligonucleotide
  Antisense strand to SEQ ID NO: 2150440
gucaaacagaauauauucu

SEQ ID NO: 2150442 - RNA, 19 nt, Artificial Sequence
  Description of Artificial Sequence: Synthetic oligonucleotide
  Sense strand starting at position 3241 of SEQ ID NO: 1882828
gguaaauaaucaguuuaag

SEQ ID NO: 2150443 - RNA, 19 nt, Artificial Sequence
  Description of Artificial Sequence: Synthetic oligonucleotide
  Antisense strand to SEQ ID NO: 2150442
cuuaaacugauuauuuacc

SEQ ID NO: 2150444 - RNA, 19 nt, Artificial Sequence
  Description of Artificial Sequence: Synthetic oligonucleotide
  Sense strand starting at position 3639 of SEQ ID NO: 1882828
gcgguuuggaaauacaaau

SEQ ID NO: 2150445 - RNA, 19 nt, Artificial Sequence
  Description of Artificial Sequence: Synthetic oligonucleotide
  Antisense strand to SEQ ID NO: 2150444
auuuguauuuccaaaccgc

SEQ ID NO: 2150446 - RNA, 19 nt, Artificial Sequence
  Description of Artificial Sequence: Synthetic oligonucleotide
  Sense strand starting at position 3868 of SEQ ID NO: 1882828
agaugauacugucugacaa

SEQ ID NO: 2150447 - RNA, 19 nt, Artificial Sequence
  Description of Artificial Sequence: Synthetic oligonucleotide
  Antisense strand to SEQ ID NO: 2150446
uugucagacaguaucaucu

SEQ ID NO: 2150448 - RNA, 19 nt, Artificial Sequence
  Description of Artificial Sequence: Synthetic oligonucleotide
  Sense strand starting at position 3869 of SEQ ID NO: 1882828
gaugauacugucugacaac

SEQ ID NO: 2150449 - RNA, 19 nt, Artificial Sequence
  Description of Artificial Sequence: Synthetic oligonucleotide
  Antisense strand to SEQ ID NO: 2150448
guugucagacaguaucauc

SEQ ID NO: 2150450 - RNA, 19 nt, Artificial Sequence
  Description of Artificial Sequence: Synthetic oligonucleotide
  Sense strand starting at position 3947 of SEQ ID NO: 1882828
acaugaacugaauguuuga

SEQ ID NO: 2150451 - RNA, 19 nt, Artificial Sequence
  Description of Artificial Sequence: Synthetic oligonucleotide
  Antisense strand to SEQ ID NO: 2150450
ucaaacauucaguucaugu

SEQ ID NO: 2150452 - RNA, 19 nt, Artificial Sequence
  Description of Artificial Sequence: Synthetic oligonucleotide
  Sense strand starting at position 3962 of SEQ ID NO: 1882828
uugagaacccauuagcuau

SEQ ID NO: 2150453 - RNA, 19 nt, Artificial Sequence
  Description of Artificial Sequence: Synthetic oligonucleotide
  Antisense strand to SEQ ID NO: 2150452
auagcuaauggguucucaa

SEQ ID NO: 2150454 - RNA, 19 nt, Artificial Sequence
  Description of Artificial Sequence: Synthetic oligonucleotide
  Sense strand starting at position 25 of SEQ ID NO: 1882829
aaauucucugguuagcuga

SEQ ID NO: 2150455 - RNA, 19 nt, Artificial Sequence
  Description of Artificial Sequence: Synthetic oligonucleotide
  Antisense strand to SEQ ID NO: 2150454
ucagcuaaccagagaauuu

SEQ ID NO: 2150456 - RNA, 19 nt, Artificial Sequence
  Description of Artificial Sequence: Synthetic oligonucleotide
  Sense strand starting at position 54 of SEQ ID NO: 1882829
agauuccaagaauguucua

SEQ ID NO: 2150457 - RNA, 19 nt, Artificial Sequence
  Description of Artificial Sequence: Synthetic oligonucleotide
  Antisense strand to SEQ ID NO: 2150456
uagaacauucuuggaaucu

SEQ ID NO: 2150458 - RNA, 19 nt, Artificial Sequence
  Description of Artificial Sequence: Synthetic oligonucleotide
  Sense strand starting at position 57 of SEQ ID NO: 1882829
uuccaagaauguucuaaag

SEQ ID NO: 2150459 - RNA, 19 nt, Artificial Sequence
  Description of Artificial Sequence: Synthetic oligonucleotide
  Antisense strand to SEQ ID NO: 2150458
cuuuagaacauucuuggaa

SEQ ID NO: 2150460 - RNA, 19 nt, Artificial Sequence
  Description of Artificial Sequence: Synthetic oligonucleotide
  Sense strand starting at position 95 of SEQ ID NO: 1882829
aaaggacuguguucugaaa

SEQ ID NO: 2150461 - RNA, 19 nt, Artificial Sequence
  Description of Artificial Sequence: Synthetic oligonucleotide
  Antisense strand to SEQ ID NO: 2150460
uuucagaacacaguccuuu

SEQ ID NO: 2150462 - RNA, 19 nt, Artificial Sequence
  Description of Artificial Sequence: Synthetic oligonucleotide
  Sense strand starting at position 176 of SEQ ID NO: 1882829
cuugaauguguauacauaa

SEQ ID NO: 2150463 - RNA, 19 nt, Artificial Sequence
  Description of Artificial Sequence: Synthetic oligonucleotide
  Antisense strand to SEQ ID NO: 2150462
uuauguauacacauucaag

SEQ ID NO: 2150464 - RNA, 19 nt, Artificial Sequence
  Description of Artificial Sequence: Synthetic oligonucleotide
  Sense strand starting at position 235 of SEQ ID NO: 1882829
uacugaaagccguacagau

SEQ ID NO: 2150465 - RNA, 19 nt, Artificial Sequence
  Description of Artificial Sequence: Synthetic oligonucleotide
  Antisense strand to SEQ ID NO: 2150464
aucuguacggcuuucagua

SEQ ID NO: 2150466 - RNA, 19 nt, Artificial Sequence
  Description of Artificial Sequence: Synthetic oligonucleotide
  Sense strand starting at position 237 of SEQ ID NO: 1882829
cugaaagccguacagauua

SEQ ID NO: 2150467 - RNA, 19 nt, Artificial Sequence
  Description of Artificial Sequence: Synthetic oligonucleotide
  Antisense strand to SEQ ID NO: 2150466
uaaucuguacggcuuucag

SEQ ID NO: 2150468 - RNA, 19 nt, Artificial Sequence
  Description of Artificial Sequence: Synthetic oligonucleotide
  Sense strand starting at position 541 of SEQ ID NO: 1882829
cggccaagauuauucuuaa

SEQ ID NO: 2150469 - RNA, 19 nt, Artificial Sequence
  Description of Artificial Sequence: Synthetic oligonucleotide
  Antisense strand to SEQ ID NO: 2150468
uuaagaauaaucuuggccg

SEQ ID NO: 2150470 - RNA, 19 nt, Artificial Sequence
  Description of Artificial Sequence: Synthetic oligonucleotide
  Sense strand starting at position 542 of SEQ ID NO: 1882829
ggccaagauuauucuuaaa

SEQ ID NO: 2150471 - RNA, 19 nt, Artificial Sequence
  Description of Artificial Sequence: Synthetic oligonucleotide
  Antisense strand to SEQ ID NO: 2150470
uuuaagaauaaucuuggcc

SEQ ID NO: 2150472 - RNA, 19 nt, Artificial Sequence
  Description of Artificial Sequence: Synthetic oligonucleotide
  Sense strand starting at position 544 of SEQ ID NO: 1882829
ccaagauuauucuuaaacg

SEQ ID NO: 2150473 - RNA, 19 nt, Artificial Sequence
  Description of Artificial Sequence: Synthetic oligonucleotide
  Antisense strand to SEQ ID NO: 2150472
cguuuaagaauaaucuugg

SEQ ID NO: 2150474 - RNA, 19 nt, Artificial Sequence
  Description of Artificial Sequence: Synthetic oligonucleotide
  Sense strand starting at position 1008 of SEQ ID NO: 1882829
cguuuauaucucguagcau

SEQ ID NO: 2150475 - RNA, 19 nt, Artificial Sequence
  Description of Artificial Sequence: Synthetic oligonucleotide
  Antisense strand to SEQ ID NO: 2150474
augcuacgagauauaaacg

SEQ ID NO: 2150476 - RNA, 19 nt, Artificial Sequence
  Description of Artificial Sequence: Synthetic oligonucleotide
  Sense strand starting at position 1067 of SEQ ID NO: 1882829
ucuauuuaacggugucauu

SEQ ID NO: 2150477 - RNA, 19 nt, Artificial Sequence
  Description of Artificial Sequence: Synthetic oligonucleotide
  Antisense strand to SEQ ID NO: 2150476
aaugacaccguuaaauaga

SEQ ID NO: 2150478 - RNA, 19 nt, Artificial Sequence
  Description of Artificial Sequence: Synthetic oligonucleotide
  Sense strand starting at position 1193 of SEQ ID NO: 1882829
cuaccuauugacugaauga

SEQ ID NO: 2150479 - RNA, 19 nt, Artificial Sequence
  Description of Artificial Sequence: Synthetic oligonucleotide
  Antisense strand to SEQ ID NO: 2150478
ucauucagucaauagguag

SEQ ID NO: 2150480 - RNA, 19 nt, Artificial Sequence
  Description of Artificial Sequence: Synthetic oligonucleotide
  Sense strand starting at position 1218 of SEQ ID NO: 1882829
augaaugucuguccaaaua

SEQ ID NO: 2150481 - RNA, 19 nt, Artificial Sequence
  Description of Artificial Sequence: Synthetic oligonucleotide
  Antisense strand to SEQ ID NO: 2150480
uauuuggacagacauucau

SEQ ID NO: 2150482 - RNA, 19 nt, Artificial Sequence
  Description of Artificial Sequence: Synthetic oligonucleotide
  Sense strand starting at position 1500 of SEQ ID NO: 1882829
ucaacaggguaaucaaguu

SEQ ID NO: 2150483 - RNA, 19 nt, Artificial Sequence
  Description of Artificial Sequence: Synthetic oligonucleotide
  Antisense strand to SEQ ID NO: 2150482
aacuugauuacccuguuga

SEQ ID NO: 2150484 - RNA, 19 nt, Artificial Sequence
  Description of Artificial Sequence: Synthetic oligonucleotide
  Sense strand starting at position 1692 of SEQ ID NO: 1882829
acaacagauuucugauaag

SEQ ID NO: 2150485 - RNA, 19 nt, Artificial Sequence
  Description of Artificial Sequence: Synthetic oligonucleotide
  Antisense strand to SEQ ID NO: 2150484
cuuaucagaaaucuguugu

SEQ ID NO: 2150486 - RNA, 19 nt, Artificial Sequence
  Description of Artificial Sequence: Synthetic oligonucleotide
  Sense strand starting at position 1695 of SEQ ID NO: 1882829
acagauuucugauaaguca

SEQ ID NO: 2150487 - RNA, 19 nt, Artificial Sequence
  Description of Artificial Sequence: Synthetic oligonucleotide
  Antisense strand to SEQ ID NO: 2150486
ugacuuaucagaaaucugu

SEQ ID NO: 2150488 - RNA, 19 nt, Artificial Sequence
  Description of Artificial Sequence: Synthetic oligonucleotide
  Sense strand starting at position 1828 of SEQ ID NO: 1882829
ucuguuaugcaguaugauu

SEQ ID NO: 2150489 - RNA, 19 nt, Artificial Sequence
  Description of Artificial Sequence: Synthetic oligonucleotide
  Antisense strand to SEQ ID NO: 2150488
aaucauacugcauaacaga

SEQ ID NO: 2150490 - RNA, 19 nt, Artificial Sequence
  Description of Artificial Sequence: Synthetic oligonucleotide
  Sense strand starting at position 2068 of SEQ ID NO: 1882829
ggaacacugccuugaucau

SEQ ID NO: 2150491 - RNA, 19 nt, Artificial Sequence
  Description of Artificial Sequence: Synthetic oligonucleotide
  Antisense strand to SEQ ID NO: 2150490
augaucaaggcaguguucc

SEQ ID NO: 2150492 - RNA, 19 nt, Artificial Sequence
  Description of Artificial Sequence: Synthetic oligonucleotide
  Sense strand starting at position 2087 of SEQ ID NO: 1882829
guugauagucucuaguuua

SEQ ID NO: 2150493 - RNA, 19 nt, Artificial Sequence
  Description of Artificial Sequence: Synthetic oligonucleotide
  Antisense strand to SEQ ID NO: 2150492
uaaacuagagacuaucaac

SEQ ID NO: 2150494 - RNA, 19 nt, Artificial Sequence
  Description of Artificial Sequence: Synthetic oligonucleotide
  Sense strand starting at position 2095 of SEQ ID NO: 1882829
ucucuaguuuacccagaua

SEQ ID NO: 2150495 - RNA, 19 nt, Artificial Sequence
  Description of Artificial Sequence: Synthetic oligonucleotide
  Antisense strand to SEQ ID NO: 2150494
uaucuggguaaacuagaga

SEQ ID NO: 2150496 - RNA, 19 nt, Artificial Sequence
  Description of Artificial Sequence: Synthetic oligonucleotide
  Sense strand starting at position 2098 of SEQ ID NO: 1882829
cuaguuuacccagauaucu

SEQ ID NO: 2150497 - RNA, 19 nt, Artificial Sequence
  Description of Artificial Sequence: Synthetic oligonucleotide
  Antisense strand to SEQ ID NO: 2150496
agauaucuggguaaacuag

SEQ ID NO: 2150498 - RNA, 19 nt, Artificial Sequence
  Description of Artificial Sequence: Synthetic oligonucleotide
  Sense strand starting at position 2106 of SEQ ID NO: 1882829
cccagauaucugugugaug

SEQ ID NO: 2150499 - RNA, 19 nt, Artificial Sequence
  Description of Artificial Sequence: Synthetic oligonucleotide
  Antisense strand to SEQ ID NO: 2150498
caucacacagauaucuggg

SEQ ID NO: 2150500 - RNA, 19 nt, Artificial Sequence
  Description of Artificial Sequence: Synthetic oligonucleotide
  Sense strand starting at position 2138 of SEQ ID NO: 1882829
agcuuugacuuaguaaauu

SEQ ID NO: 2150501 - RNA, 19 nt, Artificial Sequence
  Description of Artificial Sequence: Synthetic oligonucleotide
  Antisense strand to SEQ ID NO: 2150500
aauuuacuaagucaaagcu

SEQ ID NO: 2150502 - RNA, 19 nt, Artificial Sequence
  Description of Artificial Sequence: Synthetic oligonucleotide
  Sense strand starting at position 2272 of SEQ ID NO: 1882829
acccaucuugguuaucagu

SEQ ID NO: 2150503 - RNA, 19 nt, Artificial Sequence
  Description of Artificial Sequence: Synthetic oligonucleotide
  Antisense strand to SEQ ID NO: 2150502
acugauaaccaagaugggu

SEQ ID NO: 2150504 - RNA, 19 nt, Artificial Sequence
  Description of Artificial Sequence: Synthetic oligonucleotide
  Sense strand starting at position 2525 of SEQ ID NO: 1882829
cuuccucagaaguggagaa

SEQ ID NO: 2150505 - RNA, 19 nt, Artificial Sequence
  Description of Artificial Sequence: Synthetic oligonucleotide
  Antisense strand to SEQ ID NO: 2150504
uucuccacuucugaggaag

SEQ ID NO: 2150506 - RNA, 19 nt, Artificial Sequence
  Description of Artificial Sequence: Synthetic oligonucleotide
  Sense strand starting at position 2683 of SEQ ID NO: 1882829
uagugagcacuccagguau

SEQ ID NO: 2150507 - RNA, 19 nt, Artificial Sequence
  Description of Artificial Sequence: Synthetic oligonucleotide
  Antisense strand to SEQ ID NO: 2150506
auaccuggagugcucacua

SEQ ID NO: 2150508 - RNA, 19 nt, Artificial Sequence
  Description of Artificial Sequence: Synthetic oligonucleotide
  Sense strand starting at position 2718 of SEQ ID NO: 1882829
agguuuccacaucaucuau

SEQ ID NO: 2150509 - RNA, 19 nt, Artificial Sequence
  Description of Artificial Sequence: Synthetic oligonucleotide
  Antisense strand to SEQ ID NO: 2150508
auagaugauguggaaaccu

SEQ ID NO: 2150510 - RNA, 19 nt, Artificial Sequence
  Description of Artificial Sequence: Synthetic oligonucleotide
  Sense strand starting at position 2755 of SEQ ID NO: 1882829
ggaguaguguggaaguaga

SEQ ID NO: 2150511 - RNA, 19 nt, Artificial Sequence
  Description of Artificial Sequence: Synthetic oligonucleotide
  Antisense strand to SEQ ID NO: 2150510
ucuacuuccacacuacucc

SEQ ID NO: 2150512 - RNA, 19 nt, Artificial Sequence
  Description of Artificial Sequence: Synthetic oligonucleotide
  Sense strand starting at position 2858 of SEQ ID NO: 1882829
cuuauuugaugucauagaa

SEQ ID NO: 2150513 - RNA, 19 nt, Artificial Sequence
  Description of Artificial Sequence: Synthetic oligonucleotide
  Antisense strand to SEQ ID NO: 2150512
uucuaugacaucaaauaag

SEQ ID NO: 2150514 - RNA, 19 nt, Artificial Sequence
  Description of Artificial Sequence: Synthetic oligonucleotide
  Sense strand starting at position 3049 of SEQ ID NO: 1882829
auguuauugagauaggcuu

SEQ ID NO: 2150515 - RNA, 19 nt, Artificial Sequence
  Description of Artificial Sequence: Synthetic oligonucleotide
  Antisense strand to SEQ ID NO: 2150514
aagccuaucucaauaacau

SEQ ID NO: 2150516 - RNA, 19 nt, Artificial Sequence
  Description of Artificial Sequence: Synthetic oligonucleotide
  Sense strand starting at position 3068 of SEQ ID NO: 1882829
uuuacuauuugagagacuu

SEQ ID NO: 2150517 - RNA, 19 nt, Artificial Sequence
  Description of Artificial Sequence: Synthetic oligonucleotide
  Antisense strand to SEQ ID NO: 2150516
aagucucucaaauaguaaa

SEQ ID NO: 2150518 - RNA, 19 nt, Artificial Sequence
  Description of Artificial Sequence: Synthetic oligonucleotide
  Sense strand starting at position 3191 of SEQ ID NO: 1882829
cgagcaagucuauaaacaa

SEQ ID NO: 2150519 - RNA, 19 nt, Artificial Sequence
  Description of Artificial Sequence: Synthetic oligonucleotide
  Antisense strand to SEQ ID NO: 2150518
uuguuuauagacuugcucg

SEQ ID NO: 2150520 - RNA, 19 nt, Artificial Sequence
  Description of Artificial Sequence: Synthetic oligonucleotide
  Sense strand starting at position 3383 of SEQ ID NO: 1882829
gaaauaaauguacgucaaa

SEQ ID NO: 2150521 - RNA, 19 nt, Artificial Sequence
  Description of Artificial Sequence: Synthetic oligonucleotide
  Antisense strand to SEQ ID NO: 2150520
uuugacguacauuuauuuc

SEQ ID NO: 2150522 - RNA, 19 nt, Artificial Sequence
  Description of Artificial Sequence: Synthetic oligonucleotide
  Sense strand starting at position 3384 of SEQ ID NO: 1882829
aaauaaauguacgucaaag

SEQ ID NO: 2150523 - RNA, 19 nt, Artificial Sequence
  Description of Artificial Sequence: Synthetic oligonucleotide
  Antisense strand to SEQ ID NO: 2150522
cuuugacguacauuuauuu

SEQ ID NO: 2150524 - RNA, 19 nt, Artificial Sequence
  Description of Artificial Sequence: Synthetic oligonucleotide
  Sense strand starting at position 3392 of SEQ ID NO: 1882829
guacgucaaagagaaacuu

SEQ ID NO: 2150525 - RNA, 19 nt, Artificial Sequence
  Description of Artificial Sequence: Synthetic oligonucleotide
  Antisense strand to SEQ ID NO: 2150524
aaguuucucuuugacguac

SEQ ID NO: 2150526 - RNA, 19 nt, Artificial Sequence
  Description of Artificial Sequence: Synthetic oligonucleotide
  Sense strand starting at position 3588 of SEQ ID NO: 1882829
ugcacuuguaaguggaaua

SEQ ID NO: 2150527 - RNA, 19 nt, Artificial Sequence
  Description of Artificial Sequence: Synthetic oligonucleotide
  Antisense strand to SEQ ID NO: 2150526
uauuccacuuacaagugca

SEQ ID NO: 2150528 - RNA, 19 nt, Artificial Sequence
  Description of Artificial Sequence: Synthetic oligonucleotide
  Sense strand starting at position 3589 of SEQ ID NO: 1882829
gcacuuguaaguggaauau

SEQ ID NO: 2150529 - RNA, 19 nt, Artificial Sequence
  Description of Artificial Sequence: Synthetic oligonucleotide
  Antisense strand to SEQ ID NO: 2150528
auauuccacuuacaagugc

SEQ ID NO: 2150530 - RNA, 19 nt, Artificial Sequence
  Description of Artificial Sequence: Synthetic oligonucleotide
  Sense strand starting at position 3692 of SEQ ID NO: 1882829
gaacauagacuccgagcua

SEQ ID NO: 2150531 - RNA, 19 nt, Artificial Sequence
  Description of Artificial Sequence: Synthetic oligonucleotide
  Antisense strand to SEQ ID NO: 2150530
uagcucggagucuauguuc

SEQ ID NO: 2150532 - RNA, 19 nt, Artificial Sequence
  Description of Artificial Sequence: Synthetic oligonucleotide
  Sense strand starting at position 3774 of SEQ ID NO: 1882829
acuaaagccuuggcauaua

SEQ ID NO: 2150533 - RNA, 19 nt, Artificial Sequence
  Description of Artificial Sequence: Synthetic oligonucleotide
  Antisense strand to SEQ ID NO: 2150532
uauaugccaaggcuuuagu

SEQ ID NO: 2150534 - RNA, 19 nt, Artificial Sequence
  Description of Artificial Sequence: Synthetic oligonucleotide
  Sense strand starting at position 594 of SEQ ID NO: 1882830
guuggagggccugacauua

SEQ ID NO: 2150535 - RNA, 19 nt, Artificial Sequence
  Description of Artificial Sequence: Synthetic oligonucleotide
  Antisense strand to SEQ ID NO: 2150534
uaaugucaggcccuccaac

SEQ ID NO: 2150536 - RNA, 19 nt, Artificial Sequence
  Description of Artificial Sequence: Synthetic oligonucleotide
  Sense strand starting at position 627 of SEQ ID NO: 1882830
caguuaucuggaggccuca

SEQ ID NO: 2150537 - RNA, 19 nt, Artificial Sequence
  Description of Artificial Sequence: Synthetic oligonucleotide
  Antisense strand to SEQ ID NO: 2150536
ugaggccuccagauaacug

SEQ ID NO: 2150538 - RNA, 19 nt, Artificial Sequence
  Description of Artificial Sequence: Synthetic oligonucleotide
  Sense strand starting at position 643 of SEQ ID NO: 1882830
ucaccaucucccugugaug

SEQ ID NO: 2150539 - RNA, 19 nt, Artificial Sequence
  Description of Artificial Sequence: Synthetic oligonucleotide
  Antisense strand to SEQ ID NO: 2150538
caucacagggagaugguga

SEQ ID NO: 2150540 - RNA, 19 nt, Artificial Sequence
  Description of Artificial Sequence: Synthetic oligonucleotide
  Sense strand starting at position 1125 of SEQ ID NO: 1882830
cagcuaagcucgugguuga

SEQ ID NO: 2150541 - RNA, 19 nt, Artificial Sequence
  Description of Artificial Sequence: Synthetic oligonucleotide
  Antisense strand to SEQ ID NO: 2150540
ucaaccacgagcuuagcug

SEQ ID NO: 2150542 - RNA, 19 nt, Artificial Sequence
  Description of Artificial Sequence: Synthetic oligonucleotide
  Sense strand starting at position 1126 of SEQ ID NO: 1882830
agcuaagcucgugguugau

SEQ ID NO: 2150543 - RNA, 19 nt, Artificial Sequence
  Description of Artificial Sequence: Synthetic oligonucleotide
  Antisense strand to SEQ ID NO: 2150542
aucaaccacgagcuuagcu

SEQ ID NO: 2150544 - RNA, 19 nt, Artificial Sequence
  Description of Artificial Sequence: Synthetic oligonucleotide
  Sense strand starting at position 1159 of SEQ ID NO: 1882830
cagugagugugauguggau

SEQ ID NO: 2150545 - RNA, 19 nt, Artificial Sequence
  Description of Artificial Sequence: Synthetic oligonucleotide
  Antisense strand to SEQ ID NO: 2150544
auccacaucacacucacug

SEQ ID NO: 2150546 - RNA, 19 nt, Artificial Sequence
  Description of Artificial Sequence: Synthetic oligonucleotide
  Sense strand starting at position 1161 of SEQ ID NO: 1882830
gugagugugauguggauga

SEQ ID NO: 2150547 - RNA, 19 nt, Artificial Sequence
  Description of Artificial Sequence: Synthetic oligonucleotide
  Antisense strand to SEQ ID NO: 2150546
ucauccacaucacacucac

SEQ ID NO: 2150548 - RNA, 19 nt, Artificial Sequence
  Description of Artificial Sequence: Synthetic oligonucleotide
  Sense strand starting at position 1367 of SEQ ID NO: 1882830
gggcucugguugugacaga

SEQ ID NO: 2150549 - RNA, 19 nt, Artificial Sequence
  Description of Artificial Sequence: Synthetic oligonucleotide
  Antisense strand to SEQ ID NO: 2150548
ucugucacaaccagagccc

SEQ ID NO: 2150550 - RNA, 19 nt, Artificial Sequence
  Description of Artificial Sequence: Synthetic oligonucleotide
  Sense strand starting at position 1478 of SEQ ID NO: 1882830
gcgggauuauuuguccuuu

SEQ ID NO: 2150551 - RNA, 19 nt, Artificial Sequence
  Description of Artificial Sequence: Synthetic oligonucleotide
  Antisense strand to SEQ ID NO: 2150550
aaaggacaaauaaucccgc

SEQ ID NO: 2150552 - RNA, 19 nt, Artificial Sequence
  Description of Artificial Sequence: Synthetic oligonucleotide
  Sense strand starting at position 2014 of SEQ ID NO: 1882830
ccuguaguccuagguggaa

SEQ ID NO: 2150553 - RNA, 19 nt, Artificial Sequence
  Description of Artificial Sequence: Synthetic oligonucleotide
  Antisense strand to SEQ ID NO: 2150552
uuccaccuaggacuacagg

SEQ ID NO: 2150554 - RNA, 19 nt, Artificial Sequence
  Description of Artificial Sequence: Synthetic oligonucleotide
  Sense strand starting at position 2138 of SEQ ID NO: 1882830
acugaaagcuccgugugca

SEQ ID NO: 2150555 - RNA, 19 nt, Artificial Sequence
  Description of Artificial Sequence: Synthetic oligonucleotide
  Antisense strand to SEQ ID NO: 2150554
ugcacacggagcuuucagu

SEQ ID NO: 2150556 - RNA, 19 nt, Artificial Sequence
  Description of Artificial Sequence: Synthetic oligonucleotide
  Sense strand starting at position 2158 of SEQ ID NO: 1882830
acagguguguuagcuaaua

SEQ ID NO: 2150557 - RNA, 19 nt, Artificial Sequence
  Description of Artificial Sequence: Synthetic oligonucleotide
  Antisense strand to SEQ ID NO: 2150556
uauuagcuaacacaccugu

SEQ ID NO: 2150558 - RNA, 19 nt, Artificial Sequence
  Description of Artificial Sequence: Synthetic oligonucleotide
  Sense strand starting at position 2160 of SEQ ID NO: 1882830
agguguguuagcuaauaga

SEQ ID NO: 2150559 - RNA, 19 nt, Artificial Sequence
  Description of Artificial Sequence: Synthetic oligonucleotide
  Antisense strand to SEQ ID NO: 2150558
ucuauuagcuaacacaccu

SEQ ID NO: 2150560 - RNA, 19 nt, Artificial Sequence
  Description of Artificial Sequence: Synthetic oligonucleotide
  Sense strand starting at position 2163 of SEQ ID NO: 1882830
uguguuagcuaauagaaau

SEQ ID NO: 2150561 - RNA, 19 nt, Artificial Sequence
  Description of Artificial Sequence: Synthetic oligonucleotide
  Antisense strand to SEQ ID NO: 2150560
auuucuauuagcuaacaca

SEQ ID NO: 2150562 - RNA, 19 nt, Artificial Sequence
  Description of Artificial Sequence: Synthetic oligonucleotide
  Sense strand starting at position 2521 of SEQ ID NO: 1882830
uuguguuaguacucacaga

SEQ ID NO: 2150563 - RNA, 19 nt, Artificial Sequence
  Description of Artificial Sequence: Synthetic oligonucleotide
  Antisense strand to SEQ ID NO: 2150562
ucugugaguacuaacacaa

SEQ ID NO: 2150564 - RNA, 19 nt, Artificial Sequence
  Description of Artificial Sequence: Synthetic oligonucleotide
  Sense strand starting at position 2894 of SEQ ID NO: 1882830
ucuauauuggaaugucaca

SEQ ID NO: 2150565 - RNA, 19 nt, Artificial Sequence
  Description of Artificial Sequence: Synthetic oligonucleotide
  Antisense strand to SEQ ID NO: 2150564
ugugacauuccaauauaga

SEQ ID NO: 2150566 - RNA, 19 nt, Artificial Sequence
  Description of Artificial Sequence: Synthetic oligonucleotide
  Sense strand starting at position 2899 of SEQ ID NO: 1882830
auuggaaugucacauauug

SEQ ID NO: 2150567 - RNA, 19 nt, Artificial Sequence
  Description of Artificial Sequence: Synthetic oligonucleotide
  Antisense strand to SEQ ID NO: 2150566
caauaugugacauuccaau

SEQ ID NO: 2150568 - RNA, 19 nt, Artificial Sequence
  Description of Artificial Sequence: Synthetic oligonucleotide
  Sense strand starting at position 2907 of SEQ ID NO: 1882830
gucacauauuguuagaugu

SEQ ID NO: 2150569 - RNA, 19 nt, Artificial Sequence
  Description of Artificial Sequence: Synthetic oligonucleotide
  Antisense strand to SEQ ID NO: 2150568
acaucuaacaauaugugac

SEQ ID NO: 2150570 - RNA, 19 nt, Artificial Sequence
  Description of Artificial Sequence: Synthetic oligonucleotide
  Sense strand starting at position 2967 of SEQ ID NO: 1882830
gccuuugaacaguauugaa

SEQ ID NO: 2150571 - RNA, 19 nt, Artificial Sequence
  Description of Artificial Sequence: Synthetic oligonucleotide
  Antisense strand to SEQ ID NO: 2150570
uucaauacuguucaaaggc

SEQ ID NO: 2150572 - RNA, 19 nt, Artificial Sequence
  Description of Artificial Sequence: Synthetic oligonucleotide
  Sense strand starting at position 3440 of SEQ ID NO: 1882830
gcuaucuugugacaaacua

SEQ ID NO: 2150573 - RNA, 19 nt, Artificial Sequence
  Description of Artificial Sequence: Synthetic oligonucleotide
  Antisense strand to SEQ ID NO: 2150572
uaguuugucacaagauagc

SEQ ID NO: 2150574 - RNA, 19 nt, Artificial Sequence
  Description of Artificial Sequence: Synthetic oligonucleotide
  Sense strand starting at position 3690 of SEQ ID NO: 1882830
cauugucggccaggaugau

SEQ ID NO: 2150575 - RNA, 19 nt, Artificial Sequence
  Description of Artificial Sequence: Synthetic oligonucleotide
  Antisense strand to SEQ ID NO: 2150574
aucauccuggccgacaaug

SEQ ID NO: 2150576 - RNA, 19 nt, Artificial Sequence
  Description of Artificial Sequence: Synthetic oligonucleotide
  Sense strand starting at position 3696 of SEQ ID NO: 1882830
cggccaggaugaucucaaa

SEQ ID NO: 2150577 - RNA, 19 nt, Artificial Sequence
  Description of Artificial Sequence: Synthetic oligonucleotide
  Antisense strand to SEQ ID NO: 2150576
uuugagaucauccuggccg

SEQ ID NO: 2150578 - RNA, 19 nt, Artificial Sequence
  Description of Artificial Sequence: Synthetic oligonucleotide
  Sense strand starting at position 44 of SEQ ID NO: 1882831
acaggaguuagcugaaauu

SEQ ID NO: 2150579 - RNA, 19 nt, Artificial Sequence
  Description of Artificial Sequence: Synthetic oligonucleotide
  Antisense strand to SEQ ID NO: 2150578
aauuucagcuaacuccugu

SEQ ID NO: 2150580 - RNA, 19 nt, Artificial Sequence
  Description of Artificial Sequence: Synthetic oligonucleotide
  Sense strand starting at position 200 of SEQ ID NO: 1882831
cagguuaggccauguauuu

SEQ ID NO: 2150581 - RNA, 19 nt, Artificial Sequence
  Description of Artificial Sequence: Synthetic oligonucleotide
  Antisense strand to SEQ ID NO: 2150580
aaauacauggccuaaccug

SEQ ID NO: 2150582 - RNA, 19 nt, Artificial Sequence
  Description of Artificial Sequence: Synthetic oligonucleotide
  Sense strand starting at position 439 of SEQ ID NO: 1882831
gagcaaauacuuugguuag

SEQ ID NO: 2150583 - RNA, 19 nt, Artificial Sequence
  Description of Artificial Sequence: Synthetic oligonucleotide
  Antisense strand to SEQ ID NO: 2150582
cuaaccaaaguauuugcuc

SEQ ID NO: 2150584 - RNA, 19 nt, Artificial Sequence
  Description of Artificial Sequence: Synthetic oligonucleotide
  Sense strand starting at position 445 of SEQ ID NO: 1882831
auacuuugguuagcacaga

SEQ ID NO: 2150585 - RNA, 19 nt, Artificial Sequence
  Description of Artificial Sequence: Synthetic oligonucleotide
  Antisense strand to SEQ ID NO: 2150584
ucugugcuaaccaaaguau

SEQ ID NO: 2150586 - RNA, 19 nt, Artificial Sequence
  Description of Artificial Sequence: Synthetic oligonucleotide
  Sense strand starting at position 531 of SEQ ID NO: 1882831
cuccuauuauguuugagau

SEQ ID NO: 2150587 - RNA, 19 nt, Artificial Sequence
  Description of Artificial Sequence: Synthetic oligonucleotide
  Antisense strand to SEQ ID NO: 2150586
aucucaaacauaauaggag

SEQ ID NO: 2150588 - RNA, 19 nt, Artificial Sequence
  Description of Artificial Sequence: Synthetic oligonucleotide
  Sense strand starting at position 532 of SEQ ID NO: 1882831
uccuauuauguuugagaug

SEQ ID NO: 2150589 - RNA, 19 nt, Artificial Sequence
  Description of Artificial Sequence: Synthetic oligonucleotide
  Antisense strand to SEQ ID NO: 2150588
caucucaaacauaauagga

SEQ ID NO: 2150590 - RNA, 19 nt, Artificial Sequence
  Description of Artificial Sequence: Synthetic oligonucleotide
  Sense strand starting at position 537 of SEQ ID NO: 1882831
uuauguuugagauggagag

SEQ ID NO: 2150591 - RNA, 19 nt, Artificial Sequence
  Description of Artificial Sequence: Synthetic oligonucleotide
  Antisense strand to SEQ ID NO: 2150590
cucuccaucucaaacauaa

SEQ ID NO: 2150592 - RNA, 19 nt, Artificial Sequence
  Description of Artificial Sequence: Synthetic oligonucleotide
  Sense strand starting at position 538 of SEQ ID NO: 1882831
uauguuugagauggagagu

SEQ ID NO: 2150593 - RNA, 19 nt, Artificial Sequence
  Description of Artificial Sequence: Synthetic oligonucleotide
  Antisense strand to SEQ ID NO: 2150592
acucuccaucucaaacaua

SEQ ID NO: 2150594 - RNA, 19 nt, Artificial Sequence
  Description of Artificial Sequence: Synthetic oligonucleotide
  Sense strand starting at position 679 of SEQ ID NO: 1882831
guuguauaaauguauggag

SEQ ID NO: 2150595 - RNA, 19 nt, Artificial Sequence
  Description of Artificial Sequence: Synthetic oligonucleotide
  Antisense strand to SEQ ID NO: 2150594
cuccauacauuuauacaac

SEQ ID NO: 2150596 - RNA, 19 nt, Artificial Sequence
  Description of Artificial Sequence: Synthetic oligonucleotide
  Sense strand starting at position 681 of SEQ ID NO: 1882831
uguauaaauguauggagca

SEQ ID NO: 2150597 - RNA, 19 nt, Artificial Sequence
  Description of Artificial Sequence: Synthetic oligonucleotide
  Antisense strand to SEQ ID NO: 2150596
ugcuccauacauuuauaca

SEQ ID NO: 2150598 - RNA, 19 nt, Artificial Sequence
  Description of Artificial Sequence: Synthetic oligonucleotide
  Sense strand starting at position 704 of SEQ ID NO: 1882831
guaggacaauggucuuaca

SEQ ID NO: 2150599 - RNA, 19 nt, Artificial Sequence
  Description of Artificial Sequence: Synthetic oligonucleotide
  Antisense strand to SEQ ID NO: 2150598
uguaagaccauuguccuac

SEQ ID NO: 2150600 - RNA, 19 nt, Artificial Sequence
  Description of Artificial Sequence: Synthetic oligonucleotide
  Sense strand starting at position 766 of SEQ ID NO: 1882831
auucucauccuagagucuu

SEQ ID NO: 2150601 - RNA, 19 nt, Artificial Sequence
  Description of Artificial Sequence: Synthetic oligonucleotide
  Antisense strand to SEQ ID NO: 2150600
aagacucuaggaugagaau

SEQ ID NO: 2150602 - RNA, 19 nt, Artificial Sequence
  Description of Artificial Sequence: Synthetic oligonucleotide
  Sense strand starting at position 989 of SEQ ID NO: 1882831
gguaaauuaugguuaacuu

SEQ ID NO: 2150603 - RNA, 19 nt, Artificial Sequence
  Description of Artificial Sequence: Synthetic oligonucleotide
  Antisense strand to SEQ ID NO: 2150602
aaguuaaccauaauuuacc

SEQ ID NO: 2150604 - RNA, 19 nt, Artificial Sequence
  Description of Artificial Sequence: Synthetic oligonucleotide
  Sense strand starting at position 990 of SEQ ID NO: 1882831
guaaauuaugguuaacuuc

SEQ ID NO: 2150605 - RNA, 19 nt, Artificial Sequence
  Description of Artificial Sequence: Synthetic oligonucleotide
  Antisense strand to SEQ ID NO: 2150604
gaaguuaaccauaauuuac

SEQ ID NO: 2150606 - RNA, 19 nt, Artificial Sequence
  Description of Artificial Sequence: Synthetic oligonucleotide
  Sense strand starting at position 1163 of SEQ ID NO: 1882831
guguucuaaucacugauag

SEQ ID NO: 2150607 - RNA, 19 nt, Artificial Sequence
  Description of Artificial Sequence: Synthetic oligonucleotide
  Antisense strand to SEQ ID NO: 2150606
cuaucagugauuagaacac

SEQ ID NO: 2150608 - RNA, 19 nt, Artificial Sequence
  Description of Artificial Sequence: Synthetic oligonucleotide
  Sense strand starting at position 1174 of SEQ ID NO: 1882831
acugauagcuccuucugau

SEQ ID NO: 2150609 - RNA, 19 nt, Artificial Sequence
  Description of Artificial Sequence: Synthetic oligonucleotide
  Antisense strand to SEQ ID NO: 2150608
aucagaaggagcuaucagu

SEQ ID NO: 2150610 - RNA, 19 nt, Artificial Sequence
  Description of Artificial Sequence: Synthetic oligonucleotide
  Sense strand starting at position 1180 of SEQ ID NO: 1882831
agcuccuucugauuaugga

SEQ ID NO: 2150611 - RNA, 19 nt, Artificial Sequence
  Description of Artificial Sequence: Synthetic oligonucleotide
  Antisense strand to SEQ ID NO: 2150610
uccauaaucagaaggagcu

SEQ ID NO: 2150612 - RNA, 19 nt, Artificial Sequence
  Description of Artificial Sequence: Synthetic oligonucleotide
  Sense strand starting at position 1181 of SEQ ID NO: 1882831
gcuccuucugauuauggaa

SEQ ID NO: 2150613 - RNA, 19 nt, Artificial Sequence
  Description of Artificial Sequence: Synthetic oligonucleotide
  Antisense strand to SEQ ID NO: 2150612
uuccauaaucagaaggagc

SEQ ID NO: 2150614 - RNA, 19 nt, Artificial Sequence
  Description of Artificial Sequence: Synthetic oligonucleotide
  Sense strand starting at position 1275 of SEQ ID NO: 1882831
aagugaccuccaggagauu

SEQ ID NO: 2150615 - RNA, 19 nt, Artificial Sequence
  Description of Artificial Sequence: Synthetic oligonucleotide
  Antisense strand to SEQ ID NO: 2150614
aaucuccuggaggucacuu

SEQ ID NO: 2150616 - RNA, 19 nt, Artificial Sequence
  Description of Artificial Sequence: Synthetic oligonucleotide
  Sense strand starting at position 1747 of SEQ ID NO: 1882831
agccaagaaaguugaugua

SEQ ID NO: 2150617 - RNA, 19 nt, Artificial Sequence
  Description of Artificial Sequence: Synthetic oligonucleotide
  Antisense strand to SEQ ID NO: 2150616
uacaucaacuuucuuggcu

SEQ ID NO: 2150618 - RNA, 19 nt, Artificial Sequence
  Description of Artificial Sequence: Synthetic oligonucleotide
  Sense strand starting at position 1754 of SEQ ID NO: 1882831
aaaguugauguaugagcaa

SEQ ID NO: 2150619 - RNA, 19 nt, Artificial Sequence
  Description of Artificial Sequence: Synthetic oligonucleotide
  Antisense strand to SEQ ID NO: 2150618
uugcucauacaucaacuuu

SEQ ID NO: 2150620 - RNA, 19 nt, Artificial Sequence
  Description of Artificial Sequence: Synthetic oligonucleotide
  Sense strand starting at position 1763 of SEQ ID NO: 1882831
guaugagcaaaguggaaau

SEQ ID NO: 2150621 - RNA, 19 nt, Artificial Sequence
  Description of Artificial Sequence: Synthetic oligonucleotide
  Antisense strand to SEQ ID NO: 2150620
auuuccacuuugcucauac

SEQ ID NO: 2150622 - RNA, 19 nt, Artificial Sequence
  Description of Artificial Sequence: Synthetic oligonucleotide
  Sense strand starting at position 2005 of SEQ ID NO: 1882831
cuccauucugcccaggaua

SEQ ID NO: 2150623 - RNA, 19 nt, Artificial Sequence
  Description of Artificial Sequence: Synthetic oligonucleotide
  Antisense strand to SEQ ID NO: 2150622
uauccugggcagaauggag

SEQ ID NO: 2150624 - RNA, 19 nt, Artificial Sequence
  Description of Artificial Sequence: Synthetic oligonucleotide
  Sense strand starting at position 2007 of SEQ ID NO: 1882831
ccauucugcccaggauaua

SEQ ID NO: 2150625 - RNA, 19 nt, Artificial Sequence
  Description of Artificial Sequence: Synthetic oligonucleotide
  Antisense strand to SEQ ID NO: 2150624
uauauccugggcagaaugg

SEQ ID NO: 2150626 - RNA, 19 nt, Artificial Sequence
  Description of Artificial Sequence: Synthetic oligonucleotide
  Sense strand starting at position 2092 of SEQ ID NO: 1882831
cuguuaucagauugaucau

SEQ ID NO: 2150627 - RNA, 19 nt, Artificial Sequence
  Description of Artificial Sequence: Synthetic oligonucleotide
  Antisense strand to SEQ ID NO: 2150626
augaucaaucugauaacag

SEQ ID NO: 2150628 - RNA, 19 nt, Artificial Sequence
  Description of Artificial Sequence: Synthetic oligonucleotide
  Sense strand starting at position 2095 of SEQ ID NO: 1882831
uuaucagauugaucauugu

SEQ ID NO: 2150629 - RNA, 19 nt, Artificial Sequence
  Description of Artificial Sequence: Synthetic oligonucleotide
  Antisense strand to SEQ ID NO: 2150628
acaaugaucaaucugauaa

SEQ ID NO: 2150630 - RNA, 19 nt, Artificial Sequence
  Description of Artificial Sequence: Synthetic oligonucleotide
  Sense strand starting at position 2099 of SEQ ID NO: 1882831
cagauugaucauuguugua

SEQ ID NO: 2150631 - RNA, 19 nt, Artificial Sequence
  Description of Artificial Sequence: Synthetic oligonucleotide
  Antisense strand to SEQ ID NO: 2150630
uacaacaaugaucaaucug

SEQ ID NO: 2150632 - RNA, 19 nt, Artificial Sequence
  Description of Artificial Sequence: Synthetic oligonucleotide
  Sense strand starting at position 2302 of SEQ ID NO: 1882831
uguuguaagaauggaucuu

SEQ ID NO: 2150633 - RNA, 19 nt, Artificial Sequence
  Description of Artificial Sequence: Synthetic oligonucleotide
  Antisense strand to SEQ ID NO: 2150632
aagauccauucuuacaaca

SEQ ID NO: 2150634 - RNA, 19 nt, Artificial Sequence
  Description of Artificial Sequence: Synthetic oligonucleotide
  Sense strand starting at position 2461 of SEQ ID NO: 1882831
uguguucugauugaugaca

SEQ ID NO: 2150635 - RNA, 19 nt, Artificial Sequence
  Description of Artificial Sequence: Synthetic oligonucleotide
  Antisense strand to SEQ ID NO: 2150634
ugucaucaaucagaacaca

SEQ ID NO: 2150636 - RNA, 19 nt, Artificial Sequence
  Description of Artificial Sequence: Synthetic oligonucleotide
  Sense strand starting at position 2792 of SEQ ID NO: 1882831
uccugaauuugaugaagga

SEQ ID NO: 2150637 - RNA, 19 nt, Artificial Sequence
  Description of Artificial Sequence: Synthetic oligonucleotide
  Antisense strand to SEQ ID NO: 2150636
uccuucaucaaauucagga

SEQ ID NO: 2150638 - RNA, 19 nt, Artificial Sequence
  Description of Artificial Sequence: Synthetic oligonucleotide
  Sense strand starting at position 2833 of SEQ ID NO: 1882831
gcuccacuuguauaaagua

SEQ ID NO: 2150639 - RNA, 19 nt, Artificial Sequence
  Description of Artificial Sequence: Synthetic oligonucleotide
  Antisense strand to SEQ ID NO: 2150638
uacuuuauacaaguggagc

SEQ ID NO: 2150640 - RNA, 19 nt, Artificial Sequence
  Description of Artificial Sequence: Synthetic oligonucleotide
  Sense strand starting at position 2842 of SEQ ID NO: 1882831
guauaaaguacuuaucgua

SEQ ID NO: 2150641 - RNA, 19 nt, Artificial Sequence
  Description of Artificial Sequence: Synthetic oligonucleotide
  Antisense strand to SEQ ID NO: 2150640
uacgauaaguacuuuauac

SEQ ID NO: 2150642 - RNA, 19 nt, Artificial Sequence
  Description of Artificial Sequence: Synthetic oligonucleotide
  Sense strand starting at position 2975 of SEQ ID NO: 1882831
uuuggagaugaaugguguu

SEQ ID NO: 2150643 - RNA, 19 nt, Artificial Sequence
  Description of Artificial Sequence: Synthetic oligonucleotide
  Antisense strand to SEQ ID NO: 2150642
aacaccauucaucuccaaa

SEQ ID NO: 2150644 - RNA, 19 nt, Artificial Sequence
  Description of Artificial Sequence: Synthetic oligonucleotide
  Sense strand starting at position 3001 of SEQ ID NO: 1882831
guugcaugacaauaucaau

SEQ ID NO: 2150645 - RNA, 19 nt, Artificial Sequence
  Description of Artificial Sequence: Synthetic oligonucleotide
  Antisense strand to SEQ ID NO: 2150644
auugauauugucaugcaac

SEQ ID NO: 2150646 - RNA, 19 nt, Artificial Sequence
  Description of Artificial Sequence: Synthetic oligonucleotide
  Sense strand starting at position 3532 of SEQ ID NO: 1882831
ugggacuuaucccuagaau

SEQ ID NO: 2150647 - RNA, 19 nt, Artificial Sequence
  Description of Artificial Sequence: Synthetic oligonucleotide
  Antisense strand to SEQ ID NO: 2150646
auucuagggauaaguccca

SEQ ID NO: 2150648 - RNA, 19 nt, Artificial Sequence
  Description of Artificial Sequence: Synthetic oligonucleotide
  Sense strand starting at position 3666 of SEQ ID NO: 1882831
ugaagaugagagugacagu

SEQ ID NO: 2150649 - RNA, 19 nt, Artificial Sequence
  Description of Artificial Sequence: Synthetic oligonucleotide
  Antisense strand to SEQ ID NO: 2150648
acugucacucucaucuuca

SEQ ID NO: 2150650 - RNA, 19 nt, Artificial Sequence
  Description of Artificial Sequence: Synthetic oligonucleotide
  Sense strand starting at position 3728 of SEQ ID NO: 1882831
ggcauaugaaagggaguuu

SEQ ID NO: 2150651 - RNA, 19 nt, Artificial Sequence
  Description of Artificial Sequence: Synthetic oligonucleotide
  Antisense strand to SEQ ID NO: 2150650
aaacucccuuucauaugcc

SEQ ID NO: 2150652 - RNA, 19 nt, Artificial Sequence
  Description of Artificial Sequence: Synthetic oligonucleotide
  Sense strand starting at position 3797 of SEQ ID NO: 1882831
accauuagguaucuaaguu

SEQ ID NO: 2150653 - RNA, 19 nt, Artificial Sequence
  Description of Artificial Sequence: Synthetic oligonucleotide
  Antisense strand to SEQ ID NO: 2150652
aacuuagauaccuaauggu

SEQ ID NO: 2150654 - RNA, 19 nt, Artificial Sequence
  Description of Artificial Sequence: Synthetic oligonucleotide
  Sense strand starting at position 3801 of SEQ ID NO: 1882831
uuagguaucuaaguuacag

SEQ ID NO: 2150655 - RNA, 19 nt, Artificial Sequence
  Description of Artificial Sequence: Synthetic oligonucleotide
  Antisense strand to SEQ ID NO: 2150654
cuguaacuuagauaccuaa

SEQ ID NO: 2150656 - RNA, 19 nt, Artificial Sequence
  Description of Artificial Sequence: Synthetic oligonucleotide
  Sense strand starting at position 3851 of SEQ ID NO: 1882831
gcacuuuggcuacaccaaa

SEQ ID NO: 2150657 - RNA, 19 nt, Artificial Sequence
  Description of Artificial Sequence: Synthetic oligonucleotide
  Antisense strand to SEQ ID NO: 2150656
uuugguguagccaaagugc

SEQ ID NO: 2150658 - RNA, 19 nt, Artificial Sequence
  Description of Artificial Sequence: Synthetic oligonucleotide
  Sense strand starting at position 33 of SEQ ID NO: 1882832
gagaaccaucaccguguua

SEQ ID NO: 2150659 - RNA, 19 nt, Artificial Sequence
  Description of Artificial Sequence: Synthetic oligonucleotide
  Antisense strand to SEQ ID NO: 2150658
uaacacggugaugguucuc

SEQ ID NO: 2150660 - RNA, 19 nt, Artificial Sequence
  Description of Artificial Sequence: Synthetic oligonucleotide
  Sense strand starting at position 35 of SEQ ID NO: 1882832
gaaccaucaccguguuaaa

SEQ ID NO: 2150661 - RNA, 19 nt, Artificial Sequence
  Description of Artificial Sequence: Synthetic oligonucleotide
  Antisense strand to SEQ ID NO: 2150660
uuuaacacggugaugguuc

SEQ ID NO: 2150662 - RNA, 19 nt, Artificial Sequence
  Description of Artificial Sequence: Synthetic oligonucleotide
  Sense strand starting at position 44 of SEQ ID NO: 1882832
ccguguuaaacuggaaaca

SEQ ID NO: 2150663 - RNA, 19 nt, Artificial Sequence
  Description of Artificial Sequence: Synthetic oligonucleotide
  Antisense strand to SEQ ID NO: 2150662
uguuuccaguuuaacacgg

SEQ ID NO: 2150664 - RNA, 19 nt, Artificial Sequence
  Description of Artificial Sequence: Synthetic oligonucleotide
  Sense strand starting at position 292 of SEQ ID NO: 1882832
gaaggugacgcuuaagauc

SEQ ID NO: 2150665 - RNA, 19 nt, Artificial Sequence
  Description of Artificial Sequence: Synthetic oligonucleotide
  Antisense strand to SEQ ID NO: 2150664
gaucuuaagcgucaccuuc

SEQ ID NO: 2150666 - RNA, 19 nt, Artificial Sequence
  Description of Artificial Sequence: Synthetic oligonucleotide
  Sense strand starting at position 530 of SEQ ID NO: 1882832
aagcaaagugcugaguaga

SEQ ID NO: 2150667 - RNA, 19 nt, Artificial Sequence
  Description of Artificial Sequence: Synthetic oligonucleotide
  Antisense strand to SEQ ID NO: 2150666
ucuacucagcacuuugcuu

SEQ ID NO: 2150668 - RNA, 19 nt, Artificial Sequence
  Description of Artificial Sequence: Synthetic oligonucleotide
  Sense strand starting at position 606 of SEQ ID NO: 1882832
cagugaguaucuccgaaca

SEQ ID NO: 2150669 - RNA, 19 nt, Artificial Sequence
  Description of Artificial Sequence: Synthetic oligonucleotide
  Antisense strand to SEQ ID NO: 2150668
uguucggagauacucacug

SEQ ID NO: 2150670 - RNA, 19 nt, Artificial Sequence
  Description of Artificial Sequence: Synthetic oligonucleotide
  Sense strand starting at position 790 of SEQ ID NO: 1882832
guucuugugaacgauggga

SEQ ID NO: 2150671 - RNA, 19 nt, Artificial Sequence
  Description of Artificial Sequence: Synthetic oligonucleotide
  Antisense strand to SEQ ID NO: 2150670
ucccaucguucacaagaac

SEQ ID NO: 2150672 - RNA, 19 nt, Artificial Sequence
  Description of Artificial Sequence: Synthetic oligonucleotide
  Sense strand starting at position 792 of SEQ ID NO: 1882832
ucuugugaacgaugggaau

SEQ ID NO: 2150673 - RNA, 19 nt, Artificial Sequence
  Description of Artificial Sequence: Synthetic oligonucleotide
  Antisense strand to SEQ ID NO: 2150672
auucccaucguucacaaga

SEQ ID NO: 2150674 - RNA, 19 nt, Artificial Sequence
  Description of Artificial Sequence: Synthetic oligonucleotide
  Sense strand starting at position 2265 of SEQ ID NO: 1882832
aguugcggucaucagagaa

SEQ ID NO: 2150675 - RNA, 19 nt, Artificial Sequence
  Description of Artificial Sequence: Synthetic oligonucleotide
  Antisense strand to SEQ ID NO: 2150674
uucucugaugaccgcaacu

SEQ ID NO: 2150676 - RNA, 19 nt, Artificial Sequence
  Description of Artificial Sequence: Synthetic oligonucleotide
  Sense strand starting at position 2269 of SEQ ID NO: 1882832
gcggucaucagagaacuuc

SEQ ID NO: 2150677 - RNA, 19 nt, Artificial Sequence
  Description of Artificial Sequence: Synthetic oligonucleotide
  Antisense strand to SEQ ID NO: 2150676
gaaguucucugaugaccgc

SEQ ID NO: 2150678 - RNA, 19 nt, Artificial Sequence
  Description of Artificial Sequence: Synthetic oligonucleotide
  Sense strand starting at position 2372 of SEQ ID NO: 1882832
aggacuaauuaucagagga

SEQ ID NO: 2150679 - RNA, 19 nt, Artificial Sequence
  Description of Artificial Sequence: Synthetic oligonucleotide
  Antisense strand to SEQ ID NO: 2150678
uccucugauaauuaguccu

SEQ ID NO: 2150680 - RNA, 19 nt, Artificial Sequence
  Description of Artificial Sequence: Synthetic oligonucleotide
  Sense strand starting at position 2374 of SEQ ID NO: 1882832
gacuaauuaucagaggaga

SEQ ID NO: 2150681 - RNA, 19 nt, Artificial Sequence
  Description of Artificial Sequence: Synthetic oligonucleotide
  Antisense strand to SEQ ID NO: 2150680
ucuccucugauaauuaguc

SEQ ID NO: 2150682 - RNA, 19 nt, Artificial Sequence
  Description of Artificial Sequence: Synthetic oligonucleotide
  Sense strand starting at position 2388 of SEQ ID NO: 1882832
ggagacacucuguguuacu

SEQ ID NO: 2150683 - RNA, 19 nt, Artificial Sequence
  Description of Artificial Sequence: Synthetic oligonucleotide
  Antisense strand to SEQ ID NO: 2150682
aguaacacagagugucucc

SEQ ID NO: 2150684 - RNA, 19 nt, Artificial Sequence
  Description of Artificial Sequence: Synthetic oligonucleotide
  Sense strand starting at position 2452 of SEQ ID NO: 1882832
ggguguccuguuuacagaa

SEQ ID NO: 2150685 - RNA, 19 nt, Artificial Sequence
  Description of Artificial Sequence: Synthetic oligonucleotide
  Antisense strand to SEQ ID NO: 2150684
uucuguaaacaggacaccc

SEQ ID NO: 2150686 - RNA, 19 nt, Artificial Sequence
  Description of Artificial Sequence: Synthetic oligonucleotide
  Sense strand starting at position 2500 of SEQ ID NO: 1882832
gggcaucgucuguacacaa

SEQ ID NO: 2150687 - RNA, 19 nt, Artificial Sequence
  Description of Artificial Sequence: Synthetic oligonucleotide
  Antisense strand to SEQ ID NO: 2150686
uuguguacagacgaugccc

SEQ ID NO: 2150688 - RNA, 19 nt, Artificial Sequence
  Description of Artificial Sequence: Synthetic oligonucleotide
  Sense strand starting at position 2554 of SEQ ID NO: 1882832
aggacuaacuugccuuuaa

SEQ ID NO: 2150689 - RNA, 19 nt, Artificial Sequence
  Description of Artificial Sequence: Synthetic oligonucleotide
  Antisense strand to SEQ ID NO: 2150688
uuaaaggcaaguuaguccu

SEQ ID NO: 2150690 - RNA, 19 nt, Artificial Sequence
  Description of Artificial Sequence: Synthetic oligonucleotide
  Sense strand starting at position 2555 of SEQ ID NO: 1882832
ggacuaacuugccuuuaac

SEQ ID NO: 2150691 - RNA, 19 nt, Artificial Sequence
  Description of Artificial Sequence: Synthetic oligonucleotide
  Antisense strand to SEQ ID NO: 2150690
guuaaaggcaaguuagucc

SEQ ID NO: 2150692 - RNA, 19 nt, Artificial Sequence
  Description of Artificial Sequence: Synthetic oligonucleotide
  Sense strand starting at position 2581 of SEQ ID NO: 1882832
uguagauaaguugguuaua

SEQ ID NO: 2150693 - RNA, 19 nt, Artificial Sequence
  Description of Artificial Sequence: Synthetic oligonucleotide
  Antisense strand to SEQ ID NO: 2150692
uauaaccaacuuaucuaca

SEQ ID NO: 2150694 - RNA, 19 nt, Artificial Sequence
  Description of Artificial Sequence: Synthetic oligonucleotide
  Sense strand starting at position 2582 of SEQ ID NO: 1882832
guagauaaguugguuauaa

SEQ ID NO: 2150695 - RNA, 19 nt, Artificial Sequence
  Description of Artificial Sequence: Synthetic oligonucleotide
  Antisense strand to SEQ ID NO: 2150694
uuauaaccaacuuaucuac

SEQ ID NO: 2150696 - RNA, 19 nt, Artificial Sequence
  Description of Artificial Sequence: Synthetic oligonucleotide
  Sense strand starting at position 2590 of SEQ ID NO: 1882832
guugguuauaaugggagua

SEQ ID NO: 2150697 - RNA, 19 nt, Artificial Sequence
  Description of Artificial Sequence: Synthetic oligonucleotide
  Antisense strand to SEQ ID NO: 2150696
uacucccauuauaaccaac

SEQ ID NO: 2150698 - RNA, 19 nt, Artificial Sequence
  Description of Artificial Sequence: Synthetic oligonucleotide
  Sense strand starting at position 2595 of SEQ ID NO: 1882832
uuauaaugggaguagucuu

SEQ ID NO: 2150699 - RNA, 19 nt, Artificial Sequence
  Description of Artificial Sequence: Synthetic oligonucleotide
  Antisense strand to SEQ ID NO: 2150698
aagacuacucccauuauaa

SEQ ID NO: 2150700 - RNA, 19 nt, Artificial Sequence
  Description of Artificial Sequence: Synthetic oligonucleotide
  Sense strand starting at position 2665 of SEQ ID NO: 1882832
gcucaaucugaaugaauua

SEQ ID NO: 2150701 - RNA, 19 nt, Artificial Sequence
  Description of Artificial Sequence: Synthetic oligonucleotide
  Antisense strand to SEQ ID NO: 2150700
uaauucauucagauugagc

SEQ ID NO: 2150702 - RNA, 19 nt, Artificial Sequence
  Description of Artificial Sequence: Synthetic oligonucleotide
  Sense strand starting at position 2696 of SEQ ID NO: 1882832
ggauauuaaugcuuuaagu

SEQ ID NO: 2150703 - RNA, 19 nt, Artificial Sequence
  Description of Artificial Sequence: Synthetic oligonucleotide
  Antisense strand to SEQ ID NO: 2150702
acuuaaagcauuaauaucc

SEQ ID NO: 2150704 - RNA, 19 nt, Artificial Sequence
  Description of Artificial Sequence: Synthetic oligonucleotide
  Sense strand starting at position 2753 of SEQ ID NO: 1882832
auugaucccucacugagau

SEQ ID NO: 2150705 - RNA, 19 nt, Artificial Sequence
  Description of Artificial Sequence: Synthetic oligonucleotide
  Antisense strand to SEQ ID NO: 2150704
aucucagugagggaucaau

SEQ ID NO: 2150706 - RNA, 19 nt, Artificial Sequence
  Description of Artificial Sequence: Synthetic oligonucleotide
  Sense strand starting at position 2818 of SEQ ID NO: 1882832
cagcuuucuguccaggcaa

SEQ ID NO: 2150707 - RNA, 19 nt, Artificial Sequence
  Description of Artificial Sequence: Synthetic oligonucleotide
  Antisense strand to SEQ ID NO: 2150706
uugccuggacagaaagcug

SEQ ID NO: 2150708 - RNA, 19 nt, Artificial Sequence
  Description of Artificial Sequence: Synthetic oligonucleotide
  Sense strand starting at position 2856 of SEQ ID NO: 1882832
ccuuaauguggagagguua

SEQ ID NO: 2150709 - RNA, 19 nt, Artificial Sequence
  Description of Artificial Sequence: Synthetic oligonucleotide
  Antisense strand to SEQ ID NO: 2150708
uaaccucuccacauuaagg

SEQ ID NO: 2150710 - RNA, 19 nt, Artificial Sequence
  Description of Artificial Sequence: Synthetic oligonucleotide
  Sense strand starting at position 2864 of SEQ ID NO: 1882832
uggagagguuaacucuuua

SEQ ID NO: 2150711 - RNA, 19 nt, Artificial Sequence
  Description of Artificial Sequence: Synthetic oligonucleotide
  Antisense strand to SEQ ID NO: 2150710
uaaagaguuaaccucucca

SEQ ID NO: 2150712 - RNA, 19 nt, Artificial Sequence
  Description of Artificial Sequence: Synthetic oligonucleotide
  Sense strand starting at position 2868 of SEQ ID NO: 1882832
gagguuaacucuuuacgaa

SEQ ID NO: 2150713 - RNA, 19 nt, Artificial Sequence
  Description of Artificial Sequence: Synthetic oligonucleotide
  Antisense strand to SEQ ID NO: 2150712
uucguaaagaguuaaccuc

SEQ ID NO: 2150714 - RNA, 19 nt, Artificial Sequence
  Description of Artificial Sequence: Synthetic oligonucleotide
  Sense strand starting at position 2869 of SEQ ID NO: 1882832
agguuaacucuuuacgaaa

SEQ ID NO: 2150715 - RNA, 19 nt, Artificial Sequence
  Description of Artificial Sequence: Synthetic oligonucleotide
  Antisense strand to SEQ ID NO: 2150714
uuucguaaagaguuaaccu

SEQ ID NO: 2150716 - RNA, 19 nt, Artificial Sequence
  Description of Artificial Sequence: Synthetic oligonucleotide
  Sense strand starting at position 2968 of SEQ ID NO: 1882832
agcauaugagaagguguuu

SEQ ID NO: 2150717 - RNA, 19 nt, Artificial Sequence
  Description of Artificial Sequence: Synthetic oligonucleotide
  Antisense strand to SEQ ID NO: 2150716
aaacaccuucucauaugcu

SEQ ID NO: 2150718 - RNA, 19 nt, Artificial Sequence
  Description of Artificial Sequence: Synthetic oligonucleotide
  Sense strand starting at position 3013 of SEQ ID NO: 1882832
ucaaauguaaggugguaua

SEQ ID NO: 2150719 - RNA, 19 nt, Artificial Sequence
  Description of Artificial Sequence: Synthetic oligonucleotide
  Antisense strand to SEQ ID NO: 2150718
uauaccaccuuacauuuga

SEQ ID NO: 2150720 - RNA, 19 nt, Artificial Sequence
  Description of Artificial Sequence: Synthetic oligonucleotide
  Sense strand starting at position 3031 of SEQ ID NO: 1882832
accagauuggauuguugga

SEQ ID NO: 2150721 - RNA, 19 nt, Artificial Sequence
  Description of Artificial Sequence: Synthetic oligonucleotide
  Antisense strand to SEQ ID NO: 2150720
uccaacaauccaaucuggu

SEQ ID NO: 2150722 - RNA, 19 nt, Artificial Sequence
  Description of Artificial Sequence: Synthetic oligonucleotide
  Sense strand starting at position 3062 of SEQ ID NO: 1882832
uaaguaauaggacgaauca

SEQ ID NO: 2150723 - RNA, 19 nt, Artificial Sequence
  Description of Artificial Sequence: Synthetic oligonucleotide
  Antisense strand to SEQ ID NO: 2150722
ugauucguccuauuacuua

SEQ ID NO: 2150724 - RNA, 19 nt, Artificial Sequence
  Description of Artificial Sequence: Synthetic oligonucleotide
  Sense strand starting at position 3080 of SEQ ID NO: 1882832
augaguuuaggaugaguuc

SEQ ID NO: 2150725 - RNA, 19 nt, Artificial Sequence
  Description of Artificial Sequence: Synthetic oligonucleotide
  Antisense strand to SEQ ID NO: 2150724
gaacucauccuaaacucau

SEQ ID NO: 2150726 - RNA, 19 nt, Artificial Sequence
  Description of Artificial Sequence: Synthetic oligonucleotide
  Sense strand starting at position 3083 of SEQ ID NO: 1882832
aguuuaggaugaguucuua

SEQ ID NO: 2150727 - RNA, 19 nt, Artificial Sequence
  Description of Artificial Sequence: Synthetic oligonucleotide
  Antisense strand to SEQ ID NO: 2150726
uaagaacucauccuaaacu

SEQ ID NO: 2150728 - RNA, 19 nt, Artificial Sequence
  Description of Artificial Sequence: Synthetic oligonucleotide
  Sense strand starting at position 3201 of SEQ ID NO: 1882832
gucaccaaguccuuaaauu

SEQ ID NO: 2150729 - RNA, 19 nt, Artificial Sequence
  Description of Artificial Sequence: Synthetic oligonucleotide
  Antisense strand to SEQ ID NO: 2150728
aauuuaaggacuuggugac

SEQ ID NO: 2150730 - RNA, 19 nt, Artificial Sequence
  Description of Artificial Sequence: Synthetic oligonucleotide
  Sense strand starting at position 3408 of SEQ ID NO: 1882832
uccagcuaucuuuaggaaa

SEQ ID NO: 2150731 - RNA, 19 nt, Artificial Sequence
  Description of Artificial Sequence: Synthetic oligonucleotide
  Antisense strand to SEQ ID NO: 2150730
uuuccuaaagauagcugga

SEQ ID NO: 2150732 - RNA, 19 nt, Artificial Sequence
  Description of Artificial Sequence: Synthetic oligonucleotide
  Sense strand starting at position 3467 of SEQ ID NO: 1882832
uuugcucaguuaucugaaa

SEQ ID NO: 2150733 - RNA, 19 nt, Artificial Sequence
  Description of Artificial Sequence: Synthetic oligonucleotide
  Antisense strand to SEQ ID NO: 2150732
uuucagauaacugagcaaa

SEQ ID NO: 2150734 - RNA, 19 nt, Artificial Sequence
  Description of Artificial Sequence: Synthetic oligonucleotide
  Sense strand starting at position 3468 of SEQ ID NO: 1882832
uugcucaguuaucugaaau

SEQ ID NO: 2150735 - RNA, 19 nt, Artificial Sequence
  Description of Artificial Sequence: Synthetic oligonucleotide
  Antisense strand to SEQ ID NO: 2150734
auuucagauaacugagcaa

SEQ ID NO: 2150736 - RNA, 19 nt, Artificial Sequence
  Description of Artificial Sequence: Synthetic oligonucleotide
  Sense strand starting at position 3950 of SEQ ID NO: 1882832
gggaaugcuuaucugaaau

SEQ ID NO: 2150737 - RNA, 19 nt, Artificial Sequence
  Description of Artificial Sequence: Synthetic oligonucleotide
  Antisense strand to SEQ ID NO: 2150736
auuucagauaagcauuccc

SEQ ID NO: 2150738 - RNA, 19 nt, Artificial Sequence
  Description of Artificial Sequence: Synthetic oligonucleotide
  Sense strand starting at position 141 of SEQ ID NO: 1882833
gccagagggaaguauguau

SEQ ID NO: 2150739 - RNA, 19 nt, Artificial Sequence
  Description of Artificial Sequence: Synthetic oligonucleotide
  Antisense strand to SEQ ID NO: 2150738
auacauacuucccucuggc

SEQ ID NO: 2150740 - RNA, 19 nt, Artificial Sequence
  Description of Artificial Sequence: Synthetic oligonucleotide
  Sense strand starting at position 148 of SEQ ID NO: 1882833
ggaaguauguaucugaaau

SEQ ID NO: 2150741 - RNA, 19 nt, Artificial Sequence
  Description of Artificial Sequence: Synthetic oligonucleotide
  Antisense strand to SEQ ID NO: 2150740
auuucagauacauacuucc

SEQ ID NO: 2150742 - RNA, 19 nt, Artificial Sequence
  Description of Artificial Sequence: Synthetic oligonucleotide
  Sense strand starting at position 535 of SEQ ID NO: 1882833
cucacauuguccucaggau

SEQ ID NO: 2150743 - RNA, 19 nt, Artificial Sequence
  Description of Artificial Sequence: Synthetic oligonucleotide
  Antisense strand to SEQ ID NO: 2150742
auccugaggacaaugugag

SEQ ID NO: 2150744 - RNA, 19 nt, Artificial Sequence
  Description of Artificial Sequence: Synthetic oligonucleotide
  Sense strand starting at position 536 of SEQ ID NO: 1882833
ucacauuguccucaggauu

SEQ ID NO: 2150745 - RNA, 19 nt, Artificial Sequence
  Description of Artificial Sequence: Synthetic oligonucleotide
  Antisense strand to SEQ ID NO: 2150744
aauccugaggacaauguga

SEQ ID NO: 2150746 - RNA, 19 nt, Artificial Sequence
  Description of Artificial Sequence: Synthetic oligonucleotide
  Sense strand starting at position 2033 of SEQ ID NO: 1882833
ccuagcuucgaugaguacu

SEQ ID NO: 2150747 - RNA, 19 nt, Artificial Sequence
  Description of Artificial Sequence: Synthetic oligonucleotide
  Antisense strand to SEQ ID NO: 2150746
aguacucaucgaagcuagg

SEQ ID NO: 2150748 - RNA, 19 nt, Artificial Sequence
  Description of Artificial Sequence: Synthetic oligonucleotide
  Sense strand starting at position 2041 of SEQ ID NO: 1882833
cgaugaguacuguggauuc

SEQ ID NO: 2150749 - RNA, 19 nt, Artificial Sequence
  Description of Artificial Sequence: Synthetic oligonucleotide
  Antisense strand to SEQ ID NO: 2150748
gaauccacaguacucaucg

SEQ ID NO: 2150750 - RNA, 19 nt, Artificial Sequence
  Description of Artificial Sequence: Synthetic oligonucleotide
  Sense strand starting at position 2043 of SEQ ID NO: 1882833
augaguacuguggauucua

SEQ ID NO: 2150751 - RNA, 19 nt, Artificial Sequence
  Description of Artificial Sequence: Synthetic oligonucleotide
  Antisense strand to SEQ ID NO: 2150750
uagaauccacaguacucau

SEQ ID NO: 2150752 - RNA, 19 nt, Artificial Sequence
  Description of Artificial Sequence: Synthetic oligonucleotide
  Sense strand starting at position 2224 of SEQ ID NO: 1882833
gggaauucggaguaugcaa

SEQ ID NO: 2150753 - RNA, 19 nt, Artificial Sequence
  Description of Artificial Sequence: Synthetic oligonucleotide
  Antisense strand to SEQ ID NO: 2150752
uugcauacuccgaauuccc

SEQ ID NO: 2150754 - RNA, 19 nt, Artificial Sequence
  Description of Artificial Sequence: Synthetic oligonucleotide
  Sense strand starting at position 2226 of SEQ ID NO: 1882833
gaauucggaguaugcaaua

SEQ ID NO: 2150755 - RNA, 19 nt, Artificial Sequence
  Description of Artificial Sequence: Synthetic oligonucleotide
  Antisense strand to SEQ ID NO: 2150754
uauugcauacuccgaauuc

SEQ ID NO: 2150756 - RNA, 19 nt, Artificial Sequence
  Description of Artificial Sequence: Synthetic oligonucleotide
  Sense strand starting at position 2301 of SEQ ID NO: 1882833
uucuaauuacgguaguauu

SEQ ID NO: 2150757 - RNA, 19 nt, Artificial Sequence
  Description of Artificial Sequence: Synthetic oligonucleotide
  Antisense strand to SEQ ID NO: 2150756
aauacuaccguaauuagaa

SEQ ID NO: 2150758 - RNA, 19 nt, Artificial Sequence
  Description of Artificial Sequence: Synthetic oligonucleotide
  Sense strand starting at position 2403 of SEQ ID NO: 1882833
ggugaagaauugccuaggu

SEQ ID NO: 2150759 - RNA, 19 nt, Artificial Sequence
  Description of Artificial Sequence: Synthetic oligonucleotide
  Antisense strand to SEQ ID NO: 2150758
accuaggcaauucuucacc

SEQ ID NO: 2150760 - RNA, 19 nt, Artificial Sequence
  Description of Artificial Sequence: Synthetic oligonucleotide
  Sense strand starting at position 2408 of SEQ ID NO: 1882833
agaauugccuagguaaggu

SEQ ID NO: 2150761 - RNA, 19 nt, Artificial Sequence
  Description of Artificial Sequence: Synthetic oligonucleotide
  Antisense strand to SEQ ID NO: 2150760
accuuaccuaggcaauucu

SEQ ID NO: 2150762 - RNA, 19 nt, Artificial Sequence
  Description of Artificial Sequence: Synthetic oligonucleotide
  Sense strand starting at position 2455 of SEQ ID NO: 1882833
uuggaaagcuuucuagucu

SEQ ID NO: 2150763 - RNA, 19 nt, Artificial Sequence
  Description of Artificial Sequence: Synthetic oligonucleotide
  Antisense strand to SEQ ID NO: 2150762
agacuagaaagcuuuccaa

SEQ ID NO: 2150764 - RNA, 19 nt, Artificial Sequence
  Description of Artificial Sequence: Synthetic oligonucleotide
  Sense strand starting at position 2565 of SEQ ID NO: 1882833
cucauuaauuuaugaguga

SEQ ID NO: 2150765 - RNA, 19 nt, Artificial Sequence
  Description of Artificial Sequence: Synthetic oligonucleotide
  Antisense strand to SEQ ID NO: 2150764
ucacucauaaauuaaugag

SEQ ID NO: 2150766 - RNA, 19 nt, Artificial Sequence
  Description of Artificial Sequence: Synthetic oligonucleotide
  Sense strand starting at position 2608 of SEQ ID NO: 1882833
acaaguauuugagugcuuu

SEQ ID NO: 2150767 - RNA, 19 nt, Artificial Sequence
  Description of Artificial Sequence: Synthetic oligonucleotide
  Antisense strand to SEQ ID NO: 2150766
aaagcacucaaauacuugu

SEQ ID NO: 2150768 - RNA, 19 nt, Artificial Sequence
  Description of Artificial Sequence: Synthetic oligonucleotide
  Sense strand starting at position 2688 of SEQ ID NO: 1882833
aauggauugccuugugagg

SEQ ID NO: 2150769 - RNA, 19 nt, Artificial Sequence
  Description of Artificial Sequence: Synthetic oligonucleotide
  Antisense strand to SEQ ID NO: 2150768
ccucacaaggcaauccauu

SEQ ID NO: 2150770 - RNA, 19 nt, Artificial Sequence
  Description of Artificial Sequence: Synthetic oligonucleotide
  Sense strand starting at position 2718 of SEQ ID NO: 1882833
gugugcacugccuauuuaa

SEQ ID NO: 2150771 - RNA, 19 nt, Artificial Sequence
  Description of Artificial Sequence: Synthetic oligonucleotide
  Antisense strand to SEQ ID NO: 2150770
uuaaauaggcagugcacac

SEQ ID NO: 2150772 - RNA, 19 nt, Artificial Sequence
  Description of Artificial Sequence: Synthetic oligonucleotide
  Sense strand starting at position 2729 of SEQ ID NO: 1882833
cuauuuaauugacgaucaa

SEQ ID NO: 2150773 - RNA, 19 nt, Artificial Sequence
  Description of Artificial Sequence: Synthetic oligonucleotide
  Antisense strand to SEQ ID NO: 2150772
uugaucgucaauuaaauag

SEQ ID NO: 2150774 - RNA, 19 nt, Artificial Sequence
  Description of Artificial Sequence: Synthetic oligonucleotide
  Sense strand starting at position 2741 of SEQ ID NO: 1882833
cgaucaaagucaguugagu

SEQ ID NO: 2150775 - RNA, 19 nt, Artificial Sequence
  Description of Artificial Sequence: Synthetic oligonucleotide
  Antisense strand to SEQ ID NO: 2150774
acucaacugacuuugaucg

SEQ ID NO: 2150776 - RNA, 19 nt, Artificial Sequence
  Description of Artificial Sequence: Synthetic oligonucleotide
  Sense strand starting at position 2743 of SEQ ID NO: 1882833
aucaaagucaguugaguuu

SEQ ID NO: 2150777 - RNA, 19 nt, Artificial Sequence
  Description of Artificial Sequence: Synthetic oligonucleotide
  Antisense strand to SEQ ID NO: 2150776
aaacucaacugacuuugau

SEQ ID NO: 2150778 - RNA, 19 nt, Artificial Sequence
  Description of Artificial Sequence: Synthetic oligonucleotide
  Sense strand starting at position 2862 of SEQ ID NO: 1882833
gggaaaucaugauaaauag

SEQ ID NO: 2150779 - RNA, 19 nt, Artificial Sequence
  Description of Artificial Sequence: Synthetic oligonucleotide
  Antisense strand to SEQ ID NO: 2150778
cuauuuaucaugauuuccc

SEQ ID NO: 2150780 - RNA, 19 nt, Artificial Sequence
  Description of Artificial Sequence: Synthetic oligonucleotide
  Sense strand starting at position 3050 of SEQ ID NO: 1882833
guccauucuguuggaggau

SEQ ID NO: 2150781 - RNA, 19 nt, Artificial Sequence
  Description of Artificial Sequence: Synthetic oligonucleotide
  Antisense strand to SEQ ID NO: 2150780
auccuccaacagaauggac

SEQ ID NO: 2150782 - RNA, 19 nt, Artificial Sequence
  Description of Artificial Sequence: Synthetic oligonucleotide
  Sense strand starting at position 3053 of SEQ ID NO: 1882833
cauucuguuggaggauaga

SEQ ID NO: 2150783 - RNA, 19 nt, Artificial Sequence
  Description of Artificial Sequence: Synthetic oligonucleotide
  Antisense strand to SEQ ID NO: 2150782
ucuauccuccaacagaaug

SEQ ID NO: 2150784 - RNA, 19 nt, Artificial Sequence
  Description of Artificial Sequence: Synthetic oligonucleotide
  Sense strand starting at position 3107 of SEQ ID NO: 1882833
agacuaguuccaggaccaa

SEQ ID NO: 2150785 - RNA, 19 nt, Artificial Sequence
  Description of Artificial Sequence: Synthetic oligonucleotide
  Antisense strand to SEQ ID NO: 2150784
uugguccuggaacuagucu

SEQ ID NO: 2150786 - RNA, 19 nt, Artificial Sequence
  Description of Artificial Sequence: Synthetic oligonucleotide
  Sense strand starting at position 3371 of SEQ ID NO: 1882833
cagcgaauuagucagagga

SEQ ID NO: 2150787 - RNA, 19 nt, Artificial Sequence
  Description of Artificial Sequence: Synthetic oligonucleotide
  Antisense strand to SEQ ID NO: 2150786
uccucugacuaauucgcug

SEQ ID NO: 2150788 - RNA, 19 nt, Artificial Sequence
  Description of Artificial Sequence: Synthetic oligonucleotide
  Sense strand starting at position 3414 of SEQ ID NO: 1882833
ugaagcaauguggguaaau

SEQ ID NO: 2150789 - RNA, 19 nt, Artificial Sequence
  Description of Artificial Sequence: Synthetic oligonucleotide
  Antisense strand to SEQ ID NO: 2150788
auuuacccacauugcuuca

SEQ ID NO: 2150790 - RNA, 19 nt, Artificial Sequence
  Description of Artificial Sequence: Synthetic oligonucleotide
  Sense strand starting at position 3415 of SEQ ID NO: 1882833
gaagcaauguggguaaauu

SEQ ID NO: 2150791 - RNA, 19 nt, Artificial Sequence
  Description of Artificial Sequence: Synthetic oligonucleotide
  Antisense strand to SEQ ID NO: 2150790
aauuuacccacauugcuuc

SEQ ID NO: 2150792 - RNA, 19 nt, Artificial Sequence
  Description of Artificial Sequence: Synthetic oligonucleotide
  Sense strand starting at position 3416 of SEQ ID NO: 1882833
aagcaauguggguaaauuc

SEQ ID NO: 2150793 - RNA, 19 nt, Artificial Sequence
  Description of Artificial Sequence: Synthetic oligonucleotide
  Antisense strand to SEQ ID NO: 2150792
gaauuuacccacauugcuu

SEQ ID NO: 2150794 - RNA, 19 nt, Artificial Sequence
  Description of Artificial Sequence: Synthetic oligonucleotide
  Sense strand starting at position 3433 of SEQ ID NO: 1882833
ucacaaacugaguggauau

SEQ ID NO: 2150795 - RNA, 19 nt, Artificial Sequence
  Description of Artificial Sequence: Synthetic oligonucleotide
  Antisense strand to SEQ ID NO: 2150794
auauccacucaguuuguga

SEQ ID NO: 2150796 - RNA, 19 nt, Artificial Sequence
  Description of Artificial Sequence: Synthetic oligonucleotide
  Sense strand starting at position 3491 of SEQ ID NO: 1882833
uugaguaaguauucuguga

SEQ ID NO: 2150797 - RNA, 19 nt, Artificial Sequence
  Description of Artificial Sequence: Synthetic oligonucleotide
  Antisense strand to SEQ ID NO: 2150796
ucacagaauacuuacucaa

SEQ ID NO: 2150798 - RNA, 19 nt, Artificial Sequence
  Description of Artificial Sequence: Synthetic oligonucleotide
  Sense strand starting at position 3495 of SEQ ID NO: 1882833
guaaguauucugugaaugg

SEQ ID NO: 2150799 - RNA, 19 nt, Artificial Sequence
  Description of Artificial Sequence: Synthetic oligonucleotide
  Antisense strand to SEQ ID NO: 2150798
ccauucacagaauacuuac

SEQ ID NO: 2150800 - RNA, 19 nt, Artificial Sequence
  Description of Artificial Sequence: Synthetic oligonucleotide
  Sense strand starting at position 3499 of SEQ ID NO: 1882833
guauucugugaaugggaag

SEQ ID NO: 2150801 - RNA, 19 nt, Artificial Sequence
  Description of Artificial Sequence: Synthetic oligonucleotide
  Antisense strand to SEQ ID NO: 2150800
cuucccauucacagaauac

SEQ ID NO: 2150802 - RNA, 19 nt, Artificial Sequence
  Description of Artificial Sequence: Synthetic oligonucleotide
  Sense strand starting at position 3551 of SEQ ID NO: 1882833
agauuagccuaauuaaguu

SEQ ID NO: 2150803 - RNA, 19 nt, Artificial Sequence
  Description of Artificial Sequence: Synthetic oligonucleotide
  Antisense strand to SEQ ID NO: 2150802
aacuuaauuaggcuaaucu

SEQ ID NO: 2150804 - RNA, 19 nt, Artificial Sequence
  Description of Artificial Sequence: Synthetic oligonucleotide
  Sense strand starting at position 3660 of SEQ ID NO: 1882833
aggauuugcucccacuacu

SEQ ID NO: 2150805 - RNA, 19 nt, Artificial Sequence
  Description of Artificial Sequence: Synthetic oligonucleotide
  Antisense strand to SEQ ID NO: 2150804
aguagugggagcaaauccu

SEQ ID NO: 2150806 - RNA, 19 nt, Artificial Sequence
  Description of Artificial Sequence: Synthetic oligonucleotide
  Sense strand starting at position 3741 of SEQ ID NO: 1882833
augggaauggcugaguuca

SEQ ID NO: 2150807 - RNA, 19 nt, Artificial Sequence
  Description of Artificial Sequence: Synthetic oligonucleotide
  Antisense strand to SEQ ID NO: 2150806
ugaacucagccauucccau

SEQ ID NO: 2150808 - RNA, 19 nt, Artificial Sequence
  Description of Artificial Sequence: Synthetic oligonucleotide
  Sense strand starting at position 3743 of SEQ ID NO: 1882833
gggaauggcugaguucaaa

SEQ ID NO: 2150809 - RNA, 19 nt, Artificial Sequence
  Description of Artificial Sequence: Synthetic oligonucleotide
  Antisense strand to SEQ ID NO: 2150808
uuugaacucagccauuccc

SEQ ID NO: 2150810 - RNA, 19 nt, Artificial Sequence
  Description of Artificial Sequence: Synthetic oligonucleotide
  Sense strand starting at position 3822 of SEQ ID NO: 1882833
auauaauuagucuaucgca

SEQ ID NO: 2150811 - RNA, 19 nt, Artificial Sequence
  Description of Artificial Sequence: Synthetic oligonucleotide
  Antisense strand to SEQ ID NO: 2150810
ugcgauagacuaauuauau

SEQ ID NO: 2150812 - RNA, 19 nt, Artificial Sequence
  Description of Artificial Sequence: Synthetic oligonucleotide
  Sense strand starting at position 3839 of SEQ ID NO: 1882833
cauguaagccacugugaua

SEQ ID NO: 2150813 - RNA, 19 nt, Artificial Sequence
  Description of Artificial Sequence: Synthetic oligonucleotide
  Antisense strand to SEQ ID NO: 2150812
uaucacaguggcuuacaug

SEQ ID NO: 2150814 - RNA, 19 nt, Artificial Sequence
  Description of Artificial Sequence: Synthetic oligonucleotide
  Sense strand starting at position 3876 of SEQ ID NO: 1882833
aagggaguggguugguauu

SEQ ID NO: 2150815 - RNA, 19 nt, Artificial Sequence
  Description of Artificial Sequence: Synthetic oligonucleotide
  Antisense strand to SEQ ID NO: 2150814
aauaccaacccacucccuu

SEQ ID NO: 2150816 - RNA, 19 nt, Artificial Sequence
  Description of Artificial Sequence: Synthetic oligonucleotide
  Sense strand starting at position 3877 of SEQ ID NO: 1882833
agggaguggguugguauua

SEQ ID NO: 2150817 - RNA, 19 nt, Artificial Sequence
  Description of Artificial Sequence: Synthetic oligonucleotide
  Antisense strand to SEQ ID NO: 2150816
uaauaccaacccacucccu

SEQ ID NO: 2150818 - RNA, 19 nt, Artificial Sequence
  Description of Artificial Sequence: Synthetic oligonucleotide
  Sense strand starting at position 1991 of SEQ ID NO: 1882834
gucuguauucgauguucca

SEQ ID NO: 2150819 - RNA, 19 nt, Artificial Sequence
  Description of Artificial Sequence: Synthetic oligonucleotide
  Antisense strand to SEQ ID NO: 2150818
uggaacaucgaauacagac

SEQ ID NO: 2150820 - RNA, 19 nt, Artificial Sequence
  Description of Artificial Sequence: Synthetic oligonucleotide
  Sense strand starting at position 1994 of SEQ ID NO: 1882834
uguauucgauguuccaaca

SEQ ID NO: 2150821 - RNA, 19 nt, Artificial Sequence
  Description of Artificial Sequence: Synthetic oligonucleotide
  Antisense strand to SEQ ID NO: 2150820
uguuggaacaucgaauaca

SEQ ID NO: 2150822 - RNA, 19 nt, Artificial Sequence
  Description of Artificial Sequence: Synthetic oligonucleotide
  Sense strand starting at position 2057 of SEQ ID NO: 1882834
gcgcgcaaucauuccgaga

SEQ ID NO: 2150823 - RNA, 19 nt, Artificial Sequence
  Description of Artificial Sequence: Synthetic oligonucleotide
  Antisense strand to SEQ ID NO: 2150822
ucucggaaugauugcgcgc

SEQ ID NO: 2150824 - RNA, 19 nt, Artificial Sequence
  Description of Artificial Sequence: Synthetic oligonucleotide
  Sense strand starting at position 2068 of SEQ ID NO: 1882834
uuccgagagcugcagaauu

SEQ ID NO: 2150825 - RNA, 19 nt, Artificial Sequence
  Description of Artificial Sequence: Synthetic oligonucleotide
  Antisense strand to SEQ ID NO: 2150824
aauucugcagcucucggaa

SEQ ID NO: 2150826 - RNA, 19 nt, Artificial Sequence
  Description of Artificial Sequence: Synthetic oligonucleotide
  Sense strand starting at position 2078 of SEQ ID NO: 1882834
ugcagaauucccuggugag

SEQ ID NO: 2150827 - RNA, 19 nt, Artificial Sequence
  Description of Artificial Sequence: Synthetic oligonucleotide
  Antisense strand to SEQ ID NO: 2150826
cucaccagggaauucugca

SEQ ID NO: 2150828 - RNA, 19 nt, Artificial Sequence
  Description of Artificial Sequence: Synthetic oligonucleotide
  Sense strand starting at position 2079 of SEQ ID NO: 1882834
gcagaauucccuggugagc

SEQ ID NO: 2150829 - RNA, 19 nt, Artificial Sequence
  Description of Artificial Sequence: Synthetic oligonucleotide
  Antisense strand to SEQ ID NO: 2150828
gcucaccagggaauucugc

SEQ ID NO: 2150830 - RNA, 19 nt, Artificial Sequence
  Description of Artificial Sequence: Synthetic oligonucleotide
  Sense strand starting at position 2240 of SEQ ID NO: 1882834
gccugcuucguccaguuaa

SEQ ID NO: 2150831 - RNA, 19 nt, Artificial Sequence
  Description of Artificial Sequence: Synthetic oligonucleotide
  Antisense strand to SEQ ID NO: 2150830
uuaacuggacgaagcaggc

SEQ ID NO: 2150832 - RNA, 19 nt, Artificial Sequence
  Description of Artificial Sequence: Synthetic oligonucleotide
  Sense strand starting at position 2250 of SEQ ID NO: 1882834
uccaguuaauugucuccau

SEQ ID NO: 2150833 - RNA, 19 nt, Artificial Sequence
  Description of Artificial Sequence: Synthetic oligonucleotide
  Antisense strand to SEQ ID NO: 2150832
auggagacaauuaacugga

SEQ ID NO: 2150834 - RNA, 19 nt, Artificial Sequence
  Description of Artificial Sequence: Synthetic oligonucleotide
  Sense strand starting at position 2253 of SEQ ID NO: 1882834
aguuaauugucuccaucuu

SEQ ID NO: 2150835 - RNA, 19 nt, Artificial Sequence
  Description of Artificial Sequence: Synthetic oligonucleotide
  Antisense strand to SEQ ID NO: 2150834
aagauggagacaauuaacu

SEQ ID NO: 2150836 - RNA, 19 nt, Artificial Sequence
  Description of Artificial Sequence: Synthetic oligonucleotide
  Sense strand starting at position 2254 of SEQ ID NO: 1882834
guuaauugucuccaucuuc

SEQ ID NO: 2150837 - RNA, 19 nt, Artificial Sequence
  Description of Artificial Sequence: Synthetic oligonucleotide
  Antisense strand to SEQ ID NO: 2150836
gaagauggagacaauuaac

SEQ ID NO: 2150838 - RNA, 19 nt, Artificial Sequence
  Description of Artificial Sequence: Synthetic oligonucleotide
  Sense strand starting at position 2363 of SEQ ID NO: 1882834
ugcuauuuccacugacugu

SEQ ID NO: 2150839 - RNA, 19 nt, Artificial Sequence
  Description of Artificial Sequence: Synthetic oligonucleotide
  Antisense strand to SEQ ID NO: 2150838
acagucaguggaaauagca

SEQ ID NO: 2150840 - RNA, 19 nt, Artificial Sequence
  Description of Artificial Sequence: Synthetic oligonucleotide
  Sense strand starting at position 2374 of SEQ ID NO: 1882834
cugacuguugucuguacau

SEQ ID NO: 2150841 - RNA, 19 nt, Artificial Sequence
  Description of Artificial Sequence: Synthetic oligonucleotide
  Antisense strand to SEQ ID NO: 2150840
auguacagacaacagucag

SEQ ID NO: 2150842 - RNA, 19 nt, Artificial Sequence
  Description of Artificial Sequence: Synthetic oligonucleotide
  Sense strand starting at position 2376 of SEQ ID NO: 1882834
gacuguugucuguacauga

SEQ ID NO: 2150843 - RNA, 19 nt, Artificial Sequence
  Description of Artificial Sequence: Synthetic oligonucleotide
  Antisense strand to SEQ ID NO: 2150842
ucauguacagacaacaguc

SEQ ID NO: 2150844 - RNA, 19 nt, Artificial Sequence
  Description of Artificial Sequence: Synthetic oligonucleotide
  Sense strand starting at position 2539 of SEQ ID NO: 1882834
aguggaggauuccacucau

SEQ ID NO: 2150845 - RNA, 19 nt, Artificial Sequence
  Description of Artificial Sequence: Synthetic oligonucleotide
  Antisense strand to SEQ ID NO: 2150844
augaguggaauccuccacu

SEQ ID NO: 2150846 - RNA, 19 nt, Artificial Sequence
  Description of Artificial Sequence: Synthetic oligonucleotide
  Sense strand starting at position 2569 of SEQ ID NO: 1882834
uguccugcgucucuuugaa

SEQ ID NO: 2150847 - RNA, 19 nt, Artificial Sequence
  Description of Artificial Sequence: Synthetic oligonucleotide
  Antisense strand to SEQ ID NO: 2150846
uucaaagagacgcaggaca

SEQ ID NO: 2150848 - RNA, 19 nt, Artificial Sequence
  Description of Artificial Sequence: Synthetic oligonucleotide
  Sense strand starting at position 2571 of SEQ ID NO: 1882834
uccugcgucucuuugaaau

SEQ ID NO: 2150849 - RNA, 19 nt, Artificial Sequence
  Description of Artificial Sequence: Synthetic oligonucleotide
  Antisense strand to SEQ ID NO: 2150848
auuucaaagagacgcagga

SEQ ID NO: 2150850 - RNA, 19 nt, Artificial Sequence
  Description of Artificial Sequence: Synthetic oligonucleotide
  Sense strand starting at position 2581 of SEQ ID NO: 1882834
cuuugaaauuccuugagcu

SEQ ID NO: 2150851 - RNA, 19 nt, Artificial Sequence
  Description of Artificial Sequence: Synthetic oligonucleotide
  Antisense strand to SEQ ID NO: 2150850
agcucaaggaauuucaaag

SEQ ID NO: 2150852 - RNA, 19 nt, Artificial Sequence
  Description of Artificial Sequence: Synthetic oligonucleotide
  Sense strand starting at position 2582 of SEQ ID NO: 1882834
uuugaaauuccuugagcug

SEQ ID NO: 2150853 - RNA, 19 nt, Artificial Sequence
  Description of Artificial Sequence: Synthetic oligonucleotide
  Antisense strand to SEQ ID NO: 2150852
cagcucaaggaauuucaaa

SEQ ID NO: 2150854 - RNA, 19 nt, Artificial Sequence
  Description of Artificial Sequence: Synthetic oligonucleotide
  Sense strand starting at position 2583 of SEQ ID NO: 1882834
uugaaauuccuugagcuga

SEQ ID NO: 2150855 - RNA, 19 nt, Artificial Sequence
  Description of Artificial Sequence: Synthetic oligonucleotide
  Antisense strand to SEQ ID NO: 2150854
ucagcucaaggaauuucaa

SEQ ID NO: 2150856 - RNA, 19 nt, Artificial Sequence
  Description of Artificial Sequence: Synthetic oligonucleotide
  Sense strand starting at position 2662 of SEQ ID NO: 1882834
cugcguugccgucauucua

SEQ ID NO: 2150857 - RNA, 19 nt, Artificial Sequence
  Description of Artificial Sequence: Synthetic oligonucleotide
  Antisense strand to SEQ ID NO: 2150856
uagaaugacggcaacgcag

SEQ ID NO: 2150858 - RNA, 19 nt, Artificial Sequence
  Description of Artificial Sequence: Synthetic oligonucleotide
  Sense strand starting at position 2665 of SEQ ID NO: 1882834
cguugccgucauucuaaua

SEQ ID NO: 2150859 - RNA, 19 nt, Artificial Sequence
  Description of Artificial Sequence: Synthetic oligonucleotide
  Antisense strand to SEQ ID NO: 2150858
uauuagaaugacggcaacg

SEQ ID NO: 2150860 - RNA, 19 nt, Artificial Sequence
  Description of Artificial Sequence: Synthetic oligonucleotide
  Sense strand starting at position 2670 of SEQ ID NO: 1882834
ccgucauucuaauauaaag

SEQ ID NO: 2150861 - RNA, 19 nt, Artificial Sequence
  Description of Artificial Sequence: Synthetic oligonucleotide
  Antisense strand to SEQ ID NO: 2150860
cuuuauauuagaaugacgg

SEQ ID NO: 2150862 - RNA, 19 nt, Artificial Sequence
  Description of Artificial Sequence: Synthetic oligonucleotide
  Sense strand starting at position 2687 of SEQ ID NO: 1882834
aggcuugccucuuugaaau

SEQ ID NO: 2150863 - RNA, 19 nt, Artificial Sequence
  Description of Artificial Sequence: Synthetic oligonucleotide
  Antisense strand to SEQ ID NO: 2150862
auuucaaagaggcaagccu

SEQ ID NO: 2150864 - RNA, 19 nt, Artificial Sequence
  Description of Artificial Sequence: Synthetic oligonucleotide
  Sense strand starting at position 2726 of SEQ ID NO: 1882834
ucuuucugucuuugacuca

SEQ ID NO: 2150865 - RNA, 19 nt, Artificial Sequence
  Description of Artificial Sequence: Synthetic oligonucleotide
  Antisense strand to SEQ ID NO: 2150864
ugagucaaagacagaaaga

SEQ ID NO: 2150866 - RNA, 19 nt, Artificial Sequence
  Description of Artificial Sequence: Synthetic oligonucleotide
  Sense strand starting at position 2770 of SEQ ID NO: 1882834
ggcaacucucaacgagaca

SEQ ID NO: 2150867 - RNA, 19 nt, Artificial Sequence
  Description of Artificial Sequence: Synthetic oligonucleotide
  Antisense strand to SEQ ID NO: 2150866
ugucucguugagaguugcc

SEQ ID NO: 2150868 - RNA, 19 nt, Artificial Sequence
  Description of Artificial Sequence: Synthetic oligonucleotide
  Sense strand starting at position 2985 of SEQ ID NO: 1882834
acguuucucccgugagagg

SEQ ID NO: 2150869 - RNA, 19 nt, Artificial Sequence
  Description of Artificial Sequence: Synthetic oligonucleotide
  Antisense strand to SEQ ID NO: 2150868
ccucucacgggagaaacgu

SEQ ID NO: 2150870 - RNA, 19 nt, Artificial Sequence
  Description of Artificial Sequence: Synthetic oligonucleotide
  Sense strand starting at position 3060 of SEQ ID NO: 1882834
ggaccagucgcuuagguaa

SEQ ID NO: 2150871 - RNA, 19 nt, Artificial Sequence
  Description of Artificial Sequence: Synthetic oligonucleotide
  Antisense strand to SEQ ID NO: 2150870
uuaccuaagcgacuggucc

SEQ ID NO: 2150872 - RNA, 19 nt, Artificial Sequence
  Description of Artificial Sequence: Synthetic oligonucleotide
  Sense strand starting at position 3488 of SEQ ID NO: 1882834
ugccuacucucagaacgaa

SEQ ID NO: 2150873 - RNA, 19 nt, Artificial Sequence
  Description of Artificial Sequence: Synthetic oligonucleotide
  Antisense strand to SEQ ID NO: 2150872
uucguucugagaguaggca

SEQ ID NO: 2150874 - RNA, 19 nt, Artificial Sequence
  Description of Artificial Sequence: Synthetic oligonucleotide
  Sense strand starting at position 3591 of SEQ ID NO: 1882834
caccuuugccagcagagau

SEQ ID NO: 2150875 - RNA, 19 nt, Artificial Sequence
  Description of Artificial Sequence: Synthetic oligonucleotide
  Antisense strand to SEQ ID NO: 2150874
aucucugcuggcaaaggug

SEQ ID NO: 2150876 - RNA, 19 nt, Artificial Sequence
  Description of Artificial Sequence: Synthetic oligonucleotide
  Sense strand starting at position 3643 of SEQ ID NO: 1882834
agagaagugccucacguuu

SEQ ID NO: 2150877 - RNA, 19 nt, Artificial Sequence
  Description of Artificial Sequence: Synthetic oligonucleotide
  Antisense strand to SEQ ID NO: 2150876
aaacgugaggcacuucucu

SEQ ID NO: 2150878 - RNA, 19 nt, Artificial Sequence
  Description of Artificial Sequence: Synthetic oligonucleotide
  Sense strand starting at position 3687 of SEQ ID NO: 1882834
aucccauucugucucugau

SEQ ID NO: 2150879 - RNA, 19 nt, Artificial Sequence
  Description of Artificial Sequence: Synthetic oligonucleotide
  Antisense strand to SEQ ID NO: 2150878
aucagagacagaaugggau

SEQ ID NO: 2150880 - RNA, 19 nt, Artificial Sequence
  Description of Artificial Sequence: Synthetic oligonucleotide
  Sense strand starting at position 3689 of SEQ ID NO: 1882834
cccauucugucucugauca

SEQ ID NO: 2150881 - RNA, 19 nt, Artificial Sequence
  Description of Artificial Sequence: Synthetic oligonucleotide
  Antisense strand to SEQ ID NO: 2150880
ugaucagagacagaauggg

SEQ ID NO: 2150882 - RNA, 19 nt, Artificial Sequence
  Description of Artificial Sequence: Synthetic oligonucleotide
  Sense strand starting at position 3693 of SEQ ID NO: 1882834
uucugucucugaucacaca

SEQ ID NO: 2150883 - RNA, 19 nt, Artificial Sequence
  Description of Artificial Sequence: Synthetic oligonucleotide
  Antisense strand to SEQ ID NO: 2150882
ugugugaucagagacagaa

SEQ ID NO: 2150884 - RNA, 19 nt, Artificial Sequence
  Description of Artificial Sequence: Synthetic oligonucleotide
  Sense strand starting at position 3731 of SEQ ID NO: 1882834
ggucacaaggucuggugaa

SEQ ID NO: 2150885 - RNA, 19 nt, Artificial Sequence
  Description of Artificial Sequence: Synthetic oligonucleotide
  Antisense strand to SEQ ID NO: 2150884
uucaccagaccuugugacc

SEQ ID NO: 2150886 - RNA, 19 nt, Artificial Sequence
  Description of Artificial Sequence: Synthetic oligonucleotide
  Sense strand starting at position 3732 of SEQ ID NO: 1882834
gucacaaggucuggugaaa

SEQ ID NO: 2150887 - RNA, 19 nt, Artificial Sequence
  Description of Artificial Sequence: Synthetic oligonucleotide
  Antisense strand to SEQ ID NO: 2150886
uuucaccagaccuugugac

SEQ ID NO: 2150888 - RNA, 19 nt, Artificial Sequence
  Description of Artificial Sequence: Synthetic oligonucleotide
  Sense strand starting at position 3792 of SEQ ID NO: 1882834
cggcccucucuuugcauaa

SEQ ID NO: 2150889 - RNA, 19 nt, Artificial Sequence
  Description of Artificial Sequence: Synthetic oligonucleotide
  Antisense strand to SEQ ID NO: 2150888
uuaugcaaagagagggccg

SEQ ID NO: 2150890 - RNA, 19 nt, Artificial Sequence
  Description of Artificial Sequence: Synthetic oligonucleotide
  Sense strand starting at position 3860 of SEQ ID NO: 1882834
aaugccagcuucggauuua

SEQ ID NO: 2150891 - RNA, 19 nt, Artificial Sequence
  Description of Artificial Sequence: Synthetic oligonucleotide
  Antisense strand to SEQ ID NO: 2150890
uaaauccgaagcuggcauu

SEQ ID NO: 2150892 - RNA, 19 nt, Artificial Sequence
  Description of Artificial Sequence: Synthetic oligonucleotide
  Sense strand starting at position 3861 of SEQ ID NO: 1882834
augccagcuucggauuuaa

SEQ ID NO: 2150893 - RNA, 19 nt, Artificial Sequence
  Description of Artificial Sequence: Synthetic oligonucleotide
  Antisense strand to SEQ ID NO: 2150892
uuaaauccgaagcuggcau

SEQ ID NO: 2150894 - RNA, 19 nt, Artificial Sequence
  Description of Artificial Sequence: Synthetic oligonucleotide
  Sense strand starting at position 3924 of SEQ ID NO: 1882834
ggugcucaucugcauuaca

SEQ ID NO: 2150895 - RNA, 19 nt, Artificial Sequence
  Description of Artificial Sequence: Synthetic oligonucleotide
  Antisense strand to SEQ ID NO: 2150894
uguaaugcagaugagcacc

SEQ ID NO: 2150896 - RNA, 19 nt, Artificial Sequence
  Description of Artificial Sequence: Synthetic oligonucleotide
  Sense strand starting at position 3927 of SEQ ID NO: 1882834
gcucaucugcauuacagau

SEQ ID NO: 2150897 - RNA, 19 nt, Artificial Sequence
  Description of Artificial Sequence: Synthetic oligonucleotide
  Antisense strand to SEQ ID NO: 2150896
aucuguaaugcagaugagc

SEQ ID NO: 2150898 - RNA, 19 nt, Artificial Sequence
  Description of Artificial Sequence: Synthetic oligonucleotide
  Sense strand starting at position 30 of SEQ ID NO: 1882835
guuuguuaaccucaagaau

SEQ ID NO: 2150899 - RNA, 19 nt, Artificial Sequence
  Description of Artificial Sequence: Synthetic oligonucleotide
  Antisense strand to SEQ ID NO: 2150898
auucuugagguuaacaaac

SEQ ID NO: 2150900 - RNA, 19 nt, Artificial Sequence
  Description of Artificial Sequence: Synthetic oligonucleotide
  Sense strand starting at position 93 of SEQ ID NO: 1882835
uuuggcaucgcugucuuau

SEQ ID NO: 2150901 - RNA, 19 nt, Artificial Sequence
  Description of Artificial Sequence: Synthetic oligonucleotide
  Antisense strand to SEQ ID NO: 2150900
auaagacagcgaugccaaa

SEQ ID NO: 2150902 - RNA, 19 nt, Artificial Sequence
  Description of Artificial Sequence: Synthetic oligonucleotide
  Sense strand starting at position 94 of SEQ ID NO: 1882835
uuggcaucgcugucuuauc

SEQ ID NO: 2150903 - RNA, 19 nt, Artificial Sequence
  Description of Artificial Sequence: Synthetic oligonucleotide
  Antisense strand to SEQ ID NO: 2150902
gauaagacagcgaugccaa

SEQ ID NO: 2150904 - RNA, 19 nt, Artificial Sequence
  Description of Artificial Sequence: Synthetic oligonucleotide
  Sense strand starting at position 218 of SEQ ID NO: 1882835
aacugaguccauuggagau

SEQ ID NO: 2150905 - RNA, 19 nt, Artificial Sequence
  Description of Artificial Sequence: Synthetic oligonucleotide
  Antisense strand to SEQ ID NO: 2150904
aucuccaauggacucaguu

SEQ ID NO: 2150906 - RNA, 19 nt, Artificial Sequence
  Description of Artificial Sequence: Synthetic oligonucleotide
  Sense strand starting at position 245 of SEQ ID NO: 1882835
cugaaagcguauuuguaaa

SEQ ID NO: 2150907 - RNA, 19 nt, Artificial Sequence
  Description of Artificial Sequence: Synthetic oligonucleotide
  Antisense strand to SEQ ID NO: 2150906
uuuacaaauacgcuuucag

SEQ ID NO: 2150908 - RNA, 19 nt, Artificial Sequence
  Description of Artificial Sequence: Synthetic oligonucleotide
  Sense strand starting at position 259 of SEQ ID NO: 1882835
guaaauagggacuguguuu

SEQ ID NO: 2150909 - RNA, 19 nt, Artificial Sequence
  Description of Artificial Sequence: Synthetic oligonucleotide
  Antisense strand to SEQ ID NO: 2150908
aaacacagucccuauuuac

SEQ ID NO: 2150910 - RNA, 19 nt, Artificial Sequence
  Description of Artificial Sequence: Synthetic oligonucleotide
  Sense strand starting at position 426 of SEQ ID NO: 1882835
uagguauucuuaguuacag

SEQ ID NO: 2150911 - RNA, 19 nt, Artificial Sequence
  Description of Artificial Sequence: Synthetic oligonucleotide
  Antisense strand to SEQ ID NO: 2150910
cuguaacuaagaauaccua

SEQ ID NO: 2150912 - RNA, 19 nt, Artificial Sequence
  Description of Artificial Sequence: Synthetic oligonucleotide
  Sense strand starting at position 428 of SEQ ID NO: 1882835
gguauucuuaguuacagga

SEQ ID NO: 2150913 - RNA, 19 nt, Artificial Sequence
  Description of Artificial Sequence: Synthetic oligonucleotide
  Antisense strand to SEQ ID NO: 2150912
uccuguaacuaagaauacc

SEQ ID NO: 2150914 - RNA, 19 nt, Artificial Sequence
  Description of Artificial Sequence: Synthetic oligonucleotide
  Sense strand starting at position 594 of SEQ ID NO: 1882835
auuauauggcauuagcuaa

SEQ ID NO: 2150915 - RNA, 19 nt, Artificial Sequence
  Description of Artificial Sequence: Synthetic oligonucleotide
  Antisense strand to SEQ ID NO: 2150914
uuagcuaaugccauauaau

SEQ ID NO: 2150916 - RNA, 19 nt, Artificial Sequence
  Description of Artificial Sequence: Synthetic oligonucleotide
  Sense strand starting at position 814 of SEQ ID NO: 1882835
cugcuauggcuaugaagua

SEQ ID NO: 2150917 - RNA, 19 nt, Artificial Sequence
  Description of Artificial Sequence: Synthetic oligonucleotide
  Antisense strand to SEQ ID NO: 2150916
uacuucauagccauagcag

SEQ ID NO: 2150918 - RNA, 19 nt, Artificial Sequence
  Description of Artificial Sequence: Synthetic oligonucleotide
  Sense strand starting at position 1067 of SEQ ID NO: 1882835
ccuagcauuugucuugaua

SEQ ID NO: 2150919 - RNA, 19 nt, Artificial Sequence
  Description of Artificial Sequence: Synthetic oligonucleotide
  Antisense strand to SEQ ID NO: 2150918
uaucaagacaaaugcuagg

SEQ ID NO: 2150920 - RNA, 19 nt, Artificial Sequence
  Description of Artificial Sequence: Synthetic oligonucleotide
  Sense strand starting at position 1080 of SEQ ID NO: 1882835
uugauagguugccucaagu

SEQ ID NO: 2150921 - RNA, 19 nt, Artificial Sequence
  Description of Artificial Sequence: Synthetic oligonucleotide
  Antisense strand to SEQ ID NO: 2150920
acuugaggcaaccuaucaa

SEQ ID NO: 2150922 - RNA, 19 nt, Artificial Sequence
  Description of Artificial Sequence: Synthetic oligonucleotide
  Sense strand starting at position 1127 of SEQ ID NO: 1882835
ggauuugaaucccagcauc

SEQ ID NO: 2150923 - RNA, 19 nt, Artificial Sequence
  Description of Artificial Sequence: Synthetic oligonucleotide
  Antisense strand to SEQ ID NO: 2150922
gaugcugggauucaaaucc

SEQ ID NO: 2150924 - RNA, 19 nt, Artificial Sequence
  Description of Artificial Sequence: Synthetic oligonucleotide
  Sense strand starting at position 1160 of SEQ ID NO: 1882835
gcaugaucccaagaagguu

SEQ ID NO: 2150925 - RNA, 19 nt, Artificial Sequence
  Description of Artificial Sequence: Synthetic oligonucleotide
  Antisense strand to SEQ ID NO: 2150924
aaccuucuugggaucaugc

SEQ ID NO: 2150926 - RNA, 19 nt, Artificial Sequence
  Description of Artificial Sequence: Synthetic oligonucleotide
  Sense strand starting at position 1506 of SEQ ID NO: 1882835
gaaugaauuugagagcaag

SEQ ID NO: 2150927 - RNA, 19 nt, Artificial Sequence
  Description of Artificial Sequence: Synthetic oligonucleotide
  Antisense strand to SEQ ID NO: 2150926
cuugcucucaaauucauuc

SEQ ID NO: 2150928 - RNA, 19 nt, Artificial Sequence
  Description of Artificial Sequence: Synthetic oligonucleotide
  Sense strand starting at position 1615 of SEQ ID NO: 1882835
auguauuuauagcaugaga

SEQ ID NO: 2150929 - RNA, 19 nt, Artificial Sequence
  Description of Artificial Sequence: Synthetic oligonucleotide
  Antisense strand to SEQ ID NO: 2150928
ucucaugcuauaaauacau

SEQ ID NO: 2150930 - RNA, 19 nt, Artificial Sequence
  Description of Artificial Sequence: Synthetic oligonucleotide
  Sense strand starting at position 2000 of SEQ ID NO: 1882835
gcgguaggagcgagucauu

SEQ ID NO: 2150931 - RNA, 19 nt, Artificial Sequence
  Description of Artificial Sequence: Synthetic oligonucleotide
  Antisense strand to SEQ ID NO: 2150930
aaugacucgcuccuaccgc

SEQ ID NO: 2150932 - RNA, 19 nt, Artificial Sequence
  Description of Artificial Sequence: Synthetic oligonucleotide
  Sense strand starting at position 2005 of SEQ ID NO: 1882835
aggagcgagucauugucau

SEQ ID NO: 2150933 - RNA, 19 nt, Artificial Sequence
  Description of Artificial Sequence: Synthetic oligonucleotide
  Antisense strand to SEQ ID NO: 2150932
augacaaugacucgcuccu

SEQ ID NO: 2150934 - RNA, 19 nt, Artificial Sequence
  Description of Artificial Sequence: Synthetic oligonucleotide
  Sense strand starting at position 2193 of SEQ ID NO: 1882835
cuaugcucaucaguacgaa

SEQ ID NO: 2150935 - RNA, 19 nt, Artificial Sequence
  Description of Artificial Sequence: Synthetic oligonucleotide
  Antisense strand to SEQ ID NO: 2150934
uucguacugaugagcauag

SEQ ID NO: 2150936 - RNA, 19 nt, Artificial Sequence
  Description of Artificial Sequence: Synthetic oligonucleotide
  Sense strand starting at position 2194 of SEQ ID NO: 1882835
uaugcucaucaguacgaau

SEQ ID NO: 2150937 - RNA, 19 nt, Artificial Sequence
  Description of Artificial Sequence: Synthetic oligonucleotide
  Antisense strand to SEQ ID NO: 2150936
auucguacugaugagcaua

SEQ ID NO: 2150938 - RNA, 19 nt, Artificial Sequence
  Description of Artificial Sequence: Synthetic oligonucleotide
  Sense strand starting at position 2196 of SEQ ID NO: 1882835
ugcucaucaguacgaauau

SEQ ID NO: 2150939 - RNA, 19 nt, Artificial Sequence
  Description of Artificial Sequence: Synthetic oligonucleotide
  Antisense strand to SEQ ID NO: 2150938
auauucguacugaugagca

SEQ ID NO: 2150940 - RNA, 19 nt, Artificial Sequence
  Description of Artificial Sequence: Synthetic oligonucleotide
  Sense strand starting at position 2205 of SEQ ID NO: 1882835
guacgaauauuuccguuga

SEQ ID NO: 2150941 - RNA, 19 nt, Artificial Sequence
  Description of Artificial Sequence: Synthetic oligonucleotide
  Antisense strand to SEQ ID NO: 2150940
ucaacggaaauauucguac

SEQ ID NO: 2150942 - RNA, 19 nt, Artificial Sequence
  Description of Artificial Sequence: Synthetic oligonucleotide
  Sense strand starting at position 2219 of SEQ ID NO: 1882835
guugauaagccuuacugcu

SEQ ID NO: 2150943 - RNA, 19 nt, Artificial Sequence
  Description of Artificial Sequence: Synthetic oligonucleotide
  Antisense strand to SEQ ID NO: 2150942
agcaguaaggcuuaucaac

SEQ ID NO: 2150944 - RNA, 19 nt, Artificial Sequence
  Description of Artificial Sequence: Synthetic oligonucleotide
  Sense strand starting at position 2591 of SEQ ID NO: 1882835
ccgugcauucucuuguguu

SEQ ID NO: 2150945 - RNA, 19 nt, Artificial Sequence
  Description of Artificial Sequence: Synthetic oligonucleotide
  Antisense strand to SEQ ID NO: 2150944
aacacaagagaaugcacgg

SEQ ID NO: 2150946 - RNA, 19 nt, Artificial Sequence
  Description of Artificial Sequence: Synthetic oligonucleotide
  Sense strand starting at position 2737 of SEQ ID NO: 1882835
uugugaacuucuuccaaug

SEQ ID NO: 2150947 - RNA, 19 nt, Artificial Sequence
  Description of Artificial Sequence: Synthetic oligonucleotide
  Antisense strand to SEQ ID NO: 2150946
cauuggaagaaguucacaa

SEQ ID NO: 2150948 - RNA, 19 nt, Artificial Sequence
  Description of Artificial Sequence: Synthetic oligonucleotide
  Sense strand starting at position 2749 of SEQ ID NO: 1882835
uccaaugucucaucaguuu

SEQ ID NO: 2150949 - RNA, 19 nt, Artificial Sequence
  Description of Artificial Sequence: Synthetic oligonucleotide
  Antisense strand to SEQ ID NO: 2150948
aaacugaugagacauugga

SEQ ID NO: 2150950 - RNA, 19 nt, Artificial Sequence
  Description of Artificial Sequence: Synthetic oligonucleotide
  Sense strand starting at position 2779 of SEQ ID NO: 1882835
ccugucugauccuccuaua

SEQ ID NO: 2150951 - RNA, 19 nt, Artificial Sequence
  Description of Artificial Sequence: Synthetic oligonucleotide
  Antisense strand to SEQ ID NO: 2150950
uauaggaggaucagacagg

SEQ ID NO: 2150952 - RNA, 19 nt, Artificial Sequence
  Description of Artificial Sequence: Synthetic oligonucleotide
  Sense strand starting at position 2813 of SEQ ID NO: 1882835
uuaguuauguagucugaaa

SEQ ID NO: 2150953 - RNA, 19 nt, Artificial Sequence
  Description of Artificial Sequence: Synthetic oligonucleotide
  Antisense strand to SEQ ID NO: 2150952
uuucagacuacauaacuaa

SEQ ID NO: 2150954 - RNA, 19 nt, Artificial Sequence
  Description of Artificial Sequence: Synthetic oligonucleotide
  Sense strand starting at position 2815 of SEQ ID NO: 1882835
aguuauguagucugaaauu

SEQ ID NO: 2150955 - RNA, 19 nt, Artificial Sequence
  Description of Artificial Sequence: Synthetic oligonucleotide
  Antisense strand to SEQ ID NO: 2150954
aauuucagacuacauaacu

SEQ ID NO: 2150956 - RNA, 19 nt, Artificial Sequence
  Description of Artificial Sequence: Synthetic oligonucleotide
  Sense strand starting at position 3212 of SEQ ID NO: 1882835
cugggcugcagguaucaua

SEQ ID NO: 2150957 - RNA, 19 nt, Artificial Sequence
  Description of Artificial Sequence: Synthetic oligonucleotide
  Antisense strand to SEQ ID NO: 2150956
uaugauaccugcagcccag

SEQ ID NO: 2150958 - RNA, 19 nt, Artificial Sequence
  Description of Artificial Sequence: Synthetic oligonucleotide
  Sense strand starting at position 3223 of SEQ ID NO: 1882835
guaucauaggcguaguaga

SEQ ID NO: 2150959 - RNA, 19 nt, Artificial Sequence
  Description of Artificial Sequence: Synthetic oligonucleotide
  Antisense strand to SEQ ID NO: 2150958
ucuacuacgccuaugauac

SEQ ID NO: 2150960 - RNA, 19 nt, Artificial Sequence
  Description of Artificial Sequence: Synthetic oligonucleotide
  Sense strand starting at position 3307 of SEQ ID NO: 1882835
cuggguagagcuggagaaa

SEQ ID NO: 2150961 - RNA, 19 nt, Artificial Sequence
  Description of Artificial Sequence: Synthetic oligonucleotide
  Antisense strand to SEQ ID NO: 2150960
uuucuccagcucuacccag

SEQ ID NO: 2150962 - RNA, 19 nt, Artificial Sequence
  Description of Artificial Sequence: Synthetic oligonucleotide
  Sense strand starting at position 3498 of SEQ ID NO: 1882835
uguaucucacacuguaauu

SEQ ID NO: 2150963 - RNA, 19 nt, Artificial Sequence
  Description of Artificial Sequence: Synthetic oligonucleotide
  Antisense strand to SEQ ID NO: 2150962
aauuacagugugagauaca

SEQ ID NO: 2150964 - RNA, 19 nt, Artificial Sequence
  Description of Artificial Sequence: Synthetic oligonucleotide
  Sense strand starting at position 3509 of SEQ ID NO: 1882835
cuguaauugucaucccaga

SEQ ID NO: 2150965 - RNA, 19 nt, Artificial Sequence
  Description of Artificial Sequence: Synthetic oligonucleotide
  Antisense strand to SEQ ID NO: 2150964
ucugggaugacaauuacag

SEQ ID NO: 2150966 - RNA, 19 nt, Artificial Sequence
  Description of Artificial Sequence: Synthetic oligonucleotide
  Sense strand starting at position 3514 of SEQ ID NO: 1882835
auugucaucccagauccuu

SEQ ID NO: 2150967 - RNA, 19 nt, Artificial Sequence
  Description of Artificial Sequence: Synthetic oligonucleotide
  Antisense strand to SEQ ID NO: 2150966
aaggaucugggaugacaau

SEQ ID NO: 2150968 - RNA, 19 nt, Artificial Sequence
  Description of Artificial Sequence: Synthetic oligonucleotide
  Sense strand starting at position 3596 of SEQ ID NO: 1882835
ugguuucucagguauguau

SEQ ID NO: 2150969 - RNA, 19 nt, Artificial Sequence
  Description of Artificial Sequence: Synthetic oligonucleotide
  Antisense strand to SEQ ID NO: 2150968
auacauaccugagaaacca

SEQ ID NO: 2150970 - RNA, 19 nt, Artificial Sequence
  Description of Artificial Sequence: Synthetic oligonucleotide
  Sense strand starting at position 3603 of SEQ ID NO: 1882835
ucagguauguauucucuca

SEQ ID NO: 2150971 - RNA, 19 nt, Artificial Sequence
  Description of Artificial Sequence: Synthetic oligonucleotide
  Antisense strand to SEQ ID NO: 2150970
ugagagaauacauaccuga

SEQ ID NO: 2150972 - RNA, 19 nt, Artificial Sequence
  Description of Artificial Sequence: Synthetic oligonucleotide
  Sense strand starting at position 3633 of SEQ ID NO: 1882835
uaaagaaauguugguucuu

SEQ ID NO: 2150973 - RNA, 19 nt, Artificial Sequence
  Description of Artificial Sequence: Synthetic oligonucleotide
  Antisense strand to SEQ ID NO: 2150972
aagaaccaacauuucuuua

SEQ ID NO: 2150974 - RNA, 19 nt, Artificial Sequence
  Description of Artificial Sequence: Synthetic oligonucleotide
  Sense strand starting at position 3635 of SEQ ID NO: 1882835
aagaaauguugguucuugu

SEQ ID NO: 2150975 - RNA, 19 nt, Artificial Sequence
  Description of Artificial Sequence: Synthetic oligonucleotide
  Antisense strand to SEQ ID NO: 2150974
acaagaaccaacauuucuu

SEQ ID NO: 2150976 - RNA, 19 nt, Artificial Sequence
  Description of Artificial Sequence: Synthetic oligonucleotide
  Sense strand starting at position 3713 of SEQ ID NO: 1882835
auaaaugugucacuagaga

SEQ ID NO: 2150977 - RNA, 19 nt, Artificial Sequence
  Description of Artificial Sequence: Synthetic oligonucleotide
  Antisense strand to SEQ ID NO: 2150976
ucucuagugacacauuuau

SEQ ID NO: 2150978 - RNA, 19 nt, Artificial Sequence
  Description of Artificial Sequence: Synthetic oligonucleotide
  Sense strand starting at position 803 of SEQ ID NO: 1882836
uugaauagaauguguagaa

SEQ ID NO: 2150979 - RNA, 19 nt, Artificial Sequence
  Description of Artificial Sequence: Synthetic oligonucleotide
  Antisense strand to SEQ ID NO: 2150978
uucuacacauucuauucaa

SEQ ID NO: 2150980 - RNA, 19 nt, Artificial Sequence
  Description of Artificial Sequence: Synthetic oligonucleotide
  Sense strand starting at position 810 of SEQ ID NO: 1882836
gaauguguagaauaaugcu

SEQ ID NO: 2150981 - RNA, 19 nt, Artificial Sequence
  Description of Artificial Sequence: Synthetic oligonucleotide
  Antisense strand to SEQ ID NO: 2150980
agcauuauucuacacauuc

SEQ ID NO: 2150982 - RNA, 19 nt, Artificial Sequence
  Description of Artificial Sequence: Synthetic oligonucleotide
  Sense strand starting at position 1086 of SEQ ID NO: 1882836
uuacaaauacugugugauc

SEQ ID NO: 2150983 - RNA, 19 nt, Artificial Sequence
  Description of Artificial Sequence: Synthetic oligonucleotide
  Antisense strand to SEQ ID NO: 2150982
gaucacacaguauuuguaa

SEQ ID NO: 2150984 - RNA, 19 nt, Artificial Sequence
  Description of Artificial Sequence: Synthetic oligonucleotide
  Sense strand starting at position 1143 of SEQ ID NO: 1882836
agcagaguagaaugauagu

SEQ ID NO: 2150985 - RNA, 19 nt, Artificial Sequence
  Description of Artificial Sequence: Synthetic oligonucleotide
  Antisense strand to SEQ ID NO: 2150984
acuaucauucuacucugcu

SEQ ID NO: 2150986 - RNA, 19 nt, Artificial Sequence
  Description of Artificial Sequence: Synthetic oligonucleotide
  Sense strand starting at position 1152 of SEQ ID NO: 1882836
gaaugauaguugccaaugu

SEQ ID NO: 2150987 - RNA, 19 nt, Artificial Sequence
  Description of Artificial Sequence: Synthetic oligonucleotide
  Antisense strand to SEQ ID NO: 2150986
acauuggcaacuaucauuc

SEQ ID NO: 2150988 - RNA, 19 nt, Artificial Sequence
  Description of Artificial Sequence: Synthetic oligonucleotide
  Sense strand starting at position 1177 of SEQ ID NO: 1882836
ggagugguggugugggaau

SEQ ID NO: 2150989 - RNA, 19 nt, Artificial Sequence
  Description of Artificial Sequence: Synthetic oligonucleotide
  Antisense strand to SEQ ID NO: 2150988
auucccacaccaccacucc

SEQ ID NO: 2150990 - RNA, 19 nt, Artificial Sequence
  Description of Artificial Sequence: Synthetic oligonucleotide
  Sense strand starting at position 1226 of SEQ ID NO: 1882836
gaguaagugcuggagaucu

SEQ ID NO: 2150991 - RNA, 19 nt, Artificial Sequence
  Description of Artificial Sequence: Synthetic oligonucleotide
  Antisense strand to SEQ ID NO: 2150990
agaucuccagcacuuacuc

SEQ ID NO: 2150992 - RNA, 19 nt, Artificial Sequence
  Description of Artificial Sequence: Synthetic oligonucleotide
  Sense strand starting at position 1228 of SEQ ID NO: 1882836
guaagugcuggagaucuau

SEQ ID NO: 2150993 - RNA, 19 nt, Artificial Sequence
  Description of Artificial Sequence: Synthetic oligonucleotide
  Antisense strand to SEQ ID NO: 2150992
auagaucuccagcacuuac

SEQ ID NO: 2150994 - RNA, 19 nt, Artificial Sequence
  Description of Artificial Sequence: Synthetic oligonucleotide
  Sense strand starting at position 1237 of SEQ ID NO: 1882836
ggagaucuauuguuaagca

SEQ ID NO: 2150995 - RNA, 19 nt, Artificial Sequence
  Description of Artificial Sequence: Synthetic oligonucleotide
  Antisense strand to SEQ ID NO: 2150994
ugcuuaacaauagaucucc

SEQ ID NO: 2150996 - RNA, 19 nt, Artificial Sequence
  Description of Artificial Sequence: Synthetic oligonucleotide
  Sense strand starting at position 1244 of SEQ ID NO: 1882836
uauuguuaagcaugaugac

SEQ ID NO: 2150997 - RNA, 19 nt, Artificial Sequence
  Description of Artificial Sequence: Synthetic oligonucleotide
  Antisense strand to SEQ ID NO: 2150996
gucaucaugcuuaacaaua

SEQ ID NO: 2150998 - RNA, 19 nt, Artificial Sequence
  Description of Artificial Sequence: Synthetic oligonucleotide
  Sense strand starting at position 1245 of SEQ ID NO: 1882836
auuguuaagcaugaugacu

SEQ ID NO: 2150999 - RNA, 19 nt, Artificial Sequence
  Description of Artificial Sequence: Synthetic oligonucleotide
  Antisense strand to SEQ ID NO: 2150998
agucaucaugcuuaacaau

SEQ ID NO: 2151000 - RNA, 19 nt, Artificial Sequence
  Description of Artificial Sequence: Synthetic oligonucleotide
  Sense strand starting at position 1250 of SEQ ID NO: 1882836
uaagcaugaugacuauagu

SEQ ID NO: 2151001 - RNA, 19 nt, Artificial Sequence
  Description of Artificial Sequence: Synthetic oligonucleotide
  Antisense strand to SEQ ID NO: 2151000
acuauagucaucaugcuua

SEQ ID NO: 2151002 - RNA, 19 nt, Artificial Sequence
  Description of Artificial Sequence: Synthetic oligonucleotide
  Sense strand starting at position 1552 of SEQ ID NO: 1882836
gucucagcagcauaauuga

SEQ ID NO: 2151003 - RNA, 19 nt, Artificial Sequence
  Description of Artificial Sequence: Synthetic oligonucleotide
  Antisense strand to SEQ ID NO: 2151002
ucaauuaugcugcugagac

SEQ ID NO: 2151004 - RNA, 19 nt, Artificial Sequence
  Description of Artificial Sequence: Synthetic oligonucleotide
  Sense strand starting at position 1582 of SEQ ID NO: 1882836
agauaaaucuuguugugag

SEQ ID NO: 2151005 - RNA, 19 nt, Artificial Sequence
  Description of Artificial Sequence: Synthetic oligonucleotide
  Antisense strand to SEQ ID NO: 2151004
cucacaacaagauuuaucu

SEQ ID NO: 2151006 - RNA, 19 nt, Artificial Sequence
  Description of Artificial Sequence: Synthetic oligonucleotide
  Sense strand starting at position 1605 of SEQ ID NO: 1882836
uguucugugcaauauagga

SEQ ID NO: 2151007 - RNA, 19 nt, Artificial Sequence
  Description of Artificial Sequence: Synthetic oligonucleotide
  Antisense strand to SEQ ID NO: 2151006
uccuauauugcacagaaca

SEQ ID NO: 2151008 - RNA, 19 nt, Artificial Sequence
  Description of Artificial Sequence: Synthetic oligonucleotide
  Sense strand starting at position 1729 of SEQ ID NO: 1882836
aauugcuucugguugagac

SEQ ID NO: 2151009 - RNA, 19 nt, Artificial Sequence
  Description of Artificial Sequence: Synthetic oligonucleotide
  Antisense strand to SEQ ID NO: 2151008
gucucaaccagaagcaauu

SEQ ID NO: 2151010 - RNA, 19 nt, Artificial Sequence
  Description of Artificial Sequence: Synthetic oligonucleotide
  Sense strand starting at position 1737 of SEQ ID NO: 1882836
cugguugagacccagucua

SEQ ID NO: 2151011 - RNA, 19 nt, Artificial Sequence
  Description of Artificial Sequence: Synthetic oligonucleotide
  Antisense strand to SEQ ID NO: 2151010
uagacugggucucaaccag

SEQ ID NO: 2151012 - RNA, 19 nt, Artificial Sequence
  Description of Artificial Sequence: Synthetic oligonucleotide
  Sense strand starting at position 1768 of SEQ ID NO: 1882836
gaaauuuguuggcuguauc

SEQ ID NO: 2151013 - RNA, 19 nt, Artificial Sequence
  Description of Artificial Sequence: Synthetic oligonucleotide
  Antisense strand to SEQ ID NO: 2151012
gauacagccaacaaauuuc

SEQ ID NO: 2151014 - RNA, 19 nt, Artificial Sequence
  Description of Artificial Sequence: Synthetic oligonucleotide
  Sense strand starting at position 1769 of SEQ ID NO: 1882836
aaauuuguuggcuguaucu

SEQ ID NO: 2151015 - RNA, 19 nt, Artificial Sequence
  Description of Artificial Sequence: Synthetic oligonucleotide
  Antisense strand to SEQ ID NO: 2151014
agauacagccaacaaauuu

SEQ ID NO: 2151016 - RNA, 19 nt, Artificial Sequence
  Description of Artificial Sequence: Synthetic oligonucleotide
  Sense strand starting at position 1865 of SEQ ID NO: 1882836
ggauuauugcaguaguuuc

SEQ ID NO: 2151017 - RNA, 19 nt, Artificial Sequence
  Description of Artificial Sequence: Synthetic oligonucleotide
  Antisense strand to SEQ ID NO: 2151016
gaaacuacugcaauaaucc

SEQ ID NO: 2151018 - RNA, 19 nt, Artificial Sequence
  Description of Artificial Sequence: Synthetic oligonucleotide
  Sense strand starting at position 1876 of SEQ ID NO: 1882836
guaguuuccuaaucagacu

SEQ ID NO: 2151019 - RNA, 19 nt, Artificial Sequence
  Description of Artificial Sequence: Synthetic oligonucleotide
  Antisense strand to SEQ ID NO: 2151018
agucugauuaggaaacuac

SEQ ID NO: 2151020 - RNA, 19 nt, Artificial Sequence
  Description of Artificial Sequence: Synthetic oligonucleotide
  Sense strand starting at position 2060 of SEQ ID NO: 1882836
auggcaugccaggaacuau

SEQ ID NO: 2151021 - RNA, 19 nt, Artificial Sequence
  Description of Artificial Sequence: Synthetic oligonucleotide
  Antisense strand to SEQ ID NO: 2151020
auaguuccuggcaugccau

SEQ ID NO: 2151022 - RNA, 19 nt, Artificial Sequence
  Description of Artificial Sequence: Synthetic oligonucleotide
  Sense strand starting at position 2171 of SEQ ID NO: 1882836
ucuggauguucuuucugaa

SEQ ID NO: 2151023 - RNA, 19 nt, Artificial Sequence
  Description of Artificial Sequence: Synthetic oligonucleotide
  Antisense strand to SEQ ID NO: 2151022
uucagaaagaacauccaga

SEQ ID NO: 2151024 - RNA, 19 nt, Artificial Sequence
  Description of Artificial Sequence: Synthetic oligonucleotide
  Sense strand starting at position 2205 of SEQ ID NO: 1882836
aguuuagucaggcaggacu

SEQ ID NO: 2151025 - RNA, 19 nt, Artificial Sequence
  Description of Artificial Sequence: Synthetic oligonucleotide
  Antisense strand to SEQ ID NO: 2151024
aguccugccugacuaaacu

SEQ ID NO: 2151026 - RNA, 19 nt, Artificial Sequence
  Description of Artificial Sequence: Synthetic oligonucleotide
  Sense strand starting at position 2272 of SEQ ID NO: 1882836
cuaguuggaucauuaauca

SEQ ID NO: 2151027 - RNA, 19 nt, Artificial Sequence
  Description of Artificial Sequence: Synthetic oligonucleotide
  Antisense strand to SEQ ID NO: 2151026
ugauuaaugauccaacuag

SEQ ID NO: 2151028 - RNA, 19 nt, Artificial Sequence
  Description of Artificial Sequence: Synthetic oligonucleotide
  Sense strand starting at position 2445 of SEQ ID NO: 1882836
uggcaagaucaauggacua

SEQ ID NO: 2151029 - RNA, 19 nt, Artificial Sequence
  Description of Artificial Sequence: Synthetic oligonucleotide
  Antisense strand to SEQ ID NO: 2151028
uaguccauugaucuugcca

SEQ ID NO: 2151030 - RNA, 19 nt, Artificial Sequence
  Description of Artificial Sequence: Synthetic oligonucleotide
  Sense strand starting at position 2480 of SEQ ID NO: 1882836
ggcaguuauguugaagaag

SEQ ID NO: 2151031 - RNA, 19 nt, Artificial Sequence
  Description of Artificial Sequence: Synthetic oligonucleotide
  Antisense strand to SEQ ID NO: 2151030
cuucuucaacauaacugcc

SEQ ID NO: 2151032 - RNA, 19 nt, Artificial Sequence
  Description of Artificial Sequence: Synthetic oligonucleotide
  Sense strand starting at position 2561 of SEQ ID NO: 1882836
ugaaauuacuuccuagagu

SEQ ID NO: 2151033 - RNA, 19 nt, Artificial Sequence
  Description of Artificial Sequence: Synthetic oligonucleotide
  Antisense strand to SEQ ID NO: 2151032
acucuaggaaguaauuuca

SEQ ID NO: 2151034 - RNA, 19 nt, Artificial Sequence
  Description of Artificial Sequence: Synthetic oligonucleotide
  Sense strand starting at position 2575 of SEQ ID NO: 1882836
agaguaauuuaguaacuug

SEQ ID NO: 2151035 - RNA, 19 nt, Artificial Sequence
  Description of Artificial Sequence: Synthetic oligonucleotide
  Antisense strand to SEQ ID NO: 2151034
caaguuacuaaauuacucu

SEQ ID NO: 2151036 - RNA, 19 nt, Artificial Sequence
  Description of Artificial Sequence: Synthetic oligonucleotide
  Sense strand starting at position 2625 of SEQ ID NO: 1882836
ucaagaauaugcccuagau

SEQ ID NO: 2151037 - RNA, 19 nt, Artificial Sequence
  Description of Artificial Sequence: Synthetic oligonucleotide
  Antisense strand to SEQ ID NO: 2151036
aucuagggcauauucuuga

SEQ ID NO: 2151038 - RNA, 19 nt, Artificial Sequence
  Description of Artificial Sequence: Synthetic oligonucleotide
  Sense strand starting at position 2776 of SEQ ID NO: 1882836
gacaguuaaagguggcaga

SEQ ID NO: 2151039 - RNA, 19 nt, Artificial Sequence
  Description of Artificial Sequence: Synthetic oligonucleotide
  Antisense strand to SEQ ID NO: 2151038
ucugccaccuuuaacuguc

SEQ ID NO: 2151040 - RNA, 19 nt, Artificial Sequence
  Description of Artificial Sequence: Synthetic oligonucleotide
  Sense strand starting at position 2837 of SEQ ID NO: 1882836
ucuguuagagcacagaaau

SEQ ID NO: 2151041 - RNA, 19 nt, Artificial Sequence
  Description of Artificial Sequence: Synthetic oligonucleotide
  Antisense strand to SEQ ID NO: 2151040
auuucugugcucuaacaga

SEQ ID NO: 2151042 - RNA, 19 nt, Artificial Sequence
  Description of Artificial Sequence: Synthetic oligonucleotide
  Sense strand starting at position 3090 of SEQ ID NO: 1882836
cuaugugaaauagggcaaa

SEQ ID NO: 2151043 - RNA, 19 nt, Artificial Sequence
  Description of Artificial Sequence: Synthetic oligonucleotide
  Antisense strand to SEQ ID NO: 2151042
uuugcccuauuucacauag

SEQ ID NO: 2151044 - RNA, 19 nt, Artificial Sequence
  Description of Artificial Sequence: Synthetic oligonucleotide
  Sense strand starting at position 3157 of SEQ ID NO: 1882836
gguaaugacaaaugguaau

SEQ ID NO: 2151045 - RNA, 19 nt, Artificial Sequence
  Description of Artificial Sequence: Synthetic oligonucleotide
  Antisense strand to SEQ ID NO: 2151044
auuaccauuugucauuacc

SEQ ID NO: 2151046 - RNA, 19 nt, Artificial Sequence
  Description of Artificial Sequence: Synthetic oligonucleotide
  Sense strand starting at position 3175 of SEQ ID NO: 1882836
uguucuauuguauaacaag

SEQ ID NO: 2151047 - RNA, 19 nt, Artificial Sequence
  Description of Artificial Sequence: Synthetic oligonucleotide
  Antisense strand to SEQ ID NO: 2151046
cuuguuauacaauagaaca

SEQ ID NO: 2151048 - RNA, 19 nt, Artificial Sequence
  Description of Artificial Sequence: Synthetic oligonucleotide
  Sense strand starting at position 3230 of SEQ ID NO: 1882836
ggaauacucagcgauguuc

SEQ ID NO: 2151049 - RNA, 19 nt, Artificial Sequence
  Description of Artificial Sequence: Synthetic oligonucleotide
  Antisense strand to SEQ ID NO: 2151048
gaacaucgcugaguauucc

SEQ ID NO: 2151050 - RNA, 19 nt, Artificial Sequence
  Description of Artificial Sequence: Synthetic oligonucleotide
  Sense strand starting at position 3379 of SEQ ID NO: 1882836
caucaugcuucucuaggga

SEQ ID NO: 2151051 - RNA, 19 nt, Artificial Sequence
  Description of Artificial Sequence: Synthetic oligonucleotide
  Antisense strand to SEQ ID NO: 2151050
ucccuagagaagcaugaug

SEQ ID NO: 2151052 - RNA, 19 nt, Artificial Sequence
  Description of Artificial Sequence: Synthetic oligonucleotide
  Sense strand starting at position 3756 of SEQ ID NO: 1882836
uuugaaacugaauguucua

SEQ ID NO: 2151053 - RNA, 19 nt, Artificial Sequence
  Description of Artificial Sequence: Synthetic oligonucleotide
  Antisense strand to SEQ ID NO: 2151052
uagaacauucaguuucaaa

SEQ ID NO: 2151054 - RNA, 19 nt, Artificial Sequence
  Description of Artificial Sequence: Synthetic oligonucleotide
  Sense strand starting at position 3782 of SEQ ID NO: 1882836
gauacauuauggguuaaua

SEQ ID NO: 2151055 - RNA, 19 nt, Artificial Sequence
  Description of Artificial Sequence: Synthetic oligonucleotide
  Antisense strand to SEQ ID NO: 2151054
uauuaacccauaauguauc

SEQ ID NO: 2151056 - RNA, 19 nt, Artificial Sequence
  Description of Artificial Sequence: Synthetic oligonucleotide
  Sense strand starting at position 3931 of SEQ ID NO: 1882836
uugagagauugggacagaa

SEQ ID NO: 2151057 - RNA, 19 nt, Artificial Sequence
  Description of Artificial Sequence: Synthetic oligonucleotide
  Antisense strand to SEQ ID NO: 2151056
uucugucccaaucucucaa

SEQ ID NO: 2151058 - RNA, 19 nt, Artificial Sequence
  Description of Artificial Sequence: Synthetic oligonucleotide
  Sense strand starting at position 5 of SEQ ID NO: 1882837
auuagacaucacugucuga

SEQ ID NO: 2151059 - RNA, 19 nt, Artificial Sequence
  Description of Artificial Sequence: Synthetic oligonucleotide
  Antisense strand to SEQ ID NO: 2151058
ucagacagugaugucuaau

SEQ ID NO: 2151060 - RNA, 19 nt, Artificial Sequence
  Description of Artificial Sequence: Synthetic oligonucleotide
  Sense strand starting at position 295 of SEQ ID NO: 1882837
agcuacaaugguuauuaua

SEQ ID NO: 2151061 - RNA, 19 nt, Artificial Sequence
  Description of Artificial Sequence: Synthetic oligonucleotide
  Antisense strand to SEQ ID NO: 2151060
uauaauaaccauuguagcu

SEQ ID NO: 2151062 - RNA, 19 nt, Artificial Sequence
  Description of Artificial Sequence: Synthetic oligonucleotide
  Sense strand starting at position 329 of SEQ ID NO: 1882837
cuuugauuggaguaaucga

SEQ ID NO: 2151063 - RNA, 19 nt, Artificial Sequence
  Description of Artificial Sequence: Synthetic oligonucleotide
  Antisense strand to SEQ ID NO: 2151062
ucgauuacuccaaucaaag

SEQ ID NO: 2151064 - RNA, 19 nt, Artificial Sequence
  Description of Artificial Sequence: Synthetic oligonucleotide
  Sense strand starting at position 334 of SEQ ID NO: 1882837
auuggaguaaucgauagug

SEQ ID NO: 2151065 - RNA, 19 nt, Artificial Sequence
  Description of Artificial Sequence: Synthetic oligonucleotide
  Antisense strand to SEQ ID NO: 2151064
cacuaucgauuacuccaau

SEQ ID NO: 2151066 - RNA, 19 nt, Artificial Sequence
  Description of Artificial Sequence: Synthetic oligonucleotide
  Sense strand starting at position 336 of SEQ ID NO: 1882837
uggaguaaucgauagugua

SEQ ID NO: 2151067 - RNA, 19 nt, Artificial Sequence
  Description of Artificial Sequence: Synthetic oligonucleotide
  Antisense strand to SEQ ID NO: 2151066
uacacuaucgauuacucca

SEQ ID NO: 2151068 - RNA, 19 nt, Artificial Sequence
  Description of Artificial Sequence: Synthetic oligonucleotide
  Sense strand starting at position 384 of SEQ ID NO: 1882837
agaauauaaggcugguuua

SEQ ID NO: 2151069 - RNA, 19 nt, Artificial Sequence
  Description of Artificial Sequence: Synthetic oligonucleotide
  Antisense strand to SEQ ID NO: 2151068
uaaaccagccuuauauucu

SEQ ID NO: 2151070 - RNA, 19 nt, Artificial Sequence
  Description of Artificial Sequence: Synthetic oligonucleotide
  Sense strand starting at position 387 of SEQ ID NO: 1882837
auauaaggcugguuuaaau

SEQ ID NO: 2151071 - RNA, 19 nt, Artificial Sequence
  Description of Artificial Sequence: Synthetic oligonucleotide
  Antisense strand to SEQ ID NO: 2151070
auuuaaaccagccuuauau

SEQ ID NO: 2151072 - RNA, 19 nt, Artificial Sequence
  Description of Artificial Sequence: Synthetic oligonucleotide
  Sense strand starting at position 742 of SEQ ID NO: 1882837
guuacugugguauaaauac

SEQ ID NO: 2151073 - RNA, 19 nt, Artificial Sequence
  Description of Artificial Sequence: Synthetic oligonucleotide
  Antisense strand to SEQ ID NO: 2151072
guauuuauaccacaguaac

SEQ ID NO: 2151074 - RNA, 19 nt, Artificial Sequence
  Description of Artificial Sequence: Synthetic oligonucleotide
  Sense strand starting at position 834 of SEQ ID NO: 1882837
aucaucauauguguaaucu

SEQ ID NO: 2151075 - RNA, 19 nt, Artificial Sequence
  Description of Artificial Sequence: Synthetic oligonucleotide
  Antisense strand to SEQ ID NO: 2151074
agauuacacauaugaugau

SEQ ID NO: 2151076 - RNA, 19 nt, Artificial Sequence
  Description of Artificial Sequence: Synthetic oligonucleotide
  Sense strand starting at position 835 of SEQ ID NO: 1882837
ucaucauauguguaaucug

SEQ ID NO: 2151077 - RNA, 19 nt, Artificial Sequence
  Description of Artificial Sequence: Synthetic oligonucleotide
  Antisense strand to SEQ ID NO: 2151076
cagauuacacauaugauga

SEQ ID NO: 2151078 - RNA, 19 nt, Artificial Sequence
  Description of Artificial Sequence: Synthetic oligonucleotide
  Sense strand starting at position 844 of SEQ ID NO: 1882837
guguaaucugucuaccaca

SEQ ID NO: 2151079 - RNA, 19 nt, Artificial Sequence
  Description of Artificial Sequence: Synthetic oligonucleotide
  Antisense strand to SEQ ID NO: 2151078
ugugguagacagauuacac

SEQ ID NO: 2151080 - RNA, 19 nt, Artificial Sequence
  Description of Artificial Sequence: Synthetic oligonucleotide
  Sense strand starting at position 938 of SEQ ID NO: 1882837
gaguacuuugaacauaugu

SEQ ID NO: 2151081 - RNA, 19 nt, Artificial Sequence
  Description of Artificial Sequence: Synthetic oligonucleotide
  Antisense strand to SEQ ID NO: 2151080
acauauguucaaaguacuc

SEQ ID NO: 2151082 - RNA, 19 nt, Artificial Sequence
  Description of Artificial Sequence: Synthetic oligonucleotide
  Sense strand starting at position 1089 of SEQ ID NO: 1882837
agaaguuacugucuuacca

SEQ ID NO: 2151083 - RNA, 19 nt, Artificial Sequence
  Description of Artificial Sequence: Synthetic oligonucleotide
  Antisense strand to SEQ ID NO: 2151082
ugguaagacaguaacuucu

SEQ ID NO: 2151084 - RNA, 19 nt, Artificial Sequence
  Description of Artificial Sequence: Synthetic oligonucleotide
  Sense strand starting at position 1131 of SEQ ID NO: 1882837
ggaccuggguuauuacaga

SEQ ID NO: 2151085 - RNA, 19 nt, Artificial Sequence
  Description of Artificial Sequence: Synthetic oligonucleotide
  Antisense strand to SEQ ID NO: 2151084
ucuguaauaacccaggucc

SEQ ID NO: 2151086 - RNA, 19 nt, Artificial Sequence
  Description of Artificial Sequence: Synthetic oligonucleotide
  Sense strand starting at position 1136 of SEQ ID NO: 1882837
uggguuauuacagaguugu

SEQ ID NO: 2151087 - RNA, 19 nt, Artificial Sequence
  Description of Artificial Sequence: Synthetic oligonucleotide
  Antisense strand to SEQ ID NO: 2151086
acaacucuguaauaaccca

SEQ ID NO: 2151088 - RNA, 19 nt, Artificial Sequence
  Description of Artificial Sequence: Synthetic oligonucleotide
  Sense strand starting at position 1142 of SEQ ID NO: 1882837
auuacagaguuguuucuaa

SEQ ID NO: 2151089 - RNA, 19 nt, Artificial Sequence
  Description of Artificial Sequence: Synthetic oligonucleotide
  Antisense strand to SEQ ID NO: 2151088
uuagaaacaacucuguaau

SEQ ID NO: 2151090 - RNA, 19 nt, Artificial Sequence
  Description of Artificial Sequence: Synthetic oligonucleotide
  Sense strand starting at position 1655 of SEQ ID NO: 1882837
guggaaagcagaugagauu

SEQ ID NO: 2151091 - RNA, 19 nt, Artificial Sequence
  Description of Artificial Sequence: Synthetic oligonucleotide
  Antisense strand to SEQ ID NO: 2151090
aaucucaucugcuuuccac

SEQ ID NO: 2151092 - RNA, 19 nt, Artificial Sequence
  Description of Artificial Sequence: Synthetic oligonucleotide
  Sense strand starting at position 1664 of SEQ ID NO: 1882837
agaugagauuuagagccau

SEQ ID NO: 2151093 - RNA, 19 nt, Artificial Sequence
  Description of Artificial Sequence: Synthetic oligonucleotide
  Antisense strand to SEQ ID NO: 2151092
auggcucuaaaucucaucu

SEQ ID NO: 2151094 - RNA, 19 nt, Artificial Sequence
  Description of Artificial Sequence: Synthetic oligonucleotide
  Sense strand starting at position 1684 of SEQ ID NO: 1882837
aguaaauucuggcuuugag

SEQ ID NO: 2151095 - RNA, 19 nt, Artificial Sequence
  Description of Artificial Sequence: Synthetic oligonucleotide
  Antisense strand to SEQ ID NO: 2151094
cucaaagccagaauuuacu

SEQ ID NO: 2151096 - RNA, 19 nt, Artificial Sequence
  Description of Artificial Sequence: Synthetic oligonucleotide
  Sense strand starting at position 1709 of SEQ ID NO: 1882837
ccuugucaucuugaucaag

SEQ ID NO: 2151097 - RNA, 19 nt, Artificial Sequence
  Description of Artificial Sequence: Synthetic oligonucleotide
  Antisense strand to SEQ ID NO: 2151096
cuugaucaagaugacaagg

SEQ ID NO: 2151098 - RNA, 19 nt, Artificial Sequence
  Description of Artificial Sequence: Synthetic oligonucleotide
  Sense strand starting at position 1712 of SEQ ID NO: 1882837
ugucaucuugaucaaguca

SEQ ID NO: 2151099 - RNA, 19 nt, Artificial Sequence
  Description of Artificial Sequence: Synthetic oligonucleotide
  Antisense strand to SEQ ID NO: 2151098
ugacuugaucaagaugaca

SEQ ID NO: 2151100 - RNA, 19 nt, Artificial Sequence
  Description of Artificial Sequence: Synthetic oligonucleotide
  Sense strand starting at position 1883 of SEQ ID NO: 1882837
aacuguacuccaggcagaa

SEQ ID NO: 2151101 - RNA, 19 nt, Artificial Sequence
  Description of Artificial Sequence: Synthetic oligonucleotide
  Antisense strand to SEQ ID NO: 2151100
uucugccuggaguacaguu

SEQ ID NO: 2151102 - RNA, 19 nt, Artificial Sequence
  Description of Artificial Sequence: Synthetic oligonucleotide
  Sense strand starting at position 1985 of SEQ ID NO: 1882837
uacuuugagucucugggau

SEQ ID NO: 2151103 - RNA, 19 nt, Artificial Sequence
  Description of Artificial Sequence: Synthetic oligonucleotide
  Antisense strand to SEQ ID NO: 2151102
aucccagagacucaaagua

SEQ ID NO: 2151104 - RNA, 19 nt, Artificial Sequence
  Description of Artificial Sequence: Synthetic oligonucleotide
  Sense strand starting at position 2056 of SEQ ID NO: 1882837
gaagcuauucuagaaguac

SEQ ID NO: 2151105 - RNA, 19 nt, Artificial Sequence
  Description of Artificial Sequence: Synthetic oligonucleotide
  Antisense strand to SEQ ID NO: 2151104
guacuucuagaauagcuuc

SEQ ID NO: 2151106 - RNA, 19 nt, Artificial Sequence
  Description of Artificial Sequence: Synthetic oligonucleotide
  Sense strand starting at position 2107 of SEQ ID NO: 1882837
gucauacccagguaguaau

SEQ ID NO: 2151107 - RNA, 19 nt, Artificial Sequence
  Description of Artificial Sequence: Synthetic oligonucleotide
  Antisense strand to SEQ ID NO: 2151106
auuacuaccuggguaugac

SEQ ID NO: 2151108 - RNA, 19 nt, Artificial Sequence
  Description of Artificial Sequence: Synthetic oligonucleotide
  Sense strand starting at position 2386 of SEQ ID NO: 1882837
gguauauaguaacuuaucu

SEQ ID NO: 2151109 - RNA, 19 nt, Artificial Sequence
  Description of Artificial Sequence: Synthetic oligonucleotide
  Antisense strand to SEQ ID NO: 2151108
agauaaguuacuauauacc

SEQ ID NO: 2151110 - RNA, 19 nt, Artificial Sequence
  Description of Artificial Sequence: Synthetic oligonucleotide
  Sense strand starting at position 2391 of SEQ ID NO: 1882837
auaguaacuuaucugaugu

SEQ ID NO: 2151111 - RNA, 19 nt, Artificial Sequence
  Description of Artificial Sequence: Synthetic oligonucleotide
  Antisense strand to SEQ ID NO: 2151110
acaucagauaaguuacuau

SEQ ID NO: 2151112 - RNA, 19 nt, Artificial Sequence
  Description of Artificial Sequence: Synthetic oligonucleotide
  Sense strand starting at position 2450 of SEQ ID NO: 1882837
ucuaaagaacacuguggau

SEQ ID NO: 2151113 - RNA, 19 nt, Artificial Sequence
  Description of Artificial Sequence: Synthetic oligonucleotide
  Antisense strand to SEQ ID NO: 2151112
auccacaguguucuuuaga

SEQ ID NO: 2151114 - RNA, 19 nt, Artificial Sequence
  Description of Artificial Sequence: Synthetic oligonucleotide
  Sense strand starting at position 2731 of SEQ ID NO: 1882837
ugauaaaguguaggguuaa

SEQ ID NO: 2151115 - RNA, 19 nt, Artificial Sequence
  Description of Artificial Sequence: Synthetic oligonucleotide
  Antisense strand to SEQ ID NO: 2151114
uuaacccuacacuuuauca

SEQ ID NO: 2151116 - RNA, 19 nt, Artificial Sequence
  Description of Artificial Sequence: Synthetic oligonucleotide
  Sense strand starting at position 2763 of SEQ ID NO: 1882837
caacuuucugugggagaua

SEQ ID NO: 2151117 - RNA, 19 nt, Artificial Sequence
  Description of Artificial Sequence: Synthetic oligonucleotide
  Antisense strand to SEQ ID NO: 2151116
uaucucccacagaaaguug

SEQ ID NO: 2151118 - RNA, 19 nt, Artificial Sequence
  Description of Artificial Sequence: Synthetic oligonucleotide
  Sense strand starting at position 2775 of SEQ ID NO: 1882837
ggagauauccucugucuag

SEQ ID NO: 2151119 - RNA, 19 nt, Artificial Sequence
  Description of Artificial Sequence: Synthetic oligonucleotide
  Antisense strand to SEQ ID NO: 2151118
cuagacagaggauaucucc

SEQ ID NO: 2151120 - RNA, 19 nt, Artificial Sequence
  Description of Artificial Sequence: Synthetic oligonucleotide
  Sense strand starting at position 2779 of SEQ ID NO: 1882837
auauccucugucuaguaua

SEQ ID NO: 2151121 - RNA, 19 nt, Artificial Sequence
  Description of Artificial Sequence: Synthetic oligonucleotide
  Antisense strand to SEQ ID NO: 2151120
uauacuagacagaggauau

SEQ ID NO: 2151122 - RNA, 19 nt, Artificial Sequence
  Description of Artificial Sequence: Synthetic oligonucleotide
  Sense strand starting at position 2873 of SEQ ID NO: 1882837
aacauaugagaggguguuu

SEQ ID NO: 2151123 - RNA, 19 nt, Artificial Sequence
  Description of Artificial Sequence: Synthetic oligonucleotide
  Antisense strand to SEQ ID NO: 2151122
aaacacccucucauauguu

SEQ ID NO: 2151124 - RNA, 19 nt, Artificial Sequence
  Description of Artificial Sequence: Synthetic oligonucleotide
  Sense strand starting at position 2963 of SEQ ID NO: 1882837
caggaauucugacuguuga

SEQ ID NO: 2151125 - RNA, 19 nt, Artificial Sequence
  Description of Artificial Sequence: Synthetic oligonucleotide
  Antisense strand to SEQ ID NO: 2151124
ucaacagucagaauuccug

SEQ ID NO: 2151126 - RNA, 19 nt, Artificial Sequence
  Description of Artificial Sequence: Synthetic oligonucleotide
  Sense strand starting at position 2964 of SEQ ID NO: 1882837
aggaauucugacuguugaa

SEQ ID NO: 2151127 - RNA, 19 nt, Artificial Sequence
  Description of Artificial Sequence: Synthetic oligonucleotide
  Antisense strand to SEQ ID NO: 2151126
uucaacagucagaauuccu

SEQ ID NO: 2151128 - RNA, 19 nt, Artificial Sequence
  Description of Artificial Sequence: Synthetic oligonucleotide
  Sense strand starting at position 2971 of SEQ ID NO: 1882837
cugacuguugaaugagaac

SEQ ID NO: 2151129 - RNA, 19 nt, Artificial Sequence
  Description of Artificial Sequence: Synthetic oligonucleotide
  Antisense strand to SEQ ID NO: 2151128
guucucauucaacagucag

SEQ ID NO: 2151130 - RNA, 19 nt, Artificial Sequence
  Description of Artificial Sequence: Synthetic oligonucleotide
  Sense strand starting at position 3187 of SEQ ID NO: 1882837
agggaagugcuguaacuac

SEQ ID NO: 2151131 - RNA, 19 nt, Artificial Sequence
  Description of Artificial Sequence: Synthetic oligonucleotide
  Antisense strand to SEQ ID NO: 2151130
guaguuacagcacuucccu

SEQ ID NO: 2151132 - RNA, 19 nt, Artificial Sequence
  Description of Artificial Sequence: Synthetic oligonucleotide
  Sense strand starting at position 3342 of SEQ ID NO: 1882837
ggaagagcuucuuccauua

SEQ ID NO: 2151133 - RNA, 19 nt, Artificial Sequence
  Description of Artificial Sequence: Synthetic oligonucleotide
  Antisense strand to SEQ ID NO: 2151132
uaauggaagaagcucuucc

SEQ ID NO: 2151134 - RNA, 19 nt, Artificial Sequence
  Description of Artificial Sequence: Synthetic oligonucleotide
  Sense strand starting at position 3469 of SEQ ID NO: 1882837
caggcaucccuugaaagua

SEQ ID NO: 2151135 - RNA, 19 nt, Artificial Sequence
  Description of Artificial Sequence: Synthetic oligonucleotide
  Antisense strand to SEQ ID NO: 2151134
uacuuucaagggaugccug

SEQ ID NO: 2151136 - RNA, 19 nt, Artificial Sequence
  Description of Artificial Sequence: Synthetic oligonucleotide
  Sense strand starting at position 3704 of SEQ ID NO: 1882837
guaaguuaacccugagaga

SEQ ID NO: 2151137 - RNA, 19 nt, Artificial Sequence
  Description of Artificial Sequence: Synthetic oligonucleotide
  Antisense strand to SEQ ID NO: 2151136
ucucucaggguuaacuuac

SEQ ID NO: 2151138 - RNA, 19 nt, Artificial Sequence
  Description of Artificial Sequence: Synthetic oligonucleotide
  Sense strand starting at position 1 of SEQ ID NO: 1882838
gagaaacagucucagauuu

SEQ ID NO: 2151139 - RNA, 19 nt, Artificial Sequence
  Description of Artificial Sequence: Synthetic oligonucleotide
  Antisense strand to SEQ ID NO: 2151138
aaaucugagacuguuucuc

SEQ ID NO: 2151140 - RNA, 19 nt, Artificial Sequence
  Description of Artificial Sequence: Synthetic oligonucleotide
  Sense strand starting at position 93 of SEQ ID NO: 1882838
acuggugcccaauaaguaa

SEQ ID NO: 2151141 - RNA, 19 nt, Artificial Sequence
  Description of Artificial Sequence: Synthetic oligonucleotide
  Antisense strand to SEQ ID NO: 2151140
uuacuuauugggcaccagu

SEQ ID NO: 2151142 - RNA, 19 nt, Artificial Sequence
  Description of Artificial Sequence: Synthetic oligonucleotide
  Sense strand starting at position 107 of SEQ ID NO: 1882838
aguaauacugaauguuaag

SEQ ID NO: 2151143 - RNA, 19 nt, Artificial Sequence
  Description of Artificial Sequence: Synthetic oligonucleotide
  Antisense strand to SEQ ID NO: 2151142
cuuaacauucaguauuacu

SEQ ID NO: 2151144 - RNA, 19 nt, Artificial Sequence
  Description of Artificial Sequence: Synthetic oligonucleotide
  Sense strand starting at position 318 of SEQ ID NO: 1882838
augaaacuguagucacuua

SEQ ID NO: 2151145 - RNA, 19 nt, Artificial Sequence
  Description of Artificial Sequence: Synthetic oligonucleotide
  Antisense strand to SEQ ID NO: 2151144
uaagugacuacaguuucau

SEQ ID NO: 2151146 - RNA, 19 nt, Artificial Sequence
  Description of Artificial Sequence: Synthetic oligonucleotide
  Sense strand starting at position 642 of SEQ ID NO: 1882838
guuauuaccuuaguauaca

SEQ ID NO: 2151147 - RNA, 19 nt, Artificial Sequence
  Description of Artificial Sequence: Synthetic oligonucleotide
  Antisense strand to SEQ ID NO: 2151146
uguauacuaagguaauaac

SEQ ID NO: 2151148 - RNA, 19 nt, Artificial Sequence
  Description of Artificial Sequence: Synthetic oligonucleotide
  Sense strand starting at position 689 of SEQ ID NO: 1882838
gaauuaacaguguaugcaa

SEQ ID NO: 2151149 - RNA, 19 nt, Artificial Sequence
  Description of Artificial Sequence: Synthetic oligonucleotide
  Antisense strand to SEQ ID NO: 2151148
uugcauacacuguuaauuc

SEQ ID NO: 2151150 - RNA, 19 nt, Artificial Sequence
  Description of Artificial Sequence: Synthetic oligonucleotide
  Sense strand starting at position 767 of SEQ ID NO: 1882838
agggcuuauagguauaagu

SEQ ID NO: 2151151 - RNA, 19 nt, Artificial Sequence
  Description of Artificial Sequence: Synthetic oligonucleotide
  Antisense strand to SEQ ID NO: 2151150
acuuauaccuauaagcccu

SEQ ID NO: 2151152 - RNA, 19 nt, Artificial Sequence
  Description of Artificial Sequence: Synthetic oligonucleotide
  Sense strand starting at position 769 of SEQ ID NO: 1882838
ggcuuauagguauaaguag

SEQ ID NO: 2151153 - RNA, 19 nt, Artificial Sequence
  Description of Artificial Sequence: Synthetic oligonucleotide
  Antisense strand to SEQ ID NO: 2151152
cuacuuauaccuauaagcc

SEQ ID NO: 2151154 - RNA, 19 nt, Artificial Sequence
  Description of Artificial Sequence: Synthetic oligonucleotide
  Sense strand starting at position 841 of SEQ ID NO: 1882838
uagagugaggccuaugguu

SEQ ID NO: 2151155 - RNA, 19 nt, Artificial Sequence
  Description of Artificial Sequence: Synthetic oligonucleotide
  Antisense strand to SEQ ID NO: 2151154
aaccauaggccucacucua

SEQ ID NO: 2151156 - RNA, 19 nt, Artificial Sequence
  Description of Artificial Sequence: Synthetic oligonucleotide
  Sense strand starting at position 1255 of SEQ ID NO: 1882838
cugauucccuuucuggaaa

SEQ ID NO: 2151157 - RNA, 19 nt, Artificial Sequence
  Description of Artificial Sequence: Synthetic oligonucleotide
  Antisense strand to SEQ ID NO: 2151156
uuuccagaaagggaaucag

SEQ ID NO: 2151158 - RNA, 19 nt, Artificial Sequence
  Description of Artificial Sequence: Synthetic oligonucleotide
  Sense strand starting at position 1423 of SEQ ID NO: 1882838
gaugguaaagcauaguuau

SEQ ID NO: 2151159 - RNA, 19 nt, Artificial Sequence
  Description of Artificial Sequence: Synthetic oligonucleotide
  Antisense strand to SEQ ID NO: 2151158
auaacuaugcuuuaccauc

SEQ ID NO: 2151160 - RNA, 19 nt, Artificial Sequence
  Description of Artificial Sequence: Synthetic oligonucleotide
  Sense strand starting at position 1595 of SEQ ID NO: 1882838
uauaaauguggguaugcau

SEQ ID NO: 2151161 - RNA, 19 nt, Artificial Sequence
  Description of Artificial Sequence: Synthetic oligonucleotide
  Antisense strand to SEQ ID NO: 2151160
augcauacccacauuuaua

SEQ ID NO: 2151162 - RNA, 19 nt, Artificial Sequence
  Description of Artificial Sequence: Synthetic oligonucleotide
  Sense strand starting at position 1657 of SEQ ID NO: 1882838
ucaggauggccaugacuua

SEQ ID NO: 2151163 - RNA, 19 nt, Artificial Sequence
  Description of Artificial Sequence: Synthetic oligonucleotide
  Antisense strand to SEQ ID NO: 2151162
uaagucauggccauccuga

SEQ ID NO: 2151164 - RNA, 19 nt, Artificial Sequence
  Description of Artificial Sequence: Synthetic oligonucleotide
  Sense strand starting at position 1662 of SEQ ID NO: 1882838
auggccaugacuuauguga

SEQ ID NO: 2151165 - RNA, 19 nt, Artificial Sequence
  Description of Artificial Sequence: Synthetic oligonucleotide
  Antisense strand to SEQ ID NO: 2151164
ucacauaagucauggccau

SEQ ID NO: 2151166 - RNA, 19 nt, Artificial Sequence
  Description of Artificial Sequence: Synthetic oligonucleotide
  Sense strand starting at position 1718 of SEQ ID NO: 1882838
uaggaauugugcucauuga

SEQ ID NO: 2151167 - RNA, 19 nt, Artificial Sequence
  Description of Artificial Sequence: Synthetic oligonucleotide
  Antisense strand to SEQ ID NO: 2151166
ucaaugagcacaauuccua

SEQ ID NO: 2151168 - RNA, 19 nt, Artificial Sequence
  Description of Artificial Sequence: Synthetic oligonucleotide
  Sense strand starting at position 1719 of SEQ ID NO: 1882838
aggaauugugcucauugag

SEQ ID NO: 2151169 - RNA, 19 nt, Artificial Sequence
  Description of Artificial Sequence: Synthetic oligonucleotide
  Antisense strand to SEQ ID NO: 2151168
cucaaugagcacaauuccu

SEQ ID NO: 2151170 - RNA, 19 nt, Artificial Sequence
  Description of Artificial Sequence: Synthetic oligonucleotide
  Sense strand starting at position 1722 of SEQ ID NO: 1882838
aauugugcucauugagaga

SEQ ID NO: 2151171 - RNA, 19 nt, Artificial Sequence
  Description of Artificial Sequence: Synthetic oligonucleotide
  Antisense strand to SEQ ID NO: 2151170
ucucucaaugagcacaauu

SEQ ID NO: 2151172 - RNA, 19 nt, Artificial Sequence
  Description of Artificial Sequence: Synthetic oligonucleotide
  Sense strand starting at position 1804 of SEQ ID NO: 1882838
gagauuuguuucuuucugu

SEQ ID NO: 2151173 - RNA, 19 nt, Artificial Sequence
  Description of Artificial Sequence: Synthetic oligonucleotide
  Antisense strand to SEQ ID NO: 2151172
acagaaagaaacaaaucuc

SEQ ID NO: 2151174 - RNA, 19 nt, Artificial Sequence
  Description of Artificial Sequence: Synthetic oligonucleotide
  Sense strand starting at position 1805 of SEQ ID NO: 1882838
agauuuguuucuuucuguu

SEQ ID NO: 2151175 - RNA, 19 nt, Artificial Sequence
  Description of Artificial Sequence: Synthetic oligonucleotide
  Antisense strand to SEQ ID NO: 2151174
aacagaaagaaacaaaucu

SEQ ID NO: 2151176 - RNA, 19 nt, Artificial Sequence
  Description of Artificial Sequence: Synthetic oligonucleotide
  Sense strand starting at position 1894 of SEQ ID NO: 1882838
cuuggaaucacagguugau

SEQ ID NO: 2151177 - RNA, 19 nt, Artificial Sequence
  Description of Artificial Sequence: Synthetic oligonucleotide
  Antisense strand to SEQ ID NO: 2151176
aucaaccugugauuccaag

SEQ ID NO: 2151178 - RNA, 19 nt, Artificial Sequence
  Description of Artificial Sequence: Synthetic oligonucleotide
  Sense strand starting at position 1897 of SEQ ID NO: 1882838
ggaaucacagguugaugua

SEQ ID NO: 2151179 - RNA, 19 nt, Artificial Sequence
  Description of Artificial Sequence: Synthetic oligonucleotide
  Antisense strand to SEQ ID NO: 2151178
uacaucaaccugugauucc

SEQ ID NO: 2151180 - RNA, 19 nt, Artificial Sequence
  Description of Artificial Sequence: Synthetic oligonucleotide
  Sense strand starting at position 2125 of SEQ ID NO: 1882838
gcaugcagccaugauaaga

SEQ ID NO: 2151181 - RNA, 19 nt, Artificial Sequence
  Description of Artificial Sequence: Synthetic oligonucleotide
  Antisense strand to SEQ ID NO: 2151180
ucuuaucauggcugcaugc

SEQ ID NO: 2151182 - RNA, 19 nt, Artificial Sequence
  Description of Artificial Sequence: Synthetic oligonucleotide
  Sense strand starting at position 2141 of SEQ ID NO: 1882838
agaggaagccagugaugga

SEQ ID NO: 2151183 - RNA, 19 nt, Artificial Sequence
  Description of Artificial Sequence: Synthetic oligonucleotide
  Antisense strand to SEQ ID NO: 2151182
uccaucacuggcuuccucu

SEQ ID NO: 2151184 - RNA, 19 nt, Artificial Sequence
  Description of Artificial Sequence: Synthetic oligonucleotide
  Sense strand starting at position 2319 of SEQ ID NO: 1882838
gauucuagaaggugucgaa

SEQ ID NO: 2151185 - RNA, 19 nt, Artificial Sequence
  Description of Artificial Sequence: Synthetic oligonucleotide
  Antisense strand to SEQ ID NO: 2151184
uucgacaccuucuagaauc

SEQ ID NO: 2151186 - RNA, 19 nt, Artificial Sequence
  Description of Artificial Sequence: Synthetic oligonucleotide
  Sense strand starting at position 2323 of SEQ ID NO: 1882838
cuagaaggugucgaaguuu

SEQ ID NO: 2151187 - RNA, 19 nt, Artificial Sequence
  Description of Artificial Sequence: Synthetic oligonucleotide
  Antisense strand to SEQ ID NO: 2151186
aaacuucgacaccuucuag

SEQ ID NO: 2151188 - RNA, 19 nt, Artificial Sequence
  Description of Artificial Sequence: Synthetic oligonucleotide
  Sense strand starting at position 2335 of SEQ ID NO: 1882838
gaaguuuacuagcucagau

SEQ ID NO: 2151189 - RNA, 19 nt, Artificial Sequence
  Description of Artificial Sequence: Synthetic oligonucleotide
  Antisense strand to SEQ ID NO: 2151188
aucugagcuaguaaacuuc

SEQ ID NO: 2151190 - RNA, 19 nt, Artificial Sequence
  Description of Artificial Sequence: Synthetic oligonucleotide
  Sense strand starting at position 2337 of SEQ ID NO: 1882838
aguuuacuagcucagauaa

SEQ ID NO: 2151191 - RNA, 19 nt, Artificial Sequence
  Description of Artificial Sequence: Synthetic oligonucleotide
  Antisense strand to SEQ ID NO: 2151190
uuaucugagcuaguaaacu

SEQ ID NO: 2151192 - RNA, 19 nt, Artificial Sequence
  Description of Artificial Sequence: Synthetic oligonucleotide
  Sense strand starting at position 2463 of SEQ ID NO: 1882838
gaugcuuaugcagagccaa

SEQ ID NO: 2151193 - RNA, 19 nt, Artificial Sequence
  Description of Artificial Sequence: Synthetic oligonucleotide
  Antisense strand to SEQ ID NO: 2151192
uuggcucugcauaagcauc

SEQ ID NO: 2151194 - RNA, 19 nt, Artificial Sequence
  Description of Artificial Sequence: Synthetic oligonucleotide
  Sense strand starting at position 2620 of SEQ ID NO: 1882838
uagaaucuauuguuuggaa

SEQ ID NO: 2151195 - RNA, 19 nt, Artificial Sequence
  Description of Artificial Sequence: Synthetic oligonucleotide
  Antisense strand to SEQ ID NO: 2151194
uuccaaacaauagauucua

SEQ ID NO: 2151196 - RNA, 19 nt, Artificial Sequence
  Description of Artificial Sequence: Synthetic oligonucleotide
  Sense strand starting at position 2621 of SEQ ID NO: 1882838
agaaucuauuguuuggaaa

SEQ ID NO: 2151197 - RNA, 19 nt, Artificial Sequence
  Description of Artificial Sequence: Synthetic oligonucleotide
  Antisense strand to SEQ ID NO: 2151196
uuuccaaacaauagauucu

SEQ ID NO: 2151198 - RNA, 19 nt, Artificial Sequence
  Description of Artificial Sequence: Synthetic oligonucleotide
  Sense strand starting at position 2710 of SEQ ID NO: 1882838
ugcauuacaggucauagga

SEQ ID NO: 2151199 - RNA, 19 nt, Artificial Sequence
  Description of Artificial Sequence: Synthetic oligonucleotide
  Antisense strand to SEQ ID NO: 2151198
uccuaugaccuguaaugca

SEQ ID NO: 2151200 - RNA, 19 nt, Artificial Sequence
  Description of Artificial Sequence: Synthetic oligonucleotide
  Sense strand starting at position 2753 of SEQ ID NO: 1882838
gagguaauauuguuccuca

SEQ ID NO: 2151201 - RNA, 19 nt, Artificial Sequence
  Description of Artificial Sequence: Synthetic oligonucleotide
  Antisense strand to SEQ ID NO: 2151200
ugaggaacaauauuaccuc

SEQ ID NO: 2151202 - RNA, 19 nt, Artificial Sequence
  Description of Artificial Sequence: Synthetic oligonucleotide
  Sense strand starting at position 3109 of SEQ ID NO: 1882838
ggacacagcugacuuagua

SEQ ID NO: 2151203 - RNA, 19 nt, Artificial Sequence
  Description of Artificial Sequence: Synthetic oligonucleotide
  Antisense strand to SEQ ID NO: 2151202
uacuaagucagcugugucc

SEQ ID NO: 2151204 - RNA, 19 nt, Artificial Sequence
  Description of Artificial Sequence: Synthetic oligonucleotide
  Sense strand starting at position 3116 of SEQ ID NO: 1882838
gcugacuuaguaggaagaa

SEQ ID NO: 2151205 - RNA, 19 nt, Artificial Sequence
  Description of Artificial Sequence: Synthetic oligonucleotide
  Antisense strand to SEQ ID NO: 2151204
uucuuccuacuaagucagc

SEQ ID NO: 2151206 - RNA, 19 nt, Artificial Sequence
  Description of Artificial Sequence: Synthetic oligonucleotide
  Sense strand starting at position 3139 of SEQ ID NO: 1882838
gaagaauuaucuccuggua

SEQ ID NO: 2151207 - RNA, 19 nt, Artificial Sequence
  Description of Artificial Sequence: Synthetic oligonucleotide
  Antisense strand to SEQ ID NO: 2151206
uaccaggagauaauucuuc

SEQ ID NO: 2151208 - RNA, 19 nt, Artificial Sequence
  Description of Artificial Sequence: Synthetic oligonucleotide
  Sense strand starting at position 3532 of SEQ ID NO: 1882838
ggcaguggaauguaaguuu

SEQ ID NO: 2151209 - RNA, 19 nt, Artificial Sequence
  Description of Artificial Sequence: Synthetic oligonucleotide
  Antisense strand to SEQ ID NO: 2151208
aaacuuacauuccacugcc

SEQ ID NO: 2151210 - RNA, 19 nt, Artificial Sequence
  Description of Artificial Sequence: Synthetic oligonucleotide
  Sense strand starting at position 3642 of SEQ ID NO: 1882838
guguucugcccacuuguca

SEQ ID NO: 2151211 - RNA, 19 nt, Artificial Sequence
  Description of Artificial Sequence: Synthetic oligonucleotide
  Antisense strand to SEQ ID NO: 2151210
ugacaagugggcagaacac

SEQ ID NO: 2151212 - RNA, 19 nt, Artificial Sequence
  Description of Artificial Sequence: Synthetic oligonucleotide
  Sense strand starting at position 3653 of SEQ ID NO: 1882838
acuugucaacauggguaaa

SEQ ID NO: 2151213 - RNA, 19 nt, Artificial Sequence
  Description of Artificial Sequence: Synthetic oligonucleotide
  Antisense strand to SEQ ID NO: 2151212
uuuacccauguugacaagu

SEQ ID NO: 2151214 - RNA, 19 nt, Artificial Sequence
  Description of Artificial Sequence: Synthetic oligonucleotide
  Sense strand starting at position 3655 of SEQ ID NO: 1882838
uugucaacauggguaaaga

SEQ ID NO: 2151215 - RNA, 19 nt, Artificial Sequence
  Description of Artificial Sequence: Synthetic oligonucleotide
  Antisense strand to SEQ ID NO: 2151214
ucuuuacccauguugacaa

SEQ ID NO: 2151216 - RNA, 19 nt, Artificial Sequence
  Description of Artificial Sequence: Synthetic oligonucleotide
  Sense strand starting at position 3912 of SEQ ID NO: 1882838
ugaguauugcaagaucaug

SEQ ID NO: 2151217 - RNA, 19 nt, Artificial Sequence
  Description of Artificial Sequence: Synthetic oligonucleotide
  Antisense strand to SEQ ID NO: 2151216
caugaucuugcaauacuca

SEQ ID NO: 2151218 - RNA, 19 nt, Artificial Sequence
  Description of Artificial Sequence: Synthetic oligonucleotide
  Sense strand starting at position 1493 of SEQ ID NO: 1882839
ccuugaaacguguaaguau

SEQ ID NO: 2151219 - RNA, 19 nt, Artificial Sequence
  Description of Artificial Sequence: Synthetic oligonucleotide
  Antisense strand to SEQ ID NO: 2151218
auacuuacacguuucaagg

SEQ ID NO: 2151220 - RNA, 19 nt, Artificial Sequence
  Description of Artificial Sequence: Synthetic oligonucleotide
  Sense strand starting at position 1496 of SEQ ID NO: 1882839
ugaaacguguaaguauaau

SEQ ID NO: 2151221 - RNA, 19 nt, Artificial Sequence
  Description of Artificial Sequence: Synthetic oligonucleotide
  Antisense strand to SEQ ID NO: 2151220
auuauacuuacacguuuca

SEQ ID NO: 2151222 - RNA, 19 nt, Artificial Sequence
  Description of Artificial Sequence: Synthetic oligonucleotide
  Sense strand starting at position 1502 of SEQ ID NO: 1882839
guguaaguauaaucagaga

SEQ ID NO: 2151223 - RNA, 19 nt, Artificial Sequence
  Description of Artificial Sequence: Synthetic oligonucleotide
  Antisense strand to SEQ ID NO: 2151222
ucucugauuauacuuacac

SEQ ID NO: 2151224 - RNA, 19 nt, Artificial Sequence
  Description of Artificial Sequence: Synthetic oligonucleotide
  Sense strand starting at position 1507 of SEQ ID NO: 1882839
aguauaaucagagaggugu

SEQ ID NO: 2151225 - RNA, 19 nt, Artificial Sequence
  Description of Artificial Sequence: Synthetic oligonucleotide
  Antisense strand to SEQ ID NO: 2151224
acaccucucugauuauacu

SEQ ID NO: 2151226 - RNA, 19 nt, Artificial Sequence
  Description of Artificial Sequence: Synthetic oligonucleotide
  Sense strand starting at position 2347 of SEQ ID NO: 1882839
guagguacugguggaauca

SEQ ID NO: 2151227 - RNA, 19 nt, Artificial Sequence
  Description of Artificial Sequence: Synthetic oligonucleotide
  Antisense strand to SEQ ID NO: 2151226
ugauuccaccaguaccuac

SEQ ID NO: 2151228 - RNA, 19 nt, Artificial Sequence
  Description of Artificial Sequence: Synthetic oligonucleotide
  Sense strand starting at position 2356 of SEQ ID NO: 1882839
gguggaaucaccugacuuu

SEQ ID NO: 2151229 - RNA, 19 nt, Artificial Sequence
  Description of Artificial Sequence: Synthetic oligonucleotide
  Antisense strand to SEQ ID NO: 2151228
aaagucaggugauuccacc

SEQ ID NO: 2151230 - RNA, 19 nt, Artificial Sequence
  Description of Artificial Sequence: Synthetic oligonucleotide
  Sense strand starting at position 2463 of SEQ ID NO: 1882839
gguagaugaaccuguauca

SEQ ID NO: 2151231 - RNA, 19 nt, Artificial Sequence
  Description of Artificial Sequence: Synthetic oligonucleotide
  Antisense strand to SEQ ID NO: 2151230
ugauacagguucaucuacc

SEQ ID NO: 2151232 - RNA, 19 nt, Artificial Sequence
  Description of Artificial Sequence: Synthetic oligonucleotide
  Sense strand starting at position 2470 of SEQ ID NO: 1882839
gaaccuguaucaguaagac

SEQ ID NO: 2151233 - RNA, 19 nt, Artificial Sequence
  Description of Artificial Sequence: Synthetic oligonucleotide
  Antisense strand to SEQ ID NO: 2151232
gucuuacugauacagguuc

SEQ ID NO: 2151234 - RNA, 19 nt, Artificial Sequence
  Description of Artificial Sequence: Synthetic oligonucleotide
  Sense strand starting at position 2657 of SEQ ID NO: 1882839
aagcaucagggaugcauaa

SEQ ID NO: 2151235 - RNA, 19 nt, Artificial Sequence
  Description of Artificial Sequence: Synthetic oligonucleotide
  Antisense strand to SEQ ID NO: 2151234
uuaugcaucccugaugcuu

SEQ ID NO: 2151236 - RNA, 19 nt, Artificial Sequence
  Description of Artificial Sequence: Synthetic oligonucleotide
  Sense strand starting at position 2717 of SEQ ID NO: 1882839
ugauaagacacuugggcuu

SEQ ID NO: 2151237 - RNA, 19 nt, Artificial Sequence
  Description of Artificial Sequence: Synthetic oligonucleotide
  Antisense strand to SEQ ID NO: 2151236
aagcccaagugucuuauca

SEQ ID NO: 2151238 - RNA, 19 nt, Artificial Sequence
  Description of Artificial Sequence: Synthetic oligonucleotide
  Sense strand starting at position 2756 of SEQ ID NO: 1882839
agagauaaggucuggcuuu

SEQ ID NO: 2151239 - RNA, 19 nt, Artificial Sequence
  Description of Artificial Sequence: Synthetic oligonucleotide
  Antisense strand to SEQ ID NO: 2151238
aaagccagaccuuaucucu

SEQ ID NO: 2151240 - RNA, 19 nt, Artificial Sequence
  Description of Artificial Sequence: Synthetic oligonucleotide
  Sense strand starting at position 2819 of SEQ ID NO: 1882839
agaccuaauugugcaugaa

SEQ ID NO: 2151241 - RNA, 19 nt, Artificial Sequence
  Description of Artificial Sequence: Synthetic oligonucleotide
  Antisense strand to SEQ ID NO: 2151240
uucaugcacaauuaggucu

SEQ ID NO: 2151242 - RNA, 19 nt, Artificial Sequence
  Description of Artificial Sequence: Synthetic oligonucleotide
  Sense strand starting at position 2820 of SEQ ID NO: 1882839
gaccuaauugugcaugaau

SEQ ID NO: 2151243 - RNA, 19 nt, Artificial Sequence
  Description of Artificial Sequence: Synthetic oligonucleotide
  Antisense strand to SEQ ID NO: 2151242
auucaugcacaauuagguc

SEQ ID NO: 2151244 - RNA, 19 nt, Artificial Sequence
  Description of Artificial Sequence: Synthetic oligonucleotide
  Sense strand starting at position 2823 of SEQ ID NO: 1882839
cuaauugugcaugaauucu

SEQ ID NO: 2151245 - RNA, 19 nt, Artificial Sequence
  Description of Artificial Sequence: Synthetic oligonucleotide
  Antisense strand to SEQ ID NO: 2151244
agaauucaugcacaauuag

SEQ ID NO: 2151246 - RNA, 19 nt, Artificial Sequence
  Description of Artificial Sequence: Synthetic oligonucleotide
  Sense strand starting at position 2838 of SEQ ID NO: 1882839
uucuaacuugcggaauguu

SEQ ID NO: 2151247 - RNA, 19 nt, Artificial Sequence
  Description of Artificial Sequence: Synthetic oligonucleotide
  Antisense strand to SEQ ID NO: 2151246
aacauuccgcaaguuagaa

SEQ ID NO: 2151248 - RNA, 19 nt, Artificial Sequence
  Description of Artificial Sequence: Synthetic oligonucleotide
  Sense strand starting at position 2924 of SEQ ID NO: 1882839
aguguacagguguauauau

SEQ ID NO: 2151249 - RNA, 19 nt, Artificial Sequence
  Description of Artificial Sequence: Synthetic oligonucleotide
  Antisense strand to SEQ ID NO: 2151248
auauauacaccuguacacu

SEQ ID NO: 2151250 - RNA, 19 nt, Artificial Sequence
  Description of Artificial Sequence: Synthetic oligonucleotide
  Sense strand starting at position 3006 of SEQ ID NO: 1882839
gcagacaguuucuuugaca

SEQ ID NO: 2151251 - RNA, 19 nt, Artificial Sequence
  Description of Artificial Sequence: Synthetic oligonucleotide
  Antisense strand to SEQ ID NO: 2151250
ugucaaagaaacugucugc

SEQ ID NO: 2151252 - RNA, 19 nt, Artificial Sequence
  Description of Artificial Sequence: Synthetic oligonucleotide
  Sense strand starting at position 3081 of SEQ ID NO: 1882839
ggcauagaaacauguuaag

SEQ ID NO: 2151253 - RNA, 19 nt, Artificial Sequence
  Description of Artificial Sequence: Synthetic oligonucleotide
  Antisense strand to SEQ ID NO: 2151252
cuuaacauguuucuaugcc

SEQ ID NO: 2151254 - RNA, 19 nt, Artificial Sequence
  Description of Artificial Sequence: Synthetic oligonucleotide
  Sense strand starting at position 3087 of SEQ ID NO: 1882839
gaaacauguuaaguguauc

SEQ ID NO: 2151255 - RNA, 19 nt, Artificial Sequence
  Description of Artificial Sequence: Synthetic oligonucleotide
  Antisense strand to SEQ ID NO: 2151254
gauacacuuaacauguuuc

SEQ ID NO: 2151256 - RNA, 19 nt, Artificial Sequence
  Description of Artificial Sequence: Synthetic oligonucleotide
  Sense strand starting at position 3090 of SEQ ID NO: 1882839
acauguuaaguguaucuaa

SEQ ID NO: 2151257 - RNA, 19 nt, Artificial Sequence
  Description of Artificial Sequence: Synthetic oligonucleotide
  Antisense strand to SEQ ID NO: 2151256
uuagauacacuuaacaugu

SEQ ID NO: 2151258 - RNA, 19 nt, Artificial Sequence
  Description of Artificial Sequence: Synthetic oligonucleotide
  Sense strand starting at position 3144 of SEQ ID NO: 1882839
ugucacuguguuuaggaau

SEQ ID NO: 2151259 - RNA, 19 nt, Artificial Sequence
  Description of Artificial Sequence: Synthetic oligonucleotide
  Antisense strand to SEQ ID NO: 2151258
auuccuaaacacagugaca

SEQ ID NO: 2151260 - RNA, 19 nt, Artificial Sequence
  Description of Artificial Sequence: Synthetic oligonucleotide
  Sense strand starting at position 3458 of SEQ ID NO: 1882839
aagcauuuauuagagguca

SEQ ID NO: 2151261 - RNA, 19 nt, Artificial Sequence
  Description of Artificial Sequence: Synthetic oligonucleotide
  Antisense strand to SEQ ID NO: 2151260
ugaccucuaauaaaugcuu

SEQ ID NO: 2151262 - RNA, 19 nt, Artificial Sequence
  Description of Artificial Sequence: Synthetic oligonucleotide
  Sense strand starting at position 3481 of SEQ ID NO: 1882839
ggcaucauuacaggaguaa

SEQ ID NO: 2151263 - RNA, 19 nt, Artificial Sequence
  Description of Artificial Sequence: Synthetic oligonucleotide
  Antisense strand to SEQ ID NO: 2151262
uuacuccuguaaugaugcc

SEQ ID NO: 2151264 - RNA, 19 nt, Artificial Sequence
  Description of Artificial Sequence: Synthetic oligonucleotide
  Sense strand starting at position 3482 of SEQ ID NO: 1882839
gcaucauuacaggaguaau

SEQ ID NO: 2151265 - RNA, 19 nt, Artificial Sequence
  Description of Artificial Sequence: Synthetic oligonucleotide
  Antisense strand to SEQ ID NO: 2151264
auuacuccuguaaugaugc

SEQ ID NO: 2151266 - RNA, 19 nt, Artificial Sequence
  Description of Artificial Sequence: Synthetic oligonucleotide
  Sense strand starting at position 3492 of SEQ ID NO: 1882839
aggaguaauugcucacuau

SEQ ID NO: 2151267 - RNA, 19 nt, Artificial Sequence
  Description of Artificial Sequence: Synthetic oligonucleotide
  Antisense strand to SEQ ID NO: 2151266
auagugagcaauuacuccu

SEQ ID NO: 2151268 - RNA, 19 nt, Artificial Sequence
  Description of Artificial Sequence: Synthetic oligonucleotide
  Sense strand starting at position 3493 of SEQ ID NO: 1882839
ggaguaauugcucacuaua

SEQ ID NO: 2151269 - RNA, 19 nt, Artificial Sequence
  Description of Artificial Sequence: Synthetic oligonucleotide
  Antisense strand to SEQ ID NO: 2151268
uauagugagcaauuacucc

SEQ ID NO: 2151270 - RNA, 19 nt, Artificial Sequence
  Description of Artificial Sequence: Synthetic oligonucleotide
  Sense strand starting at position 3496 of SEQ ID NO: 1882839
guaauugcucacuauaggu

SEQ ID NO: 2151271 - RNA, 19 nt, Artificial Sequence
  Description of Artificial Sequence: Synthetic oligonucleotide
  Antisense strand to SEQ ID NO: 2151270
accuauagugagcaauuac

SEQ ID NO: 2151272 - RNA, 19 nt, Artificial Sequence
  Description of Artificial Sequence: Synthetic oligonucleotide
  Sense strand starting at position 3610 of SEQ ID NO: 1882839
agguuuggcgucgcucaua

SEQ ID NO: 2151273 - RNA, 19 nt, Artificial Sequence
  Description of Artificial Sequence: Synthetic oligonucleotide
  Antisense strand to SEQ ID NO: 2151272
uaugagcgacgccaaaccu

SEQ ID NO: 2151274 - RNA, 19 nt, Artificial Sequence
  Description of Artificial Sequence: Synthetic oligonucleotide
  Sense strand starting at position 3706 of SEQ ID NO: 1882839
uggccugaaagaugcuaua

SEQ ID NO: 2151275 - RNA, 19 nt, Artificial Sequence
  Description of Artificial Sequence: Synthetic oligonucleotide
  Antisense strand to SEQ ID NO: 2151274
uauagcaucuuucaggcca

SEQ ID NO: 2151276 - RNA, 19 nt, Artificial Sequence
  Description of Artificial Sequence: Synthetic oligonucleotide
  Sense strand starting at position 3728 of SEQ ID NO: 1882839
uugcuaacacuguagaaua

SEQ ID NO: 2151277 - RNA, 19 nt, Artificial Sequence
  Description of Artificial Sequence: Synthetic oligonucleotide
  Antisense strand to SEQ ID NO: 2151276
uauucuacaguguuagcaa

SEQ ID NO: 2151278 - RNA, 19 nt, Artificial Sequence
  Description of Artificial Sequence: Synthetic oligonucleotide
  Sense strand starting at position 3823 of SEQ ID NO: 1882839
uccaaauuauagguagauu

SEQ ID NO: 2151279 - RNA, 19 nt, Artificial Sequence
  Description of Artificial Sequence: Synthetic oligonucleotide
  Antisense strand to SEQ ID NO: 2151278
aaucuaccuauaauuugga

SEQ ID NO: 2151280 - RNA, 19 nt, Artificial Sequence
  Description of Artificial Sequence: Synthetic oligonucleotide
  Sense strand starting at position 3876 of SEQ ID NO: 1882839
aggcucauucuggaaaguu

SEQ ID NO: 2151281 - RNA, 19 nt, Artificial Sequence
  Description of Artificial Sequence: Synthetic oligonucleotide
  Antisense strand to SEQ ID NO: 2151280
aacuuuccagaaugagccu

SEQ ID NO: 2151282 - RNA, 19 nt, Artificial Sequence
  Description of Artificial Sequence: Synthetic oligonucleotide
  Sense strand starting at position 3884 of SEQ ID NO: 1882839
ucuggaaaguuucuauacu

SEQ ID NO: 2151283 - RNA, 19 nt, Artificial Sequence
  Description of Artificial Sequence: Synthetic oligonucleotide
  Antisense strand to SEQ ID NO: 2151282
aguauagaaacuuuccaga

SEQ ID NO: 2151284 - RNA, 19 nt, Artificial Sequence
  Description of Artificial Sequence: Synthetic oligonucleotide
  Sense strand starting at position 3896 of SEQ ID NO: 1882839
cuauacuuuccaugguaua

SEQ ID NO: 2151285 - RNA, 19 nt, Artificial Sequence
  Description of Artificial Sequence: Synthetic oligonucleotide
  Antisense strand to SEQ ID NO: 2151284
uauaccauggaaaguauag

SEQ ID NO: 2151286 - RNA, 19 nt, Artificial Sequence
  Description of Artificial Sequence: Synthetic oligonucleotide
  Sense strand starting at position 3907 of SEQ ID NO: 1882839
augguauaccaauguggaa

SEQ ID NO: 2151287 - RNA, 19 nt, Artificial Sequence
  Description of Artificial Sequence: Synthetic oligonucleotide
  Antisense strand to SEQ ID NO: 2151286
uuccacauugguauaccau

SEQ ID NO: 2151288 - RNA, 19 nt, Artificial Sequence
  Description of Artificial Sequence: Synthetic oligonucleotide
  Sense strand starting at position 3919 of SEQ ID NO: 1882839
uguggaaacuguccaacau

SEQ ID NO: 2151289 - RNA, 19 nt, Artificial Sequence
  Description of Artificial Sequence: Synthetic oligonucleotide
  Antisense strand to SEQ ID NO: 2151288
auguuggacaguuuccaca

SEQ ID NO: 2151290 - RNA, 19 nt, Artificial Sequence
  Description of Artificial Sequence: Synthetic oligonucleotide
  Sense strand starting at position 3969 of SEQ ID NO: 1882839
gccacuguggcucagacaa

SEQ ID NO: 2151291 - RNA, 19 nt, Artificial Sequence
  Description of Artificial Sequence: Synthetic oligonucleotide
  Antisense strand to SEQ ID NO: 2151290
uugucugagccacaguggc

SEQ ID NO: 2151292 - RNA, 19 nt, Artificial Sequence
  Description of Artificial Sequence: Synthetic oligonucleotide
  Sense strand starting at position 3980 of SEQ ID NO: 1882839
ucagacaagugcuugggaa

SEQ ID NO: 2151293 - RNA, 19 nt, Artificial Sequence
  Description of Artificial Sequence: Synthetic oligonucleotide
  Antisense strand to SEQ ID NO: 2151292
uucccaagcacuugucuga

SEQ ID NO: 2151294 - RNA, 19 nt, Artificial Sequence
  Description of Artificial Sequence: Synthetic oligonucleotide
  Sense strand starting at position 3981 of SEQ ID NO: 1882839
cagacaagugcuugggaau

SEQ ID NO: 2151295 - RNA, 19 nt, Artificial Sequence
  Description of Artificial Sequence: Synthetic oligonucleotide
  Antisense strand to SEQ ID NO: 2151294
auucccaagcacuugucug

SEQ ID NO: 2151296 - RNA, 19 nt, Artificial Sequence
  Description of Artificial Sequence: Synthetic oligonucleotide
  Sense strand starting at position 3982 of SEQ ID NO: 1882839
agacaagugcuugggaauu

SEQ ID NO: 2151297 - RNA, 19 nt, Artificial Sequence
  Description of Artificial Sequence: Synthetic oligonucleotide
  Antisense strand to SEQ ID NO: 2151296
aauucccaagcacuugucu

SEQ ID NO: 2151298 - RNA, 19 nt, Artificial Sequence
  Description of Artificial Sequence: Synthetic oligonucleotide
  Sense strand starting at position 58 of SEQ ID NO: 1882840
ucaguacugugauuacuua

SEQ ID NO: 2151299 - RNA, 19 nt, Artificial Sequence
  Description of Artificial Sequence: Synthetic oligonucleotide
  Antisense strand to SEQ ID NO: 2151298
uaaguaaucacaguacuga

SEQ ID NO: 2151300 - RNA, 19 nt, Artificial Sequence
  Description of Artificial Sequence: Synthetic oligonucleotide
  Sense strand starting at position 518 of SEQ ID NO: 1882840
cccagugaccuguacaaau

SEQ ID NO: 2151301 - RNA, 19 nt, Artificial Sequence
  Description of Artificial Sequence: Synthetic oligonucleotide
  Antisense strand to SEQ ID NO: 2151300
auuuguacaggucacuggg

SEQ ID NO: 2151302 - RNA, 19 nt, Artificial Sequence
  Description of Artificial Sequence: Synthetic oligonucleotide
  Sense strand starting at position 520 of SEQ ID NO: 1882840
cagugaccuguacaaaugu

SEQ ID NO: 2151303 - RNA, 19 nt, Artificial Sequence
  Description of Artificial Sequence: Synthetic oligonucleotide
  Antisense strand to SEQ ID NO: 2151302
acauuuguacaggucacug

SEQ ID NO: 2151304 - RNA, 19 nt, Artificial Sequence
  Description of Artificial Sequence: Synthetic oligonucleotide
  Sense strand starting at position 583 of SEQ ID NO: 1882840
aaggucuguuaaccuaaga

SEQ ID NO: 2151305 - RNA, 19 nt, Artificial Sequence
  Description of Artificial Sequence: Synthetic oligonucleotide
  Antisense strand to SEQ ID NO: 2151304
ucuuagguuaacagaccuu

SEQ ID NO: 2151306 - RNA, 19 nt, Artificial Sequence
  Description of Artificial Sequence: Synthetic oligonucleotide
  Sense strand starting at position 619 of SEQ ID NO: 1882840
auuaaagagccugauccuu

SEQ ID NO: 2151307 - RNA, 19 nt, Artificial Sequence
  Description of Artificial Sequence: Synthetic oligonucleotide
  Antisense strand to SEQ ID NO: 2151306
aaggaucaggcucuuuaau

SEQ ID NO: 2151308 - RNA, 19 nt, Artificial Sequence
  Description of Artificial Sequence: Synthetic oligonucleotide
  Sense strand starting at position 639 of SEQ ID NO: 1882840
uguuaaaugccucaguuaa

SEQ ID NO: 2151309 - RNA, 19 nt, Artificial Sequence
  Description of Artificial Sequence: Synthetic oligonucleotide
  Antisense strand to SEQ ID NO: 2151308
uuaacugaggcauuuaaca

SEQ ID NO: 2151310 - RNA, 19 nt, Artificial Sequence
  Description of Artificial Sequence: Synthetic oligonucleotide
  Sense strand starting at position 684 of SEQ ID NO: 1882840
aauguugcucuggacuuaa

SEQ ID NO: 2151311 - RNA, 19 nt, Artificial Sequence
  Description of Artificial Sequence: Synthetic oligonucleotide
  Antisense strand to SEQ ID NO: 2151310
uuaaguccagagcaacauu

SEQ ID NO: 2151312 - RNA, 19 nt, Artificial Sequence
  Description of Artificial Sequence: Synthetic oligonucleotide
  Sense strand starting at position 776 of SEQ ID NO: 1882840
gcaagagcccuauauucua

SEQ ID NO: 2151313 - RNA, 19 nt, Artificial Sequence
  Description of Artificial Sequence: Synthetic oligonucleotide
  Antisense strand to SEQ ID NO: 2151312
uagaauauagggcucuugc

SEQ ID NO: 2151314 - RNA, 19 nt, Artificial Sequence
  Description of Artificial Sequence: Synthetic oligonucleotide
  Sense strand starting at position 779 of SEQ ID NO: 1882840
agagcccuauauucuaaga

SEQ ID NO: 2151315 - RNA, 19 nt, Artificial Sequence
  Description of Artificial Sequence: Synthetic oligonucleotide
  Antisense strand to SEQ ID NO: 2151314
ucuuagaauauagggcucu

SEQ ID NO: 2151316 - RNA, 19 nt, Artificial Sequence
  Description of Artificial Sequence: Synthetic oligonucleotide
  Sense strand starting at position 878 of SEQ ID NO: 1882840
aguccaucuguuuauaaau

SEQ ID NO: 2151317 - RNA, 19 nt, Artificial Sequence
  Description of Artificial Sequence: Synthetic oligonucleotide
  Antisense strand to SEQ ID NO: 2151316
auuuauaaacagauggacu

SEQ ID NO: 2151318 - RNA, 19 nt, Artificial Sequence
  Description of Artificial Sequence: Synthetic oligonucleotide
  Sense strand starting at position 1213 of SEQ ID NO: 1882840
ccuuuaacagagugaaauc

SEQ ID NO: 2151319 - RNA, 19 nt, Artificial Sequence
  Description of Artificial Sequence: Synthetic oligonucleotide
  Antisense strand to SEQ ID NO: 2151318
gauuucacucuguuaaagg

SEQ ID NO: 2151320 - RNA, 19 nt, Artificial Sequence
  Description of Artificial Sequence: Synthetic oligonucleotide
  Sense strand starting at position 1222 of SEQ ID NO: 1882840
gagugaaaucagcaaaguu

SEQ ID NO: 2151321 - RNA, 19 nt, Artificial Sequence
  Description of Artificial Sequence: Synthetic oligonucleotide
  Antisense strand to SEQ ID NO: 2151320
aacuuugcugauuucacuc

SEQ ID NO: 2151322 - RNA, 19 nt, Artificial Sequence
  Description of Artificial Sequence: Synthetic oligonucleotide
  Sense strand starting at position 1266 of SEQ ID NO: 1882840
gauaauagccacugaguuu

SEQ ID NO: 2151323 - RNA, 19 nt, Artificial Sequence
  Description of Artificial Sequence: Synthetic oligonucleotide
  Antisense strand to SEQ ID NO: 2151322
aaacucaguggcuauuauc

SEQ ID NO: 2151324 - RNA, 19 nt, Artificial Sequence
  Description of Artificial Sequence: Synthetic oligonucleotide
  Sense strand starting at position 1379 of SEQ ID NO: 1882840
uaauuaguaggguagcauu

SEQ ID NO: 2151325 - RNA, 19 nt, Artificial Sequence
  Description of Artificial Sequence: Synthetic oligonucleotide
  Antisense strand to SEQ ID NO: 2151324
aaugcuacccuacuaauua

SEQ ID NO: 2151326 - RNA, 19 nt, Artificial Sequence
  Description of Artificial Sequence: Synthetic oligonucleotide
  Sense strand starting at position 1422 of SEQ ID NO: 1882840
ggugaaauagaaugugcau

SEQ ID NO: 2151327 - RNA, 19 nt, Artificial Sequence
  Description of Artificial Sequence: Synthetic oligonucleotide
  Antisense strand to SEQ ID NO: 2151326
augcacauucuauuucacc

SEQ ID NO: 2151328 - RNA, 19 nt, Artificial Sequence
  Description of Artificial Sequence: Synthetic oligonucleotide
  Sense strand starting at position 1429 of SEQ ID NO: 1882840
uagaaugugcauugugaag

SEQ ID NO: 2151329 - RNA, 19 nt, Artificial Sequence
  Description of Artificial Sequence: Synthetic oligonucleotide
  Antisense strand to SEQ ID NO: 2151328
cuucacaaugcacauucua

SEQ ID NO: 2151330 - RNA, 19 nt, Artificial Sequence
  Description of Artificial Sequence: Synthetic oligonucleotide
  Sense strand starting at position 1435 of SEQ ID NO: 1882840
gugcauugugaagauccaa

SEQ ID NO: 2151331 - RNA, 19 nt, Artificial Sequence
  Description of Artificial Sequence: Synthetic oligonucleotide
  Antisense strand to SEQ ID NO: 2151330
uuggaucuucacaaugcac

SEQ ID NO: 2151332 - RNA, 19 nt, Artificial Sequence
  Description of Artificial Sequence: Synthetic oligonucleotide
  Sense strand starting at position 1567 of SEQ ID NO: 1882840
gucauugcagguuaaucau

SEQ ID NO: 2151333 - RNA, 19 nt, Artificial Sequence
  Description of Artificial Sequence: Synthetic oligonucleotide
  Antisense strand to SEQ ID NO: 2151332
augauuaaccugcaaugac

SEQ ID NO: 2151334 - RNA, 19 nt, Artificial Sequence
  Description of Artificial Sequence: Synthetic oligonucleotide
  Sense strand starting at position 1570 of SEQ ID NO: 1882840
auugcagguuaaucaugaa

SEQ ID NO: 2151335 - RNA, 19 nt, Artificial Sequence
  Description of Artificial Sequence: Synthetic oligonucleotide
  Antisense strand to SEQ ID NO: 2151334
uucaugauuaaccugcaau

SEQ ID NO: 2151336 - RNA, 19 nt, Artificial Sequence
  Description of Artificial Sequence: Synthetic oligonucleotide
  Sense strand starting at position 1685 of SEQ ID NO: 1882840
gcuuuauggcuagacugac

SEQ ID NO: 2151337 - RNA, 19 nt, Artificial Sequence
  Description of Artificial Sequence: Synthetic oligonucleotide
  Antisense strand to SEQ ID NO: 2151336
gucagucuagccauaaagc

SEQ ID NO: 2151338 - RNA, 19 nt, Artificial Sequence
  Description of Artificial Sequence: Synthetic oligonucleotide
  Sense strand starting at position 1832 of SEQ ID NO: 1882840
uuguuaucagcucauauua

SEQ ID NO: 2151339 - RNA, 19 nt, Artificial Sequence
  Description of Artificial Sequence: Synthetic oligonucleotide
  Antisense strand to SEQ ID NO: 2151338
uaauaugagcugauaacaa

SEQ ID NO: 2151340 - RNA, 19 nt, Artificial Sequence
  Description of Artificial Sequence: Synthetic oligonucleotide
  Sense strand starting at position 1881 of SEQ ID NO: 1882840
acaccaguauagguauaaa

SEQ ID NO: 2151341 - RNA, 19 nt, Artificial Sequence
  Description of Artificial Sequence: Synthetic oligonucleotide
  Antisense strand to SEQ ID NO: 2151340
uuuauaccuauacuggugu

SEQ ID NO: 2151342 - RNA, 19 nt, Artificial Sequence
  Description of Artificial Sequence: Synthetic oligonucleotide
  Sense strand starting at position 1918 of SEQ ID NO: 1882840
uaaucugaauggguuugau

SEQ ID NO: 2151343 - RNA, 19 nt, Artificial Sequence
  Description of Artificial Sequence: Synthetic oligonucleotide
  Antisense strand to SEQ ID NO: 2151342
aucaaacccauucagauua

SEQ ID NO: 2151344 - RNA, 19 nt, Artificial Sequence
  Description of Artificial Sequence: Synthetic oligonucleotide
  Sense strand starting at position 2069 of SEQ ID NO: 1882840
ugauaugucuaaucaaggu

SEQ ID NO: 2151345 - RNA, 19 nt, Artificial Sequence
  Description of Artificial Sequence: Synthetic oligonucleotide
  Antisense strand to SEQ ID NO: 2151344
accuugauuagacauauca

SEQ ID NO: 2151346 - RNA, 19 nt, Artificial Sequence
  Description of Artificial Sequence: Synthetic oligonucleotide
  Sense strand starting at position 2079 of SEQ ID NO: 1882840
aaucaaggugucuaugcau

SEQ ID NO: 2151347 - RNA, 19 nt, Artificial Sequence
  Description of Artificial Sequence: Synthetic oligonucleotide
  Antisense strand to SEQ ID NO: 2151346
augcauagacaccuugauu

SEQ ID NO: 2151348 - RNA, 19 nt, Artificial Sequence
  Description of Artificial Sequence: Synthetic oligonucleotide
  Sense strand starting at position 2117 of SEQ ID NO: 1882840
auacuucuagcauaagcga

SEQ ID NO: 2151349 - RNA, 19 nt, Artificial Sequence
  Description of Artificial Sequence: Synthetic oligonucleotide
  Antisense strand to SEQ ID NO: 2151348
ucgcuuaugcuagaaguau

SEQ ID NO: 2151350 - RNA, 19 nt, Artificial Sequence
  Description of Artificial Sequence: Synthetic oligonucleotide
  Sense strand starting at position 2139 of SEQ ID NO: 1882840
gaaggaugaucacuagcau

SEQ ID NO: 2151351 - RNA, 19 nt, Artificial Sequence
  Description of Artificial Sequence: Synthetic oligonucleotide
  Antisense strand to SEQ ID NO: 2151350
augcuagugaucauccuuc

SEQ ID NO: 2151352 - RNA, 19 nt, Artificial Sequence
  Description of Artificial Sequence: Synthetic oligonucleotide
  Sense strand starting at position 2150 of SEQ ID NO: 1882840
acuagcauuguguaggaua

SEQ ID NO: 2151353 - RNA, 19 nt, Artificial Sequence
  Description of Artificial Sequence: Synthetic oligonucleotide
  Antisense strand to SEQ ID NO: 2151352
uauccuacacaaugcuagu

SEQ ID NO: 2151354 - RNA, 19 nt, Artificial Sequence
  Description of Artificial Sequence: Synthetic oligonucleotide
  Sense strand starting at position 2214 of SEQ ID NO: 1882840
uccugaggcccugacauaa

SEQ ID NO: 2151355 - RNA, 19 nt, Artificial Sequence
  Description of Artificial Sequence: Synthetic oligonucleotide
  Antisense strand to SEQ ID NO: 2151354
uuaugucagggccucagga

SEQ ID NO: 2151356 - RNA, 19 nt, Artificial Sequence
  Description of Artificial Sequence: Synthetic oligonucleotide
  Sense strand starting at position 2304 of SEQ ID NO: 1882840
guaguauagauguauggau

SEQ ID NO: 2151357 - RNA, 19 nt, Artificial Sequence
  Description of Artificial Sequence: Synthetic oligonucleotide
  Antisense strand to SEQ ID NO: 2151356
auccauacaucuauacuac

SEQ ID NO: 2151358 - RNA, 19 nt, Artificial Sequence
  Description of Artificial Sequence: Synthetic oligonucleotide
  Sense strand starting at position 2317 of SEQ ID NO: 1882840
auggauuuauccuaguaau

SEQ ID NO: 2151359 - RNA, 19 nt, Artificial Sequence
  Description of Artificial Sequence: Synthetic oligonucleotide
  Antisense strand to SEQ ID NO: 2151358
auuacuaggauaaauccau

SEQ ID NO: 2151360 - RNA, 19 nt, Artificial Sequence
  Description of Artificial Sequence: Synthetic oligonucleotide
  Sense strand starting at position 2950 of SEQ ID NO: 1882840
uccaccaugcccugagaau

SEQ ID NO: 2151361 - RNA, 19 nt, Artificial Sequence
  Description of Artificial Sequence: Synthetic oligonucleotide
  Antisense strand to SEQ ID NO: 2151360
auucucagggcauggugga

SEQ ID NO: 2151362 - RNA, 19 nt, Artificial Sequence
  Description of Artificial Sequence: Synthetic oligonucleotide
  Sense strand starting at position 3000 of SEQ ID NO: 1882840
acugauaggucagugugau

SEQ ID NO: 2151363 - RNA, 19 nt, Artificial Sequence
  Description of Artificial Sequence: Synthetic oligonucleotide
  Antisense strand to SEQ ID NO: 2151362
aucacacugaccuaucagu

SEQ ID NO: 2151364 - RNA, 19 nt, Artificial Sequence
  Description of Artificial Sequence: Synthetic oligonucleotide
  Sense strand starting at position 3191 of SEQ ID NO: 1882840
gcauaauauucuuugaaug

SEQ ID NO: 2151365 - RNA, 19 nt, Artificial Sequence
  Description of Artificial Sequence: Synthetic oligonucleotide
  Antisense strand to SEQ ID NO: 2151364
cauucaaagaauauuaugc

SEQ ID NO: 2151366 - RNA, 19 nt, Artificial Sequence
  Description of Artificial Sequence: Synthetic oligonucleotide
  Sense strand starting at position 3224 of SEQ ID NO: 1882840
gagauaauccuguauaguu

SEQ ID NO: 2151367 - RNA, 19 nt, Artificial Sequence
  Description of Artificial Sequence: Synthetic oligonucleotide
  Antisense strand to SEQ ID NO: 2151366
aacuauacaggauuaucuc

SEQ ID NO: 2151368 - RNA, 19 nt, Artificial Sequence
  Description of Artificial Sequence: Synthetic oligonucleotide
  Sense strand starting at position 3240 of SEQ ID NO: 1882840
guuauacauuagguugaua

SEQ ID NO: 2151369 - RNA, 19 nt, Artificial Sequence
  Description of Artificial Sequence: Synthetic oligonucleotide
  Antisense strand to SEQ ID NO: 2151368
uaucaaccuaauguauaac

SEQ ID NO: 2151370 - RNA, 19 nt, Artificial Sequence
  Description of Artificial Sequence: Synthetic oligonucleotide
  Sense strand starting at position 3258 of SEQ ID NO: 1882840
acuaaauuccaagaguguu

SEQ ID NO: 2151371 - RNA, 19 nt, Artificial Sequence
  Description of Artificial Sequence: Synthetic oligonucleotide
  Antisense strand to SEQ ID NO: 2151370
aacacucuuggaauuuagu

SEQ ID NO: 2151372 - RNA, 19 nt, Artificial Sequence
  Description of Artificial Sequence: Synthetic oligonucleotide
  Sense strand starting at position 3288 of SEQ ID NO: 1882840
ucauauacauguuuguaca

SEQ ID NO: 2151373 - RNA, 19 nt, Artificial Sequence
  Description of Artificial Sequence: Synthetic oligonucleotide
  Antisense strand to SEQ ID NO: 2151372
uguacaaacauguauauga

SEQ ID NO: 2151374 - RNA, 19 nt, Artificial Sequence
  Description of Artificial Sequence: Synthetic oligonucleotide
  Sense strand starting at position 3498 of SEQ ID NO: 1882840
uuaaucuaauggguaugau

SEQ ID NO: 2151375 - RNA, 19 nt, Artificial Sequence
  Description of Artificial Sequence: Synthetic oligonucleotide
  Antisense strand to SEQ ID NO: 2151374
aucauacccauuagauuaa

SEQ ID NO: 2151376 - RNA, 19 nt, Artificial Sequence
  Description of Artificial Sequence: Synthetic oligonucleotide
  Sense strand starting at position 3687 of SEQ ID NO: 1882840
uaguacucucugggaguua

SEQ ID NO: 2151377 - RNA, 19 nt, Artificial Sequence
  Description of Artificial Sequence: Synthetic oligonucleotide
  Antisense strand to SEQ ID NO: 2151376
uaacucccagagaguacua

SEQ ID NO: 2151378 - RNA, 19 nt, Artificial Sequence
  Description of Artificial Sequence: Synthetic oligonucleotide
  Sense strand starting at position 20 of SEQ ID NO: 1882841
auauguauaccacagagca

SEQ ID NO: 2151379 - RNA, 19 nt, Artificial Sequence
  Description of Artificial Sequence: Synthetic oligonucleotide
  Antisense strand to SEQ ID NO: 2151378
ugcucugugguauacauau

SEQ ID NO: 2151380 - RNA, 19 nt, Artificial Sequence
  Description of Artificial Sequence: Synthetic oligonucleotide
  Sense strand starting at position 53 of SEQ ID NO: 1882841
cagguacauuuagagaaua

SEQ ID NO: 2151381 - RNA, 19 nt, Artificial Sequence
  Description of Artificial Sequence: Synthetic oligonucleotide
  Antisense strand to SEQ ID NO: 2151380
uauucucuaaauguaccug

SEQ ID NO: 2151382 - RNA, 19 nt, Artificial Sequence
  Description of Artificial Sequence: Synthetic oligonucleotide
  Sense strand starting at position 227 of SEQ ID NO: 1882841
cucaaagugugucucauuu

SEQ ID NO: 2151383 - RNA, 19 nt, Artificial Sequence
  Description of Artificial Sequence: Synthetic oligonucleotide
  Antisense strand to SEQ ID NO: 2151382
aaaugagacacacuuugag

SEQ ID NO: 2151384 - RNA, 19 nt, Artificial Sequence
  Description of Artificial Sequence: Synthetic oligonucleotide
  Sense strand starting at position 231 of SEQ ID NO: 1882841
aagugugucucauuuaagc

SEQ ID NO: 2151385 - RNA, 19 nt, Artificial Sequence
  Description of Artificial Sequence: Synthetic oligonucleotide
  Antisense strand to SEQ ID NO: 2151384
gcuuaaaugagacacacuu

SEQ ID NO: 2151386 - RNA, 19 nt, Artificial Sequence
  Description of Artificial Sequence: Synthetic oligonucleotide
  Sense strand starting at position 233 of SEQ ID NO: 1882841
gugugucucauuuaagcug

SEQ ID NO: 2151387 - RNA, 19 nt, Artificial Sequence
  Description of Artificial Sequence: Synthetic oligonucleotide
  Antisense strand to SEQ ID NO: 2151386
cagcuuaaaugagacacac

SEQ ID NO: 2151388 - RNA, 19 nt, Artificial Sequence
  Description of Artificial Sequence: Synthetic oligonucleotide
  Sense strand starting at position 450 of SEQ ID NO: 1882841
ggccacagaguuuggauua

SEQ ID NO: 2151389 - RNA, 19 nt, Artificial Sequence
  Description of Artificial Sequence: Synthetic oligonucleotide
  Antisense strand to SEQ ID NO: 2151388
uaauccaaacucuguggcc

SEQ ID NO: 2151390 - RNA, 19 nt, Artificial Sequence
  Description of Artificial Sequence: Synthetic oligonucleotide
  Sense strand starting at position 462 of SEQ ID NO: 1882841
uggauuacaaccugggagu

SEQ ID NO: 2151391 - RNA, 19 nt, Artificial Sequence
  Description of Artificial Sequence: Synthetic oligonucleotide
  Antisense strand to SEQ ID NO: 2151390
acucccagguuguaaucca

SEQ ID NO: 2151392 - RNA, 19 nt, Artificial Sequence
  Description of Artificial Sequence: Synthetic oligonucleotide
  Sense strand starting at position 540 of SEQ ID NO: 1882841
acagaugacucacuaguuu

SEQ ID NO: 2151393 - RNA, 19 nt, Artificial Sequence
  Description of Artificial Sequence: Synthetic oligonucleotide
  Antisense strand to SEQ ID NO: 2151392
aaacuagugagucaucugu

SEQ ID NO: 2151394 - RNA, 19 nt, Artificial Sequence
  Description of Artificial Sequence: Synthetic oligonucleotide
  Sense strand starting at position 888 of SEQ ID NO: 1882841
ggccucagauucuuaauac

SEQ ID NO: 2151395 - RNA, 19 nt, Artificial Sequence
  Description of Artificial Sequence: Synthetic oligonucleotide
  Antisense strand to SEQ ID NO: 2151394
guauuaagaaucugaggcc

SEQ ID NO: 2151396 - RNA, 19 nt, Artificial Sequence
  Description of Artificial Sequence: Synthetic oligonucleotide
  Sense strand starting at position 916 of SEQ ID NO: 1882841
ggcaaucucuacuuauuga

SEQ ID NO: 2151397 - RNA, 19 nt, Artificial Sequence
  Description of Artificial Sequence: Synthetic oligonucleotide
  Antisense strand to SEQ ID NO: 2151396
ucaauaaguagagauugcc

SEQ ID NO: 2151398 - RNA, 19 nt, Artificial Sequence
  Description of Artificial Sequence: Synthetic oligonucleotide
  Sense strand starting at position 1046 of SEQ ID NO: 1882841
agcagauucuuggugaaua

SEQ ID NO: 2151399 - RNA, 19 nt, Artificial Sequence
  Description of Artificial Sequence: Synthetic oligonucleotide
  Antisense strand to SEQ ID NO: 2151398
uauucaccaagaaucugcu

SEQ ID NO: 2151400 - RNA, 19 nt, Artificial Sequence
  Description of Artificial Sequence: Synthetic oligonucleotide
  Sense strand starting at position 1071 of SEQ ID NO: 1882841
guaugaaugaaugguuucu

SEQ ID NO: 2151401 - RNA, 19 nt, Artificial Sequence
  Description of Artificial Sequence: Synthetic oligonucleotide
  Antisense strand to SEQ ID NO: 2151400
agaaaccauucauucauac

SEQ ID NO: 2151402 - RNA, 19 nt, Artificial Sequence
  Description of Artificial Sequence: Synthetic oligonucleotide
  Sense strand starting at position 1158 of SEQ ID NO: 1882841
cacugaauaguagguggua

SEQ ID NO: 2151403 - RNA, 19 nt, Artificial Sequence
  Description of Artificial Sequence: Synthetic oligonucleotide
  Antisense strand to SEQ ID NO: 2151402
uaccaccuacuauucagug

SEQ ID NO: 2151404 - RNA, 19 nt, Artificial Sequence
  Description of Artificial Sequence: Synthetic oligonucleotide
  Sense strand starting at position 1257 of SEQ ID NO: 1882841
aguuguaauuaagcuggga

SEQ ID NO: 2151405 - RNA, 19 nt, Artificial Sequence
  Description of Artificial Sequence: Synthetic oligonucleotide
  Antisense strand to SEQ ID NO: 2151404
ucccagcuuaauuacaacu

SEQ ID NO: 2151406 - RNA, 19 nt, Artificial Sequence
  Description of Artificial Sequence: Synthetic oligonucleotide
  Sense strand starting at position 1261 of SEQ ID NO: 1882841
guaauuaagcugggaggua

SEQ ID NO: 2151407 - RNA, 19 nt, Artificial Sequence
  Description of Artificial Sequence: Synthetic oligonucleotide
  Antisense strand to SEQ ID NO: 2151406
uaccucccagcuuaauuac

SEQ ID NO: 2151408 - RNA, 19 nt, Artificial Sequence
  Description of Artificial Sequence: Synthetic oligonucleotide
  Sense strand starting at position 1293 of SEQ ID NO: 1882841
ucuccaaagcccugaaaug

SEQ ID NO: 2151409 - RNA, 19 nt, Artificial Sequence
  Description of Artificial Sequence: Synthetic oligonucleotide
  Antisense strand to SEQ ID NO: 2151408
cauuucagggcuuuggaga

SEQ ID NO: 2151410 - RNA, 19 nt, Artificial Sequence
  Description of Artificial Sequence: Synthetic oligonucleotide
  Sense strand starting at position 1420 of SEQ ID NO: 1882841
agaaaugcugaauguaaua

SEQ ID NO: 2151411 - RNA, 19 nt, Artificial Sequence
  Description of Artificial Sequence: Synthetic oligonucleotide
  Antisense strand to SEQ ID NO: 2151410
uauuacauucagcauuucu

SEQ ID NO: 2151412 - RNA, 19 nt, Artificial Sequence
  Description of Artificial Sequence: Synthetic oligonucleotide
  Sense strand starting at position 1482 of SEQ ID NO: 1882841
gaauguaagucucuacaga

SEQ ID NO: 2151413 - RNA, 19 nt, Artificial Sequence
  Description of Artificial Sequence: Synthetic oligonucleotide
  Antisense strand to SEQ ID NO: 2151412
ucuguagagacuuacauuc

SEQ ID NO: 2151414 - RNA, 19 nt, Artificial Sequence
  Description of Artificial Sequence: Synthetic oligonucleotide
  Sense strand starting at position 1681 of SEQ ID NO: 1882841
ggucaacggaacugauuaa

SEQ ID NO: 2151415 - RNA, 19 nt, Artificial Sequence
  Description of Artificial Sequence: Synthetic oligonucleotide
  Antisense strand to SEQ ID NO: 2151414
uuaaucaguuccguugacc

SEQ ID NO: 2151416 - RNA, 19 nt, Artificial Sequence
  Description of Artificial Sequence: Synthetic oligonucleotide
  Sense strand starting at position 1820 of SEQ ID NO: 1882841
ggaaaugucucugcugaga

SEQ ID NO: 2151417 - RNA, 19 nt, Artificial Sequence
  Description of Artificial Sequence: Synthetic oligonucleotide
  Antisense strand to SEQ ID NO: 2151416
ucucagcagagacauuucc

SEQ ID NO: 2151418 - RNA, 19 nt, Artificial Sequence
  Description of Artificial Sequence: Synthetic oligonucleotide
  Sense strand starting at position 1823 of SEQ ID NO: 1882841
aaugucucugcugagaauu

SEQ ID NO: 2151419 - RNA, 19 nt, Artificial Sequence
  Description of Artificial Sequence: Synthetic oligonucleotide
  Antisense strand to SEQ ID NO: 2151418
aauucucagcagagacauu

SEQ ID NO: 2151420 - RNA, 19 nt, Artificial Sequence
  Description of Artificial Sequence: Synthetic oligonucleotide
  Sense strand starting at position 2449 of SEQ ID NO: 1882841
uucugugauagugagaucu

SEQ ID NO: 2151421 - RNA, 19 nt, Artificial Sequence
  Description of Artificial Sequence: Synthetic oligonucleotide
  Antisense strand to SEQ ID NO: 2151420
agaucucacuaucacagaa

SEQ ID NO: 2151422 - RNA, 19 nt, Artificial Sequence
  Description of Artificial Sequence: Synthetic oligonucleotide
  Sense strand starting at position 2906 of SEQ ID NO: 1882841
cuaguauuacuccaagguc

SEQ ID NO: 2151423 - RNA, 19 nt, Artificial Sequence
  Description of Artificial Sequence: Synthetic oligonucleotide
  Antisense strand to SEQ ID NO: 2151422
gaccuuggaguaauacuag

SEQ ID NO: 2151424 - RNA, 19 nt, Artificial Sequence
  Description of Artificial Sequence: Synthetic oligonucleotide
  Sense strand starting at position 2909 of SEQ ID NO: 1882841
guauuacuccaaggucaac

SEQ ID NO: 2151425 - RNA, 19 nt, Artificial Sequence
  Description of Artificial Sequence: Synthetic oligonucleotide
  Antisense strand to SEQ ID NO: 2151424
guugaccuuggaguaauac

SEQ ID NO: 2151426 - RNA, 19 nt, Artificial Sequence
  Description of Artificial Sequence: Synthetic oligonucleotide
  Sense strand starting at position 2955 of SEQ ID NO: 1882841
uuaugcaaguauccugaau

SEQ ID NO: 2151427 - RNA, 19 nt, Artificial Sequence
  Description of Artificial Sequence: Synthetic oligonucleotide
  Antisense strand to SEQ ID NO: 2151426
auucaggauacuugcauaa

SEQ ID NO: 2151428 - RNA, 19 nt, Artificial Sequence
  Description of Artificial Sequence: Synthetic oligonucleotide
  Sense strand starting at position 3142 of SEQ ID NO: 1882841
gugaauaugccacauucua

SEQ ID NO: 2151429 - RNA, 19 nt, Artificial Sequence
  Description of Artificial Sequence: Synthetic oligonucleotide
  Antisense strand to SEQ ID NO: 2151428
uagaauguggcauauucac

SEQ ID NO: 2151430 - RNA, 19 nt, Artificial Sequence
  Description of Artificial Sequence: Synthetic oligonucleotide
  Sense strand starting at position 3216 of SEQ ID NO: 1882841
gguuuauuccuaggaguag

SEQ ID NO: 2151431 - RNA, 19 nt, Artificial Sequence
  Description of Artificial Sequence: Synthetic oligonucleotide
  Antisense strand to SEQ ID NO: 2151430
cuacuccuaggaauaaacc

SEQ ID NO: 2151432 - RNA, 19 nt, Artificial Sequence
  Description of Artificial Sequence: Synthetic oligonucleotide
  Sense strand starting at position 3272 of SEQ ID NO: 1882841
guagaaauugccuaauggu

SEQ ID NO: 2151433 - RNA, 19 nt, Artificial Sequence
  Description of Artificial Sequence: Synthetic oligonucleotide
  Antisense strand to SEQ ID NO: 2151432
accauuaggcaauuucuac

SEQ ID NO: 2151434 - RNA, 19 nt, Artificial Sequence
  Description of Artificial Sequence: Synthetic oligonucleotide
  Sense strand starting at position 3314 of SEQ ID NO: 1882841
ugaaaucuugucuggaagu

SEQ ID NO: 2151435 - RNA, 19 nt, Artificial Sequence
  Description of Artificial Sequence: Synthetic oligonucleotide
  Antisense strand to SEQ ID NO: 2151434
acuuccagacaagauuuca

SEQ ID NO: 2151436 - RNA, 19 nt, Artificial Sequence
  Description of Artificial Sequence: Synthetic oligonucleotide
  Sense strand starting at position 3316 of SEQ ID NO: 1882841
aaaucuugucuggaaguuc

SEQ ID NO: 2151437 - RNA, 19 nt, Artificial Sequence
  Description of Artificial Sequence: Synthetic oligonucleotide
  Antisense strand to SEQ ID NO: 2151436
gaacuuccagacaagauuu

SEQ ID NO: 2151438 - RNA, 19 nt, Artificial Sequence
  Description of Artificial Sequence: Synthetic oligonucleotide
  Sense strand starting at position 3435 of SEQ ID NO: 1882841
aucagugauuuggaagaua

SEQ ID NO: 2151439 - RNA, 19 nt, Artificial Sequence
  Description of Artificial Sequence: Synthetic oligonucleotide
  Antisense strand to SEQ ID NO: 2151438
uaucuuccaaaucacugau

SEQ ID NO: 2151440 - RNA, 19 nt, Artificial Sequence
  Description of Artificial Sequence: Synthetic oligonucleotide
  Sense strand starting at position 3503 of SEQ ID NO: 1882841
aaaggagauuaagagauaa

SEQ ID NO: 2151441 - RNA, 19 nt, Artificial Sequence
  Description of Artificial Sequence: Synthetic oligonucleotide
  Antisense strand to SEQ ID NO: 2151440
uuaucucuuaaucuccuuu

SEQ ID NO: 2151442 - RNA, 19 nt, Artificial Sequence
  Description of Artificial Sequence: Synthetic oligonucleotide
  Sense strand starting at position 3548 of SEQ ID NO: 1882841
uguguaauugaagagagcu

SEQ ID NO: 2151443 - RNA, 19 nt, Artificial Sequence
  Description of Artificial Sequence: Synthetic oligonucleotide
  Antisense strand to SEQ ID NO: 2151442
agcucucuucaauuacaca

SEQ ID NO: 2151444 - RNA, 19 nt, Artificial Sequence
  Description of Artificial Sequence: Synthetic oligonucleotide
  Sense strand starting at position 3791 of SEQ ID NO: 1882841
agcacaucucaguaguuua

SEQ ID NO: 2151445 - RNA, 19 nt, Artificial Sequence
  Description of Artificial Sequence: Synthetic oligonucleotide
  Antisense strand to SEQ ID NO: 2151444
uaaacuacugagaugugcu

SEQ ID NO: 2151446 - RNA, 19 nt, Artificial Sequence
  Description of Artificial Sequence: Synthetic oligonucleotide
  Sense strand starting at position 3916 of SEQ ID NO: 1882841
aagguaaauugagugaagu

SEQ ID NO: 2151447 - RNA, 19 nt, Artificial Sequence
  Description of Artificial Sequence: Synthetic oligonucleotide
  Antisense strand to SEQ ID NO: 2151446
acuucacucaauuuaccuu

SEQ ID NO: 2151448 - RNA, 19 nt, Artificial Sequence
  Description of Artificial Sequence: Synthetic oligonucleotide
  Sense strand starting at position 3917 of SEQ ID NO: 1882841
agguaaauugagugaaguu

SEQ ID NO: 2151449 - RNA, 19 nt, Artificial Sequence
  Description of Artificial Sequence: Synthetic oligonucleotide
  Antisense strand to SEQ ID NO: 2151448
aacuucacucaauuuaccu

SEQ ID NO: 2151450 - RNA, 19 nt, Artificial Sequence
  Description of Artificial Sequence: Synthetic oligonucleotide
  Sense strand starting at position 3918 of SEQ ID NO: 1882841
gguaaauugagugaaguuc

SEQ ID NO: 2151451 - RNA, 19 nt, Artificial Sequence
  Description of Artificial Sequence: Synthetic oligonucleotide
  Antisense strand to SEQ ID NO: 2151450
gaacuucacucaauuuacc

SEQ ID NO: 2151452 - RNA, 19 nt, Artificial Sequence
  Description of Artificial Sequence: Synthetic oligonucleotide
  Sense strand starting at position 3937 of SEQ ID NO: 1882841
caggcauucggagaaguga

SEQ ID NO: 2151453 - RNA, 19 nt, Artificial Sequence
  Description of Artificial Sequence: Synthetic oligonucleotide
  Antisense strand to SEQ ID NO: 2151452
ucacuucuccgaaugccug

SEQ ID NO: 2151454 - RNA, 19 nt, Artificial Sequence
  Description of Artificial Sequence: Synthetic oligonucleotide
  Sense strand starting at position 3946 of SEQ ID NO: 1882841
ggagaagugagccaguuga

SEQ ID NO: 2151455 - RNA, 19 nt, Artificial Sequence
  Description of Artificial Sequence: Synthetic oligonucleotide
  Antisense strand to SEQ ID NO: 2151454
ucaacuggcucacuucucc

SEQ ID NO: 2151456 - RNA, 19 nt, Artificial Sequence
  Description of Artificial Sequence: Synthetic oligonucleotide
  Sense strand starting at position 3966 of SEQ ID NO: 1882841
guaagaggacugugucaug

SEQ ID NO: 2151457 - RNA, 19 nt, Artificial Sequence
  Description of Artificial Sequence: Synthetic oligonucleotide
  Antisense strand to SEQ ID NO: 2151456
caugacacaguccucuuac

SEQ ID NO: 2151458 - RNA, 19 nt, Artificial Sequence
  Description of Artificial Sequence: Synthetic oligonucleotide
  Sense strand starting at position 136 of SEQ ID NO: 1882842
ccuugagcuuauccacaga

SEQ ID NO: 2151459 - RNA, 19 nt, Artificial Sequence
  Description of Artificial Sequence: Synthetic oligonucleotide
  Antisense strand to SEQ ID NO: 2151458
ucuguggauaagcucaagg

SEQ ID NO: 2151460 - RNA, 19 nt, Artificial Sequence
  Description of Artificial Sequence: Synthetic oligonucleotide
  Sense strand starting at position 139 of SEQ ID NO: 1882842
ugagcuuauccacagagua

SEQ ID NO: 2151461 - RNA, 19 nt, Artificial Sequence
  Description of Artificial Sequence: Synthetic oligonucleotide
  Antisense strand to SEQ ID NO: 2151460
uacucuguggauaagcuca

SEQ ID NO: 2151462 - RNA, 19 nt, Artificial Sequence
  Description of Artificial Sequence: Synthetic oligonucleotide
  Sense strand starting at position 220 of SEQ ID NO: 1882842
ccuuuagagacuuguggag

SEQ ID NO: 2151463 - RNA, 19 nt, Artificial Sequence
  Description of Artificial Sequence: Synthetic oligonucleotide
  Antisense strand to SEQ ID NO: 2151462
cuccacaagucucuaaagg

SEQ ID NO: 2151464 - RNA, 19 nt, Artificial Sequence
  Description of Artificial Sequence: Synthetic oligonucleotide
  Sense strand starting at position 227 of SEQ ID NO: 1882842
agacuuguggagugacuga

SEQ ID NO: 2151465 - RNA, 19 nt, Artificial Sequence
  Description of Artificial Sequence: Synthetic oligonucleotide
  Antisense strand to SEQ ID NO: 2151464
ucagucacuccacaagucu

SEQ ID NO: 2151466 - RNA, 19 nt, Artificial Sequence
  Description of Artificial Sequence: Synthetic oligonucleotide
  Sense strand starting at position 240 of SEQ ID NO: 1882842
gacugagucugagaagaag

SEQ ID NO: 2151467 - RNA, 19 nt, Artificial Sequence
  Description of Artificial Sequence: Synthetic oligonucleotide
  Antisense strand to SEQ ID NO: 2151466
cuucuucucagacucaguc

SEQ ID NO: 2151468 - RNA, 19 nt, Artificial Sequence
  Description of Artificial Sequence: Synthetic oligonucleotide
  Sense strand starting at position 404 of SEQ ID NO: 1882842
aggacauguugugauuuag

SEQ ID NO: 2151469 - RNA, 19 nt, Artificial Sequence
  Description of Artificial Sequence: Synthetic oligonucleotide
  Antisense strand to SEQ ID NO: 2151468
cuaaaucacaacauguccu

SEQ ID NO: 2151470 - RNA, 19 nt, Artificial Sequence
  Description of Artificial Sequence: Synthetic oligonucleotide
  Sense strand starting at position 444 of SEQ ID NO: 1882842
ucagguaacuugcuaugau

SEQ ID NO: 2151471 - RNA, 19 nt, Artificial Sequence
  Description of Artificial Sequence: Synthetic oligonucleotide
  Antisense strand to SEQ ID NO: 2151470
aucauagcaaguuaccuga

SEQ ID NO: 2151472 - RNA, 19 nt, Artificial Sequence
  Description of Artificial Sequence: Synthetic oligonucleotide
  Sense strand starting at position 494 of SEQ ID NO: 1882842
auauguucuccuuagaguu

SEQ ID NO: 2151473 - RNA, 19 nt, Artificial Sequence
  Description of Artificial Sequence: Synthetic oligonucleotide
  Antisense strand to SEQ ID NO: 2151472
aacucuaaggagaacauau

SEQ ID NO: 2151474 - RNA, 19 nt, Artificial Sequence
  Description of Artificial Sequence: Synthetic oligonucleotide
  Sense strand starting at position 532 of SEQ ID NO: 1882842
auaguucaggcguagauga

SEQ ID NO: 2151475 - RNA, 19 nt, Artificial Sequence
  Description of Artificial Sequence: Synthetic oligonucleotide
  Antisense strand to SEQ ID NO: 2151474
ucaucuacgccugaacuau

SEQ ID NO: 2151476 - RNA, 19 nt, Artificial Sequence
  Description of Artificial Sequence: Synthetic oligonucleotide
  Sense strand starting at position 543 of SEQ ID NO: 1882842
guagaugacuuuccagucu

SEQ ID NO: 2151477 - RNA, 19 nt, Artificial Sequence
  Description of Artificial Sequence: Synthetic oligonucleotide
  Antisense strand to SEQ ID NO: 2151476
agacuggaaagucaucuac

SEQ ID NO: 2151478 - RNA, 19 nt, Artificial Sequence
  Description of Artificial Sequence: Synthetic oligonucleotide
  Sense strand starting at position 571 of SEQ ID NO: 1882842
gguuuaauuucucaccuug

SEQ ID NO: 2151479 - RNA, 19 nt, Artificial Sequence
  Description of Artificial Sequence: Synthetic oligonucleotide
  Antisense strand to SEQ ID NO: 2151478
caaggugagaaauuaaacc

SEQ ID NO: 2151480 - RNA, 19 nt, Artificial Sequence
  Description of Artificial Sequence: Synthetic oligonucleotide
  Sense strand starting at position 642 of SEQ ID NO: 1882842
gaaagauguccacggagau

SEQ ID NO: 2151481 - RNA, 19 nt, Artificial Sequence
  Description of Artificial Sequence: Synthetic oligonucleotide
  Antisense strand to SEQ ID NO: 2151480
aucuccguggacaucuuuc

SEQ ID NO: 2151482 - RNA, 19 nt, Artificial Sequence
  Description of Artificial Sequence: Synthetic oligonucleotide
  Sense strand starting at position 643 of SEQ ID NO: 1882842
aaagauguccacggagauu

SEQ ID NO: 2151483 - RNA, 19 nt, Artificial Sequence
  Description of Artificial Sequence: Synthetic oligonucleotide
  Antisense strand to SEQ ID NO: 2151482
aaucuccguggacaucuuu

SEQ ID NO: 2151484 - RNA, 19 nt, Artificial Sequence
  Description of Artificial Sequence: Synthetic oligonucleotide
  Sense strand starting at position 779 of SEQ ID NO: 1882842
agggaauuaccacgguuaa

SEQ ID NO: 2151485 - RNA, 19 nt, Artificial Sequence
  Description of Artificial Sequence: Synthetic oligonucleotide
  Antisense strand to SEQ ID NO: 2151484
uuaaccgugguaauucccu

SEQ ID NO: 2151486 - RNA, 19 nt, Artificial Sequence
  Description of Artificial Sequence: Synthetic oligonucleotide
  Sense strand starting at position 780 of SEQ ID NO: 1882842
gggaauuaccacgguuaag

SEQ ID NO: 2151487 - RNA, 19 nt, Artificial Sequence
  Description of Artificial Sequence: Synthetic oligonucleotide
  Antisense strand to SEQ ID NO: 2151486
cuuaaccgugguaauuccc

SEQ ID NO: 2151488 - RNA, 19 nt, Artificial Sequence
  Description of Artificial Sequence: Synthetic oligonucleotide
  Sense strand starting at position 871 of SEQ ID NO: 1882842
guagaauccuagcccauga

SEQ ID NO: 2151489 - RNA, 19 nt, Artificial Sequence
  Description of Artificial Sequence: Synthetic oligonucleotide
  Antisense strand to SEQ ID NO: 2151488
ucaugggcuaggauucuac

SEQ ID NO: 2151490 - RNA, 19 nt, Artificial Sequence
  Description of Artificial Sequence: Synthetic oligonucleotide
  Sense strand starting at position 1078 of SEQ ID NO: 1882842
cagagaagugguggauguu

SEQ ID NO: 2151491 - RNA, 19 nt, Artificial Sequence
  Description of Artificial Sequence: Synthetic oligonucleotide
  Antisense strand to SEQ ID NO: 2151490
aacauccaccacuucucug

SEQ ID NO: 2151492 - RNA, 19 nt, Artificial Sequence
  Description of Artificial Sequence: Synthetic oligonucleotide
  Sense strand starting at position 1087 of SEQ ID NO: 1882842
gguggauguugcucccaaa

SEQ ID NO: 2151493 - RNA, 19 nt, Artificial Sequence
  Description of Artificial Sequence: Synthetic oligonucleotide
  Antisense strand to SEQ ID NO: 2151492
uuugggagcaacauccacc

SEQ ID NO: 2151494 - RNA, 19 nt, Artificial Sequence
  Description of Artificial Sequence: Synthetic oligonucleotide
  Sense strand starting at position 1383 of SEQ ID NO: 1882842
gugaacugaucguuucaga

SEQ ID NO: 2151495 - RNA, 19 nt, Artificial Sequence
  Description of Artificial Sequence: Synthetic oligonucleotide
  Antisense strand to SEQ ID NO: 2151494
ucugaaacgaucaguucac

SEQ ID NO: 2151496 - RNA, 19 nt, Artificial Sequence
  Description of Artificial Sequence: Synthetic oligonucleotide
  Sense strand starting at position 1717 of SEQ ID NO: 1882842
ucacaauuaccaggugaga

SEQ ID NO: 2151497 - RNA, 19 nt, Artificial Sequence
  Description of Artificial Sequence: Synthetic oligonucleotide
  Antisense strand to SEQ ID NO: 2151496
ucucaccugguaauuguga

SEQ ID NO: 2151498 - RNA, 19 nt, Artificial Sequence
  Description of Artificial Sequence: Synthetic oligonucleotide
  Sense strand starting at position 1768 of SEQ ID NO: 1882842
gcaggaaagguuuggaaac

SEQ ID NO: 2151499 - RNA, 19 nt, Artificial Sequence
  Description of Artificial Sequence: Synthetic oligonucleotide
  Antisense strand to SEQ ID NO: 2151498
guuuccaaaccuuuccugc

SEQ ID NO: 2151500 - RNA, 19 nt, Artificial Sequence
  Description of Artificial Sequence: Synthetic oligonucleotide
  Sense strand starting at position 1849 of SEQ ID NO: 1882842
ggaccucugcucgauguau

SEQ ID NO: 2151501 - RNA, 19 nt, Artificial Sequence
  Description of Artificial Sequence: Synthetic oligonucleotide
  Antisense strand to SEQ ID NO: 2151500
auacaucgagcagaggucc

SEQ ID NO: 2151502 - RNA, 19 nt, Artificial Sequence
  Description of Artificial Sequence: Synthetic oligonucleotide
  Sense strand starting at position 1927 of SEQ ID NO: 1882842
agggcugccugacuacaau

SEQ ID NO: 2151503 - RNA, 19 nt, Artificial Sequence
  Description of Artificial Sequence: Synthetic oligonucleotide
  Antisense strand to SEQ ID NO: 2151502
auuguagucaggcagcccu

SEQ ID NO: 2151504 - RNA, 19 nt, Artificial Sequence
  Description of Artificial Sequence: Synthetic oligonucleotide
  Sense strand starting at position 2084 of SEQ ID NO: 1882842
ccaagcaugcauugggauu

SEQ ID NO: 2151505 - RNA, 19 nt, Artificial Sequence
  Description of Artificial Sequence: Synthetic oligonucleotide
  Antisense strand to SEQ ID NO: 2151504
aaucccaaugcaugcuugg

SEQ ID NO: 2151506 - RNA, 19 nt, Artificial Sequence
  Description of Artificial Sequence: Synthetic oligonucleotide
  Sense strand starting at position 2500 of SEQ ID NO: 1882842
guguaauaguuucuuaacc

SEQ ID NO: 2151507 - RNA, 19 nt, Artificial Sequence
  Description of Artificial Sequence: Synthetic oligonucleotide
  Antisense strand to SEQ ID NO: 2151506
gguuaagaaacuauuacac

SEQ ID NO: 2151508 - RNA, 19 nt, Artificial Sequence
  Description of Artificial Sequence: Synthetic oligonucleotide
  Sense strand starting at position 2501 of SEQ ID NO: 1882842
uguaauaguuucuuaacca

SEQ ID NO: 2151509 - RNA, 19 nt, Artificial Sequence
  Description of Artificial Sequence: Synthetic oligonucleotide
  Antisense strand to SEQ ID NO: 2151508
ugguuaagaaacuauuaca

SEQ ID NO: 2151510 - RNA, 19 nt, Artificial Sequence
  Description of Artificial Sequence: Synthetic oligonucleotide
  Sense strand starting at position 2637 of SEQ ID NO: 1882842
gacacugauucugcgccaa

SEQ ID NO: 2151511 - RNA, 19 nt, Artificial Sequence
  Description of Artificial Sequence: Synthetic oligonucleotide
  Antisense strand to SEQ ID NO: 2151510
uuggcgcagaaucaguguc

SEQ ID NO: 2151512 - RNA, 19 nt, Artificial Sequence
  Description of Artificial Sequence: Synthetic oligonucleotide
  Sense strand starting at position 3077 of SEQ ID NO: 1882842
ggaugugaaaguugaggca

SEQ ID NO: 2151513 - RNA, 19 nt, Artificial Sequence
  Description of Artificial Sequence: Synthetic oligonucleotide
  Antisense strand to SEQ ID NO: 2151512
ugccucaacuuucacaucc

SEQ ID NO: 2151514 - RNA, 19 nt, Artificial Sequence
  Description of Artificial Sequence: Synthetic oligonucleotide
  Sense strand starting at position 3167 of SEQ ID NO: 1882842
cccugauucccaggcaugu

SEQ ID NO: 2151515 - RNA, 19 nt, Artificial Sequence
  Description of Artificial Sequence: Synthetic oligonucleotide
  Antisense strand to SEQ ID NO: 2151514
acaugccugggaaucaggg

SEQ ID NO: 2151516 - RNA, 19 nt, Artificial Sequence
  Description of Artificial Sequence: Synthetic oligonucleotide
  Sense strand starting at position 3352 of SEQ ID NO: 1882842
ggucuuugugcugauggau

SEQ ID NO: 2151517 - RNA, 19 nt, Artificial Sequence
  Description of Artificial Sequence: Synthetic oligonucleotide
  Antisense strand to SEQ ID NO: 2151516
auccaucagcacaaagacc

SEQ ID NO: 2151518 - RNA, 19 nt, Artificial Sequence
  Description of Artificial Sequence: Synthetic oligonucleotide
  Sense strand starting at position 3394 of SEQ ID NO: 1882842
ggacacuugcuccaggcaa

SEQ ID NO: 2151519 - RNA, 19 nt, Artificial Sequence
  Description of Artificial Sequence: Synthetic oligonucleotide
  Antisense strand to SEQ ID NO: 2151518
uugccuggagcaagugucc

SEQ ID NO: 2151520 - RNA, 19 nt, Artificial Sequence
  Description of Artificial Sequence: Synthetic oligonucleotide
  Sense strand starting at position 3454 of SEQ ID NO: 1882842
agcagacuuggucagcuuu

SEQ ID NO: 2151521 - RNA, 19 nt, Artificial Sequence
  Description of Artificial Sequence: Synthetic oligonucleotide
  Antisense strand to SEQ ID NO: 2151520
aaagcugaccaagucugcu

SEQ ID NO: 2151522 - RNA, 19 nt, Artificial Sequence
  Description of Artificial Sequence: Synthetic oligonucleotide
  Sense strand starting at position 3598 of SEQ ID NO: 1882842
ccuugaauaccauguaugu

SEQ ID NO: 2151523 - RNA, 19 nt, Artificial Sequence
  Description of Artificial Sequence: Synthetic oligonucleotide
  Antisense strand to SEQ ID NO: 2151522
acauacaugguauucaagg

SEQ ID NO: 2151524 - RNA, 19 nt, Artificial Sequence
  Description of Artificial Sequence: Synthetic oligonucleotide
  Sense strand starting at position 3632 of SEQ ID NO: 1882842
augcucauccuccagaaga

SEQ ID NO: 2151525 - RNA, 19 nt, Artificial Sequence
  Description of Artificial Sequence: Synthetic oligonucleotide
  Antisense strand to SEQ ID NO: 2151524
ucuucuggaggaugagcau

SEQ ID NO: 2151526 - RNA, 19 nt, Artificial Sequence
  Description of Artificial Sequence: Synthetic oligonucleotide
  Sense strand starting at position 3634 of SEQ ID NO: 1882842
gcucauccuccagaagaca

SEQ ID NO: 2151527 - RNA, 19 nt, Artificial Sequence
  Description of Artificial Sequence: Synthetic oligonucleotide
  Antisense strand to SEQ ID NO: 2151526
ugucuucuggaggaugagc

SEQ ID NO: 2151528 - RNA, 19 nt, Artificial Sequence
  Description of Artificial Sequence: Synthetic oligonucleotide
  Sense strand starting at position 3805 of SEQ ID NO: 1882842
cacacaugaggcuggauua

SEQ ID NO: 2151529 - RNA, 19 nt, Artificial Sequence
  Description of Artificial Sequence: Synthetic oligonucleotide
  Antisense strand to SEQ ID NO: 2151528
uaauccagccucaugugug

SEQ ID NO: 2151530 - RNA, 19 nt, Artificial Sequence
  Description of Artificial Sequence: Synthetic oligonucleotide
  Sense strand starting at position 3853 of SEQ ID NO: 1882842
ggacucaucucagcagaau

SEQ ID NO: 2151531 - RNA, 19 nt, Artificial Sequence
  Description of Artificial Sequence: Synthetic oligonucleotide
  Antisense strand to SEQ ID NO: 2151530
auucugcugagaugagucc

SEQ ID NO: 2151532 - RNA, 19 nt, Artificial Sequence
  Description of Artificial Sequence: Synthetic oligonucleotide
  Sense strand starting at position 3868 of SEQ ID NO: 1882842
gaauauggccucuggaaga

SEQ ID NO: 2151533 - RNA, 19 nt, Artificial Sequence
  Description of Artificial Sequence: Synthetic oligonucleotide
  Antisense strand to SEQ ID NO: 2151532
ucuuccagaggccauauuc

SEQ ID NO: 2151534 - RNA, 19 nt, Artificial Sequence
  Description of Artificial Sequence: Synthetic oligonucleotide
  Sense strand starting at position 3917 of SEQ ID NO: 1882842
gggcucuugcaagauaagu

SEQ ID NO: 2151535 - RNA, 19 nt, Artificial Sequence
  Description of Artificial Sequence: Synthetic oligonucleotide
  Antisense strand to SEQ ID NO: 2151534
acuuaucuugcaagagccc

SEQ ID NO: 2151536 - RNA, 19 nt, Artificial Sequence
  Description of Artificial Sequence: Synthetic oligonucleotide
  Sense strand starting at position 3928 of SEQ ID NO: 1882842
agauaagucuuggcccagu

SEQ ID NO: 2151537 - RNA, 19 nt, Artificial Sequence
  Description of Artificial Sequence: Synthetic oligonucleotide
  Antisense strand to SEQ ID NO: 2151536
acugggccaagacuuaucu

SEQ ID NO: 2151538 - RNA, 19 nt, Artificial Sequence
  Description of Artificial Sequence: Synthetic oligonucleotide
  Sense strand starting at position 136 of SEQ ID NO: 1882843
ugggcacagugaucuagaa

SEQ ID NO: 2151539 - RNA, 19 nt, Artificial Sequence
  Description of Artificial Sequence: Synthetic oligonucleotide
  Antisense strand to SEQ ID NO: 2151538
uucuagaucacugugccca

SEQ ID NO: 2151540 - RNA, 19 nt, Artificial Sequence
  Description of Artificial Sequence: Synthetic oligonucleotide
  Sense strand starting at position 144 of SEQ ID NO: 1882843
gugaucuagaaauggucua

SEQ ID NO: 2151541 - RNA, 19 nt, Artificial Sequence
  Description of Artificial Sequence: Synthetic oligonucleotide
  Antisense strand to SEQ ID NO: 2151540
uagaccauuucuagaucac

SEQ ID NO: 2151542 - RNA, 19 nt, Artificial Sequence
  Description of Artificial Sequence: Synthetic oligonucleotide
  Sense strand starting at position 149 of SEQ ID NO: 1882843
cuagaaauggucuagccaa

SEQ ID NO: 2151543 - RNA, 19 nt, Artificial Sequence
  Description of Artificial Sequence: Synthetic oligonucleotide
  Antisense strand to SEQ ID NO: 2151542
uuggcuagaccauuucuag

SEQ ID NO: 2151544 - RNA, 19 nt, Artificial Sequence
  Description of Artificial Sequence: Synthetic oligonucleotide
  Sense strand starting at position 236 of SEQ ID NO: 1882843
ugacuuaugucaccaugga

SEQ ID NO: 2151545 - RNA, 19 nt, Artificial Sequence
  Description of Artificial Sequence: Synthetic oligonucleotide
  Antisense strand to SEQ ID NO: 2151544
uccauggugacauaaguca

SEQ ID NO: 2151546 - RNA, 19 nt, Artificial Sequence
  Description of Artificial Sequence: Synthetic oligonucleotide
  Sense strand starting at position 328 of SEQ ID NO: 1882843
gguaaaggauuccuacuuu

SEQ ID NO: 2151547 - RNA, 19 nt, Artificial Sequence
  Description of Artificial Sequence: Synthetic oligonucleotide
  Antisense strand to SEQ ID NO: 2151546
aaaguaggaauccuuuacc

SEQ ID NO: 2151548 - RNA, 19 nt, Artificial Sequence
  Description of Artificial Sequence: Synthetic oligonucleotide
  Sense strand starting at position 792 of SEQ ID NO: 1882843
aggagacacucuuuauucu

SEQ ID NO: 2151549 - RNA, 19 nt, Artificial Sequence
  Description of Artificial Sequence: Synthetic oligonucleotide
  Antisense strand to SEQ ID NO: 2151548
agaauaaagagugucuccu

SEQ ID NO: 2151550 - RNA, 19 nt, Artificial Sequence
  Description of Artificial Sequence: Synthetic oligonucleotide
  Sense strand starting at position 1177 of SEQ ID NO: 1882843
accaaugaggccugaagau

SEQ ID NO: 2151551 - RNA, 19 nt, Artificial Sequence
  Description of Artificial Sequence: Synthetic oligonucleotide
  Antisense strand to SEQ ID NO: 2151550
aucuucaggccucauuggu

SEQ ID NO: 2151552 - RNA, 19 nt, Artificial Sequence
  Description of Artificial Sequence: Synthetic oligonucleotide
  Sense strand starting at position 1875 of SEQ ID NO: 1882843
aggccuuucccagggauca

SEQ ID NO: 2151553 - RNA, 19 nt, Artificial Sequence
  Description of Artificial Sequence: Synthetic oligonucleotide
  Antisense strand to SEQ ID NO: 2151552
ugaucccugggaaaggccu

SEQ ID NO: 2151554 - RNA, 19 nt, Artificial Sequence
  Description of Artificial Sequence: Synthetic oligonucleotide
  Sense strand starting at position 1876 of SEQ ID NO: 1882843
ggccuuucccagggaucag

SEQ ID NO: 2151555 - RNA, 19 nt, Artificial Sequence
  Description of Artificial Sequence: Synthetic oligonucleotide
  Antisense strand to SEQ ID NO: 2151554
cugaucccugggaaaggcc

SEQ ID NO: 2151556 - RNA, 19 nt, Artificial Sequence
  Description of Artificial Sequence: Synthetic oligonucleotide
  Sense strand starting at position 2174 of SEQ ID NO: 1882843
guuccuuaccuggagaggu

SEQ ID NO: 2151557 - RNA, 19 nt, Artificial Sequence
  Description of Artificial Sequence: Synthetic oligonucleotide
  Antisense strand to SEQ ID NO: 2151556
accucuccagguaaggaac

SEQ ID NO: 2151558 - RNA, 19 nt, Artificial Sequence
  Description of Artificial Sequence: Synthetic oligonucleotide
  Sense strand starting at position 2302 of SEQ ID NO: 1882843
cuccguaaccuggaacagu

SEQ ID NO: 2151559 - RNA, 19 nt, Artificial Sequence
  Description of Artificial Sequence: Synthetic oligonucleotide
  Antisense strand to SEQ ID NO: 2151558
acuguuccagguuacggag

SEQ ID NO: 2151560 - RNA, 19 nt, Artificial Sequence
  Description of Artificial Sequence: Synthetic oligonucleotide
  Sense strand starting at position 2366 of SEQ ID NO: 1882843
cuccuaaagcuugauguga

SEQ ID NO: 2151561 - RNA, 19 nt, Artificial Sequence
  Description of Artificial Sequence: Synthetic oligonucleotide
  Antisense strand to SEQ ID NO: 2151560
ucacaucaagcuuuaggag

SEQ ID NO: 2151562 - RNA, 19 nt, Artificial Sequence
  Description of Artificial Sequence: Synthetic oligonucleotide
  Sense strand starting at position 2397 of SEQ ID NO: 1882843
cauucuuagcaagguggaa

SEQ ID NO: 2151563 - RNA, 19 nt, Artificial Sequence
  Description of Artificial Sequence: Synthetic oligonucleotide
  Antisense strand to SEQ ID NO: 2151562
uuccaccuugcuaagaaug

SEQ ID NO: 2151564 - RNA, 19 nt, Artificial Sequence
  Description of Artificial Sequence: Synthetic oligonucleotide
  Sense strand starting at position 2528 of SEQ ID NO: 1882843
aggagagccaguugugaua

SEQ ID NO: 2151565 - RNA, 19 nt, Artificial Sequence
  Description of Artificial Sequence: Synthetic oligonucleotide
  Antisense strand to SEQ ID NO: 2151564
uaucacaacuggcucuccu

SEQ ID NO: 2151566 - RNA, 19 nt, Artificial Sequence
  Description of Artificial Sequence: Synthetic oligonucleotide
  Sense strand starting at position 2539 of SEQ ID NO: 1882843
uugugauacuacgucauuu

SEQ ID NO: 2151567 - RNA, 19 nt, Artificial Sequence
  Description of Artificial Sequence: Synthetic oligonucleotide
  Antisense strand to SEQ ID NO: 2151566
aaaugacguaguaucacaa

SEQ ID NO: 2151568 - RNA, 19 nt, Artificial Sequence
  Description of Artificial Sequence: Synthetic oligonucleotide
  Sense strand starting at position 2584 of SEQ ID NO: 1882843
ccuggaucuuggguuccaa

SEQ ID NO: 2151569 - RNA, 19 nt, Artificial Sequence
  Description of Artificial Sequence: Synthetic oligonucleotide
  Antisense strand to SEQ ID NO: 2151568
uuggaacccaagauccagg

SEQ ID NO: 2151570 - RNA, 19 nt, Artificial Sequence
  Description of Artificial Sequence: Synthetic oligonucleotide
  Sense strand starting at position 2618 of SEQ ID NO: 1882843
ccugucuaccuagaaguga

SEQ ID NO: 2151571 - RNA, 19 nt, Artificial Sequence
  Description of Artificial Sequence: Synthetic oligonucleotide
  Antisense strand to SEQ ID NO: 2151570
ucacuucuagguagacagg

SEQ ID NO: 2151572 - RNA, 19 nt, Artificial Sequence
  Description of Artificial Sequence: Synthetic oligonucleotide
  Sense strand starting at position 2665 of SEQ ID NO: 1882843
gagagaagggugugucaaa

SEQ ID NO: 2151573 - RNA, 19 nt, Artificial Sequence
  Description of Artificial Sequence: Synthetic oligonucleotide
  Antisense strand to SEQ ID NO: 2151572
uuugacacacccuucucuc

SEQ ID NO: 2151574 - RNA, 19 nt, Artificial Sequence
  Description of Artificial Sequence: Synthetic oligonucleotide
  Sense strand starting at position 2672 of SEQ ID NO: 1882843
gggugugucaaacagauga

SEQ ID NO: 2151575 - RNA, 19 nt, Artificial Sequence
  Description of Artificial Sequence: Synthetic oligonucleotide
  Antisense strand to SEQ ID NO: 2151574
ucaucuguuugacacaccc

SEQ ID NO: 2151576 - RNA, 19 nt, Artificial Sequence
  Description of Artificial Sequence: Synthetic oligonucleotide
  Sense strand starting at position 2674 of SEQ ID NO: 1882843
gugugucaaacagaugaga

SEQ ID NO: 2151577 - RNA, 19 nt, Artificial Sequence
  Description of Artificial Sequence: Synthetic oligonucleotide
  Antisense strand to SEQ ID NO: 2151576
ucucaucuguuugacacac

SEQ ID NO: 2151578 - RNA, 19 nt, Artificial Sequence
  Description of Artificial Sequence: Synthetic oligonucleotide
  Sense strand starting at position 2760 of SEQ ID NO: 1882843
gcaucuugggccuaaucca

SEQ ID NO: 2151579 - RNA, 19 nt, Artificial Sequence
  Description of Artificial Sequence: Synthetic oligonucleotide
  Antisense strand to SEQ ID NO: 2151578
uggauuaggcccaagaugc

SEQ ID NO: 2151580 - RNA, 19 nt, Artificial Sequence
  Description of Artificial Sequence: Synthetic oligonucleotide
  Sense strand starting at position 2856 of SEQ ID NO: 1882843
gaagaaguuccuggcauag

SEQ ID NO: 2151581 - RNA, 19 nt, Artificial Sequence
  Description of Artificial Sequence: Synthetic oligonucleotide
  Antisense strand to SEQ ID NO: 2151580
cuaugccaggaacuucuuc

SEQ ID NO: 2151582 - RNA, 19 nt, Artificial Sequence
  Description of Artificial Sequence: Synthetic oligonucleotide
  Sense strand starting at position 2867 of SEQ ID NO: 1882843
uggcauaggccuuagcaaa

SEQ ID NO: 2151583 - RNA, 19 nt, Artificial Sequence
  Description of Artificial Sequence: Synthetic oligonucleotide
  Antisense strand to SEQ ID NO: 2151582
uuugcuaaggccuaugcca

SEQ ID NO: 2151584 - RNA, 19 nt, Artificial Sequence
  Description of Artificial Sequence: Synthetic oligonucleotide
  Sense strand starting at position 2886 of SEQ ID NO: 1882843
augggugucauuuguuaac

SEQ ID NO: 2151585 - RNA, 19 nt, Artificial Sequence
  Description of Artificial Sequence: Synthetic oligonucleotide
  Antisense strand to SEQ ID NO: 2151584
guuaacaaaugacacccau

SEQ ID NO: 2151586 - RNA, 19 nt, Artificial Sequence
  Description of Artificial Sequence: Synthetic oligonucleotide
  Sense strand starting at position 2903 of SEQ ID NO: 1882843
accaaucugugggccuaaa

SEQ ID NO: 2151587 - RNA, 19 nt, Artificial Sequence
  Description of Artificial Sequence: Synthetic oligonucleotide
  Antisense strand to SEQ ID NO: 2151586
uuuaggcccacagauuggu

SEQ ID NO: 2151588 - RNA, 19 nt, Artificial Sequence
  Description of Artificial Sequence: Synthetic oligonucleotide
  Sense strand starting at position 3343 of SEQ ID NO: 1882843
gaccaacagcucuagugua

SEQ ID NO: 2151589 - RNA, 19 nt, Artificial Sequence
  Description of Artificial Sequence: Synthetic oligonucleotide
  Antisense strand to SEQ ID NO: 2151588
uacacuagagcuguugguc

SEQ ID NO: 2151590 - RNA, 19 nt, Artificial Sequence
  Description of Artificial Sequence: Synthetic oligonucleotide
  Sense strand starting at position 3399 of SEQ ID NO: 1882843
gcaggagccgaucacuuau

SEQ ID NO: 2151591 - RNA, 19 nt, Artificial Sequence
  Description of Artificial Sequence: Synthetic oligonucleotide
  Antisense strand to SEQ ID NO: 2151590
auaagugaucggcuccugc

SEQ ID NO: 2151592 - RNA, 19 nt, Artificial Sequence
  Description of Artificial Sequence: Synthetic oligonucleotide
  Sense strand starting at position 3448 of SEQ ID NO: 1882843
acccucaaggucuauguua

SEQ ID NO: 2151593 - RNA, 19 nt, Artificial Sequence
  Description of Artificial Sequence: Synthetic oligonucleotide
  Antisense strand to SEQ ID NO: 2151592
uaacauagaccuugagggu

SEQ ID NO: 2151594 - RNA, 19 nt, Artificial Sequence
  Description of Artificial Sequence: Synthetic oligonucleotide
  Sense strand starting at position 3529 of SEQ ID NO: 1882843
gauuguagaguguaaguca

SEQ ID NO: 2151595 - RNA, 19 nt, Artificial Sequence
  Description of Artificial Sequence: Synthetic oligonucleotide
  Antisense strand to SEQ ID NO: 2151594
ugacuuacacucuacaauc

SEQ ID NO: 2151596 - RNA, 19 nt, Artificial Sequence
  Description of Artificial Sequence: Synthetic oligonucleotide
  Sense strand starting at position 3578 of SEQ ID NO: 1882843
cuaucuggucuauaaggca

SEQ ID NO: 2151597 - RNA, 19 nt, Artificial Sequence
  Description of Artificial Sequence: Synthetic oligonucleotide
  Antisense strand to SEQ ID NO: 2151596
ugccuuauagaccagauag

SEQ ID NO: 2151598 - RNA, 19 nt, Artificial Sequence
  Description of Artificial Sequence: Synthetic oligonucleotide
  Sense strand starting at position 3663 of SEQ ID NO: 1882843
gggacuuuccugcaaugga

SEQ ID NO: 2151599 - RNA, 19 nt, Artificial Sequence
  Description of Artificial Sequence: Synthetic oligonucleotide
  Antisense strand to SEQ ID NO: 2151598
uccauugcaggaaaguccc

SEQ ID NO: 2151600 - RNA, 19 nt, Artificial Sequence
  Description of Artificial Sequence: Synthetic oligonucleotide
  Sense strand starting at position 3741 of SEQ ID NO: 1882843
uaguauugagggcagugau

SEQ ID NO: 2151601 - RNA, 19 nt, Artificial Sequence
  Description of Artificial Sequence: Synthetic oligonucleotide
  Antisense strand to SEQ ID NO: 2151600
aucacugcccucaauacua

SEQ ID NO: 2151602 - RNA, 19 nt, Artificial Sequence
  Description of Artificial Sequence: Synthetic oligonucleotide
  Sense strand starting at position 3757 of SEQ ID NO: 1882843
gaugucaaacagugaauaa

SEQ ID NO: 2151603 - RNA, 19 nt, Artificial Sequence
  Description of Artificial Sequence: Synthetic oligonucleotide
  Antisense strand to SEQ ID NO: 2151602
uuauucacuguuugacauc

SEQ ID NO: 2151604 - RNA, 19 nt, Artificial Sequence
  Description of Artificial Sequence: Synthetic oligonucleotide
  Sense strand starting at position 3783 of SEQ ID NO: 1882843
uaucuauguggugaucuua

SEQ ID NO: 2151605 - RNA, 19 nt, Artificial Sequence
  Description of Artificial Sequence: Synthetic oligonucleotide
  Antisense strand to SEQ ID NO: 2151604
uaagaucaccacauagaua

SEQ ID NO: 2151606 - RNA, 19 nt, Artificial Sequence
  Description of Artificial Sequence: Synthetic oligonucleotide
  Sense strand starting at position 3835 of SEQ ID NO: 1882843
gucagaauauuugaaauca

SEQ ID NO: 2151607 - RNA, 19 nt, Artificial Sequence
  Description of Artificial Sequence: Synthetic oligonucleotide
  Antisense strand to SEQ ID NO: 2151606
ugauuucaaauauucugac

SEQ ID NO: 2151608 - RNA, 19 nt, Artificial Sequence
  Description of Artificial Sequence: Synthetic oligonucleotide
  Sense strand starting at position 3846 of SEQ ID NO: 1882843
ugaaaucaaccuugcuaga

SEQ ID NO: 2151609 - RNA, 19 nt, Artificial Sequence
  Description of Artificial Sequence: Synthetic oligonucleotide
  Antisense strand to SEQ ID NO: 2151608
ucuagcaagguugauuuca

SEQ ID NO: 2151610 - RNA, 19 nt, Artificial Sequence
  Description of Artificial Sequence: Synthetic oligonucleotide
  Sense strand starting at position 3946 of SEQ ID NO: 1882843
gguuguauccuugaaauac

SEQ ID NO: 2151611 - RNA, 19 nt, Artificial Sequence
  Description of Artificial Sequence: Synthetic oligonucleotide
  Antisense strand to SEQ ID NO: 2151610
guauuucaaggauacaacc

SEQ ID NO: 2151612 - RNA, 19 nt, Artificial Sequence
  Description of Artificial Sequence: Synthetic oligonucleotide
  Sense strand starting at position 3968 of SEQ ID NO: 1882843
guuguuucuagugacuaga

SEQ ID NO: 2151613 - RNA, 19 nt, Artificial Sequence
  Description of Artificial Sequence: Synthetic oligonucleotide
  Antisense strand to SEQ ID NO: 2151612
ucuagucacuagaaacaac

SEQ ID NO: 2151614 - RNA, 19 nt, Artificial Sequence
  Description of Artificial Sequence: Synthetic oligonucleotide
  Sense strand starting at position 3970 of SEQ ID NO: 1882843
uguuucuagugacuagaaa

SEQ ID NO: 2151615 - RNA, 19 nt, Artificial Sequence
  Description of Artificial Sequence: Synthetic oligonucleotide
  Antisense strand to SEQ ID NO: 2151614
uuucuagucacuagaaaca

SEQ ID NO: 2151616 - RNA, 19 nt, Artificial Sequence
  Description of Artificial Sequence: Synthetic oligonucleotide
  Sense strand starting at position 3971 of SEQ ID NO: 1882843
guuucuagugacuagaaau

SEQ ID NO: 2151617 - RNA, 19 nt, Artificial Sequence
  Description of Artificial Sequence: Synthetic oligonucleotide
  Antisense strand to SEQ ID NO: 2151616
auuucuagucacuagaaac

SEQ ID NO: 2151618 - RNA, 19 nt, Artificial Sequence
  Description of Artificial Sequence: Synthetic oligonucleotide
  Sense strand starting at position 15 of SEQ ID NO: 1882844
gugauaauuggaugcuuau

SEQ ID NO: 2151619 - RNA, 19 nt, Artificial Sequence
  Description of Artificial Sequence: Synthetic oligonucleotide
  Antisense strand to SEQ ID NO: 2151618
auaagcauccaauuaucac

SEQ ID NO: 2151620 - RNA, 19 nt, Artificial Sequence
  Description of Artificial Sequence: Synthetic oligonucleotide
  Sense strand starting at position 24 of SEQ ID NO: 1882844
ggaugcuuauuaucaccua

SEQ ID NO: 2151621 - RNA, 19 nt, Artificial Sequence
  Description of Artificial Sequence: Synthetic oligonucleotide
  Antisense strand to SEQ ID NO: 2151620
uaggugauaauaagcaucc

SEQ ID NO: 2151622 - RNA, 19 nt, Artificial Sequence
  Description of Artificial Sequence: Synthetic oligonucleotide
  Sense strand starting at position 27 of SEQ ID NO: 1882844
ugcuuauuaucaccuagag

SEQ ID NO: 2151623 - RNA, 19 nt, Artificial Sequence
  Description of Artificial Sequence: Synthetic oligonucleotide
  Antisense strand to SEQ ID NO: 2151622
cucuaggugauaauaagca

SEQ ID NO: 2151624 - RNA, 19 nt, Artificial Sequence
  Description of Artificial Sequence: Synthetic oligonucleotide
  Sense strand starting at position 42 of SEQ ID NO: 1882844
agagaucuggcuugacagu

SEQ ID NO: 2151625 - RNA, 19 nt, Artificial Sequence
  Description of Artificial Sequence: Synthetic oligonucleotide
  Antisense strand to SEQ ID NO: 2151624
acugucaagccagaucucu

SEQ ID NO: 2151626 - RNA, 19 nt, Artificial Sequence
  Description of Artificial Sequence: Synthetic oligonucleotide
  Sense strand starting at position 43 of SEQ ID NO: 1882844
gagaucuggcuugacaguu

SEQ ID NO: 2151627 - RNA, 19 nt, Artificial Sequence
  Description of Artificial Sequence: Synthetic oligonucleotide
  Antisense strand to SEQ ID NO: 2151626
aacugucaagccagaucuc

SEQ ID NO: 2151628 - RNA, 19 nt, Artificial Sequence
  Description of Artificial Sequence: Synthetic oligonucleotide
  Sense strand starting at position 258 of SEQ ID NO: 1882844
auguauuugucucuagcau

SEQ ID NO: 2151629 - RNA, 19 nt, Artificial Sequence
  Description of Artificial Sequence: Synthetic oligonucleotide
  Antisense strand to SEQ ID NO: 2151628
augcuagagacaaauacau

SEQ ID NO: 2151630 - RNA, 19 nt, Artificial Sequence
  Description of Artificial Sequence: Synthetic oligonucleotide
  Sense strand starting at position 259 of SEQ ID NO: 1882844
uguauuugucucuagcauu

SEQ ID NO: 2151631 - RNA, 19 nt, Artificial Sequence
  Description of Artificial Sequence: Synthetic oligonucleotide
  Antisense strand to SEQ ID NO: 2151630
aaugcuagagacaaauaca

SEQ ID NO: 2151632 - RNA, 19 nt, Artificial Sequence
  Description of Artificial Sequence: Synthetic oligonucleotide
  Sense strand starting at position 360 of SEQ ID NO: 1882844
gcaguaaugucuccauuua

SEQ ID NO: 2151633 - RNA, 19 nt, Artificial Sequence
  Description of Artificial Sequence: Synthetic oligonucleotide
  Antisense strand to SEQ ID NO: 2151632
uaaauggagacauuacugc

SEQ ID NO: 2151634 - RNA, 19 nt, Artificial Sequence
  Description of Artificial Sequence: Synthetic oligonucleotide
  Sense strand starting at position 389 of SEQ ID NO: 1882844
gccaaugacuaggucagua

SEQ ID NO: 2151635 - RNA, 19 nt, Artificial Sequence
  Description of Artificial Sequence: Synthetic oligonucleotide
  Antisense strand to SEQ ID NO: 2151634
uacugaccuagucauuggc

SEQ ID NO: 2151636 - RNA, 19 nt, Artificial Sequence
  Description of Artificial Sequence: Synthetic oligonucleotide
  Sense strand starting at position 465 of SEQ ID NO: 1882844
aggagauugugggaggaaa

SEQ ID NO: 2151637 - RNA, 19 nt, Artificial Sequence
  Description of Artificial Sequence: Synthetic oligonucleotide
  Antisense strand to SEQ ID NO: 2151636
uuuccucccacaaucuccu

SEQ ID NO: 2151638 - RNA, 19 nt, Artificial Sequence
  Description of Artificial Sequence: Synthetic oligonucleotide
  Sense strand starting at position 546 of SEQ ID NO: 1882844
uaugccaaauguucuggaa

SEQ ID NO: 2151639 - RNA, 19 nt, Artificial Sequence
  Description of Artificial Sequence: Synthetic oligonucleotide
  Antisense strand to SEQ ID NO: 2151638
uuccagaacauuuggcaua

SEQ ID NO: 2151640 - RNA, 19 nt, Artificial Sequence
  Description of Artificial Sequence: Synthetic oligonucleotide
  Sense strand starting at position 652 of SEQ ID NO: 1882844
gaggaauccuguucuuaac

SEQ ID NO: 2151641 - RNA, 19 nt, Artificial Sequence
  Description of Artificial Sequence: Synthetic oligonucleotide
  Antisense strand to SEQ ID NO: 2151640
guuaagaacaggauuccuc

SEQ ID NO: 2151642 - RNA, 19 nt, Artificial Sequence
  Description of Artificial Sequence: Synthetic oligonucleotide
  Sense strand starting at position 692 of SEQ ID NO: 1882844
uguuuaaccucuuugacug

SEQ ID NO: 2151643 - RNA, 19 nt, Artificial Sequence
  Description of Artificial Sequence: Synthetic oligonucleotide
  Antisense strand to SEQ ID NO: 2151642
cagucaaagagguuaaaca

SEQ ID NO: 2151644 - RNA, 19 nt, Artificial Sequence
  Description of Artificial Sequence: Synthetic oligonucleotide
  Sense strand starting at position 693 of SEQ ID NO: 1882844
guuuaaccucuuugacuga

SEQ ID NO: 2151645 - RNA, 19 nt, Artificial Sequence
  Description of Artificial Sequence: Synthetic oligonucleotide
  Antisense strand to SEQ ID NO: 2151644
ucagucaaagagguuaaac

SEQ ID NO: 2151646 - RNA, 19 nt, Artificial Sequence
  Description of Artificial Sequence: Synthetic oligonucleotide
  Sense strand starting at position 1254 of SEQ ID NO: 1882844
uuguguauacagcauucua

SEQ ID NO: 2151647 - RNA, 19 nt, Artificial Sequence
  Description of Artificial Sequence: Synthetic oligonucleotide
  Antisense strand to SEQ ID NO: 2151646
uagaaugcuguauacacaa

SEQ ID NO: 2151648 - RNA, 19 nt, Artificial Sequence
  Description of Artificial Sequence: Synthetic oligonucleotide
  Sense strand starting at position 1524 of SEQ ID NO: 1882844
ggagauuuaugcuauaaag

SEQ ID NO: 2151649 - RNA, 19 nt, Artificial Sequence
  Description of Artificial Sequence: Synthetic oligonucleotide
  Antisense strand to SEQ ID NO: 2151648
cuuuauagcauaaaucucc

SEQ ID NO: 2151650 - RNA, 19 nt, Artificial Sequence
  Description of Artificial Sequence: Synthetic oligonucleotide
  Sense strand starting at position 1846 of SEQ ID NO: 1882844
ggagaaaugcaauaugcuu

SEQ ID NO: 2151651 - RNA, 19 nt, Artificial Sequence
  Description of Artificial Sequence: Synthetic oligonucleotide
  Antisense strand to SEQ ID NO: 2151650
aagcauauugcauuucucc

SEQ ID NO: 2151652 - RNA, 19 nt, Artificial Sequence
  Description of Artificial Sequence: Synthetic oligonucleotide
  Sense strand starting at position 1923 of SEQ ID NO: 1882844
ugguguuaauaccuggaga

SEQ ID NO: 2151653 - RNA, 19 nt, Artificial Sequence
  Description of Artificial Sequence: Synthetic oligonucleotide
  Antisense strand to SEQ ID NO: 2151652
ucuccagguauuaacacca

SEQ ID NO: 2151654 - RNA, 19 nt, Artificial Sequence
  Description of Artificial Sequence: Synthetic oligonucleotide
  Sense strand starting at position 1924 of SEQ ID NO: 1882844
gguguuaauaccuggagag

SEQ ID NO: 2151655 - RNA, 19 nt, Artificial Sequence
  Description of Artificial Sequence: Synthetic oligonucleotide
  Antisense strand to SEQ ID NO: 2151654
cucuccagguauuaacacc

SEQ ID NO: 2151656 - RNA, 19 nt, Artificial Sequence
  Description of Artificial Sequence: Synthetic oligonucleotide
  Sense strand starting at position 1925 of SEQ ID NO: 1882844
guguuaauaccuggagagc

SEQ ID NO: 2151657 - RNA, 19 nt, Artificial Sequence
  Description of Artificial Sequence: Synthetic oligonucleotide
  Antisense strand to SEQ ID NO: 2151656
gcucuccagguauuaacac

SEQ ID NO: 2151658 - RNA, 19 nt, Artificial Sequence
  Description of Artificial Sequence: Synthetic oligonucleotide
  Sense strand starting at position 1926 of SEQ ID NO: 1882844
uguuaauaccuggagagca

SEQ ID NO: 2151659 - RNA, 19 nt, Artificial Sequence
  Description of Artificial Sequence: Synthetic oligonucleotide
  Antisense strand to SEQ ID NO: 2151658
ugcucuccagguauuaaca

SEQ ID NO: 2151660 - RNA, 19 nt, Artificial Sequence
  Description of Artificial Sequence: Synthetic oligonucleotide
  Sense strand starting at position 2017 of SEQ ID NO: 1882844
agacuaacugauggcauaa

SEQ ID NO: 2151661 - RNA, 19 nt, Artificial Sequence
  Description of Artificial Sequence: Synthetic oligonucleotide
  Antisense strand to SEQ ID NO: 2151660
uuaugccaucaguuagucu

SEQ ID NO: 2151662 - RNA, 19 nt, Artificial Sequence
  Description of Artificial Sequence: Synthetic oligonucleotide
  Sense strand starting at position 2199 of SEQ ID NO: 1882844
cugucugacauugggugaa

SEQ ID NO: 2151663 - RNA, 19 nt, Artificial Sequence
  Description of Artificial Sequence: Synthetic oligonucleotide
  Antisense strand to SEQ ID NO: 2151662
uucacccaaugucagacag

SEQ ID NO: 2151664 - RNA, 19 nt, Artificial Sequence
  Description of Artificial Sequence: Synthetic oligonucleotide
  Sense strand starting at position 2201 of SEQ ID NO: 1882844
gucugacauugggugaauc

SEQ ID NO: 2151665 - RNA, 19 nt, Artificial Sequence
  Description of Artificial Sequence: Synthetic oligonucleotide
  Antisense strand to SEQ ID NO: 2151664
gauucacccaaugucagac

SEQ ID NO: 2151666 - RNA, 19 nt, Artificial Sequence
  Description of Artificial Sequence: Synthetic oligonucleotide
  Sense strand starting at position 2537 of SEQ ID NO: 1882844
augagacgaugucuguaaa

SEQ ID NO: 2151667 - RNA, 19 nt, Artificial Sequence
  Description of Artificial Sequence: Synthetic oligonucleotide
  Antisense strand to SEQ ID NO: 2151666
uuuacagacaucgucucau

SEQ ID NO: 2151668 - RNA, 19 nt, Artificial Sequence
  Description of Artificial Sequence: Synthetic oligonucleotide
  Sense strand starting at position 2540 of SEQ ID NO: 1882844
agacgaugucuguaaaugc

SEQ ID NO: 2151669 - RNA, 19 nt, Artificial Sequence
  Description of Artificial Sequence: Synthetic oligonucleotide
  Antisense strand to SEQ ID NO: 2151668
gcauuuacagacaucgucu

SEQ ID NO: 2151670 - RNA, 19 nt, Artificial Sequence
  Description of Artificial Sequence: Synthetic oligonucleotide
  Sense strand starting at position 2548 of SEQ ID NO: 1882844
ucuguaaaugcucagccaa

SEQ ID NO: 2151671 - RNA, 19 nt, Artificial Sequence
  Description of Artificial Sequence: Synthetic oligonucleotide
  Antisense strand to SEQ ID NO: 2151670
uuggcugagcauuuacaga

SEQ ID NO: 2151672 - RNA, 19 nt, Artificial Sequence
  Description of Artificial Sequence: Synthetic oligonucleotide
  Sense strand starting at position 2550 of SEQ ID NO: 1882844
uguaaaugcucagccaaga

SEQ ID NO: 2151673 - RNA, 19 nt, Artificial Sequence
  Description of Artificial Sequence: Synthetic oligonucleotide
  Antisense strand to SEQ ID NO: 2151672
ucuuggcugagcauuuaca

SEQ ID NO: 2151674 - RNA, 19 nt, Artificial Sequence
  Description of Artificial Sequence: Synthetic oligonucleotide
  Sense strand starting at position 2576 of SEQ ID NO: 1882844
gagugcuccaggcauggaa

SEQ ID NO: 2151675 - RNA, 19 nt, Artificial Sequence
  Description of Artificial Sequence: Synthetic oligonucleotide
  Antisense strand to SEQ ID NO: 2151674
uuccaugccuggagcacuc

SEQ ID NO: 2151676 - RNA, 19 nt, Artificial Sequence
  Description of Artificial Sequence: Synthetic oligonucleotide
  Sense strand starting at position 2683 of SEQ ID NO: 1882844
ggcgaacuucugcaggaca

SEQ ID NO: 2151677 - RNA, 19 nt, Artificial Sequence
  Description of Artificial Sequence: Synthetic oligonucleotide
  Antisense strand to SEQ ID NO: 2151676
uguccugcagaaguucgcc

SEQ ID NO: 2151678 - RNA, 19 nt, Artificial Sequence
  Description of Artificial Sequence: Synthetic oligonucleotide
  Sense strand starting at position 2685 of SEQ ID NO: 1882844
cgaacuucugcaggacaca

SEQ ID NO: 2151679 - RNA, 19 nt, Artificial Sequence
  Description of Artificial Sequence: Synthetic oligonucleotide
  Antisense strand to SEQ ID NO: 2151678
uguguccugcagaaguucg

SEQ ID NO: 2151680 - RNA, 19 nt, Artificial Sequence
  Description of Artificial Sequence: Synthetic oligonucleotide
  Sense strand starting at position 2776 of SEQ ID NO: 1882844
cuuggaagcucucccuaga

SEQ ID NO: 2151681 - RNA, 19 nt, Artificial Sequence
  Description of Artificial Sequence: Synthetic oligonucleotide
  Antisense strand to SEQ ID NO: 2151680
ucuagggagagcuuccaag

SEQ ID NO: 2151682 - RNA, 19 nt, Artificial Sequence
  Description of Artificial Sequence: Synthetic oligonucleotide
  Sense strand starting at position 2909 of SEQ ID NO: 1882844
aaagaaauaccucgccugu

SEQ ID NO: 2151683 - RNA, 19 nt, Artificial Sequence
  Description of Artificial Sequence: Synthetic oligonucleotide
  Antisense strand to SEQ ID NO: 2151682
acaggcgagguauuucuuu

SEQ ID NO: 2151684 - RNA, 19 nt, Artificial Sequence
  Description of Artificial Sequence: Synthetic oligonucleotide
  Sense strand starting at position 3250 of SEQ ID NO: 1882844
guuuacuaggcucaugauu

SEQ ID NO: 2151685 - RNA, 19 nt, Artificial Sequence
  Description of Artificial Sequence: Synthetic oligonucleotide
  Antisense strand to SEQ ID NO: 2151684
aaucaugagccuaguaaac

SEQ ID NO: 2151686 - RNA, 19 nt, Artificial Sequence
  Description of Artificial Sequence: Synthetic oligonucleotide
  Sense strand starting at position 3348 of SEQ ID NO: 1882844
ggagccagaugucucacau

SEQ ID NO: 2151687 - RNA, 19 nt, Artificial Sequence
  Description of Artificial Sequence: Synthetic oligonucleotide
  Antisense strand to SEQ ID NO: 2151686
augugagacaucuggcucc

SEQ ID NO: 2151688 - RNA, 19 nt, Artificial Sequence
  Description of Artificial Sequence: Synthetic oligonucleotide
  Sense strand starting at position 3453 of SEQ ID NO: 1882844
gcaucaaauggaugguacu

SEQ ID NO: 2151689 - RNA, 19 nt, Artificial Sequence
  Description of Artificial Sequence: Synthetic oligonucleotide
  Antisense strand to SEQ ID NO: 2151688
aguaccauccauuugaugc

SEQ ID NO: 2151690 - RNA, 19 nt, Artificial Sequence
  Description of Artificial Sequence: Synthetic oligonucleotide
  Sense strand starting at position 3454 of SEQ ID NO: 1882844
caucaaauggaugguacua

SEQ ID NO: 2151691 - RNA, 19 nt, Artificial Sequence
  Description of Artificial Sequence: Synthetic oligonucleotide
  Antisense strand to SEQ ID NO: 2151690
uaguaccauccauuugaug

SEQ ID NO: 2151692 - RNA, 19 nt, Artificial Sequence
  Description of Artificial Sequence: Synthetic oligonucleotide
  Sense strand starting at position 3552 of SEQ ID NO: 1882844
gggaaugauuuccggauga

SEQ ID NO: 2151693 - RNA, 19 nt, Artificial Sequence
  Description of Artificial Sequence: Synthetic oligonucleotide
  Antisense strand to SEQ ID NO: 2151692
ucauccggaaaucauuccc

SEQ ID NO: 2151694 - RNA, 19 nt, Artificial Sequence
  Description of Artificial Sequence: Synthetic oligonucleotide
  Sense strand starting at position 3594 of SEQ ID NO: 1882844
ggcauuagauucucaaccu

SEQ ID NO: 2151695 - RNA, 19 nt, Artificial Sequence
  Description of Artificial Sequence: Synthetic oligonucleotide
  Antisense strand to SEQ ID NO: 2151694
agguugagaaucuaaugcc

SEQ ID NO: 2151696 - RNA, 19 nt, Artificial Sequence
  Description of Artificial Sequence: Synthetic oligonucleotide
  Sense strand starting at position 3943 of SEQ ID NO: 1882844
cagcaaagacuuuguuaug

SEQ ID NO: 2151697 - RNA, 19 nt, Artificial Sequence
  Description of Artificial Sequence: Synthetic oligonucleotide
  Antisense strand to SEQ ID NO: 2151696
cauaacaaagucuuugcug

SEQ ID NO: 2151698 - RNA, 19 nt, Artificial Sequence
  Description of Artificial Sequence: Synthetic oligonucleotide
  Sense strand starting at position 241 of SEQ ID NO: 1882845
agguucuuguuccuaugaa

SEQ ID NO: 2151699 - RNA, 19 nt, Artificial Sequence
  Description of Artificial Sequence: Synthetic oligonucleotide
  Antisense strand to SEQ ID NO: 2151698
uucauaggaacaagaaccu

SEQ ID NO: 2151700 - RNA, 19 nt, Artificial Sequence
  Description of Artificial Sequence: Synthetic oligonucleotide
  Sense strand starting at position 442 of SEQ ID NO: 1882845
uguuguuuccuacagaauu

SEQ ID NO: 2151701 - RNA, 19 nt, Artificial Sequence
  Description of Artificial Sequence: Synthetic oligonucleotide
  Antisense strand to SEQ ID NO: 2151700
aauucuguaggaaacaaca

SEQ ID NO: 2151702 - RNA, 19 nt, Artificial Sequence
  Description of Artificial Sequence: Synthetic oligonucleotide
  Sense strand starting at position 527 of SEQ ID NO: 1882845
uuauuagcagacuaauugu

SEQ ID NO: 2151703 - RNA, 19 nt, Artificial Sequence
  Description of Artificial Sequence: Synthetic oligonucleotide
  Antisense strand to SEQ ID NO: 2151702
acaauuagucugcuaauaa

SEQ ID NO: 2151704 - RNA, 19 nt, Artificial Sequence
  Description of Artificial Sequence: Synthetic oligonucleotide
  Sense strand starting at position 611 of SEQ ID NO: 1882845
acauaaaugugggccagua

SEQ ID NO: 2151705 - RNA, 19 nt, Artificial Sequence
  Description of Artificial Sequence: Synthetic oligonucleotide
  Antisense strand to SEQ ID NO: 2151704
uacuggcccacauuuaugu

SEQ ID NO: 2151706 - RNA, 19 nt, Artificial Sequence
  Description of Artificial Sequence: Synthetic oligonucleotide
  Sense strand starting at position 634 of SEQ ID NO: 1882845
gcagccucugcauaauaca

SEQ ID NO: 2151707 - RNA, 19 nt, Artificial Sequence
  Description of Artificial Sequence: Synthetic oligonucleotide
  Antisense strand to SEQ ID NO: 2151706
uguauuaugcagaggcugc

SEQ ID NO: 2151708 - RNA, 19 nt, Artificial Sequence
  Description of Artificial Sequence: Synthetic oligonucleotide
  Sense strand starting at position 764 of SEQ ID NO: 1882845
auaaguuaccuccauguga

SEQ ID NO: 2151709 - RNA, 19 nt, Artificial Sequence
  Description of Artificial Sequence: Synthetic oligonucleotide
  Antisense strand to SEQ ID NO: 2151708
ucacauggagguaacuuau

SEQ ID NO: 2151710 - RNA, 19 nt, Artificial Sequence
  Description of Artificial Sequence: Synthetic oligonucleotide
  Sense strand starting at position 898 of SEQ ID NO: 1882845
agggaaauaugucucucuu

SEQ ID NO: 2151711 - RNA, 19 nt, Artificial Sequence
  Description of Artificial Sequence: Synthetic oligonucleotide
  Antisense strand to SEQ ID NO: 2151710
aagagagacauauuucccu

SEQ ID NO: 2151712 - RNA, 19 nt, Artificial Sequence
  Description of Artificial Sequence: Synthetic oligonucleotide
  Sense strand starting at position 915 of SEQ ID NO: 1882845
uuggucauauugcuaucaa

SEQ ID NO: 2151713 - RNA, 19 nt, Artificial Sequence
  Description of Artificial Sequence: Synthetic oligonucleotide
  Antisense strand to SEQ ID NO: 2151712
uugauagcaauaugaccaa

SEQ ID NO: 2151714 - RNA, 19 nt, Artificial Sequence
  Description of Artificial Sequence: Synthetic oligonucleotide
  Sense strand starting at position 1011 of SEQ ID NO: 1882845
gucuucucugagcauugaa

SEQ ID NO: 2151715 - RNA, 19 nt, Artificial Sequence
  Description of Artificial Sequence: Synthetic oligonucleotide
  Antisense strand to SEQ ID NO: 2151714
uucaaugcucagagaagac

SEQ ID NO: 2151716 - RNA, 19 nt, Artificial Sequence
  Description of Artificial Sequence: Synthetic oligonucleotide
  Sense strand starting at position 1090 of SEQ ID NO: 1882845
ccacaaguuguguaaguac

SEQ ID NO: 2151717 - RNA, 19 nt, Artificial Sequence
  Description of Artificial Sequence: Synthetic oligonucleotide
  Antisense strand to SEQ ID NO: 2151716
guacuuacacaacuugugg

SEQ ID NO: 2151718 - RNA, 19 nt, Artificial Sequence
  Description of Artificial Sequence: Synthetic oligonucleotide
  Sense strand starting at position 1157 of SEQ ID NO: 1882845
gugagugugcaggugucau

SEQ ID NO: 2151719 - RNA, 19 nt, Artificial Sequence
  Description of Artificial Sequence: Synthetic oligonucleotide
  Antisense strand to SEQ ID NO: 2151718
augacaccugcacacucac

SEQ ID NO: 2151720 - RNA, 19 nt, Artificial Sequence
  Description of Artificial Sequence: Synthetic oligonucleotide
  Sense strand starting at position 1168 of SEQ ID NO: 1882845
ggugucaugaaguaaugga

SEQ ID NO: 2151721 - RNA, 19 nt, Artificial Sequence
  Description of Artificial Sequence: Synthetic oligonucleotide
  Antisense strand to SEQ ID NO: 2151720
uccauuacuucaugacacc

SEQ ID NO: 2151722 - RNA, 19 nt, Artificial Sequence
  Description of Artificial Sequence: Synthetic oligonucleotide
  Sense strand starting at position 1225 of SEQ ID NO: 1882845
gcccaaaucacugaggugu

SEQ ID NO: 2151723 - RNA, 19 nt, Artificial Sequence
  Description of Artificial Sequence: Synthetic oligonucleotide
  Antisense strand to SEQ ID NO: 2151722
acaccucagugauuugggc

SEQ ID NO: 2151724 - RNA, 19 nt, Artificial Sequence
  Description of Artificial Sequence: Synthetic oligonucleotide
  Sense strand starting at position 1391 of SEQ ID NO: 1882845
cacccaaagguaugugaaa

SEQ ID NO: 2151725 - RNA, 19 nt, Artificial Sequence
  Description of Artificial Sequence: Synthetic oligonucleotide
  Antisense strand to SEQ ID NO: 2151724
uuucacauaccuuugggug

SEQ ID NO: 2151726 - RNA, 19 nt, Artificial Sequence
  Description of Artificial Sequence: Synthetic oligonucleotide
  Sense strand starting at position 1392 of SEQ ID NO: 1882845
acccaaagguaugugaaau

SEQ ID NO: 2151727 - RNA, 19 nt, Artificial Sequence
  Description of Artificial Sequence: Synthetic oligonucleotide
  Antisense strand to SEQ ID NO: 2151726
auuucacauaccuuugggu

SEQ ID NO: 2151728 - RNA, 19 nt, Artificial Sequence
  Description of Artificial Sequence: Synthetic oligonucleotide
  Sense strand starting at position 1601 of SEQ ID NO: 1882845
gcuacucguccugacaaau

SEQ ID NO: 2151729 - RNA, 19 nt, Artificial Sequence
  Description of Artificial Sequence: Synthetic oligonucleotide
  Antisense strand to SEQ ID NO: 2151728
auuugucaggacgaguagc

SEQ ID NO: 2151730 - RNA, 19 nt, Artificial Sequence
  Description of Artificial Sequence: Synthetic oligonucleotide
  Sense strand starting at position 1628 of SEQ ID NO: 1882845
guuguugauggauguauag

SEQ ID NO: 2151731 - RNA, 19 nt, Artificial Sequence
  Description of Artificial Sequence: Synthetic oligonucleotide
  Antisense strand to SEQ ID NO: 2151730
cuauacauccaucaacaac

SEQ ID NO: 2151732 - RNA, 19 nt, Artificial Sequence
  Description of Artificial Sequence: Synthetic oligonucleotide
  Sense strand starting at position 1697 of SEQ ID NO: 1882845
uguacauauguguggauga

SEQ ID NO: 2151733 - RNA, 19 nt, Artificial Sequence
  Description of Artificial Sequence: Synthetic oligonucleotide
  Antisense strand to SEQ ID NO: 2151732
ucauccacacauauguaca

SEQ ID NO: 2151734 - RNA, 19 nt, Artificial Sequence
  Description of Artificial Sequence: Synthetic oligonucleotide
  Sense strand starting at position 1702 of SEQ ID NO: 1882845
auauguguggaugaauagu

SEQ ID NO: 2151735 - RNA, 19 nt, Artificial Sequence
  Description of Artificial Sequence: Synthetic oligonucleotide
  Antisense strand to SEQ ID NO: 2151734
acuauucauccacacauau

SEQ ID NO: 2151736 - RNA, 19 nt, Artificial Sequence
  Description of Artificial Sequence: Synthetic oligonucleotide
  Sense strand starting at position 1985 of SEQ ID NO: 1882845
gggaaacggucccuaugau

SEQ ID NO: 2151737 - RNA, 19 nt, Artificial Sequence
  Description of Artificial Sequence: Synthetic oligonucleotide
  Antisense strand to SEQ ID NO: 2151736
aucauagggaccguuuccc

SEQ ID NO: 2151738 - RNA, 19 nt, Artificial Sequence
  Description of Artificial Sequence: Synthetic oligonucleotide
  Sense strand starting at position 1986 of SEQ ID NO: 1882845
ggaaacggucccuaugauu

SEQ ID NO: 2151739 - RNA, 19 nt, Artificial Sequence
  Description of Artificial Sequence: Synthetic oligonucleotide
  Antisense strand to SEQ ID NO: 2151738
aaucauagggaccguuucc

SEQ ID NO: 2151740 - RNA, 19 nt, Artificial Sequence
  Description of Artificial Sequence: Synthetic oligonucleotide
  Sense strand starting at position 2115 of SEQ ID NO: 1882845
aaggauagcgcauagaaau

SEQ ID NO: 2151741 - RNA, 19 nt, Artificial Sequence
  Description of Artificial Sequence: Synthetic oligonucleotide
  Antisense strand to SEQ ID NO: 2151740
auuucuaugcgcuauccuu

SEQ ID NO: 2151742 - RNA, 19 nt, Artificial Sequence
  Description of Artificial Sequence: Synthetic oligonucleotide
  Sense strand starting at position 2381 of SEQ ID NO: 1882845
uugaaauucuguguaguga

SEQ ID NO: 2151743 - RNA, 19 nt, Artificial Sequence
  Description of Artificial Sequence: Synthetic oligonucleotide
  Antisense strand to SEQ ID NO: 2151742
ucacuacacagaauuucaa

SEQ ID NO: 2151744 - RNA, 19 nt, Artificial Sequence
  Description of Artificial Sequence: Synthetic oligonucleotide
  Sense strand starting at position 2382 of SEQ ID NO: 1882845
ugaaauucuguguagugau

SEQ ID NO: 2151745 - RNA, 19 nt, Artificial Sequence
  Description of Artificial Sequence: Synthetic oligonucleotide
  Antisense strand to SEQ ID NO: 2151744
aucacuacacagaauuuca

SEQ ID NO: 2151746 - RNA, 19 nt, Artificial Sequence
  Description of Artificial Sequence: Synthetic oligonucleotide
  Sense strand starting at position 2396 of SEQ ID NO: 1882845
gugauaaugcaucaucuga

SEQ ID NO: 2151747 - RNA, 19 nt, Artificial Sequence
  Description of Artificial Sequence: Synthetic oligonucleotide
  Antisense strand to SEQ ID NO: 2151746
ucagaugaugcauuaucac

SEQ ID NO: 2151748 - RNA, 19 nt, Artificial Sequence
  Description of Artificial Sequence: Synthetic oligonucleotide
  Sense strand starting at position 2433 of SEQ ID NO: 1882845
ugacauagguaucuucuga

SEQ ID NO: 2151749 - RNA, 19 nt, Artificial Sequence
  Description of Artificial Sequence: Synthetic oligonucleotide
  Antisense strand to SEQ ID NO: 2151748
ucagaagauaccuauguca

SEQ ID NO: 2151750 - RNA, 19 nt, Artificial Sequence
  Description of Artificial Sequence: Synthetic oligonucleotide
  Sense strand starting at position 2511 of SEQ ID NO: 1882845
gucuuuguucucucuguuu

SEQ ID NO: 2151751 - RNA, 19 nt, Artificial Sequence
  Description of Artificial Sequence: Synthetic oligonucleotide
  Antisense strand to SEQ ID NO: 2151750
aaacagagagaacaaagac

SEQ ID NO: 2151752 - RNA, 19 nt, Artificial Sequence
  Description of Artificial Sequence: Synthetic oligonucleotide
  Sense strand starting at position 2701 of SEQ ID NO: 1882845
aauuguaagccuuauguag

SEQ ID NO: 2151753 - RNA, 19 nt, Artificial Sequence
  Description of Artificial Sequence: Synthetic oligonucleotide
  Antisense strand to SEQ ID NO: 2151752
cuacauaaggcuuacaauu

SEQ ID NO: 2151754 - RNA, 19 nt, Artificial Sequence
  Description of Artificial Sequence: Synthetic oligonucleotide
  Sense strand starting at position 2814 of SEQ ID NO: 1882845
acuggaaaguuccuguauu

SEQ ID NO: 2151755 - RNA, 19 nt, Artificial Sequence
  Description of Artificial Sequence: Synthetic oligonucleotide
  Antisense strand to SEQ ID NO: 2151754
aauacaggaacuuuccagu

SEQ ID NO: 2151756 - RNA, 19 nt, Artificial Sequence
  Description of Artificial Sequence: Synthetic oligonucleotide
  Sense strand starting at position 2888 of SEQ ID NO: 1882845
caauguuauggauguagaa

SEQ ID NO: 2151757 - RNA, 19 nt, Artificial Sequence
  Description of Artificial Sequence: Synthetic oligonucleotide
  Antisense strand to SEQ ID NO: 2151756
uucuacauccauaacauug

SEQ ID NO: 2151758 - RNA, 19 nt, Artificial Sequence
  Description of Artificial Sequence: Synthetic oligonucleotide
  Sense strand starting at position 2917 of SEQ ID NO: 1882845
aguccagaaguugaucuua

SEQ ID NO: 2151759 - RNA, 19 nt, Artificial Sequence
  Description of Artificial Sequence: Synthetic oligonucleotide
  Antisense strand to SEQ ID NO: 2151758
uaagaucaacuucuggacu

SEQ ID NO: 2151760 - RNA, 19 nt, Artificial Sequence
  Description of Artificial Sequence: Synthetic oligonucleotide
  Sense strand starting at position 2919 of SEQ ID NO: 1882845
uccagaaguugaucuuaga

SEQ ID NO: 2151761 - RNA, 19 nt, Artificial Sequence
  Description of Artificial Sequence: Synthetic oligonucleotide
  Antisense strand to SEQ ID NO: 2151760
ucuaagaucaacuucugga

SEQ ID NO: 2151762 - RNA, 19 nt, Artificial Sequence
  Description of Artificial Sequence: Synthetic oligonucleotide
  Sense strand starting at position 3208 of SEQ ID NO: 1882845
auacgauauuuauaaccag

SEQ ID NO: 2151763 - RNA, 19 nt, Artificial Sequence
  Description of Artificial Sequence: Synthetic oligonucleotide
  Antisense strand to SEQ ID NO: 2151762
cugguuauaaauaucguau

SEQ ID NO: 2151764 - RNA, 19 nt, Artificial Sequence
  Description of Artificial Sequence: Synthetic oligonucleotide
  Sense strand starting at position 3519 of SEQ ID NO: 1882845
cuggaauaauuauuccagu

SEQ ID NO: 2151765 - RNA, 19 nt, Artificial Sequence
  Description of Artificial Sequence: Synthetic oligonucleotide
  Antisense strand to SEQ ID NO: 2151764
acuggaauaauuauuccag

SEQ ID NO: 2151766 - RNA, 19 nt, Artificial Sequence
  Description of Artificial Sequence: Synthetic oligonucleotide
  Sense strand starting at position 3601 of SEQ ID NO: 1882845
gacggaucaugguccagaa

SEQ ID NO: 2151767 - RNA, 19 nt, Artificial Sequence
  Description of Artificial Sequence: Synthetic oligonucleotide
  Antisense strand to SEQ ID NO: 2151766
uucuggaccaugauccguc

SEQ ID NO: 2151768 - RNA, 19 nt, Artificial Sequence
  Description of Artificial Sequence: Synthetic oligonucleotide
  Sense strand starting at position 3660 of SEQ ID NO: 1882845
cuggauugauugcuuuaua

SEQ ID NO: 2151769 - RNA, 19 nt, Artificial Sequence
  Description of Artificial Sequence: Synthetic oligonucleotide
  Antisense strand to SEQ ID NO: 2151768
uauaaagcaaucaauccag

SEQ ID NO: 2151770 - RNA, 19 nt, Artificial Sequence
  Description of Artificial Sequence: Synthetic oligonucleotide
  Sense strand starting at position 3661 of SEQ ID NO: 1882845
uggauugauugcuuuauau

SEQ ID NO: 2151771 - RNA, 19 nt, Artificial Sequence
  Description of Artificial Sequence: Synthetic oligonucleotide
  Antisense strand to SEQ ID NO: 2151770
auauaaagcaaucaaucca

SEQ ID NO: 2151772 - RNA, 19 nt, Artificial Sequence
  Description of Artificial Sequence: Synthetic oligonucleotide
  Sense strand starting at position 3710 of SEQ ID NO: 1882845
uggcuaacucugggaagac

SEQ ID NO: 2151773 - RNA, 19 nt, Artificial Sequence
  Description of Artificial Sequence: Synthetic oligonucleotide
  Antisense strand to SEQ ID NO: 2151772
gucuucccagaguuagcca

SEQ ID NO: 2151774 - RNA, 19 nt, Artificial Sequence
  Description of Artificial Sequence: Synthetic oligonucleotide
  Sense strand starting at position 3892 of SEQ ID NO: 1882845
cguuuacucauagggauaa

SEQ ID NO: 2151775 - RNA, 19 nt, Artificial Sequence
  Description of Artificial Sequence: Synthetic oligonucleotide
  Antisense strand to SEQ ID NO: 2151774
uuaucccuaugaguaaacg

SEQ ID NO: 2151776 - RNA, 19 nt, Artificial Sequence
  Description of Artificial Sequence: Synthetic oligonucleotide
  Sense strand starting at position 3966 of SEQ ID NO: 1882845
guugcuuaucacuauuugu

SEQ ID NO: 2151777 - RNA, 19 nt, Artificial Sequence
  Description of Artificial Sequence: Synthetic oligonucleotide
  Antisense strand to SEQ ID NO: 2151776
acaaauagugauaagcaac

SEQ ID NO: 2151778 - RNA, 19 nt, Artificial Sequence
  Description of Artificial Sequence: Synthetic oligonucleotide
  Sense strand starting at position 95 of SEQ ID NO: 1882846
ggacauauaugugucaucu

SEQ ID NO: 2151779 - RNA, 19 nt, Artificial Sequence
  Description of Artificial Sequence: Synthetic oligonucleotide
  Antisense strand to SEQ ID NO: 2151778
agaugacacauauaugucc

SEQ ID NO: 2151780 - RNA, 19 nt, Artificial Sequence
  Description of Artificial Sequence: Synthetic oligonucleotide
  Sense strand starting at position 99 of SEQ ID NO: 1882846
auauaugugucaucucaug

SEQ ID NO: 2151781 - RNA, 19 nt, Artificial Sequence
  Description of Artificial Sequence: Synthetic oligonucleotide
  Antisense strand to SEQ ID NO: 2151780
caugagaugacacauauau

SEQ ID NO: 2151782 - RNA, 19 nt, Artificial Sequence
  Description of Artificial Sequence: Synthetic oligonucleotide
  Sense strand starting at position 111 of SEQ ID NO: 1882846
ucucaugugccagauucuu

SEQ ID NO: 2151783 - RNA, 19 nt, Artificial Sequence
  Description of Artificial Sequence: Synthetic oligonucleotide
  Antisense strand to SEQ ID NO: 2151782
aagaaucuggcacaugaga

SEQ ID NO: 2151784 - RNA, 19 nt, Artificial Sequence
  Description of Artificial Sequence: Synthetic oligonucleotide
  Sense strand starting at position 161 of SEQ ID NO: 1882846
guuccaaaucccugguaac

SEQ ID NO: 2151785 - RNA, 19 nt, Artificial Sequence
  Description of Artificial Sequence: Synthetic oligonucleotide
  Antisense strand to SEQ ID NO: 2151784
guuaccagggauuuggaac

SEQ ID NO: 2151786 - RNA, 19 nt, Artificial Sequence
  Description of Artificial Sequence: Synthetic oligonucleotide
  Sense strand starting at position 174 of SEQ ID NO: 1882846
gguaacuccaaucgugaca

SEQ ID NO: 2151787 - RNA, 19 nt, Artificial Sequence
  Description of Artificial Sequence: Synthetic oligonucleotide
  Antisense strand to SEQ ID NO: 2151786
ugucacgauuggaguuacc

SEQ ID NO: 2151788 - RNA, 19 nt, Artificial Sequence
  Description of Artificial Sequence: Synthetic oligonucleotide
  Sense strand starting at position 283 of SEQ ID NO: 1882846
cuaugauagucacugcaca

SEQ ID NO: 2151789 - RNA, 19 nt, Artificial Sequence
  Description of Artificial Sequence: Synthetic oligonucleotide
  Antisense strand to SEQ ID NO: 2151788
ugugcagugacuaucauag

SEQ ID NO: 2151790 - RNA, 19 nt, Artificial Sequence
  Description of Artificial Sequence: Synthetic oligonucleotide
  Sense strand starting at position 356 of SEQ ID NO: 1882846
cugauaagauugcuguaaa

SEQ ID NO: 2151791 - RNA, 19 nt, Artificial Sequence
  Description of Artificial Sequence: Synthetic oligonucleotide
  Antisense strand to SEQ ID NO: 2151790
uuuacagcaaucuuaucag

SEQ ID NO: 2151792 - RNA, 19 nt, Artificial Sequence
  Description of Artificial Sequence: Synthetic oligonucleotide
  Sense strand starting at position 431 of SEQ ID NO: 1882846
uuccauucccuguggaaau

SEQ ID NO: 2151793 - RNA, 19 nt, Artificial Sequence
  Description of Artificial Sequence: Synthetic oligonucleotide
  Antisense strand to SEQ ID NO: 2151792
auuuccacagggaauggaa

SEQ ID NO: 2151794 - RNA, 19 nt, Artificial Sequence
  Description of Artificial Sequence: Synthetic oligonucleotide
  Sense strand starting at position 482 of SEQ ID NO: 1882846
gugaaauugguaggauaca

SEQ ID NO: 2151795 - RNA, 19 nt, Artificial Sequence
  Description of Artificial Sequence: Synthetic oligonucleotide
  Antisense strand to SEQ ID NO: 2151794
uguauccuaccaauuucac

SEQ ID NO: 2151796 - RNA, 19 nt, Artificial Sequence
  Description of Artificial Sequence: Synthetic oligonucleotide
  Sense strand starting at position 553 of SEQ ID NO: 1882846
ggaccuuguuucucuccua

SEQ ID NO: 2151797 - RNA, 19 nt, Artificial Sequence
  Description of Artificial Sequence: Synthetic oligonucleotide
  Antisense strand to SEQ ID NO: 2151796
uaggagagaaacaaggucc

SEQ ID NO: 2151798 - RNA, 19 nt, Artificial Sequence
  Description of Artificial Sequence: Synthetic oligonucleotide
  Sense strand starting at position 652 of SEQ ID NO: 1882846
cagaguaugcuggaugcaa

SEQ ID NO: 2151799 - RNA, 19 nt, Artificial Sequence
  Description of Artificial Sequence: Synthetic oligonucleotide
  Antisense strand to SEQ ID NO: 2151798
uugcauccagcauacucug

SEQ ID NO: 2151800 - RNA, 19 nt, Artificial Sequence
  Description of Artificial Sequence: Synthetic oligonucleotide
  Sense strand starting at position 654 of SEQ ID NO: 1882846
gaguaugcuggaugcaaga

SEQ ID NO: 2151801 - RNA, 19 nt, Artificial Sequence
  Description of Artificial Sequence: Synthetic oligonucleotide
  Antisense strand to SEQ ID NO: 2151800
ucuugcauccagcauacuc

SEQ ID NO: 2151802 - RNA, 19 nt, Artificial Sequence
  Description of Artificial Sequence: Synthetic oligonucleotide
  Sense strand starting at position 793 of SEQ ID NO: 1882846
ccuagaauuucuuuguguu

SEQ ID NO: 2151803 - RNA, 19 nt, Artificial Sequence
  Description of Artificial Sequence: Synthetic oligonucleotide
  Antisense strand to SEQ ID NO: 2151802
aacacaaagaaauucuagg

SEQ ID NO: 2151804 - RNA, 19 nt, Artificial Sequence
  Description of Artificial Sequence: Synthetic oligonucleotide
  Sense strand starting at position 795 of SEQ ID NO: 1882846
uagaauuucuuuguguugu

SEQ ID NO: 2151805 - RNA, 19 nt, Artificial Sequence
  Description of Artificial Sequence: Synthetic oligonucleotide
  Antisense strand to SEQ ID NO: 2151804
acaacacaaagaaauucua

SEQ ID NO: 2151806 - RNA, 19 nt, Artificial Sequence
  Description of Artificial Sequence: Synthetic oligonucleotide
  Sense strand starting at position 842 of SEQ ID NO: 1882846
gaagguuuacuccacaguu

SEQ ID NO: 2151807 - RNA, 19 nt, Artificial Sequence
  Description of Artificial Sequence: Synthetic oligonucleotide
  Antisense strand to SEQ ID NO: 2151806
aacuguggaguaaaccuuc

SEQ ID NO: 2151808 - RNA, 19 nt, Artificial Sequence
  Description of Artificial Sequence: Synthetic oligonucleotide
  Sense strand starting at position 891 of SEQ ID NO: 1882846
guugcuugcagagagauug

SEQ ID NO: 2151809 - RNA, 19 nt, Artificial Sequence
  Description of Artificial Sequence: Synthetic oligonucleotide
  Antisense strand to SEQ ID NO: 2151808
caaucucucugcaagcaac

SEQ ID NO: 2151810 - RNA, 19 nt, Artificial Sequence
  Description of Artificial Sequence: Synthetic oligonucleotide
  Sense strand starting at position 901 of SEQ ID NO: 1882846
gagagauuguuaucucuuu

SEQ ID NO: 2151811 - RNA, 19 nt, Artificial Sequence
  Description of Artificial Sequence: Synthetic oligonucleotide
  Antisense strand to SEQ ID NO: 2151810
aaagagauaacaaucucuc

SEQ ID NO: 2151812 - RNA, 19 nt, Artificial Sequence
  Description of Artificial Sequence: Synthetic oligonucleotide
  Sense strand starting at position 975 of SEQ ID NO: 1882846
uucccuugugcucaauuga

SEQ ID NO: 2151813 - RNA, 19 nt, Artificial Sequence
  Description of Artificial Sequence: Synthetic oligonucleotide
  Antisense strand to SEQ ID NO: 2151812
ucaauugagcacaagggaa

SEQ ID NO: 2151814 - RNA, 19 nt, Artificial Sequence
  Description of Artificial Sequence: Synthetic oligonucleotide
  Sense strand starting at position 1077 of SEQ ID NO: 1882846
guucucuugguaggaaaga

SEQ ID NO: 2151815 - RNA, 19 nt, Artificial Sequence
  Description of Artificial Sequence: Synthetic oligonucleotide
  Antisense strand to SEQ ID NO: 2151814
ucuuuccuaccaagagaac

SEQ ID NO: 2151816 - RNA, 19 nt, Artificial Sequence
  Description of Artificial Sequence: Synthetic oligonucleotide
  Sense strand starting at position 1111 of SEQ ID NO: 1882846
agguaagagggauguuuaa

SEQ ID NO: 2151817 - RNA, 19 nt, Artificial Sequence
  Description of Artificial Sequence: Synthetic oligonucleotide
  Antisense strand to SEQ ID NO: 2151816
uuaaacaucccucuuaccu

SEQ ID NO: 2151818 - RNA, 19 nt, Artificial Sequence
  Description of Artificial Sequence: Synthetic oligonucleotide
  Sense strand starting at position 1166 of SEQ ID NO: 1882846
agaugucugggaggaaucu

SEQ ID NO: 2151819 - RNA, 19 nt, Artificial Sequence
  Description of Artificial Sequence: Synthetic oligonucleotide
  Antisense strand to SEQ ID NO: 2151818
agauuccucccagacaucu

SEQ ID NO: 2151820 - RNA, 19 nt, Artificial Sequence
  Description of Artificial Sequence: Synthetic oligonucleotide
  Sense strand starting at position 1225 of SEQ ID NO: 1882846
ugcccuuaucugcaccaga

SEQ ID NO: 2151821 - RNA, 19 nt, Artificial Sequence
  Description of Artificial Sequence: Synthetic oligonucleotide
  Antisense strand to SEQ ID NO: 2151820
ucuggugcagauaagggca

SEQ ID NO: 2151822 - RNA, 19 nt, Artificial Sequence
  Description of Artificial Sequence: Synthetic oligonucleotide
  Sense strand starting at position 1273 of SEQ ID NO: 1882846
ggagggaaggguuguagau

SEQ ID NO: 2151823 - RNA, 19 nt, Artificial Sequence
  Description of Artificial Sequence: Synthetic oligonucleotide
  Antisense strand to SEQ ID NO: 2151822
aucuacaacccuucccucc

SEQ ID NO: 2151824 - RNA, 19 nt, Artificial Sequence
  Description of Artificial Sequence: Synthetic oligonucleotide
  Sense strand starting at position 1275 of SEQ ID NO: 1882846
agggaaggguuguagauuu

SEQ ID NO: 2151825 - RNA, 19 nt, Artificial Sequence
  Description of Artificial Sequence: Synthetic oligonucleotide
  Antisense strand to SEQ ID NO: 2151824
aaaucuacaacccuucccu

SEQ ID NO: 2151826 - RNA, 19 nt, Artificial Sequence
  Description of Artificial Sequence: Synthetic oligonucleotide
  Sense strand starting at position 1310 of SEQ ID NO: 1882846
uauggaugccugugauuag

SEQ ID NO: 2151827 - RNA, 19 nt, Artificial Sequence
  Description of Artificial Sequence: Synthetic oligonucleotide
  Antisense strand to SEQ ID NO: 2151826
cuaaucacaggcauccaua

SEQ ID NO: 2151828 - RNA, 19 nt, Artificial Sequence
  Description of Artificial Sequence: Synthetic oligonucleotide
  Sense strand starting at position 1313 of SEQ ID NO: 1882846
ggaugccugugauuaggau

SEQ ID NO: 2151829 - RNA, 19 nt, Artificial Sequence
  Description of Artificial Sequence: Synthetic oligonucleotide
  Antisense strand to SEQ ID NO: 2151828
auccuaaucacaggcaucc

SEQ ID NO: 2151830 - RNA, 19 nt, Artificial Sequence
  Description of Artificial Sequence: Synthetic oligonucleotide
  Sense strand starting at position 1431 of SEQ ID NO: 1882846
agaguugauagauguaauu

SEQ ID NO: 2151831 - RNA, 19 nt, Artificial Sequence
  Description of Artificial Sequence: Synthetic oligonucleotide
  Antisense strand to SEQ ID NO: 2151830
aauuacaucuaucaacucu

SEQ ID NO: 2151832 - RNA, 19 nt, Artificial Sequence
  Description of Artificial Sequence: Synthetic oligonucleotide
  Sense strand starting at position 1578 of SEQ ID NO: 1882846
agagaugccuguguccaga

SEQ ID NO: 2151833 - RNA, 19 nt, Artificial Sequence
  Description of Artificial Sequence: Synthetic oligonucleotide
  Antisense strand to SEQ ID NO: 2151832
ucuggacacaggcaucucu

SEQ ID NO: 2151834 - RNA, 19 nt, Artificial Sequence
  Description of Artificial Sequence: Synthetic oligonucleotide
  Sense strand starting at position 1581 of SEQ ID NO: 1882846
gaugccuguguccagaauu

SEQ ID NO: 2151835 - RNA, 19 nt, Artificial Sequence
  Description of Artificial Sequence: Synthetic oligonucleotide
  Antisense strand to SEQ ID NO: 2151834
aauucuggacacaggcauc

SEQ ID NO: 2151836 - RNA, 19 nt, Artificial Sequence
  Description of Artificial Sequence: Synthetic oligonucleotide
  Sense strand starting at position 2015 of SEQ ID NO: 1882846
ugccauugugcguuuauuc

SEQ ID NO: 2151837 - RNA, 19 nt, Artificial Sequence
  Description of Artificial Sequence: Synthetic oligonucleotide
  Antisense strand to SEQ ID NO: 2151836
gaauaaacgcacaauggca

SEQ ID NO: 2151838 - RNA, 19 nt, Artificial Sequence
  Description of Artificial Sequence: Synthetic oligonucleotide
  Sense strand starting at position 2192 of SEQ ID NO: 1882846
acccucuagcuagaaguaa

SEQ ID NO: 2151839 - RNA, 19 nt, Artificial Sequence
  Description of Artificial Sequence: Synthetic oligonucleotide
  Antisense strand to SEQ ID NO: 2151838
uuacuucuagcuagagggu

SEQ ID NO: 2151840 - RNA, 19 nt, Artificial Sequence
  Description of Artificial Sequence: Synthetic oligonucleotide
  Sense strand starting at position 3122 of SEQ ID NO: 1882846
ugaacaccugugugaaaca

SEQ ID NO: 2151841 - RNA, 19 nt, Artificial Sequence
  Description of Artificial Sequence: Synthetic oligonucleotide
  Antisense strand to SEQ ID NO: 2151840
uguuucacacagguguuca

SEQ ID NO: 2151842 - RNA, 19 nt, Artificial Sequence
  Description of Artificial Sequence: Synthetic oligonucleotide
  Sense strand starting at position 3155 of SEQ ID NO: 1882846
ugcuaucuccaaggacaau

SEQ ID NO: 2151843 - RNA, 19 nt, Artificial Sequence
  Description of Artificial Sequence: Synthetic oligonucleotide
  Antisense strand to SEQ ID NO: 2151842
auuguccuuggagauagca

SEQ ID NO: 2151844 - RNA, 19 nt, Artificial Sequence
  Description of Artificial Sequence: Synthetic oligonucleotide
  Sense strand starting at position 3409 of SEQ ID NO: 1882846
agcuuugaaaugggaucau

SEQ ID NO: 2151845 - RNA, 19 nt, Artificial Sequence
  Description of Artificial Sequence: Synthetic oligonucleotide
  Antisense strand to SEQ ID NO: 2151844
augaucccauuucaaagcu

SEQ ID NO: 2151846 - RNA, 19 nt, Artificial Sequence
  Description of Artificial Sequence: Synthetic oligonucleotide
  Sense strand starting at position 3445 of SEQ ID NO: 1882846
aaggguguuuccucaagac

SEQ ID NO: 2151847 - RNA, 19 nt, Artificial Sequence
  Description of Artificial Sequence: Synthetic oligonucleotide
  Antisense strand to SEQ ID NO: 2151846
gucuugaggaaacacccuu

SEQ ID NO: 2151848 - RNA, 19 nt, Artificial Sequence
  Description of Artificial Sequence: Synthetic oligonucleotide
  Sense strand starting at position 3449 of SEQ ID NO: 1882846
guguuuccucaagacacua

SEQ ID NO: 2151849 - RNA, 19 nt, Artificial Sequence
  Description of Artificial Sequence: Synthetic oligonucleotide
  Antisense strand to SEQ ID NO: 2151848
uagugucuugaggaaacac

SEQ ID NO: 2151850 - RNA, 19 nt, Artificial Sequence
  Description of Artificial Sequence: Synthetic oligonucleotide
  Sense strand starting at position 3564 of SEQ ID NO: 1882846
cuagaacacugugcucuua

SEQ ID NO: 2151851 - RNA, 19 nt, Artificial Sequence
  Description of Artificial Sequence: Synthetic oligonucleotide
  Antisense strand to SEQ ID NO: 2151850
uaagagcacaguguucuag

SEQ ID NO: 2151852 - RNA, 19 nt, Artificial Sequence
  Description of Artificial Sequence: Synthetic oligonucleotide
  Sense strand starting at position 3615 of SEQ ID NO: 1882846
gcuucugggagcuauuugu

SEQ ID NO: 2151853 - RNA, 19 nt, Artificial Sequence
  Description of Artificial Sequence: Synthetic oligonucleotide
  Antisense strand to SEQ ID NO: 2151852
acaaauagcucccagaagc

SEQ ID NO: 2151854 - RNA, 19 nt, Artificial Sequence
  Description of Artificial Sequence: Synthetic oligonucleotide
  Sense strand starting at position 3626 of SEQ ID NO: 1882846
cuauuugugauguguggua

SEQ ID NO: 2151855 - RNA, 19 nt, Artificial Sequence
  Description of Artificial Sequence: Synthetic oligonucleotide
  Antisense strand to SEQ ID NO: 2151854
uaccacacaucacaaauag

SEQ ID NO: 2151856 - RNA, 19 nt, Artificial Sequence
  Description of Artificial Sequence: Synthetic oligonucleotide
  Sense strand starting at position 3658 of SEQ ID NO: 1882846
uggaaaguauucuuguaug

SEQ ID NO: 2151857 - RNA, 19 nt, Artificial Sequence
  Description of Artificial Sequence: Synthetic oligonucleotide
  Antisense strand to SEQ ID NO: 2151856
cauacaagaauacuuucca

SEQ ID NO: 2151858 - RNA, 19 nt, Artificial Sequence
  Description of Artificial Sequence: Synthetic oligonucleotide
  Sense strand starting at position 82 of SEQ ID NO: 1882847
ccuagucuagcacauugau

SEQ ID NO: 2151859 - RNA, 19 nt, Artificial Sequence
  Description of Artificial Sequence: Synthetic oligonucleotide
  Antisense strand to SEQ ID NO: 2151858
aucaaugugcuagacuagg

SEQ ID NO: 2151860 - RNA, 19 nt, Artificial Sequence
  Description of Artificial Sequence: Synthetic oligonucleotide
  Sense strand starting at position 109 of SEQ ID NO: 1882847
guuguuuccaaguacagga

SEQ ID NO: 2151861 - RNA, 19 nt, Artificial Sequence
  Description of Artificial Sequence: Synthetic oligonucleotide
  Antisense strand to SEQ ID NO: 2151860
uccuguacuuggaaacaac

SEQ ID NO: 2151862 - RNA, 19 nt, Artificial Sequence
  Description of Artificial Sequence: Synthetic oligonucleotide
  Sense strand starting at position 237 of SEQ ID NO: 1882847
guacaaauucugggcaauc

SEQ ID NO: 2151863 - RNA, 19 nt, Artificial Sequence
  Description of Artificial Sequence: Synthetic oligonucleotide
  Antisense strand to SEQ ID NO: 2151862
gauugcccagaauuuguac

SEQ ID NO: 2151864 - RNA, 19 nt, Artificial Sequence
  Description of Artificial Sequence: Synthetic oligonucleotide
  Sense strand starting at position 239 of SEQ ID NO: 1882847
acaaauucugggcaaucuu

SEQ ID NO: 2151865 - RNA, 19 nt, Artificial Sequence
  Description of Artificial Sequence: Synthetic oligonucleotide
  Antisense strand to SEQ ID NO: 2151864
aagauugcccagaauuugu

SEQ ID NO: 2151866 - RNA, 19 nt, Artificial Sequence
  Description of Artificial Sequence: Synthetic oligonucleotide
  Sense strand starting at position 246 of SEQ ID NO: 1882847
cugggcaaucuugaaaugu

SEQ ID NO: 2151867 - RNA, 19 nt, Artificial Sequence
  Description of Artificial Sequence: Synthetic oligonucleotide
  Antisense strand to SEQ ID NO: 2151866
acauuucaagauugcccag

SEQ ID NO: 2151868 - RNA, 19 nt, Artificial Sequence
  Description of Artificial Sequence: Synthetic oligonucleotide
  Sense strand starting at position 392 of SEQ ID NO: 1882847
cuuauaucugcagacuuag

SEQ ID NO: 2151869 - RNA, 19 nt, Artificial Sequence
  Description of Artificial Sequence: Synthetic oligonucleotide
  Antisense strand to SEQ ID NO: 2151868
cuaagucugcagauauaag

SEQ ID NO: 2151870 - RNA, 19 nt, Artificial Sequence
  Description of Artificial Sequence: Synthetic oligonucleotide
  Sense strand starting at position 401 of SEQ ID NO: 1882847
gcagacuuagagcagugau

SEQ ID NO: 2151871 - RNA, 19 nt, Artificial Sequence
  Description of Artificial Sequence: Synthetic oligonucleotide
  Antisense strand to SEQ ID NO: 2151870
aucacugcucuaagucugc

SEQ ID NO: 2151872 - RNA, 19 nt, Artificial Sequence
  Description of Artificial Sequence: Synthetic oligonucleotide
  Sense strand starting at position 404 of SEQ ID NO: 1882847
gacuuagagcagugauucu

SEQ ID NO: 2151873 - RNA, 19 nt, Artificial Sequence
  Description of Artificial Sequence: Synthetic oligonucleotide
  Antisense strand to SEQ ID NO: 2151872
agaaucacugcucuaaguc

SEQ ID NO: 2151874 - RNA, 19 nt, Artificial Sequence
  Description of Artificial Sequence: Synthetic oligonucleotide
  Sense strand starting at position 525 of SEQ ID NO: 1882847
ugguaugaugcccagauga

SEQ ID NO: 2151875 - RNA, 19 nt, Artificial Sequence
  Description of Artificial Sequence: Synthetic oligonucleotide
  Antisense strand to SEQ ID NO: 2151874
ucaucugggcaucauacca

SEQ ID NO: 2151876 - RNA, 19 nt, Artificial Sequence
  Description of Artificial Sequence: Synthetic oligonucleotide
  Sense strand starting at position 527 of SEQ ID NO: 1882847
guaugaugcccagaugauc

SEQ ID NO: 2151877 - RNA, 19 nt, Artificial Sequence
  Description of Artificial Sequence: Synthetic oligonucleotide
  Antisense strand to SEQ ID NO: 2151876
gaucaucugggcaucauac

SEQ ID NO: 2151878 - RNA, 19 nt, Artificial Sequence
  Description of Artificial Sequence: Synthetic oligonucleotide
  Sense strand starting at position 746 of SEQ ID NO: 1882847
gugaaacccugucuauaac

SEQ ID NO: 2151879 - RNA, 19 nt, Artificial Sequence
  Description of Artificial Sequence: Synthetic oligonucleotide
  Antisense strand to SEQ ID NO: 2151878
guuauagacaggguuucac

SEQ ID NO: 2151880 - RNA, 19 nt, Artificial Sequence
  Description of Artificial Sequence: Synthetic oligonucleotide
  Sense strand starting at position 1129 of SEQ ID NO: 1882847
guacauaagccuuggaauc

SEQ ID NO: 2151881 - RNA, 19 nt, Artificial Sequence
  Description of Artificial Sequence: Synthetic oligonucleotide
  Antisense strand to SEQ ID NO: 2151880
gauuccaaggcuuauguac

SEQ ID NO: 2151882 - RNA, 19 nt, Artificial Sequence
  Description of Artificial Sequence: Synthetic oligonucleotide
  Sense strand starting at position 1180 of SEQ ID NO: 1882847
auuugauagcuuuguggcu

SEQ ID NO: 2151883 - RNA, 19 nt, Artificial Sequence
  Description of Artificial Sequence: Synthetic oligonucleotide
  Antisense strand to SEQ ID NO: 2151882
agccacaaagcuaucaaau

SEQ ID NO: 2151884 - RNA, 19 nt, Artificial Sequence
  Description of Artificial Sequence: Synthetic oligonucleotide
  Sense strand starting at position 1254 of SEQ ID NO: 1882847
cauagaaucugugucacag

SEQ ID NO: 2151885 - RNA, 19 nt, Artificial Sequence
  Description of Artificial Sequence: Synthetic oligonucleotide
  Antisense strand to SEQ ID NO: 2151884
cugugacacagauucuaug

SEQ ID NO: 2151886 - RNA, 19 nt, Artificial Sequence
  Description of Artificial Sequence: Synthetic oligonucleotide
  Sense strand starting at position 1272 of SEQ ID NO: 1882847
gcaacacuccagugauuaa

SEQ ID NO: 2151887 - RNA, 19 nt, Artificial Sequence
  Description of Artificial Sequence: Synthetic oligonucleotide
  Antisense strand to SEQ ID NO: 2151886
uuaaucacuggaguguugc

SEQ ID NO: 2151888 - RNA, 19 nt, Artificial Sequence
  Description of Artificial Sequence: Synthetic oligonucleotide
  Sense strand starting at position 1275 of SEQ ID NO: 1882847
acacuccagugauuaaaug

SEQ ID NO: 2151889 - RNA, 19 nt, Artificial Sequence
  Description of Artificial Sequence: Synthetic oligonucleotide
  Antisense strand to SEQ ID NO: 2151888
cauuuaaucacuggagugu

SEQ ID NO: 2151890 - RNA, 19 nt, Artificial Sequence
  Description of Artificial Sequence: Synthetic oligonucleotide
  Sense strand starting at position 1290 of SEQ ID NO: 1882847
aauggaguaauggguguaa

SEQ ID NO: 2151891 - RNA, 19 nt, Artificial Sequence
  Description of Artificial Sequence: Synthetic oligonucleotide
  Antisense strand to SEQ ID NO: 2151890
uuacacccauuacuccauu

SEQ ID NO: 2151892 - RNA, 19 nt, Artificial Sequence
  Description of Artificial Sequence: Synthetic oligonucleotide
  Sense strand starting at position 1354 of SEQ ID NO: 1882847
cugcguugacugcuuugau

SEQ ID NO: 2151893 - RNA, 19 nt, Artificial Sequence
  Description of Artificial Sequence: Synthetic oligonucleotide
  Antisense strand to SEQ ID NO: 2151892
aucaaagcagucaacgcag

SEQ ID NO: 2151894 - RNA, 19 nt, Artificial Sequence
  Description of Artificial Sequence: Synthetic oligonucleotide
  Sense strand starting at position 1619 of SEQ ID NO: 1882847
uugucagcuggccauuuau

SEQ ID NO: 2151895 - RNA, 19 nt, Artificial Sequence
  Description of Artificial Sequence: Synthetic oligonucleotide
  Antisense strand to SEQ ID NO: 2151894
auaaauggccagcugacaa

SEQ ID NO: 2151896 - RNA, 19 nt, Artificial Sequence
  Description of Artificial Sequence: Synthetic oligonucleotide
  Sense strand starting at position 1802 of SEQ ID NO: 1882847
ggacgauccuuccuugacu

SEQ ID NO: 2151897 - RNA, 19 nt, Artificial Sequence
  Description of Artificial Sequence: Synthetic oligonucleotide
  Antisense strand to SEQ ID NO: 2151896
agucaaggaaggaucgucc

SEQ ID NO: 2151898 - RNA, 19 nt, Artificial Sequence
  Description of Artificial Sequence: Synthetic oligonucleotide
  Sense strand starting at position 1932 of SEQ ID NO: 1882847
ggcucuuguaaggauacuu

SEQ ID NO: 2151899 - RNA, 19 nt, Artificial Sequence
  Description of Artificial Sequence: Synthetic oligonucleotide
  Antisense strand to SEQ ID NO: 2151898
aaguauccuuacaagagcc

SEQ ID NO: 2151900 - RNA, 19 nt, Artificial Sequence
  Description of Artificial Sequence: Synthetic oligonucleotide
  Sense strand starting at position 1968 of SEQ ID NO: 1882847
ugucuuaauccaggacgau

SEQ ID NO: 2151901 - RNA, 19 nt, Artificial Sequence
  Description of Artificial Sequence: Synthetic oligonucleotide
  Antisense strand to SEQ ID NO: 2151900
aucguccuggauuaagaca

SEQ ID NO: 2151902 - RNA, 19 nt, Artificial Sequence
  Description of Artificial Sequence: Synthetic oligonucleotide
  Sense strand starting at position 1969 of SEQ ID NO: 1882847
gucuuaauccaggacgauc

SEQ ID NO: 2151903 - RNA, 19 nt, Artificial Sequence
  Description of Artificial Sequence: Synthetic oligonucleotide
  Antisense strand to SEQ ID NO: 2151902
gaucguccuggauuaagac

SEQ ID NO: 2151904 - RNA, 19 nt, Artificial Sequence
  Description of Artificial Sequence: Synthetic oligonucleotide
  Sense strand starting at position 2154 of SEQ ID NO: 1882847
ggaagcaguguggaaguau

SEQ ID NO: 2151905 - RNA, 19 nt, Artificial Sequence
  Description of Artificial Sequence: Synthetic oligonucleotide
  Antisense strand to SEQ ID NO: 2151904
auacuuccacacugcuucc

SEQ ID NO: 2151906 - RNA, 19 nt, Artificial Sequence
  Description of Artificial Sequence: Synthetic oligonucleotide
  Sense strand starting at position 2532 of SEQ ID NO: 1882847
gucuaaauucuagauguca

SEQ ID NO: 2151907 - RNA, 19 nt, Artificial Sequence
  Description of Artificial Sequence: Synthetic oligonucleotide
  Antisense strand to SEQ ID NO: 2151906
ugacaucuagaauuuagac

SEQ ID NO: 2151908 - RNA, 19 nt, Artificial Sequence
  Description of Artificial Sequence: Synthetic oligonucleotide
  Sense strand starting at position 2540 of SEQ ID NO: 1882847
ucuagaugucaacaagguu

SEQ ID NO: 2151909 - RNA, 19 nt, Artificial Sequence
  Description of Artificial Sequence: Synthetic oligonucleotide
  Antisense strand to SEQ ID NO: 2151908
aaccuuguugacaucuaga

SEQ ID NO: 2151910 - RNA, 19 nt, Artificial Sequence
  Description of Artificial Sequence: Synthetic oligonucleotide
  Sense strand starting at position 2594 of SEQ ID NO: 1882847
ggagcucuuacugaaaguu

SEQ ID NO: 2151911 - RNA, 19 nt, Artificial Sequence
  Description of Artificial Sequence: Synthetic oligonucleotide
  Antisense strand to SEQ ID NO: 2151910
aacuuucaguaagagcucc

SEQ ID NO: 2151912 - RNA, 19 nt, Artificial Sequence
  Description of Artificial Sequence: Synthetic oligonucleotide
  Sense strand starting at position 2795 of SEQ ID NO: 1882847
guugcauuugaguggcauu

SEQ ID NO: 2151913 - RNA, 19 nt, Artificial Sequence
  Description of Artificial Sequence: Synthetic oligonucleotide
  Antisense strand to SEQ ID NO: 2151912
aaugccacucaaaugcaac

SEQ ID NO: 2151914 - RNA, 19 nt, Artificial Sequence
  Description of Artificial Sequence: Synthetic oligonucleotide
  Sense strand starting at position 2875 of SEQ ID NO: 1882847
guaaauagauuagucccau

SEQ ID NO: 2151915 - RNA, 19 nt, Artificial Sequence
  Description of Artificial Sequence: Synthetic oligonucleotide
  Antisense strand to SEQ ID NO: 2151914
augggacuaaucuauuuac

SEQ ID NO: 2151916 - RNA, 19 nt, Artificial Sequence
  Description of Artificial Sequence: Synthetic oligonucleotide
  Sense strand starting at position 2965 of SEQ ID NO: 1882847
cccuguaagcucugagaga

SEQ ID NO: 2151917 - RNA, 19 nt, Artificial Sequence
  Description of Artificial Sequence: Synthetic oligonucleotide
  Antisense strand to SEQ ID NO: 2151916
ucucucagagcuuacaggg

SEQ ID NO: 2151918 - RNA, 19 nt, Artificial Sequence
  Description of Artificial Sequence: Synthetic oligonucleotide
  Sense strand starting at position 3174 of SEQ ID NO: 1882847
agaauaaugacuuguggcu

SEQ ID NO: 2151919 - RNA, 19 nt, Artificial Sequence
  Description of Artificial Sequence: Synthetic oligonucleotide
  Antisense strand to SEQ ID NO: 2151918
agccacaagucauuauucu

SEQ ID NO: 2151920 - RNA, 19 nt, Artificial Sequence
  Description of Artificial Sequence: Synthetic oligonucleotide
  Sense strand starting at position 3180 of SEQ ID NO: 1882847
augacuuguggcuaccuaa

SEQ ID NO: 2151921 - RNA, 19 nt, Artificial Sequence
  Description of Artificial Sequence: Synthetic oligonucleotide
  Antisense strand to SEQ ID NO: 2151920
uuagguagccacaagucau

SEQ ID NO: 2151922 - RNA, 19 nt, Artificial Sequence
  Description of Artificial Sequence: Synthetic oligonucleotide
  Sense strand starting at position 3232 of SEQ ID NO: 1882847
uguguucuugucuuuguuu

SEQ ID NO: 2151923 - RNA, 19 nt, Artificial Sequence
  Description of Artificial Sequence: Synthetic oligonucleotide
  Antisense strand to SEQ ID NO: 2151922
aaacaaagacaagaacaca

SEQ ID NO: 2151924 - RNA, 19 nt, Artificial Sequence
  Description of Artificial Sequence: Synthetic oligonucleotide
  Sense strand starting at position 3646 of SEQ ID NO: 1882847
ugagaaguacuaugguauc

SEQ ID NO: 2151925 - RNA, 19 nt, Artificial Sequence
  Description of Artificial Sequence: Synthetic oligonucleotide
  Antisense strand to SEQ ID NO: 2151924
gauaccauaguacuucuca

SEQ ID NO: 2151926 - RNA, 19 nt, Artificial Sequence
  Description of Artificial Sequence: Synthetic oligonucleotide
  Sense strand starting at position 3671 of SEQ ID NO: 1882847
ucaguagggcuuuaugaag

SEQ ID NO: 2151927 - RNA, 19 nt, Artificial Sequence
  Description of Artificial Sequence: Synthetic oligonucleotide
  Antisense strand to SEQ ID NO: 2151926
cuucauaaagcccuacuga

SEQ ID NO: 2151928 - RNA, 19 nt, Artificial Sequence
  Description of Artificial Sequence: Synthetic oligonucleotide
  Sense strand starting at position 3685 of SEQ ID NO: 1882847
ugaagucuucuacauauug

SEQ ID NO: 2151929 - RNA, 19 nt, Artificial Sequence
  Description of Artificial Sequence: Synthetic oligonucleotide
  Antisense strand to SEQ ID NO: 2151928
caauauguagaagacuuca

SEQ ID NO: 2151930 - RNA, 19 nt, Artificial Sequence
  Description of Artificial Sequence: Synthetic oligonucleotide
  Sense strand starting at position 3693 of SEQ ID NO: 1882847
ucuacauauugaucuguuu

SEQ ID NO: 2151931 - RNA, 19 nt, Artificial Sequence
  Description of Artificial Sequence: Synthetic oligonucleotide
  Antisense strand to SEQ ID NO: 2151930
aaacagaucaauauguaga

SEQ ID NO: 2151932 - RNA, 19 nt, Artificial Sequence
  Description of Artificial Sequence: Synthetic oligonucleotide
  Sense strand starting at position 3720 of SEQ ID NO: 1882847
uuauuagugguccacauac

SEQ ID NO: 2151933 - RNA, 19 nt, Artificial Sequence
  Description of Artificial Sequence: Synthetic oligonucleotide
  Antisense strand to SEQ ID NO: 2151932
guauguggaccacuaauaa

SEQ ID NO: 2151934 - RNA, 19 nt, Artificial Sequence
  Description of Artificial Sequence: Synthetic oligonucleotide
  Sense strand starting at position 3832 of SEQ ID NO: 1882847
aguagaaagccucacugau

SEQ ID NO: 2151935 - RNA, 19 nt, Artificial Sequence
  Description of Artificial Sequence: Synthetic oligonucleotide
  Antisense strand to SEQ ID NO: 2151934
aucagugaggcuuucuacu

SEQ ID NO: 2151936 - RNA, 19 nt, Artificial Sequence
  Description of Artificial Sequence: Synthetic oligonucleotide
  Sense strand starting at position 3887 of SEQ ID NO: 1882847
guauaagaaccuggcaaua

SEQ ID NO: 2151937 - RNA, 19 nt, Artificial Sequence
  Description of Artificial Sequence: Synthetic oligonucleotide
  Antisense strand to SEQ ID NO: 2151936
uauugccagguucuuauac

SEQ ID NO: 2151938 - RNA, 19 nt, Artificial Sequence
  Description of Artificial Sequence: Synthetic oligonucleotide
  Sense strand starting at position 40 of SEQ ID NO: 1882848
uccuuaucacccugggaag

SEQ ID NO: 2151939 - RNA, 19 nt, Artificial Sequence
  Description of Artificial Sequence: Synthetic oligonucleotide
  Antisense strand to SEQ ID NO: 2151938
cuucccagggugauaagga

SEQ ID NO: 2151940 - RNA, 19 nt, Artificial Sequence
  Description of Artificial Sequence: Synthetic oligonucleotide
  Sense strand starting at position 41 of SEQ ID NO: 1882848
ccuuaucacccugggaaga

SEQ ID NO: 2151941 - RNA, 19 nt, Artificial Sequence
  Description of Artificial Sequence: Synthetic oligonucleotide
  Antisense strand to SEQ ID NO: 2151940
ucuucccagggugauaagg

SEQ ID NO: 2151942 - RNA, 19 nt, Artificial Sequence
  Description of Artificial Sequence: Synthetic oligonucleotide
  Sense strand starting at position 209 of SEQ ID NO: 1882848
ggagauucaugaguuuaug

SEQ ID NO: 2151943 - RNA, 19 nt, Artificial Sequence
  Description of Artificial Sequence: Synthetic oligonucleotide
  Antisense strand to SEQ ID NO: 2151942
cauaaacucaugaaucucc

SEQ ID NO: 2151944 - RNA, 19 nt, Artificial Sequence
  Description of Artificial Sequence: Synthetic oligonucleotide
  Sense strand starting at position 307 of SEQ ID NO: 1882848
gggaaagaauguuucuuac

SEQ ID NO: 2151945 - RNA, 19 nt, Artificial Sequence
  Description of Artificial Sequence: Synthetic oligonucleotide
  Antisense strand to SEQ ID NO: 2151944
guaagaaacauucuuuccc

SEQ ID NO: 2151946 - RNA, 19 nt, Artificial Sequence
  Description of Artificial Sequence: Synthetic oligonucleotide
  Sense strand starting at position 564 of SEQ ID NO: 1882848
acaaucauuuaugggaaag

SEQ ID NO: 2151947 - RNA, 19 nt, Artificial Sequence
  Description of Artificial Sequence: Synthetic oligonucleotide
  Antisense strand to SEQ ID NO: 2151946
cuuucccauaaaugauugu

SEQ ID NO: 2151948 - RNA, 19 nt, Artificial Sequence
  Description of Artificial Sequence: Synthetic oligonucleotide
  Sense strand starting at position 617 of SEQ ID NO: 1882848
uguacuaacccauggucau

SEQ ID NO: 2151949 - RNA, 19 nt, Artificial Sequence
  Description of Artificial Sequence: Synthetic oligonucleotide
  Antisense strand to SEQ ID NO: 2151948
augaccauggguuaguaca

SEQ ID NO: 2151950 - RNA, 19 nt, Artificial Sequence
  Description of Artificial Sequence: Synthetic oligonucleotide
  Sense strand starting at position 665 of SEQ ID NO: 1882848
uuuggauaccucugaaugu

SEQ ID NO: 2151951 - RNA, 19 nt, Artificial Sequence
  Description of Artificial Sequence: Synthetic oligonucleotide
  Antisense strand to SEQ ID NO: 2151950
acauucagagguauccaaa

SEQ ID NO: 2151952 - RNA, 19 nt, Artificial Sequence
  Description of Artificial Sequence: Synthetic oligonucleotide
  Sense strand starting at position 1018 of SEQ ID NO: 1882848
auucgaugugggcaagaaa

SEQ ID NO: 2151953 - RNA, 19 nt, Artificial Sequence
  Description of Artificial Sequence: Synthetic oligonucleotide
  Antisense strand to SEQ ID NO: 2151952
uuucuugcccacaucgaau

SEQ ID NO: 2151954 - RNA, 19 nt, Artificial Sequence
  Description of Artificial Sequence: Synthetic oligonucleotide
  Sense strand starting at position 1127 of SEQ ID NO: 1882848
ugguuauaguaguugauga

SEQ ID NO: 2151955 - RNA, 19 nt, Artificial Sequence
  Description of Artificial Sequence: Synthetic oligonucleotide
  Antisense strand to SEQ ID NO: 2151954
ucaucaacuacuauaacca

SEQ ID NO: 2151956 - RNA, 19 nt, Artificial Sequence
  Description of Artificial Sequence: Synthetic oligonucleotide
  Sense strand starting at position 1128 of SEQ ID NO: 1882848
gguuauaguaguugaugaa

SEQ ID NO: 2151957 - RNA, 19 nt, Artificial Sequence
  Description of Artificial Sequence: Synthetic oligonucleotide
  Antisense strand to SEQ ID NO: 2151956
uucaucaacuacuauaacc

SEQ ID NO: 2151958 - RNA, 19 nt, Artificial Sequence
  Description of Artificial Sequence: Synthetic oligonucleotide
  Sense strand starting at position 1129 of SEQ ID NO: 1882848
guuauaguaguugaugaau

SEQ ID NO: 2151959 - RNA, 19 nt, Artificial Sequence
  Description of Artificial Sequence: Synthetic oligonucleotide
  Antisense strand to SEQ ID NO: 2151958
auucaucaacuacuauaac

SEQ ID NO: 2151960 - RNA, 19 nt, Artificial Sequence
  Description of Artificial Sequence: Synthetic oligonucleotide
  Sense strand starting at position 1350 of SEQ ID NO: 1882848
ccuauuagucuggaccuca

SEQ ID NO: 2151961 - RNA, 19 nt, Artificial Sequence
  Description of Artificial Sequence: Synthetic oligonucleotide
  Antisense strand to SEQ ID NO: 2151960
ugagguccagacuaauagg

SEQ ID NO: 2151962 - RNA, 19 nt, Artificial Sequence
  Description of Artificial Sequence: Synthetic oligonucleotide
  Sense strand starting at position 1584 of SEQ ID NO: 1882848
agacaaauugaccgcaaga

SEQ ID NO: 2151963 - RNA, 19 nt, Artificial Sequence
  Description of Artificial Sequence: Synthetic oligonucleotide
  Antisense strand to SEQ ID NO: 2151962
ucuugcggucaauuugucu

SEQ ID NO: 2151964 - RNA, 19 nt, Artificial Sequence
  Description of Artificial Sequence: Synthetic oligonucleotide
  Sense strand starting at position 1586 of SEQ ID NO: 1882848
acaaauugaccgcaagauu

SEQ ID NO: 2151965 - RNA, 19 nt, Artificial Sequence
  Description of Artificial Sequence: Synthetic oligonucleotide
  Antisense strand to SEQ ID NO: 2151964
aaucuugcggucaauuugu

SEQ ID NO: 2151966 - RNA, 19 nt, Artificial Sequence
  Description of Artificial Sequence: Synthetic oligonucleotide
  Sense strand starting at position 1855 of SEQ ID NO: 1882848
gcacuuaccuuaccaggaa

SEQ ID NO: 2151967 - RNA, 19 nt, Artificial Sequence
  Description of Artificial Sequence: Synthetic oligonucleotide
  Antisense strand to SEQ ID NO: 2151966
uuccugguaagguaagugc

SEQ ID NO: 2151968 - RNA, 19 nt, Artificial Sequence
  Description of Artificial Sequence: Synthetic oligonucleotide
  Sense strand starting at position 2107 of SEQ ID NO: 1882848
ugagccuacuccuuggaca

SEQ ID NO: 2151969 - RNA, 19 nt, Artificial Sequence
  Description of Artificial Sequence: Synthetic oligonucleotide
  Antisense strand to SEQ ID NO: 2151968
uguccaaggaguaggcuca

SEQ ID NO: 2151970 - RNA, 19 nt, Artificial Sequence
  Description of Artificial Sequence: Synthetic oligonucleotide
  Sense strand starting at position 2292 of SEQ ID NO: 1882848
uuagguuguugaccauuga

SEQ ID NO: 2151971 - RNA, 19 nt, Artificial Sequence
  Description of Artificial Sequence: Synthetic oligonucleotide
  Antisense strand to SEQ ID NO: 2151970
ucaauggucaacaaccuaa

SEQ ID NO: 2151972 - RNA, 19 nt, Artificial Sequence
  Description of Artificial Sequence: Synthetic oligonucleotide
  Sense strand starting at position 2293 of SEQ ID NO: 1882848
uagguuguugaccauugaa

SEQ ID NO: 2151973 - RNA, 19 nt, Artificial Sequence
  Description of Artificial Sequence: Synthetic oligonucleotide
  Antisense strand to SEQ ID NO: 2151972
uucaauggucaacaaccua

SEQ ID NO: 2151974 - RNA, 19 nt, Artificial Sequence
  Description of Artificial Sequence: Synthetic oligonucleotide
  Sense strand starting at position 2302 of SEQ ID NO: 1882848
gaccauugaaggugaggua

SEQ ID NO: 2151975 - RNA, 19 nt, Artificial Sequence
  Description of Artificial Sequence: Synthetic oligonucleotide
  Antisense strand to SEQ ID NO: 2151974
uaccucaccuucaaugguc

SEQ ID NO: 2151976 - RNA, 19 nt, Artificial Sequence
  Description of Artificial Sequence: Synthetic oligonucleotide
  Sense strand starting at position 2318 of SEQ ID NO: 1882848
guaaacaccuguuuauacu

SEQ ID NO: 2151977 - RNA, 19 nt, Artificial Sequence
  Description of Artificial Sequence: Synthetic oligonucleotide
  Antisense strand to SEQ ID NO: 2151976
aguauaaacagguguuuac

SEQ ID NO: 2151978 - RNA, 19 nt, Artificial Sequence
  Description of Artificial Sequence: Synthetic oligonucleotide
  Sense strand starting at position 2324 of SEQ ID NO: 1882848
accuguuuauacuuaacga

SEQ ID NO: 2151979 - RNA, 19 nt, Artificial Sequence
  Description of Artificial Sequence: Synthetic oligonucleotide
  Antisense strand to SEQ ID NO: 2151978
ucguuaaguauaaacaggu

SEQ ID NO: 2151980 - RNA, 19 nt, Artificial Sequence
  Description of Artificial Sequence: Synthetic oligonucleotide
  Sense strand starting at position 2445 of SEQ ID NO: 1882848
ggcagcucuaaugagaguu

SEQ ID NO: 2151981 - RNA, 19 nt, Artificial Sequence
  Description of Artificial Sequence: Synthetic oligonucleotide
  Antisense strand to SEQ ID NO: 2151980
aacucucauuagagcugcc

SEQ ID NO: 2151982 - RNA, 19 nt, Artificial Sequence
  Description of Artificial Sequence: Synthetic oligonucleotide
  Sense strand starting at position 2533 of SEQ ID NO: 1882848
uuucguugacauuacauua

SEQ ID NO: 2151983 - RNA, 19 nt, Artificial Sequence
  Description of Artificial Sequence: Synthetic oligonucleotide
  Antisense strand to SEQ ID NO: 2151982
uaauguaaugucaacgaaa

SEQ ID NO: 2151984 - RNA, 19 nt, Artificial Sequence
  Description of Artificial Sequence: Synthetic oligonucleotide
  Sense strand starting at position 2571 of SEQ ID NO: 1882848
uugaaagacucuucugauu

SEQ ID NO: 2151985 - RNA, 19 nt, Artificial Sequence
  Description of Artificial Sequence: Synthetic oligonucleotide
  Antisense strand to SEQ ID NO: 2151984
aaucagaagagucuuucaa

SEQ ID NO: 2151986 - RNA, 19 nt, Artificial Sequence
  Description of Artificial Sequence: Synthetic oligonucleotide
  Sense strand starting at position 2656 of SEQ ID NO: 1882848
acagauucuaugggucaga

SEQ ID NO: 2151987 - RNA, 19 nt, Artificial Sequence
  Description of Artificial Sequence: Synthetic oligonucleotide
  Antisense strand to SEQ ID NO: 2151986
ucugacccauagaaucugu

SEQ ID NO: 2151988 - RNA, 19 nt, Artificial Sequence
  Description of Artificial Sequence: Synthetic oligonucleotide
  Sense strand starting at position 2657 of SEQ ID NO: 1882848
cagauucuaugggucagaa

SEQ ID NO: 2151989 - RNA, 19 nt, Artificial Sequence
  Description of Artificial Sequence: Synthetic oligonucleotide
  Antisense strand to SEQ ID NO: 2151988
uucugacccauagaaucug

SEQ ID NO: 2151990 - RNA, 19 nt, Artificial Sequence
  Description of Artificial Sequence: Synthetic oligonucleotide
  Sense strand starting at position 2741 of SEQ ID NO: 1882848
gauuguacugggcaggaau

SEQ ID NO: 2151991 - RNA, 19 nt, Artificial Sequence
  Description of Artificial Sequence: Synthetic oligonucleotide
  Antisense strand to SEQ ID NO: 2151990
auuccugcccaguacaauc

SEQ ID NO: 2151992 - RNA, 19 nt, Artificial Sequence
  Description of Artificial Sequence: Synthetic oligonucleotide
  Sense strand starting at position 2743 of SEQ ID NO: 1882848
uuguacugggcaggaauua

SEQ ID NO: 2151993 - RNA, 19 nt, Artificial Sequence
  Description of Artificial Sequence: Synthetic oligonucleotide
  Antisense strand to SEQ ID NO: 2151992
uaauuccugcccaguacaa

SEQ ID NO: 2151994 - RNA, 19 nt, Artificial Sequence
  Description of Artificial Sequence: Synthetic oligonucleotide
  Sense strand starting at position 2744 of SEQ ID NO: 1882848
uguacugggcaggaauuau

SEQ ID NO: 2151995 - RNA, 19 nt, Artificial Sequence
  Description of Artificial Sequence: Synthetic oligonucleotide
  Antisense strand to SEQ ID NO: 2151994
auaauuccugcccaguaca

SEQ ID NO: 2151996 - RNA, 19 nt, Artificial Sequence
  Description of Artificial Sequence: Synthetic oligonucleotide
  Sense strand starting at position 2756 of SEQ ID NO: 1882848
gaauuaucuggaggcuucu

SEQ ID NO: 2151997 - RNA, 19 nt, Artificial Sequence
  Description of Artificial Sequence: Synthetic oligonucleotide
  Antisense strand to SEQ ID NO: 2151996
agaagccuccagauaauuc

SEQ ID NO: 2151998 - RNA, 19 nt, Artificial Sequence
  Description of Artificial Sequence: Synthetic oligonucleotide
  Sense strand starting at position 2888 of SEQ ID NO: 1882848
ccuucugagccucaggaua

SEQ ID NO: 2151999 - RNA, 19 nt, Artificial Sequence
  Description of Artificial Sequence: Synthetic oligonucleotide
  Antisense strand to SEQ ID NO: 2151998
uauccugaggcucagaagg

SEQ ID NO: 2152000 - RNA, 19 nt, Artificial Sequence
  Description of Artificial Sequence: Synthetic oligonucleotide
  Sense strand starting at position 2933 of SEQ ID NO: 1882848
ggcucugggagugaauguu

SEQ ID NO: 2152001 - RNA, 19 nt, Artificial Sequence
  Description of Artificial Sequence: Synthetic oligonucleotide
  Antisense strand to SEQ ID NO: 2152000
aacauucacucccagagcc

SEQ ID NO: 2152002 - RNA, 19 nt, Artificial Sequence
  Description of Artificial Sequence: Synthetic oligonucleotide
  Sense strand starting at position 2958 of SEQ ID NO: 1882848
accugacauccauggucuu

SEQ ID NO: 2152003 - RNA, 19 nt, Artificial Sequence
  Description of Artificial Sequence: Synthetic oligonucleotide
  Antisense strand to SEQ ID NO: 2152002
aagaccauggaugucaggu

SEQ ID NO: 2152004 - RNA, 19 nt, Artificial Sequence
  Description of Artificial Sequence: Synthetic oligonucleotide
  Sense strand starting at position 3034 of SEQ ID NO: 1882848
cugaacuguagugguuaaa

SEQ ID NO: 2152005 - RNA, 19 nt, Artificial Sequence
  Description of Artificial Sequence: Synthetic oligonucleotide
  Antisense strand to SEQ ID NO: 2152004
uuuaaccacuacaguucag

SEQ ID NO: 2152006 - RNA, 19 nt, Artificial Sequence
  Description of Artificial Sequence: Synthetic oligonucleotide
  Sense strand starting at position 3231 of SEQ ID NO: 1882848
uuuauaccuguuggaagau

SEQ ID NO: 2152007 - RNA, 19 nt, Artificial Sequence
  Description of Artificial Sequence: Synthetic oligonucleotide
  Antisense strand to SEQ ID NO: 2152006
aucuuccaacagguauaaa

SEQ ID NO: 2152008 - RNA, 19 nt, Artificial Sequence
  Description of Artificial Sequence: Synthetic oligonucleotide
  Sense strand starting at position 3603 of SEQ ID NO: 1882848
guuacaaucuaacugaagu

SEQ ID NO: 2152009 - RNA, 19 nt, Artificial Sequence
  Description of Artificial Sequence: Synthetic oligonucleotide
  Antisense strand to SEQ ID NO: 2152008
acuucaguuagauuguaac

SEQ ID NO: 2152010 - RNA, 19 nt, Artificial Sequence
  Description of Artificial Sequence: Synthetic oligonucleotide
  Sense strand starting at position 3638 of SEQ ID NO: 1882848
ugcuuaaagcaguauagau

SEQ ID NO: 2152011 - RNA, 19 nt, Artificial Sequence
  Description of Artificial Sequence: Synthetic oligonucleotide
  Antisense strand to SEQ ID NO: 2152010
aucuauacugcuuuaagca

SEQ ID NO: 2152012 - RNA, 19 nt, Artificial Sequence
  Description of Artificial Sequence: Synthetic oligonucleotide
  Sense strand starting at position 3648 of SEQ ID NO: 1882848
aguauagaugcauaacuau

SEQ ID NO: 2152013 - RNA, 19 nt, Artificial Sequence
  Description of Artificial Sequence: Synthetic oligonucleotide
  Antisense strand to SEQ ID NO: 2152012
auaguuaugcaucuauacu

SEQ ID NO: 2152014 - RNA, 19 nt, Artificial Sequence
  Description of Artificial Sequence: Synthetic oligonucleotide
  Sense strand starting at position 3659 of SEQ ID NO: 1882848
auaacuaugucuguuuaac

SEQ ID NO: 2152015 - RNA, 19 nt, Artificial Sequence
  Description of Artificial Sequence: Synthetic oligonucleotide
  Antisense strand to SEQ ID NO: 2152014
guuaaacagacauaguuau

SEQ ID NO: 2152016 - RNA, 19 nt, Artificial Sequence
  Description of Artificial Sequence: Synthetic oligonucleotide
  Sense strand starting at position 3873 of SEQ ID NO: 1882848
agaagagauccacgccaca

SEQ ID NO: 2152017 - RNA, 19 nt, Artificial Sequence
  Description of Artificial Sequence: Synthetic oligonucleotide
  Antisense strand to SEQ ID NO: 2152016
uguggcguggaucucuucu

SEQ ID NO: 2152018 - RNA, 19 nt, Artificial Sequence
  Description of Artificial Sequence: Synthetic oligonucleotide
  Sense strand starting at position 260 of SEQ ID NO: 1882849
agaacaugcuccuuacuga

SEQ ID NO: 2152019 - RNA, 19 nt, Artificial Sequence
  Description of Artificial Sequence: Synthetic oligonucleotide
  Antisense strand to SEQ ID NO: 2152018
ucaguaaggagcauguucu

SEQ ID NO: 2152020 - RNA, 19 nt, Artificial Sequence
  Description of Artificial Sequence: Synthetic oligonucleotide
  Sense strand starting at position 267 of SEQ ID NO: 1882849
gcuccuuacugacagauga

SEQ ID NO: 2152021 - RNA, 19 nt, Artificial Sequence
  Description of Artificial Sequence: Synthetic oligonucleotide
  Antisense strand to SEQ ID NO: 2152020
ucaucugucaguaaggagc

SEQ ID NO: 2152022 - RNA, 19 nt, Artificial Sequence
  Description of Artificial Sequence: Synthetic oligonucleotide
  Sense strand starting at position 305 of SEQ ID NO: 1882849
uucccacucggguguaaga

SEQ ID NO: 2152023 - RNA, 19 nt, Artificial Sequence
  Description of Artificial Sequence: Synthetic oligonucleotide
  Antisense strand to SEQ ID NO: 2152022
ucuuacacccgagugggaa

SEQ ID NO: 2152024 - RNA, 19 nt, Artificial Sequence
  Description of Artificial Sequence: Synthetic oligonucleotide
  Sense strand starting at position 315 of SEQ ID NO: 1882849
gguguaagagcuggcaaga

SEQ ID NO: 2152025 - RNA, 19 nt, Artificial Sequence
  Description of Artificial Sequence: Synthetic oligonucleotide
  Antisense strand to SEQ ID NO: 2152024
ucuugccagcucuuacacc

SEQ ID NO: 2152026 - RNA, 19 nt, Artificial Sequence
  Description of Artificial Sequence: Synthetic oligonucleotide
  Sense strand starting at position 358 of SEQ ID NO: 1882849
cucugcauuugugcugaga

SEQ ID NO: 2152027 - RNA, 19 nt, Artificial Sequence
  Description of Artificial Sequence: Synthetic oligonucleotide
  Antisense strand to SEQ ID NO: 2152026
ucucagcacaaaugcagag

SEQ ID NO: 2152028 - RNA, 19 nt, Artificial Sequence
  Description of Artificial Sequence: Synthetic oligonucleotide
  Sense strand starting at position 361 of SEQ ID NO: 1882849
ugcauuugugcugagaguc

SEQ ID NO: 2152029 - RNA, 19 nt, Artificial Sequence
  Description of Artificial Sequence: Synthetic oligonucleotide
  Antisense strand to SEQ ID NO: 2152028
gacucucagcacaaaugca

SEQ ID NO: 2152030 - RNA, 19 nt, Artificial Sequence
  Description of Artificial Sequence: Synthetic oligonucleotide
  Sense strand starting at position 470 of SEQ ID NO: 1882849
gcugugaucgggccuguga

SEQ ID NO: 2152031 - RNA, 19 nt, Artificial Sequence
  Description of Artificial Sequence: Synthetic oligonucleotide
  Antisense strand to SEQ ID NO: 2152030
ucacaggcccgaucacagc

SEQ ID NO: 2152032 - RNA, 19 nt, Artificial Sequence
  Description of Artificial Sequence: Synthetic oligonucleotide
  Sense strand starting at position 478 of SEQ ID NO: 1882849
cgggccugugaugaugaau

SEQ ID NO: 2152033 - RNA, 19 nt, Artificial Sequence
  Description of Artificial Sequence: Synthetic oligonucleotide
  Antisense strand to SEQ ID NO: 2152032
auucaucaucacaggcccg

SEQ ID NO: 2152034 - RNA, 19 nt, Artificial Sequence
  Description of Artificial Sequence: Synthetic oligonucleotide
  Sense strand starting at position 481 of SEQ ID NO: 1882849
gccugugaugaugaauauu

SEQ ID NO: 2152035 - RNA, 19 nt, Artificial Sequence
  Description of Artificial Sequence: Synthetic oligonucleotide
  Antisense strand to SEQ ID NO: 2152034
aauauucaucaucacaggc

SEQ ID NO: 2152036 - RNA, 19 nt, Artificial Sequence
  Description of Artificial Sequence: Synthetic oligonucleotide
  Sense strand starting at position 490 of SEQ ID NO: 1882849
gaugaauauugagugucaa

SEQ ID NO: 2152037 - RNA, 19 nt, Artificial Sequence
  Description of Artificial Sequence: Synthetic oligonucleotide
  Antisense strand to SEQ ID NO: 2152036
uugacacucaauauucauc

SEQ ID NO: 2152038 - RNA, 19 nt, Artificial Sequence
  Description of Artificial Sequence: Synthetic oligonucleotide
  Sense strand starting at position 752 of SEQ ID NO: 1882849
uuuggaacucuuggacuua

SEQ ID NO: 2152039 - RNA, 19 nt, Artificial Sequence
  Description of Artificial Sequence: Synthetic oligonucleotide
  Antisense strand to SEQ ID NO: 2152038
uaaguccaagaguuccaaa

SEQ ID NO: 2152040 - RNA, 19 nt, Artificial Sequence
  Description of Artificial Sequence: Synthetic oligonucleotide
  Sense strand starting at position 1077 of SEQ ID NO: 1882849
augcuuugccauggucagu

SEQ ID NO: 2152041 - RNA, 19 nt, Artificial Sequence
  Description of Artificial Sequence: Synthetic oligonucleotide
  Antisense strand to SEQ ID NO: 2152040
acugaccauggcaaagcau

SEQ ID NO: 2152042 - RNA, 19 nt, Artificial Sequence
  Description of Artificial Sequence: Synthetic oligonucleotide
  Sense strand starting at position 1135 of SEQ ID NO: 1882849
gcccucuucugguugaacu

SEQ ID NO: 2152043 - RNA, 19 nt, Artificial Sequence
  Description of Artificial Sequence: Synthetic oligonucleotide
  Antisense strand to SEQ ID NO: 2152042
aguucaaccagaagagggc

SEQ ID NO: 2152044 - RNA, 19 nt, Artificial Sequence
  Description of Artificial Sequence: Synthetic oligonucleotide
  Sense strand starting at position 1186 of SEQ ID NO: 1882849
ggcccuauuccaggcaugu

SEQ ID NO: 2152045 - RNA, 19 nt, Artificial Sequence
  Description of Artificial Sequence: Synthetic oligonucleotide
  Antisense strand to SEQ ID NO: 2152044
acaugccuggaauagggcc

SEQ ID NO: 2152046 - RNA, 19 nt, Artificial Sequence
  Description of Artificial Sequence: Synthetic oligonucleotide
  Sense strand starting at position 1205 of SEQ ID NO: 1882849
gccacugugcuuggcuaua

SEQ ID NO: 2152047 - RNA, 19 nt, Artificial Sequence
  Description of Artificial Sequence: Synthetic oligonucleotide
  Antisense strand to SEQ ID NO: 2152046
uauagccaagcacaguggc

SEQ ID NO: 2152048 - RNA, 19 nt, Artificial Sequence
  Description of Artificial Sequence: Synthetic oligonucleotide
  Sense strand starting at position 1207 of SEQ ID NO: 1882849
cacugugcuuggcuauaua

SEQ ID NO: 2152049 - RNA, 19 nt, Artificial Sequence
  Description of Artificial Sequence: Synthetic oligonucleotide
  Antisense strand to SEQ ID NO: 2152048
uauauagccaagcacagug

SEQ ID NO: 2152050 - RNA, 19 nt, Artificial Sequence
  Description of Artificial Sequence: Synthetic oligonucleotide
  Sense strand starting at position 1367 of SEQ ID NO: 1882849
gggaauaggcccuguucca

SEQ ID NO: 2152051 - RNA, 19 nt, Artificial Sequence
  Description of Artificial Sequence: Synthetic oligonucleotide
  Antisense strand to SEQ ID NO: 2152050
uggaacagggccuauuccc

SEQ ID NO: 2152052 - RNA, 19 nt, Artificial Sequence
  Description of Artificial Sequence: Synthetic oligonucleotide
  Sense strand starting at position 1716 of SEQ ID NO: 1882849
ggccuauuccagcacuucu

SEQ ID NO: 2152053 - RNA, 19 nt, Artificial Sequence
  Description of Artificial Sequence: Synthetic oligonucleotide
  Antisense strand to SEQ ID NO: 2152052
agaagugcuggaauaggcc

SEQ ID NO: 2152054 - RNA, 19 nt, Artificial Sequence
  Description of Artificial Sequence: Synthetic oligonucleotide
  Sense strand starting at position 1727 of SEQ ID NO: 1882849
gcacuucuuuaagaggaga

SEQ ID NO: 2152055 - RNA, 19 nt, Artificial Sequence
  Description of Artificial Sequence: Synthetic oligonucleotide
  Antisense strand to SEQ ID NO: 2152054
ucuccucuuaaagaagugc

SEQ ID NO: 2152056 - RNA, 19 nt, Artificial Sequence
  Description of Artificial Sequence: Synthetic oligonucleotide
  Sense strand starting at position 1745 of SEQ ID NO: 1882849
acccuugaauacugagaag

SEQ ID NO: 2152057 - RNA, 19 nt, Artificial Sequence
  Description of Artificial Sequence: Synthetic oligonucleotide
  Antisense strand to SEQ ID NO: 2152056
cuucucaguauucaagggu

SEQ ID NO: 2152058 - RNA, 19 nt, Artificial Sequence
  Description of Artificial Sequence: Synthetic oligonucleotide
  Sense strand starting at position 1756 of SEQ ID NO: 1882849
cugagaaguccuuaaaggc

SEQ ID NO: 2152059 - RNA, 19 nt, Artificial Sequence
  Description of Artificial Sequence: Synthetic oligonucleotide
  Antisense strand to SEQ ID NO: 2152058
gccuuuaaggacuucucag

SEQ ID NO: 2152060 - RNA, 19 nt, Artificial Sequence
  Description of Artificial Sequence: Synthetic oligonucleotide
  Sense strand starting at position 1785 of SEQ ID NO: 1882849
gagcuuuagcagugaaauu

SEQ ID NO: 2152061 - RNA, 19 nt, Artificial Sequence
  Description of Artificial Sequence: Synthetic oligonucleotide
  Antisense strand to SEQ ID NO: 2152060
aauuucacugcuaaagcuc

SEQ ID NO: 2152062 - RNA, 19 nt, Artificial Sequence
  Description of Artificial Sequence: Synthetic oligonucleotide
  Sense strand starting at position 1795 of SEQ ID NO: 1882849
agugaaauuucaggcagag

SEQ ID NO: 2152063 - RNA, 19 nt, Artificial Sequence
  Description of Artificial Sequence: Synthetic oligonucleotide
  Antisense strand to SEQ ID NO: 2152062
cucugccugaaauuucacu

SEQ ID NO: 2152064 - RNA, 19 nt, Artificial Sequence
  Description of Artificial Sequence: Synthetic oligonucleotide
  Sense strand starting at position 1816 of SEQ ID NO: 1882849
uaaggcaccuuugugagaa

SEQ ID NO: 2152065 - RNA, 19 nt, Artificial Sequence
  Description of Artificial Sequence: Synthetic oligonucleotide
  Antisense strand to SEQ ID NO: 2152064
uucucacaaaggugccuua

SEQ ID NO: 2152066 - RNA, 19 nt, Artificial Sequence
  Description of Artificial Sequence: Synthetic oligonucleotide
  Sense strand starting at position 1872 of SEQ ID NO: 1882849
gcaugcuuugaguguucua

SEQ ID NO: 2152067 - RNA, 19 nt, Artificial Sequence
  Description of Artificial Sequence: Synthetic oligonucleotide
  Antisense strand to SEQ ID NO: 2152066
uagaacacucaaagcaugc

SEQ ID NO: 2152068 - RNA, 19 nt, Artificial Sequence
  Description of Artificial Sequence: Synthetic oligonucleotide
  Sense strand starting at position 1875 of SEQ ID NO: 1882849
ugcuuugaguguucuaaga

SEQ ID NO: 2152069 - RNA, 19 nt, Artificial Sequence
  Description of Artificial Sequence: Synthetic oligonucleotide
  Antisense strand to SEQ ID NO: 2152068
ucuuagaacacucaaagca

SEQ ID NO: 2152070 - RNA, 19 nt, Artificial Sequence
  Description of Artificial Sequence: Synthetic oligonucleotide
  Sense strand starting at position 1877 of SEQ ID NO: 1882849
cuuugaguguucuaagaaa

SEQ ID NO: 2152071 - RNA, 19 nt, Artificial Sequence
  Description of Artificial Sequence: Synthetic oligonucleotide
  Antisense strand to SEQ ID NO: 2152070
uuucuuagaacacucaaag

SEQ ID NO: 2152072 - RNA, 19 nt, Artificial Sequence
  Description of Artificial Sequence: Synthetic oligonucleotide
  Sense strand starting at position 1894 of SEQ ID NO: 1882849
aagauaaggugugcacuua

SEQ ID NO: 2152073 - RNA, 19 nt, Artificial Sequence
  Description of Artificial Sequence: Synthetic oligonucleotide
  Antisense strand to SEQ ID NO: 2152072
uaagugcacaccuuaucuu

SEQ ID NO: 2152074 - RNA, 19 nt, Artificial Sequence
  Description of Artificial Sequence: Synthetic oligonucleotide
  Sense strand starting at position 2024 of SEQ ID NO: 1882849
gggaaucaguaacaacaau

SEQ ID NO: 2152075 - RNA, 19 nt, Artificial Sequence
  Description of Artificial Sequence: Synthetic oligonucleotide
  Antisense strand to SEQ ID NO: 2152074
auuguuguuacugauuccc

SEQ ID NO: 2152076 - RNA, 19 nt, Artificial Sequence
  Description of Artificial Sequence: Synthetic oligonucleotide
  Sense strand starting at position 2525 of SEQ ID NO: 1882849
aagccagugugccugaauu

SEQ ID NO: 2152077 - RNA, 19 nt, Artificial Sequence
  Description of Artificial Sequence: Synthetic oligonucleotide
  Antisense strand to SEQ ID NO: 2152076
aauucaggcacacuggcuu

SEQ ID NO: 2152078 - RNA, 19 nt, Artificial Sequence
  Description of Artificial Sequence: Synthetic oligonucleotide
  Sense strand starting at position 2990 of SEQ ID NO: 1882849
cuacuuaugucuucucuga

SEQ ID NO: 2152079 - RNA, 19 nt, Artificial Sequence
  Description of Artificial Sequence: Synthetic oligonucleotide
  Antisense strand to SEQ ID NO: 2152078
ucagagaagacauaaguag

SEQ ID NO: 2152080 - RNA, 19 nt, Artificial Sequence
  Description of Artificial Sequence: Synthetic oligonucleotide
  Sense strand starting at position 2992 of SEQ ID NO: 1882849
acuuaugucuucucugauu

SEQ ID NO: 2152081 - RNA, 19 nt, Artificial Sequence
  Description of Artificial Sequence: Synthetic oligonucleotide
  Antisense strand to SEQ ID NO: 2152080
aaucagagaagacauaagu

SEQ ID NO: 2152082 - RNA, 19 nt, Artificial Sequence
  Description of Artificial Sequence: Synthetic oligonucleotide
  Sense strand starting at position 2994 of SEQ ID NO: 1882849
uuaugucuucucugauucu

SEQ ID NO: 2152083 - RNA, 19 nt, Artificial Sequence
  Description of Artificial Sequence: Synthetic oligonucleotide
  Antisense strand to SEQ ID NO: 2152082
agaaucagagaagacauaa

SEQ ID NO: 2152084 - RNA, 19 nt, Artificial Sequence
  Description of Artificial Sequence: Synthetic oligonucleotide
  Sense strand starting at position 3003 of SEQ ID NO: 1882849
cucugauucuuguagugac

SEQ ID NO: 2152085 - RNA, 19 nt, Artificial Sequence
  Description of Artificial Sequence: Synthetic oligonucleotide
  Antisense strand to SEQ ID NO: 2152084
gucacuacaagaaucagag

SEQ ID NO: 2152086 - RNA, 19 nt, Artificial Sequence
  Description of Artificial Sequence: Synthetic oligonucleotide
  Sense strand starting at position 3013 of SEQ ID NO: 1882849
uguagugacugacugcaaa

SEQ ID NO: 2152087 - RNA, 19 nt, Artificial Sequence
  Description of Artificial Sequence: Synthetic oligonucleotide
  Antisense strand to SEQ ID NO: 2152086
uuugcagucagucacuaca

SEQ ID NO: 2152088 - RNA, 19 nt, Artificial Sequence
  Description of Artificial Sequence: Synthetic oligonucleotide
  Sense strand starting at position 3505 of SEQ ID NO: 1882849
ucuuaaccucgugaucuga

SEQ ID NO: 2152089 - RNA, 19 nt, Artificial Sequence
  Description of Artificial Sequence: Synthetic oligonucleotide
  Antisense strand to SEQ ID NO: 2152088
ucagaucacgagguuaaga

SEQ ID NO: 2152090 - RNA, 19 nt, Artificial Sequence
  Description of Artificial Sequence: Synthetic oligonucleotide
  Sense strand starting at position 3581 of SEQ ID NO: 1882849
aggaauuauucuuaugacu

SEQ ID NO: 2152091 - RNA, 19 nt, Artificial Sequence
  Description of Artificial Sequence: Synthetic oligonucleotide
  Antisense strand to SEQ ID NO: 2152090
agucauaagaauaauuccu

SEQ ID NO: 2152092 - RNA, 19 nt, Artificial Sequence
  Description of Artificial Sequence: Synthetic oligonucleotide
  Sense strand starting at position 3610 of SEQ ID NO: 1882849
uuggaaaccugggaauaga

SEQ ID NO: 2152093 - RNA, 19 nt, Artificial Sequence
  Description of Artificial Sequence: Synthetic oligonucleotide
  Antisense strand to SEQ ID NO: 2152092
ucuauucccagguuuccaa

SEQ ID NO: 2152094 - RNA, 19 nt, Artificial Sequence
  Description of Artificial Sequence: Synthetic oligonucleotide
  Sense strand starting at position 3712 of SEQ ID NO: 1882849
ucugcaaaguguuuaauag

SEQ ID NO: 2152095 - RNA, 19 nt, Artificial Sequence
  Description of Artificial Sequence: Synthetic oligonucleotide
  Antisense strand to SEQ ID NO: 2152094
cuauuaaacacuuugcaga

SEQ ID NO: 2152096 - RNA, 19 nt, Artificial Sequence
  Description of Artificial Sequence: Synthetic oligonucleotide
  Sense strand starting at position 3716 of SEQ ID NO: 1882849
caaaguguuuaauaggcau

SEQ ID NO: 2152097 - RNA, 19 nt, Artificial Sequence
  Description of Artificial Sequence: Synthetic oligonucleotide
  Antisense strand to SEQ ID NO: 2152096
augccuauuaaacacuuug

SEQ ID NO: 2152098 - RNA, 19 nt, Artificial Sequence
  Description of Artificial Sequence: Synthetic oligonucleotide
  Sense strand starting at position 21 of SEQ ID NO: 1882850
caaacuugugguugaauua

SEQ ID NO: 2152099 - RNA, 19 nt, Artificial Sequence
  Description of Artificial Sequence: Synthetic oligonucleotide
  Antisense strand to SEQ ID NO: 2152098
uaauucaaccacaaguuug

SEQ ID NO: 2152100 - RNA, 19 nt, Artificial Sequence
  Description of Artificial Sequence: Synthetic oligonucleotide
  Sense strand starting at position 127 of SEQ ID NO: 1882850
auuacauagcucgauucua

SEQ ID NO: 2152101 - RNA, 19 nt, Artificial Sequence
  Description of Artificial Sequence: Synthetic oligonucleotide
  Antisense strand to SEQ ID NO: 2152100
uagaaucgagcuauguaau

SEQ ID NO: 2152102 - RNA, 19 nt, Artificial Sequence
  Description of Artificial Sequence: Synthetic oligonucleotide
  Sense strand starting at position 165 of SEQ ID NO: 1882850
ugaacuugauugcuaauca

SEQ ID NO: 2152103 - RNA, 19 nt, Artificial Sequence
  Description of Artificial Sequence: Synthetic oligonucleotide
  Antisense strand to SEQ ID NO: 2152102
ugauuagcaaucaaguuca

SEQ ID NO: 2152104 - RNA, 19 nt, Artificial Sequence
  Description of Artificial Sequence: Synthetic oligonucleotide
  Sense strand starting at position 265 of SEQ ID NO: 1882850
uaaucuugugaacagugua

SEQ ID NO: 2152105 - RNA, 19 nt, Artificial Sequence
  Description of Artificial Sequence: Synthetic oligonucleotide
  Antisense strand to SEQ ID NO: 2152104
uacacuguucacaagauua

SEQ ID NO: 2152106 - RNA, 19 nt, Artificial Sequence
  Description of Artificial Sequence: Synthetic oligonucleotide
  Sense strand starting at position 446 of SEQ ID NO: 1882850
gcuaucuuacauugagaga

SEQ ID NO: 2152107 - RNA, 19 nt, Artificial Sequence
  Description of Artificial Sequence: Synthetic oligonucleotide
  Antisense strand to SEQ ID NO: 2152106
ucucucaauguaagauagc

SEQ ID NO: 2152108 - RNA, 19 nt, Artificial Sequence
  Description of Artificial Sequence: Synthetic oligonucleotide
  Sense strand starting at position 462 of SEQ ID NO: 1882850
agaggacacuucccuaguu

SEQ ID NO: 2152109 - RNA, 19 nt, Artificial Sequence
  Description of Artificial Sequence: Synthetic oligonucleotide
  Antisense strand to SEQ ID NO: 2152108
aacuagggaaguguccucu

SEQ ID NO: 2152110 - RNA, 19 nt, Artificial Sequence
  Description of Artificial Sequence: Synthetic oligonucleotide
  Sense strand starting at position 534 of SEQ ID NO: 1882850
agaggagauguuuguucuu

SEQ ID NO: 2152111 - RNA, 19 nt, Artificial Sequence
  Description of Artificial Sequence: Synthetic oligonucleotide
  Antisense strand to SEQ ID NO: 2152110
aagaacaaacaucuccucu

SEQ ID NO: 2152112 - RNA, 19 nt, Artificial Sequence
  Description of Artificial Sequence: Synthetic oligonucleotide
  Sense strand starting at position 747 of SEQ ID NO: 1882850
guuaaugaucuguaucuuu

SEQ ID NO: 2152113 - RNA, 19 nt, Artificial Sequence
  Description of Artificial Sequence: Synthetic oligonucleotide
  Antisense strand to SEQ ID NO: 2152112
aaagauacagaucauuaac

SEQ ID NO: 2152114 - RNA, 19 nt, Artificial Sequence
  Description of Artificial Sequence: Synthetic oligonucleotide
  Sense strand starting at position 752 of SEQ ID NO: 1882850
ugaucuguaucuuugaaac

SEQ ID NO: 2152115 - RNA, 19 nt, Artificial Sequence
  Description of Artificial Sequence: Synthetic oligonucleotide
  Antisense strand to SEQ ID NO: 2152114
guuucaaagauacagauca

SEQ ID NO: 2152116 - RNA, 19 nt, Artificial Sequence
  Description of Artificial Sequence: Synthetic oligonucleotide
  Sense strand starting at position 792 of SEQ ID NO: 1882850
agacuagcauucuuagauu

SEQ ID NO: 2152117 - RNA, 19 nt, Artificial Sequence
  Description of Artificial Sequence: Synthetic oligonucleotide
  Antisense strand to SEQ ID NO: 2152116
aaucuaagaaugcuagucu

SEQ ID NO: 2152118 - RNA, 19 nt, Artificial Sequence
  Description of Artificial Sequence: Synthetic oligonucleotide
  Sense strand starting at position 1036 of SEQ ID NO: 1882850
gugaaucuuccagauguau

SEQ ID NO: 2152119 - RNA, 19 nt, Artificial Sequence
  Description of Artificial Sequence: Synthetic oligonucleotide
  Antisense strand to SEQ ID NO: 2152118
auacaucuggaagauucac

SEQ ID NO: 2152120 - RNA, 19 nt, Artificial Sequence
  Description of Artificial Sequence: Synthetic oligonucleotide
  Sense strand starting at position 1047 of SEQ ID NO: 1882850
agauguauuugugcucuga

SEQ ID NO: 2152121 - RNA, 19 nt, Artificial Sequence
  Description of Artificial Sequence: Synthetic oligonucleotide
  Antisense strand to SEQ ID NO: 2152120
ucagagcacaaauacaucu

SEQ ID NO: 2152122 - RNA, 19 nt, Artificial Sequence
  Description of Artificial Sequence: Synthetic oligonucleotide
  Sense strand starting at position 1049 of SEQ ID NO: 1882850
auguauuugugcucugaaa

SEQ ID NO: 2152123 - RNA, 19 nt, Artificial Sequence
  Description of Artificial Sequence: Synthetic oligonucleotide
  Antisense strand to SEQ ID NO: 2152122
uuucagagcacaaauacau

SEQ ID NO: 2152124 - RNA, 19 nt, Artificial Sequence
  Description of Artificial Sequence: Synthetic oligonucleotide
  Sense strand starting at position 1129 of SEQ ID NO: 1882850
gccuucuauuuauugaugu

SEQ ID NO: 2152125 - RNA, 19 nt, Artificial Sequence
  Description of Artificial Sequence: Synthetic oligonucleotide
  Antisense strand to SEQ ID NO: 2152124
acaucaauaaauagaaggc

SEQ ID NO: 2152126 - RNA, 19 nt, Artificial Sequence
  Description of Artificial Sequence: Synthetic oligonucleotide
  Sense strand starting at position 1218 of SEQ ID NO: 1882850
gcuagcucagauugagaga

SEQ ID NO: 2152127 - RNA, 19 nt, Artificial Sequence
  Description of Artificial Sequence: Synthetic oligonucleotide
  Antisense strand to SEQ ID NO: 2152126
ucucucaaucugagcuagc

SEQ ID NO: 2152128 - RNA, 19 nt, Artificial Sequence
  Description of Artificial Sequence: Synthetic oligonucleotide
  Sense strand starting at position 1232 of SEQ ID NO: 1882850
agagaagaguaguugccaa

SEQ ID NO: 2152129 - RNA, 19 nt, Artificial Sequence
  Description of Artificial Sequence: Synthetic oligonucleotide
  Antisense strand to SEQ ID NO: 2152128
uuggcaacuacucuucucu

SEQ ID NO: 2152130 - RNA, 19 nt, Artificial Sequence
  Description of Artificial Sequence: Synthetic oligonucleotide
  Sense strand starting at position 1527 of SEQ ID NO: 1882850
ggaggauacaaacguaagu

SEQ ID NO: 2152131 - RNA, 19 nt, Artificial Sequence
  Description of Artificial Sequence: Synthetic oligonucleotide
  Antisense strand to SEQ ID NO: 2152130
acuuacguuuguauccucc

SEQ ID NO: 2152132 - RNA, 19 nt, Artificial Sequence
  Description of Artificial Sequence: Synthetic oligonucleotide
  Sense strand starting at position 1553 of SEQ ID NO: 1882850
cccaaaguuugucuaaaua

SEQ ID NO: 2152133 - RNA, 19 nt, Artificial Sequence
  Description of Artificial Sequence: Synthetic oligonucleotide
  Antisense strand to SEQ ID NO: 2152132
uauuuagacaaacuuuggg

SEQ ID NO: 2152134 - RNA, 19 nt, Artificial Sequence
  Description of Artificial Sequence: Synthetic oligonucleotide
  Sense strand starting at position 1640 of SEQ ID NO: 1882850
ucuagcaaaguuuagaauu

SEQ ID NO: 2152135 - RNA, 19 nt, Artificial Sequence
  Description of Artificial Sequence: Synthetic oligonucleotide
  Antisense strand to SEQ ID NO: 2152134
aauucuaaacuuugcuaga

SEQ ID NO: 2152136 - RNA, 19 nt, Artificial Sequence
  Description of Artificial Sequence: Synthetic oligonucleotide
  Sense strand starting at position 2336 of SEQ ID NO: 1882850
cugccaugagcugagagua

SEQ ID NO: 2152137 - RNA, 19 nt, Artificial Sequence
  Description of Artificial Sequence: Synthetic oligonucleotide
  Antisense strand to SEQ ID NO: 2152136
uacucucagcucauggcag

SEQ ID NO: 2152138 - RNA, 19 nt, Artificial Sequence
  Description of Artificial Sequence: Synthetic oligonucleotide
  Sense strand starting at position 2719 of SEQ ID NO: 1882850
gugguuccucuugaaauua

SEQ ID NO: 2152139 - RNA, 19 nt, Artificial Sequence
  Description of Artificial Sequence: Synthetic oligonucleotide
  Antisense strand to SEQ ID NO: 2152138
uaauuucaagaggaaccac

SEQ ID NO: 2152140 - RNA, 19 nt, Artificial Sequence
  Description of Artificial Sequence: Synthetic oligonucleotide
  Sense strand starting at position 2740 of SEQ ID NO: 1882850
ucuugaacaugauagauuu

SEQ ID NO: 2152141 - RNA, 19 nt, Artificial Sequence
  Description of Artificial Sequence: Synthetic oligonucleotide
  Antisense strand to SEQ ID NO: 2152140
aaaucuaucauguucaaga

SEQ ID NO: 2152142 - RNA, 19 nt, Artificial Sequence
  Description of Artificial Sequence: Synthetic oligonucleotide
  Sense strand starting at position 2748 of SEQ ID NO: 1882850
augauagauuuccagggua

SEQ ID NO: 2152143 - RNA, 19 nt, Artificial Sequence
  Description of Artificial Sequence: Synthetic oligonucleotide
  Antisense strand to SEQ ID NO: 2152142
uacccuggaaaucuaucau

SEQ ID NO: 2152144 - RNA, 19 nt, Artificial Sequence
  Description of Artificial Sequence: Synthetic oligonucleotide
  Sense strand starting at position 2766 of SEQ ID NO: 1882850
agagaauaaugucuuaguu

SEQ ID NO: 2152145 - RNA, 19 nt, Artificial Sequence
  Description of Artificial Sequence: Synthetic oligonucleotide
  Antisense strand to SEQ ID NO: 2152144
aacuaagacauuauucucu

SEQ ID NO: 2152146 - RNA, 19 nt, Artificial Sequence
  Description of Artificial Sequence: Synthetic oligonucleotide
  Sense strand starting at position 2854 of SEQ ID NO: 1882850
ugguuagcuguggauuaaa

SEQ ID NO: 2152147 - RNA, 19 nt, Artificial Sequence
  Description of Artificial Sequence: Synthetic oligonucleotide
  Antisense strand to SEQ ID NO: 2152146
uuuaauccacagcuaacca

SEQ ID NO: 2152148 - RNA, 19 nt, Artificial Sequence
  Description of Artificial Sequence: Synthetic oligonucleotide
  Sense strand starting at position 2931 of SEQ ID NO: 1882850
ugacauggcauguauuaga

SEQ ID NO: 2152149 - RNA, 19 nt, Artificial Sequence
  Description of Artificial Sequence: Synthetic oligonucleotide
  Antisense strand to SEQ ID NO: 2152148
ucuaauacaugccauguca

SEQ ID NO: 2152150 - RNA, 19 nt, Artificial Sequence
  Description of Artificial Sequence: Synthetic oligonucleotide
  Sense strand starting at position 3000 of SEQ ID NO: 1882850
ugacuuuaguauccuauua

SEQ ID NO: 2152151 - RNA, 19 nt, Artificial Sequence
  Description of Artificial Sequence: Synthetic oligonucleotide
  Antisense strand to SEQ ID NO: 2152150
uaauaggauacuaaaguca

SEQ ID NO: 2152152 - RNA, 19 nt, Artificial Sequence
  Description of Artificial Sequence: Synthetic oligonucleotide
  Sense strand starting at position 3200 of SEQ ID NO: 1882850
auuagcaggguuuaucaaa

SEQ ID NO: 2152153 - RNA, 19 nt, Artificial Sequence
  Description of Artificial Sequence: Synthetic oligonucleotide
  Antisense strand to SEQ ID NO: 2152152
uuugauaaacccugcuaau

SEQ ID NO: 2152154 - RNA, 19 nt, Artificial Sequence
  Description of Artificial Sequence: Synthetic oligonucleotide
  Sense strand starting at position 3361 of SEQ ID NO: 1882850
uagugauggccuuagauca

SEQ ID NO: 2152155 - RNA, 19 nt, Artificial Sequence
  Description of Artificial Sequence: Synthetic oligonucleotide
  Antisense strand to SEQ ID NO: 2152154
ugaucuaaggccaucacua

SEQ ID NO: 2152156 - RNA, 19 nt, Artificial Sequence
  Description of Artificial Sequence: Synthetic oligonucleotide
  Sense strand starting at position 3508 of SEQ ID NO: 1882850
gauauuauauggccauuag

SEQ ID NO: 2152157 - RNA, 19 nt, Artificial Sequence
  Description of Artificial Sequence: Synthetic oligonucleotide
  Antisense strand to SEQ ID NO: 2152156
cuaauggccauauaauauc

SEQ ID NO: 2152158 - RNA, 19 nt, Artificial Sequence
  Description of Artificial Sequence: Synthetic oligonucleotide
  Sense strand starting at position 3509 of SEQ ID NO: 1882850
auauuauauggccauuagu

SEQ ID NO: 2152159 - RNA, 19 nt, Artificial Sequence
  Description of Artificial Sequence: Synthetic oligonucleotide
  Antisense strand to SEQ ID NO: 2152158
acuaauggccauauaauau

SEQ ID NO: 2152160 - RNA, 19 nt, Artificial Sequence
  Description of Artificial Sequence: Synthetic oligonucleotide
  Sense strand starting at position 3634 of SEQ ID NO: 1882850
agcagucauaccuagaggu

SEQ ID NO: 2152161 - RNA, 19 nt, Artificial Sequence
  Description of Artificial Sequence: Synthetic oligonucleotide
  Antisense strand to SEQ ID NO: 2152160
accucuagguaugacugcu

SEQ ID NO: 2152162 - RNA, 19 nt, Artificial Sequence
  Description of Artificial Sequence: Synthetic oligonucleotide
  Sense strand starting at position 3662 of SEQ ID NO: 1882850
gagagaaguuguguuccag

SEQ ID NO: 2152163 - RNA, 19 nt, Artificial Sequence
  Description of Artificial Sequence: Synthetic oligonucleotide
  Antisense strand to SEQ ID NO: 2152162
cuggaacacaacuucucuc

SEQ ID NO: 2152164 - RNA, 19 nt, Artificial Sequence
  Description of Artificial Sequence: Synthetic oligonucleotide
  Sense strand starting at position 3673 of SEQ ID NO: 1882850
uguuccagucaguaagauu

SEQ ID NO: 2152165 - RNA, 19 nt, Artificial Sequence
  Description of Artificial Sequence: Synthetic oligonucleotide
  Antisense strand to SEQ ID NO: 2152164
aaucuuacugacuggaaca

SEQ ID NO: 2152166 - RNA, 19 nt, Artificial Sequence
  Description of Artificial Sequence: Synthetic oligonucleotide
  Sense strand starting at position 3714 of SEQ ID NO: 1882850
ccugaauuuaguuguucgu

SEQ ID NO: 2152167 - RNA, 19 nt, Artificial Sequence
  Description of Artificial Sequence: Synthetic oligonucleotide
  Antisense strand to SEQ ID NO: 2152166
acgaacaacuaaauucagg

SEQ ID NO: 2152168 - RNA, 19 nt, Artificial Sequence
  Description of Artificial Sequence: Synthetic oligonucleotide
  Sense strand starting at position 3721 of SEQ ID NO: 1882850
uuaguuguucgucugugau

SEQ ID NO: 2152169 - RNA, 19 nt, Artificial Sequence
  Description of Artificial Sequence: Synthetic oligonucleotide
  Antisense strand to SEQ ID NO: 2152168
aucacagacgaacaacuaa

SEQ ID NO: 2152170 - RNA, 19 nt, Artificial Sequence
  Description of Artificial Sequence: Synthetic oligonucleotide
  Sense strand starting at position 3733 of SEQ ID NO: 1882850
cugugauaagguugagaga

SEQ ID NO: 2152171 - RNA, 19 nt, Artificial Sequence
  Description of Artificial Sequence: Synthetic oligonucleotide
  Antisense strand to SEQ ID NO: 2152170
ucucucaaccuuaucacag

SEQ ID NO: 2152172 - RNA, 19 nt, Artificial Sequence
  Description of Artificial Sequence: Synthetic oligonucleotide
  Sense strand starting at position 3772 of SEQ ID NO: 1882850
uccuucuagguccauuaua

SEQ ID NO: 2152173 - RNA, 19 nt, Artificial Sequence
  Description of Artificial Sequence: Synthetic oligonucleotide
  Antisense strand to SEQ ID NO: 2152172
uauaauggaccuagaagga

SEQ ID NO: 2152174 - RNA, 19 nt, Artificial Sequence
  Description of Artificial Sequence: Synthetic oligonucleotide
  Sense strand starting at position 3814 of SEQ ID NO: 1882850
agauguuugaggcauucua

SEQ ID NO: 2152175 - RNA, 19 nt, Artificial Sequence
  Description of Artificial Sequence: Synthetic oligonucleotide
  Antisense strand to SEQ ID NO: 2152174
uagaaugccucaaacaucu

SEQ ID NO: 2152176 - RNA, 19 nt, Artificial Sequence
  Description of Artificial Sequence: Synthetic oligonucleotide
  Sense strand starting at position 3876 of SEQ ID NO: 1882850
agcagagauucuuuggaaa

SEQ ID NO: 2152177 - RNA, 19 nt, Artificial Sequence
  Description of Artificial Sequence: Synthetic oligonucleotide
  Antisense strand to SEQ ID NO: 2152176
uuuccaaagaaucucugcu

SEQ ID NO: 2152178 - RNA, 19 nt, Artificial Sequence
  Description of Artificial Sequence: Synthetic oligonucleotide
  Sense strand starting at position 249 of SEQ ID NO: 1882851
cccugcugugugcaagagu

SEQ ID NO: 2152179 - RNA, 19 nt, Artificial Sequence
  Description of Artificial Sequence: Synthetic oligonucleotide
  Antisense strand to SEQ ID NO: 2152178
acucuugcacacagcaggg

SEQ ID NO: 2152180 - RNA, 19 nt, Artificial Sequence
  Description of Artificial Sequence: Synthetic oligonucleotide
  Sense strand starting at position 266 of SEQ ID NO: 1882851
gugcaggagugguugagaa

SEQ ID NO: 2152181 - RNA, 19 nt, Artificial Sequence
  Description of Artificial Sequence: Synthetic oligonucleotide
  Antisense strand to SEQ ID NO: 2152180
uucucaaccacuccugcac

SEQ ID NO: 2152182 - RNA, 19 nt, Artificial Sequence
  Description of Artificial Sequence: Synthetic oligonucleotide
  Sense strand starting at position 432 of SEQ ID NO: 1882851
aggugagacugacucuuga

SEQ ID NO: 2152183 - RNA, 19 nt, Artificial Sequence
  Description of Artificial Sequence: Synthetic oligonucleotide
  Antisense strand to SEQ ID NO: 2152182
ucaagagucagucucaccu

SEQ ID NO: 2152184 - RNA, 19 nt, Artificial Sequence
  Description of Artificial Sequence: Synthetic oligonucleotide
  Sense strand starting at position 436 of SEQ ID NO: 1882851
gagacugacucuugaauag

SEQ ID NO: 2152185 - RNA, 19 nt, Artificial Sequence
  Description of Artificial Sequence: Synthetic oligonucleotide
  Antisense strand to SEQ ID NO: 2152184
cuauucaagagucagucuc

SEQ ID NO: 2152186 - RNA, 19 nt, Artificial Sequence
  Description of Artificial Sequence: Synthetic oligonucleotide
  Sense strand starting at position 442 of SEQ ID NO: 1882851
gacucuugaauaggugagu

SEQ ID NO: 2152187 - RNA, 19 nt, Artificial Sequence
  Description of Artificial Sequence: Synthetic oligonucleotide
  Antisense strand to SEQ ID NO: 2152186
acucaccuauucaagaguc

SEQ ID NO: 2152188 - RNA, 19 nt, Artificial Sequence
  Description of Artificial Sequence: Synthetic oligonucleotide
  Sense strand starting at position 443 of SEQ ID NO: 1882851
acucuugaauaggugagua

SEQ ID NO: 2152189 - RNA, 19 nt, Artificial Sequence
  Description of Artificial Sequence: Synthetic oligonucleotide
  Antisense strand to SEQ ID NO: 2152188
uacucaccuauucaagagu

SEQ ID NO: 2152190 - RNA, 19 nt, Artificial Sequence
  Description of Artificial Sequence: Synthetic oligonucleotide
  Sense strand starting at position 456 of SEQ ID NO: 1882851
ugaguaagcaggugugcuu

SEQ ID NO: 2152191 - RNA, 19 nt, Artificial Sequence
  Description of Artificial Sequence: Synthetic oligonucleotide
  Antisense strand to SEQ ID NO: 2152190
aagcacaccugcuuacuca

SEQ ID NO: 2152192 - RNA, 19 nt, Artificial Sequence
  Description of Artificial Sequence: Synthetic oligonucleotide
  Sense strand starting at position 512 of SEQ ID NO: 1882851
gccuuaucccagugaggac

SEQ ID NO: 2152193 - RNA, 19 nt, Artificial Sequence
  Description of Artificial Sequence: Synthetic oligonucleotide
  Antisense strand to SEQ ID NO: 2152192
guccucacugggauaaggc

SEQ ID NO: 2152194 - RNA, 19 nt, Artificial Sequence
  Description of Artificial Sequence: Synthetic oligonucleotide
  Sense strand starting at position 564 of SEQ ID NO: 1882851
augagaaacgccugcaguu

SEQ ID NO: 2152195 - RNA, 19 nt, Artificial Sequence
  Description of Artificial Sequence: Synthetic oligonucleotide
  Antisense strand to SEQ ID NO: 2152194
aacugcaggcguuucucau

SEQ ID NO: 2152196 - RNA, 19 nt, Artificial Sequence
  Description of Artificial Sequence: Synthetic oligonucleotide
  Sense strand starting at position 618 of SEQ ID NO: 1882851
aggucaaucucacaaagaa

SEQ ID NO: 2152197 - RNA, 19 nt, Artificial Sequence
  Description of Artificial Sequence: Synthetic oligonucleotide
  Antisense strand to SEQ ID NO: 2152196
uucuuugugagauugaccu

SEQ ID NO: 2152198 - RNA, 19 nt, Artificial Sequence
  Description of Artificial Sequence: Synthetic oligonucleotide
  Sense strand starting at position 1161 of SEQ ID NO: 1882851
gggaggauuuccgggauug

SEQ ID NO: 2152199 - RNA, 19 nt, Artificial Sequence
  Description of Artificial Sequence: Synthetic oligonucleotide
  Antisense strand to SEQ ID NO: 2152198
caaucccggaaauccuccc

SEQ ID NO: 2152200 - RNA, 19 nt, Artificial Sequence
  Description of Artificial Sequence: Synthetic oligonucleotide
  Sense strand starting at position 1171 of SEQ ID NO: 1882851
ccgggauuguccgagcuga

SEQ ID NO: 2152201 - RNA, 19 nt, Artificial Sequence
  Description of Artificial Sequence: Synthetic oligonucleotide
  Antisense strand to SEQ ID NO: 2152200
ucagcucggacaaucccgg

SEQ ID NO: 2152202 - RNA, 19 nt, Artificial Sequence
  Description of Artificial Sequence: Synthetic oligonucleotide
  Sense strand starting at position 1172 of SEQ ID NO: 1882851
cgggauuguccgagcugac

SEQ ID NO: 2152203 - RNA, 19 nt, Artificial Sequence
  Description of Artificial Sequence: Synthetic oligonucleotide
  Antisense strand to SEQ ID NO: 2152202
gucagcucggacaaucccg

SEQ ID NO: 2152204 - RNA, 19 nt, Artificial Sequence
  Description of Artificial Sequence: Synthetic oligonucleotide
  Sense strand starting at position 1329 of SEQ ID NO: 1882851
ggaauagagguuuguccau

SEQ ID NO: 2152205 - RNA, 19 nt, Artificial Sequence
  Description of Artificial Sequence: Synthetic oligonucleotide
  Antisense strand to SEQ ID NO: 2152204
auggacaaaccucuauucc

SEQ ID NO: 2152206 - RNA, 19 nt, Artificial Sequence
  Description of Artificial Sequence: Synthetic oligonucleotide
  Sense strand starting at position 1331 of SEQ ID NO: 1882851
aauagagguuuguccauuc

SEQ ID NO: 2152207 - RNA, 19 nt, Artificial Sequence
  Description of Artificial Sequence: Synthetic oligonucleotide
  Antisense strand to SEQ ID NO: 2152206
gaauggacaaaccucuauu

SEQ ID NO: 2152208 - RNA, 19 nt, Artificial Sequence
  Description of Artificial Sequence: Synthetic oligonucleotide
  Sense strand starting at position 1527 of SEQ ID NO: 1882851
ggaaguaagugaucgcugu

SEQ ID NO: 2152209 - RNA, 19 nt, Artificial Sequence
  Description of Artificial Sequence: Synthetic oligonucleotide
  Antisense strand to SEQ ID NO: 2152208
acagcgaucacuuacuucc

SEQ ID NO: 2152210 - RNA, 19 nt, Artificial Sequence
  Description of Artificial Sequence: Synthetic oligonucleotide
  Sense strand starting at position 1531 of SEQ ID NO: 1882851
guaagugaucgcugugcuc

SEQ ID NO: 2152211 - RNA, 19 nt, Artificial Sequence
  Description of Artificial Sequence: Synthetic oligonucleotide
  Antisense strand to SEQ ID NO: 2152210
gagcacagcgaucacuuac

SEQ ID NO: 2152212 - RNA, 19 nt, Artificial Sequence
  Description of Artificial Sequence: Synthetic oligonucleotide
  Sense strand starting at position 1540 of SEQ ID NO: 1882851
cgcugugcuccgggaggau

SEQ ID NO: 2152213 - RNA, 19 nt, Artificial Sequence
  Description of Artificial Sequence: Synthetic oligonucleotide
  Antisense strand to SEQ ID NO: 2152212
auccucccggagcacagcg

SEQ ID NO: 2152214 - RNA, 19 nt, Artificial Sequence
  Description of Artificial Sequence: Synthetic oligonucleotide
  Sense strand starting at position 1598 of SEQ ID NO: 1882851
ugguuaccguugcuaugaa

SEQ ID NO: 2152215 - RNA, 19 nt, Artificial Sequence
  Description of Artificial Sequence: Synthetic oligonucleotide
  Antisense strand to SEQ ID NO: 2152214
uucauagcaacgguaacca

SEQ ID NO: 2152216 - RNA, 19 nt, Artificial Sequence
  Description of Artificial Sequence: Synthetic oligonucleotide
  Sense strand starting at position 3403 of SEQ ID NO: 1882851
ugggauuucucccaggacu

SEQ ID NO: 2152217 - RNA, 19 nt, Artificial Sequence
  Description of Artificial Sequence: Synthetic oligonucleotide
  Antisense strand to SEQ ID NO: 2152216
aguccugggagaaauccca

SEQ ID NO: 2152218 - RNA, 19 nt, Artificial Sequence
  Description of Artificial Sequence: Synthetic oligonucleotide
  Sense strand starting at position 3462 of SEQ ID NO: 1882851
uccugugucuuugcaggga

SEQ ID NO: 2152219 - RNA, 19 nt, Artificial Sequence
  Description of Artificial Sequence: Synthetic oligonucleotide
  Antisense strand to SEQ ID NO: 2152218
ucccugcaaagacacagga

SEQ ID NO: 2152220 - RNA, 19 nt, Artificial Sequence
  Description of Artificial Sequence: Synthetic oligonucleotide
  Sense strand starting at position 3735 of SEQ ID NO: 1882851
agggcauacucauaggaca

SEQ ID NO: 2152221 - RNA, 19 nt, Artificial Sequence
  Description of Artificial Sequence: Synthetic oligonucleotide
  Antisense strand to SEQ ID NO: 2152220
uguccuaugaguaugcccu

SEQ ID NO: 2152222 - RNA, 19 nt, Artificial Sequence
  Description of Artificial Sequence: Synthetic oligonucleotide
  Sense strand starting at position 3738 of SEQ ID NO: 1882851
gcauacucauaggacaaua

SEQ ID NO: 2152223 - RNA, 19 nt, Artificial Sequence
  Description of Artificial Sequence: Synthetic oligonucleotide
  Antisense strand to SEQ ID NO: 2152222
uauuguccuaugaguaugc

SEQ ID NO: 2152224 - RNA, 19 nt, Artificial Sequence
  Description of Artificial Sequence: Synthetic oligonucleotide
  Sense strand starting at position 131 of SEQ ID NO: 1882852
gggugugcgauuuauagcu

SEQ ID NO: 2152225 - RNA, 19 nt, Artificial Sequence
  Description of Artificial Sequence: Synthetic oligonucleotide
  Antisense strand to SEQ ID NO: 2152224
agcuauaaaucgcacaccc

SEQ ID NO: 2152226 - RNA, 19 nt, Artificial Sequence
  Description of Artificial Sequence: Synthetic oligonucleotide
  Sense strand starting at position 136 of SEQ ID NO: 1882852
ugcgauuuauagcucaaua

SEQ ID NO: 2152227 - RNA, 19 nt, Artificial Sequence
  Description of Artificial Sequence: Synthetic oligonucleotide
  Antisense strand to SEQ ID NO: 2152226
uauugagcuauaaaucgca

SEQ ID NO: 2152228 - RNA, 19 nt, Artificial Sequence
  Description of Artificial Sequence: Synthetic oligonucleotide
  Sense strand starting at position 201 of SEQ ID NO: 1882852
gaaggugaaucagucauaa

SEQ ID NO: 2152229 - RNA, 19 nt, Artificial Sequence
  Description of Artificial Sequence: Synthetic oligonucleotide
  Antisense strand to SEQ ID NO: 2152228
uuaugacugauucaccuuc

SEQ ID NO: 2152230 - RNA, 19 nt, Artificial Sequence
  Description of Artificial Sequence: Synthetic oligonucleotide
  Sense strand starting at position 203 of SEQ ID NO: 1882852
aggugaaucagucauaacg

SEQ ID NO: 2152231 - RNA, 19 nt, Artificial Sequence
  Description of Artificial Sequence: Synthetic oligonucleotide
  Antisense strand to SEQ ID NO: 2152230
cguuaugacugauucaccu

SEQ ID NO: 2152232 - RNA, 19 nt, Artificial Sequence
  Description of Artificial Sequence: Synthetic oligonucleotide
  Sense strand starting at position 211 of SEQ ID NO: 1882852
cagucauaacgugagcaaa

SEQ ID NO: 2152233 - RNA, 19 nt, Artificial Sequence
  Description of Artificial Sequence: Synthetic oligonucleotide
  Antisense strand to SEQ ID NO: 2152232
uuugcucacguuaugacug

SEQ ID NO: 2152234 - RNA, 19 nt, Artificial Sequence
  Description of Artificial Sequence: Synthetic oligonucleotide
  Sense strand starting at position 397 of SEQ ID NO: 1882852
cuucucagauaguuccaua

SEQ ID NO: 2152235 - RNA, 19 nt, Artificial Sequence
  Description of Artificial Sequence: Synthetic oligonucleotide
  Antisense strand to SEQ ID NO: 2152234
uauggaacuaucugagaag

SEQ ID NO: 2152236 - RNA, 19 nt, Artificial Sequence
  Description of Artificial Sequence: Synthetic oligonucleotide
  Sense strand starting at position 647 of SEQ ID NO: 1882852
gugugagucauccaggaag

SEQ ID NO: 2152237 - RNA, 19 nt, Artificial Sequence
  Description of Artificial Sequence: Synthetic oligonucleotide
  Antisense strand to SEQ ID NO: 2152236
cuuccuggaugacucacac

SEQ ID NO: 2152238 - RNA, 19 nt, Artificial Sequence
  Description of Artificial Sequence: Synthetic oligonucleotide
  Sense strand starting at position 766 of SEQ ID NO: 1882852
agacguuuccaaggauauc

SEQ ID NO: 2152239 - RNA, 19 nt, Artificial Sequence
  Description of Artificial Sequence: Synthetic oligonucleotide
  Antisense strand to SEQ ID NO: 2152238
gauauccuuggaaacgucu

SEQ ID NO: 2152240 - RNA, 19 nt, Artificial Sequence
  Description of Artificial Sequence: Synthetic oligonucleotide
  Sense strand starting at position 838 of SEQ ID NO: 1882852
aacagaucacgguauugua

SEQ ID NO: 2152241 - RNA, 19 nt, Artificial Sequence
  Description of Artificial Sequence: Synthetic oligonucleotide
  Antisense strand to SEQ ID NO: 2152240
uacaauaccgugaucuguu

SEQ ID NO: 2152242 - RNA, 19 nt, Artificial Sequence
  Description of Artificial Sequence: Synthetic oligonucleotide
  Sense strand starting at position 1007 of SEQ ID NO: 1882852
uuucuagaaccauguauug

SEQ ID NO: 2152243 - RNA, 19 nt, Artificial Sequence
  Description of Artificial Sequence: Synthetic oligonucleotide
  Antisense strand to SEQ ID NO: 2152242
caauacaugguucuagaaa

SEQ ID NO: 2152244 - RNA, 19 nt, Artificial Sequence
  Description of Artificial Sequence: Synthetic oligonucleotide
  Sense strand starting at position 1118 of SEQ ID NO: 1882852
uauagagacuccucuaggu

SEQ ID NO: 2152245 - RNA, 19 nt, Artificial Sequence
  Description of Artificial Sequence: Synthetic oligonucleotide
  Antisense strand to SEQ ID NO: 2152244
accuagaggagucucuaua

SEQ ID NO: 2152246 - RNA, 19 nt, Artificial Sequence
  Description of Artificial Sequence: Synthetic oligonucleotide
  Sense strand starting at position 1122 of SEQ ID NO: 1882852
gagacuccucuagguagau

SEQ ID NO: 2152247 - RNA, 19 nt, Artificial Sequence
  Description of Artificial Sequence: Synthetic oligonucleotide
  Antisense strand to SEQ ID NO: 2152246
aucuaccuagaggagucuc

SEQ ID NO: 2152248 - RNA, 19 nt, Artificial Sequence
  Description of Artificial Sequence: Synthetic oligonucleotide
  Sense strand starting at position 1144 of SEQ ID NO: 1882852
cuuucuguuaauuggagga

SEQ ID NO: 2152249 - RNA, 19 nt, Artificial Sequence
  Description of Artificial Sequence: Synthetic oligonucleotide
  Antisense strand to SEQ ID NO: 2152248
uccuccaauuaacagaaag

SEQ ID NO: 2152250 - RNA, 19 nt, Artificial Sequence
  Description of Artificial Sequence: Synthetic oligonucleotide
  Sense strand starting at position 1168 of SEQ ID NO: 1882852
ggcccugucauggaauuaa

SEQ ID NO: 2152251 - RNA, 19 nt, Artificial Sequence
  Description of Artificial Sequence: Synthetic oligonucleotide
  Antisense strand to SEQ ID NO: 2152250
uuaauuccaugacagggcc

SEQ ID NO: 2152252 - RNA, 19 nt, Artificial Sequence
  Description of Artificial Sequence: Synthetic oligonucleotide
  Sense strand starting at position 1212 of SEQ ID NO: 1882852
ggaacugagucccugggua

SEQ ID NO: 2152253 - RNA, 19 nt, Artificial Sequence
  Description of Artificial Sequence: Synthetic oligonucleotide
  Antisense strand to SEQ ID NO: 2152252
uacccagggacucaguucc

SEQ ID NO: 2152254 - RNA, 19 nt, Artificial Sequence
  Description of Artificial Sequence: Synthetic oligonucleotide
  Sense strand starting at position 1409 of SEQ ID NO: 1882852
agaacuucuuccuuaaggu

SEQ ID NO: 2152255 - RNA, 19 nt, Artificial Sequence
  Description of Artificial Sequence: Synthetic oligonucleotide
  Antisense strand to SEQ ID NO: 2152254
accuuaaggaagaaguucu

SEQ ID NO: 2152256 - RNA, 19 nt, Artificial Sequence
  Description of Artificial Sequence: Synthetic oligonucleotide
  Sense strand starting at position 2139 of SEQ ID NO: 1882852
auaggauucccuggaugua

SEQ ID NO: 2152257 - RNA, 19 nt, Artificial Sequence
  Description of Artificial Sequence: Synthetic oligonucleotide
  Antisense strand to SEQ ID NO: 2152256
uacauccagggaauccuau

SEQ ID NO: 2152258 - RNA, 19 nt, Artificial Sequence
  Description of Artificial Sequence: Synthetic oligonucleotide
  Sense strand starting at position 2337 of SEQ ID NO: 1882852
ugagaauuccaagacgcau

SEQ ID NO: 2152259 - RNA, 19 nt, Artificial Sequence
  Description of Artificial Sequence: Synthetic oligonucleotide
  Antisense strand to SEQ ID NO: 2152258
augcgucuuggaauucuca

SEQ ID NO: 2152260 - RNA, 19 nt, Artificial Sequence
  Description of Artificial Sequence: Synthetic oligonucleotide
  Sense strand starting at position 2379 of SEQ ID NO: 1882852
auuauagucuuaguugaga

SEQ ID NO: 2152261 - RNA, 19 nt, Artificial Sequence
  Description of Artificial Sequence: Synthetic oligonucleotide
  Antisense strand to SEQ ID NO: 2152260
ucucaacuaagacuauaau

SEQ ID NO: 2152262 - RNA, 19 nt, Artificial Sequence
  Description of Artificial Sequence: Synthetic oligonucleotide
  Sense strand starting at position 2587 of SEQ ID NO: 1882852
agucuuuagcucuaaugag

SEQ ID NO: 2152263 - RNA, 19 nt, Artificial Sequence
  Description of Artificial Sequence: Synthetic oligonucleotide
  Antisense strand to SEQ ID NO: 2152262
cucauuagagcuaaagacu

SEQ ID NO: 2152264 - RNA, 19 nt, Artificial Sequence
  Description of Artificial Sequence: Synthetic oligonucleotide
  Sense strand starting at position 2732 of SEQ ID NO: 1882852
cuugcuaugggagggaauu

SEQ ID NO: 2152265 - RNA, 19 nt, Artificial Sequence
  Description of Artificial Sequence: Synthetic oligonucleotide
  Antisense strand to SEQ ID NO: 2152264
aauucccucccauagcaag

SEQ ID NO: 2152266 - RNA, 19 nt, Artificial Sequence
  Description of Artificial Sequence: Synthetic oligonucleotide
  Sense strand starting at position 2773 of SEQ ID NO: 1882852
aauagugaucauuagcagu

SEQ ID NO: 2152267 - RNA, 19 nt, Artificial Sequence
  Description of Artificial Sequence: Synthetic oligonucleotide
  Antisense strand to SEQ ID NO: 2152266
acugcuaaugaucacuauu

SEQ ID NO: 2152268 - RNA, 19 nt, Artificial Sequence
  Description of Artificial Sequence: Synthetic oligonucleotide
  Sense strand starting at position 2835 of SEQ ID NO: 1882852
guggaauaaauguauuggu

SEQ ID NO: 2152269 - RNA, 19 nt, Artificial Sequence
  Description of Artificial Sequence: Synthetic oligonucleotide
  Antisense strand to SEQ ID NO: 2152268
accaauacauuuauuccac

SEQ ID NO: 2152270 - RNA, 19 nt, Artificial Sequence
  Description of Artificial Sequence: Synthetic oligonucleotide
  Sense strand starting at position 2850 of SEQ ID NO: 1882852
uggugccuaauuggagaaa

SEQ ID NO: 2152271 - RNA, 19 nt, Artificial Sequence
  Description of Artificial Sequence: Synthetic oligonucleotide
  Antisense strand to SEQ ID NO: 2152270
uuucuccaauuaggcacca

SEQ ID NO: 2152272 - RNA, 19 nt, Artificial Sequence
  Description of Artificial Sequence: Synthetic oligonucleotide
  Sense strand starting at position 2959 of SEQ ID NO: 1882852
cguaaagaucacuggauga

SEQ ID NO: 2152273 - RNA, 19 nt, Artificial Sequence
  Description of Artificial Sequence: Synthetic oligonucleotide
  Antisense strand to SEQ ID NO: 2152272
ucauccagugaucuuuacg

SEQ ID NO: 2152274 - RNA, 19 nt, Artificial Sequence
  Description of Artificial Sequence: Synthetic oligonucleotide
  Sense strand starting at position 2986 of SEQ ID NO: 1882852
gugaccuaagucuauggua

SEQ ID NO: 2152275 - RNA, 19 nt, Artificial Sequence
  Description of Artificial Sequence: Synthetic oligonucleotide
  Antisense strand to SEQ ID NO: 2152274
uaccauagacuuaggucac

SEQ ID NO: 2152276 - RNA, 19 nt, Artificial Sequence
  Description of Artificial Sequence: Synthetic oligonucleotide
  Sense strand starting at position 3004 of SEQ ID NO: 1882852
aguucuuucucagcauuua

SEQ ID NO: 2152277 - RNA, 19 nt, Artificial Sequence
  Description of Artificial Sequence: Synthetic oligonucleotide
  Antisense strand to SEQ ID NO: 2152276
uaaaugcugagaaagaacu

SEQ ID NO: 2152278 - RNA, 19 nt, Artificial Sequence
  Description of Artificial Sequence: Synthetic oligonucleotide
  Sense strand starting at position 3069 of SEQ ID NO: 1882852
gaugcuuauguguagaauu

SEQ ID NO: 2152279 - RNA, 19 nt, Artificial Sequence
  Description of Artificial Sequence: Synthetic oligonucleotide
  Antisense strand to SEQ ID NO: 2152278
aauucuacacauaagcauc

SEQ ID NO: 2152280 - RNA, 19 nt, Artificial Sequence
  Description of Artificial Sequence: Synthetic oligonucleotide
  Sense strand starting at position 3088 of SEQ ID NO: 1882852
auuaguuuggcccagauca

SEQ ID NO: 2152281 - RNA, 19 nt, Artificial Sequence
  Description of Artificial Sequence: Synthetic oligonucleotide
  Antisense strand to SEQ ID NO: 2152280
ugaucugggccaaacuaau

SEQ ID NO: 2152282 - RNA, 19 nt, Artificial Sequence
  Description of Artificial Sequence: Synthetic oligonucleotide
  Sense strand starting at position 3090 of SEQ ID NO: 1882852
uaguuuggcccagaucauc

SEQ ID NO: 2152283 - RNA, 19 nt, Artificial Sequence
  Description of Artificial Sequence: Synthetic oligonucleotide
  Antisense strand to SEQ ID NO: 2152282
gaugaucugggccaaacua

SEQ ID NO: 2152284 - RNA, 19 nt, Artificial Sequence
  Description of Artificial Sequence: Synthetic oligonucleotide
  Sense strand starting at position 3099 of SEQ ID NO: 1882852
ccagaucaucucugagggu

SEQ ID NO: 2152285 - RNA, 19 nt, Artificial Sequence
  Description of Artificial Sequence: Synthetic oligonucleotide
  Antisense strand to SEQ ID NO: 2152284
acccucagagaugaucugg

SEQ ID NO: 2152286 - RNA, 19 nt, Artificial Sequence
  Description of Artificial Sequence: Synthetic oligonucleotide
  Sense strand starting at position 3305 of SEQ ID NO: 1882852
uugggugucuguaccguaa

SEQ ID NO: 2152287 - RNA, 19 nt, Artificial Sequence
  Description of Artificial Sequence: Synthetic oligonucleotide
  Antisense strand to SEQ ID NO: 2152286
uuacgguacagacacccaa

SEQ ID NO: 2152288 - RNA, 19 nt, Artificial Sequence
  Description of Artificial Sequence: Synthetic oligonucleotide
  Sense strand starting at position 3560 of SEQ ID NO: 1882852
aauucuggaccuuguggaa

SEQ ID NO: 2152289 - RNA, 19 nt, Artificial Sequence
  Description of Artificial Sequence: Synthetic oligonucleotide
  Antisense strand to SEQ ID NO: 2152288
uuccacaagguccagaauu

SEQ ID NO: 2152290 - RNA, 19 nt, Artificial Sequence
  Description of Artificial Sequence: Synthetic oligonucleotide
  Sense strand starting at position 3680 of SEQ ID NO: 1882852
ugguauauuagagggugau

SEQ ID NO: 2152291 - RNA, 19 nt, Artificial Sequence
  Description of Artificial Sequence: Synthetic oligonucleotide
  Antisense strand to SEQ ID NO: 2152290
aucacccucuaauauacca

SEQ ID NO: 2152292 - RNA, 19 nt, Artificial Sequence
  Description of Artificial Sequence: Synthetic oligonucleotide
  Sense strand starting at position 3681 of SEQ ID NO: 1882852
gguauauuagagggugaua

SEQ ID NO: 2152293 - RNA, 19 nt, Artificial Sequence
  Description of Artificial Sequence: Synthetic oligonucleotide
  Antisense strand to SEQ ID NO: 2152292
uaucacccucuaauauacc

SEQ ID NO: 2152294 - RNA, 19 nt, Artificial Sequence
  Description of Artificial Sequence: Synthetic oligonucleotide
  Sense strand starting at position 3767 of SEQ ID NO: 1882852
uaaguuuaguggucagaga

SEQ ID NO: 2152295 - RNA, 19 nt, Artificial Sequence
  Description of Artificial Sequence: Synthetic oligonucleotide
  Antisense strand to SEQ ID NO: 2152294
ucucugaccacuaaacuua

SEQ ID NO: 2152296 - RNA, 19 nt, Artificial Sequence
  Description of Artificial Sequence: Synthetic oligonucleotide
  Sense strand starting at position 3768 of SEQ ID NO: 1882852
aaguuuaguggucagagaa

SEQ ID NO: 2152297 - RNA, 19 nt, Artificial Sequence
  Description of Artificial Sequence: Synthetic oligonucleotide
  Antisense strand to SEQ ID NO: 2152296
uucucugaccacuaaacuu

SEQ ID NO: 2152298 - RNA, 19 nt, Artificial Sequence
  Description of Artificial Sequence: Synthetic oligonucleotide
  Sense strand starting at position 3798 of SEQ ID NO: 1882852
gaaggugacacuugauggu

SEQ ID NO: 2152299 - RNA, 19 nt, Artificial Sequence
  Description of Artificial Sequence: Synthetic oligonucleotide
  Antisense strand to SEQ ID NO: 2152298
accaucaagugucaccuuc

SEQ ID NO: 2152300 - RNA, 19 nt, Artificial Sequence
  Description of Artificial Sequence: Synthetic oligonucleotide
  Sense strand starting at position 3831 of SEQ ID NO: 1882852
ugcagauauuuggagaaag

SEQ ID NO: 2152301 - RNA, 19 nt, Artificial Sequence
  Description of Artificial Sequence: Synthetic oligonucleotide
  Antisense strand to SEQ ID NO: 2152300
cuuucuccaaauaucugca

SEQ ID NO: 2152302 - RNA, 19 nt, Artificial Sequence
  Description of Artificial Sequence: Synthetic oligonucleotide
  Sense strand starting at position 3928 of SEQ ID NO: 1882852
aggccaguagagugagaaa

SEQ ID NO: 2152303 - RNA, 19 nt, Artificial Sequence
  Description of Artificial Sequence: Synthetic oligonucleotide
  Antisense strand to SEQ ID NO: 2152302
uuucucacucuacuggccu

SEQ ID NO: 2152304 - RNA, 19 nt, Artificial Sequence
  Description of Artificial Sequence: Synthetic oligonucleotide
  Sense strand starting at position 37 of SEQ ID NO: 1882853
gcguucugccuccugguua

SEQ ID NO: 2152305 - RNA, 19 nt, Artificial Sequence
  Description of Artificial Sequence: Synthetic oligonucleotide
  Antisense strand to SEQ ID NO: 2152304
uaaccaggaggcagaacgc

SEQ ID NO: 2152306 - RNA, 19 nt, Artificial Sequence
  Description of Artificial Sequence: Synthetic oligonucleotide
  Sense strand starting at position 118 of SEQ ID NO: 1882853
ugagucucucuuuaaauag

SEQ ID NO: 2152307 - RNA, 19 nt, Artificial Sequence
  Description of Artificial Sequence: Synthetic oligonucleotide
  Antisense strand to SEQ ID NO: 2152306
cuauuuaaagagagacuca

SEQ ID NO: 2152308 - RNA, 19 nt, Artificial Sequence
  Description of Artificial Sequence: Synthetic oligonucleotide
  Sense strand starting at position 161 of SEQ ID NO: 1882853
ggccauaaacucuacgagu

SEQ ID NO: 2152309 - RNA, 19 nt, Artificial Sequence
  Description of Artificial Sequence: Synthetic oligonucleotide
  Antisense strand to SEQ ID NO: 2152308
acucguagaguuuauggcc

SEQ ID NO: 2152310 - RNA, 19 nt, Artificial Sequence
  Description of Artificial Sequence: Synthetic oligonucleotide
  Sense strand starting at position 163 of SEQ ID NO: 1882853
ccauaaacucuacgaguga

SEQ ID NO: 2152311 - RNA, 19 nt, Artificial Sequence
  Description of Artificial Sequence: Synthetic oligonucleotide
  Antisense strand to SEQ ID NO: 2152310
ucacucguagaguuuaugg

SEQ ID NO: 2152312 - RNA, 19 nt, Artificial Sequence
  Description of Artificial Sequence: Synthetic oligonucleotide
  Sense strand starting at position 167 of SEQ ID NO: 1882853
aaacucuacgagugagauc

SEQ ID NO: 2152313 - RNA, 19 nt, Artificial Sequence
  Description of Artificial Sequence: Synthetic oligonucleotide
  Antisense strand to SEQ ID NO: 2152312
gaucucacucguagaguuu

SEQ ID NO: 2152314 - RNA, 19 nt, Artificial Sequence
  Description of Artificial Sequence: Synthetic oligonucleotide
  Sense strand starting at position 238 of SEQ ID NO: 1882853
uggagcuagccguauuaac

SEQ ID NO: 2152315 - RNA, 19 nt, Artificial Sequence
  Description of Artificial Sequence: Synthetic oligonucleotide
  Antisense strand to SEQ ID NO: 2152314
guuaauacggcuagcucca

SEQ ID NO: 2152316 - RNA, 19 nt, Artificial Sequence
  Description of Artificial Sequence: Synthetic oligonucleotide
  Sense strand starting at position 245 of SEQ ID NO: 1882853
agccguauuaacugaauag

SEQ ID NO: 2152317 - RNA, 19 nt, Artificial Sequence
  Description of Artificial Sequence: Synthetic oligonucleotide
  Antisense strand to SEQ ID NO: 2152316
cuauucaguuaauacggcu

SEQ ID NO: 2152318 - RNA, 19 nt, Artificial Sequence
  Description of Artificial Sequence: Synthetic oligonucleotide
  Sense strand starting at position 289 of SEQ ID NO: 1882853
gagugaauguaacugugua

SEQ ID NO: 2152319 - RNA, 19 nt, Artificial Sequence
  Description of Artificial Sequence: Synthetic oligonucleotide
  Antisense strand to SEQ ID NO: 2152318
uacacaguuacauucacuc

SEQ ID NO: 2152320 - RNA, 19 nt, Artificial Sequence
  Description of Artificial Sequence: Synthetic oligonucleotide
  Sense strand starting at position 293 of SEQ ID NO: 1882853
gaauguaacuguguacauc

SEQ ID NO: 2152321 - RNA, 19 nt, Artificial Sequence
  Description of Artificial Sequence: Synthetic oligonucleotide
  Antisense strand to SEQ ID NO: 2152320
gauguacacaguuacauuc

SEQ ID NO: 2152322 - RNA, 19 nt, Artificial Sequence
  Description of Artificial Sequence: Synthetic oligonucleotide
  Sense strand starting at position 388 of SEQ ID NO: 1882853
uuuagaaguguauacaucu

SEQ ID NO: 2152323 - RNA, 19 nt, Artificial Sequence
  Description of Artificial Sequence: Synthetic oligonucleotide
  Antisense strand to SEQ ID NO: 2152322
agauguauacacuucuaaa

SEQ ID NO: 2152324 - RNA, 19 nt, Artificial Sequence
  Description of Artificial Sequence: Synthetic oligonucleotide
  Sense strand starting at position 506 of SEQ ID NO: 1882853
uggugaaccuccuuaauug

SEQ ID NO: 2152325 - RNA, 19 nt, Artificial Sequence
  Description of Artificial Sequence: Synthetic oligonucleotide
  Antisense strand to SEQ ID NO: 2152324
caauuaaggagguucacca

SEQ ID NO: 2152326 - RNA, 19 nt, Artificial Sequence
  Description of Artificial Sequence: Synthetic oligonucleotide
  Sense strand starting at position 507 of SEQ ID NO: 1882853
ggugaaccuccuuaauugu

SEQ ID NO: 2152327 - RNA, 19 nt, Artificial Sequence
  Description of Artificial Sequence: Synthetic oligonucleotide
  Antisense strand to SEQ ID NO: 2152326
acaauuaaggagguucacc

SEQ ID NO: 2152328 - RNA, 19 nt, Artificial Sequence
  Description of Artificial Sequence: Synthetic oligonucleotide
  Sense strand starting at position 561 of SEQ ID NO: 1882853
acaguuggccuauguagau

SEQ ID NO: 2152329 - RNA, 19 nt, Artificial Sequence
  Description of Artificial Sequence: Synthetic oligonucleotide
  Antisense strand to SEQ ID NO: 2152328
aucuacauaggccaacugu

SEQ ID NO: 2152330 - RNA, 19 nt, Artificial Sequence
  Description of Artificial Sequence: Synthetic oligonucleotide
  Sense strand starting at position 1171 of SEQ ID NO: 1882853
ggguccuaggagugauaua

SEQ ID NO: 2152331 - RNA, 19 nt, Artificial Sequence
  Description of Artificial Sequence: Synthetic oligonucleotide
  Antisense strand to SEQ ID NO: 2152330
uauaucacuccuaggaccc

SEQ ID NO: 2152332 - RNA, 19 nt, Artificial Sequence
  Description of Artificial Sequence: Synthetic oligonucleotide
  Sense strand starting at position 1570 of SEQ ID NO: 1882853
guguuaauauacuuacugu

SEQ ID NO: 2152333 - RNA, 19 nt, Artificial Sequence
  Description of Artificial Sequence: Synthetic oligonucleotide
  Antisense strand to SEQ ID NO: 2152332
acaguaaguauauuaacac

SEQ ID NO: 2152334 - RNA, 19 nt, Artificial Sequence
  Description of Artificial Sequence: Synthetic oligonucleotide
  Sense strand starting at position 1849 of SEQ ID NO: 1882853
uccacaaagguaugugaaa

SEQ ID NO: 2152335 - RNA, 19 nt, Artificial Sequence
  Description of Artificial Sequence: Synthetic oligonucleotide
  Antisense strand to SEQ ID NO: 2152334
uuucacauaccuuugugga

SEQ ID NO: 2152336 - RNA, 19 nt, Artificial Sequence
  Description of Artificial Sequence: Synthetic oligonucleotide
  Sense strand starting at position 2011 of SEQ ID NO: 1882853
ucaguagacccuuauucua

SEQ ID NO: 2152337 - RNA, 19 nt, Artificial Sequence
  Description of Artificial Sequence: Synthetic oligonucleotide
  Antisense strand to SEQ ID NO: 2152336
uagaauaagggucuacuga

SEQ ID NO: 2152338 - RNA, 19 nt, Artificial Sequence
  Description of Artificial Sequence: Synthetic oligonucleotide
  Sense strand starting at position 2013 of SEQ ID NO: 1882853
aguagacccuuauucuaca

SEQ ID NO: 2152339 - RNA, 19 nt, Artificial Sequence
  Description of Artificial Sequence: Synthetic oligonucleotide
  Antisense strand to SEQ ID NO: 2152338
uguagaauaagggucuacu

SEQ ID NO: 2152340 - RNA, 19 nt, Artificial Sequence
  Description of Artificial Sequence: Synthetic oligonucleotide
  Sense strand starting at position 2046 of SEQ ID NO: 1882853
uauacauugugaccuacga

SEQ ID NO: 2152341 - RNA, 19 nt, Artificial Sequence
  Description of Artificial Sequence: Synthetic oligonucleotide
  Antisense strand to SEQ ID NO: 2152340
ucguaggucacaauguaua

SEQ ID NO: 2152342 - RNA, 19 nt, Artificial Sequence
  Description of Artificial Sequence: Synthetic oligonucleotide
  Sense strand starting at position 2083 of SEQ ID NO: 1882853
gauugcucucucgagagac

SEQ ID NO: 2152343 - RNA, 19 nt, Artificial Sequence
  Description of Artificial Sequence: Synthetic oligonucleotide
  Antisense strand to SEQ ID NO: 2152342
gucucucgagagagcaauc

SEQ ID NO: 2152344 - RNA, 19 nt, Artificial Sequence
  Description of Artificial Sequence: Synthetic oligonucleotide
  Sense strand starting at position 2087 of SEQ ID NO: 1882853
gcucucucgagagacaguu

SEQ ID NO: 2152345 - RNA, 19 nt, Artificial Sequence
  Description of Artificial Sequence: Synthetic oligonucleotide
  Antisense strand to SEQ ID NO: 2152344
aacugucucucgagagagc

SEQ ID NO: 2152346 - RNA, 19 nt, Artificial Sequence
  Description of Artificial Sequence: Synthetic oligonucleotide
  Sense strand starting at position 2323 of SEQ ID NO: 1882853
cugaucaggucccucaauu

SEQ ID NO: 2152347 - RNA, 19 nt, Artificial Sequence
  Description of Artificial Sequence: Synthetic oligonucleotide
  Antisense strand to SEQ ID NO: 2152346
aauugagggaccugaucag

SEQ ID NO: 2152348 - RNA, 19 nt, Artificial Sequence
  Description of Artificial Sequence: Synthetic oligonucleotide
  Sense strand starting at position 2680 of SEQ ID NO: 1882853
uuuccaacagauugugaca

SEQ ID NO: 2152349 - RNA, 19 nt, Artificial Sequence
  Description of Artificial Sequence: Synthetic oligonucleotide
  Antisense strand to SEQ ID NO: 2152348
ugucacaaucuguuggaaa

SEQ ID NO: 2152350 - RNA, 19 nt, Artificial Sequence
  Description of Artificial Sequence: Synthetic oligonucleotide
  Sense strand starting at position 2780 of SEQ ID NO: 1882853
gccacuacucacugugaga

SEQ ID NO: 2152351 - RNA, 19 nt, Artificial Sequence
  Description of Artificial Sequence: Synthetic oligonucleotide
  Antisense strand to SEQ ID NO: 2152350
ucucacagugaguaguggc

SEQ ID NO: 2152352 - RNA, 19 nt, Artificial Sequence
  Description of Artificial Sequence: Synthetic oligonucleotide
  Sense strand starting at position 2793 of SEQ ID NO: 1882853
gugagacccuagccuuauu

SEQ ID NO: 2152353 - RNA, 19 nt, Artificial Sequence
  Description of Artificial Sequence: Synthetic oligonucleotide
  Antisense strand to SEQ ID NO: 2152352
aauaaggcuagggucucac

SEQ ID NO: 2152354 - RNA, 19 nt, Artificial Sequence
  Description of Artificial Sequence: Synthetic oligonucleotide
  Sense strand starting at position 2833 of SEQ ID NO: 1882853
cguccucaucugcaaauga

SEQ ID NO: 2152355 - RNA, 19 nt, Artificial Sequence
  Description of Artificial Sequence: Synthetic oligonucleotide
  Antisense strand to SEQ ID NO: 2152354
ucauuugcagaugaggacg

SEQ ID NO: 2152356 - RNA, 19 nt, Artificial Sequence
  Description of Artificial Sequence: Synthetic oligonucleotide
  Sense strand starting at position 2938 of SEQ ID NO: 1882853
ucaaauaagcccugugaag

SEQ ID NO: 2152357 - RNA, 19 nt, Artificial Sequence
  Description of Artificial Sequence: Synthetic oligonucleotide
  Antisense strand to SEQ ID NO: 2152356
cuucacagggcuuauuuga

SEQ ID NO: 2152358 - RNA, 19 nt, Artificial Sequence
  Description of Artificial Sequence: Synthetic oligonucleotide
  Sense strand starting at position 2940 of SEQ ID NO: 1882853
aaauaagcccugugaagua

SEQ ID NO: 2152359 - RNA, 19 nt, Artificial Sequence
  Description of Artificial Sequence: Synthetic oligonucleotide
  Antisense strand to SEQ ID NO: 2152358
uacuucacagggcuuauuu

SEQ ID NO: 2152360 - RNA, 19 nt, Artificial Sequence
  Description of Artificial Sequence: Synthetic oligonucleotide
  Sense strand starting at position 2952 of SEQ ID NO: 1882853
ugaaguaagcuguauuaau

SEQ ID NO: 2152361 - RNA, 19 nt, Artificial Sequence
  Description of Artificial Sequence: Synthetic oligonucleotide
  Antisense strand to SEQ ID NO: 2152360
auuaauacagcuuacuuca

SEQ ID NO: 2152362 - RNA, 19 nt, Artificial Sequence
  Description of Artificial Sequence: Synthetic oligonucleotide
  Sense strand starting at position 3077 of SEQ ID NO: 1882853
augucagugucacuggaau

SEQ ID NO: 2152363 - RNA, 19 nt, Artificial Sequence
  Description of Artificial Sequence: Synthetic oligonucleotide
  Antisense strand to SEQ ID NO: 2152362
auuccagugacacugacau

SEQ ID NO: 2152364 - RNA, 19 nt, Artificial Sequence
  Description of Artificial Sequence: Synthetic oligonucleotide
  Sense strand starting at position 3079 of SEQ ID NO: 1882853
gucagugucacuggaauau

SEQ ID NO: 2152365 - RNA, 19 nt, Artificial Sequence
  Description of Artificial Sequence: Synthetic oligonucleotide
  Antisense strand to SEQ ID NO: 2152364
auauuccagugacacugac

SEQ ID NO: 2152366 - RNA, 19 nt, Artificial Sequence
  Description of Artificial Sequence: Synthetic oligonucleotide
  Sense strand starting at position 3083 of SEQ ID NO: 1882853
gugucacuggaauaucaua

SEQ ID NO: 2152367 - RNA, 19 nt, Artificial Sequence
  Description of Artificial Sequence: Synthetic oligonucleotide
  Antisense strand to SEQ ID NO: 2152366
uaugauauuccagugacac

SEQ ID NO: 2152368 - RNA, 19 nt, Artificial Sequence
  Description of Artificial Sequence: Synthetic oligonucleotide
  Sense strand starting at position 3136 of SEQ ID NO: 1882853
ccucuaagcuccuuagagu

SEQ ID NO: 2152369 - RNA, 19 nt, Artificial Sequence
  Description of Artificial Sequence: Synthetic oligonucleotide
  Antisense strand to SEQ ID NO: 2152368
acucuaaggagcuuagagg

SEQ ID NO: 2152370 - RNA, 19 nt, Artificial Sequence
  Description of Artificial Sequence: Synthetic oligonucleotide
  Sense strand starting at position 3137 of SEQ ID NO: 1882853
cucuaagcuccuuagagua

SEQ ID NO: 2152371 - RNA, 19 nt, Artificial Sequence
  Description of Artificial Sequence: Synthetic oligonucleotide
  Antisense strand to SEQ ID NO: 2152370
uacucuaaggagcuuagag

SEQ ID NO: 2152372 - RNA, 19 nt, Artificial Sequence
  Description of Artificial Sequence: Synthetic oligonucleotide
  Sense strand starting at position 3145 of SEQ ID NO: 1882853
uccuuagaguagucacacu

SEQ ID NO: 2152373 - RNA, 19 nt, Artificial Sequence
  Description of Artificial Sequence: Synthetic oligonucleotide
  Antisense strand to SEQ ID NO: 2152372
agugugacuacucuaagga

SEQ ID NO: 2152374 - RNA, 19 nt, Artificial Sequence
  Description of Artificial Sequence: Synthetic oligonucleotide
  Sense strand starting at position 3325 of SEQ ID NO: 1882853
uuacuuaaggccuagaguu

SEQ ID NO: 2152375 - RNA, 19 nt, Artificial Sequence
  Description of Artificial Sequence: Synthetic oligonucleotide
  Antisense strand to SEQ ID NO: 2152374
aacucuaggccuuaaguaa

SEQ ID NO: 2152376 - RNA, 19 nt, Artificial Sequence
  Description of Artificial Sequence: Synthetic oligonucleotide
  Sense strand starting at position 3592 of SEQ ID NO: 1882853
gaauuugccugucaugaaa

SEQ ID NO: 2152377 - RNA, 19 nt, Artificial Sequence
  Description of Artificial Sequence: Synthetic oligonucleotide
  Antisense strand to SEQ ID NO: 2152376
uuucaugacaggcaaauuc

SEQ ID NO: 2152378 - RNA, 19 nt, Artificial Sequence
  Description of Artificial Sequence: Synthetic oligonucleotide
  Sense strand starting at position 3672 of SEQ ID NO: 1882853
augcaugacuguuuauuga

SEQ ID NO: 2152379 - RNA, 19 nt, Artificial Sequence
  Description of Artificial Sequence: Synthetic oligonucleotide
  Antisense strand to SEQ ID NO: 2152378
ucaauaaacagucaugcau

SEQ ID NO: 2152380 - RNA, 19 nt, Artificial Sequence
  Description of Artificial Sequence: Synthetic oligonucleotide
  Sense strand starting at position 3675 of SEQ ID NO: 1882853
caugacuguuuauugaaag

SEQ ID NO: 2152381 - RNA, 19 nt, Artificial Sequence
  Description of Artificial Sequence: Synthetic oligonucleotide
  Antisense strand to SEQ ID NO: 2152380
cuuucaauaaacagucaug

SEQ ID NO: 2152382 - RNA, 19 nt, Artificial Sequence
  Description of Artificial Sequence: Synthetic oligonucleotide
  Sense strand starting at position 3706 of SEQ ID NO: 1882853
ggaggcccuuaauucuaua

SEQ ID NO: 2152383 - RNA, 19 nt, Artificial Sequence
  Description of Artificial Sequence: Synthetic oligonucleotide
  Antisense strand to SEQ ID NO: 2152382
uauagaauuaagggccucc

SEQ ID NO: 2152384 - RNA, 19 nt, Artificial Sequence
  Description of Artificial Sequence: Synthetic oligonucleotide
  Sense strand starting at position 384 of SEQ ID NO: 1882854
agcaaagaauaugucuaaa

SEQ ID NO: 2152385 - RNA, 19 nt, Artificial Sequence
  Description of Artificial Sequence: Synthetic oligonucleotide
  Antisense strand to SEQ ID NO: 2152384
uuuagacauauucuuugcu

SEQ ID NO: 2152386 - RNA, 19 nt, Artificial Sequence
  Description of Artificial Sequence: Synthetic oligonucleotide
  Sense strand starting at position 429 of SEQ ID NO: 1882854
uacagugagcacggaauaa

SEQ ID NO: 2152387 - RNA, 19 nt, Artificial Sequence
  Description of Artificial Sequence: Synthetic oligonucleotide
  Antisense strand to SEQ ID NO: 2152386
uuauuccgugcucacugua

SEQ ID NO: 2152388 - RNA, 19 nt, Artificial Sequence
  Description of Artificial Sequence: Synthetic oligonucleotide
  Sense strand starting at position 642 of SEQ ID NO: 1882854
ugaaguagcggugaguuga

SEQ ID NO: 2152389 - RNA, 19 nt, Artificial Sequence
  Description of Artificial Sequence: Synthetic oligonucleotide
  Antisense strand to SEQ ID NO: 2152388
ucaacucaccgcuacuuca

SEQ ID NO: 2152390 - RNA, 19 nt, Artificial Sequence
  Description of Artificial Sequence: Synthetic oligonucleotide
  Sense strand starting at position 911 of SEQ ID NO: 1882854
ugcuuuagggcagaaucua

SEQ ID NO: 2152391 - RNA, 19 nt, Artificial Sequence
  Description of Artificial Sequence: Synthetic oligonucleotide
  Antisense strand to SEQ ID NO: 2152390
uagauucugcccuaaagca

SEQ ID NO: 2152392 - RNA, 19 nt, Artificial Sequence
  Description of Artificial Sequence: Synthetic oligonucleotide
  Sense strand starting at position 1117 of SEQ ID NO: 1882854
acaaucguccucuacaaga

SEQ ID NO: 2152393 - RNA, 19 nt, Artificial Sequence
  Description of Artificial Sequence: Synthetic oligonucleotide
  Antisense strand to SEQ ID NO: 2152392
ucuuguagaggacgauugu

SEQ ID NO: 2152394 - RNA, 19 nt, Artificial Sequence
  Description of Artificial Sequence: Synthetic oligonucleotide
  Sense strand starting at position 1218 of SEQ ID NO: 1882854
uggcaugccagugauuacu

SEQ ID NO: 2152395 - RNA, 19 nt, Artificial Sequence
  Description of Artificial Sequence: Synthetic oligonucleotide
  Antisense strand to SEQ ID NO: 2152394
aguaaucacuggcaugcca

SEQ ID NO: 2152396 - RNA, 19 nt, Artificial Sequence
  Description of Artificial Sequence: Synthetic oligonucleotide
  Sense strand starting at position 1226 of SEQ ID NO: 1882854
cagugauuacuggacguuu

SEQ ID NO: 2152397 - RNA, 19 nt, Artificial Sequence
  Description of Artificial Sequence: Synthetic oligonucleotide
  Antisense strand to SEQ ID NO: 2152396
aaacguccaguaaucacug

SEQ ID NO: 2152398 - RNA, 19 nt, Artificial Sequence
  Description of Artificial Sequence: Synthetic oligonucleotide
  Sense strand starting at position 1407 of SEQ ID NO: 1882854
caauacucggcagagcauu

SEQ ID NO: 2152399 - RNA, 19 nt, Artificial Sequence
  Description of Artificial Sequence: Synthetic oligonucleotide
  Antisense strand to SEQ ID NO: 2152398
aaugcucugccgaguauug

SEQ ID NO: 2152400 - RNA, 19 nt, Artificial Sequence
  Description of Artificial Sequence: Synthetic oligonucleotide
  Sense strand starting at position 1413 of SEQ ID NO: 1882854
ucggcagagcauugagaau

SEQ ID NO: 2152401 - RNA, 19 nt, Artificial Sequence
  Description of Artificial Sequence: Synthetic oligonucleotide
  Antisense strand to SEQ ID NO: 2152400
auucucaaugcucugccga

SEQ ID NO: 2152402 - RNA, 19 nt, Artificial Sequence
  Description of Artificial Sequence: Synthetic oligonucleotide
  Sense strand starting at position 1441 of SEQ ID NO: 1882854
ugaucucagccucagaagu

SEQ ID NO: 2152403 - RNA, 19 nt, Artificial Sequence
  Description of Artificial Sequence: Synthetic oligonucleotide
  Antisense strand to SEQ ID NO: 2152402
acuucugaggcugagauca

SEQ ID NO: 2152404 - RNA, 19 nt, Artificial Sequence
  Description of Artificial Sequence: Synthetic oligonucleotide
  Sense strand starting at position 1606 of SEQ ID NO: 1882854
ugaguaauaugucccggaa

SEQ ID NO: 2152405 - RNA, 19 nt, Artificial Sequence
  Description of Artificial Sequence: Synthetic oligonucleotide
  Antisense strand to SEQ ID NO: 2152404
uuccgggacauauuacuca

SEQ ID NO: 2152406 - RNA, 19 nt, Artificial Sequence
  Description of Artificial Sequence: Synthetic oligonucleotide
  Sense strand starting at position 1610 of SEQ ID NO: 1882854
uaauaugucccggaaagcu

SEQ ID NO: 2152407 - RNA, 19 nt, Artificial Sequence
  Description of Artificial Sequence: Synthetic oligonucleotide
  Antisense strand to SEQ ID NO: 2152406
agcuuuccgggacauauua

SEQ ID NO: 2152408 - RNA, 19 nt, Artificial Sequence
  Description of Artificial Sequence: Synthetic oligonucleotide
  Sense strand starting at position 1646 of SEQ ID NO: 1882854
cgaaaugugcccucgugca

SEQ ID NO: 2152409 - RNA, 19 nt, Artificial Sequence
  Description of Artificial Sequence: Synthetic oligonucleotide
  Antisense strand to SEQ ID NO: 2152408
ugcacgagggcacauuucg

SEQ ID NO: 2152410 - RNA, 19 nt, Artificial Sequence
  Description of Artificial Sequence: Synthetic oligonucleotide
  Sense strand starting at position 2213 of SEQ ID NO: 1882854
cuaggaggucucggaaacu

SEQ ID NO: 2152411 - RNA, 19 nt, Artificial Sequence
  Description of Artificial Sequence: Synthetic oligonucleotide
  Antisense strand to SEQ ID NO: 2152410
aguuuccgagaccuccuag

SEQ ID NO: 2152412 - RNA, 19 nt, Artificial Sequence
  Description of Artificial Sequence: Synthetic oligonucleotide
  Sense strand starting at position 2494 of SEQ ID NO: 1882854
gccaguuugcugucgcacu

SEQ ID NO: 2152413 - RNA, 19 nt, Artificial Sequence
  Description of Artificial Sequence: Synthetic oligonucleotide
  Antisense strand to SEQ ID NO: 2152412
agugcgacagcaaacuggc

SEQ ID NO: 2152414 - RNA, 19 nt, Artificial Sequence
  Description of Artificial Sequence: Synthetic oligonucleotide
  Sense strand starting at position 2499 of SEQ ID NO: 1882854
uuugcugucgcacuugaua

SEQ ID NO: 2152415 - RNA, 19 nt, Artificial Sequence
  Description of Artificial Sequence: Synthetic oligonucleotide
  Antisense strand to SEQ ID NO: 2152414
uaucaagugcgacagcaaa

SEQ ID NO: 2152416 - RNA, 19 nt, Artificial Sequence
  Description of Artificial Sequence: Synthetic oligonucleotide
  Sense strand starting at position 2558 of SEQ ID NO: 1882854
gcgaauaguucccuaacaa

SEQ ID NO: 2152417 - RNA, 19 nt, Artificial Sequence
  Description of Artificial Sequence: Synthetic oligonucleotide
  Antisense strand to SEQ ID NO: 2152416
uuguuagggaacuauucgc

SEQ ID NO: 2152418 - RNA, 19 nt, Artificial Sequence
  Description of Artificial Sequence: Synthetic oligonucleotide
  Sense strand starting at position 2559 of SEQ ID NO: 1882854
cgaauaguucccuaacaac

SEQ ID NO: 2152419 - RNA, 19 nt, Artificial Sequence
  Description of Artificial Sequence: Synthetic oligonucleotide
  Antisense strand to SEQ ID NO: 2152418
guuguuagggaacuauucg

SEQ ID NO: 2152420 - RNA, 19 nt, Artificial Sequence
  Description of Artificial Sequence: Synthetic oligonucleotide
  Sense strand starting at position 2824 of SEQ ID NO: 1882854
guuauauucuugcugggag

SEQ ID NO: 2152421 - RNA, 19 nt, Artificial Sequence
  Description of Artificial Sequence: Synthetic oligonucleotide
  Antisense strand to SEQ ID NO: 2152420
cucccagcaagaauauaac

SEQ ID NO: 2152422 - RNA, 19 nt, Artificial Sequence
  Description of Artificial Sequence: Synthetic oligonucleotide
  Sense strand starting at position 2827 of SEQ ID NO: 1882854
auauucuugcugggaggga

SEQ ID NO: 2152423 - RNA, 19 nt, Artificial Sequence
  Description of Artificial Sequence: Synthetic oligonucleotide
  Antisense strand to SEQ ID NO: 2152422
ucccucccagcaagaauau

SEQ ID NO: 2152424 - RNA, 19 nt, Artificial Sequence
  Description of Artificial Sequence: Synthetic oligonucleotide
  Sense strand starting at position 2880 of SEQ ID NO: 1882854
cgugcauggcuggagaaau

SEQ ID NO: 2152425 - RNA, 19 nt, Artificial Sequence
  Description of Artificial Sequence: Synthetic oligonucleotide
  Antisense strand to SEQ ID NO: 2152424
auuucuccagccaugcacg

SEQ ID NO: 2152426 - RNA, 19 nt, Artificial Sequence
  Description of Artificial Sequence: Synthetic oligonucleotide
  Sense strand starting at position 2926 of SEQ ID NO: 1882854
cucgaauuucuacgcaaga

SEQ ID NO: 2152427 - RNA, 19 nt, Artificial Sequence
  Description of Artificial Sequence: Synthetic oligonucleotide
  Antisense strand to SEQ ID NO: 2152426
ucuugcguagaaauucgag

SEQ ID NO: 2152428 - RNA, 19 nt, Artificial Sequence
  Description of Artificial Sequence: Synthetic oligonucleotide
  Sense strand starting at position 2996 of SEQ ID NO: 1882854
ugguguagucuggaguuua

SEQ ID NO: 2152429 - RNA, 19 nt, Artificial Sequence
  Description of Artificial Sequence: Synthetic oligonucleotide
  Antisense strand to SEQ ID NO: 2152428
uaaacuccagacuacacca

SEQ ID NO: 2152430 - RNA, 19 nt, Artificial Sequence
  Description of Artificial Sequence: Synthetic oligonucleotide
  Sense strand starting at position 3007 of SEQ ID NO: 1882854
ggaguuuaggaacgucuua

SEQ ID NO: 2152431 - RNA, 19 nt, Artificial Sequence
  Description of Artificial Sequence: Synthetic oligonucleotide
  Antisense strand to SEQ ID NO: 2152430
uaagacguuccuaaacucc

SEQ ID NO: 2152432 - RNA, 19 nt, Artificial Sequence
  Description of Artificial Sequence: Synthetic oligonucleotide
  Sense strand starting at position 3018 of SEQ ID NO: 1882854
acgucuuaccuaggaaagu

SEQ ID NO: 2152433 - RNA, 19 nt, Artificial Sequence
  Description of Artificial Sequence: Synthetic oligonucleotide
  Antisense strand to SEQ ID NO: 2152432
acuuuccuagguaagacgu

SEQ ID NO: 2152434 - RNA, 19 nt, Artificial Sequence
  Description of Artificial Sequence: Synthetic oligonucleotide
  Sense strand starting at position 3033 of SEQ ID NO: 1882854
aagugaugacugugcuaga

SEQ ID NO: 2152435 - RNA, 19 nt, Artificial Sequence
  Description of Artificial Sequence: Synthetic oligonucleotide
  Antisense strand to SEQ ID NO: 2152434
ucuagcacagucaucacuu

SEQ ID NO: 2152436 - RNA, 19 nt, Artificial Sequence
  Description of Artificial Sequence: Synthetic oligonucleotide
  Sense strand starting at position 3034 of SEQ ID NO: 1882854
agugaugacugugcuagaa

SEQ ID NO: 2152437 - RNA, 19 nt, Artificial Sequence
  Description of Artificial Sequence: Synthetic oligonucleotide
  Antisense strand to SEQ ID NO: 2152436
uucuagcacagucaucacu

SEQ ID NO: 2152438 - RNA, 19 nt, Artificial Sequence
  Description of Artificial Sequence: Synthetic oligonucleotide
  Sense strand starting at position 3132 of SEQ ID NO: 1882854
ggcuuuaguuucuuaauaa

SEQ ID NO: 2152439 - RNA, 19 nt, Artificial Sequence
  Description of Artificial Sequence: Synthetic oligonucleotide
  Antisense strand to SEQ ID NO: 2152438
uuauuaagaaacuaaagcc

SEQ ID NO: 2152440 - RNA, 19 nt, Artificial Sequence
  Description of Artificial Sequence: Synthetic oligonucleotide
  Sense strand starting at position 3178 of SEQ ID NO: 1882854
ggauauagugaacguccaa

SEQ ID NO: 2152441 - RNA, 19 nt, Artificial Sequence
  Description of Artificial Sequence: Synthetic oligonucleotide
  Antisense strand to SEQ ID NO: 2152440
uuggacguucacuauaucc

SEQ ID NO: 2152442 - RNA, 19 nt, Artificial Sequence
  Description of Artificial Sequence: Synthetic oligonucleotide
  Sense strand starting at position 3204 of SEQ ID NO: 1882854
ugucgaauuagugaguuaa

SEQ ID NO: 2152443 - RNA, 19 nt, Artificial Sequence
  Description of Artificial Sequence: Synthetic oligonucleotide
  Antisense strand to SEQ ID NO: 2152442
uuaacucacuaauucgaca

SEQ ID NO: 2152444 - RNA, 19 nt, Artificial Sequence
  Description of Artificial Sequence: Synthetic oligonucleotide
  Sense strand starting at position 3206 of SEQ ID NO: 1882854
ucgaauuagugaguuaaua

SEQ ID NO: 2152445 - RNA, 19 nt, Artificial Sequence
  Description of Artificial Sequence: Synthetic oligonucleotide
  Antisense strand to SEQ ID NO: 2152444
uauuaacucacuaauucga

SEQ ID NO: 2152446 - RNA, 19 nt, Artificial Sequence
  Description of Artificial Sequence: Synthetic oligonucleotide
  Sense strand starting at position 3228 of SEQ ID NO: 1882854
gacucuucggaggacuagu

SEQ ID NO: 2152447 - RNA, 19 nt, Artificial Sequence
  Description of Artificial Sequence: Synthetic oligonucleotide
  Antisense strand to SEQ ID NO: 2152446
acuaguccuccgaagaguc

SEQ ID NO: 2152448 - RNA, 19 nt, Artificial Sequence
  Description of Artificial Sequence: Synthetic oligonucleotide
  Sense strand starting at position 3245 of SEQ ID NO: 1882854
guggaaaucugauuggcag

SEQ ID NO: 2152449 - RNA, 19 nt, Artificial Sequence
  Description of Artificial Sequence: Synthetic oligonucleotide
  Antisense strand to SEQ ID NO: 2152448
cugccaaucagauuuccac

SEQ ID NO: 2152450 - RNA, 19 nt, Artificial Sequence
  Description of Artificial Sequence: Synthetic oligonucleotide
  Sense strand starting at position 3246 of SEQ ID NO: 1882854
uggaaaucugauuggcaga

SEQ ID NO: 2152451 - RNA, 19 nt, Artificial Sequence
  Description of Artificial Sequence: Synthetic oligonucleotide
  Antisense strand to SEQ ID NO: 2152450
ucugccaaucagauuucca

SEQ ID NO: 2152452 - RNA, 19 nt, Artificial Sequence
  Description of Artificial Sequence: Synthetic oligonucleotide
  Sense strand starting at position 3247 of SEQ ID NO: 1882854
ggaaaucugauuggcagag

SEQ ID NO: 2152453 - RNA, 19 nt, Artificial Sequence
  Description of Artificial Sequence: Synthetic oligonucleotide
  Antisense strand to SEQ ID NO: 2152452
cucugccaaucagauuucc

SEQ ID NO: 2152454 - RNA, 19 nt, Artificial Sequence
  Description of Artificial Sequence: Synthetic oligonucleotide
  Sense strand starting at position 3301 of SEQ ID NO: 1882854
aggagaaacuuacacagaa

SEQ ID NO: 2152455 - RNA, 19 nt, Artificial Sequence
  Description of Artificial Sequence: Synthetic oligonucleotide
  Antisense strand to SEQ ID NO: 2152454
uucuguguaaguuucuccu

SEQ ID NO: 2152456 - RNA, 19 nt, Artificial Sequence
  Description of Artificial Sequence: Synthetic oligonucleotide
  Sense strand starting at position 3328 of SEQ ID NO: 1882854
guggauaagacuugccaga

SEQ ID NO: 2152457 - RNA, 19 nt, Artificial Sequence
  Description of Artificial Sequence: Synthetic oligonucleotide
  Antisense strand to SEQ ID NO: 2152456
ucuggcaagucuuauccac

SEQ ID NO: 2152458 - RNA, 19 nt, Artificial Sequence
  Description of Artificial Sequence: Synthetic oligonucleotide
  Sense strand starting at position 3330 of SEQ ID NO: 1882854
ggauaagacuugccagaau

SEQ ID NO: 2152459 - RNA, 19 nt, Artificial Sequence
  Description of Artificial Sequence: Synthetic oligonucleotide
  Antisense strand to SEQ ID NO: 2152458
auucuggcaagucuuaucc

SEQ ID NO: 2152460 - RNA, 19 nt, Artificial Sequence
  Description of Artificial Sequence: Synthetic oligonucleotide
  Sense strand starting at position 3461 of SEQ ID NO: 1882854
gaaagugggucaguaaagu

SEQ ID NO: 2152461 - RNA, 19 nt, Artificial Sequence
  Description of Artificial Sequence: Synthetic oligonucleotide
  Antisense strand to SEQ ID NO: 2152460
acuuuacugacccacuuuc

SEQ ID NO: 2152462 - RNA, 19 nt, Artificial Sequence
  Description of Artificial Sequence: Synthetic oligonucleotide
  Sense strand starting at position 3883 of SEQ ID NO: 1882854
guacuacuauuguucuaaa

SEQ ID NO: 2152463 - RNA, 19 nt, Artificial Sequence
  Description of Artificial Sequence: Synthetic oligonucleotide
  Antisense strand to SEQ ID NO: 2152462
uuuagaacaauaguaguac

SEQ ID NO: 2152464 - RNA, 19 nt, Artificial Sequence
  Description of Artificial Sequence: Synthetic oligonucleotide
  Sense strand starting at position 16 of SEQ ID NO: 1882855
ggcucuauuuacucagcca

SEQ ID NO: 2152465 - RNA, 19 nt, Artificial Sequence
  Description of Artificial Sequence: Synthetic oligonucleotide
  Antisense strand to SEQ ID NO: 2152464
uggcugaguaaauagagcc

SEQ ID NO: 2152466 - RNA, 19 nt, Artificial Sequence
  Description of Artificial Sequence: Synthetic oligonucleotide
  Sense strand starting at position 206 of SEQ ID NO: 1882855
gggagaaaggccuguuguu

SEQ ID NO: 2152467 - RNA, 19 nt, Artificial Sequence
  Description of Artificial Sequence: Synthetic oligonucleotide
  Antisense strand to SEQ ID NO: 2152466
aacaacaggccuuucuccc

SEQ ID NO: 2152468 - RNA, 19 nt, Artificial Sequence
  Description of Artificial Sequence: Synthetic oligonucleotide
  Sense strand starting at position 219 of SEQ ID NO: 1882855
guuguucugccuuggugau

SEQ ID NO: 2152469 - RNA, 19 nt, Artificial Sequence
  Description of Artificial Sequence: Synthetic oligonucleotide
  Antisense strand to SEQ ID NO: 2152468
aucaccaaggcagaacaac

SEQ ID NO: 2152470 - RNA, 19 nt, Artificial Sequence
  Description of Artificial Sequence: Synthetic oligonucleotide
  Sense strand starting at position 220 of SEQ ID NO: 1882855
uuguucugccuuggugauu

SEQ ID NO: 2152471 - RNA, 19 nt, Artificial Sequence
  Description of Artificial Sequence: Synthetic oligonucleotide
  Antisense strand to SEQ ID NO: 2152470
aaucaccaaggcagaacaa

SEQ ID NO: 2152472 - RNA, 19 nt, Artificial Sequence
  Description of Artificial Sequence: Synthetic oligonucleotide
  Sense strand starting at position 221 of SEQ ID NO: 1882855
uguucugccuuggugauuu

SEQ ID NO: 2152473 - RNA, 19 nt, Artificial Sequence
  Description of Artificial Sequence: Synthetic oligonucleotide
  Antisense strand to SEQ ID NO: 2152472
aaaucaccaaggcagaaca

SEQ ID NO: 2152474 - RNA, 19 nt, Artificial Sequence
  Description of Artificial Sequence: Synthetic oligonucleotide
  Sense strand starting at position 225 of SEQ ID NO: 1882855
cugccuuggugauuucuaa

SEQ ID NO: 2152475 - RNA, 19 nt, Artificial Sequence
  Description of Artificial Sequence: Synthetic oligonucleotide
  Antisense strand to SEQ ID NO: 2152474
uuagaaaucaccaaggcag

SEQ ID NO: 2152476 - RNA, 19 nt, Artificial Sequence
  Description of Artificial Sequence: Synthetic oligonucleotide
  Sense strand starting at position 256 of SEQ ID NO: 1882855
cugacaucuacugguguga

SEQ ID NO: 2152477 - RNA, 19 nt, Artificial Sequence
  Description of Artificial Sequence: Synthetic oligonucleotide
  Antisense strand to SEQ ID NO: 2152476
ucacaccaguagaugucag

SEQ ID NO: 2152478 - RNA, 19 nt, Artificial Sequence
  Description of Artificial Sequence: Synthetic oligonucleotide
  Sense strand starting at position 258 of SEQ ID NO: 1882855
gacaucuacuggugugacu

SEQ ID NO: 2152479 - RNA, 19 nt, Artificial Sequence
  Description of Artificial Sequence: Synthetic oligonucleotide
  Antisense strand to SEQ ID NO: 2152478
agucacaccaguagauguc

SEQ ID NO: 2152480 - RNA, 19 nt, Artificial Sequence
  Description of Artificial Sequence: Synthetic oligonucleotide
  Sense strand starting at position 451 of SEQ ID NO: 1882855
uauuguguauugcuagaaa

SEQ ID NO: 2152481 - RNA, 19 nt, Artificial Sequence
  Description of Artificial Sequence: Synthetic oligonucleotide
  Antisense strand to SEQ ID NO: 2152480
uuucuagcaauacacaaua

SEQ ID NO: 2152482 - RNA, 19 nt, Artificial Sequence
  Description of Artificial Sequence: Synthetic oligonucleotide
  Sense strand starting at position 454 of SEQ ID NO: 1882855
uguguauugcuagaaauaa

SEQ ID NO: 2152483 - RNA, 19 nt, Artificial Sequence
  Description of Artificial Sequence: Synthetic oligonucleotide
  Antisense strand to SEQ ID NO: 2152482
uuauuucuagcaauacaca

SEQ ID NO: 2152484 - RNA, 19 nt, Artificial Sequence
  Description of Artificial Sequence: Synthetic oligonucleotide
  Sense strand starting at position 500 of SEQ ID NO: 1882855
gggaacaguugagguauaa

SEQ ID NO: 2152485 - RNA, 19 nt, Artificial Sequence
  Description of Artificial Sequence: Synthetic oligonucleotide
  Antisense strand to SEQ ID NO: 2152484
uuauaccucaacuguuccc

SEQ ID NO: 2152486 - RNA, 19 nt, Artificial Sequence
  Description of Artificial Sequence: Synthetic oligonucleotide
  Sense strand starting at position 520 of SEQ ID NO: 1882855
gggagugcuccuggaaaug

SEQ ID NO: 2152487 - RNA, 19 nt, Artificial Sequence
  Description of Artificial Sequence: Synthetic oligonucleotide
  Antisense strand to SEQ ID NO: 2152486
cauuuccaggagcacuccc

SEQ ID NO: 2152488 - RNA, 19 nt, Artificial Sequence
  Description of Artificial Sequence: Synthetic oligonucleotide
  Sense strand starting at position 596 of SEQ ID NO: 1882855
gaggucaagccacauuacu

SEQ ID NO: 2152489 - RNA, 19 nt, Artificial Sequence
  Description of Artificial Sequence: Synthetic oligonucleotide
  Antisense strand to SEQ ID NO: 2152488
aguaauguggcuugaccuc

SEQ ID NO: 2152490 - RNA, 19 nt, Artificial Sequence
  Description of Artificial Sequence: Synthetic oligonucleotide
  Sense strand starting at position 708 of SEQ ID NO: 1882855
aagcacucaugguguauga

SEQ ID NO: 2152491 - RNA, 19 nt, Artificial Sequence
  Description of Artificial Sequence: Synthetic oligonucleotide
  Antisense strand to SEQ ID NO: 2152490
ucauacaccaugagugcuu

SEQ ID NO: 2152492 - RNA, 19 nt, Artificial Sequence
  Description of Artificial Sequence: Synthetic oligonucleotide
  Sense strand starting at position 710 of SEQ ID NO: 1882855
gcacucaugguguaugaca

SEQ ID NO: 2152493 - RNA, 19 nt, Artificial Sequence
  Description of Artificial Sequence: Synthetic oligonucleotide
  Antisense strand to SEQ ID NO: 2152492
ugucauacaccaugagugc

SEQ ID NO: 2152494 - RNA, 19 nt, Artificial Sequence
  Description of Artificial Sequence: Synthetic oligonucleotide
  Sense strand starting at position 712 of SEQ ID NO: 1882855
acucaugguguaugacauu

SEQ ID NO: 2152495 - RNA, 19 nt, Artificial Sequence
  Description of Artificial Sequence: Synthetic oligonucleotide
  Antisense strand to SEQ ID NO: 2152494
aaugucauacaccaugagu

SEQ ID NO: 2152496 - RNA, 19 nt, Artificial Sequence
  Description of Artificial Sequence: Synthetic oligonucleotide
  Sense strand starting at position 768 of SEQ ID NO: 1882855
auggaccagugaucugaau

SEQ ID NO: 2152497 - RNA, 19 nt, Artificial Sequence
  Description of Artificial Sequence: Synthetic oligonucleotide
  Antisense strand to SEQ ID NO: 2152496
auucagaucacugguccau

SEQ ID NO: 2152498 - RNA, 19 nt, Artificial Sequence
  Description of Artificial Sequence: Synthetic oligonucleotide
  Sense strand starting at position 774 of SEQ ID NO: 1882855
cagugaucugaauguguua

SEQ ID NO: 2152499 - RNA, 19 nt, Artificial Sequence
  Description of Artificial Sequence: Synthetic oligonucleotide
  Antisense strand to SEQ ID NO: 2152498
uaacacauucagaucacug

SEQ ID NO: 2152500 - RNA, 19 nt, Artificial Sequence
  Description of Artificial Sequence: Synthetic oligonucleotide
  Sense strand starting at position 776 of SEQ ID NO: 1882855
gugaucugaauguguuaug

SEQ ID NO: 2152501 - RNA, 19 nt, Artificial Sequence
  Description of Artificial Sequence: Synthetic oligonucleotide
  Antisense strand to SEQ ID NO: 2152500
cauaacacauucagaucac

SEQ ID NO: 2152502 - RNA, 19 nt, Artificial Sequence
  Description of Artificial Sequence: Synthetic oligonucleotide
  Sense strand starting at position 777 of SEQ ID NO: 1882855
ugaucugaauguguuauga

SEQ ID NO: 2152503 - RNA, 19 nt, Artificial Sequence
  Description of Artificial Sequence: Synthetic oligonucleotide
  Antisense strand to SEQ ID NO: 2152502
ucauaacacauucagauca

SEQ ID NO: 2152504 - RNA, 19 nt, Artificial Sequence
  Description of Artificial Sequence: Synthetic oligonucleotide
  Sense strand starting at position 779 of SEQ ID NO: 1882855
aucugaauguguuaugaac

SEQ ID NO: 2152505 - RNA, 19 nt, Artificial Sequence
  Description of Artificial Sequence: Synthetic oligonucleotide
  Antisense strand to SEQ ID NO: 2152504
guucauaacacauucagau

SEQ ID NO: 2152506 - RNA, 19 nt, Artificial Sequence
  Description of Artificial Sequence: Synthetic oligonucleotide
  Sense strand starting at position 781 of SEQ ID NO: 1882855
cugaauguguuaugaacca

SEQ ID NO: 2152507 - RNA, 19 nt, Artificial Sequence
  Description of Artificial Sequence: Synthetic oligonucleotide
  Antisense strand to SEQ ID NO: 2152506
ugguucauaacacauucag

SEQ ID NO: 2152508 - RNA, 19 nt, Artificial Sequence
  Description of Artificial Sequence: Synthetic oligonucleotide
  Sense strand starting at position 793 of SEQ ID NO: 1882855
ugaaccaaagacugugauu

SEQ ID NO: 2152509 - RNA, 19 nt, Artificial Sequence
  Description of Artificial Sequence: Synthetic oligonucleotide
  Antisense strand to SEQ ID NO: 2152508
aaucacagucuuugguuca

SEQ ID NO: 2152510 - RNA, 19 nt, Artificial Sequence
  Description of Artificial Sequence: Synthetic oligonucleotide
  Sense strand starting at position 796 of SEQ ID NO: 1882855
accaaagacugugauuaau

SEQ ID NO: 2152511 - RNA, 19 nt, Artificial Sequence
  Description of Artificial Sequence: Synthetic oligonucleotide
  Antisense strand to SEQ ID NO: 2152510
auuaaucacagucuuuggu

SEQ ID NO: 2152512 - RNA, 19 nt, Artificial Sequence
  Description of Artificial Sequence: Synthetic oligonucleotide
  Sense strand starting at position 814 of SEQ ID NO: 1882855
uccaauucugugcaacuga

SEQ ID NO: 2152513 - RNA, 19 nt, Artificial Sequence
  Description of Artificial Sequence: Synthetic oligonucleotide
  Antisense strand to SEQ ID NO: 2152512
ucaguugcacagaauugga

SEQ ID NO: 2152514 - RNA, 19 nt, Artificial Sequence
  Description of Artificial Sequence: Synthetic oligonucleotide
  Sense strand starting at position 827 of SEQ ID NO: 1882855
aacugaguuucucagagac

SEQ ID NO: 2152515 - RNA, 19 nt, Artificial Sequence
  Description of Artificial Sequence: Synthetic oligonucleotide
  Antisense strand to SEQ ID NO: 2152514
gucucugagaaacucaguu

SEQ ID NO: 2152516 - RNA, 19 nt, Artificial Sequence
  Description of Artificial Sequence: Synthetic oligonucleotide
  Sense strand starting at position 829 of SEQ ID NO: 1882855
cugaguuucucagagaccu

SEQ ID NO: 2152517 - RNA, 19 nt, Artificial Sequence
  Description of Artificial Sequence: Synthetic oligonucleotide
  Antisense strand to SEQ ID NO: 2152516
aggucucugagaaacucag

SEQ ID NO: 2152518 - RNA, 19 nt, Artificial Sequence
  Description of Artificial Sequence: Synthetic oligonucleotide
  Sense strand starting at position 952 of SEQ ID NO: 1882855
cuggccucugucugauaca

SEQ ID NO: 2152519 - RNA, 19 nt, Artificial Sequence
  Description of Artificial Sequence: Synthetic oligonucleotide
  Antisense strand to SEQ ID NO: 2152518
uguaucagacagaggccag

SEQ ID NO: 2152520 - RNA, 19 nt, Artificial Sequence
  Description of Artificial Sequence: Synthetic oligonucleotide
  Sense strand starting at position 953 of SEQ ID NO: 1882855
uggccucugucugauacaa

SEQ ID NO: 2152521 - RNA, 19 nt, Artificial Sequence
  Description of Artificial Sequence: Synthetic oligonucleotide
  Antisense strand to SEQ ID NO: 2152520
uuguaucagacagaggcca

SEQ ID NO: 2152522 - RNA, 19 nt, Artificial Sequence
  Description of Artificial Sequence: Synthetic oligonucleotide
  Sense strand starting at position 955 of SEQ ID NO: 1882855
gccucugucugauacaaug

SEQ ID NO: 2152523 - RNA, 19 nt, Artificial Sequence
  Description of Artificial Sequence: Synthetic oligonucleotide
  Antisense strand to SEQ ID NO: 2152522
cauuguaucagacagaggc

SEQ ID NO: 2152524 - RNA, 19 nt, Artificial Sequence
  Description of Artificial Sequence: Synthetic oligonucleotide
  Sense strand starting at position 1090 of SEQ ID NO: 1882855
agcuauuuauacuaggaga

SEQ ID NO: 2152525 - RNA, 19 nt, Artificial Sequence
  Description of Artificial Sequence: Synthetic oligonucleotide
  Antisense strand to SEQ ID NO: 2152524
ucuccuaguauaaauagcu

SEQ ID NO: 2152526 - RNA, 19 nt, Artificial Sequence
  Description of Artificial Sequence: Synthetic oligonucleotide
  Sense strand starting at position 1243 of SEQ ID NO: 1882855
aaggacuugucagggaauu

SEQ ID NO: 2152527 - RNA, 19 nt, Artificial Sequence
  Description of Artificial Sequence: Synthetic oligonucleotide
  Antisense strand to SEQ ID NO: 2152526
aauucccugacaaguccuu

SEQ ID NO: 2152528 - RNA, 19 nt, Artificial Sequence
  Description of Artificial Sequence: Synthetic oligonucleotide
  Sense strand starting at position 1299 of SEQ ID NO: 1882855
ggaaucagagcucaagucu

SEQ ID NO: 2152529 - RNA, 19 nt, Artificial Sequence
  Description of Artificial Sequence: Synthetic oligonucleotide
  Antisense strand to SEQ ID NO: 2152528
agacuugagcucugauucc

SEQ ID NO: 2152530 - RNA, 19 nt, Artificial Sequence
  Description of Artificial Sequence: Synthetic oligonucleotide
  Sense strand starting at position 1416 of SEQ ID NO: 1882855
gguggaucuuugagauggu

SEQ ID NO: 2152531 - RNA, 19 nt, Artificial Sequence
  Description of Artificial Sequence: Synthetic oligonucleotide
  Antisense strand to SEQ ID NO: 2152530
accaucucaaagauccacc

SEQ ID NO: 2152532 - RNA, 19 nt, Artificial Sequence
  Description of Artificial Sequence: Synthetic oligonucleotide
  Sense strand starting at position 1419 of SEQ ID NO: 1882855
ggaucuuugagauggucga

SEQ ID NO: 2152533 - RNA, 19 nt, Artificial Sequence
  Description of Artificial Sequence: Synthetic oligonucleotide
  Antisense strand to SEQ ID NO: 2152532
ucgaccaucucaaagaucc

SEQ ID NO: 2152534 - RNA, 19 nt, Artificial Sequence
  Description of Artificial Sequence: Synthetic oligonucleotide
  Sense strand starting at position 1470 of SEQ ID NO: 1882855
agaggaaucuuggagaguc

SEQ ID NO: 2152535 - RNA, 19 nt, Artificial Sequence
  Description of Artificial Sequence: Synthetic oligonucleotide
  Antisense strand to SEQ ID NO: 2152534
gacucuccaagauuccucu

SEQ ID NO: 2152536 - RNA, 19 nt, Artificial Sequence
  Description of Artificial Sequence: Synthetic oligonucleotide
  Sense strand starting at position 1478 of SEQ ID NO: 1882855
cuuggagagucuggaauga

SEQ ID NO: 2152537 - RNA, 19 nt, Artificial Sequence
  Description of Artificial Sequence: Synthetic oligonucleotide
  Antisense strand to SEQ ID NO: 2152536
ucauuccagacucuccaag

SEQ ID NO: 2152538 - RNA, 19 nt, Artificial Sequence
  Description of Artificial Sequence: Synthetic oligonucleotide
  Sense strand starting at position 1611 of SEQ ID NO: 1882855
gagcgagaagggcguuuau

SEQ ID NO: 2152539 - RNA, 19 nt, Artificial Sequence
  Description of Artificial Sequence: Synthetic oligonucleotide
  Antisense strand to SEQ ID NO: 2152538
auaaacgcccuucucgcuc

SEQ ID NO: 2152540 - RNA, 19 nt, Artificial Sequence
  Description of Artificial Sequence: Synthetic oligonucleotide
  Sense strand starting at position 1718 of SEQ ID NO: 1882855
ggaacauccuccuggcgaa

SEQ ID NO: 2152541 - RNA, 19 nt, Artificial Sequence
  Description of Artificial Sequence: Synthetic oligonucleotide
  Antisense strand to SEQ ID NO: 2152540
uucgccaggaggauguucc

SEQ ID NO: 2152542 - RNA, 19 nt, Artificial Sequence
  Description of Artificial Sequence: Synthetic oligonucleotide
  Sense strand starting at position 1719 of SEQ ID NO: 1882855
gaacauccuccuggcgaau

SEQ ID NO: 2152543 - RNA, 19 nt, Artificial Sequence
  Description of Artificial Sequence: Synthetic oligonucleotide
  Antisense strand to SEQ ID NO: 2152542
auucgccaggaggauguuc

SEQ ID NO: 2152544 - RNA, 19 nt, Artificial Sequence
  Description of Artificial Sequence: Synthetic oligonucleotide
  Sense strand starting at position 225 of SEQ ID NO: 1882856
agacauuucugcuguuuac

SEQ ID NO: 2152545 - RNA, 19 nt, Artificial Sequence
  Description of Artificial Sequence: Synthetic oligonucleotide
  Antisense strand to SEQ ID NO: 2152544
guaaacagcagaaaugucu

SEQ ID NO: 2152546 - RNA, 19 nt, Artificial Sequence
  Description of Artificial Sequence: Synthetic oligonucleotide
  Sense strand starting at position 702 of SEQ ID NO: 1882856
aaagaagucuugcuguguu

SEQ ID NO: 2152547 - RNA, 19 nt, Artificial Sequence
  Description of Artificial Sequence: Synthetic oligonucleotide
  Antisense strand to SEQ ID NO: 2152546
aacacagcaagacuucuuu

SEQ ID NO: 2152548 - RNA, 19 nt, Artificial Sequence
  Description of Artificial Sequence: Synthetic oligonucleotide
  Sense strand starting at position 802 of SEQ ID NO: 1882856
cacugugcuuggccucaaa

SEQ ID NO: 2152549 - RNA, 19 nt, Artificial Sequence
  Description of Artificial Sequence: Synthetic oligonucleotide
  Antisense strand to SEQ ID NO: 2152548
uuugaggccaagcacagug

SEQ ID NO: 2152550 - RNA, 19 nt, Artificial Sequence
  Description of Artificial Sequence: Synthetic oligonucleotide
  Sense strand starting at position 886 of SEQ ID NO: 1882856
guauuuauuuguugaggag

SEQ ID NO: 2152551 - RNA, 19 nt, Artificial Sequence
  Description of Artificial Sequence: Synthetic oligonucleotide
  Antisense strand to SEQ ID NO: 2152550
cuccucaacaaauaaauac

SEQ ID NO: 2152552 - RNA, 19 nt, Artificial Sequence
  Description of Artificial Sequence: Synthetic oligonucleotide
  Sense strand starting at position 889 of SEQ ID NO: 1882856
uuuauuuguugaggagaca

SEQ ID NO: 2152553 - RNA, 19 nt, Artificial Sequence
  Description of Artificial Sequence: Synthetic oligonucleotide
  Antisense strand to SEQ ID NO: 2152552
ugucuccucaacaaauaaa

SEQ ID NO: 2152554 - RNA, 19 nt, Artificial Sequence
  Description of Artificial Sequence: Synthetic oligonucleotide
  Sense strand starting at position 998 of SEQ ID NO: 1882856
cucagucuccaggaaaugu

SEQ ID NO: 2152555 - RNA, 19 nt, Artificial Sequence
  Description of Artificial Sequence: Synthetic oligonucleotide
  Antisense strand to SEQ ID NO: 2152554
acauuuccuggagacugag

SEQ ID NO: 2152556 - RNA, 19 nt, Artificial Sequence
  Description of Artificial Sequence: Synthetic oligonucleotide
  Sense strand starting at position 1138 of SEQ ID NO: 1882856
uccugucggcucuaaguau

SEQ ID NO: 2152557 - RNA, 19 nt, Artificial Sequence
  Description of Artificial Sequence: Synthetic oligonucleotide
  Antisense strand to SEQ ID NO: 2152556
auacuuagagccgacagga

SEQ ID NO: 2152558 - RNA, 19 nt, Artificial Sequence
  Description of Artificial Sequence: Synthetic oligonucleotide
  Sense strand starting at position 1142 of SEQ ID NO: 1882856
gucggcucuaaguauguau

SEQ ID NO: 2152559 - RNA, 19 nt, Artificial Sequence
  Description of Artificial Sequence: Synthetic oligonucleotide
  Antisense strand to SEQ ID NO: 2152558
auacauacuuagagccgac

SEQ ID NO: 2152560 - RNA, 19 nt, Artificial Sequence
  Description of Artificial Sequence: Synthetic oligonucleotide
  Sense strand starting at position 1146 of SEQ ID NO: 1882856
gcucuaaguauguauguau

SEQ ID NO: 2152561 - RNA, 19 nt, Artificial Sequence
  Description of Artificial Sequence: Synthetic oligonucleotide
  Antisense strand to SEQ ID NO: 2152560
auacauacauacuuagagc

SEQ ID NO: 2152562 - RNA, 19 nt, Artificial Sequence
  Description of Artificial Sequence: Synthetic oligonucleotide
  Sense strand starting at position 1501 of SEQ ID NO: 1882856
aacgcaaacgcuuaaguau

SEQ ID NO: 2152563 - RNA, 19 nt, Artificial Sequence
  Description of Artificial Sequence: Synthetic oligonucleotide
  Antisense strand to SEQ ID NO: 2152562
auacuuaagcguuugcguu

SEQ ID NO: 2152564 - RNA, 19 nt, Artificial Sequence
  Description of Artificial Sequence: Synthetic oligonucleotide
  Sense strand starting at position 1559 of SEQ ID NO: 1882856
ucagucagugucuaucaca

SEQ ID NO: 2152565 - RNA, 19 nt, Artificial Sequence
  Description of Artificial Sequence: Synthetic oligonucleotide
  Antisense strand to SEQ ID NO: 2152564
ugugauagacacugacuga

SEQ ID NO: 2152566 - RNA, 19 nt, Artificial Sequence
  Description of Artificial Sequence: Synthetic oligonucleotide
  Sense strand starting at position 1572 of SEQ ID NO: 1882856
aucacauuccagggauagu

SEQ ID NO: 2152567 - RNA, 19 nt, Artificial Sequence
  Description of Artificial Sequence: Synthetic oligonucleotide
  Antisense strand to SEQ ID NO: 2152566
acuaucccuggaaugugau

SEQ ID NO: 2152568 - RNA, 19 nt, Artificial Sequence
  Description of Artificial Sequence: Synthetic oligonucleotide
  Sense strand starting at position 1615 of SEQ ID NO: 1882856
cugcuuacaguuuauuaga

SEQ ID NO: 2152569 - RNA, 19 nt, Artificial Sequence
  Description of Artificial Sequence: Synthetic oligonucleotide
  Antisense strand to SEQ ID NO: 2152568
ucuaauaaacuguaagcag

SEQ ID NO: 2152570 - RNA, 19 nt, Artificial Sequence
  Description of Artificial Sequence: Synthetic oligonucleotide
  Sense strand starting at position 1649 of SEQ ID NO: 1882856
aaagauaccgucggucaga

SEQ ID NO: 2152571 - RNA, 19 nt, Artificial Sequence
  Description of Artificial Sequence: Synthetic oligonucleotide
  Antisense strand to SEQ ID NO: 2152570
ucugaccgacgguaucuuu

SEQ ID NO: 2152572 - RNA, 19 nt, Artificial Sequence
  Description of Artificial Sequence: Synthetic oligonucleotide
  Sense strand starting at position 1650 of SEQ ID NO: 1882856
aagauaccgucggucagau

SEQ ID NO: 2152573 - RNA, 19 nt, Artificial Sequence
  Description of Artificial Sequence: Synthetic oligonucleotide
  Antisense strand to SEQ ID NO: 2152572
aucugaccgacgguaucuu

SEQ ID NO: 2152574 - RNA, 19 nt, Artificial Sequence
  Description of Artificial Sequence: Synthetic oligonucleotide
  Sense strand starting at position 1777 of SEQ ID NO: 1882856
ggcguuugcacacgaaaga

SEQ ID NO: 2152575 - RNA, 19 nt, Artificial Sequence
  Description of Artificial Sequence: Synthetic oligonucleotide
  Antisense strand to SEQ ID NO: 2152574
ucuuucgugugcaaacgcc

SEQ ID NO: 2152576 - RNA, 19 nt, Artificial Sequence
  Description of Artificial Sequence: Synthetic oligonucleotide
  Sense strand starting at position 2427 of SEQ ID NO: 1882856
ugcauuccugaucgccaga

SEQ ID NO: 2152577 - RNA, 19 nt, Artificial Sequence
  Description of Artificial Sequence: Synthetic oligonucleotide
  Antisense strand to SEQ ID NO: 2152576
ucuggcgaucaggaaugca

SEQ ID NO: 2152578 - RNA, 19 nt, Artificial Sequence
  Description of Artificial Sequence: Synthetic oligonucleotide
  Sense strand starting at position 2430 of SEQ ID NO: 1882856
auuccugaucgccagaguu

SEQ ID NO: 2152579 - RNA, 19 nt, Artificial Sequence
  Description of Artificial Sequence: Synthetic oligonucleotide
  Antisense strand to SEQ ID NO: 2152578
aacucuggcgaucaggaau

SEQ ID NO: 2152580 - RNA, 19 nt, Artificial Sequence
  Description of Artificial Sequence: Synthetic oligonucleotide
  Sense strand starting at position 2432 of SEQ ID NO: 1882856
uccugaucgccagaguugu

SEQ ID NO: 2152581 - RNA, 19 nt, Artificial Sequence
  Description of Artificial Sequence: Synthetic oligonucleotide
  Antisense strand to SEQ ID NO: 2152580
acaacucuggcgaucagga

SEQ ID NO: 2152582 - RNA, 19 nt, Artificial Sequence
  Description of Artificial Sequence: Synthetic oligonucleotide
  Sense strand starting at position 2688 of SEQ ID NO: 1882856
cgacguacccuggaauucu

SEQ ID NO: 2152583 - RNA, 19 nt, Artificial Sequence
  Description of Artificial Sequence: Synthetic oligonucleotide
  Antisense strand to SEQ ID NO: 2152582
agaauuccaggguacgucg

SEQ ID NO: 2152584 - RNA, 19 nt, Artificial Sequence
  Description of Artificial Sequence: Synthetic oligonucleotide
  Sense strand starting at position 2757 of SEQ ID NO: 1882856
uguaauguggugcaaagua

SEQ ID NO: 2152585 - RNA, 19 nt, Artificial Sequence
  Description of Artificial Sequence: Synthetic oligonucleotide
  Antisense strand to SEQ ID NO: 2152584
uacuuugcaccacauuaca

SEQ ID NO: 2152586 - RNA, 19 nt, Artificial Sequence
  Description of Artificial Sequence: Synthetic oligonucleotide
  Sense strand starting at position 2770 of SEQ ID NO: 1882856
aaaguauugucucugcaga

SEQ ID NO: 2152587 - RNA, 19 nt, Artificial Sequence
  Description of Artificial Sequence: Synthetic oligonucleotide
  Antisense strand to SEQ ID NO: 2152586
ucugcagagacaauacuuu

SEQ ID NO: 2152588 - RNA, 19 nt, Artificial Sequence
  Description of Artificial Sequence: Synthetic oligonucleotide
  Sense strand starting at position 2771 of SEQ ID NO: 1882856
aaguauugucucugcagaa

SEQ ID NO: 2152589 - RNA, 19 nt, Artificial Sequence
  Description of Artificial Sequence: Synthetic oligonucleotide
  Antisense strand to SEQ ID NO: 2152588
uucugcagagacaauacuu

SEQ ID NO: 2152590 - RNA, 19 nt, Artificial Sequence
  Description of Artificial Sequence: Synthetic oligonucleotide
  Sense strand starting at position 2772 of SEQ ID NO: 1882856
aguauugucucugcagaaa

SEQ ID NO: 2152591 - RNA, 19 nt, Artificial Sequence
  Description of Artificial Sequence: Synthetic oligonucleotide
  Antisense strand to SEQ ID NO: 2152590
uuucugcagagacaauacu

SEQ ID NO: 2152592 - RNA, 19 nt, Artificial Sequence
  Description of Artificial Sequence: Synthetic oligonucleotide
  Sense strand starting at position 2805 of SEQ ID NO: 1882856
acucuagacucugacuagu

SEQ ID NO: 2152593 - RNA, 19 nt, Artificial Sequence
  Description of Artificial Sequence: Synthetic oligonucleotide
  Antisense strand to SEQ ID NO: 2152592
acuagucagagucuagagu

SEQ ID NO: 2152594 - RNA, 19 nt, Artificial Sequence
  Description of Artificial Sequence: Synthetic oligonucleotide
  Sense strand starting at position 2831 of SEQ ID NO: 1882856
cguugaugcuuccugccua

SEQ ID NO: 2152595 - RNA, 19 nt, Artificial Sequence
  Description of Artificial Sequence: Synthetic oligonucleotide
  Antisense strand to SEQ ID NO: 2152594
uaggcaggaagcaucaacg

SEQ ID NO: 2152596 - RNA, 19 nt, Artificial Sequence
  Description of Artificial Sequence: Synthetic oligonucleotide
  Sense strand starting at position 2902 of SEQ ID NO: 1882856
gggugcacuucgcagauuu

SEQ ID NO: 2152597 - RNA, 19 nt, Artificial Sequence
  Description of Artificial Sequence: Synthetic oligonucleotide
  Antisense strand to SEQ ID NO: 2152596
aaaucugcgaagugcaccc

SEQ ID NO: 2152598 - RNA, 19 nt, Artificial Sequence
  Description of Artificial Sequence: Synthetic oligonucleotide
  Sense strand starting at position 2922 of SEQ ID NO: 1882856
ggagcuugccuggguucua

SEQ ID NO: 2152599 - RNA, 19 nt, Artificial Sequence
  Description of Artificial Sequence: Synthetic oligonucleotide
  Antisense strand to SEQ ID NO: 2152598
uagaacccaggcaagcucc

SEQ ID NO: 2152600 - RNA, 19 nt, Artificial Sequence
  Description of Artificial Sequence: Synthetic oligonucleotide
  Sense strand starting at position 2949 of SEQ ID NO: 1882856
gagugagaggcucaagugu

SEQ ID NO: 2152601 - RNA, 19 nt, Artificial Sequence
  Description of Artificial Sequence: Synthetic oligonucleotide
  Antisense strand to SEQ ID NO: 2152600
acacuugagccucucacuc

SEQ ID NO: 2152602 - RNA, 19 nt, Artificial Sequence
  Description of Artificial Sequence: Synthetic oligonucleotide
  Sense strand starting at position 2960 of SEQ ID NO: 1882856
ucaagugucuuccucagag

SEQ ID NO: 2152603 - RNA, 19 nt, Artificial Sequence
  Description of Artificial Sequence: Synthetic oligonucleotide
  Antisense strand to SEQ ID NO: 2152602
cucugaggaagacacuuga

SEQ ID NO: 2152604 - RNA, 19 nt, Artificial Sequence
  Description of Artificial Sequence: Synthetic oligonucleotide
  Sense strand starting at position 2962 of SEQ ID NO: 1882856
aagugucuuccucagagug

SEQ ID NO: 2152605 - RNA, 19 nt, Artificial Sequence
  Description of Artificial Sequence: Synthetic oligonucleotide
  Antisense strand to SEQ ID NO: 2152604
cacucugaggaagacacuu

SEQ ID NO: 2152606 - RNA, 19 nt, Artificial Sequence
  Description of Artificial Sequence: Synthetic oligonucleotide
  Sense strand starting at position 3043 of SEQ ID NO: 1882856
gugaaugcggccuagaaau

SEQ ID NO: 2152607 - RNA, 19 nt, Artificial Sequence
  Description of Artificial Sequence: Synthetic oligonucleotide
  Antisense strand to SEQ ID NO: 2152606
auuucuaggccgcauucac

SEQ ID NO: 2152608 - RNA, 19 nt, Artificial Sequence
  Description of Artificial Sequence: Synthetic oligonucleotide
  Sense strand starting at position 3069 of SEQ ID NO: 1882856
guggcuucuugauugacaa

SEQ ID NO: 2152609 - RNA, 19 nt, Artificial Sequence
  Description of Artificial Sequence: Synthetic oligonucleotide
  Antisense strand to SEQ ID NO: 2152608
uugucaaucaagaagccac

SEQ ID NO: 2152610 - RNA, 19 nt, Artificial Sequence
  Description of Artificial Sequence: Synthetic oligonucleotide
  Sense strand starting at position 3070 of SEQ ID NO: 1882856
uggcuucuugauugacaag

SEQ ID NO: 2152611 - RNA, 19 nt, Artificial Sequence
  Description of Artificial Sequence: Synthetic oligonucleotide
  Antisense strand to SEQ ID NO: 2152610
cuugucaaucaagaagcca

SEQ ID NO: 2152612 - RNA, 19 nt, Artificial Sequence
  Description of Artificial Sequence: Synthetic oligonucleotide
  Sense strand starting at position 3073 of SEQ ID NO: 1882856
cuucuugauugacaaggaa

SEQ ID NO: 2152613 - RNA, 19 nt, Artificial Sequence
  Description of Artificial Sequence: Synthetic oligonucleotide
  Antisense strand to SEQ ID NO: 2152612
uuccuugucaaucaagaag

SEQ ID NO: 2152614 - RNA, 19 nt, Artificial Sequence
  Description of Artificial Sequence: Synthetic oligonucleotide
  Sense strand starting at position 3100 of SEQ ID NO: 1882856
ggcucaacugcagauugau

SEQ ID NO: 2152615 - RNA, 19 nt, Artificial Sequence
  Description of Artificial Sequence: Synthetic oligonucleotide
  Antisense strand to SEQ ID NO: 2152614
aucaaucugcaguugagcc

SEQ ID NO: 2152616 - RNA, 19 nt, Artificial Sequence
  Description of Artificial Sequence: Synthetic oligonucleotide
  Sense strand starting at position 3106 of SEQ ID NO: 1882856
acugcagauugauaagauu

SEQ ID NO: 2152617 - RNA, 19 nt, Artificial Sequence
  Description of Artificial Sequence: Synthetic oligonucleotide
  Antisense strand to SEQ ID NO: 2152616
aaucuuaucaaucugcagu

SEQ ID NO: 2152618 - RNA, 19 nt, Artificial Sequence
  Description of Artificial Sequence: Synthetic oligonucleotide
  Sense strand starting at position 3109 of SEQ ID NO: 1882856
gcagauugauaagauugaa

SEQ ID NO: 2152619 - RNA, 19 nt, Artificial Sequence
  Description of Artificial Sequence: Synthetic oligonucleotide
  Antisense strand to SEQ ID NO: 2152618
uucaaucuuaucaaucugc

SEQ ID NO: 2152620 - RNA, 19 nt, Artificial Sequence
  Description of Artificial Sequence: Synthetic oligonucleotide
  Sense strand starting at position 3180 of SEQ ID NO: 1882856
cugguaccuuggucuuaca

SEQ ID NO: 2152621 - RNA, 19 nt, Artificial Sequence
  Description of Artificial Sequence: Synthetic oligonucleotide
  Antisense strand to SEQ ID NO: 2152620
uguaagaccaagguaccag

SEQ ID NO: 2152622 - RNA, 19 nt, Artificial Sequence
  Description of Artificial Sequence: Synthetic oligonucleotide
  Sense strand starting at position 3357 of SEQ ID NO: 1882856
ggguuacacgugugcauca

SEQ ID NO: 2152623 - RNA, 19 nt, Artificial Sequence
  Description of Artificial Sequence: Synthetic oligonucleotide
  Antisense strand to SEQ ID NO: 2152622
ugaugcacacguguaaccc

SEQ ID NO: 2152624 - RNA, 19 nt, Artificial Sequence
  Description of Artificial Sequence: Synthetic oligonucleotide
  Sense strand starting at position 48 of SEQ ID NO: 1882857
ugacuugcacccuaauugu

SEQ ID NO: 2152625 - RNA, 19 nt, Artificial Sequence
  Description of Artificial Sequence: Synthetic oligonucleotide
  Antisense strand to SEQ ID NO: 2152624
acaauuagggugcaaguca

SEQ ID NO: 2152626 - RNA, 19 nt, Artificial Sequence
  Description of Artificial Sequence: Synthetic oligonucleotide
  Sense strand starting at position 266 of SEQ ID NO: 1882857
uuuacucgucugcaggauu

SEQ ID NO: 2152627 - RNA, 19 nt, Artificial Sequence
  Description of Artificial Sequence: Synthetic oligonucleotide
  Antisense strand to SEQ ID NO: 2152626
aauccugcagacgaguaaa

SEQ ID NO: 2152628 - RNA, 19 nt, Artificial Sequence
  Description of Artificial Sequence: Synthetic oligonucleotide
  Sense strand starting at position 377 of SEQ ID NO: 1882857
ccagucuuacugcaagauc

SEQ ID NO: 2152629 - RNA, 19 nt, Artificial Sequence
  Description of Artificial Sequence: Synthetic oligonucleotide
  Antisense strand to SEQ ID NO: 2152628
gaucuugcaguaagacugg

SEQ ID NO: 2152630 - RNA, 19 nt, Artificial Sequence
  Description of Artificial Sequence: Synthetic oligonucleotide
  Sense strand starting at position 380 of SEQ ID NO: 1882857
gucuuacugcaagaucuug

SEQ ID NO: 2152631 - RNA, 19 nt, Artificial Sequence
  Description of Artificial Sequence: Synthetic oligonucleotide
  Antisense strand to SEQ ID NO: 2152630
caagaucuugcaguaagac

SEQ ID NO: 2152632 - RNA, 19 nt, Artificial Sequence
  Description of Artificial Sequence: Synthetic oligonucleotide
  Sense strand starting at position 386 of SEQ ID NO: 1882857
cugcaagaucuugauauau

SEQ ID NO: 2152633 - RNA, 19 nt, Artificial Sequence
  Description of Artificial Sequence: Synthetic oligonucleotide
  Antisense strand to SEQ ID NO: 2152632
auauaucaagaucuugcag

SEQ ID NO: 2152634 - RNA, 19 nt, Artificial Sequence
  Description of Artificial Sequence: Synthetic oligonucleotide
  Sense strand starting at position 775 of SEQ ID NO: 1882857
cgaugaugauaguuggacu

SEQ ID NO: 2152635 - RNA, 19 nt, Artificial Sequence
  Description of Artificial Sequence: Synthetic oligonucleotide
  Antisense strand to SEQ ID NO: 2152634
aguccaacuaucaucaucg

SEQ ID NO: 2152636 - RNA, 19 nt, Artificial Sequence
  Description of Artificial Sequence: Synthetic oligonucleotide
  Sense strand starting at position 853 of SEQ ID NO: 1882857
gagaguccucgcgucggaa

SEQ ID NO: 2152637 - RNA, 19 nt, Artificial Sequence
  Description of Artificial Sequence: Synthetic oligonucleotide
  Antisense strand to SEQ ID NO: 2152636
uuccgacgcgaggacucuc

SEQ ID NO: 2152638 - RNA, 19 nt, Artificial Sequence
  Description of Artificial Sequence: Synthetic oligonucleotide
  Sense strand starting at position 896 of SEQ ID NO: 1882857
gcuaaagagcccguguguu

SEQ ID NO: 2152639 - RNA, 19 nt, Artificial Sequence
  Description of Artificial Sequence: Synthetic oligonucleotide
  Antisense strand to SEQ ID NO: 2152638
aacacacgggcucuuuagc

SEQ ID NO: 2152640 - RNA, 19 nt, Artificial Sequence
  Description of Artificial Sequence: Synthetic oligonucleotide
  Sense strand starting at position 1118 of SEQ ID NO: 1882857
gcuccuauuucuucuguau

SEQ ID NO: 2152641 - RNA, 19 nt, Artificial Sequence
  Description of Artificial Sequence: Synthetic oligonucleotide
  Antisense strand to SEQ ID NO: 2152640
auacagaagaaauaggagc

SEQ ID NO: 2152642 - RNA, 19 nt, Artificial Sequence
  Description of Artificial Sequence: Synthetic oligonucleotide
  Sense strand starting at position 1302 of SEQ ID NO: 1882857
gaggaaagcgucugcauuu

SEQ ID NO: 2152643 - RNA, 19 nt, Artificial Sequence
  Description of Artificial Sequence: Synthetic oligonucleotide
  Antisense strand to SEQ ID NO: 2152642
aaaugcagacgcuuuccuc

SEQ ID NO: 2152644 - RNA, 19 nt, Artificial Sequence
  Description of Artificial Sequence: Synthetic oligonucleotide
  Sense strand starting at position 1382 of SEQ ID NO: 1882857
gcagacuuuggacgaaauu

SEQ ID NO: 2152645 - RNA, 19 nt, Artificial Sequence
  Description of Artificial Sequence: Synthetic oligonucleotide
  Antisense strand to SEQ ID NO: 2152644
aauuucguccaaagucugc

SEQ ID NO: 2152646 - RNA, 19 nt, Artificial Sequence
  Description of Artificial Sequence: Synthetic oligonucleotide
  Sense strand starting at position 1446 of SEQ ID NO: 1882857
gaauuaaauugccuguggu

SEQ ID NO: 2152647 - RNA, 19 nt, Artificial Sequence
  Description of Artificial Sequence: Synthetic oligonucleotide
  Antisense strand to SEQ ID NO: 2152646
accacaggcaauuuaauuc

SEQ ID NO: 2152648 - RNA, 19 nt, Artificial Sequence
  Description of Artificial Sequence: Synthetic oligonucleotide
  Sense strand starting at position 1447 of SEQ ID NO: 1882857
aauuaaauugccugugguu

SEQ ID NO: 2152649 - RNA, 19 nt, Artificial Sequence
  Description of Artificial Sequence: Synthetic oligonucleotide
  Antisense strand to SEQ ID NO: 2152648
aaccacaggcaauuuaauu

SEQ ID NO: 2152650 - RNA, 19 nt, Artificial Sequence
  Description of Artificial Sequence: Synthetic oligonucleotide
  Sense strand starting at position 1452 of SEQ ID NO: 1882857
aauugccugugguugauau

SEQ ID NO: 2152651 - RNA, 19 nt, Artificial Sequence
  Description of Artificial Sequence: Synthetic oligonucleotide
  Antisense strand to SEQ ID NO: 2152650
auaucaaccacaggcaauu

SEQ ID NO: 2152652 - RNA, 19 nt, Artificial Sequence
  Description of Artificial Sequence: Synthetic oligonucleotide
  Sense strand starting at position 1821 of SEQ ID NO: 1882857
gguguuccuugggcacaga

SEQ ID NO: 2152653 - RNA, 19 nt, Artificial Sequence
  Description of Artificial Sequence: Synthetic oligonucleotide
  Antisense strand to SEQ ID NO: 2152652
ucugugcccaaggaacacc

SEQ ID NO: 2152654 - RNA, 19 nt, Artificial Sequence
  Description of Artificial Sequence: Synthetic oligonucleotide
  Sense strand starting at position 1822 of SEQ ID NO: 1882857
guguuccuugggcacagau

SEQ ID NO: 2152655 - RNA, 19 nt, Artificial Sequence
  Description of Artificial Sequence: Synthetic oligonucleotide
  Antisense strand to SEQ ID NO: 2152654
aucugugcccaaggaacac

SEQ ID NO: 2152656 - RNA, 19 nt, Artificial Sequence
  Description of Artificial Sequence: Synthetic oligonucleotide
  Sense strand starting at position 1917 of SEQ ID NO: 1882857
cuaccugauuaguccagga

SEQ ID NO: 2152657 - RNA, 19 nt, Artificial Sequence
  Description of Artificial Sequence: Synthetic oligonucleotide
  Antisense strand to SEQ ID NO: 2152656
uccuggacuaaucagguag

SEQ ID NO: 2152658 - RNA, 19 nt, Artificial Sequence
  Description of Artificial Sequence: Synthetic oligonucleotide
  Sense strand starting at position 1921 of SEQ ID NO: 1882857
cugauuaguccaggaggau

SEQ ID NO: 2152659 - RNA, 19 nt, Artificial Sequence
  Description of Artificial Sequence: Synthetic oligonucleotide
  Antisense strand to SEQ ID NO: 2152658
auccuccuggacuaaucag

SEQ ID NO: 2152660 - RNA, 19 nt, Artificial Sequence
  Description of Artificial Sequence: Synthetic oligonucleotide
  Sense strand starting at position 2058 of SEQ ID NO: 1882857
acagcauucuuccucagga

SEQ ID NO: 2152661 - RNA, 19 nt, Artificial Sequence
  Description of Artificial Sequence: Synthetic oligonucleotide
  Antisense strand to SEQ ID NO: 2152660
uccugaggaagaaugcugu

SEQ ID NO: 2152662 - RNA, 19 nt, Artificial Sequence
  Description of Artificial Sequence: Synthetic oligonucleotide
  Sense strand starting at position 2180 of SEQ ID NO: 1882857
caagguuaucgccaaccca

SEQ ID NO: 2152663 - RNA, 19 nt, Artificial Sequence
  Description of Artificial Sequence: Synthetic oligonucleotide
  Antisense strand to SEQ ID NO: 2152662
uggguuggcgauaaccuug

SEQ ID NO: 2152664 - RNA, 19 nt, Artificial Sequence
  Description of Artificial Sequence: Synthetic oligonucleotide
  Sense strand starting at position 2302 of SEQ ID NO: 1882857
ucauguuuaauugaacgga

SEQ ID NO: 2152665 - RNA, 19 nt, Artificial Sequence
  Description of Artificial Sequence: Synthetic oligonucleotide
  Antisense strand to SEQ ID NO: 2152664
uccguucaauuaaacauga

SEQ ID NO: 2152666 - RNA, 19 nt, Artificial Sequence
  Description of Artificial Sequence: Synthetic oligonucleotide
  Sense strand starting at position 2305 of SEQ ID NO: 1882857
uguuuaauugaacggauca

SEQ ID NO: 2152667 - RNA, 19 nt, Artificial Sequence
  Description of Artificial Sequence: Synthetic oligonucleotide
  Antisense strand to SEQ ID NO: 2152666
ugauccguucaauuaaaca

SEQ ID NO: 2152668 - RNA, 19 nt, Artificial Sequence
  Description of Artificial Sequence: Synthetic oligonucleotide
  Sense strand starting at position 2306 of SEQ ID NO: 1882857
guuuaauugaacggaucau

SEQ ID NO: 2152669 - RNA, 19 nt, Artificial Sequence
  Description of Artificial Sequence: Synthetic oligonucleotide
  Antisense strand to SEQ ID NO: 2152668
augauccguucaauuaaac

SEQ ID NO: 2152670 - RNA, 19 nt, Artificial Sequence
  Description of Artificial Sequence: Synthetic oligonucleotide
  Sense strand starting at position 2389 of SEQ ID NO: 1882857
gugaaucuggaucacggau

SEQ ID NO: 2152671 - RNA, 19 nt, Artificial Sequence
  Description of Artificial Sequence: Synthetic oligonucleotide
  Antisense strand to SEQ ID NO: 2152670
auccgugauccagauucac

SEQ ID NO: 2152672 - RNA, 19 nt, Artificial Sequence
  Description of Artificial Sequence: Synthetic oligonucleotide
  Sense strand starting at position 2570 of SEQ ID NO: 1882857
gauccauguggucaggcaa

SEQ ID NO: 2152673 - RNA, 19 nt, Artificial Sequence
  Description of Artificial Sequence: Synthetic oligonucleotide
  Antisense strand to SEQ ID NO: 2152672
uugccugaccacauggauc

SEQ ID NO: 2152674 - RNA, 19 nt, Artificial Sequence
  Description of Artificial Sequence: Synthetic oligonucleotide
  Sense strand starting at position 2706 of SEQ ID NO: 1882857
ggaggagauuugggaauuc

SEQ ID NO: 2152675 - RNA, 19 nt, Artificial Sequence
  Description of Artificial Sequence: Synthetic oligonucleotide
  Antisense strand to SEQ ID NO: 2152674
gaauucccaaaucuccucc

SEQ ID NO: 2152676 - RNA, 19 nt, Artificial Sequence
  Description of Artificial Sequence: Synthetic oligonucleotide
  Sense strand starting at position 3287 of SEQ ID NO: 1882857
gaaacugagucacuuguaa

SEQ ID NO: 2152677 - RNA, 19 nt, Artificial Sequence
  Description of Artificial Sequence: Synthetic oligonucleotide
  Antisense strand to SEQ ID NO: 2152676
uuacaagugacucaguuuc

SEQ ID NO: 2152678 - RNA, 19 nt, Artificial Sequence
  Description of Artificial Sequence: Synthetic oligonucleotide
  Sense strand starting at position 3388 of SEQ ID NO: 1882857
ggugggaggucucugcaga

SEQ ID NO: 2152679 - RNA, 19 nt, Artificial Sequence
  Description of Artificial Sequence: Synthetic oligonucleotide
  Antisense strand to SEQ ID NO: 2152678
ucugcagagaccucccacc

SEQ ID NO: 2152680 - RNA, 19 nt, Artificial Sequence
  Description of Artificial Sequence: Synthetic oligonucleotide
  Sense strand starting at position 3389 of SEQ ID NO: 1882857
gugggaggucucugcagaa

SEQ ID NO: 2152681 - RNA, 19 nt, Artificial Sequence
  Description of Artificial Sequence: Synthetic oligonucleotide
  Antisense strand to SEQ ID NO: 2152680
uucugcagagaccucccac

SEQ ID NO: 2152682 - RNA, 19 nt, Artificial Sequence
  Description of Artificial Sequence: Synthetic oligonucleotide
  Sense strand starting at position 3520 of SEQ ID NO: 1882857
ccaugaaccuaugaauaga

SEQ ID NO: 2152683 - RNA, 19 nt, Artificial Sequence
  Description of Artificial Sequence: Synthetic oligonucleotide
  Antisense strand to SEQ ID NO: 2152682
ucuauucauagguucaugg

SEQ ID NO: 2152684 - RNA, 19 nt, Artificial Sequence
  Description of Artificial Sequence: Synthetic oligonucleotide
  Sense strand starting at position 3792 of SEQ ID NO: 1882857
uugguaacuuauccuagca

SEQ ID NO: 2152685 - RNA, 19 nt, Artificial Sequence
  Description of Artificial Sequence: Synthetic oligonucleotide
  Antisense strand to SEQ ID NO: 2152684
ugcuaggauaaguuaccaa

SEQ ID NO: 2152686 - RNA, 19 nt, Artificial Sequence
  Description of Artificial Sequence: Synthetic oligonucleotide
  Sense strand starting at position 3836 of SEQ ID NO: 1882857
cuauuauagcugugcagaa

SEQ ID NO: 2152687 - RNA, 19 nt, Artificial Sequence
  Description of Artificial Sequence: Synthetic oligonucleotide
  Antisense strand to SEQ ID NO: 2152686
uucugcacagcuauaauag

SEQ ID NO: 2152688 - RNA, 19 nt, Artificial Sequence
  Description of Artificial Sequence: Synthetic oligonucleotide
  Sense strand starting at position 3837 of SEQ ID NO: 1882857
uauuauagcugugcagaaa

SEQ ID NO: 2152689 - RNA, 19 nt, Artificial Sequence
  Description of Artificial Sequence: Synthetic oligonucleotide
  Antisense strand to SEQ ID NO: 2152688
uuucugcacagcuauaaua

SEQ ID NO: 2152690 - RNA, 19 nt, Artificial Sequence
  Description of Artificial Sequence: Synthetic oligonucleotide
  Sense strand starting at position 3838 of SEQ ID NO: 1882857
auuauagcugugcagaaau

SEQ ID NO: 2152691 - RNA, 19 nt, Artificial Sequence
  Description of Artificial Sequence: Synthetic oligonucleotide
  Antisense strand to SEQ ID NO: 2152690
auuucugcacagcuauaau

SEQ ID NO: 2152692 - RNA, 19 nt, Artificial Sequence
  Description of Artificial Sequence: Synthetic oligonucleotide
  Sense strand starting at position 3849 of SEQ ID NO: 1882857
gcagaaaucccgcaacaag

SEQ ID NO: 2152693 - RNA, 19 nt, Artificial Sequence
  Description of Artificial Sequence: Synthetic oligonucleotide
  Antisense strand to SEQ ID NO: 2152692
cuuguugcgggauuucugc

SEQ ID NO: 2152694 - RNA, 19 nt, Artificial Sequence
  Description of Artificial Sequence: Synthetic oligonucleotide
  Sense strand starting at position 3905 of SEQ ID NO: 1882857
aaaugugucuacccgggua

SEQ ID NO: 2152695 - RNA, 19 nt, Artificial Sequence
  Description of Artificial Sequence: Synthetic oligonucleotide
  Antisense strand to SEQ ID NO: 2152694
uacccggguagacacauuu

SEQ ID NO: 2152696 - RNA, 19 nt, Artificial Sequence
  Description of Artificial Sequence: Synthetic oligonucleotide
  Sense strand starting at position 3910 of SEQ ID NO: 1882857
ugucuacccggguauuaca

SEQ ID NO: 2152697 - RNA, 19 nt, Artificial Sequence
  Description of Artificial Sequence: Synthetic oligonucleotide
  Antisense strand to SEQ ID NO: 2152696
uguaauacccggguagaca

SEQ ID NO: 2152698 - RNA, 19 nt, Artificial Sequence
  Description of Artificial Sequence: Synthetic oligonucleotide
  Sense strand starting at position 3917 of SEQ ID NO: 1882857
ccggguauuacaggaauua

SEQ ID NO: 2152699 - RNA, 19 nt, Artificial Sequence
  Description of Artificial Sequence: Synthetic oligonucleotide
  Antisense strand to SEQ ID NO: 2152698
uaauuccuguaauacccgg

SEQ ID NO: 2152700 - RNA, 19 nt, Artificial Sequence
  Description of Artificial Sequence: Synthetic oligonucleotide
  Sense strand starting at position 3942 of SEQ ID NO: 1882857
gguuucauuuacgaaggga

SEQ ID NO: 2152701 - RNA, 19 nt, Artificial Sequence
  Description of Artificial Sequence: Synthetic oligonucleotide
  Antisense strand to SEQ ID NO: 2152700
ucccuucguaaaugaaacc

SEQ ID NO: 2152702 - RNA, 19 nt, Artificial Sequence
  Description of Artificial Sequence: Synthetic oligonucleotide
  Sense strand starting at position 3966 of SEQ ID NO: 1882857
agaacagauuuaugaaaug

SEQ ID NO: 2152703 - RNA, 19 nt, Artificial Sequence
  Description of Artificial Sequence: Synthetic oligonucleotide
  Antisense strand to SEQ ID NO: 2152702
cauuucauaaaucuguucu

SEQ ID NO: 2152704 - RNA, 19 nt, Artificial Sequence
  Description of Artificial Sequence: Synthetic oligonucleotide
  Sense strand starting at position 212 of SEQ ID NO: 1882858
cuucuuuggcagcaauaag

SEQ ID NO: 2152705 - RNA, 19 nt, Artificial Sequence
  Description of Artificial Sequence: Synthetic oligonucleotide
  Antisense strand to SEQ ID NO: 2152704
cuuauugcugccaaagaag

SEQ ID NO: 2152706 - RNA, 19 nt, Artificial Sequence
  Description of Artificial Sequence: Synthetic oligonucleotide
  Sense strand starting at position 249 of SEQ ID NO: 1882858
agaauauugaguuggugac

SEQ ID NO: 2152707 - RNA, 19 nt, Artificial Sequence
  Description of Artificial Sequence: Synthetic oligonucleotide
  Antisense strand to SEQ ID NO: 2152706
gucaccaacucaauauucu

SEQ ID NO: 2152708 - RNA, 19 nt, Artificial Sequence
  Description of Artificial Sequence: Synthetic oligonucleotide
  Sense strand starting at position 250 of SEQ ID NO: 1882858
gaauauugaguuggugaca

SEQ ID NO: 2152709 - RNA, 19 nt, Artificial Sequence
  Description of Artificial Sequence: Synthetic oligonucleotide
  Antisense strand to SEQ ID NO: 2152708
ugucaccaacucaauauuc

SEQ ID NO: 2152710 - RNA, 19 nt, Artificial Sequence
  Description of Artificial Sequence: Synthetic oligonucleotide
  Sense strand starting at position 251 of SEQ ID NO: 1882858
aauauugaguuggugacau

SEQ ID NO: 2152711 - RNA, 19 nt, Artificial Sequence
  Description of Artificial Sequence: Synthetic oligonucleotide
  Antisense strand to SEQ ID NO: 2152710
augucaccaacucaauauu

SEQ ID NO: 2152712 - RNA, 19 nt, Artificial Sequence
  Description of Artificial Sequence: Synthetic oligonucleotide
  Sense strand starting at position 261 of SEQ ID NO: 1882858
uggugacauacuggucaaa

SEQ ID NO: 2152713 - RNA, 19 nt, Artificial Sequence
  Description of Artificial Sequence: Synthetic oligonucleotide
  Antisense strand to SEQ ID NO: 2152712
uuugaccaguaugucacca

SEQ ID NO: 2152714 - RNA, 19 nt, Artificial Sequence
  Description of Artificial Sequence: Synthetic oligonucleotide
  Sense strand starting at position 263 of SEQ ID NO: 1882858
gugacauacuggucaaacu

SEQ ID NO: 2152715 - RNA, 19 nt, Artificial Sequence
  Description of Artificial Sequence: Synthetic oligonucleotide
  Antisense strand to SEQ ID NO: 2152714
aguuugaccaguaugucac

SEQ ID NO: 2152716 - RNA, 19 nt, Artificial Sequence
  Description of Artificial Sequence: Synthetic oligonucleotide
  Sense strand starting at position 281 of SEQ ID NO: 1882858
uugacaaguuucccauaag

SEQ ID NO: 2152717 - RNA, 19 nt, Artificial Sequence
  Description of Artificial Sequence: Synthetic oligonucleotide
  Antisense strand to SEQ ID NO: 2152716
cuuaugggaaacuugucaa

SEQ ID NO: 2152718 - RNA, 19 nt, Artificial Sequence
  Description of Artificial Sequence: Synthetic oligonucleotide
  Sense strand starting at position 369 of SEQ ID NO: 1882858
ggauaacaguuguuccuca

SEQ ID NO: 2152719 - RNA, 19 nt, Artificial Sequence
  Description of Artificial Sequence: Synthetic oligonucleotide
  Antisense strand to SEQ ID NO: 2152718
ugaggaacaacuguuaucc

SEQ ID NO: 2152720 - RNA, 19 nt, Artificial Sequence
  Description of Artificial Sequence: Synthetic oligonucleotide
  Sense strand starting at position 374 of SEQ ID NO: 1882858
acaguuguuccucaauaug

SEQ ID NO: 2152721 - RNA, 19 nt, Artificial Sequence
  Description of Artificial Sequence: Synthetic oligonucleotide
  Antisense strand to SEQ ID NO: 2152720
cauauugaggaacaacugu

SEQ ID NO: 2152722 - RNA, 19 nt, Artificial Sequence
  Description of Artificial Sequence: Synthetic oligonucleotide
  Sense strand starting at position 786 of SEQ ID NO: 1882858
aaauguucuguguggagaa

SEQ ID NO: 2152723 - RNA, 19 nt, Artificial Sequence
  Description of Artificial Sequence: Synthetic oligonucleotide
  Antisense strand to SEQ ID NO: 2152722
uucuccacacagaacauuu

SEQ ID NO: 2152724 - RNA, 19 nt, Artificial Sequence
  Description of Artificial Sequence: Synthetic oligonucleotide
  Sense strand starting at position 788 of SEQ ID NO: 1882858
auguucuguguggagaaca

SEQ ID NO: 2152725 - RNA, 19 nt, Artificial Sequence
  Description of Artificial Sequence: Synthetic oligonucleotide
  Antisense strand to SEQ ID NO: 2152724
uguucuccacacagaacau

SEQ ID NO: 2152726 - RNA, 19 nt, Artificial Sequence
  Description of Artificial Sequence: Synthetic oligonucleotide
  Sense strand starting at position 840 of SEQ ID NO: 1882858
acuaucaugugauccagga

SEQ ID NO: 2152727 - RNA, 19 nt, Artificial Sequence
  Description of Artificial Sequence: Synthetic oligonucleotide
  Antisense strand to SEQ ID NO: 2152726
uccuggaucacaugauagu

SEQ ID NO: 2152728 - RNA, 19 nt, Artificial Sequence
  Description of Artificial Sequence: Synthetic oligonucleotide
  Sense strand starting at position 844 of SEQ ID NO: 1882858
ucaugugauccaggauucu

SEQ ID NO: 2152729 - RNA, 19 nt, Artificial Sequence
  Description of Artificial Sequence: Synthetic oligonucleotide
  Antisense strand to SEQ ID NO: 2152728
agaauccuggaucacauga

SEQ ID NO: 2152730 - RNA, 19 nt, Artificial Sequence
  Description of Artificial Sequence: Synthetic oligonucleotide
  Sense strand starting at position 853 of SEQ ID NO: 1882858
ccaggauucucacuucuag

SEQ ID NO: 2152731 - RNA, 19 nt, Artificial Sequence
  Description of Artificial Sequence: Synthetic oligonucleotide
  Antisense strand to SEQ ID NO: 2152730
cuagaagugagaauccugg

SEQ ID NO: 2152732 - RNA, 19 nt, Artificial Sequence
  Description of Artificial Sequence: Synthetic oligonucleotide
  Sense strand starting at position 859 of SEQ ID NO: 1882858
uucucacuucuagguauau

SEQ ID NO: 2152733 - RNA, 19 nt, Artificial Sequence
  Description of Artificial Sequence: Synthetic oligonucleotide
  Antisense strand to SEQ ID NO: 2152732
auauaccuagaagugagaa

SEQ ID NO: 2152734 - RNA, 19 nt, Artificial Sequence
  Description of Artificial Sequence: Synthetic oligonucleotide
  Sense strand starting at position 1088 of SEQ ID NO: 1882858
agaggauauugugugaagu

SEQ ID NO: 2152735 - RNA, 19 nt, Artificial Sequence
  Description of Artificial Sequence: Synthetic oligonucleotide
  Antisense strand to SEQ ID NO: 2152734
acuucacacaauauccucu

SEQ ID NO: 2152736 - RNA, 19 nt, Artificial Sequence
  Description of Artificial Sequence: Synthetic oligonucleotide
  Sense strand starting at position 1089 of SEQ ID NO: 1882858
gaggauauugugugaagug

SEQ ID NO: 2152737 - RNA, 19 nt, Artificial Sequence
  Description of Artificial Sequence: Synthetic oligonucleotide
  Antisense strand to SEQ ID NO: 2152736
cacuucacacaauauccuc

SEQ ID NO: 2152738 - RNA, 19 nt, Artificial Sequence
  Description of Artificial Sequence: Synthetic oligonucleotide
  Sense strand starting at position 1262 of SEQ ID NO: 1882858
ggaugauuacugggugcaa

SEQ ID NO: 2152739 - RNA, 19 nt, Artificial Sequence
  Description of Artificial Sequence: Synthetic oligonucleotide
  Antisense strand to SEQ ID NO: 2152738
uugcacccaguaaucaucc

SEQ ID NO: 2152740 - RNA, 19 nt, Artificial Sequence
  Description of Artificial Sequence: Synthetic oligonucleotide
  Sense strand starting at position 1263 of SEQ ID NO: 1882858
gaugauuacugggugcaaa

SEQ ID NO: 2152741 - RNA, 19 nt, Artificial Sequence
  Description of Artificial Sequence: Synthetic oligonucleotide
  Antisense strand to SEQ ID NO: 2152740
uuugcacccaguaaucauc

SEQ ID NO: 2152742 - RNA, 19 nt, Artificial Sequence
  Description of Artificial Sequence: Synthetic oligonucleotide
  Sense strand starting at position 1304 of SEQ ID NO: 1882858
uagcacaauugagugacua

SEQ ID NO: 2152743 - RNA, 19 nt, Artificial Sequence
  Description of Artificial Sequence: Synthetic oligonucleotide
  Antisense strand to SEQ ID NO: 2152742
uagucacucaauugugcua

SEQ ID NO: 2152744 - RNA, 19 nt, Artificial Sequence
  Description of Artificial Sequence: Synthetic oligonucleotide
  Sense strand starting at position 1308 of SEQ ID NO: 1882858
acaauugagugacuacagu

SEQ ID NO: 2152745 - RNA, 19 nt, Artificial Sequence
  Description of Artificial Sequence: Synthetic oligonucleotide
  Antisense strand to SEQ ID NO: 2152744
acuguagucacucaauugu

SEQ ID NO: 2152746 - RNA, 19 nt, Artificial Sequence
  Description of Artificial Sequence: Synthetic oligonucleotide
  Sense strand starting at position 1423 of SEQ ID NO: 1882858
cccaauugcccugaaguga

SEQ ID NO: 2152747 - RNA, 19 nt, Artificial Sequence
  Description of Artificial Sequence: Synthetic oligonucleotide
  Antisense strand to SEQ ID NO: 2152746
ucacuucagggcaauuggg

SEQ ID NO: 2152748 - RNA, 19 nt, Artificial Sequence
  Description of Artificial Sequence: Synthetic oligonucleotide
  Sense strand starting at position 1557 of SEQ ID NO: 1882858
gggaucaucacaugccaga

SEQ ID NO: 2152749 - RNA, 19 nt, Artificial Sequence
  Description of Artificial Sequence: Synthetic oligonucleotide
  Antisense strand to SEQ ID NO: 2152748
ucuggcaugugaugauccc

SEQ ID NO: 2152750 - RNA, 19 nt, Artificial Sequence
  Description of Artificial Sequence: Synthetic oligonucleotide
  Sense strand starting at position 1763 of SEQ ID NO: 1882858
ccaggauauuggucuaccu

SEQ ID NO: 2152751 - RNA, 19 nt, Artificial Sequence
  Description of Artificial Sequence: Synthetic oligonucleotide
  Antisense strand to SEQ ID NO: 2152750
agguagaccaauauccugg

SEQ ID NO: 2152752 - RNA, 19 nt, Artificial Sequence
  Description of Artificial Sequence: Synthetic oligonucleotide
  Sense strand starting at position 1959 of SEQ ID NO: 1882858
gaccauaacggaugacgua

SEQ ID NO: 2152753 - RNA, 19 nt, Artificial Sequence
  Description of Artificial Sequence: Synthetic oligonucleotide
  Antisense strand to SEQ ID NO: 2152752
uacgucauccguuaugguc

SEQ ID NO: 2152754 - RNA, 19 nt, Artificial Sequence
  Description of Artificial Sequence: Synthetic oligonucleotide
  Sense strand starting at position 2466 of SEQ ID NO: 1882858
ucgcaaacccgagaugaau

SEQ ID NO: 2152755 - RNA, 19 nt, Artificial Sequence
  Description of Artificial Sequence: Synthetic oligonucleotide
  Antisense strand to SEQ ID NO: 2152754
auucaucucggguuugcga

SEQ ID NO: 2152756 - RNA, 19 nt, Artificial Sequence
  Description of Artificial Sequence: Synthetic oligonucleotide
  Sense strand starting at position 2721 of SEQ ID NO: 1882858
auuuacgaguccuugguau

SEQ ID NO: 2152757 - RNA, 19 nt, Artificial Sequence
  Description of Artificial Sequence: Synthetic oligonucleotide
  Antisense strand to SEQ ID NO: 2152756
auaccaaggacucguaaau

SEQ ID NO: 2152758 - RNA, 19 nt, Artificial Sequence
  Description of Artificial Sequence: Synthetic oligonucleotide
  Sense strand starting at position 2740 of SEQ ID NO: 1882858
guuggcaaagacugaucau

SEQ ID NO: 2152759 - RNA, 19 nt, Artificial Sequence
  Description of Artificial Sequence: Synthetic oligonucleotide
  Antisense strand to SEQ ID NO: 2152758
augaucagucuuugccaac

SEQ ID NO: 2152760 - RNA, 19 nt, Artificial Sequence
  Description of Artificial Sequence: Synthetic oligonucleotide
  Sense strand starting at position 2914 of SEQ ID NO: 1882858
guaaauuacugcucaggaa

SEQ ID NO: 2152761 - RNA, 19 nt, Artificial Sequence
  Description of Artificial Sequence: Synthetic oligonucleotide
  Antisense strand to SEQ ID NO: 2152760
uuccugagcaguaauuuac

SEQ ID NO: 2152762 - RNA, 19 nt, Artificial Sequence
  Description of Artificial Sequence: Synthetic oligonucleotide
  Sense strand starting at position 3101 of SEQ ID NO: 1882858
gucuuucugccagcuuagu

SEQ ID NO: 2152763 - RNA, 19 nt, Artificial Sequence
  Description of Artificial Sequence: Synthetic oligonucleotide
  Antisense strand to SEQ ID NO: 2152762
acuaagcuggcagaaagac

SEQ ID NO: 2152764 - RNA, 19 nt, Artificial Sequence
  Description of Artificial Sequence: Synthetic oligonucleotide
  Sense strand starting at position 3110 of SEQ ID NO: 1882858
ccagcuuagugauugauua

SEQ ID NO: 2152765 - RNA, 19 nt, Artificial Sequence
  Description of Artificial Sequence: Synthetic oligonucleotide
  Antisense strand to SEQ ID NO: 2152764
uaaucaaucacuaagcugg

SEQ ID NO: 2152766 - RNA, 19 nt, Artificial Sequence
  Description of Artificial Sequence: Synthetic oligonucleotide
  Sense strand starting at position 3117 of SEQ ID NO: 1882858
agugauugauuaucuaucu

SEQ ID NO: 2152767 - RNA, 19 nt, Artificial Sequence
  Description of Artificial Sequence: Synthetic oligonucleotide
  Antisense strand to SEQ ID NO: 2152766
agauagauaaucaaucacu

SEQ ID NO: 2152768 - RNA, 19 nt, Artificial Sequence
  Description of Artificial Sequence: Synthetic oligonucleotide
  Sense strand starting at position 3118 of SEQ ID NO: 1882858
gugauugauuaucuaucuu

SEQ ID NO: 2152769 - RNA, 19 nt, Artificial Sequence
  Description of Artificial Sequence: Synthetic oligonucleotide
  Antisense strand to SEQ ID NO: 2152768
aagauagauaaucaaucac

SEQ ID NO: 2152770 - RNA, 19 nt, Artificial Sequence
  Description of Artificial Sequence: Synthetic oligonucleotide
  Sense strand starting at position 3145 of SEQ ID NO: 1882858
agucaaucuguacacugaa

SEQ ID NO: 2152771 - RNA, 19 nt, Artificial Sequence
  Description of Artificial Sequence: Synthetic oligonucleotide
  Antisense strand to SEQ ID NO: 2152770
uucaguguacagauugacu

SEQ ID NO: 2152772 - RNA, 19 nt, Artificial Sequence
  Description of Artificial Sequence: Synthetic oligonucleotide
  Sense strand starting at position 3176 of SEQ ID NO: 1882858
ucagcagucaaaggaagaa

SEQ ID NO: 2152773 - RNA, 19 nt, Artificial Sequence
  Description of Artificial Sequence: Synthetic oligonucleotide
  Antisense strand to SEQ ID NO: 2152772
uucuuccuuugacugcuga

SEQ ID NO: 2152774 - RNA, 19 nt, Artificial Sequence
  Description of Artificial Sequence: Synthetic oligonucleotide
  Sense strand starting at position 3209 of SEQ ID NO: 1882858
uaugauacggcuuagguaa

SEQ ID NO: 2152775 - RNA, 19 nt, Artificial Sequence
  Description of Artificial Sequence: Synthetic oligonucleotide
  Antisense strand to SEQ ID NO: 2152774
uuaccuaagccguaucaua

SEQ ID NO: 2152776 - RNA, 19 nt, Artificial Sequence
  Description of Artificial Sequence: Synthetic oligonucleotide
  Sense strand starting at position 3249 of SEQ ID NO: 1882858
auccuaagucuguagcaau

SEQ ID NO: 2152777 - RNA, 19 nt, Artificial Sequence
  Description of Artificial Sequence: Synthetic oligonucleotide
  Antisense strand to SEQ ID NO: 2152776
auugcuacagacuuaggau

SEQ ID NO: 2152778 - RNA, 19 nt, Artificial Sequence
  Description of Artificial Sequence: Synthetic oligonucleotide
  Sense strand starting at position 3413 of SEQ ID NO: 1882858
uuaaaugguuacguuaaga

SEQ ID NO: 2152779 - RNA, 19 nt, Artificial Sequence
  Description of Artificial Sequence: Synthetic oligonucleotide
  Antisense strand to SEQ ID NO: 2152778
ucuuaacguaaccauuuaa

SEQ ID NO: 2152780 - RNA, 19 nt, Artificial Sequence
  Description of Artificial Sequence: Synthetic oligonucleotide
  Sense strand starting at position 3931 of SEQ ID NO: 1882858
gaauaagauuugggagaag

SEQ ID NO: 2152781 - RNA, 19 nt, Artificial Sequence
  Description of Artificial Sequence: Synthetic oligonucleotide
  Antisense strand to SEQ ID NO: 2152780
cuucucccaaaucuuauuc

SEQ ID NO: 2152782 - RNA, 19 nt, Artificial Sequence
  Description of Artificial Sequence: Synthetic oligonucleotide
  Sense strand starting at position 3954 of SEQ ID NO: 1882858
uguguugcaggacaauaaa

SEQ ID NO: 2152783 - RNA, 19 nt, Artificial Sequence
  Description of Artificial Sequence: Synthetic oligonucleotide
  Antisense strand to SEQ ID NO: 2152782
uuuauuguccugcaacaca

SEQ ID NO: 2152784 - RNA, 19 nt, Artificial Sequence
  Description of Artificial Sequence: Synthetic oligonucleotide
  Sense strand starting at position 58 of SEQ ID NO: 1882859
acuauuucugugcagugua

SEQ ID NO: 2152785 - RNA, 19 nt, Artificial Sequence
  Description of Artificial Sequence: Synthetic oligonucleotide
  Antisense strand to SEQ ID NO: 2152784
uacacugcacagaaauagu

SEQ ID NO: 2152786 - RNA, 19 nt, Artificial Sequence
  Description of Artificial Sequence: Synthetic oligonucleotide
  Sense strand starting at position 157 of SEQ ID NO: 1882859
guagaaccuacuuggagau

SEQ ID NO: 2152787 - RNA, 19 nt, Artificial Sequence
  Description of Artificial Sequence: Synthetic oligonucleotide
  Antisense strand to SEQ ID NO: 2152786
aucuccaaguagguucuac

SEQ ID NO: 2152788 - RNA, 19 nt, Artificial Sequence
  Description of Artificial Sequence: Synthetic oligonucleotide
  Sense strand starting at position 159 of SEQ ID NO: 1882859
agaaccuacuuggagauuu

SEQ ID NO: 2152789 - RNA, 19 nt, Artificial Sequence
  Description of Artificial Sequence: Synthetic oligonucleotide
  Antisense strand to SEQ ID NO: 2152788
aaaucuccaaguagguucu

SEQ ID NO: 2152790 - RNA, 19 nt, Artificial Sequence
  Description of Artificial Sequence: Synthetic oligonucleotide
  Sense strand starting at position 197 of SEQ ID NO: 1882859
cccugacgaucuucuaaag

SEQ ID NO: 2152791 - RNA, 19 nt, Artificial Sequence
  Description of Artificial Sequence: Synthetic oligonucleotide
  Antisense strand to SEQ ID NO: 2152790
cuuuagaagaucgucaggg

SEQ ID NO: 2152792 - RNA, 19 nt, Artificial Sequence
  Description of Artificial Sequence: Synthetic oligonucleotide
  Sense strand starting at position 240 of SEQ ID NO: 1882859
uauaccaaucgugaucagu

SEQ ID NO: 2152793 - RNA, 19 nt, Artificial Sequence
  Description of Artificial Sequence: Synthetic oligonucleotide
  Antisense strand to SEQ ID NO: 2152792
acugaucacgauugguaua

SEQ ID NO: 2152794 - RNA, 19 nt, Artificial Sequence
  Description of Artificial Sequence: Synthetic oligonucleotide
  Sense strand starting at position 266 of SEQ ID NO: 1882859
gucacuuagaagcgacaaa

SEQ ID NO: 2152795 - RNA, 19 nt, Artificial Sequence
  Description of Artificial Sequence: Synthetic oligonucleotide
  Antisense strand to SEQ ID NO: 2152794
uuugucgcuucuaagugac

SEQ ID NO: 2152796 - RNA, 19 nt, Artificial Sequence
  Description of Artificial Sequence: Synthetic oligonucleotide
  Sense strand starting at position 357 of SEQ ID NO: 1882859
gcaccaugucuggaaugaa

SEQ ID NO: 2152797 - RNA, 19 nt, Artificial Sequence
  Description of Artificial Sequence: Synthetic oligonucleotide
  Antisense strand to SEQ ID NO: 2152796
uucauuccagacauggugc

SEQ ID NO: 2152798 - RNA, 19 nt, Artificial Sequence
  Description of Artificial Sequence: Synthetic oligonucleotide
  Sense strand starting at position 559 of SEQ ID NO: 1882859
aaaugauuagggugacgua

SEQ ID NO: 2152799 - RNA, 19 nt, Artificial Sequence
  Description of Artificial Sequence: Synthetic oligonucleotide
  Antisense strand to SEQ ID NO: 2152798
uacgucacccuaaucauuu

SEQ ID NO: 2152800 - RNA, 19 nt, Artificial Sequence
  Description of Artificial Sequence: Synthetic oligonucleotide
  Sense strand starting at position 560 of SEQ ID NO: 1882859
aaugauuagggugacguau

SEQ ID NO: 2152801 - RNA, 19 nt, Artificial Sequence
  Description of Artificial Sequence: Synthetic oligonucleotide
  Antisense strand to SEQ ID NO: 2152800
auacgucacccuaaucauu

SEQ ID NO: 2152802 - RNA, 19 nt, Artificial Sequence
  Description of Artificial Sequence: Synthetic oligonucleotide
  Sense strand starting at position 1173 of SEQ ID NO: 1882859
cugucauggagggaucuuu

SEQ ID NO: 2152803 - RNA, 19 nt, Artificial Sequence
  Description of Artificial Sequence: Synthetic oligonucleotide
  Antisense strand to SEQ ID NO: 2152802
aaagaucccuccaugacag

SEQ ID NO: 2152804 - RNA, 19 nt, Artificial Sequence
  Description of Artificial Sequence: Synthetic oligonucleotide
  Sense strand starting at position 1419 of SEQ ID NO: 1882859
ggaguuaucugaucaaguc

SEQ ID NO: 2152805 - RNA, 19 nt, Artificial Sequence
  Description of Artificial Sequence: Synthetic oligonucleotide
  Antisense strand to SEQ ID NO: 2152804
gacuugaucagauaacucc

SEQ ID NO: 2152806 - RNA, 19 nt, Artificial Sequence
  Description of Artificial Sequence: Synthetic oligonucleotide
  Sense strand starting at position 1420 of SEQ ID NO: 1882859
gaguuaucugaucaagucu

SEQ ID NO: 2152807 - RNA, 19 nt, Artificial Sequence
  Description of Artificial Sequence: Synthetic oligonucleotide
  Antisense strand to SEQ ID NO: 2152806
agacuugaucagauaacuc

SEQ ID NO: 2152808 - RNA, 19 nt, Artificial Sequence
  Description of Artificial Sequence: Synthetic oligonucleotide
  Sense strand starting at position 1929 of SEQ ID NO: 1882859
cagaaaugccugggucuga

SEQ ID NO: 2152809 - RNA, 19 nt, Artificial Sequence
  Description of Artificial Sequence: Synthetic oligonucleotide
  Antisense strand to SEQ ID NO: 2152808
ucagacccaggcauuucug

SEQ ID NO: 2152810 - RNA, 19 nt, Artificial Sequence
  Description of Artificial Sequence: Synthetic oligonucleotide
  Sense strand starting at position 2089 of SEQ ID NO: 1882859
gcuuguggccgcccagaua

SEQ ID NO: 2152811 - RNA, 19 nt, Artificial Sequence
  Description of Artificial Sequence: Synthetic oligonucleotide
  Antisense strand to SEQ ID NO: 2152810
uaucugggcggccacaagc

SEQ ID NO: 2152812 - RNA, 19 nt, Artificial Sequence
  Description of Artificial Sequence: Synthetic oligonucleotide
  Sense strand starting at position 2186 of SEQ ID NO: 1882859
agguccucgccugaggaaa

SEQ ID NO: 2152813 - RNA, 19 nt, Artificial Sequence
  Description of Artificial Sequence: Synthetic oligonucleotide
  Antisense strand to SEQ ID NO: 2152812
uuuccucaggcgaggaccu

SEQ ID NO: 2152814 - RNA, 19 nt, Artificial Sequence
  Description of Artificial Sequence: Synthetic oligonucleotide
  Sense strand starting at position 2379 of SEQ ID NO: 1882859
ucaguaguugugaguguug

SEQ ID NO: 2152815 - RNA, 19 nt, Artificial Sequence
  Description of Artificial Sequence: Synthetic oligonucleotide
  Antisense strand to SEQ ID NO: 2152814
caacacucacaacuacuga

SEQ ID NO: 2152816 - RNA, 19 nt, Artificial Sequence
  Description of Artificial Sequence: Synthetic oligonucleotide
  Sense strand starting at position 2382 of SEQ ID NO: 1882859
guaguugugaguguuguac

SEQ ID NO: 2152817 - RNA, 19 nt, Artificial Sequence
  Description of Artificial Sequence: Synthetic oligonucleotide
  Antisense strand to SEQ ID NO: 2152816
guacaacacucacaacuac

SEQ ID NO: 2152818 - RNA, 19 nt, Artificial Sequence
  Description of Artificial Sequence: Synthetic oligonucleotide
  Sense strand starting at position 2390 of SEQ ID NO: 1882859
gaguguuguacuguugugu

SEQ ID NO: 2152819 - RNA, 19 nt, Artificial Sequence
  Description of Artificial Sequence: Synthetic oligonucleotide
  Antisense strand to SEQ ID NO: 2152818
acacaacaguacaacacuc

SEQ ID NO: 2152820 - RNA, 19 nt, Artificial Sequence
  Description of Artificial Sequence: Synthetic oligonucleotide
  Sense strand starting at position 2427 of SEQ ID NO: 1882859
aaguguaacuuguuuggaa

SEQ ID NO: 2152821 - RNA, 19 nt, Artificial Sequence
  Description of Artificial Sequence: Synthetic oligonucleotide
  Antisense strand to SEQ ID NO: 2152820
uuccaaacaaguuacacuu

SEQ ID NO: 2152822 - RNA, 19 nt, Artificial Sequence
  Description of Artificial Sequence: Synthetic oligonucleotide
  Sense strand starting at position 2428 of SEQ ID NO: 1882859
aguguaacuuguuuggaaa

SEQ ID NO: 2152823 - RNA, 19 nt, Artificial Sequence
  Description of Artificial Sequence: Synthetic oligonucleotide
  Antisense strand to SEQ ID NO: 2152822
uuuccaaacaaguuacacu

SEQ ID NO: 2152824 - RNA, 19 nt, Artificial Sequence
  Description of Artificial Sequence: Synthetic oligonucleotide
  Sense strand starting at position 2604 of SEQ ID NO: 1882859
gguggugaaugagucacau

SEQ ID NO: 2152825 - RNA, 19 nt, Artificial Sequence
  Description of Artificial Sequence: Synthetic oligonucleotide
  Antisense strand to SEQ ID NO: 2152824
augugacucauucaccacc

SEQ ID NO: 2152826 - RNA, 19 nt, Artificial Sequence
  Description of Artificial Sequence: Synthetic oligonucleotide
  Sense strand starting at position 2672 of SEQ ID NO: 1882859
gugagaucuuaaucaagug

SEQ ID NO: 2152827 - RNA, 19 nt, Artificial Sequence
  Description of Artificial Sequence: Synthetic oligonucleotide
  Antisense strand to SEQ ID NO: 2152826
cacuugauuaagaucucac

SEQ ID NO: 2152828 - RNA, 19 nt, Artificial Sequence
  Description of Artificial Sequence: Synthetic oligonucleotide
  Sense strand starting at position 2758 of SEQ ID NO: 1882859
gauuuauggugagaugaaa

SEQ ID NO: 2152829 - RNA, 19 nt, Artificial Sequence
  Description of Artificial Sequence: Synthetic oligonucleotide
  Antisense strand to SEQ ID NO: 2152828
uuucaucucaccauaaauc

SEQ ID NO: 2152830 - RNA, 19 nt, Artificial Sequence
  Description of Artificial Sequence: Synthetic oligonucleotide
  Sense strand starting at position 2885 of SEQ ID NO: 1882859
ccagucuguggugagaagu

SEQ ID NO: 2152831 - RNA, 19 nt, Artificial Sequence
  Description of Artificial Sequence: Synthetic oligonucleotide
  Antisense strand to SEQ ID NO: 2152830
acuucucaccacagacugg

SEQ ID NO: 2152832 - RNA, 19 nt, Artificial Sequence
  Description of Artificial Sequence: Synthetic oligonucleotide
  Sense strand starting at position 2915 of SEQ ID NO: 1882859
aaagcaugccucugagaag

SEQ ID NO: 2152833 - RNA, 19 nt, Artificial Sequence
  Description of Artificial Sequence: Synthetic oligonucleotide
  Antisense strand to SEQ ID NO: 2152832
cuucucagaggcaugcuuu

SEQ ID NO: 2152834 - RNA, 19 nt, Artificial Sequence
  Description of Artificial Sequence: Synthetic oligonucleotide
  Sense strand starting at position 2930 of SEQ ID NO: 1882859
gaaggaugauacguggauu

SEQ ID NO: 2152835 - RNA, 19 nt, Artificial Sequence
  Description of Artificial Sequence: Synthetic oligonucleotide
  Antisense strand to SEQ ID NO: 2152834
aauccacguaucauccuuc

SEQ ID NO: 2152836 - RNA, 19 nt, Artificial Sequence
  Description of Artificial Sequence: Synthetic oligonucleotide
  Sense strand starting at position 2958 of SEQ ID NO: 1882859
aauggaauuccauguuggu

SEQ ID NO: 2152837 - RNA, 19 nt, Artificial Sequence
  Description of Artificial Sequence: Synthetic oligonucleotide
  Antisense strand to SEQ ID NO: 2152836
accaacauggaauuccauu

SEQ ID NO: 2152838 - RNA, 19 nt, Artificial Sequence
  Description of Artificial Sequence: Synthetic oligonucleotide
  Sense strand starting at position 2962 of SEQ ID NO: 1882859
gaauuccauguuggucaaa

SEQ ID NO: 2152839 - RNA, 19 nt, Artificial Sequence
  Description of Artificial Sequence: Synthetic oligonucleotide
  Antisense strand to SEQ ID NO: 2152838
uuugaccaacauggaauuc

SEQ ID NO: 2152840 - RNA, 19 nt, Artificial Sequence
  Description of Artificial Sequence: Synthetic oligonucleotide
  Sense strand starting at position 3030 of SEQ ID NO: 1882859
auagcauagugacuauaaa

SEQ ID NO: 2152841 - RNA, 19 nt, Artificial Sequence
  Description of Artificial Sequence: Synthetic oligonucleotide
  Antisense strand to SEQ ID NO: 2152840
uuuauagucacuaugcuau

SEQ ID NO: 2152842 - RNA, 19 nt, Artificial Sequence
  Description of Artificial Sequence: Synthetic oligonucleotide
  Sense strand starting at position 3113 of SEQ ID NO: 1882859
aaugguaguuaugugauau

SEQ ID NO: 2152843 - RNA, 19 nt, Artificial Sequence
  Description of Artificial Sequence: Synthetic oligonucleotide
  Antisense strand to SEQ ID NO: 2152842
auaucacauaacuaccauu

SEQ ID NO: 2152844 - RNA, 19 nt, Artificial Sequence
  Description of Artificial Sequence: Synthetic oligonucleotide
  Sense strand starting at position 3119 of SEQ ID NO: 1882859
aguuaugugauaugaugga

SEQ ID NO: 2152845 - RNA, 19 nt, Artificial Sequence
  Description of Artificial Sequence: Synthetic oligonucleotide
  Antisense strand to SEQ ID NO: 2152844
uccaucauaucacauaacu

SEQ ID NO: 2152846 - RNA, 19 nt, Artificial Sequence
  Description of Artificial Sequence: Synthetic oligonucleotide
  Sense strand starting at position 3126 of SEQ ID NO: 1882859
ugauaugauggauguguua

SEQ ID NO: 2152847 - RNA, 19 nt, Artificial Sequence
  Description of Artificial Sequence: Synthetic oligonucleotide
  Antisense strand to SEQ ID NO: 2152846
uaacacauccaucauauca

SEQ ID NO: 2152848 - RNA, 19 nt, Artificial Sequence
  Description of Artificial Sequence: Synthetic oligonucleotide
  Sense strand starting at position 3128 of SEQ ID NO: 1882859
auaugauggauguguuaac

SEQ ID NO: 2152849 - RNA, 19 nt, Artificial Sequence
  Description of Artificial Sequence: Synthetic oligonucleotide
  Antisense strand to SEQ ID NO: 2152848
guuaacacauccaucauau

SEQ ID NO: 2152850 - RNA, 19 nt, Artificial Sequence
  Description of Artificial Sequence: Synthetic oligonucleotide
  Sense strand starting at position 3129 of SEQ ID NO: 1882859
uaugauggauguguuaacu

SEQ ID NO: 2152851 - RNA, 19 nt, Artificial Sequence
  Description of Artificial Sequence: Synthetic oligonucleotide
  Antisense strand to SEQ ID NO: 2152850
aguuaacacauccaucaua

SEQ ID NO: 2152852 - RNA, 19 nt, Artificial Sequence
  Description of Artificial Sequence: Synthetic oligonucleotide
  Sense strand starting at position 3309 of SEQ ID NO: 1882859
cuccauccugcaggagaaa

SEQ ID NO: 2152853 - RNA, 19 nt, Artificial Sequence
  Description of Artificial Sequence: Synthetic oligonucleotide
  Antisense strand to SEQ ID NO: 2152852
uuucuccugcaggauggag

SEQ ID NO: 2152854 - RNA, 19 nt, Artificial Sequence
  Description of Artificial Sequence: Synthetic oligonucleotide
  Sense strand starting at position 3358 of SEQ ID NO: 1882859
aaguauaggagcugaguca

SEQ ID NO: 2152855 - RNA, 19 nt, Artificial Sequence
  Description of Artificial Sequence: Synthetic oligonucleotide
  Antisense strand to SEQ ID NO: 2152854
ugacucagcuccuauacuu

SEQ ID NO: 2152856 - RNA, 19 nt, Artificial Sequence
  Description of Artificial Sequence: Synthetic oligonucleotide
  Sense strand starting at position 3497 of SEQ ID NO: 1882859
agggcuuuguacccacuaa

SEQ ID NO: 2152857 - RNA, 19 nt, Artificial Sequence
  Description of Artificial Sequence: Synthetic oligonucleotide
  Antisense strand to SEQ ID NO: 2152856
uuaguggguacaaagcccu

SEQ ID NO: 2152858 - RNA, 19 nt, Artificial Sequence
  Description of Artificial Sequence: Synthetic oligonucleotide
  Sense strand starting at position 3579 of SEQ ID NO: 1882859
aggugaguuaaguggaaca

SEQ ID NO: 2152859 - RNA, 19 nt, Artificial Sequence
  Description of Artificial Sequence: Synthetic oligonucleotide
  Antisense strand to SEQ ID NO: 2152858
uguuccacuuaacucaccu

SEQ ID NO: 2152860 - RNA, 19 nt, Artificial Sequence
  Description of Artificial Sequence: Synthetic oligonucleotide
  Sense strand starting at position 3581 of SEQ ID NO: 1882859
gugaguuaaguggaacauu

SEQ ID NO: 2152861 - RNA, 19 nt, Artificial Sequence
  Description of Artificial Sequence: Synthetic oligonucleotide
  Antisense strand to SEQ ID NO: 2152860
aauguuccacuuaacucac

SEQ ID NO: 2152862 - RNA, 19 nt, Artificial Sequence
  Description of Artificial Sequence: Synthetic oligonucleotide
  Sense strand starting at position 3618 of SEQ ID NO: 1882859
uauacagugccacgagaaa

SEQ ID NO: 2152863 - RNA, 19 nt, Artificial Sequence
  Description of Artificial Sequence: Synthetic oligonucleotide
  Antisense strand to SEQ ID NO: 2152862
uuucucguggcacuguaua

SEQ ID NO: 2152864 - RNA, 19 nt, Artificial Sequence
  Description of Artificial Sequence: Synthetic oligonucleotide
  Sense strand starting at position 3 of SEQ ID NO: 1882860
ccuucuuuguucucauaga

SEQ ID NO: 2152865 - RNA, 19 nt, Artificial Sequence
  Description of Artificial Sequence: Synthetic oligonucleotide
  Antisense strand to SEQ ID NO: 2152864
ucuaugagaacaaagaagg

SEQ ID NO: 2152866 - RNA, 19 nt, Artificial Sequence
  Description of Artificial Sequence: Synthetic oligonucleotide
  Sense strand starting at position 417 of SEQ ID NO: 1882860
acaagaauuuaucguacaa

SEQ ID NO: 2152867 - RNA, 19 nt, Artificial Sequence
  Description of Artificial Sequence: Synthetic oligonucleotide
  Antisense strand to SEQ ID NO: 2152866
uuguacgauaaauucuugu

SEQ ID NO: 2152868 - RNA, 19 nt, Artificial Sequence
  Description of Artificial Sequence: Synthetic oligonucleotide
  Sense strand starting at position 992 of SEQ ID NO: 1882860
acgguaauuaugggaguua

SEQ ID NO: 2152869 - RNA, 19 nt, Artificial Sequence
  Description of Artificial Sequence: Synthetic oligonucleotide
  Antisense strand to SEQ ID NO: 2152868
uaacucccauaauuaccgu

SEQ ID NO: 2152870 - RNA, 19 nt, Artificial Sequence
  Description of Artificial Sequence: Synthetic oligonucleotide
  Sense strand starting at position 1198 of SEQ ID NO: 1882860
ugagauauccaaugggcau

SEQ ID NO: 2152871 - RNA, 19 nt, Artificial Sequence
  Description of Artificial Sequence: Synthetic oligonucleotide
  Antisense strand to SEQ ID NO: 2152870
augcccauuggauaucuca

SEQ ID NO: 2152872 - RNA, 19 nt, Artificial Sequence
  Description of Artificial Sequence: Synthetic oligonucleotide
  Sense strand starting at position 1539 of SEQ ID NO: 1882860
gguuaauagcuuuauaauc

SEQ ID NO: 2152873 - RNA, 19 nt, Artificial Sequence
  Description of Artificial Sequence: Synthetic oligonucleotide
  Antisense strand to SEQ ID NO: 2152872
gauuauaaagcuauuaacc

SEQ ID NO: 2152874 - RNA, 19 nt, Artificial Sequence
  Description of Artificial Sequence: Synthetic oligonucleotide
  Sense strand starting at position 1678 of SEQ ID NO: 1882860
ccagcuauuuaaugaagau

SEQ ID NO: 2152875 - RNA, 19 nt, Artificial Sequence
  Description of Artificial Sequence: Synthetic oligonucleotide
  Antisense strand to SEQ ID NO: 2152874
aucuucauuaaauagcugg

SEQ ID NO: 2152876 - RNA, 19 nt, Artificial Sequence
  Description of Artificial Sequence: Synthetic oligonucleotide
  Sense strand starting at position 1772 of SEQ ID NO: 1882860
ugauuugguugacacaaca

SEQ ID NO: 2152877 - RNA, 19 nt, Artificial Sequence
  Description of Artificial Sequence: Synthetic oligonucleotide
  Antisense strand to SEQ ID NO: 2152876
uguugugucaaccaaauca

SEQ ID NO: 2152878 - RNA, 19 nt, Artificial Sequence
  Description of Artificial Sequence: Synthetic oligonucleotide
  Sense strand starting at position 2182 of SEQ ID NO: 1882860
ggccaaguauuauugcaaa

SEQ ID NO: 2152879 - RNA, 19 nt, Artificial Sequence
  Description of Artificial Sequence: Synthetic oligonucleotide
  Antisense strand to SEQ ID NO: 2152878
uuugcaauaauacuuggcc

SEQ ID NO: 2152880 - RNA, 19 nt, Artificial Sequence
  Description of Artificial Sequence: Synthetic oligonucleotide
  Sense strand starting at position 2211 of SEQ ID NO: 1882860
auguuuccuccuuagauua

SEQ ID NO: 2152881 - RNA, 19 nt, Artificial Sequence
  Description of Artificial Sequence: Synthetic oligonucleotide
  Antisense strand to SEQ ID NO: 2152880
uaaucuaaggaggaaacau

SEQ ID NO: 2152882 - RNA, 19 nt, Artificial Sequence
  Description of Artificial Sequence: Synthetic oligonucleotide
  Sense strand starting at position 2271 of SEQ ID NO: 1882860
ugggaagucagguggaaua

SEQ ID NO: 2152883 - RNA, 19 nt, Artificial Sequence
  Description of Artificial Sequence: Synthetic oligonucleotide
  Antisense strand to SEQ ID NO: 2152882
uauuccaccugacuuccca

SEQ ID NO: 2152884 - RNA, 19 nt, Artificial Sequence
  Description of Artificial Sequence: Synthetic oligonucleotide
  Sense strand starting at position 2282 of SEQ ID NO: 1882860
guggaauaaauggaguguu

SEQ ID NO: 2152885 - RNA, 19 nt, Artificial Sequence
  Description of Artificial Sequence: Synthetic oligonucleotide
  Antisense strand to SEQ ID NO: 2152884
aacacuccauuuauuccac

SEQ ID NO: 2152886 - RNA, 19 nt, Artificial Sequence
  Description of Artificial Sequence: Synthetic oligonucleotide
  Sense strand starting at position 2290 of SEQ ID NO: 1882860
aauggaguguuuccuguag

SEQ ID NO: 2152887 - RNA, 19 nt, Artificial Sequence
  Description of Artificial Sequence: Synthetic oligonucleotide
  Antisense strand to SEQ ID NO: 2152886
cuacaggaaacacuccauu

SEQ ID NO: 2152888 - RNA, 19 nt, Artificial Sequence
  Description of Artificial Sequence: Synthetic oligonucleotide
  Sense strand starting at position 2304 of SEQ ID NO: 1882860
uguaguggucugcaagaga

SEQ ID NO: 2152889 - RNA, 19 nt, Artificial Sequence
  Description of Artificial Sequence: Synthetic oligonucleotide
  Antisense strand to SEQ ID NO: 2152888
ucucuugcagaccacuaca

SEQ ID NO: 2152890 - RNA, 19 nt, Artificial Sequence
  Description of Artificial Sequence: Synthetic oligonucleotide
  Sense strand starting at position 2340 of SEQ ID NO: 1882860
gccuuaguacuagaccuga

SEQ ID NO: 2152891 - RNA, 19 nt, Artificial Sequence
  Description of Artificial Sequence: Synthetic oligonucleotide
  Antisense strand to SEQ ID NO: 2152890
ucaggucuaguacuaaggc

SEQ ID NO: 2152892 - RNA, 19 nt, Artificial Sequence
  Description of Artificial Sequence: Synthetic oligonucleotide
  Sense strand starting at position 2505 of SEQ ID NO: 1882860
gaggcaauggccuaauaug

SEQ ID NO: 2152893 - RNA, 19 nt, Artificial Sequence
  Description of Artificial Sequence: Synthetic oligonucleotide
  Antisense strand to SEQ ID NO: 2152892
cauauuaggccauugccuc

SEQ ID NO: 2152894 - RNA, 19 nt, Artificial Sequence
  Description of Artificial Sequence: Synthetic oligonucleotide
  Sense strand starting at position 2529 of SEQ ID NO: 1882860
uucucuugucccuggauga

SEQ ID NO: 2152895 - RNA, 19 nt, Artificial Sequence
  Description of Artificial Sequence: Synthetic oligonucleotide
  Antisense strand to SEQ ID NO: 2152894
ucauccagggacaagagaa

SEQ ID NO: 2152896 - RNA, 19 nt, Artificial Sequence
  Description of Artificial Sequence: Synthetic oligonucleotide
  Sense strand starting at position 2530 of SEQ ID NO: 1882860
ucucuugucccuggaugaa

SEQ ID NO: 2152897 - RNA, 19 nt, Artificial Sequence
  Description of Artificial Sequence: Synthetic oligonucleotide
  Antisense strand to SEQ ID NO: 2152896
uucauccagggacaagaga

SEQ ID NO: 2152898 - RNA, 19 nt, Artificial Sequence
  Description of Artificial Sequence: Synthetic oligonucleotide
  Sense strand starting at position 2593 of SEQ ID NO: 1882860
uccugcauuccuugcaaga

SEQ ID NO: 2152899 - RNA, 19 nt, Artificial Sequence
  Description of Artificial Sequence: Synthetic oligonucleotide
  Antisense strand to SEQ ID NO: 2152898
ucuugcaaggaaugcagga

SEQ ID NO: 2152900 - RNA, 19 nt, Artificial Sequence
  Description of Artificial Sequence: Synthetic oligonucleotide
  Sense strand starting at position 2634 of SEQ ID NO: 1882860
cagaguuaacgguaccaag

SEQ ID NO: 2152901 - RNA, 19 nt, Artificial Sequence
  Description of Artificial Sequence: Synthetic oligonucleotide
  Antisense strand to SEQ ID NO: 2152900
cuugguaccguuaacucug

SEQ ID NO: 2152902 - RNA, 19 nt, Artificial Sequence
  Description of Artificial Sequence: Synthetic oligonucleotide
  Sense strand starting at position 2680 of SEQ ID NO: 1882860
uggugcagagguuauauaa

SEQ ID NO: 2152903 - RNA, 19 nt, Artificial Sequence
  Description of Artificial Sequence: Synthetic oligonucleotide
  Antisense strand to SEQ ID NO: 2152902
uuauauaaccucugcacca

SEQ ID NO: 2152904 - RNA, 19 nt, Artificial Sequence
  Description of Artificial Sequence: Synthetic oligonucleotide
  Sense strand starting at position 2704 of SEQ ID NO: 1882860
uggguuuauauuggguaua

SEQ ID NO: 2152905 - RNA, 19 nt, Artificial Sequence
  Description of Artificial Sequence: Synthetic oligonucleotide
  Antisense strand to SEQ ID NO: 2152904
uauacccaauauaaaccca

SEQ ID NO: 2152906 - RNA, 19 nt, Artificial Sequence
  Description of Artificial Sequence: Synthetic oligonucleotide
  Sense strand starting at position 2706 of SEQ ID NO: 1882860
gguuuauauuggguauaua

SEQ ID NO: 2152907 - RNA, 19 nt, Artificial Sequence
  Description of Artificial Sequence: Synthetic oligonucleotide
  Antisense strand to SEQ ID NO: 2152906
uauauacccaauauaaacc

SEQ ID NO: 2152908 - RNA, 19 nt, Artificial Sequence
  Description of Artificial Sequence: Synthetic oligonucleotide
  Sense strand starting at position 2811 of SEQ ID NO: 1882860
agauguagaauguguucua

SEQ ID NO: 2152909 - RNA, 19 nt, Artificial Sequence
  Description of Artificial Sequence: Synthetic oligonucleotide
  Antisense strand to SEQ ID NO: 2152908
uagaacacauucuacaucu

SEQ ID NO: 2152910 - RNA, 19 nt, Artificial Sequence
  Description of Artificial Sequence: Synthetic oligonucleotide
  Sense strand starting at position 2812 of SEQ ID NO: 1882860
gauguagaauguguucuaa

SEQ ID NO: 2152911 - RNA, 19 nt, Artificial Sequence
  Description of Artificial Sequence: Synthetic oligonucleotide
  Antisense strand to SEQ ID NO: 2152910
uuagaacacauucuacauc

SEQ ID NO: 2152912 - RNA, 19 nt, Artificial Sequence
  Description of Artificial Sequence: Synthetic oligonucleotide
  Sense strand starting at position 2814 of SEQ ID NO: 1882860
uguagaauguguucuaaag

SEQ ID NO: 2152913 - RNA, 19 nt, Artificial Sequence
  Description of Artificial Sequence: Synthetic oligonucleotide
  Antisense strand to SEQ ID NO: 2152912
cuuuagaacacauucuaca

SEQ ID NO: 2152914 - RNA, 19 nt, Artificial Sequence
  Description of Artificial Sequence: Synthetic oligonucleotide
  Sense strand starting at position 2948 of SEQ ID NO: 1882860
gcuuaagaaagaggguuua

SEQ ID NO: 2152915 - RNA, 19 nt, Artificial Sequence
  Description of Artificial Sequence: Synthetic oligonucleotide
  Antisense strand to SEQ ID NO: 2152914
uaaacccucuuucuuaagc

SEQ ID NO: 2152916 - RNA, 19 nt, Artificial Sequence
  Description of Artificial Sequence: Synthetic oligonucleotide
  Sense strand starting at position 2958 of SEQ ID NO: 1882860
gaggguuuaagucgccuga

SEQ ID NO: 2152917 - RNA, 19 nt, Artificial Sequence
  Description of Artificial Sequence: Synthetic oligonucleotide
  Antisense strand to SEQ ID NO: 2152916
ucaggcgacuuaaacccuc

SEQ ID NO: 2152918 - RNA, 19 nt, Artificial Sequence
  Description of Artificial Sequence: Synthetic oligonucleotide
  Sense strand starting at position 2960 of SEQ ID NO: 1882860
ggguuuaagucgccugaaa

SEQ ID NO: 2152919 - RNA, 19 nt, Artificial Sequence
  Description of Artificial Sequence: Synthetic oligonucleotide
  Antisense strand to SEQ ID NO: 2152918
uuucaggcgacuuaaaccc

SEQ ID NO: 2152920 - RNA, 19 nt, Artificial Sequence
  Description of Artificial Sequence: Synthetic oligonucleotide
  Sense strand starting at position 2984 of SEQ ID NO: 1882860
gugaguucacccuggacga

SEQ ID NO: 2152921 - RNA, 19 nt, Artificial Sequence
  Description of Artificial Sequence: Synthetic oligonucleotide
  Antisense strand to SEQ ID NO: 2152920
ucguccagggugaacucac

SEQ ID NO: 2152922 - RNA, 19 nt, Artificial Sequence
  Description of Artificial Sequence: Synthetic oligonucleotide
  Sense strand starting at position 3000 of SEQ ID NO: 1882860
cgagcuucugcugccaauu

SEQ ID NO: 2152923 - RNA, 19 nt, Artificial Sequence
  Description of Artificial Sequence: Synthetic oligonucleotide
  Antisense strand to SEQ ID NO: 2152922
aauuggcagcagaagcucg

SEQ ID NO: 2152924 - RNA, 19 nt, Artificial Sequence
  Description of Artificial Sequence: Synthetic oligonucleotide
  Sense strand starting at position 3293 of SEQ ID NO: 1882860
cuguuagaaaccugugguu

SEQ ID NO: 2152925 - RNA, 19 nt, Artificial Sequence
  Description of Artificial Sequence: Synthetic oligonucleotide
  Antisense strand to SEQ ID NO: 2152924
aaccacagguuucuaacag

SEQ ID NO: 2152926 - RNA, 19 nt, Artificial Sequence
  Description of Artificial Sequence: Synthetic oligonucleotide
  Sense strand starting at position 3657 of SEQ ID NO: 1882860
uacagaauuuccuggaguu

SEQ ID NO: 2152927 - RNA, 19 nt, Artificial Sequence
  Description of Artificial Sequence: Synthetic oligonucleotide
  Antisense strand to SEQ ID NO: 2152926
aacuccaggaaauucugua

SEQ ID NO: 2152928 - RNA, 19 nt, Artificial Sequence
  Description of Artificial Sequence: Synthetic oligonucleotide
  Sense strand starting at position 3710 of SEQ ID NO: 1882860
gguuauacccuauguaagu

SEQ ID NO: 2152929 - RNA, 19 nt, Artificial Sequence
  Description of Artificial Sequence: Synthetic oligonucleotide
  Antisense strand to SEQ ID NO: 2152928
acuuacauaggguauaacc

SEQ ID NO: 2152930 - RNA, 19 nt, Artificial Sequence
  Description of Artificial Sequence: Synthetic oligonucleotide
  Sense strand starting at position 3716 of SEQ ID NO: 1882860
acccuauguaagugaagga

SEQ ID NO: 2152931 - RNA, 19 nt, Artificial Sequence
  Description of Artificial Sequence: Synthetic oligonucleotide
  Antisense strand to SEQ ID NO: 2152930
uccuucacuuacauagggu

SEQ ID NO: 2152932 - RNA, 19 nt, Artificial Sequence
  Description of Artificial Sequence: Synthetic oligonucleotide
  Sense strand starting at position 3743 of SEQ ID NO: 1882860
cgacaagucugauugguug

SEQ ID NO: 2152933 - RNA, 19 nt, Artificial Sequence
  Description of Artificial Sequence: Synthetic oligonucleotide
  Antisense strand to SEQ ID NO: 2152932
caaccaaucagacuugucg

SEQ ID NO: 2152934 - RNA, 19 nt, Artificial Sequence
  Description of Artificial Sequence: Synthetic oligonucleotide
  Sense strand starting at position 3816 of SEQ ID NO: 1882860
gacaguagccucugauacu

SEQ ID NO: 2152935 - RNA, 19 nt, Artificial Sequence
  Description of Artificial Sequence: Synthetic oligonucleotide
  Antisense strand to SEQ ID NO: 2152934
aguaucagaggcuacuguc

SEQ ID NO: 2152936 - RNA, 19 nt, Artificial Sequence
  Description of Artificial Sequence: Synthetic oligonucleotide
  Sense strand starting at position 3892 of SEQ ID NO: 1882860
agggcaaauuggccuuaga

SEQ ID NO: 2152937 - RNA, 19 nt, Artificial Sequence
  Description of Artificial Sequence: Synthetic oligonucleotide
  Antisense strand to SEQ ID NO: 2152936
ucuaaggccaauuugcccu

SEQ ID NO: 2152938 - RNA, 19 nt, Artificial Sequence
  Description of Artificial Sequence: Synthetic oligonucleotide
  Sense strand starting at position 3895 of SEQ ID NO: 1882860
gcaaauuggccuuagauuc

SEQ ID NO: 2152939 - RNA, 19 nt, Artificial Sequence
  Description of Artificial Sequence: Synthetic oligonucleotide
  Antisense strand to SEQ ID NO: 2152938
gaaucuaaggccaauuugc

SEQ ID NO: 2152940 - RNA, 19 nt, Artificial Sequence
  Description of Artificial Sequence: Synthetic oligonucleotide
  Sense strand starting at position 3952 of SEQ ID NO: 1882860
ucaugaauggucuggagua

SEQ ID NO: 2152941 - RNA, 19 nt, Artificial Sequence
  Description of Artificial Sequence: Synthetic oligonucleotide
  Antisense strand to SEQ ID NO: 2152940
uacuccagaccauucauga

SEQ ID NO: 2152942 - RNA, 19 nt, Artificial Sequence
  Description of Artificial Sequence: Synthetic oligonucleotide
  Sense strand starting at position 3967 of SEQ ID NO: 1882860
aguaaaucauaagcggauu

SEQ ID NO: 2152943 - RNA, 19 nt, Artificial Sequence
  Description of Artificial Sequence: Synthetic oligonucleotide
  Antisense strand to SEQ ID NO: 2152942
aauccgcuuaugauuuacu

SEQ ID NO: 2152944 - RNA, 19 nt, Artificial Sequence
  Description of Artificial Sequence: Synthetic oligonucleotide
  Sense strand starting at position 43 of SEQ ID NO: 1882861
cagagucaccacugugauu

SEQ ID NO: 2152945 - RNA, 19 nt, Artificial Sequence
  Description of Artificial Sequence: Synthetic oligonucleotide
  Antisense strand to SEQ ID NO: 2152944
aaucacaguggugacucug

SEQ ID NO: 2152946 - RNA, 19 nt, Artificial Sequence
  Description of Artificial Sequence: Synthetic oligonucleotide
  Sense strand starting at position 55 of SEQ ID NO: 1882861
ugugauucccuccaucacu

SEQ ID NO: 2152947 - RNA, 19 nt, Artificial Sequence
  Description of Artificial Sequence: Synthetic oligonucleotide
  Antisense strand to SEQ ID NO: 2152946
agugauggagggaaucaca

SEQ ID NO: 2152948 - RNA, 19 nt, Artificial Sequence
  Description of Artificial Sequence: Synthetic oligonucleotide
  Sense strand starting at position 781 of SEQ ID NO: 1882861
uaugaaauguaggcuggaa

SEQ ID NO: 2152949 - RNA, 19 nt, Artificial Sequence
  Description of Artificial Sequence: Synthetic oligonucleotide
  Antisense strand to SEQ ID NO: 2152948
uuccagccuacauuucaua

SEQ ID NO: 2152950 - RNA, 19 nt, Artificial Sequence
  Description of Artificial Sequence: Synthetic oligonucleotide
  Sense strand starting at position 802 of SEQ ID NO: 1882861
caagauuucuacuaugggu

SEQ ID NO: 2152951 - RNA, 19 nt, Artificial Sequence
  Description of Artificial Sequence: Synthetic oligonucleotide
  Antisense strand to SEQ ID NO: 2152950
acccauaguagaaaucuug

SEQ ID NO: 2152952 - RNA, 19 nt, Artificial Sequence
  Description of Artificial Sequence: Synthetic oligonucleotide
  Sense strand starting at position 805 of SEQ ID NO: 1882861
gauuucuacuauggguaaa

SEQ ID NO: 2152953 - RNA, 19 nt, Artificial Sequence
  Description of Artificial Sequence: Synthetic oligonucleotide
  Antisense strand to SEQ ID NO: 2152952
uuuacccauaguagaaauc

SEQ ID NO: 2152954 - RNA, 19 nt, Artificial Sequence
  Description of Artificial Sequence: Synthetic oligonucleotide
  Sense strand starting at position 807 of SEQ ID NO: 1882861
uuucuacuauggguaaacu

SEQ ID NO: 2152955 - RNA, 19 nt, Artificial Sequence
  Description of Artificial Sequence: Synthetic oligonucleotide
  Antisense strand to SEQ ID NO: 2152954
aguuuacccauaguagaaa

SEQ ID NO: 2152956 - RNA, 19 nt, Artificial Sequence
  Description of Artificial Sequence: Synthetic oligonucleotide
  Sense strand starting at position 816 of SEQ ID NO: 1882861
uggguaaacuaaucuugaa

SEQ ID NO: 2152957 - RNA, 19 nt, Artificial Sequence
  Description of Artificial Sequence: Synthetic oligonucleotide
  Antisense strand to SEQ ID NO: 2152956
uucaagauuaguuuaccca

SEQ ID NO: 2152958 - RNA, 19 nt, Artificial Sequence
  Description of Artificial Sequence: Synthetic oligonucleotide
  Sense strand starting at position 852 of SEQ ID NO: 1882861
ucagaugggugccugugaa

SEQ ID NO: 2152959 - RNA, 19 nt, Artificial Sequence
  Description of Artificial Sequence: Synthetic oligonucleotide
  Antisense strand to SEQ ID NO: 2152958
uucacaggcacccaucuga

SEQ ID NO: 2152960 - RNA, 19 nt, Artificial Sequence
  Description of Artificial Sequence: Synthetic oligonucleotide
  Sense strand starting at position 898 of SEQ ID NO: 1882861
ucuuuauaguuaucuaguc

SEQ ID NO: 2152961 - RNA, 19 nt, Artificial Sequence
  Description of Artificial Sequence: Synthetic oligonucleotide
  Antisense strand to SEQ ID NO: 2152960
gacuagauaacuauaaaga

SEQ ID NO: 2152962 - RNA, 19 nt, Artificial Sequence
  Description of Artificial Sequence: Synthetic oligonucleotide
  Sense strand starting at position 903 of SEQ ID NO: 1882861
auaguuaucuaguccugaa

SEQ ID NO: 2152963 - RNA, 19 nt, Artificial Sequence
  Description of Artificial Sequence: Synthetic oligonucleotide
  Antisense strand to SEQ ID NO: 2152962
uucaggacuagauaacuau

SEQ ID NO: 2152964 - RNA, 19 nt, Artificial Sequence
  Description of Artificial Sequence: Synthetic oligonucleotide
  Sense strand starting at position 928 of SEQ ID NO: 1882861
gcaucaucuuguccuccau

SEQ ID NO: 2152965 - RNA, 19 nt, Artificial Sequence
  Description of Artificial Sequence: Synthetic oligonucleotide
  Antisense strand to SEQ ID NO: 2152964
auggaggacaagaugaugc

SEQ ID NO: 2152966 - RNA, 19 nt, Artificial Sequence
  Description of Artificial Sequence: Synthetic oligonucleotide
  Sense strand starting at position 948 of SEQ ID NO: 1882861
uccaaucagucacugagua

SEQ ID NO: 2152967 - RNA, 19 nt, Artificial Sequence
  Description of Artificial Sequence: Synthetic oligonucleotide
  Antisense strand to SEQ ID NO: 2152966
uacucagugacugauugga

SEQ ID NO: 2152968 - RNA, 19 nt, Artificial Sequence
  Description of Artificial Sequence: Synthetic oligonucleotide
  Sense strand starting at position 953 of SEQ ID NO: 1882861
ucagucacugaguaccaua

SEQ ID NO: 2152969 - RNA, 19 nt, Artificial Sequence
  Description of Artificial Sequence: Synthetic oligonucleotide
  Antisense strand to SEQ ID NO: 2152968
uaugguacucagugacuga

SEQ ID NO: 2152970 - RNA, 19 nt, Artificial Sequence
  Description of Artificial Sequence: Synthetic oligonucleotide
  Sense strand starting at position 1277 of SEQ ID NO: 1882861
cuagguugguguccucauu

SEQ ID NO: 2152971 - RNA, 19 nt, Artificial Sequence
  Description of Artificial Sequence: Synthetic oligonucleotide
  Antisense strand to SEQ ID NO: 2152970
aaugaggacaccaaccuag

SEQ ID NO: 2152972 - RNA, 19 nt, Artificial Sequence
  Description of Artificial Sequence: Synthetic oligonucleotide
  Sense strand starting at position 1357 of SEQ ID NO: 1882861
uuuggucugucuucuacaa

SEQ ID NO: 2152973 - RNA, 19 nt, Artificial Sequence
  Description of Artificial Sequence: Synthetic oligonucleotide
  Antisense strand to SEQ ID NO: 2152972
uuguagaagacagaccaaa

SEQ ID NO: 2152974 - RNA, 19 nt, Artificial Sequence
  Description of Artificial Sequence: Synthetic oligonucleotide
  Sense strand starting at position 1429 of SEQ ID NO: 1882861
ggagauauauguuaaagaa

SEQ ID NO: 2152975 - RNA, 19 nt, Artificial Sequence
  Description of Artificial Sequence: Synthetic oligonucleotide
  Antisense strand to SEQ ID NO: 2152974
uucuuuaacauauaucucc

SEQ ID NO: 2152976 - RNA, 19 nt, Artificial Sequence
  Description of Artificial Sequence: Synthetic oligonucleotide
  Sense strand starting at position 1454 of SEQ ID NO: 1882861
guagcagauuuguaggaug

SEQ ID NO: 2152977 - RNA, 19 nt, Artificial Sequence
  Description of Artificial Sequence: Synthetic oligonucleotide
  Antisense strand to SEQ ID NO: 2152976
cauccuacaaaucugcuac

SEQ ID NO: 2152978 - RNA, 19 nt, Artificial Sequence
  Description of Artificial Sequence: Synthetic oligonucleotide
  Sense strand starting at position 1457 of SEQ ID NO: 1882861
gcagauuuguaggaugaac

SEQ ID NO: 2152979 - RNA, 19 nt, Artificial Sequence
  Description of Artificial Sequence: Synthetic oligonucleotide
  Antisense strand to SEQ ID NO: 2152978
guucauccuacaaaucugc

SEQ ID NO: 2152980 - RNA, 19 nt, Artificial Sequence
  Description of Artificial Sequence: Synthetic oligonucleotide
  Sense strand starting at position 1590 of SEQ ID NO: 1882861
acgaguaacuaugugagau

SEQ ID NO: 2152981 - RNA, 19 nt, Artificial Sequence
  Description of Artificial Sequence: Synthetic oligonucleotide
  Antisense strand to SEQ ID NO: 2152980
aucucacauaguuacucgu

SEQ ID NO: 2152982 - RNA, 19 nt, Artificial Sequence
  Description of Artificial Sequence: Synthetic oligonucleotide
  Sense strand starting at position 1591 of SEQ ID NO: 1882861
cgaguaacuaugugagaug

SEQ ID NO: 2152983 - RNA, 19 nt, Artificial Sequence
  Description of Artificial Sequence: Synthetic oligonucleotide
  Antisense strand to SEQ ID NO: 2152982
caucucacauaguuacucg

SEQ ID NO: 2152984 - RNA, 19 nt, Artificial Sequence
  Description of Artificial Sequence: Synthetic oligonucleotide
  Sense strand starting at position 1798 of SEQ ID NO: 1882861
gcuuuaagauuacagacaa

SEQ ID NO: 2152985 - RNA, 19 nt, Artificial Sequence
  Description of Artificial Sequence: Synthetic oligonucleotide
  Antisense strand to SEQ ID NO: 2152984
uugucuguaaucuuaaagc

SEQ ID NO: 2152986 - RNA, 19 nt, Artificial Sequence
  Description of Artificial Sequence: Synthetic oligonucleotide
  Sense strand starting at position 1830 of SEQ ID NO: 1882861
gacucuguaucucuugagu

SEQ ID NO: 2152987 - RNA, 19 nt, Artificial Sequence
  Description of Artificial Sequence: Synthetic oligonucleotide
  Antisense strand to SEQ ID NO: 2152986
acucaagagauacagaguc

SEQ ID NO: 2152988 - RNA, 19 nt, Artificial Sequence
  Description of Artificial Sequence: Synthetic oligonucleotide
  Sense strand starting at position 1835 of SEQ ID NO: 1882861
uguaucucuugaguccuaa

SEQ ID NO: 2152989 - RNA, 19 nt, Artificial Sequence
  Description of Artificial Sequence: Synthetic oligonucleotide
  Antisense strand to SEQ ID NO: 2152988
uuaggacucaagagauaca

SEQ ID NO: 2152990 - RNA, 19 nt, Artificial Sequence
  Description of Artificial Sequence: Synthetic oligonucleotide
  Sense strand starting at position 1881 of SEQ ID NO: 1882861
gcauguagcagccaagaga

SEQ ID NO: 2152991 - RNA, 19 nt, Artificial Sequence
  Description of Artificial Sequence: Synthetic oligonucleotide
  Antisense strand to SEQ ID NO: 2152990
ucucuuggcugcuacaugc

SEQ ID NO: 2152992 - RNA, 19 nt, Artificial Sequence
  Description of Artificial Sequence: Synthetic oligonucleotide
  Sense strand starting at position 2113 of SEQ ID NO: 1882861
gagugagaggacugucaac

SEQ ID NO: 2152993 - RNA, 19 nt, Artificial Sequence
  Description of Artificial Sequence: Synthetic oligonucleotide
  Antisense strand to SEQ ID NO: 2152992
guugacaguccucucacuc

SEQ ID NO: 2152994 - RNA, 19 nt, Artificial Sequence
  Description of Artificial Sequence: Synthetic oligonucleotide
  Sense strand starting at position 2119 of SEQ ID NO: 1882861
gaggacugucaacgaaaua

SEQ ID NO: 2152995 - RNA, 19 nt, Artificial Sequence
  Description of Artificial Sequence: Synthetic oligonucleotide
  Antisense strand to SEQ ID NO: 2152994
uauuucguugacaguccuc

SEQ ID NO: 2152996 - RNA, 19 nt, Artificial Sequence
  Description of Artificial Sequence: Synthetic oligonucleotide
  Sense strand starting at position 2293 of SEQ ID NO: 1882861
gaauguggcccucgaaguu

SEQ ID NO: 2152997 - RNA, 19 nt, Artificial Sequence
  Description of Artificial Sequence: Synthetic oligonucleotide
  Antisense strand to SEQ ID NO: 2152996
aacuucgagggccacauuc

SEQ ID NO: 2152998 - RNA, 19 nt, Artificial Sequence
  Description of Artificial Sequence: Synthetic oligonucleotide
  Sense strand starting at position 2341 of SEQ ID NO: 1882861
ucgauauuaagaggugauu

SEQ ID NO: 2152999 - RNA, 19 nt, Artificial Sequence
  Description of Artificial Sequence: Synthetic oligonucleotide
  Antisense strand to SEQ ID NO: 2152998
aaucaccucuuaauaucga

SEQ ID NO: 2153000 - RNA, 19 nt, Artificial Sequence
  Description of Artificial Sequence: Synthetic oligonucleotide
  Sense strand starting at position 2350 of SEQ ID NO: 1882861
agaggugauucgguuauga

SEQ ID NO: 2153001 - RNA, 19 nt, Artificial Sequence
  Description of Artificial Sequence: Synthetic oligonucleotide
  Antisense strand to SEQ ID NO: 2153000
ucauaaccgaaucaccucu

SEQ ID NO: 2153002 - RNA, 19 nt, Artificial Sequence
  Description of Artificial Sequence: Synthetic oligonucleotide
  Sense strand starting at position 2404 of SEQ ID NO: 1882861
ugcgggagugguuaguuau

SEQ ID NO: 2153003 - RNA, 19 nt, Artificial Sequence
  Description of Artificial Sequence: Synthetic oligonucleotide
  Antisense strand to SEQ ID NO: 2153002
auaacuaaccacucccgca

SEQ ID NO: 2153004 - RNA, 19 nt, Artificial Sequence
  Description of Artificial Sequence: Synthetic oligonucleotide
  Sense strand starting at position 2405 of SEQ ID NO: 1882861
gcgggagugguuaguuauc

SEQ ID NO: 2153005 - RNA, 19 nt, Artificial Sequence
  Description of Artificial Sequence: Synthetic oligonucleotide
  Antisense strand to SEQ ID NO: 2153004
gauaacuaaccacucccgc

SEQ ID NO: 2153006 - RNA, 19 nt, Artificial Sequence
  Description of Artificial Sequence: Synthetic oligonucleotide
  Sense strand starting at position 2407 of SEQ ID NO: 1882861
gggagugguuaguuaucau

SEQ ID NO: 2153007 - RNA, 19 nt, Artificial Sequence
  Description of Artificial Sequence: Synthetic oligonucleotide
  Antisense strand to SEQ ID NO: 2153006
augauaacuaaccacuccc

SEQ ID NO: 2153008 - RNA, 19 nt, Artificial Sequence
  Description of Artificial Sequence: Synthetic oligonucleotide
  Sense strand starting at position 2410 of SEQ ID NO: 1882861
agugguuaguuaucaugga

SEQ ID NO: 2153009 - RNA, 19 nt, Artificial Sequence
  Description of Artificial Sequence: Synthetic oligonucleotide
  Antisense strand to SEQ ID NO: 2153008
uccaugauaacuaaccacu

SEQ ID NO: 2153010 - RNA, 19 nt, Artificial Sequence
  Description of Artificial Sequence: Synthetic oligonucleotide
  Sense strand starting at position 2488 of SEQ ID NO: 1882861
gccuccuugccaugagauu

SEQ ID NO: 2153011 - RNA, 19 nt, Artificial Sequence
  Description of Artificial Sequence: Synthetic oligonucleotide
  Antisense strand to SEQ ID NO: 2153010
aaucucauggcaaggaggc

SEQ ID NO: 2153012 - RNA, 19 nt, Artificial Sequence
  Description of Artificial Sequence: Synthetic oligonucleotide
  Sense strand starting at position 2723 of SEQ ID NO: 1882861
ggccaucaacauggugauu

SEQ ID NO: 2153013 - RNA, 19 nt, Artificial Sequence
  Description of Artificial Sequence: Synthetic oligonucleotide
  Antisense strand to SEQ ID NO: 2153012
aaucaccauguugauggcc

SEQ ID NO: 2153014 - RNA, 19 nt, Artificial Sequence
  Description of Artificial Sequence: Synthetic oligonucleotide
  Sense strand starting at position 2736 of SEQ ID NO: 1882861
gugauuagcuccucaucug

SEQ ID NO: 2153015 - RNA, 19 nt, Artificial Sequence
  Description of Artificial Sequence: Synthetic oligonucleotide
  Antisense strand to SEQ ID NO: 2153014
cagaugaggagcuaaucac

SEQ ID NO: 2153016 - RNA, 19 nt, Artificial Sequence
  Description of Artificial Sequence: Synthetic oligonucleotide
  Sense strand starting at position 3289 of SEQ ID NO: 1882861
uaggcacacugggauuuaa

SEQ ID NO: 2153017 - RNA, 19 nt, Artificial Sequence
  Description of Artificial Sequence: Synthetic oligonucleotide
  Antisense strand to SEQ ID NO: 2153016
uuaaaucccagugugccua

SEQ ID NO: 2153018 - RNA, 19 nt, Artificial Sequence
  Description of Artificial Sequence: Synthetic oligonucleotide
  Sense strand starting at position 3360 of SEQ ID NO: 1882861
guguacauaagacauuagu

SEQ ID NO: 2153019 - RNA, 19 nt, Artificial Sequence
  Description of Artificial Sequence: Synthetic oligonucleotide
  Antisense strand to SEQ ID NO: 2153018
acuaaugucuuauguacac

SEQ ID NO: 2153020 - RNA, 19 nt, Artificial Sequence
  Description of Artificial Sequence: Synthetic oligonucleotide
  Sense strand starting at position 3592 of SEQ ID NO: 1882861
ggagacaauugucaaagaa

SEQ ID NO: 2153021 - RNA, 19 nt, Artificial Sequence
  Description of Artificial Sequence: Synthetic oligonucleotide
  Antisense strand to SEQ ID NO: 2153020
uucuuugacaauugucucc

SEQ ID NO: 2153022 - RNA, 19 nt, Artificial Sequence
  Description of Artificial Sequence: Synthetic oligonucleotide
  Sense strand starting at position 3697 of SEQ ID NO: 1882861
cuagacauguuauugcuaa

SEQ ID NO: 2153023 - RNA, 19 nt, Artificial Sequence
  Description of Artificial Sequence: Synthetic oligonucleotide
  Antisense strand to SEQ ID NO: 2153022
uuagcaauaacaugucuag

SEQ ID NO: 2153024 - RNA, 19 nt, Artificial Sequence
  Description of Artificial Sequence: Synthetic oligonucleotide
  Sense strand starting at position 133 of SEQ ID NO: 1882862
cuggacucauugucuuaaa

SEQ ID NO: 2153025 - RNA, 19 nt, Artificial Sequence
  Description of Artificial Sequence: Synthetic oligonucleotide
  Antisense strand to SEQ ID NO: 2153024
uuuaagacaaugaguccag

SEQ ID NO: 2153026 - RNA, 19 nt, Artificial Sequence
  Description of Artificial Sequence: Synthetic oligonucleotide
  Sense strand starting at position 134 of SEQ ID NO: 1882862
uggacucauugucuuaaau

SEQ ID NO: 2153027 - RNA, 19 nt, Artificial Sequence
  Description of Artificial Sequence: Synthetic oligonucleotide
  Antisense strand to SEQ ID NO: 2153026
auuuaagacaaugagucca

SEQ ID NO: 2153028 - RNA, 19 nt, Artificial Sequence
  Description of Artificial Sequence: Synthetic oligonucleotide
  Sense strand starting at position 159 of SEQ ID NO: 1882862
uuguccaaggguugaagaa

SEQ ID NO: 2153029 - RNA, 19 nt, Artificial Sequence
  Description of Artificial Sequence: Synthetic oligonucleotide
  Antisense strand to SEQ ID NO: 2153028
uucuucaacccuuggacaa

SEQ ID NO: 2153030 - RNA, 19 nt, Artificial Sequence
  Description of Artificial Sequence: Synthetic oligonucleotide
  Sense strand starting at position 1987 of SEQ ID NO: 1882862
gccggaguccaagagcuuu

SEQ ID NO: 2153031 - RNA, 19 nt, Artificial Sequence
  Description of Artificial Sequence: Synthetic oligonucleotide
  Antisense strand to SEQ ID NO: 2153030
aaagcucuuggacuccggc

SEQ ID NO: 2153032 - RNA, 19 nt, Artificial Sequence
  Description of Artificial Sequence: Synthetic oligonucleotide
  Sense strand starting at position 2166 of SEQ ID NO: 1882862
uauagagucuggcuuuaaa

SEQ ID NO: 2153033 - RNA, 19 nt, Artificial Sequence
  Description of Artificial Sequence: Synthetic oligonucleotide
  Antisense strand to SEQ ID NO: 2153032
uuuaaagccagacucuaua

SEQ ID NO: 2153034 - RNA, 19 nt, Artificial Sequence
  Description of Artificial Sequence: Synthetic oligonucleotide
  Sense strand starting at position 2197 of SEQ ID NO: 1882862
agcucuaggucugugauca

SEQ ID NO: 2153035 - RNA, 19 nt, Artificial Sequence
  Description of Artificial Sequence: Synthetic oligonucleotide
  Antisense strand to SEQ ID NO: 2153034
ugaucacagaccuagagcu

SEQ ID NO: 2153036 - RNA, 19 nt, Artificial Sequence
  Description of Artificial Sequence: Synthetic oligonucleotide
  Sense strand starting at position 2201 of SEQ ID NO: 1882862
cuaggucugugaucauaac

SEQ ID NO: 2153037 - RNA, 19 nt, Artificial Sequence
  Description of Artificial Sequence: Synthetic oligonucleotide
  Antisense strand to SEQ ID NO: 2153036
guuaugaucacagaccuag

SEQ ID NO: 2153038 - RNA, 19 nt, Artificial Sequence
  Description of Artificial Sequence: Synthetic oligonucleotide
  Sense strand starting at position 2207 of SEQ ID NO: 1882862
cugugaucauaaccacuga

SEQ ID NO: 2153039 - RNA, 19 nt, Artificial Sequence
  Description of Artificial Sequence: Synthetic oligonucleotide
  Antisense strand to SEQ ID NO: 2153038
ucagugguuaugaucacag

SEQ ID NO: 2153040 - RNA, 19 nt, Artificial Sequence
  Description of Artificial Sequence: Synthetic oligonucleotide
  Sense strand starting at position 2233 of SEQ ID NO: 1882862
ugcuucuuacagcaagagu

SEQ ID NO: 2153041 - RNA, 19 nt, Artificial Sequence
  Description of Artificial Sequence: Synthetic oligonucleotide
  Antisense strand to SEQ ID NO: 2153040
acucuugcuguaagaagca

SEQ ID NO: 2153042 - RNA, 19 nt, Artificial Sequence
  Description of Artificial Sequence: Synthetic oligonucleotide
  Sense strand starting at position 2236 of SEQ ID NO: 1882862
uucuuacagcaagagugua

SEQ ID NO: 2153043 - RNA, 19 nt, Artificial Sequence
  Description of Artificial Sequence: Synthetic oligonucleotide
  Antisense strand to SEQ ID NO: 2153042
uacacucuugcuguaagaa

SEQ ID NO: 2153044 - RNA, 19 nt, Artificial Sequence
  Description of Artificial Sequence: Synthetic oligonucleotide
  Sense strand starting at position 2241 of SEQ ID NO: 1882862
acagcaagaguguaucuga

SEQ ID NO: 2153045 - RNA, 19 nt, Artificial Sequence
  Description of Artificial Sequence: Synthetic oligonucleotide
  Antisense strand to SEQ ID NO: 2153044
ucagauacacucuugcugu

SEQ ID NO: 2153046 - RNA, 19 nt, Artificial Sequence
  Description of Artificial Sequence: Synthetic oligonucleotide
  Sense strand starting at position 2244 of SEQ ID NO: 1882862
gcaagaguguaucugacga

SEQ ID NO: 2153047 - RNA, 19 nt, Artificial Sequence
  Description of Artificial Sequence: Synthetic oligonucleotide
  Antisense strand to SEQ ID NO: 2153046
ucgucagauacacucuugc

SEQ ID NO: 2153048 - RNA, 19 nt, Artificial Sequence
  Description of Artificial Sequence: Synthetic oligonucleotide
  Sense strand starting at position 2261 of SEQ ID NO: 1882862
gaagucgugacuuggaacu

SEQ ID NO: 2153049 - RNA, 19 nt, Artificial Sequence
  Description of Artificial Sequence: Synthetic oligonucleotide
  Antisense strand to SEQ ID NO: 2153048
aguuccaagucacgacuuc

SEQ ID NO: 2153050 - RNA, 19 nt, Artificial Sequence
  Description of Artificial Sequence: Synthetic oligonucleotide
  Sense strand starting at position 2298 of SEQ ID NO: 1882862
uccagaguuuaauucugaa

SEQ ID NO: 2153051 - RNA, 19 nt, Artificial Sequence
  Description of Artificial Sequence: Synthetic oligonucleotide
  Antisense strand to SEQ ID NO: 2153050
uucagaauuaaacucugga

SEQ ID NO: 2153052 - RNA, 19 nt, Artificial Sequence
  Description of Artificial Sequence: Synthetic oligonucleotide
  Sense strand starting at position 2323 of SEQ ID NO: 1882862
aaaggaggcugauauuaaa

SEQ ID NO: 2153053 - RNA, 19 nt, Artificial Sequence
  Description of Artificial Sequence: Synthetic oligonucleotide
  Antisense strand to SEQ ID NO: 2153052
uuuaauaucagccuccuuu

SEQ ID NO: 2153054 - RNA, 19 nt, Artificial Sequence
  Description of Artificial Sequence: Synthetic oligonucleotide
  Sense strand starting at position 2396 of SEQ ID NO: 1882862
agaauacauugcuaaagaa

SEQ ID NO: 2153055 - RNA, 19 nt, Artificial Sequence
  Description of Artificial Sequence: Synthetic oligonucleotide
  Antisense strand to SEQ ID NO: 2153054
uucuuuagcaauguauucu

SEQ ID NO: 2153056 - RNA, 19 nt, Artificial Sequence
  Description of Artificial Sequence: Synthetic oligonucleotide
  Sense strand starting at position 2423 of SEQ ID NO: 1882862
aagaaacgauacucguauu

SEQ ID NO: 2153057 - RNA, 19 nt, Artificial Sequence
  Description of Artificial Sequence: Synthetic oligonucleotide
  Antisense strand to SEQ ID NO: 2153056
aauacgaguaucguuucuu

SEQ ID NO: 2153058 - RNA, 19 nt, Artificial Sequence
  Description of Artificial Sequence: Synthetic oligonucleotide
  Sense strand starting at position 2497 of SEQ ID NO: 1882862
aguuguaagcaauaaauuc

SEQ ID NO: 2153059 - RNA, 19 nt, Artificial Sequence
  Description of Artificial Sequence: Synthetic oligonucleotide
  Antisense strand to SEQ ID NO: 2153058
gaauuuauugcuuacaacu

SEQ ID NO: 2153060 - RNA, 19 nt, Artificial Sequence
  Description of Artificial Sequence: Synthetic oligonucleotide
  Sense strand starting at position 2540 of SEQ ID NO: 1882862
uguacugcucaggaagagu

SEQ ID NO: 2153061 - RNA, 19 nt, Artificial Sequence
  Description of Artificial Sequence: Synthetic oligonucleotide
  Antisense strand to SEQ ID NO: 2153060
acucuuccugagcaguaca

SEQ ID NO: 2153062 - RNA, 19 nt, Artificial Sequence
  Description of Artificial Sequence: Synthetic oligonucleotide
  Sense strand starting at position 2599 of SEQ ID NO: 1882862
guugcagauuuauugcaca

SEQ ID NO: 2153063 - RNA, 19 nt, Artificial Sequence
  Description of Artificial Sequence: Synthetic oligonucleotide
  Antisense strand to SEQ ID NO: 2153062
ugugcaauaaaucugcaac

SEQ ID NO: 2153064 - RNA, 19 nt, Artificial Sequence
  Description of Artificial Sequence: Synthetic oligonucleotide
  Sense strand starting at position 2602 of SEQ ID NO: 1882862
gcagauuuauugcacauua

SEQ ID NO: 2153065 - RNA, 19 nt, Artificial Sequence
  Description of Artificial Sequence: Synthetic oligonucleotide
  Antisense strand to SEQ ID NO: 2153064
uaaugugcaauaaaucugc

SEQ ID NO: 2153066 - RNA, 19 nt, Artificial Sequence
  Description of Artificial Sequence: Synthetic oligonucleotide
  Sense strand starting at position 2626 of SEQ ID NO: 1882862
uuuggauggacaggugaau

SEQ ID NO: 2153067 - RNA, 19 nt, Artificial Sequence
  Description of Artificial Sequence: Synthetic oligonucleotide
  Antisense strand to SEQ ID NO: 2153066
auucaccuguccauccaaa

SEQ ID NO: 2153068 - RNA, 19 nt, Artificial Sequence
  Description of Artificial Sequence: Synthetic oligonucleotide
  Sense strand starting at position 2646 of SEQ ID NO: 1882862
uucuuugucccauaauguc

SEQ ID NO: 2153069 - RNA, 19 nt, Artificial Sequence
  Description of Artificial Sequence: Synthetic oligonucleotide
  Antisense strand to SEQ ID NO: 2153068
gacauuaugggacaaagaa

SEQ ID NO: 2153070 - RNA, 19 nt, Artificial Sequence
  Description of Artificial Sequence: Synthetic oligonucleotide
  Sense strand starting at position 3089 of SEQ ID NO: 1882862
gcaugcauagagggagaua

SEQ ID NO: 2153071 - RNA, 19 nt, Artificial Sequence
  Description of Artificial Sequence: Synthetic oligonucleotide
  Antisense strand to SEQ ID NO: 2153070
uaucucccucuaugcaugc

SEQ ID NO: 2153072 - RNA, 19 nt, Artificial Sequence
  Description of Artificial Sequence: Synthetic oligonucleotide
  Sense strand starting at position 3118 of SEQ ID NO: 1882862
gugcaacuagagugauaca

SEQ ID NO: 2153073 - RNA, 19 nt, Artificial Sequence
  Description of Artificial Sequence: Synthetic oligonucleotide
  Antisense strand to SEQ ID NO: 2153072
uguaucacucuaguugcac

SEQ ID NO: 2153074 - RNA, 19 nt, Artificial Sequence
  Description of Artificial Sequence: Synthetic oligonucleotide
  Sense strand starting at position 3137 of SEQ ID NO: 1882862
gccaaugaguagucaguaa

SEQ ID NO: 2153075 - RNA, 19 nt, Artificial Sequence
  Description of Artificial Sequence: Synthetic oligonucleotide
  Antisense strand to SEQ ID NO: 2153074
uuacugacuacucauuggc

SEQ ID NO: 2153076 - RNA, 19 nt, Artificial Sequence
  Description of Artificial Sequence: Synthetic oligonucleotide
  Sense strand starting at position 3148 of SEQ ID NO: 1882862
gucaguaaagaacggaaau

SEQ ID NO: 2153077 - RNA, 19 nt, Artificial Sequence
  Description of Artificial Sequence: Synthetic oligonucleotide
  Antisense strand to SEQ ID NO: 2153076
auuuccguucuuuacugac

SEQ ID NO: 2153078 - RNA, 19 nt, Artificial Sequence
  Description of Artificial Sequence: Synthetic oligonucleotide
  Sense strand starting at position 3149 of SEQ ID NO: 1882862
ucaguaaagaacggaaauu

SEQ ID NO: 2153079 - RNA, 19 nt, Artificial Sequence
  Description of Artificial Sequence: Synthetic oligonucleotide
  Antisense strand to SEQ ID NO: 2153078
aauuuccguucuuuacuga

SEQ ID NO: 2153080 - RNA, 19 nt, Artificial Sequence
  Description of Artificial Sequence: Synthetic oligonucleotide
  Sense strand starting at position 3176 of SEQ ID NO: 1882862
gccauuaucagggacaggu

SEQ ID NO: 2153081 - RNA, 19 nt, Artificial Sequence
  Description of Artificial Sequence: Synthetic oligonucleotide
  Antisense strand to SEQ ID NO: 2153080
accugucccugauaauggc

SEQ ID NO: 2153082 - RNA, 19 nt, Artificial Sequence
  Description of Artificial Sequence: Synthetic oligonucleotide
  Sense strand starting at position 3184 of SEQ ID NO: 1882862
cagggacaggucuguuaga

SEQ ID NO: 2153083 - RNA, 19 nt, Artificial Sequence
  Description of Artificial Sequence: Synthetic oligonucleotide
  Antisense strand to SEQ ID NO: 2153082
ucuaacagaccugucccug

SEQ ID NO: 2153084 - RNA, 19 nt, Artificial Sequence
  Description of Artificial Sequence: Synthetic oligonucleotide
  Sense strand starting at position 3185 of SEQ ID NO: 1882862
agggacaggucuguuagaa

SEQ ID NO: 2153085 - RNA, 19 nt, Artificial Sequence
  Description of Artificial Sequence: Synthetic oligonucleotide
  Antisense strand to SEQ ID NO: 2153084
uucuaacagaccugucccu

SEQ ID NO: 2153086 - RNA, 19 nt, Artificial Sequence
  Description of Artificial Sequence: Synthetic oligonucleotide
  Sense strand starting at position 3274 of SEQ ID NO: 1882862
ggagacucaccaugcagaa

SEQ ID NO: 2153087 - RNA, 19 nt, Artificial Sequence
  Description of Artificial Sequence: Synthetic oligonucleotide
  Antisense strand to SEQ ID NO: 2153086
uucugcauggugagucucc

SEQ ID NO: 2153088 - RNA, 19 nt, Artificial Sequence
  Description of Artificial Sequence: Synthetic oligonucleotide
  Sense strand starting at position 3392 of SEQ ID NO: 1882862
agguguucgcgaaggguuu

SEQ ID NO: 2153089 - RNA, 19 nt, Artificial Sequence
  Description of Artificial Sequence: Synthetic oligonucleotide
  Antisense strand to SEQ ID NO: 2153088
aaacccuucgcgaacaccu

SEQ ID NO: 2153090 - RNA, 19 nt, Artificial Sequence
  Description of Artificial Sequence: Synthetic oligonucleotide
  Sense strand starting at position 3477 of SEQ ID NO: 1882862
ccuggagugccuuggagau

SEQ ID NO: 2153091 - RNA, 19 nt, Artificial Sequence
  Description of Artificial Sequence: Synthetic oligonucleotide
  Antisense strand to SEQ ID NO: 2153090
aucuccaaggcacuccagg

SEQ ID NO: 2153092 - RNA, 19 nt, Artificial Sequence
  Description of Artificial Sequence: Synthetic oligonucleotide
  Sense strand starting at position 3491 of SEQ ID NO: 1882862
gagauauccugucucugga

SEQ ID NO: 2153093 - RNA, 19 nt, Artificial Sequence
  Description of Artificial Sequence: Synthetic oligonucleotide
  Antisense strand to SEQ ID NO: 2153092
uccagagacaggauaucuc

SEQ ID NO: 2153094 - RNA, 19 nt, Artificial Sequence
  Description of Artificial Sequence: Synthetic oligonucleotide
  Sense strand starting at position 3493 of SEQ ID NO: 1882862
gauauccugucucuggaau

SEQ ID NO: 2153095 - RNA, 19 nt, Artificial Sequence
  Description of Artificial Sequence: Synthetic oligonucleotide
  Antisense strand to SEQ ID NO: 2153094
auuccagagacaggauauc

SEQ ID NO: 2153096 - RNA, 19 nt, Artificial Sequence
  Description of Artificial Sequence: Synthetic oligonucleotide
  Sense strand starting at position 3494 of SEQ ID NO: 1882862
auauccugucucuggaaua

SEQ ID NO: 2153097 - RNA, 19 nt, Artificial Sequence
  Description of Artificial Sequence: Synthetic oligonucleotide
  Antisense strand to SEQ ID NO: 2153096
uauuccagagacaggauau

SEQ ID NO: 2153098 - RNA, 19 nt, Artificial Sequence
  Description of Artificial Sequence: Synthetic oligonucleotide
  Sense strand starting at position 3516 of SEQ ID NO: 1882862
ggaauugcaacgggaguaa

SEQ ID NO: 2153099 - RNA, 19 nt, Artificial Sequence
  Description of Artificial Sequence: Synthetic oligonucleotide
  Antisense strand to SEQ ID NO: 2153098
uuacucccguugcaauucc

SEQ ID NO: 2153100 - RNA, 19 nt, Artificial Sequence
  Description of Artificial Sequence: Synthetic oligonucleotide
  Sense strand starting at position 3874 of SEQ ID NO: 1882862
uucccauuaugguuagguu

SEQ ID NO: 2153101 - RNA, 19 nt, Artificial Sequence
  Description of Artificial Sequence: Synthetic oligonucleotide
  Antisense strand to SEQ ID NO: 2153100
aaccuaaccauaaugggaa

SEQ ID NO: 2153102 - RNA, 19 nt, Artificial Sequence
  Description of Artificial Sequence: Synthetic oligonucleotide
  Sense strand starting at position 3875 of SEQ ID NO: 1882862
ucccauuaugguuagguua

SEQ ID NO: 2153103 - RNA, 19 nt, Artificial Sequence
  Description of Artificial Sequence: Synthetic oligonucleotide
  Antisense strand to SEQ ID NO: 2153102
uaaccuaaccauaauggga

SEQ ID NO: 2153104 - RNA, 19 nt, Artificial Sequence
  Description of Artificial Sequence: Synthetic oligonucleotide
  Sense strand starting at position 261 of SEQ ID NO: 1882863
caguaugcagauuggaaga

SEQ ID NO: 2153105 - RNA, 19 nt, Artificial Sequence
  Description of Artificial Sequence: Synthetic oligonucleotide
  Antisense strand to SEQ ID NO: 2153104
ucuuccaaucugcauacug

SEQ ID NO: 2153106 - RNA, 19 nt, Artificial Sequence
  Description of Artificial Sequence: Synthetic oligonucleotide
  Sense strand starting at position 380 of SEQ ID NO: 1882863
gcacauuaaagcuauggga

SEQ ID NO: 2153107 - RNA, 19 nt, Artificial Sequence
  Description of Artificial Sequence: Synthetic oligonucleotide
  Antisense strand to SEQ ID NO: 2153106
ucccauagcuuuaaugugc

SEQ ID NO: 2153108 - RNA, 19 nt, Artificial Sequence
  Description of Artificial Sequence: Synthetic oligonucleotide
  Sense strand starting at position 382 of SEQ ID NO: 1882863
acauuaaagcuaugggaug

SEQ ID NO: 2153109 - RNA, 19 nt, Artificial Sequence
  Description of Artificial Sequence: Synthetic oligonucleotide
  Antisense strand to SEQ ID NO: 2153108
caucccauagcuuuaaugu

SEQ ID NO: 2153110 - RNA, 19 nt, Artificial Sequence
  Description of Artificial Sequence: Synthetic oligonucleotide
  Sense strand starting at position 384 of SEQ ID NO: 1882863
auuaaagcuaugggauguu

SEQ ID NO: 2153111 - RNA, 19 nt, Artificial Sequence
  Description of Artificial Sequence: Synthetic oligonucleotide
  Antisense strand to SEQ ID NO: 2153110
aacaucccauagcuuuaau

SEQ ID NO: 2153112 - RNA, 19 nt, Artificial Sequence
  Description of Artificial Sequence: Synthetic oligonucleotide
  Sense strand starting at position 618 of SEQ ID NO: 1882863
guccuuccuuaaucuggaa

SEQ ID NO: 2153113 - RNA, 19 nt, Artificial Sequence
  Description of Artificial Sequence: Synthetic oligonucleotide
  Antisense strand to SEQ ID NO: 2153112
uuccagauuaaggaaggac

SEQ ID NO: 2153114 - RNA, 19 nt, Artificial Sequence
  Description of Artificial Sequence: Synthetic oligonucleotide
  Sense strand starting at position 690 of SEQ ID NO: 1882863
auuuauguacuccgugcaa

SEQ ID NO: 2153115 - RNA, 19 nt, Artificial Sequence
  Description of Artificial Sequence: Synthetic oligonucleotide
  Antisense strand to SEQ ID NO: 2153114
uugcacggaguacauaaau

SEQ ID NO: 2153116 - RNA, 19 nt, Artificial Sequence
  Description of Artificial Sequence: Synthetic oligonucleotide
  Sense strand starting at position 966 of SEQ ID NO: 1882863
gggcuuauucaguggagga

SEQ ID NO: 2153117 - RNA, 19 nt, Artificial Sequence
  Description of Artificial Sequence: Synthetic oligonucleotide
  Antisense strand to SEQ ID NO: 2153116
uccuccacugaauaagccc

SEQ ID NO: 2153118 - RNA, 19 nt, Artificial Sequence
  Description of Artificial Sequence: Synthetic oligonucleotide
  Sense strand starting at position 968 of SEQ ID NO: 1882863
gcuuauucaguggaggagu

SEQ ID NO: 2153119 - RNA, 19 nt, Artificial Sequence
  Description of Artificial Sequence: Synthetic oligonucleotide
  Antisense strand to SEQ ID NO: 2153118
acuccuccacugaauaagc

SEQ ID NO: 2153120 - RNA, 19 nt, Artificial Sequence
  Description of Artificial Sequence: Synthetic oligonucleotide
  Sense strand starting at position 979 of SEQ ID NO: 1882863
ggaggaguugcuuauaacc

SEQ ID NO: 2153121 - RNA, 19 nt, Artificial Sequence
  Description of Artificial Sequence: Synthetic oligonucleotide
  Antisense strand to SEQ ID NO: 2153120
gguuauaagcaacuccucc

SEQ ID NO: 2153122 - RNA, 19 nt, Artificial Sequence
  Description of Artificial Sequence: Synthetic oligonucleotide
  Sense strand starting at position 1021 of SEQ ID NO: 1882863
augaauuaaugugcucuaa

SEQ ID NO: 2153123 - RNA, 19 nt, Artificial Sequence
  Description of Artificial Sequence: Synthetic oligonucleotide
  Antisense strand to SEQ ID NO: 2153122
uuagagcacauuaauucau

SEQ ID NO: 2153124 - RNA, 19 nt, Artificial Sequence
  Description of Artificial Sequence: Synthetic oligonucleotide
  Sense strand starting at position 1042 of SEQ ID NO: 1882863
cugauucucccagguugau

SEQ ID NO: 2153125 - RNA, 19 nt, Artificial Sequence
  Description of Artificial Sequence: Synthetic oligonucleotide
  Antisense strand to SEQ ID NO: 2153124
aucaaccugggagaaucag

SEQ ID NO: 2153126 - RNA, 19 nt, Artificial Sequence
  Description of Artificial Sequence: Synthetic oligonucleotide
  Sense strand starting at position 1051 of SEQ ID NO: 1882863
ccagguugauagguuauua

SEQ ID NO: 2153127 - RNA, 19 nt, Artificial Sequence
  Description of Artificial Sequence: Synthetic oligonucleotide
  Antisense strand to SEQ ID NO: 2153126
uaauaaccuaucaaccugg

SEQ ID NO: 2153128 - RNA, 19 nt, Artificial Sequence
  Description of Artificial Sequence: Synthetic oligonucleotide
  Sense strand starting at position 1055 of SEQ ID NO: 1882863
guugauagguuauuaccaa

SEQ ID NO: 2153129 - RNA, 19 nt, Artificial Sequence
  Description of Artificial Sequence: Synthetic oligonucleotide
  Antisense strand to SEQ ID NO: 2153128
uugguaauaaccuaucaac

SEQ ID NO: 2153130 - RNA, 19 nt, Artificial Sequence
  Description of Artificial Sequence: Synthetic oligonucleotide
  Sense strand starting at position 1084 of SEQ ID NO: 1882863
cucucagugugauuuguag

SEQ ID NO: 2153131 - RNA, 19 nt, Artificial Sequence
  Description of Artificial Sequence: Synthetic oligonucleotide
  Antisense strand to SEQ ID NO: 2153130
cuacaaaucacacugagag

SEQ ID NO: 2153132 - RNA, 19 nt, Artificial Sequence
  Description of Artificial Sequence: Synthetic oligonucleotide
  Sense strand starting at position 1086 of SEQ ID NO: 1882863
cucagugugauuuguagcu

SEQ ID NO: 2153133 - RNA, 19 nt, Artificial Sequence
  Description of Artificial Sequence: Synthetic oligonucleotide
  Antisense strand to SEQ ID NO: 2153132
agcuacaaaucacacugag

SEQ ID NO: 2153134 - RNA, 19 nt, Artificial Sequence
  Description of Artificial Sequence: Synthetic oligonucleotide
  Sense strand starting at position 1193 of SEQ ID NO: 1882863
ggacucucaccauaaagcu

SEQ ID NO: 2153135 - RNA, 19 nt, Artificial Sequence
  Description of Artificial Sequence: Synthetic oligonucleotide
  Antisense strand to SEQ ID NO: 2153134
agcuuuauggugagagucc

SEQ ID NO: 2153136 - RNA, 19 nt, Artificial Sequence
  Description of Artificial Sequence: Synthetic oligonucleotide
  Sense strand starting at position 1202 of SEQ ID NO: 1882863
ccauaaagcuaugcagaga

SEQ ID NO: 2153137 - RNA, 19 nt, Artificial Sequence
  Description of Artificial Sequence: Synthetic oligonucleotide
  Antisense strand to SEQ ID NO: 2153136
ucucugcauagcuuuaugg

SEQ ID NO: 2153138 - RNA, 19 nt, Artificial Sequence
  Description of Artificial Sequence: Synthetic oligonucleotide
  Sense strand starting at position 1214 of SEQ ID NO: 1882863
gcagagaaaucggcgggaa

SEQ ID NO: 2153139 - RNA, 19 nt, Artificial Sequence
  Description of Artificial Sequence: Synthetic oligonucleotide
  Antisense strand to SEQ ID NO: 2153138
uucccgccgauuucucugc

SEQ ID NO: 2153140 - RNA, 19 nt, Artificial Sequence
  Description of Artificial Sequence: Synthetic oligonucleotide
  Sense strand starting at position 1215 of SEQ ID NO: 1882863
cagagaaaucggcgggaaa

SEQ ID NO: 2153141 - RNA, 19 nt, Artificial Sequence
  Description of Artificial Sequence: Synthetic oligonucleotide
  Antisense strand to SEQ ID NO: 2153140
uuucccgccgauuucucug

SEQ ID NO: 2153142 - RNA, 19 nt, Artificial Sequence
  Description of Artificial Sequence: Synthetic oligonucleotide
  Sense strand starting at position 1216 of SEQ ID NO: 1882863
agagaaaucggcgggaaau

SEQ ID NO: 2153143 - RNA, 19 nt, Artificial Sequence
  Description of Artificial Sequence: Synthetic oligonucleotide
  Antisense strand to SEQ ID NO: 2153142
auuucccgccgauuucucu

SEQ ID NO: 2153144 - RNA, 19 nt, Artificial Sequence
  Description of Artificial Sequence: Synthetic oligonucleotide
  Sense strand starting at position 1217 of SEQ ID NO: 1882863
gagaaaucggcgggaaauu

SEQ ID NO: 2153145 - RNA, 19 nt, Artificial Sequence
  Description of Artificial Sequence: Synthetic oligonucleotide
  Antisense strand to SEQ ID NO: 2153144
aauuucccgccgauuucuc

SEQ ID NO: 2153146 - RNA, 19 nt, Artificial Sequence
  Description of Artificial Sequence: Synthetic oligonucleotide
  Sense strand starting at position 1252 of SEQ ID NO: 1882863
aagugucuuccacgauaaa

SEQ ID NO: 2153147 - RNA, 19 nt, Artificial Sequence
  Description of Artificial Sequence: Synthetic oligonucleotide
  Antisense strand to SEQ ID NO: 2153146
uuuaucguggaagacacuu

SEQ ID NO: 2153148 - RNA, 19 nt, Artificial Sequence
  Description of Artificial Sequence: Synthetic oligonucleotide
  Sense strand starting at position 1305 of SEQ ID NO: 1882863
cuguuagucgguguguaag

SEQ ID NO: 2153149 - RNA, 19 nt, Artificial Sequence
  Description of Artificial Sequence: Synthetic oligonucleotide
  Antisense strand to SEQ ID NO: 2153148
cuuacacaccgacuaacag

SEQ ID NO: 2153150 - RNA, 19 nt, Artificial Sequence
  Description of Artificial Sequence: Synthetic oligonucleotide
  Sense strand starting at position 1323 of SEQ ID NO: 1882863
gaugaucagcuuggcaaua

SEQ ID NO: 2153151 - RNA, 19 nt, Artificial Sequence
  Description of Artificial Sequence: Synthetic oligonucleotide
  Antisense strand to SEQ ID NO: 2153150
uauugccaagcugaucauc

SEQ ID NO: 2153152 - RNA, 19 nt, Artificial Sequence
  Description of Artificial Sequence: Synthetic oligonucleotide
  Sense strand starting at position 1452 of SEQ ID NO: 1882863
ugcaguaaugauugaaaua

SEQ ID NO: 2153153 - RNA, 19 nt, Artificial Sequence
  Description of Artificial Sequence: Synthetic oligonucleotide
  Antisense strand to SEQ ID NO: 2153152
uauuucaaucauuacugca

SEQ ID NO: 2153154 - RNA, 19 nt, Artificial Sequence
  Description of Artificial Sequence: Synthetic oligonucleotide
  Sense strand starting at position 1486 of SEQ ID NO: 1882863
uuguuauauccauacccug

SEQ ID NO: 2153155 - RNA, 19 nt, Artificial Sequence
  Description of Artificial Sequence: Synthetic oligonucleotide
  Antisense strand to SEQ ID NO: 2153154
caggguauggauauaacaa

SEQ ID NO: 2153156 - RNA, 19 nt, Artificial Sequence
  Description of Artificial Sequence: Synthetic oligonucleotide
  Sense strand starting at position 1537 of SEQ ID NO: 1882863
agaucuaaaugugcuaaga

SEQ ID NO: 2153157 - RNA, 19 nt, Artificial Sequence
  Description of Artificial Sequence: Synthetic oligonucleotide
  Antisense strand to SEQ ID NO: 2153156
ucuuagcacauuuagaucu

SEQ ID NO: 2153158 - RNA, 19 nt, Artificial Sequence
  Description of Artificial Sequence: Synthetic oligonucleotide
  Sense strand starting at position 1609 of SEQ ID NO: 1882863
agaggugucguuaggugau

SEQ ID NO: 2153159 - RNA, 19 nt, Artificial Sequence
  Description of Artificial Sequence: Synthetic oligonucleotide
  Antisense strand to SEQ ID NO: 2153158
aucaccuaacgacaccucu

SEQ ID NO: 2153160 - RNA, 19 nt, Artificial Sequence
  Description of Artificial Sequence: Synthetic oligonucleotide
  Sense strand starting at position 1611 of SEQ ID NO: 1882863
aggugucguuaggugauuu

SEQ ID NO: 2153161 - RNA, 19 nt, Artificial Sequence
  Description of Artificial Sequence: Synthetic oligonucleotide
  Antisense strand to SEQ ID NO: 2153160
aaaucaccuaacgacaccu

SEQ ID NO: 2153162 - RNA, 19 nt, Artificial Sequence
  Description of Artificial Sequence: Synthetic oligonucleotide
  Sense strand starting at position 2170 of SEQ ID NO: 1882863
agugucucugaguaaguca

SEQ ID NO: 2153163 - RNA, 19 nt, Artificial Sequence
  Description of Artificial Sequence: Synthetic oligonucleotide
  Antisense strand to SEQ ID NO: 2153162
ugacuuacucagagacacu

SEQ ID NO: 2153164 - RNA, 19 nt, Artificial Sequence
  Description of Artificial Sequence: Synthetic oligonucleotide
  Sense strand starting at position 2175 of SEQ ID NO: 1882863
cucugaguaagucagugaa

SEQ ID NO: 2153165 - RNA, 19 nt, Artificial Sequence
  Description of Artificial Sequence: Synthetic oligonucleotide
  Antisense strand to SEQ ID NO: 2153164
uucacugacuuacucagag

SEQ ID NO: 2153166 - RNA, 19 nt, Artificial Sequence
  Description of Artificial Sequence: Synthetic oligonucleotide
  Sense strand starting at position 2185 of SEQ ID NO: 1882863
gucagugaaugaguagaca

SEQ ID NO: 2153167 - RNA, 19 nt, Artificial Sequence
  Description of Artificial Sequence: Synthetic oligonucleotide
  Antisense strand to SEQ ID NO: 2153166
ugucuacucauucacugac

SEQ ID NO: 2153168 - RNA, 19 nt, Artificial Sequence
  Description of Artificial Sequence: Synthetic oligonucleotide
  Sense strand starting at position 2256 of SEQ ID NO: 1882863
ucuauacucuagccaggaa

SEQ ID NO: 2153169 - RNA, 19 nt, Artificial Sequence
  Description of Artificial Sequence: Synthetic oligonucleotide
  Antisense strand to SEQ ID NO: 2153168
uuccuggcuagaguauaga

SEQ ID NO: 2153170 - RNA, 19 nt, Artificial Sequence
  Description of Artificial Sequence: Synthetic oligonucleotide
  Sense strand starting at position 2344 of SEQ ID NO: 1882863
ucuaauccagccuggguaa

SEQ ID NO: 2153171 - RNA, 19 nt, Artificial Sequence
  Description of Artificial Sequence: Synthetic oligonucleotide
  Antisense strand to SEQ ID NO: 2153170
uuacccaggcuggauuaga

SEQ ID NO: 2153172 - RNA, 19 nt, Artificial Sequence
  Description of Artificial Sequence: Synthetic oligonucleotide
  Sense strand starting at position 2768 of SEQ ID NO: 1882863
aggucaucagugcauagaa

SEQ ID NO: 2153173 - RNA, 19 nt, Artificial Sequence
  Description of Artificial Sequence: Synthetic oligonucleotide
  Antisense strand to SEQ ID NO: 2153172
uucuaugcacugaugaccu

SEQ ID NO: 2153174 - RNA, 19 nt, Artificial Sequence
  Description of Artificial Sequence: Synthetic oligonucleotide
  Sense strand starting at position 2770 of SEQ ID NO: 1882863
gucaucagugcauagaacu

SEQ ID NO: 2153175 - RNA, 19 nt, Artificial Sequence
  Description of Artificial Sequence: Synthetic oligonucleotide
  Antisense strand to SEQ ID NO: 2153174
aguucuaugcacugaugac

SEQ ID NO: 2153176 - RNA, 19 nt, Artificial Sequence
  Description of Artificial Sequence: Synthetic oligonucleotide
  Sense strand starting at position 3196 of SEQ ID NO: 1882863
uaugcauguguagaaagua

SEQ ID NO: 2153177 - RNA, 19 nt, Artificial Sequence
  Description of Artificial Sequence: Synthetic oligonucleotide
  Antisense strand to SEQ ID NO: 2153176
uacuuucuacacaugcaua

SEQ ID NO: 2153178 - RNA, 19 nt, Artificial Sequence
  Description of Artificial Sequence: Synthetic oligonucleotide
  Sense strand starting at position 3282 of SEQ ID NO: 1882863
aggauuauguacuugauaa

SEQ ID NO: 2153179 - RNA, 19 nt, Artificial Sequence
  Description of Artificial Sequence: Synthetic oligonucleotide
  Antisense strand to SEQ ID NO: 2153178
uuaucaaguacauaauccu

SEQ ID NO: 2153180 - RNA, 19 nt, Artificial Sequence
  Description of Artificial Sequence: Synthetic oligonucleotide
  Sense strand starting at position 3419 of SEQ ID NO: 1882863
aagacaucaccaggcgaua

SEQ ID NO: 2153181 - RNA, 19 nt, Artificial Sequence
  Description of Artificial Sequence: Synthetic oligonucleotide
  Antisense strand to SEQ ID NO: 2153180
uaucgccuggugaugucuu

SEQ ID NO: 2153182 - RNA, 19 nt, Artificial Sequence
  Description of Artificial Sequence: Synthetic oligonucleotide
  Sense strand starting at position 3723 of SEQ ID NO: 1882863
cacaauguuguagagcaau

SEQ ID NO: 2153183 - RNA, 19 nt, Artificial Sequence
  Description of Artificial Sequence: Synthetic oligonucleotide
  Antisense strand to SEQ ID NO: 2153182
auugcucuacaacauugug

SEQ ID NO: 2153184 - RNA, 19 nt, Artificial Sequence
  Description of Artificial Sequence: Synthetic oligonucleotide
  Sense strand starting at position 193 of SEQ ID NO: 1882865
acgugagcuuccuuuagga

SEQ ID NO: 2153185 - RNA, 19 nt, Artificial Sequence
  Description of Artificial Sequence: Synthetic oligonucleotide
  Antisense strand to SEQ ID NO: 2153184
uccuaaaggaagcucacgu

SEQ ID NO: 2153186 - RNA, 19 nt, Artificial Sequence
  Description of Artificial Sequence: Synthetic oligonucleotide
  Sense strand starting at position 350 of SEQ ID NO: 1882865
cugacaaucugccugcuaa

SEQ ID NO: 2153187 - RNA, 19 nt, Artificial Sequence
  Description of Artificial Sequence: Synthetic oligonucleotide
  Antisense strand to SEQ ID NO: 2153186
uuagcaggcagauugucag

SEQ ID NO: 2153188 - RNA, 19 nt, Artificial Sequence
  Description of Artificial Sequence: Synthetic oligonucleotide
  Sense strand starting at position 351 of SEQ ID NO: 1882865
ugacaaucugccugcuaaa

SEQ ID NO: 2153189 - RNA, 19 nt, Artificial Sequence
  Description of Artificial Sequence: Synthetic oligonucleotide
  Antisense strand to SEQ ID NO: 2153188
uuuagcaggcagauuguca

SEQ ID NO: 2153190 - RNA, 19 nt, Artificial Sequence
  Description of Artificial Sequence: Synthetic oligonucleotide
  Sense strand starting at position 555 of SEQ ID NO: 1882865
gcacuauaaugcccagguu

SEQ ID NO: 2153191 - RNA, 19 nt, Artificial Sequence
  Description of Artificial Sequence: Synthetic oligonucleotide
  Antisense strand to SEQ ID NO: 2153190
aaccugggcauuauagugc

SEQ ID NO: 2153192 - RNA, 19 nt, Artificial Sequence
  Description of Artificial Sequence: Synthetic oligonucleotide
  Sense strand starting at position 558 of SEQ ID NO: 1882865
cuauaaugcccagguuauu

SEQ ID NO: 2153193 - RNA, 19 nt, Artificial Sequence
  Description of Artificial Sequence: Synthetic oligonucleotide
  Antisense strand to SEQ ID NO: 2153192
aauaaccugggcauuauag

SEQ ID NO: 2153194 - RNA, 19 nt, Artificial Sequence
  Description of Artificial Sequence: Synthetic oligonucleotide
  Sense strand starting at position 1476 of SEQ ID NO: 1882865
aggcuuuaauacuauugca

SEQ ID NO: 2153195 - RNA, 19 nt, Artificial Sequence
  Description of Artificial Sequence: Synthetic oligonucleotide
  Antisense strand to SEQ ID NO: 2153194
ugcaauaguauuaaagccu

SEQ ID NO: 2153196 - RNA, 19 nt, Artificial Sequence
  Description of Artificial Sequence: Synthetic oligonucleotide
  Sense strand starting at position 2563 of SEQ ID NO: 1882865
ucgagaugcgccuggacaa

SEQ ID NO: 2153197 - RNA, 19 nt, Artificial Sequence
  Description of Artificial Sequence: Synthetic oligonucleotide
  Antisense strand to SEQ ID NO: 2153196
uuguccaggcgcaucucga

SEQ ID NO: 2153198 - RNA, 19 nt, Artificial Sequence
  Description of Artificial Sequence: Synthetic oligonucleotide
  Sense strand starting at position 2650 of SEQ ID NO: 1882865
uuuguaucuuccguagaga

SEQ ID NO: 2153199 - RNA, 19 nt, Artificial Sequence
  Description of Artificial Sequence: Synthetic oligonucleotide
  Antisense strand to SEQ ID NO: 2153198
ucucuacggaagauacaaa

SEQ ID NO: 2153200 - RNA, 19 nt, Artificial Sequence
  Description of Artificial Sequence: Synthetic oligonucleotide
  Sense strand starting at position 2651 of SEQ ID NO: 1882865
uuguaucuuccguagagau

SEQ ID NO: 2153201 - RNA, 19 nt, Artificial Sequence
  Description of Artificial Sequence: Synthetic oligonucleotide
  Antisense strand to SEQ ID NO: 2153200
aucucuacggaagauacaa

SEQ ID NO: 2153202 - RNA, 19 nt, Artificial Sequence
  Description of Artificial Sequence: Synthetic oligonucleotide
  Sense strand starting at position 3655 of SEQ ID NO: 1882865
uucgcuuucuggugacuga

SEQ ID NO: 2153203 - RNA, 19 nt, Artificial Sequence
  Description of Artificial Sequence: Synthetic oligonucleotide
  Antisense strand to SEQ ID NO: 2153202
ucagucaccagaaagcgaa

SEQ ID NO: 2153204 - RNA, 19 nt, Artificial Sequence
  Description of Artificial Sequence: Synthetic oligonucleotide
  Sense strand starting at position 380 of SEQ ID NO: 1882864
cacgacuggucuccucaua

SEQ ID NO: 2153205 - RNA, 19 nt, Artificial Sequence
  Description of Artificial Sequence: Synthetic oligonucleotide
  Antisense strand to SEQ ID NO: 2153204
uaugaggagaccagucgug

SEQ ID NO: 2153206 - RNA, 19 nt, Artificial Sequence
  Description of Artificial Sequence: Synthetic oligonucleotide
  Sense strand starting at position 437 of SEQ ID NO: 1882864
ccauguaaugccuauggaa

SEQ ID NO: 2153207 - RNA, 19 nt, Artificial Sequence
  Description of Artificial Sequence: Synthetic oligonucleotide
  Antisense strand to SEQ ID NO: 2153206
uuccauaggcauuacaugg

SEQ ID NO: 2153208 - RNA, 19 nt, Artificial Sequence
  Description of Artificial Sequence: Synthetic oligonucleotide
  Sense strand starting at position 439 of SEQ ID NO: 1882864
auguaaugccuauggaacu

SEQ ID NO: 2153209 - RNA, 19 nt, Artificial Sequence
  Description of Artificial Sequence: Synthetic oligonucleotide
  Antisense strand to SEQ ID NO: 2153208
aguuccauaggcauuacau

SEQ ID NO: 2153210 - RNA, 19 nt, Artificial Sequence
  Description of Artificial Sequence: Synthetic oligonucleotide
  Sense strand starting at position 482 of SEQ ID NO: 1882864
ugcuucuagucacauauau

SEQ ID NO: 2153211 - RNA, 19 nt, Artificial Sequence
  Description of Artificial Sequence: Synthetic oligonucleotide
  Antisense strand to SEQ ID NO: 2153210
auauaugugacuagaagca

SEQ ID NO: 2153212 - RNA, 19 nt, Artificial Sequence
  Description of Artificial Sequence: Synthetic oligonucleotide
  Sense strand starting at position 602 of SEQ ID NO: 1882864
gucaguaggugacugguua

SEQ ID NO: 2153213 - RNA, 19 nt, Artificial Sequence
  Description of Artificial Sequence: Synthetic oligonucleotide
  Antisense strand to SEQ ID NO: 2153212
uaaccagucaccuacugac

SEQ ID NO: 2153214 - RNA, 19 nt, Artificial Sequence
  Description of Artificial Sequence: Synthetic oligonucleotide
  Sense strand starting at position 609 of SEQ ID NO: 1882864
ggugacugguuaguuguau

SEQ ID NO: 2153215 - RNA, 19 nt, Artificial Sequence
  Description of Artificial Sequence: Synthetic oligonucleotide
  Antisense strand to SEQ ID NO: 2153214
auacaacuaaccagucacc

SEQ ID NO: 2153216 - RNA, 19 nt, Artificial Sequence
  Description of Artificial Sequence: Synthetic oligonucleotide
  Sense strand starting at position 656 of SEQ ID NO: 1882864
guggcaauaucauagcuga

SEQ ID NO: 2153217 - RNA, 19 nt, Artificial Sequence
  Description of Artificial Sequence: Synthetic oligonucleotide
  Antisense strand to SEQ ID NO: 2153216
ucagcuaugauauugccac

SEQ ID NO: 2153218 - RNA, 19 nt, Artificial Sequence
  Description of Artificial Sequence: Synthetic oligonucleotide
  Sense strand starting at position 659 of SEQ ID NO: 1882864
gcaauaucauagcugacau

SEQ ID NO: 2153219 - RNA, 19 nt, Artificial Sequence
  Description of Artificial Sequence: Synthetic oligonucleotide
  Antisense strand to SEQ ID NO: 2153218
augucagcuaugauauugc

SEQ ID NO: 2153220 - RNA, 19 nt, Artificial Sequence
  Description of Artificial Sequence: Synthetic oligonucleotide
  Sense strand starting at position 778 of SEQ ID NO: 1882864
uuuguacuuucuguauaga

SEQ ID NO: 2153221 - RNA, 19 nt, Artificial Sequence
  Description of Artificial Sequence: Synthetic oligonucleotide
  Antisense strand to SEQ ID NO: 2153220
ucuauacagaaaguacaaa

SEQ ID NO: 2153222 - RNA, 19 nt, Artificial Sequence
  Description of Artificial Sequence: Synthetic oligonucleotide
  Sense strand starting at position 904 of SEQ ID NO: 1882864
ccggcuccuaguuguguaa

SEQ ID NO: 2153223 - RNA, 19 nt, Artificial Sequence
  Description of Artificial Sequence: Synthetic oligonucleotide
  Antisense strand to SEQ ID NO: 2153222
uuacacaacuaggagccgg

SEQ ID NO: 2153224 - RNA, 19 nt, Artificial Sequence
  Description of Artificial Sequence: Synthetic oligonucleotide
  Sense strand starting at position 905 of SEQ ID NO: 1882864
cggcuccuaguuguguaau

SEQ ID NO: 2153225 - RNA, 19 nt, Artificial Sequence
  Description of Artificial Sequence: Synthetic oligonucleotide
  Antisense strand to SEQ ID NO: 2153224
auuacacaacuaggagccg

SEQ ID NO: 2153226 - RNA, 19 nt, Artificial Sequence
  Description of Artificial Sequence: Synthetic oligonucleotide
  Sense strand starting at position 907 of SEQ ID NO: 1882864
gcuccuaguuguguaauuc

SEQ ID NO: 2153227 - RNA, 19 nt, Artificial Sequence
  Description of Artificial Sequence: Synthetic oligonucleotide
  Antisense strand to SEQ ID NO: 2153226
gaauuacacaacuaggagc

SEQ ID NO: 2153228 - RNA, 19 nt, Artificial Sequence
  Description of Artificial Sequence: Synthetic oligonucleotide
  Sense strand starting at position 908 of SEQ ID NO: 1882864
cuccuaguuguguaauucu

SEQ ID NO: 2153229 - RNA, 19 nt, Artificial Sequence
  Description of Artificial Sequence: Synthetic oligonucleotide
  Antisense strand to SEQ ID NO: 2153228
agaauuacacaacuaggag

SEQ ID NO: 2153230 - RNA, 19 nt, Artificial Sequence
  Description of Artificial Sequence: Synthetic oligonucleotide
  Sense strand starting at position 911 of SEQ ID NO: 1882864
cuaguuguguaauucuuac

SEQ ID NO: 2153231 - RNA, 19 nt, Artificial Sequence
  Description of Artificial Sequence: Synthetic oligonucleotide
  Antisense strand to SEQ ID NO: 2153230
guaagaauuacacaacuag

SEQ ID NO: 2153232 - RNA, 19 nt, Artificial Sequence
  Description of Artificial Sequence: Synthetic oligonucleotide
  Sense strand starting at position 915 of SEQ ID NO: 1882864
uuguguaauucuuacgaag

SEQ ID NO: 2153233 - RNA, 19 nt, Artificial Sequence
  Description of Artificial Sequence: Synthetic oligonucleotide
  Antisense strand to SEQ ID NO: 2153232
cuucguaagaauuacacaa

SEQ ID NO: 2153234 - RNA, 19 nt, Artificial Sequence
  Description of Artificial Sequence: Synthetic oligonucleotide
  Sense strand starting at position 918 of SEQ ID NO: 1882864
uguaauucuuacgaagaac

SEQ ID NO: 2153235 - RNA, 19 nt, Artificial Sequence
  Description of Artificial Sequence: Synthetic oligonucleotide
  Antisense strand to SEQ ID NO: 2153234
guucuucguaagaauuaca

SEQ ID NO: 2153236 - RNA, 19 nt, Artificial Sequence
  Description of Artificial Sequence: Synthetic oligonucleotide
  Sense strand starting at position 1011 of SEQ ID NO: 1882864
cacccuacaguguguauua

SEQ ID NO: 2153237 - RNA, 19 nt, Artificial Sequence
  Description of Artificial Sequence: Synthetic oligonucleotide
  Antisense strand to SEQ ID NO: 2153236
uaauacacacuguagggug

SEQ ID NO: 2153238 - RNA, 19 nt, Artificial Sequence
  Description of Artificial Sequence: Synthetic oligonucleotide
  Sense strand starting at position 1016 of SEQ ID NO: 1882864
uacaguguguauuaggaau

SEQ ID NO: 2153239 - RNA, 19 nt, Artificial Sequence
  Description of Artificial Sequence: Synthetic oligonucleotide
  Antisense strand to SEQ ID NO: 2153238
auuccuaauacacacugua

SEQ ID NO: 2153240 - RNA, 19 nt, Artificial Sequence
  Description of Artificial Sequence: Synthetic oligonucleotide
  Sense strand starting at position 1124 of SEQ ID NO: 1882864
ugugcuugucucuaguguu

SEQ ID NO: 2153241 - RNA, 19 nt, Artificial Sequence
  Description of Artificial Sequence: Synthetic oligonucleotide
  Antisense strand to SEQ ID NO: 2153240
aacacuagagacaagcaca

SEQ ID NO: 2153242 - RNA, 19 nt, Artificial Sequence
  Description of Artificial Sequence: Synthetic oligonucleotide
  Sense strand starting at position 1313 of SEQ ID NO: 1882864
gcaguaucacuugagcuca

SEQ ID NO: 2153243 - RNA, 19 nt, Artificial Sequence
  Description of Artificial Sequence: Synthetic oligonucleotide
  Antisense strand to SEQ ID NO: 2153242
ugagcucaagugauacugc

SEQ ID NO: 2153244 - RNA, 19 nt, Artificial Sequence
  Description of Artificial Sequence: Synthetic oligonucleotide
  Sense strand starting at position 1362 of SEQ ID NO: 1882864
gaggccgugugucuauaaa

SEQ ID NO: 2153245 - RNA, 19 nt, Artificial Sequence
  Description of Artificial Sequence: Synthetic oligonucleotide
  Antisense strand to SEQ ID NO: 2153244
uuuauagacacacggccuc

SEQ ID NO: 2153246 - RNA, 19 nt, Artificial Sequence
  Description of Artificial Sequence: Synthetic oligonucleotide
  Sense strand starting at position 1397 of SEQ ID NO: 1882864
aaauaucacguguaacuga

SEQ ID NO: 2153247 - RNA, 19 nt, Artificial Sequence
  Description of Artificial Sequence: Synthetic oligonucleotide
  Antisense strand to SEQ ID NO: 2153246
ucaguuacacgugauauuu

SEQ ID NO: 2153248 - RNA, 19 nt, Artificial Sequence
  Description of Artificial Sequence: Synthetic oligonucleotide
  Sense strand starting at position 1408 of SEQ ID NO: 1882864
guaacugaaucccuggaau

SEQ ID NO: 2153249 - RNA, 19 nt, Artificial Sequence
  Description of Artificial Sequence: Synthetic oligonucleotide
  Antisense strand to SEQ ID NO: 2153248
auuccagggauucaguuac

SEQ ID NO: 2153250 - RNA, 19 nt, Artificial Sequence
  Description of Artificial Sequence: Synthetic oligonucleotide
  Sense strand starting at position 1563 of SEQ ID NO: 1882864
gcagcauccugaguccuaa

SEQ ID NO: 2153251 - RNA, 19 nt, Artificial Sequence
  Description of Artificial Sequence: Synthetic oligonucleotide
  Antisense strand to SEQ ID NO: 2153250
uuaggacucaggaugcugc

SEQ ID NO: 2153252 - RNA, 19 nt, Artificial Sequence
  Description of Artificial Sequence: Synthetic oligonucleotide
  Sense strand starting at position 1585 of SEQ ID NO: 1882864
cggacagguuaugacucaa

SEQ ID NO: 2153253 - RNA, 19 nt, Artificial Sequence
  Description of Artificial Sequence: Synthetic oligonucleotide
  Antisense strand to SEQ ID NO: 2153252
uugagucauaaccuguccg

SEQ ID NO: 2153254 - RNA, 19 nt, Artificial Sequence
  Description of Artificial Sequence: Synthetic oligonucleotide
  Sense strand starting at position 1669 of SEQ ID NO: 1882864
ucaucuucguuaguccuua

SEQ ID NO: 2153255 - RNA, 19 nt, Artificial Sequence
  Description of Artificial Sequence: Synthetic oligonucleotide
  Antisense strand to SEQ ID NO: 2153254
uaaggacuaacgaagauga

SEQ ID NO: 2153256 - RNA, 19 nt, Artificial Sequence
  Description of Artificial Sequence: Synthetic oligonucleotide
  Sense strand starting at position 1674 of SEQ ID NO: 1882864
uucguuaguccuuacagca

SEQ ID NO: 2153257 - RNA, 19 nt, Artificial Sequence
  Description of Artificial Sequence: Synthetic oligonucleotide
  Antisense strand to SEQ ID NO: 2153256
ugcuguaaggacuaacgaa

SEQ ID NO: 2153258 - RNA, 19 nt, Artificial Sequence
  Description of Artificial Sequence: Synthetic oligonucleotide
  Sense strand starting at position 1709 of SEQ ID NO: 1882864
gagggugcuuaucagacua

SEQ ID NO: 2153259 - RNA, 19 nt, Artificial Sequence
  Description of Artificial Sequence: Synthetic oligonucleotide
  Antisense strand to SEQ ID NO: 2153258
uagucugauaagcacccuc

SEQ ID NO: 2153260 - RNA, 19 nt, Artificial Sequence
  Description of Artificial Sequence: Synthetic oligonucleotide
  Sense strand starting at position 1782 of SEQ ID NO: 1882864
uccaaugaaagucgugaaa

SEQ ID NO: 2153261 - RNA, 19 nt, Artificial Sequence
  Description of Artificial Sequence: Synthetic oligonucleotide
  Antisense strand to SEQ ID NO: 2153260
uuucacgacuuucauugga

SEQ ID NO: 2153262 - RNA, 19 nt, Artificial Sequence
  Description of Artificial Sequence: Synthetic oligonucleotide
  Sense strand starting at position 1785 of SEQ ID NO: 1882864
aaugaaagucgugaaagca

SEQ ID NO: 2153263 - RNA, 19 nt, Artificial Sequence
  Description of Artificial Sequence: Synthetic oligonucleotide
  Antisense strand to SEQ ID NO: 2153262
ugcuuucacgacuuucauu

SEQ ID NO: 2153264 - RNA, 19 nt, Artificial Sequence
  Description of Artificial Sequence: Synthetic oligonucleotide
  Sense strand starting at position 2136 of SEQ ID NO: 1882864
ggaagauccggauagugca

SEQ ID NO: 2153265 - RNA, 19 nt, Artificial Sequence
  Description of Artificial Sequence: Synthetic oligonucleotide
  Antisense strand to SEQ ID NO: 2153264
ugcacuauccggaucuucc

SEQ ID NO: 2153266 - RNA, 19 nt, Artificial Sequence
  Description of Artificial Sequence: Synthetic oligonucleotide
  Sense strand starting at position 2528 of SEQ ID NO: 1882864
cauuucuuccugcgucgau

SEQ ID NO: 2153267 - RNA, 19 nt, Artificial Sequence
  Description of Artificial Sequence: Synthetic oligonucleotide
  Antisense strand to SEQ ID NO: 2153266
aucgacgcaggaagaaaug

SEQ ID NO: 2153268 - RNA, 19 nt, Artificial Sequence
  Description of Artificial Sequence: Synthetic oligonucleotide
  Sense strand starting at position 2546 of SEQ ID NO: 1882864
ugccgucuccauggagaaa

SEQ ID NO: 2153269 - RNA, 19 nt, Artificial Sequence
  Description of Artificial Sequence: Synthetic oligonucleotide
  Antisense strand to SEQ ID NO: 2153268
uuucuccauggagacggca

SEQ ID NO: 2153270 - RNA, 19 nt, Artificial Sequence
  Description of Artificial Sequence: Synthetic oligonucleotide
  Sense strand starting at position 2679 of SEQ ID NO: 1882864
ggagauaacuagcuccaua

SEQ ID NO: 2153271 - RNA, 19 nt, Artificial Sequence
  Description of Artificial Sequence: Synthetic oligonucleotide
  Antisense strand to SEQ ID NO: 2153270
uauggagcuaguuaucucc

SEQ ID NO: 2153272 - RNA, 19 nt, Artificial Sequence
  Description of Artificial Sequence: Synthetic oligonucleotide
  Sense strand starting at position 2761 of SEQ ID NO: 1882864
guugauaacuagcuccaua

SEQ ID NO: 2153273 - RNA, 19 nt, Artificial Sequence
  Description of Artificial Sequence: Synthetic oligonucleotide
  Antisense strand to SEQ ID NO: 2153272
uauggagcuaguuaucaac

SEQ ID NO: 2153274 - RNA, 19 nt, Artificial Sequence
  Description of Artificial Sequence: Synthetic oligonucleotide
  Sense strand starting at position 3213 of SEQ ID NO: 1882864
uugucacaauuugauugau

SEQ ID NO: 2153275 - RNA, 19 nt, Artificial Sequence
  Description of Artificial Sequence: Synthetic oligonucleotide
  Antisense strand to SEQ ID NO: 2153274
aucaaucaaauugugacaa

SEQ ID NO: 2153276 - RNA, 19 nt, Artificial Sequence
  Description of Artificial Sequence: Synthetic oligonucleotide
  Sense strand starting at position 3402 of SEQ ID NO: 1882864
ggugcucugcuaggucaga

SEQ ID NO: 2153277 - RNA, 19 nt, Artificial Sequence
  Description of Artificial Sequence: Synthetic oligonucleotide
  Antisense strand to SEQ ID NO: 2153276
ucugaccuagcagagcacc

SEQ ID NO: 2153278 - RNA, 19 nt, Artificial Sequence
  Description of Artificial Sequence: Synthetic oligonucleotide
  Sense strand starting at position 3403 of SEQ ID NO: 1882864
gugcucugcuaggucagaa

SEQ ID NO: 2153279 - RNA, 19 nt, Artificial Sequence
  Description of Artificial Sequence: Synthetic oligonucleotide
  Antisense strand to SEQ ID NO: 2153278
uucugaccuagcagagcac

SEQ ID NO: 2153280 - RNA, 19 nt, Artificial Sequence
  Description of Artificial Sequence: Synthetic oligonucleotide
  Sense strand starting at position 3407 of SEQ ID NO: 1882864
ucugcuaggucagaaaugu

SEQ ID NO: 2153281 - RNA, 19 nt, Artificial Sequence
  Description of Artificial Sequence: Synthetic oligonucleotide
  Antisense strand to SEQ ID NO: 2153280
acauuucugaccuagcaga

SEQ ID NO: 2153282 - RNA, 19 nt, Artificial Sequence
  Description of Artificial Sequence: Synthetic oligonucleotide
  Sense strand starting at position 3470 of SEQ ID NO: 1882864
guccauucucaagguagga

SEQ ID NO: 2153283 - RNA, 19 nt, Artificial Sequence
  Description of Artificial Sequence: Synthetic oligonucleotide
  Antisense strand to SEQ ID NO: 2153282
uccuaccuugagaauggac

SEQ ID NO: 2153284 - RNA, 19 nt, Artificial Sequence
  Description of Artificial Sequence: Synthetic oligonucleotide
  Sense strand starting at position 656 of SEQ ID NO: 1882866
augggauugucccuugugu

SEQ ID NO: 2153285 - RNA, 19 nt, Artificial Sequence
  Description of Artificial Sequence: Synthetic oligonucleotide
  Antisense strand to SEQ ID NO: 2153284
acacaagggacaaucccau

SEQ ID NO: 2153286 - RNA, 19 nt, Artificial Sequence
  Description of Artificial Sequence: Synthetic oligonucleotide
  Sense strand starting at position 663 of SEQ ID NO: 1882866
ugucccuugugucugguaa

SEQ ID NO: 2153287 - RNA, 19 nt, Artificial Sequence
  Description of Artificial Sequence: Synthetic oligonucleotide
  Antisense strand to SEQ ID NO: 2153286
uuaccagacacaagggaca

SEQ ID NO: 2153288 - RNA, 19 nt, Artificial Sequence
  Description of Artificial Sequence: Synthetic oligonucleotide
  Sense strand starting at position 664 of SEQ ID NO: 1882866
gucccuugugucugguaau

SEQ ID NO: 2153289 - RNA, 19 nt, Artificial Sequence
  Description of Artificial Sequence: Synthetic oligonucleotide
  Antisense strand to SEQ ID NO: 2153288
auuaccagacacaagggac

SEQ ID NO: 2153290 - RNA, 19 nt, Artificial Sequence
  Description of Artificial Sequence: Synthetic oligonucleotide
  Sense strand starting at position 665 of SEQ ID NO: 1882866
ucccuugugucugguaauu

SEQ ID NO: 2153291 - RNA, 19 nt, Artificial Sequence
  Description of Artificial Sequence: Synthetic oligonucleotide
  Antisense strand to SEQ ID NO: 2153290
aauuaccagacacaaggga

SEQ ID NO: 2153292 - RNA, 19 nt, Artificial Sequence
  Description of Artificial Sequence: Synthetic oligonucleotide
  Sense strand starting at position 998 of SEQ ID NO: 1882866
cauugaggguccugggaau

SEQ ID NO: 2153293 - RNA, 19 nt, Artificial Sequence
  Description of Artificial Sequence: Synthetic oligonucleotide
  Antisense strand to SEQ ID NO: 2153292
auucccaggacccucaaug

SEQ ID NO: 2153294 - RNA, 19 nt, Artificial Sequence
  Description of Artificial Sequence: Synthetic oligonucleotide
  Sense strand starting at position 1044 of SEQ ID NO: 1882866
ugcacaagagccuguuaua

SEQ ID NO: 2153295 - RNA, 19 nt, Artificial Sequence
  Description of Artificial Sequence: Synthetic oligonucleotide
  Antisense strand to SEQ ID NO: 2153294
uauaacaggcucuugugca

SEQ ID NO: 2153296 - RNA, 19 nt, Artificial Sequence
  Description of Artificial Sequence: Synthetic oligonucleotide
  Sense strand starting at position 1114 of SEQ ID NO: 1882866
cuccguguguggccauauu

SEQ ID NO: 2153297 - RNA, 19 nt, Artificial Sequence
  Description of Artificial Sequence: Synthetic oligonucleotide
  Antisense strand to SEQ ID NO: 2153296
aauauggccacacacggag

SEQ ID NO: 2153298 - RNA, 19 nt, Artificial Sequence
  Description of Artificial Sequence: Synthetic oligonucleotide
  Sense strand starting at position 1141 of SEQ ID NO: 1882866
ggguugucgcagcugugau

SEQ ID NO: 2153299 - RNA, 19 nt, Artificial Sequence
  Description of Artificial Sequence: Synthetic oligonucleotide
  Antisense strand to SEQ ID NO: 2153298
aucacagcugcgacaaccc

SEQ ID NO: 2153300 - RNA, 19 nt, Artificial Sequence
  Description of Artificial Sequence: Synthetic oligonucleotide
  Sense strand starting at position 1142 of SEQ ID NO: 1882866
gguugucgcagcugugauu

SEQ ID NO: 2153301 - RNA, 19 nt, Artificial Sequence
  Description of Artificial Sequence: Synthetic oligonucleotide
  Antisense strand to SEQ ID NO: 2153300
aaucacagcugcgacaacc

SEQ ID NO: 2153302 - RNA, 19 nt, Artificial Sequence
  Description of Artificial Sequence: Synthetic oligonucleotide
  Sense strand starting at position 1149 of SEQ ID NO: 1882866
gcagcugugauuuguuuag

SEQ ID NO: 2153303 - RNA, 19 nt, Artificial Sequence
  Description of Artificial Sequence: Synthetic oligonucleotide
  Antisense strand to SEQ ID NO: 2153302
cuaaacaaaucacagcugc

SEQ ID NO: 2153304 - RNA, 19 nt, Artificial Sequence
  Description of Artificial Sequence: Synthetic oligonucleotide
  Sense strand starting at position 1151 of SEQ ID NO: 1882866
agcugugauuuguuuagau

SEQ ID NO: 2153305 - RNA, 19 nt, Artificial Sequence
  Description of Artificial Sequence: Synthetic oligonucleotide
  Antisense strand to SEQ ID NO: 2153304
aucuaaacaaaucacagcu

SEQ ID NO: 2153306 - RNA, 19 nt, Artificial Sequence
  Description of Artificial Sequence: Synthetic oligonucleotide
  Sense strand starting at position 1597 of SEQ ID NO: 1882866
aggccagucucgggacaau

SEQ ID NO: 2153307 - RNA, 19 nt, Artificial Sequence
  Description of Artificial Sequence: Synthetic oligonucleotide
  Antisense strand to SEQ ID NO: 2153306
auugucccgagacuggccu

SEQ ID NO: 2153308 - RNA, 19 nt, Artificial Sequence
  Description of Artificial Sequence: Synthetic oligonucleotide
  Sense strand starting at position 1648 of SEQ ID NO: 1882866
gcgcgauucgccuuuggag

SEQ ID NO: 2153309 - RNA, 19 nt, Artificial Sequence
  Description of Artificial Sequence: Synthetic oligonucleotide
  Antisense strand to SEQ ID NO: 2153308
cuccaaaggcgaaucgcgc

SEQ ID NO: 2153310 - RNA, 19 nt, Artificial Sequence
  Description of Artificial Sequence: Synthetic oligonucleotide
  Sense strand starting at position 1649 of SEQ ID NO: 1882866
cgcgauucgccuuuggaga

SEQ ID NO: 2153311 - RNA, 19 nt, Artificial Sequence
  Description of Artificial Sequence: Synthetic oligonucleotide
  Antisense strand to SEQ ID NO: 2153310
ucuccaaaggcgaaucgcg

SEQ ID NO: 2153312 - RNA, 19 nt, Artificial Sequence
  Description of Artificial Sequence: Synthetic oligonucleotide
  Sense strand starting at position 1650 of SEQ ID NO: 1882866
gcgauucgccuuuggagaa

SEQ ID NO: 2153313 - RNA, 19 nt, Artificial Sequence
  Description of Artificial Sequence: Synthetic oligonucleotide
  Antisense strand to SEQ ID NO: 2153312
uucuccaaaggcgaaucgc

SEQ ID NO: 2153314 - RNA, 19 nt, Artificial Sequence
  Description of Artificial Sequence: Synthetic oligonucleotide
  Sense strand starting at position 1651 of SEQ ID NO: 1882866
cgauucgccuuuggagaaa

SEQ ID NO: 2153315 - RNA, 19 nt, Artificial Sequence
  Description of Artificial Sequence: Synthetic oligonucleotide
  Antisense strand to SEQ ID NO: 2153314
uuucuccaaaggcgaaucg

SEQ ID NO: 2153316 - RNA, 19 nt, Artificial Sequence
  Description of Artificial Sequence: Synthetic oligonucleotide
  Sense strand starting at position 1771 of SEQ ID NO: 1882866
cgcguccucgcuuuacaga

SEQ ID NO: 2153317 - RNA, 19 nt, Artificial Sequence
  Description of Artificial Sequence: Synthetic oligonucleotide
  Antisense strand to SEQ ID NO: 2153316
ucuguaaagcgaggacgcg

SEQ ID NO: 2153318 - RNA, 19 nt, Artificial Sequence
  Description of Artificial Sequence: Synthetic oligonucleotide
  Sense strand starting at position 1779 of SEQ ID NO: 1882866
cgcuuuacagaccgggaaa

SEQ ID NO: 2153319 - RNA, 19 nt, Artificial Sequence
  Description of Artificial Sequence: Synthetic oligonucleotide
  Antisense strand to SEQ ID NO: 2153318
uuucccggucuguaaagcg

SEQ ID NO: 2153320 - RNA, 19 nt, Artificial Sequence
  Description of Artificial Sequence: Synthetic oligonucleotide
  Sense strand starting at position 2031 of SEQ ID NO: 1882866
agaagagucugugacagga

SEQ ID NO: 2153321 - RNA, 19 nt, Artificial Sequence
  Description of Artificial Sequence: Synthetic oligonucleotide
  Antisense strand to SEQ ID NO: 2153320
uccugucacagacucuucu

SEQ ID NO: 2153322 - RNA, 19 nt, Artificial Sequence
  Description of Artificial Sequence: Synthetic oligonucleotide
  Sense strand starting at position 2312 of SEQ ID NO: 1882866
acccaugcuuugcuaugaa

SEQ ID NO: 2153323 - RNA, 19 nt, Artificial Sequence
  Description of Artificial Sequence: Synthetic oligonucleotide
  Antisense strand to SEQ ID NO: 2153322
uucauagcaaagcaugggu

SEQ ID NO: 2153324 - RNA, 19 nt, Artificial Sequence
  Description of Artificial Sequence: Synthetic oligonucleotide
  Sense strand starting at position 2315 of SEQ ID NO: 1882866
caugcuuugcuaugaagga

SEQ ID NO: 2153325 - RNA, 19 nt, Artificial Sequence
  Description of Artificial Sequence: Synthetic oligonucleotide
  Antisense strand to SEQ ID NO: 2153324
uccuucauagcaaagcaug

SEQ ID NO: 2153326 - RNA, 19 nt, Artificial Sequence
  Description of Artificial Sequence: Synthetic oligonucleotide
  Sense strand starting at position 2319 of SEQ ID NO: 1882866
cuuugcuaugaaggagauu

SEQ ID NO: 2153327 - RNA, 19 nt, Artificial Sequence
  Description of Artificial Sequence: Synthetic oligonucleotide
  Antisense strand to SEQ ID NO: 2153326
aaucuccuucauagcaaag

SEQ ID NO: 2153328 - RNA, 19 nt, Artificial Sequence
  Description of Artificial Sequence: Synthetic oligonucleotide
  Sense strand starting at position 2441 of SEQ ID NO: 1882866
gggagcuucucuuggagaa

SEQ ID NO: 2153329 - RNA, 19 nt, Artificial Sequence
  Description of Artificial Sequence: Synthetic oligonucleotide
  Antisense strand to SEQ ID NO: 2153328
uucuccaagagaagcuccc

SEQ ID NO: 2153330 - RNA, 19 nt, Artificial Sequence
  Description of Artificial Sequence: Synthetic oligonucleotide
  Sense strand starting at position 2442 of SEQ ID NO: 1882866
ggagcuucucuuggagaag

SEQ ID NO: 2153331 - RNA, 19 nt, Artificial Sequence
  Description of Artificial Sequence: Synthetic oligonucleotide
  Antisense strand to SEQ ID NO: 2153330
cuucuccaagagaagcucc

SEQ ID NO: 2153332 - RNA, 19 nt, Artificial Sequence
  Description of Artificial Sequence: Synthetic oligonucleotide
  Sense strand starting at position 2443 of SEQ ID NO: 1882866
gagcuucucuuggagaaga

SEQ ID NO: 2153333 - RNA, 19 nt, Artificial Sequence
  Description of Artificial Sequence: Synthetic oligonucleotide
  Antisense strand to SEQ ID NO: 2153332
ucuucuccaagagaagcuc

SEQ ID NO: 2153334 - RNA, 19 nt, Artificial Sequence
  Description of Artificial Sequence: Synthetic oligonucleotide
  Sense strand starting at position 2765 of SEQ ID NO: 1882866
gucccacagucgugaaaug

SEQ ID NO: 2153335 - RNA, 19 nt, Artificial Sequence
  Description of Artificial Sequence: Synthetic oligonucleotide
  Antisense strand to SEQ ID NO: 2153334
cauuucacgacugugggac

SEQ ID NO: 2153336 - RNA, 19 nt, Artificial Sequence
  Description of Artificial Sequence: Synthetic oligonucleotide
  Sense strand starting at position 2909 of SEQ ID NO: 1882866
cagcguccugugucucuaa

SEQ ID NO: 2153337 - RNA, 19 nt, Artificial Sequence
  Description of Artificial Sequence: Synthetic oligonucleotide
  Antisense strand to SEQ ID NO: 2153336
uuagagacacaggacgcug

SEQ ID NO: 2153338 - RNA, 19 nt, Artificial Sequence
  Description of Artificial Sequence: Synthetic oligonucleotide
  Sense strand starting at position 2944 of SEQ ID NO: 1882866
gggcuucuucgugaaugaa

SEQ ID NO: 2153339 - RNA, 19 nt, Artificial Sequence
  Description of Artificial Sequence: Synthetic oligonucleotide
  Antisense strand to SEQ ID NO: 2153338
uucauucacgaagaagccc

SEQ ID NO: 2153340 - RNA, 19 nt, Artificial Sequence
  Description of Artificial Sequence: Synthetic oligonucleotide
  Sense strand starting at position 3031 of SEQ ID NO: 1882866
ccgguuuacuguucccagu

SEQ ID NO: 2153341 - RNA, 19 nt, Artificial Sequence
  Description of Artificial Sequence: Synthetic oligonucleotide
  Antisense strand to SEQ ID NO: 2153340
acugggaacaguaaaccgg

SEQ ID NO: 2153342 - RNA, 19 nt, Artificial Sequence
  Description of Artificial Sequence: Synthetic oligonucleotide
  Sense strand starting at position 3033 of SEQ ID NO: 1882866
gguuuacuguucccaguga

SEQ ID NO: 2153343 - RNA, 19 nt, Artificial Sequence
  Description of Artificial Sequence: Synthetic oligonucleotide
  Antisense strand to SEQ ID NO: 2153342
ucacugggaacaguaaacc

SEQ ID NO: 2153344 - RNA, 19 nt, Artificial Sequence
  Description of Artificial Sequence: Synthetic oligonucleotide
  Sense strand starting at position 3034 of SEQ ID NO: 1882866
guuuacuguucccagugau

SEQ ID NO: 2153345 - RNA, 19 nt, Artificial Sequence
  Description of Artificial Sequence: Synthetic oligonucleotide
  Antisense strand to SEQ ID NO: 2153344
aucacugggaacaguaaac

SEQ ID NO: 2153346 - RNA, 19 nt, Artificial Sequence
  Description of Artificial Sequence: Synthetic oligonucleotide
  Sense strand starting at position 3053 of SEQ ID NO: 1882866
uuaggagguggcuauuauu

SEQ ID NO: 2153347 - RNA, 19 nt, Artificial Sequence
  Description of Artificial Sequence: Synthetic oligonucleotide
  Antisense strand to SEQ ID NO: 2153346
aauaauagccaccuccuaa

SEQ ID NO: 2153348 - RNA, 19 nt, Artificial Sequence
  Description of Artificial Sequence: Synthetic oligonucleotide
  Sense strand starting at position 3299 of SEQ ID NO: 1882866
gucauuugagcccgugagu

SEQ ID NO: 2153349 - RNA, 19 nt, Artificial Sequence
  Description of Artificial Sequence: Synthetic oligonucleotide
  Antisense strand to SEQ ID NO: 2153348
acucacgggcucaaaugac

SEQ ID NO: 2153350 - RNA, 19 nt, Artificial Sequence
  Description of Artificial Sequence: Synthetic oligonucleotide
  Sense strand starting at position 3373 of SEQ ID NO: 1882866
ggaaacuugucucacaaga

SEQ ID NO: 2153351 - RNA, 19 nt, Artificial Sequence
  Description of Artificial Sequence: Synthetic oligonucleotide
  Antisense strand to SEQ ID NO: 2153350
ucuugugagacaaguuucc

SEQ ID NO: 2153352 - RNA, 19 nt, Artificial Sequence
  Description of Artificial Sequence: Synthetic oligonucleotide
  Sense strand starting at position 3496 of SEQ ID NO: 1882866
ugcucuaaccucugggauu

SEQ ID NO: 2153353 - RNA, 19 nt, Artificial Sequence
  Description of Artificial Sequence: Synthetic oligonucleotide
  Antisense strand to SEQ ID NO: 2153352
aaucccagagguuagagca

SEQ ID NO: 2153354 - RNA, 19 nt, Artificial Sequence
  Description of Artificial Sequence: Synthetic oligonucleotide
  Sense strand starting at position 3497 of SEQ ID NO: 1882866
gcucuaaccucugggauuc

SEQ ID NO: 2153355 - RNA, 19 nt, Artificial Sequence
  Description of Artificial Sequence: Synthetic oligonucleotide
  Antisense strand to SEQ ID NO: 2153354
gaaucccagagguuagagc

SEQ ID NO: 2153356 - RNA, 19 nt, Artificial Sequence
  Description of Artificial Sequence: Synthetic oligonucleotide
  Sense strand starting at position 3507 of SEQ ID NO: 1882866
cugggauucugcccaguac

SEQ ID NO: 2153357 - RNA, 19 nt, Artificial Sequence
  Description of Artificial Sequence: Synthetic oligonucleotide
  Antisense strand to SEQ ID NO: 2153356
guacugggcagaaucccag

SEQ ID NO: 2153358 - RNA, 19 nt, Artificial Sequence
  Description of Artificial Sequence: Synthetic oligonucleotide
  Sense strand starting at position 3575 of SEQ ID NO: 1882866
aggucuuucgugcugugga

SEQ ID NO: 2153359 - RNA, 19 nt, Artificial Sequence
  Description of Artificial Sequence: Synthetic oligonucleotide
  Antisense strand to SEQ ID NO: 2153358
uccacagcacgaaagaccu

SEQ ID NO: 2153360 - RNA, 19 nt, Artificial Sequence
  Description of Artificial Sequence: Synthetic oligonucleotide
  Sense strand starting at position 3577 of SEQ ID NO: 1882866
gucuuucgugcuguggaca

SEQ ID NO: 2153361 - RNA, 19 nt, Artificial Sequence
  Description of Artificial Sequence: Synthetic oligonucleotide
  Antisense strand to SEQ ID NO: 2153360
uguccacagcacgaaagac

SEQ ID NO: 2153362 - RNA, 19 nt, Artificial Sequence
  Description of Artificial Sequence: Synthetic oligonucleotide
  Sense strand starting at position 3625 of SEQ ID NO: 1882866
cagagauucucucccgcuu

SEQ ID NO: 2153363 - RNA, 19 nt, Artificial Sequence
  Description of Artificial Sequence: Synthetic oligonucleotide
  Antisense strand to SEQ ID NO: 2153362
aagcgggagagaaucucug

SEQ ID NO: 2153364 - RNA, 19 nt, Artificial Sequence
  Description of Artificial Sequence: Synthetic oligonucleotide
  Sense strand starting at position 63 of SEQ ID NO: 1882867
agcccaugccuguaauuuc

SEQ ID NO: 2153365 - RNA, 19 nt, Artificial Sequence
  Description of Artificial Sequence: Synthetic oligonucleotide
  Antisense strand to SEQ ID NO: 2153364
gaaauuacaggcaugggcu

SEQ ID NO: 2153366 - RNA, 19 nt, Artificial Sequence
  Description of Artificial Sequence: Synthetic oligonucleotide
  Sense strand starting at position 275 of SEQ ID NO: 1882867
gugacucgugaucguguca

SEQ ID NO: 2153367 - RNA, 19 nt, Artificial Sequence
  Description of Artificial Sequence: Synthetic oligonucleotide
  Antisense strand to SEQ ID NO: 2153366
ugacacgaucacgagucac

SEQ ID NO: 2153368 - RNA, 19 nt, Artificial Sequence
  Description of Artificial Sequence: Synthetic oligonucleotide
  Sense strand starting at position 408 of SEQ ID NO: 1882867
ccacccuguuaguaugaau

SEQ ID NO: 2153369 - RNA, 19 nt, Artificial Sequence
  Description of Artificial Sequence: Synthetic oligonucleotide
  Antisense strand to SEQ ID NO: 2153368
auucauacuaacagggugg

SEQ ID NO: 2153370 - RNA, 19 nt, Artificial Sequence
  Description of Artificial Sequence: Synthetic oligonucleotide
  Sense strand starting at position 411 of SEQ ID NO: 1882867
cccuguuaguaugaauguu

SEQ ID NO: 2153371 - RNA, 19 nt, Artificial Sequence
  Description of Artificial Sequence: Synthetic oligonucleotide
  Antisense strand to SEQ ID NO: 2153370
aacauucauacuaacaggg

SEQ ID NO: 2153372 - RNA, 19 nt, Artificial Sequence
  Description of Artificial Sequence: Synthetic oligonucleotide
  Sense strand starting at position 419 of SEQ ID NO: 1882867
guaugaauguuacucauuc

SEQ ID NO: 2153373 - RNA, 19 nt, Artificial Sequence
  Description of Artificial Sequence: Synthetic oligonucleotide
  Antisense strand to SEQ ID NO: 2153372
gaaugaguaacauucauac

SEQ ID NO: 2153374 - RNA, 19 nt, Artificial Sequence
  Description of Artificial Sequence: Synthetic oligonucleotide
  Sense strand starting at position 449 of SEQ ID NO: 1882867
ugcagaaaguauucccuga

SEQ ID NO: 2153375 - RNA, 19 nt, Artificial Sequence
  Description of Artificial Sequence: Synthetic oligonucleotide
  Antisense strand to SEQ ID NO: 2153374
ucagggaauacuuucugca

SEQ ID NO: 2153376 - RNA, 19 nt, Artificial Sequence
  Description of Artificial Sequence: Synthetic oligonucleotide
  Sense strand starting at position 560 of SEQ ID NO: 1882867
uugaaaguaucuugacugu

SEQ ID NO: 2153377 - RNA, 19 nt, Artificial Sequence
  Description of Artificial Sequence: Synthetic oligonucleotide
  Antisense strand to SEQ ID NO: 2153376
acagucaagauacuuucaa

SEQ ID NO: 2153378 - RNA, 19 nt, Artificial Sequence
  Description of Artificial Sequence: Synthetic oligonucleotide
  Sense strand starting at position 592 of SEQ ID NO: 1882867
cuggcuaacuucuagagag

SEQ ID NO: 2153379 - RNA, 19 nt, Artificial Sequence
  Description of Artificial Sequence: Synthetic oligonucleotide
  Antisense strand to SEQ ID NO: 2153378
cucucuagaaguuagccag

SEQ ID NO: 2153380 - RNA, 19 nt, Artificial Sequence
  Description of Artificial Sequence: Synthetic oligonucleotide
  Sense strand starting at position 594 of SEQ ID NO: 1882867
ggcuaacuucuagagagca

SEQ ID NO: 2153381 - RNA, 19 nt, Artificial Sequence
  Description of Artificial Sequence: Synthetic oligonucleotide
  Antisense strand to SEQ ID NO: 2153380
ugcucucuagaaguuagcc

SEQ ID NO: 2153382 - RNA, 19 nt, Artificial Sequence
  Description of Artificial Sequence: Synthetic oligonucleotide
  Sense strand starting at position 662 of SEQ ID NO: 1882867
cuuaauccugcagauauga

SEQ ID NO: 2153383 - RNA, 19 nt, Artificial Sequence
  Description of Artificial Sequence: Synthetic oligonucleotide
  Antisense strand to SEQ ID NO: 2153382
ucauaucugcaggauuaag

SEQ ID NO: 2153384 - RNA, 19 nt, Artificial Sequence
  Description of Artificial Sequence: Synthetic oligonucleotide
  Sense strand starting at position 745 of SEQ ID NO: 1882867
uugcaucucuggcaaguuu

SEQ ID NO: 2153385 - RNA, 19 nt, Artificial Sequence
  Description of Artificial Sequence: Synthetic oligonucleotide
  Antisense strand to SEQ ID NO: 2153384
aaacuugccagagaugcaa

SEQ ID NO: 2153386 - RNA, 19 nt, Artificial Sequence
  Description of Artificial Sequence: Synthetic oligonucleotide
  Sense strand starting at position 753 of SEQ ID NO: 1882867
cuggcaaguuucuuggcau

SEQ ID NO: 2153387 - RNA, 19 nt, Artificial Sequence
  Description of Artificial Sequence: Synthetic oligonucleotide
  Antisense strand to SEQ ID NO: 2153386
augccaagaaacuugccag

SEQ ID NO: 2153388 - RNA, 19 nt, Artificial Sequence
  Description of Artificial Sequence: Synthetic oligonucleotide
  Sense strand starting at position 754 of SEQ ID NO: 1882867
uggcaaguuucuuggcaua

SEQ ID NO: 2153389 - RNA, 19 nt, Artificial Sequence
  Description of Artificial Sequence: Synthetic oligonucleotide
  Antisense strand to SEQ ID NO: 2153388
uaugccaagaaacuugcca

SEQ ID NO: 2153390 - RNA, 19 nt, Artificial Sequence
  Description of Artificial Sequence: Synthetic oligonucleotide
  Sense strand starting at position 756 of SEQ ID NO: 1882867
gcaaguuucuuggcauaac

SEQ ID NO: 2153391 - RNA, 19 nt, Artificial Sequence
  Description of Artificial Sequence: Synthetic oligonucleotide
  Antisense strand to SEQ ID NO: 2153390
guuaugccaagaaacuugc

SEQ ID NO: 2153392 - RNA, 19 nt, Artificial Sequence
  Description of Artificial Sequence: Synthetic oligonucleotide
  Sense strand starting at position 759 of SEQ ID NO: 1882867
aguuucuuggcauaacaau

SEQ ID NO: 2153393 - RNA, 19 nt, Artificial Sequence
  Description of Artificial Sequence: Synthetic oligonucleotide
  Antisense strand to SEQ ID NO: 2153392
auuguuaugccaagaaacu

SEQ ID NO: 2153394 - RNA, 19 nt, Artificial Sequence
  Description of Artificial Sequence: Synthetic oligonucleotide
  Sense strand starting at position 1009 of SEQ ID NO: 1882867
ccgguaaacucguccugga

SEQ ID NO: 2153395 - RNA, 19 nt, Artificial Sequence
  Description of Artificial Sequence: Synthetic oligonucleotide
  Antisense strand to SEQ ID NO: 2153394
uccaggacgaguuuaccgg

SEQ ID NO: 2153396 - RNA, 19 nt, Artificial Sequence
  Description of Artificial Sequence: Synthetic oligonucleotide
  Sense strand starting at position 1390 of SEQ ID NO: 1882867
gugguuuggguccgagagu

SEQ ID NO: 2153397 - RNA, 19 nt, Artificial Sequence
  Description of Artificial Sequence: Synthetic oligonucleotide
  Antisense strand to SEQ ID NO: 2153396
acucucggacccaaaccac

SEQ ID NO: 2153398 - RNA, 19 nt, Artificial Sequence
  Description of Artificial Sequence: Synthetic oligonucleotide
  Sense strand starting at position 1457 of SEQ ID NO: 1882867
cacaaauguugcuucggaa

SEQ ID NO: 2153399 - RNA, 19 nt, Artificial Sequence
  Description of Artificial Sequence: Synthetic oligonucleotide
  Antisense strand to SEQ ID NO: 2153398
uuccgaagcaacauuugug

SEQ ID NO: 2153400 - RNA, 19 nt, Artificial Sequence
  Description of Artificial Sequence: Synthetic oligonucleotide
  Sense strand starting at position 1460 of SEQ ID NO: 1882867
aaauguugcuucggaacca

SEQ ID NO: 2153401 - RNA, 19 nt, Artificial Sequence
  Description of Artificial Sequence: Synthetic oligonucleotide
  Antisense strand to SEQ ID NO: 2153400
ugguuccgaagcaacauuu

SEQ ID NO: 2153402 - RNA, 19 nt, Artificial Sequence
  Description of Artificial Sequence: Synthetic oligonucleotide
  Sense strand starting at position 2267 of SEQ ID NO: 1882867
cuucuuggcuuauagauag

SEQ ID NO: 2153403 - RNA, 19 nt, Artificial Sequence
  Description of Artificial Sequence: Synthetic oligonucleotide
  Antisense strand to SEQ ID NO: 2153402
cuaucuauaagccaagaag

SEQ ID NO: 2153404 - RNA, 19 nt, Artificial Sequence
  Description of Artificial Sequence: Synthetic oligonucleotide
  Sense strand starting at position 2274 of SEQ ID NO: 1882867
gcuuauagauagucacugu

SEQ ID NO: 2153405 - RNA, 19 nt, Artificial Sequence
  Description of Artificial Sequence: Synthetic oligonucleotide
  Antisense strand to SEQ ID NO: 2153404
acagugacuaucuauaagc

SEQ ID NO: 2153406 - RNA, 19 nt, Artificial Sequence
  Description of Artificial Sequence: Synthetic oligonucleotide
  Sense strand starting at position 2783 of SEQ ID NO: 1882867
uuauaaagucaccaguuga

SEQ ID NO: 2153407 - RNA, 19 nt, Artificial Sequence
  Description of Artificial Sequence: Synthetic oligonucleotide
  Antisense strand to SEQ ID NO: 2153406
ucaacuggugacuuuauaa

SEQ ID NO: 2153408 - RNA, 19 nt, Artificial Sequence
  Description of Artificial Sequence: Synthetic oligonucleotide
  Sense strand starting at position 2868 of SEQ ID NO: 1882867
acaguugcauucugaugua

SEQ ID NO: 2153409 - RNA, 19 nt, Artificial Sequence
  Description of Artificial Sequence: Synthetic oligonucleotide
  Antisense strand to SEQ ID NO: 2153408
uacaucagaaugcaacugu

SEQ ID NO: 2153410 - RNA, 19 nt, Artificial Sequence
  Description of Artificial Sequence: Synthetic oligonucleotide
  Sense strand starting at position 2871 of SEQ ID NO: 1882867
guugcauucugauguacug

SEQ ID NO: 2153411 - RNA, 19 nt, Artificial Sequence
  Description of Artificial Sequence: Synthetic oligonucleotide
  Antisense strand to SEQ ID NO: 2153410
caguacaucagaaugcaac

SEQ ID NO: 2153412 - RNA, 19 nt, Artificial Sequence
  Description of Artificial Sequence: Synthetic oligonucleotide
  Sense strand starting at position 2877 of SEQ ID NO: 1882867
uucugauguacugggauua

SEQ ID NO: 2153413 - RNA, 19 nt, Artificial Sequence
  Description of Artificial Sequence: Synthetic oligonucleotide
  Antisense strand to SEQ ID NO: 2153412
uaaucccaguacaucagaa

SEQ ID NO: 2153414 - RNA, 19 nt, Artificial Sequence
  Description of Artificial Sequence: Synthetic oligonucleotide
  Sense strand starting at position 2968 of SEQ ID NO: 1882867
auaacauggugauauagaa

SEQ ID NO: 2153415 - RNA, 19 nt, Artificial Sequence
  Description of Artificial Sequence: Synthetic oligonucleotide
  Antisense strand to SEQ ID NO: 2153414
uucuauaucaccauguuau

SEQ ID NO: 2153416 - RNA, 19 nt, Artificial Sequence
  Description of Artificial Sequence: Synthetic oligonucleotide
  Sense strand starting at position 3019 of SEQ ID NO: 1882867
gggagaucgugauaagaug

SEQ ID NO: 2153417 - RNA, 19 nt, Artificial Sequence
  Description of Artificial Sequence: Synthetic oligonucleotide
  Antisense strand to SEQ ID NO: 2153416
caucuuaucacgaucuccc

SEQ ID NO: 2153418 - RNA, 19 nt, Artificial Sequence
  Description of Artificial Sequence: Synthetic oligonucleotide
  Sense strand starting at position 3033 of SEQ ID NO: 1882867
agaugauggcuccaaguug

SEQ ID NO: 2153419 - RNA, 19 nt, Artificial Sequence
  Description of Artificial Sequence: Synthetic oligonucleotide
  Antisense strand to SEQ ID NO: 2153418
caacuuggagccaucaucu

SEQ ID NO: 2153420 - RNA, 19 nt, Artificial Sequence
  Description of Artificial Sequence: Synthetic oligonucleotide
  Sense strand starting at position 3109 of SEQ ID NO: 1882867
gccagcuguccuggaguuu

SEQ ID NO: 2153421 - RNA, 19 nt, Artificial Sequence
  Description of Artificial Sequence: Synthetic oligonucleotide
  Antisense strand to SEQ ID NO: 2153420
aaacuccaggacagcuggc

SEQ ID NO: 2153422 - RNA, 19 nt, Artificial Sequence
  Description of Artificial Sequence: Synthetic oligonucleotide
  Sense strand starting at position 3110 of SEQ ID NO: 1882867
ccagcuguccuggaguuua

SEQ ID NO: 2153423 - RNA, 19 nt, Artificial Sequence
  Description of Artificial Sequence: Synthetic oligonucleotide
  Antisense strand to SEQ ID NO: 2153422
uaaacuccaggacagcugg

SEQ ID NO: 2153424 - RNA, 19 nt, Artificial Sequence
  Description of Artificial Sequence: Synthetic oligonucleotide
  Sense strand starting at position 3121 of SEQ ID NO: 1882867
ggaguuuaggcaggacuua

SEQ ID NO: 2153425 - RNA, 19 nt, Artificial Sequence
  Description of Artificial Sequence: Synthetic oligonucleotide
  Antisense strand to SEQ ID NO: 2153424
uaaguccugccuaaacucc

SEQ ID NO: 2153426 - RNA, 19 nt, Artificial Sequence
  Description of Artificial Sequence: Synthetic oligonucleotide
  Sense strand starting at position 3130 of SEQ ID NO: 1882867
gcaggacuuaagugacuuu

SEQ ID NO: 2153427 - RNA, 19 nt, Artificial Sequence
  Description of Artificial Sequence: Synthetic oligonucleotide
  Antisense strand to SEQ ID NO: 2153426
aaagucacuuaaguccugc

SEQ ID NO: 2153428 - RNA, 19 nt, Artificial Sequence
  Description of Artificial Sequence: Synthetic oligonucleotide
  Sense strand starting at position 3193 of SEQ ID NO: 1882867
aaaugauacgacugagcaa

SEQ ID NO: 2153429 - RNA, 19 nt, Artificial Sequence
  Description of Artificial Sequence: Synthetic oligonucleotide
  Antisense strand to SEQ ID NO: 2153428
uugcucagucguaucauuu

SEQ ID NO: 2153430 - RNA, 19 nt, Artificial Sequence
  Description of Artificial Sequence: Synthetic oligonucleotide
  Sense strand starting at position 3235 of SEQ ID NO: 1882867
uuuggcuucuucuugugua

SEQ ID NO: 2153431 - RNA, 19 nt, Artificial Sequence
  Description of Artificial Sequence: Synthetic oligonucleotide
  Antisense strand to SEQ ID NO: 2153430
uacacaagaagaagccaaa

SEQ ID NO: 2153432 - RNA, 19 nt, Artificial Sequence
  Description of Artificial Sequence: Synthetic oligonucleotide
  Sense strand starting at position 3247 of SEQ ID NO: 1882867
uuguguagcucaucucaua

SEQ ID NO: 2153433 - RNA, 19 nt, Artificial Sequence
  Description of Artificial Sequence: Synthetic oligonucleotide
  Antisense strand to SEQ ID NO: 2153432
uaugagaugagcuacacaa

SEQ ID NO: 2153434 - RNA, 19 nt, Artificial Sequence
  Description of Artificial Sequence: Synthetic oligonucleotide
  Sense strand starting at position 3576 of SEQ ID NO: 1882867
cggccaaguuuccuuguau

SEQ ID NO: 2153435 - RNA, 19 nt, Artificial Sequence
  Description of Artificial Sequence: Synthetic oligonucleotide
  Antisense strand to SEQ ID NO: 2153434
auacaaggaaacuuggccg

SEQ ID NO: 2153436 - RNA, 19 nt, Artificial Sequence
  Description of Artificial Sequence: Synthetic oligonucleotide
  Sense strand starting at position 3577 of SEQ ID NO: 1882867
ggccaaguuuccuuguauu

SEQ ID NO: 2153437 - RNA, 19 nt, Artificial Sequence
  Description of Artificial Sequence: Synthetic oligonucleotide
  Antisense strand to SEQ ID NO: 2153436
aauacaaggaaacuuggcc

SEQ ID NO: 2153438 - RNA, 19 nt, Artificial Sequence
  Description of Artificial Sequence: Synthetic oligonucleotide
  Sense strand starting at position 3587 of SEQ ID NO: 1882867
ccuuguauuuaauguagaa

SEQ ID NO: 2153439 - RNA, 19 nt, Artificial Sequence
  Description of Artificial Sequence: Synthetic oligonucleotide
  Antisense strand to SEQ ID NO: 2153438
uucuacauuaaauacaagg

SEQ ID NO: 2153440 - RNA, 19 nt, Artificial Sequence
  Description of Artificial Sequence: Synthetic oligonucleotide
  Sense strand starting at position 3599 of SEQ ID NO: 1882867
uguagaaucugaugggaac

SEQ ID NO: 2153441 - RNA, 19 nt, Artificial Sequence
  Description of Artificial Sequence: Synthetic oligonucleotide
  Antisense strand to SEQ ID NO: 2153440
guucccaucagauucuaca

SEQ ID NO: 2153442 - RNA, 19 nt, Artificial Sequence
  Description of Artificial Sequence: Synthetic oligonucleotide
  Sense strand starting at position 3707 of SEQ ID NO: 1882867
acgcccuugcuggaagauu

SEQ ID NO: 2153443 - RNA, 19 nt, Artificial Sequence
  Description of Artificial Sequence: Synthetic oligonucleotide
  Antisense strand to SEQ ID NO: 2153442
aaucuuccagcaagggcgu

SEQ ID NO: 2153444 - RNA, 19 nt, Artificial Sequence
  Description of Artificial Sequence: Synthetic oligonucleotide
  Sense strand starting at position 105 of SEQ ID NO: 1882868
uaauaucuguaagaaggga

SEQ ID NO: 2153445 - RNA, 19 nt, Artificial Sequence
  Description of Artificial Sequence: Synthetic oligonucleotide
  Antisense strand to SEQ ID NO: 2153444
ucccuucuuacagauauua

SEQ ID NO: 2153446 - RNA, 19 nt, Artificial Sequence
  Description of Artificial Sequence: Synthetic oligonucleotide
  Sense strand starting at position 144 of SEQ ID NO: 1882868
ugcucaguauccugcuuaa

SEQ ID NO: 2153447 - RNA, 19 nt, Artificial Sequence
  Description of Artificial Sequence: Synthetic oligonucleotide
  Antisense strand to SEQ ID NO: 2153446
uuaagcaggauacugagca

SEQ ID NO: 2153448 - RNA, 19 nt, Artificial Sequence
  Description of Artificial Sequence: Synthetic oligonucleotide
  Sense strand starting at position 154 of SEQ ID NO: 1882868
ccugcuuaaugcuaucagu

SEQ ID NO: 2153449 - RNA, 19 nt, Artificial Sequence
  Description of Artificial Sequence: Synthetic oligonucleotide
  Antisense strand to SEQ ID NO: 2153448
acugauagcauuaagcagg

SEQ ID NO: 2153450 - RNA, 19 nt, Artificial Sequence
  Description of Artificial Sequence: Synthetic oligonucleotide
  Sense strand starting at position 157 of SEQ ID NO: 1882868
gcuuaaugcuaucaguuuc

SEQ ID NO: 2153451 - RNA, 19 nt, Artificial Sequence
  Description of Artificial Sequence: Synthetic oligonucleotide
  Antisense strand to SEQ ID NO: 2153450
gaaacugauagcauuaagc

SEQ ID NO: 2153452 - RNA, 19 nt, Artificial Sequence
  Description of Artificial Sequence: Synthetic oligonucleotide
  Sense strand starting at position 260 of SEQ ID NO: 1882868
gugcccagcuucuagugau

SEQ ID NO: 2153453 - RNA, 19 nt, Artificial Sequence
  Description of Artificial Sequence: Synthetic oligonucleotide
  Antisense strand to SEQ ID NO: 2153452
aucacuagaagcugggcac

SEQ ID NO: 2153454 - RNA, 19 nt, Artificial Sequence
  Description of Artificial Sequence: Synthetic oligonucleotide
  Sense strand starting at position 263 of SEQ ID NO: 1882868
cccagcuucuagugauaga

SEQ ID NO: 2153455 - RNA, 19 nt, Artificial Sequence
  Description of Artificial Sequence: Synthetic oligonucleotide
  Antisense strand to SEQ ID NO: 2153454
ucuaucacuagaagcuggg

SEQ ID NO: 2153456 - RNA, 19 nt, Artificial Sequence
  Description of Artificial Sequence: Synthetic oligonucleotide
  Sense strand starting at position 328 of SEQ ID NO: 1882868
ggaagccuucccugaacuu

SEQ ID NO: 2153457 - RNA, 19 nt, Artificial Sequence
  Description of Artificial Sequence: Synthetic oligonucleotide
  Antisense strand to SEQ ID NO: 2153456
aaguucagggaaggcuucc

SEQ ID NO: 2153458 - RNA, 19 nt, Artificial Sequence
  Description of Artificial Sequence: Synthetic oligonucleotide
  Sense strand starting at position 442 of SEQ ID NO: 1882868
aggucagucuccucuacua

SEQ ID NO: 2153459 - RNA, 19 nt, Artificial Sequence
  Description of Artificial Sequence: Synthetic oligonucleotide
  Antisense strand to SEQ ID NO: 2153458
uaguagaggagacugaccu

SEQ ID NO: 2153460 - RNA, 19 nt, Artificial Sequence
  Description of Artificial Sequence: Synthetic oligonucleotide
  Sense strand starting at position 444 of SEQ ID NO: 1882868
gucagucuccucuacuaca

SEQ ID NO: 2153461 - RNA, 19 nt, Artificial Sequence
  Description of Artificial Sequence: Synthetic oligonucleotide
  Antisense strand to SEQ ID NO: 2153460
uguaguagaggagacugac

SEQ ID NO: 2153462 - RNA, 19 nt, Artificial Sequence
  Description of Artificial Sequence: Synthetic oligonucleotide
  Sense strand starting at position 534 of SEQ ID NO: 1882868
gaaguaagcauucgucgau

SEQ ID NO: 2153463 - RNA, 19 nt, Artificial Sequence
  Description of Artificial Sequence: Synthetic oligonucleotide
  Antisense strand to SEQ ID NO: 2153462
aucgacgaaugcuuacuuc

SEQ ID NO: 2153464 - RNA, 19 nt, Artificial Sequence
  Description of Artificial Sequence: Synthetic oligonucleotide
  Sense strand starting at position 535 of SEQ ID NO: 1882868
aaguaagcauucgucgauu

SEQ ID NO: 2153465 - RNA, 19 nt, Artificial Sequence
  Description of Artificial Sequence: Synthetic oligonucleotide
  Antisense strand to SEQ ID NO: 2153464
aaucgacgaaugcuuacuu

SEQ ID NO: 2153466 - RNA, 19 nt, Artificial Sequence
  Description of Artificial Sequence: Synthetic oligonucleotide
  Sense strand starting at position 579 of SEQ ID NO: 1882868
cauucccaguggugaguua

SEQ ID NO: 2153467 - RNA, 19 nt, Artificial Sequence
  Description of Artificial Sequence: Synthetic oligonucleotide
  Antisense strand to SEQ ID NO: 2153466
uaacucaccacugggaaug

SEQ ID NO: 2153468 - RNA, 19 nt, Artificial Sequence
  Description of Artificial Sequence: Synthetic oligonucleotide
  Sense strand starting at position 580 of SEQ ID NO: 1882868
auucccaguggugaguuaa

SEQ ID NO: 2153469 - RNA, 19 nt, Artificial Sequence
  Description of Artificial Sequence: Synthetic oligonucleotide
  Antisense strand to SEQ ID NO: 2153468
uuaacucaccacugggaau

SEQ ID NO: 2153470 - RNA, 19 nt, Artificial Sequence
  Description of Artificial Sequence: Synthetic oligonucleotide
  Sense strand starting at position 586 of SEQ ID NO: 1882868
aguggugaguuaagucaga

SEQ ID NO: 2153471 - RNA, 19 nt, Artificial Sequence
  Description of Artificial Sequence: Synthetic oligonucleotide
  Antisense strand to SEQ ID NO: 2153470
ucugacuuaacucaccacu

SEQ ID NO: 2153472 - RNA, 19 nt, Artificial Sequence
  Description of Artificial Sequence: Synthetic oligonucleotide
  Sense strand starting at position 591 of SEQ ID NO: 1882868
ugaguuaagucagagugca

SEQ ID NO: 2153473 - RNA, 19 nt, Artificial Sequence
  Description of Artificial Sequence: Synthetic oligonucleotide
  Antisense strand to SEQ ID NO: 2153472
ugcacucugacuuaacuca

SEQ ID NO: 2153474 - RNA, 19 nt, Artificial Sequence
  Description of Artificial Sequence: Synthetic oligonucleotide
  Sense strand starting at position 754 of SEQ ID NO: 1882868
ugccucaucucgcuccuaa

SEQ ID NO: 2153475 - RNA, 19 nt, Artificial Sequence
  Description of Artificial Sequence: Synthetic oligonucleotide
  Antisense strand to SEQ ID NO: 2153474
uuaggagcgagaugaggca

SEQ ID NO: 2153476 - RNA, 19 nt, Artificial Sequence
  Description of Artificial Sequence: Synthetic oligonucleotide
  Sense strand starting at position 979 of SEQ ID NO: 1882868
cagaaacaaugcgaucaga

SEQ ID NO: 2153477 - RNA, 19 nt, Artificial Sequence
  Description of Artificial Sequence: Synthetic oligonucleotide
  Antisense strand to SEQ ID NO: 2153476
ucugaucgcauuguuucug

SEQ ID NO: 2153478 - RNA, 19 nt, Artificial Sequence
  Description of Artificial Sequence: Synthetic oligonucleotide
  Sense strand starting at position 987 of SEQ ID NO: 1882868
augcgaucagaugagcuua

SEQ ID NO: 2153479 - RNA, 19 nt, Artificial Sequence
  Description of Artificial Sequence: Synthetic oligonucleotide
  Antisense strand to SEQ ID NO: 2153478
uaagcucaucugaucgcau

SEQ ID NO: 2153480 - RNA, 19 nt, Artificial Sequence
  Description of Artificial Sequence: Synthetic oligonucleotide
  Sense strand starting at position 1029 of SEQ ID NO: 1882868
aggaauaaaucucucugca

SEQ ID NO: 2153481 - RNA, 19 nt, Artificial Sequence
  Description of Artificial Sequence: Synthetic oligonucleotide
  Antisense strand to SEQ ID NO: 2153480
ugcagagagauuuauuccu

SEQ ID NO: 2153482 - RNA, 19 nt, Artificial Sequence
  Description of Artificial Sequence: Synthetic oligonucleotide
  Sense strand starting at position 1119 of SEQ ID NO: 1882868
guccuuagcuuuccucuua

SEQ ID NO: 2153483 - RNA, 19 nt, Artificial Sequence
  Description of Artificial Sequence: Synthetic oligonucleotide
  Antisense strand to SEQ ID NO: 2153482
uaagaggaaagcuaaggac

SEQ ID NO: 2153484 - RNA, 19 nt, Artificial Sequence
  Description of Artificial Sequence: Synthetic oligonucleotide
  Sense strand starting at position 1299 of SEQ ID NO: 1882868
guggauugcgccuguaaau

SEQ ID NO: 2153485 - RNA, 19 nt, Artificial Sequence
  Description of Artificial Sequence: Synthetic oligonucleotide
  Antisense strand to SEQ ID NO: 2153484
auuuacaggcgcaauccac

SEQ ID NO: 2153486 - RNA, 19 nt, Artificial Sequence
  Description of Artificial Sequence: Synthetic oligonucleotide
  Sense strand starting at position 1526 of SEQ ID NO: 1882868
cauggauccugcggacaaa

SEQ ID NO: 2153487 - RNA, 19 nt, Artificial Sequence
  Description of Artificial Sequence: Synthetic oligonucleotide
  Antisense strand to SEQ ID NO: 2153486
uuuguccgcaggauccaug

SEQ ID NO: 2153488 - RNA, 19 nt, Artificial Sequence
  Description of Artificial Sequence: Synthetic oligonucleotide
  Sense strand starting at position 2704 of SEQ ID NO: 1882868
uccauuguauucuagagaa

SEQ ID NO: 2153489 - RNA, 19 nt, Artificial Sequence
  Description of Artificial Sequence: Synthetic oligonucleotide
  Antisense strand to SEQ ID NO: 2153488
uucucuagaauacaaugga

SEQ ID NO: 2153490 - RNA, 19 nt, Artificial Sequence
  Description of Artificial Sequence: Synthetic oligonucleotide
  Sense strand starting at position 2928 of SEQ ID NO: 1882868
uuaauuugcugguaagaug

SEQ ID NO: 2153491 - RNA, 19 nt, Artificial Sequence
  Description of Artificial Sequence: Synthetic oligonucleotide
  Antisense strand to SEQ ID NO: 2153490
caucuuaccagcaaauuaa

SEQ ID NO: 2153492 - RNA, 19 nt, Artificial Sequence
  Description of Artificial Sequence: Synthetic oligonucleotide
  Sense strand starting at position 2939 of SEQ ID NO: 1882868
guaagaugguuuguagcuu

SEQ ID NO: 2153493 - RNA, 19 nt, Artificial Sequence
  Description of Artificial Sequence: Synthetic oligonucleotide
  Antisense strand to SEQ ID NO: 2153492
aagcuacaaaccaucuuac

SEQ ID NO: 2153494 - RNA, 19 nt, Artificial Sequence
  Description of Artificial Sequence: Synthetic oligonucleotide
  Sense strand starting at position 3026 of SEQ ID NO: 1882868
ggauuauaggcguaggcua

SEQ ID NO: 2153495 - RNA, 19 nt, Artificial Sequence
  Description of Artificial Sequence: Synthetic oligonucleotide
  Antisense strand to SEQ ID NO: 2153494
uagccuacgccuauaaucc

SEQ ID NO: 2153496 - RNA, 19 nt, Artificial Sequence
  Description of Artificial Sequence: Synthetic oligonucleotide
  Sense strand starting at position 3381 of SEQ ID NO: 1882868
ggcagugagccugauugca

SEQ ID NO: 2153497 - RNA, 19 nt, Artificial Sequence
  Description of Artificial Sequence: Synthetic oligonucleotide
  Antisense strand to SEQ ID NO: 2153496
ugcaaucaggcucacugcc

SEQ ID NO: 2153498 - RNA, 19 nt, Artificial Sequence
  Description of Artificial Sequence: Synthetic oligonucleotide
  Sense strand starting at position 3567 of SEQ ID NO: 1882868
aaggguacauucuauauga

SEQ ID NO: 2153499 - RNA, 19 nt, Artificial Sequence
  Description of Artificial Sequence: Synthetic oligonucleotide
  Antisense strand to SEQ ID NO: 2153498
ucauauagaauguacccuu

SEQ ID NO: 2153500 - RNA, 19 nt, Artificial Sequence
  Description of Artificial Sequence: Synthetic oligonucleotide
  Sense strand starting at position 3583 of SEQ ID NO: 1882868
ugaugcuguuuaugugaca

SEQ ID NO: 2153501 - RNA, 19 nt, Artificial Sequence
  Description of Artificial Sequence: Synthetic oligonucleotide
  Antisense strand to SEQ ID NO: 2153500
ugucacauaaacagcauca

SEQ ID NO: 2153502 - RNA, 19 nt, Artificial Sequence
  Description of Artificial Sequence: Synthetic oligonucleotide
  Sense strand starting at position 3584 of SEQ ID NO: 1882868
gaugcuguuuaugugacau

SEQ ID NO: 2153503 - RNA, 19 nt, Artificial Sequence
  Description of Artificial Sequence: Synthetic oligonucleotide
  Antisense strand to SEQ ID NO: 2153502
augucacauaaacagcauc

SEQ ID NO: 2153504 - RNA, 19 nt, Artificial Sequence
  Description of Artificial Sequence: Synthetic oligonucleotide
  Sense strand starting at position 3681 of SEQ ID NO: 1882868
gagggagcuuucuggaaac

SEQ ID NO: 2153505 - RNA, 19 nt, Artificial Sequence
  Description of Artificial Sequence: Synthetic oligonucleotide
  Antisense strand to SEQ ID NO: 2153504
guuuccagaaagcucccuc

SEQ ID NO: 2153506 - RNA, 19 nt, Artificial Sequence
  Description of Artificial Sequence: Synthetic oligonucleotide
  Sense strand starting at position 3726 of SEQ ID NO: 1882868
acguauauacaucaagugu

SEQ ID NO: 2153507 - RNA, 19 nt, Artificial Sequence
  Description of Artificial Sequence: Synthetic oligonucleotide
  Antisense strand to SEQ ID NO: 2153506
acacuugauguauauacgu

SEQ ID NO: 2153508 - RNA, 19 nt, Artificial Sequence
  Description of Artificial Sequence: Synthetic oligonucleotide
  Sense strand starting at position 21 of SEQ ID NO: 1882869
ggcguaguucgguuugaac

SEQ ID NO: 2153509 - RNA, 19 nt, Artificial Sequence
  Description of Artificial Sequence: Synthetic oligonucleotide
  Antisense strand to SEQ ID NO: 2153508
guucaaaccgaacuacgcc

SEQ ID NO: 2153510 - RNA, 19 nt, Artificial Sequence
  Description of Artificial Sequence: Synthetic oligonucleotide
  Sense strand starting at position 101 of SEQ ID NO: 1882869
uaauaucuguaagaaggga

SEQ ID NO: 2153511 - RNA, 19 nt, Artificial Sequence
  Description of Artificial Sequence: Synthetic oligonucleotide
  Antisense strand to SEQ ID NO: 2153510
ucccuucuuacagauauua

SEQ ID NO: 2153512 - RNA, 19 nt, Artificial Sequence
  Description of Artificial Sequence: Synthetic oligonucleotide
  Sense strand starting at position 130 of SEQ ID NO: 1882869
gggugaagcuugcucagua

SEQ ID NO: 2153513 - RNA, 19 nt, Artificial Sequence
  Description of Artificial Sequence: Synthetic oligonucleotide
  Antisense strand to SEQ ID NO: 2153512
uacugagcaagcuucaccc

SEQ ID NO: 2153514 - RNA, 19 nt, Artificial Sequence
  Description of Artificial Sequence: Synthetic oligonucleotide
  Sense strand starting at position 438 of SEQ ID NO: 1882869
aggucagucuccucuacua

SEQ ID NO: 2153515 - RNA, 19 nt, Artificial Sequence
  Description of Artificial Sequence: Synthetic oligonucleotide
  Antisense strand to SEQ ID NO: 2153514
uaguagaggagacugaccu

SEQ ID NO: 2153516 - RNA, 19 nt, Artificial Sequence
  Description of Artificial Sequence: Synthetic oligonucleotide
  Sense strand starting at position 440 of SEQ ID NO: 1882869
gucagucuccucuacuaca

SEQ ID NO: 2153517 - RNA, 19 nt, Artificial Sequence
  Description of Artificial Sequence: Synthetic oligonucleotide
  Antisense strand to SEQ ID NO: 2153516
uguaguagaggagacugac

SEQ ID NO: 2153518 - RNA, 19 nt, Artificial Sequence
  Description of Artificial Sequence: Synthetic oligonucleotide
  Sense strand starting at position 459 of SEQ ID NO: 1882869
uugugagguccuuaagggu

SEQ ID NO: 2153519 - RNA, 19 nt, Artificial Sequence
  Description of Artificial Sequence: Synthetic oligonucleotide
  Antisense strand to SEQ ID NO: 2153518
acccuuaaggaccucacaa

SEQ ID NO: 2153520 - RNA, 19 nt, Artificial Sequence
  Description of Artificial Sequence: Synthetic oligonucleotide
  Sense strand starting at position 465 of SEQ ID NO: 1882869
gguccuuaaggguggagau

SEQ ID NO: 2153521 - RNA, 19 nt, Artificial Sequence
  Description of Artificial Sequence: Synthetic oligonucleotide
  Antisense strand to SEQ ID NO: 2153520
aucuccacccuuaaggacc

SEQ ID NO: 2153522 - RNA, 19 nt, Artificial Sequence
  Description of Artificial Sequence: Synthetic oligonucleotide
  Sense strand starting at position 482 of SEQ ID NO: 1882869
auguucuaaucuucugagu

SEQ ID NO: 2153523 - RNA, 19 nt, Artificial Sequence
  Description of Artificial Sequence: Synthetic oligonucleotide
  Antisense strand to SEQ ID NO: 2153522
acucagaagauuagaacau

SEQ ID NO: 2153524 - RNA, 19 nt, Artificial Sequence
  Description of Artificial Sequence: Synthetic oligonucleotide
  Sense strand starting at position 517 of SEQ ID NO: 1882869
ccauguauugugggaagua

SEQ ID NO: 2153525 - RNA, 19 nt, Artificial Sequence
  Description of Artificial Sequence: Synthetic oligonucleotide
  Antisense strand to SEQ ID NO: 2153524
uacuucccacaauacaugg

SEQ ID NO: 2153526 - RNA, 19 nt, Artificial Sequence
  Description of Artificial Sequence: Synthetic oligonucleotide
  Sense strand starting at position 576 of SEQ ID NO: 1882869
auucccaguggugaguuaa

SEQ ID NO: 2153527 - RNA, 19 nt, Artificial Sequence
  Description of Artificial Sequence: Synthetic oligonucleotide
  Antisense strand to SEQ ID NO: 2153526
uuaacucaccacugggaau

SEQ ID NO: 2153528 - RNA, 19 nt, Artificial Sequence
  Description of Artificial Sequence: Synthetic oligonucleotide
  Sense strand starting at position 582 of SEQ ID NO: 1882869
aguggugaguuaagucaga

SEQ ID NO: 2153529 - RNA, 19 nt, Artificial Sequence
  Description of Artificial Sequence: Synthetic oligonucleotide
  Antisense strand to SEQ ID NO: 2153528
ucugacuuaacucaccacu

SEQ ID NO: 2153530 - RNA, 19 nt, Artificial Sequence
  Description of Artificial Sequence: Synthetic oligonucleotide
  Sense strand starting at position 592 of SEQ ID NO: 1882869
uaagucagagugcaaagau

SEQ ID NO: 2153531 - RNA, 19 nt, Artificial Sequence
  Description of Artificial Sequence: Synthetic oligonucleotide
  Antisense strand to SEQ ID NO: 2153530
aucuuugcacucugacuua

SEQ ID NO: 2153532 - RNA, 19 nt, Artificial Sequence
  Description of Artificial Sequence: Synthetic oligonucleotide
  Sense strand starting at position 815 of SEQ ID NO: 1882869
guuucauuagccgaggagu

SEQ ID NO: 2153533 - RNA, 19 nt, Artificial Sequence
  Description of Artificial Sequence: Synthetic oligonucleotide
  Antisense strand to SEQ ID NO: 2153532
acuccucggcuaaugaaac

SEQ ID NO: 2153534 - RNA, 19 nt, Artificial Sequence
  Description of Artificial Sequence: Synthetic oligonucleotide
  Sense strand starting at position 817 of SEQ ID NO: 1882869
uucauuagccgaggaguuu

SEQ ID NO: 2153535 - RNA, 19 nt, Artificial Sequence
  Description of Artificial Sequence: Synthetic oligonucleotide
  Antisense strand to SEQ ID NO: 2153534
aaacuccucggcuaaugaa

SEQ ID NO: 2153536 - RNA, 19 nt, Artificial Sequence
  Description of Artificial Sequence: Synthetic oligonucleotide
  Sense strand starting at position 843 of SEQ ID NO: 1882869
guaauuagaaucgaagggu

SEQ ID NO: 2153537 - RNA, 19 nt, Artificial Sequence
  Description of Artificial Sequence: Synthetic oligonucleotide
  Antisense strand to SEQ ID NO: 2153536
acccuucgauucuaauuac

SEQ ID NO: 2153538 - RNA, 19 nt, Artificial Sequence
  Description of Artificial Sequence: Synthetic oligonucleotide
  Sense strand starting at position 851 of SEQ ID NO: 1882869
aaucgaagggucuguccaa

SEQ ID NO: 2153539 - RNA, 19 nt, Artificial Sequence
  Description of Artificial Sequence: Synthetic oligonucleotide
  Antisense strand to SEQ ID NO: 2153538
uuggacagacccuucgauu

SEQ ID NO: 2153540 - RNA, 19 nt, Artificial Sequence
  Description of Artificial Sequence: Synthetic oligonucleotide
  Sense strand starting at position 872 of SEQ ID NO: 1882869
guuccagguauccauagua

SEQ ID NO: 2153541 - RNA, 19 nt, Artificial Sequence
  Description of Artificial Sequence: Synthetic oligonucleotide
  Antisense strand to SEQ ID NO: 2153540
uacuauggauaccuggaac

SEQ ID NO: 2153542 - RNA, 19 nt, Artificial Sequence
  Description of Artificial Sequence: Synthetic oligonucleotide
  Sense strand starting at position 956 of SEQ ID NO: 1882869
cgagucucucaugaucaca

SEQ ID NO: 2153543 - RNA, 19 nt, Artificial Sequence
  Description of Artificial Sequence: Synthetic oligonucleotide
  Antisense strand to SEQ ID NO: 2153542
ugugaucaugagagacucg

SEQ ID NO: 2153544 - RNA, 19 nt, Artificial Sequence
  Description of Artificial Sequence: Synthetic oligonucleotide
  Sense strand starting at position 958 of SEQ ID NO: 1882869
agucucucaugaucacaca

SEQ ID NO: 2153545 - RNA, 19 nt, Artificial Sequence
  Description of Artificial Sequence: Synthetic oligonucleotide
  Antisense strand to SEQ ID NO: 2153544
ugugugaucaugagagacu

SEQ ID NO: 2153546 - RNA, 19 nt, Artificial Sequence
  Description of Artificial Sequence: Synthetic oligonucleotide
  Sense strand starting at position 983 of SEQ ID NO: 1882869
augcgaucagaugagcuua

SEQ ID NO: 2153547 - RNA, 19 nt, Artificial Sequence
  Description of Artificial Sequence: Synthetic oligonucleotide
  Antisense strand to SEQ ID NO: 2153546
uaagcucaucugaucgcau

SEQ ID NO: 2153548 - RNA, 19 nt, Artificial Sequence
  Description of Artificial Sequence: Synthetic oligonucleotide
  Sense strand starting at position 1025 of SEQ ID NO: 1882869
aggaauaaaucucucugca

SEQ ID NO: 2153549 - RNA, 19 nt, Artificial Sequence
  Description of Artificial Sequence: Synthetic oligonucleotide
  Antisense strand to SEQ ID NO: 2153548
ugcagagagauuuauuccu

SEQ ID NO: 2153550 - RNA, 19 nt, Artificial Sequence
  Description of Artificial Sequence: Synthetic oligonucleotide
  Sense strand starting at position 1787 of SEQ ID NO: 1882869
ccaggacucccugguuuaa

SEQ ID NO: 2153551 - RNA, 19 nt, Artificial Sequence
  Description of Artificial Sequence: Synthetic oligonucleotide
  Antisense strand to SEQ ID NO: 2153550
uuaaaccagggaguccugg

SEQ ID NO: 2153552 - RNA, 19 nt, Artificial Sequence
  Description of Artificial Sequence: Synthetic oligonucleotide
  Sense strand starting at position 1962 of SEQ ID NO: 1882869
cgaggaggcacucaucguu

SEQ ID NO: 2153553 - RNA, 19 nt, Artificial Sequence
  Description of Artificial Sequence: Synthetic oligonucleotide
  Antisense strand to SEQ ID NO: 2153552
aacgaugagugccuccucg

SEQ ID NO: 2153554 - RNA, 19 nt, Artificial Sequence
  Description of Artificial Sequence: Synthetic oligonucleotide
  Sense strand starting at position 2587 of SEQ ID NO: 1882869
aaggaugcagcaugugauu

SEQ ID NO: 2153555 - RNA, 19 nt, Artificial Sequence
  Description of Artificial Sequence: Synthetic oligonucleotide
  Antisense strand to SEQ ID NO: 2153554
aaucacaugcugcauccuu

SEQ ID NO: 2153556 - RNA, 19 nt, Artificial Sequence
  Description of Artificial Sequence: Synthetic oligonucleotide
  Sense strand starting at position 2791 of SEQ ID NO: 1882869
gcuggaguucagugaugga

SEQ ID NO: 2153557 - RNA, 19 nt, Artificial Sequence
  Description of Artificial Sequence: Synthetic oligonucleotide
  Antisense strand to SEQ ID NO: 2153556
uccaucacugaacuccagc

SEQ ID NO: 2153558 - RNA, 19 nt, Artificial Sequence
  Description of Artificial Sequence: Synthetic oligonucleotide
  Sense strand starting at position 2927 of SEQ ID NO: 1882869
uuaauuugcugguaagaug

SEQ ID NO: 2153559 - RNA, 19 nt, Artificial Sequence
  Description of Artificial Sequence: Synthetic oligonucleotide
  Antisense strand to SEQ ID NO: 2153558
caucuuaccagcaaauuaa

SEQ ID NO: 2153560 - RNA, 19 nt, Artificial Sequence
  Description of Artificial Sequence: Synthetic oligonucleotide
  Sense strand starting at position 3025 of SEQ ID NO: 1882869
ggauuauaggcguaggcua

SEQ ID NO: 2153561 - RNA, 19 nt, Artificial Sequence
  Description of Artificial Sequence: Synthetic oligonucleotide
  Antisense strand to SEQ ID NO: 2153560
uagccuacgccuauaaucc

SEQ ID NO: 2153562 - RNA, 19 nt, Artificial Sequence
  Description of Artificial Sequence: Synthetic oligonucleotide
  Sense strand starting at position 3088 of SEQ ID NO: 1882869
acaugaaauuaggaggaua

SEQ ID NO: 2153563 - RNA, 19 nt, Artificial Sequence
  Description of Artificial Sequence: Synthetic oligonucleotide
  Antisense strand to SEQ ID NO: 2153562
uauccuccuaauuucaugu

SEQ ID NO: 2153564 - RNA, 19 nt, Artificial Sequence
  Description of Artificial Sequence: Synthetic oligonucleotide
  Sense strand starting at position 3380 of SEQ ID NO: 1882869
ggcagugagccugauugca

SEQ ID NO: 2153565 - RNA, 19 nt, Artificial Sequence
  Description of Artificial Sequence: Synthetic oligonucleotide
  Antisense strand to SEQ ID NO: 2153564
ugcaaucaggcucacugcc

SEQ ID NO: 2153566 - RNA, 19 nt, Artificial Sequence
  Description of Artificial Sequence: Synthetic oligonucleotide
  Sense strand starting at position 3467 of SEQ ID NO: 1882869
uguauaacagagugucauu

SEQ ID NO: 2153567 - RNA, 19 nt, Artificial Sequence
  Description of Artificial Sequence: Synthetic oligonucleotide
  Antisense strand to SEQ ID NO: 2153566
aaugacacucuguuauaca

SEQ ID NO: 2153568 - RNA, 19 nt, Artificial Sequence
  Description of Artificial Sequence: Synthetic oligonucleotide
  Sense strand starting at position 3472 of SEQ ID NO: 1882869
aacagagugucauugaauu

SEQ ID NO: 2153569 - RNA, 19 nt, Artificial Sequence
  Description of Artificial Sequence: Synthetic oligonucleotide
  Antisense strand to SEQ ID NO: 2153568
aauucaaugacacucuguu

SEQ ID NO: 2153570 - RNA, 19 nt, Artificial Sequence
  Description of Artificial Sequence: Synthetic oligonucleotide
  Sense strand starting at position 3489 of SEQ ID NO: 1882869
uuucuaaacguugaaagac

SEQ ID NO: 2153571 - RNA, 19 nt, Artificial Sequence
  Description of Artificial Sequence: Synthetic oligonucleotide
  Antisense strand to SEQ ID NO: 2153570
gucuuucaacguuuagaaa

SEQ ID NO: 2153572 - RNA, 19 nt, Artificial Sequence
  Description of Artificial Sequence: Synthetic oligonucleotide
  Sense strand starting at position 3583 of SEQ ID NO: 1882869
gaugcuguuuaugugacau

SEQ ID NO: 2153573 - RNA, 19 nt, Artificial Sequence
  Description of Artificial Sequence: Synthetic oligonucleotide
  Antisense strand to SEQ ID NO: 2153572
augucacauaaacagcauc

SEQ ID NO: 2153574 - RNA, 19 nt, Artificial Sequence
  Description of Artificial Sequence: Synthetic oligonucleotide
  Sense strand starting at position 3649 of SEQ ID NO: 1882869
cuuguuaggaguuaugacu

SEQ ID NO: 2153575 - RNA, 19 nt, Artificial Sequence
  Description of Artificial Sequence: Synthetic oligonucleotide
  Antisense strand to SEQ ID NO: 2153574
agucauaacuccuaacaag

SEQ ID NO: 2153576 - RNA, 19 nt, Artificial Sequence
  Description of Artificial Sequence: Synthetic oligonucleotide
  Sense strand starting at position 3725 of SEQ ID NO: 1882869
acguauauacaucaagugu

SEQ ID NO: 2153577 - RNA, 19 nt, Artificial Sequence
  Description of Artificial Sequence: Synthetic oligonucleotide
  Antisense strand to SEQ ID NO: 2153576
acacuugauguauauacgu

SEQ ID NO: 2153578 - RNA, 19 nt, Artificial Sequence
  Description of Artificial Sequence: Synthetic oligonucleotide
  Sense strand starting at position 3733 of SEQ ID NO: 1882869
acaucaaguguuuaucaag

SEQ ID NO: 2153579 - RNA, 19 nt, Artificial Sequence
  Description of Artificial Sequence: Synthetic oligonucleotide
  Antisense strand to SEQ ID NO: 2153578
cuugauaaacacuugaugu

SEQ ID NO: 2153580 - RNA, 19 nt, Artificial Sequence
  Description of Artificial Sequence: Synthetic oligonucleotide
  Sense strand starting at position 3745 of SEQ ID NO: 1882869
uaucaagcugugugguuaa

SEQ ID NO: 2153581 - RNA, 19 nt, Artificial Sequence
  Description of Artificial Sequence: Synthetic oligonucleotide
  Antisense strand to SEQ ID NO: 2153580
uuaaccacacagcuugaua

SEQ ID NO: 2153582 - RNA, 19 nt, Artificial Sequence
  Description of Artificial Sequence: Synthetic oligonucleotide
  Sense strand starting at position 3748 of SEQ ID NO: 1882869
caagcugugugguuaagau

SEQ ID NO: 2153583 - RNA, 19 nt, Artificial Sequence
  Description of Artificial Sequence: Synthetic oligonucleotide
  Antisense strand to SEQ ID NO: 2153582
aucuuaaccacacagcuug

SEQ ID NO: 2153584 - RNA, 19 nt, Artificial Sequence
  Description of Artificial Sequence: Synthetic oligonucleotide
  Sense strand starting at position 3758 of SEQ ID NO: 1882869
gguuaagauuugcacacuu

SEQ ID NO: 2153585 - RNA, 19 nt, Artificial Sequence
  Description of Artificial Sequence: Synthetic oligonucleotide
  Antisense strand to SEQ ID NO: 2153584
aagugugcaaaucuuaacc

SEQ ID NO: 2153586 - RNA, 19 nt, Artificial Sequence
  Description of Artificial Sequence: Synthetic oligonucleotide
  Sense strand starting at position 3768 of SEQ ID NO: 1882869
ugcacacuuguauauguua

SEQ ID NO: 2153587 - RNA, 19 nt, Artificial Sequence
  Description of Artificial Sequence: Synthetic oligonucleotide
  Antisense strand to SEQ ID NO: 2153586
uaacauauacaagugugca

SEQ ID NO: 2153588 - RNA, 19 nt, Artificial Sequence
  Description of Artificial Sequence: Synthetic oligonucleotide
  Sense strand starting at position 11 of SEQ ID NO: 1882870
guacaauguaucuggucua

SEQ ID NO: 2153589 - RNA, 19 nt, Artificial Sequence
  Description of Artificial Sequence: Synthetic oligonucleotide
  Antisense strand to SEQ ID NO: 2153588
uagaccagauacauuguac

SEQ ID NO: 2153590 - RNA, 19 nt, Artificial Sequence
  Description of Artificial Sequence: Synthetic oligonucleotide
  Sense strand starting at position 16 of SEQ ID NO: 1882870
auguaucuggucuaugcua

SEQ ID NO: 2153591 - RNA, 19 nt, Artificial Sequence
  Description of Artificial Sequence: Synthetic oligonucleotide
  Antisense strand to SEQ ID NO: 2153590
uagcauagaccagauacau

SEQ ID NO: 2153592 - RNA, 19 nt, Artificial Sequence
  Description of Artificial Sequence: Synthetic oligonucleotide
  Sense strand starting at position 21 of SEQ ID NO: 1882870
ucuggucuaugcuacagau

SEQ ID NO: 2153593 - RNA, 19 nt, Artificial Sequence
  Description of Artificial Sequence: Synthetic oligonucleotide
  Antisense strand to SEQ ID NO: 2153592
aucuguagcauagaccaga

SEQ ID NO: 2153594 - RNA, 19 nt, Artificial Sequence
  Description of Artificial Sequence: Synthetic oligonucleotide
  Sense strand starting at position 23 of SEQ ID NO: 1882870
uggucuaugcuacagauag

SEQ ID NO: 2153595 - RNA, 19 nt, Artificial Sequence
  Description of Artificial Sequence: Synthetic oligonucleotide
  Antisense strand to SEQ ID NO: 2153594
cuaucuguagcauagacca

SEQ ID NO: 2153596 - RNA, 19 nt, Artificial Sequence
  Description of Artificial Sequence: Synthetic oligonucleotide
  Sense strand starting at position 84 of SEQ ID NO: 1882870
agaugagauuaugaacaga

SEQ ID NO: 2153597 - RNA, 19 nt, Artificial Sequence
  Description of Artificial Sequence: Synthetic oligonucleotide
  Antisense strand to SEQ ID NO: 2153596
ucuguucauaaucucaucu

SEQ ID NO: 2153598 - RNA, 19 nt, Artificial Sequence
  Description of Artificial Sequence: Synthetic oligonucleotide
  Sense strand starting at position 132 of SEQ ID NO: 1882870
acggguucguacugcagau

SEQ ID NO: 2153599 - RNA, 19 nt, Artificial Sequence
  Description of Artificial Sequence: Synthetic oligonucleotide
  Antisense strand to SEQ ID NO: 2153598
aucugcaguacgaacccgu

SEQ ID NO: 2153600 - RNA, 19 nt, Artificial Sequence
  Description of Artificial Sequence: Synthetic oligonucleotide
  Sense strand starting at position 153 of SEQ ID NO: 1882870
agugucuugguauaggaau

SEQ ID NO: 2153601 - RNA, 19 nt, Artificial Sequence
  Description of Artificial Sequence: Synthetic oligonucleotide
  Antisense strand to SEQ ID NO: 2153600
auuccuauaccaagacacu

SEQ ID NO: 2153602 - RNA, 19 nt, Artificial Sequence
  Description of Artificial Sequence: Synthetic oligonucleotide
  Sense strand starting at position 155 of SEQ ID NO: 1882870
ugucuugguauaggaauau

SEQ ID NO: 2153603 - RNA, 19 nt, Artificial Sequence
  Description of Artificial Sequence: Synthetic oligonucleotide
  Antisense strand to SEQ ID NO: 2153602
auauuccuauaccaagaca

SEQ ID NO: 2153604 - RNA, 19 nt, Artificial Sequence
  Description of Artificial Sequence: Synthetic oligonucleotide
  Sense strand starting at position 166 of SEQ ID NO: 1882870
aggaauaugucaggagccu

SEQ ID NO: 2153605 - RNA, 19 nt, Artificial Sequence
  Description of Artificial Sequence: Synthetic oligonucleotide
  Antisense strand to SEQ ID NO: 2153604
aggcuccugacauauuccu

SEQ ID NO: 2153606 - RNA, 19 nt, Artificial Sequence
  Description of Artificial Sequence: Synthetic oligonucleotide
  Sense strand starting at position 167 of SEQ ID NO: 1882870
ggaauaugucaggagccuu

SEQ ID NO: 2153607 - RNA, 19 nt, Artificial Sequence
  Description of Artificial Sequence: Synthetic oligonucleotide
  Antisense strand to SEQ ID NO: 2153606
aaggcuccugacauauucc

SEQ ID NO: 2153608 - RNA, 19 nt, Artificial Sequence
  Description of Artificial Sequence: Synthetic oligonucleotide
  Sense strand starting at position 276 of SEQ ID NO: 1882870
gugugaacaccucaauguc

SEQ ID NO: 2153609 - RNA, 19 nt, Artificial Sequence
  Description of Artificial Sequence: Synthetic oligonucleotide
  Antisense strand to SEQ ID NO: 2153608
gacauugagguguucacac

SEQ ID NO: 2153610 - RNA, 19 nt, Artificial Sequence
  Description of Artificial Sequence: Synthetic oligonucleotide
  Sense strand starting at position 2003 of SEQ ID NO: 1882870
ucuaguagguaucuuuguu

SEQ ID NO: 2153611 - RNA, 19 nt, Artificial Sequence
  Description of Artificial Sequence: Synthetic oligonucleotide
  Antisense strand to SEQ ID NO: 2153610
aacaaagauaccuacuaga

SEQ ID NO: 2153612 - RNA, 19 nt, Artificial Sequence
  Description of Artificial Sequence: Synthetic oligonucleotide
  Sense strand starting at position 2007 of SEQ ID NO: 1882870
guagguaucuuuguuagug

SEQ ID NO: 2153613 - RNA, 19 nt, Artificial Sequence
  Description of Artificial Sequence: Synthetic oligonucleotide
  Antisense strand to SEQ ID NO: 2153612
cacuaacaaagauaccuac

SEQ ID NO: 2153614 - RNA, 19 nt, Artificial Sequence
  Description of Artificial Sequence: Synthetic oligonucleotide
  Sense strand starting at position 2010 of SEQ ID NO: 1882870
gguaucuuuguuagugggu

SEQ ID NO: 2153615 - RNA, 19 nt, Artificial Sequence
  Description of Artificial Sequence: Synthetic oligonucleotide
  Antisense strand to SEQ ID NO: 2153614
acccacuaacaaagauacc

SEQ ID NO: 2153616 - RNA, 19 nt, Artificial Sequence
  Description of Artificial Sequence: Synthetic oligonucleotide
  Sense strand starting at position 2012 of SEQ ID NO: 1882870
uaucuuuguuaguggguga

SEQ ID NO: 2153617 - RNA, 19 nt, Artificial Sequence
  Description of Artificial Sequence: Synthetic oligonucleotide
  Antisense strand to SEQ ID NO: 2153616
ucacccacuaacaaagaua

SEQ ID NO: 2153618 - RNA, 19 nt, Artificial Sequence
  Description of Artificial Sequence: Synthetic oligonucleotide
  Sense strand starting at position 2013 of SEQ ID NO: 1882870
aucuuuguuagugggugaa

SEQ ID NO: 2153619 - RNA, 19 nt, Artificial Sequence
  Description of Artificial Sequence: Synthetic oligonucleotide
  Antisense strand to SEQ ID NO: 2153618
uucacccacuaacaaagau

SEQ ID NO: 2153620 - RNA, 19 nt, Artificial Sequence
  Description of Artificial Sequence: Synthetic oligonucleotide
  Sense strand starting at position 2066 of SEQ ID NO: 1882870
cuguuaucagcgcuccuuu

SEQ ID NO: 2153621 - RNA, 19 nt, Artificial Sequence
  Description of Artificial Sequence: Synthetic oligonucleotide
  Antisense strand to SEQ ID NO: 2153620
aaaggagcgcugauaacag

SEQ ID NO: 2153622 - RNA, 19 nt, Artificial Sequence
  Description of Artificial Sequence: Synthetic oligonucleotide
  Sense strand starting at position 2075 of SEQ ID NO: 1882870
gcgcuccuuuccuuuaagu

SEQ ID NO: 2153623 - RNA, 19 nt, Artificial Sequence
  Description of Artificial Sequence: Synthetic oligonucleotide
  Antisense strand to SEQ ID NO: 2153622
acuuaaaggaaaggagcgc

SEQ ID NO: 2153624 - RNA, 19 nt, Artificial Sequence
  Description of Artificial Sequence: Synthetic oligonucleotide
  Sense strand starting at position 2209 of SEQ ID NO: 1882870
aggccaggccucugagaua

SEQ ID NO: 2153625 - RNA, 19 nt, Artificial Sequence
  Description of Artificial Sequence: Synthetic oligonucleotide
  Antisense strand to SEQ ID NO: 2153624
uaucucagaggccuggccu

SEQ ID NO: 2153626 - RNA, 19 nt, Artificial Sequence
  Description of Artificial Sequence: Synthetic oligonucleotide
  Sense strand starting at position 2223 of SEQ ID NO: 1882870
agauaucuuucuucuggca

SEQ ID NO: 2153627 - RNA, 19 nt, Artificial Sequence
  Description of Artificial Sequence: Synthetic oligonucleotide
  Antisense strand to SEQ ID NO: 2153626
ugccagaagaaagauaucu

SEQ ID NO: 2153628 - RNA, 19 nt, Artificial Sequence
  Description of Artificial Sequence: Synthetic oligonucleotide
  Sense strand starting at position 2246 of SEQ ID NO: 1882870
aucuguaguuugcugaaua

SEQ ID NO: 2153629 - RNA, 19 nt, Artificial Sequence
  Description of Artificial Sequence: Synthetic oligonucleotide
  Antisense strand to SEQ ID NO: 2153628
uauucagcaaacuacagau

SEQ ID NO: 2153630 - RNA, 19 nt, Artificial Sequence
  Description of Artificial Sequence: Synthetic oligonucleotide
  Sense strand starting at position 2247 of SEQ ID NO: 1882870
ucuguaguuugcugaauau

SEQ ID NO: 2153631 - RNA, 19 nt, Artificial Sequence
  Description of Artificial Sequence: Synthetic oligonucleotide
  Antisense strand to SEQ ID NO: 2153630
auauucagcaaacuacaga

SEQ ID NO: 2153632 - RNA, 19 nt, Artificial Sequence
  Description of Artificial Sequence: Synthetic oligonucleotide
  Sense strand starting at position 2251 of SEQ ID NO: 1882870
uaguuugcugaauaucaag

SEQ ID NO: 2153633 - RNA, 19 nt, Artificial Sequence
  Description of Artificial Sequence: Synthetic oligonucleotide
  Antisense strand to SEQ ID NO: 2153632
cuugauauucagcaaacua

SEQ ID NO: 2153634 - RNA, 19 nt, Artificial Sequence
  Description of Artificial Sequence: Synthetic oligonucleotide
  Sense strand starting at position 2254 of SEQ ID NO: 1882870
uuugcugaauaucaaguaa

SEQ ID NO: 2153635 - RNA, 19 nt, Artificial Sequence
  Description of Artificial Sequence: Synthetic oligonucleotide
  Antisense strand to SEQ ID NO: 2153634
uuacuugauauucagcaaa

SEQ ID NO: 2153636 - RNA, 19 nt, Artificial Sequence
  Description of Artificial Sequence: Synthetic oligonucleotide
  Sense strand starting at position 2301 of SEQ ID NO: 1882870
cuugaauucugauuguuag

SEQ ID NO: 2153637 - RNA, 19 nt, Artificial Sequence
  Description of Artificial Sequence: Synthetic oligonucleotide
  Antisense strand to SEQ ID NO: 2153636
cuaacaaucagaauucaag

SEQ ID NO: 2153638 - RNA, 19 nt, Artificial Sequence
  Description of Artificial Sequence: Synthetic oligonucleotide
  Sense strand starting at position 2302 of SEQ ID NO: 1882870
uugaauucugauuguuagu

SEQ ID NO: 2153639 - RNA, 19 nt, Artificial Sequence
  Description of Artificial Sequence: Synthetic oligonucleotide
  Antisense strand to SEQ ID NO: 2153638
acuaacaaucagaauucaa

SEQ ID NO: 2153640 - RNA, 19 nt, Artificial Sequence
  Description of Artificial Sequence: Synthetic oligonucleotide
  Sense strand starting at position 2307 of SEQ ID NO: 1882870
uucugauuguuaguccaag

SEQ ID NO: 2153641 - RNA, 19 nt, Artificial Sequence
  Description of Artificial Sequence: Synthetic oligonucleotide
  Antisense strand to SEQ ID NO: 2153640
cuuggacuaacaaucagaa

SEQ ID NO: 2153642 - RNA, 19 nt, Artificial Sequence
  Description of Artificial Sequence: Synthetic oligonucleotide
  Sense strand starting at position 2362 of SEQ ID NO: 1882870
cgcagaccauggucagaau

SEQ ID NO: 2153643 - RNA, 19 nt, Artificial Sequence
  Description of Artificial Sequence: Synthetic oligonucleotide
  Antisense strand to SEQ ID NO: 2153642
auucugaccauggucugcg

SEQ ID NO: 2153644 - RNA, 19 nt, Artificial Sequence
  Description of Artificial Sequence: Synthetic oligonucleotide
  Sense strand starting at position 2365 of SEQ ID NO: 1882870
agaccauggucagaaugaa

SEQ ID NO: 2153645 - RNA, 19 nt, Artificial Sequence
  Description of Artificial Sequence: Synthetic oligonucleotide
  Antisense strand to SEQ ID NO: 2153644
uucauucugaccauggucu

SEQ ID NO: 2153646 - RNA, 19 nt, Artificial Sequence
  Description of Artificial Sequence: Synthetic oligonucleotide
  Sense strand starting at position 2441 of SEQ ID NO: 1882870
aucacacacgucuguguaa

SEQ ID NO: 2153647 - RNA, 19 nt, Artificial Sequence
  Description of Artificial Sequence: Synthetic oligonucleotide
  Antisense strand to SEQ ID NO: 2153646
uuacacagacgugugugau

SEQ ID NO: 2153648 - RNA, 19 nt, Artificial Sequence
  Description of Artificial Sequence: Synthetic oligonucleotide
  Sense strand starting at position 2443 of SEQ ID NO: 1882870
cacacacgucuguguaaca

SEQ ID NO: 2153649 - RNA, 19 nt, Artificial Sequence
  Description of Artificial Sequence: Synthetic oligonucleotide
  Antisense strand to SEQ ID NO: 2153648
uguuacacagacgugugug

SEQ ID NO: 2153650 - RNA, 19 nt, Artificial Sequence
  Description of Artificial Sequence: Synthetic oligonucleotide
  Sense strand starting at position 2476 of SEQ ID NO: 1882870
cuuauuacaucuugcugga

SEQ ID NO: 2153651 - RNA, 19 nt, Artificial Sequence
  Description of Artificial Sequence: Synthetic oligonucleotide
  Antisense strand to SEQ ID NO: 2153650
uccagcaagauguaauaag

SEQ ID NO: 2153652 - RNA, 19 nt, Artificial Sequence
  Description of Artificial Sequence: Synthetic oligonucleotide
  Sense strand starting at position 2736 of SEQ ID NO: 1882870
gaaagccuuugucugccua

SEQ ID NO: 2153653 - RNA, 19 nt, Artificial Sequence
  Description of Artificial Sequence: Synthetic oligonucleotide
  Antisense strand to SEQ ID NO: 2153652
uaggcagacaaaggcuuuc

SEQ ID NO: 2153654 - RNA, 19 nt, Artificial Sequence
  Description of Artificial Sequence: Synthetic oligonucleotide
  Sense strand starting at position 2786 of SEQ ID NO: 1882870
guacuuccuucuguugcaa

SEQ ID NO: 2153655 - RNA, 19 nt, Artificial Sequence
  Description of Artificial Sequence: Synthetic oligonucleotide
  Antisense strand to SEQ ID NO: 2153654
uugcaacagaaggaaguac

SEQ ID NO: 2153656 - RNA, 19 nt, Artificial Sequence
  Description of Artificial Sequence: Synthetic oligonucleotide
  Sense strand starting at position 2973 of SEQ ID NO: 1882870
gucuguagcuucucucagu

SEQ ID NO: 2153657 - RNA, 19 nt, Artificial Sequence
  Description of Artificial Sequence: Synthetic oligonucleotide
  Antisense strand to SEQ ID NO: 2153656
acugagagaagcuacagac

SEQ ID NO: 2153658 - RNA, 19 nt, Artificial Sequence
  Description of Artificial Sequence: Synthetic oligonucleotide
  Sense strand starting at position 3098 of SEQ ID NO: 1882870
auauuagccuuagcuugaa

SEQ ID NO: 2153659 - RNA, 19 nt, Artificial Sequence
  Description of Artificial Sequence: Synthetic oligonucleotide
  Antisense strand to SEQ ID NO: 2153658
uucaagcuaaggcuaauau

SEQ ID NO: 2153660 - RNA, 19 nt, Artificial Sequence
  Description of Artificial Sequence: Synthetic oligonucleotide
  Sense strand starting at position 3102 of SEQ ID NO: 1882870
uagccuuagcuugaaguca

SEQ ID NO: 2153661 - RNA, 19 nt, Artificial Sequence
  Description of Artificial Sequence: Synthetic oligonucleotide
  Antisense strand to SEQ ID NO: 2153660
ugacuucaagcuaaggcua

SEQ ID NO: 2153662 - RNA, 19 nt, Artificial Sequence
  Description of Artificial Sequence: Synthetic oligonucleotide
  Sense strand starting at position 3132 of SEQ ID NO: 1882870
ccuuaauuuccaugucagu

SEQ ID NO: 2153663 - RNA, 19 nt, Artificial Sequence
  Description of Artificial Sequence: Synthetic oligonucleotide
  Antisense strand to SEQ ID NO: 2153662
acugacauggaaauuaagg

SEQ ID NO: 2153664 - RNA, 19 nt, Artificial Sequence
  Description of Artificial Sequence: Synthetic oligonucleotide
  Sense strand starting at position 3199 of SEQ ID NO: 1882870
acucaaacaugguguuaau

SEQ ID NO: 2153665 - RNA, 19 nt, Artificial Sequence
  Description of Artificial Sequence: Synthetic oligonucleotide
  Antisense strand to SEQ ID NO: 2153664
auuaacaccauguuugagu

SEQ ID NO: 2153666 - RNA, 19 nt, Artificial Sequence
  Description of Artificial Sequence: Synthetic oligonucleotide
  Sense strand starting at position 3210 of SEQ ID NO: 1882870
guguuaauauaagagaaga

SEQ ID NO: 2153667 - RNA, 19 nt, Artificial Sequence
  Description of Artificial Sequence: Synthetic oligonucleotide
  Antisense strand to SEQ ID NO: 2153666
ucuucucuuauauuaacac

SEQ ID NO: 2153668 - RNA, 19 nt, Artificial Sequence
  Description of Artificial Sequence: Synthetic oligonucleotide
  Sense strand starting at position 250 of SEQ ID NO: 1882871
guuaguugugaucaaauca

SEQ ID NO: 2153669 - RNA, 19 nt, Artificial Sequence
  Description of Artificial Sequence: Synthetic oligonucleotide
  Antisense strand to SEQ ID NO: 2153668
ugauuugaucacaacuaac

SEQ ID NO: 2153670 - RNA, 19 nt, Artificial Sequence
  Description of Artificial Sequence: Synthetic oligonucleotide
  Sense strand starting at position 395 of SEQ ID NO: 1882871
ucaagcgucguuccauauu

SEQ ID NO: 2153671 - RNA, 19 nt, Artificial Sequence
  Description of Artificial Sequence: Synthetic oligonucleotide
  Antisense strand to SEQ ID NO: 2153670
aauauggaacgacgcuuga

SEQ ID NO: 2153672 - RNA, 19 nt, Artificial Sequence
  Description of Artificial Sequence: Synthetic oligonucleotide
  Sense strand starting at position 398 of SEQ ID NO: 1882871
agcgucguuccauauugaa

SEQ ID NO: 2153673 - RNA, 19 nt, Artificial Sequence
  Description of Artificial Sequence: Synthetic oligonucleotide
  Antisense strand to SEQ ID NO: 2153672
uucaauauggaacgacgcu

SEQ ID NO: 2153674 - RNA, 19 nt, Artificial Sequence
  Description of Artificial Sequence: Synthetic oligonucleotide
  Sense strand starting at position 417 of SEQ ID NO: 1882871
uguacaaagcguuacuaaa

SEQ ID NO: 2153675 - RNA, 19 nt, Artificial Sequence
  Description of Artificial Sequence: Synthetic oligonucleotide
  Antisense strand to SEQ ID NO: 2153674
uuuaguaacgcuuuguaca

SEQ ID NO: 2153676 - RNA, 19 nt, Artificial Sequence
  Description of Artificial Sequence: Synthetic oligonucleotide
  Sense strand starting at position 513 of SEQ ID NO: 1882871
acagauaaauuacuacgua

SEQ ID NO: 2153677 - RNA, 19 nt, Artificial Sequence
  Description of Artificial Sequence: Synthetic oligonucleotide
  Antisense strand to SEQ ID NO: 2153676
uacguaguaauuuaucugu

SEQ ID NO: 2153678 - RNA, 19 nt, Artificial Sequence
  Description of Artificial Sequence: Synthetic oligonucleotide
  Sense strand starting at position 558 of SEQ ID NO: 1882871
aguuccuacguuuacaaau

SEQ ID NO: 2153679 - RNA, 19 nt, Artificial Sequence
  Description of Artificial Sequence: Synthetic oligonucleotide
  Antisense strand to SEQ ID NO: 2153678
auuuguaaacguaggaacu

SEQ ID NO: 2153680 - RNA, 19 nt, Artificial Sequence
  Description of Artificial Sequence: Synthetic oligonucleotide
  Sense strand starting at position 627 of SEQ ID NO: 1882871
aucugugcucaguugcgaa

SEQ ID NO: 2153681 - RNA, 19 nt, Artificial Sequence
  Description of Artificial Sequence: Synthetic oligonucleotide
  Antisense strand to SEQ ID NO: 2153680
uucgcaacugagcacagau

SEQ ID NO: 2153682 - RNA, 19 nt, Artificial Sequence
  Description of Artificial Sequence: Synthetic oligonucleotide
  Sense strand starting at position 629 of SEQ ID NO: 1882871
cugugcucaguugcgaauu

SEQ ID NO: 2153683 - RNA, 19 nt, Artificial Sequence
  Description of Artificial Sequence: Synthetic oligonucleotide
  Antisense strand to SEQ ID NO: 2153682
aauucgcaacugagcacag

SEQ ID NO: 2153684 - RNA, 19 nt, Artificial Sequence
  Description of Artificial Sequence: Synthetic oligonucleotide
  Sense strand starting at position 637 of SEQ ID NO: 1882871
aguugcgaauucuucuaau

SEQ ID NO: 2153685 - RNA, 19 nt, Artificial Sequence
  Description of Artificial Sequence: Synthetic oligonucleotide
  Antisense strand to SEQ ID NO: 2153684
auuagaagaauucgcaacu

SEQ ID NO: 2153686 - RNA, 19 nt, Artificial Sequence
  Description of Artificial Sequence: Synthetic oligonucleotide
  Sense strand starting at position 660 of SEQ ID NO: 1882871
gauacauaaugcgaugaaa

SEQ ID NO: 2153687 - RNA, 19 nt, Artificial Sequence
  Description of Artificial Sequence: Synthetic oligonucleotide
  Antisense strand to SEQ ID NO: 2153686
uuucaucgcauuauguauc

SEQ ID NO: 2153688 - RNA, 19 nt, Artificial Sequence
  Description of Artificial Sequence: Synthetic oligonucleotide
  Sense strand starting at position 662 of SEQ ID NO: 1882871
uacauaaugcgaugaaaug

SEQ ID NO: 2153689 - RNA, 19 nt, Artificial Sequence
  Description of Artificial Sequence: Synthetic oligonucleotide
  Antisense strand to SEQ ID NO: 2153688
cauuucaucgcauuaugua

SEQ ID NO: 2153690 - RNA, 19 nt, Artificial Sequence
  Description of Artificial Sequence: Synthetic oligonucleotide
  Sense strand starting at position 679 of SEQ ID NO: 1882871
ugggaaugcuuaucuucua

SEQ ID NO: 2153691 - RNA, 19 nt, Artificial Sequence
  Description of Artificial Sequence: Synthetic oligonucleotide
  Antisense strand to SEQ ID NO: 2153690
uagaagauaagcauuccca

SEQ ID NO: 2153692 - RNA, 19 nt, Artificial Sequence
  Description of Artificial Sequence: Synthetic oligonucleotide
  Sense strand starting at position 680 of SEQ ID NO: 1882871
gggaaugcuuaucuucuau

SEQ ID NO: 2153693 - RNA, 19 nt, Artificial Sequence
  Description of Artificial Sequence: Synthetic oligonucleotide
  Antisense strand to SEQ ID NO: 2153692
auagaagauaagcauuccc

SEQ ID NO: 2153694 - RNA, 19 nt, Artificial Sequence
  Description of Artificial Sequence: Synthetic oligonucleotide
  Sense strand starting at position 729 of SEQ ID NO: 1882871
ggagguggucuugauucau

SEQ ID NO: 2153695 - RNA, 19 nt, Artificial Sequence
  Description of Artificial Sequence: Synthetic oligonucleotide
  Antisense strand to SEQ ID NO: 2153694
augaaucaagaccaccucc

SEQ ID NO: 2153696 - RNA, 19 nt, Artificial Sequence
  Description of Artificial Sequence: Synthetic oligonucleotide
  Sense strand starting at position 836 of SEQ ID NO: 1882871
cuguuucuacaguaaagca

SEQ ID NO: 2153697 - RNA, 19 nt, Artificial Sequence
  Description of Artificial Sequence: Synthetic oligonucleotide
  Antisense strand to SEQ ID NO: 2153696
ugcuuuacuguagaaacag

SEQ ID NO: 2153698 - RNA, 19 nt, Artificial Sequence
  Description of Artificial Sequence: Synthetic oligonucleotide
  Sense strand starting at position 948 of SEQ ID NO: 1882871
guaccuuguaggcagaguu

SEQ ID NO: 2153699 - RNA, 19 nt, Artificial Sequence
  Description of Artificial Sequence: Synthetic oligonucleotide
  Antisense strand to SEQ ID NO: 2153698
aacucugccuacaagguac

SEQ ID NO: 2153700 - RNA, 19 nt, Artificial Sequence
  Description of Artificial Sequence: Synthetic oligonucleotide
  Sense strand starting at position 1041 of SEQ ID NO: 1882871
ugugaucuuaaguagcagu

SEQ ID NO: 2153701 - RNA, 19 nt, Artificial Sequence
  Description of Artificial Sequence: Synthetic oligonucleotide
  Antisense strand to SEQ ID NO: 2153700
acugcuacuuaagaucaca

SEQ ID NO: 2153702 - RNA, 19 nt, Artificial Sequence
  Description of Artificial Sequence: Synthetic oligonucleotide
  Sense strand starting at position 1123 of SEQ ID NO: 1882871
ugggacuacugacacagau

SEQ ID NO: 2153703 - RNA, 19 nt, Artificial Sequence
  Description of Artificial Sequence: Synthetic oligonucleotide
  Antisense strand to SEQ ID NO: 2153702
aucugugucaguaguccca

SEQ ID NO: 2153704 - RNA, 19 nt, Artificial Sequence
  Description of Artificial Sequence: Synthetic oligonucleotide
  Sense strand starting at position 1146 of SEQ ID NO: 1882871
ggauuacagcuuuauauua

SEQ ID NO: 2153705 - RNA, 19 nt, Artificial Sequence
  Description of Artificial Sequence: Synthetic oligonucleotide
  Antisense strand to SEQ ID NO: 2153704
uaauauaaagcuguaaucc

SEQ ID NO: 2153706 - RNA, 19 nt, Artificial Sequence
  Description of Artificial Sequence: Synthetic oligonucleotide
  Sense strand starting at position 1279 of SEQ ID NO: 1882871
uccugacuuccugguacua

SEQ ID NO: 2153707 - RNA, 19 nt, Artificial Sequence
  Description of Artificial Sequence: Synthetic oligonucleotide
  Antisense strand to SEQ ID NO: 2153706
uaguaccaggaagucagga

SEQ ID NO: 2153708 - RNA, 19 nt, Artificial Sequence
  Description of Artificial Sequence: Synthetic oligonucleotide
  Sense strand starting at position 1314 of SEQ ID NO: 1882871
gggcuauuucguggguuug

SEQ ID NO: 2153709 - RNA, 19 nt, Artificial Sequence
  Description of Artificial Sequence: Synthetic oligonucleotide
  Antisense strand to SEQ ID NO: 2153708
caaacccacgaaauagccc

SEQ ID NO: 2153710 - RNA, 19 nt, Artificial Sequence
  Description of Artificial Sequence: Synthetic oligonucleotide
  Sense strand starting at position 1352 of SEQ ID NO: 1882871
ccagucaacucacuggaaa

SEQ ID NO: 2153711 - RNA, 19 nt, Artificial Sequence
  Description of Artificial Sequence: Synthetic oligonucleotide
  Antisense strand to SEQ ID NO: 2153710
uuuccagugaguugacugg

SEQ ID NO: 2153712 - RNA, 19 nt, Artificial Sequence
  Description of Artificial Sequence: Synthetic oligonucleotide
  Sense strand starting at position 1403 of SEQ ID NO: 1882871
gugggugcucacgauguuu

SEQ ID NO: 2153713 - RNA, 19 nt, Artificial Sequence
  Description of Artificial Sequence: Synthetic oligonucleotide
  Antisense strand to SEQ ID NO: 2153712
aaacaucgugagcacccac

SEQ ID NO: 2153714 - RNA, 19 nt, Artificial Sequence
  Description of Artificial Sequence: Synthetic oligonucleotide
  Sense strand starting at position 1405 of SEQ ID NO: 1882871
gggugcucacgauguuuaa

SEQ ID NO: 2153715 - RNA, 19 nt, Artificial Sequence
  Description of Artificial Sequence: Synthetic oligonucleotide
  Antisense strand to SEQ ID NO: 2153714
uuaaacaucgugagcaccc

SEQ ID NO: 2153716 - RNA, 19 nt, Artificial Sequence
  Description of Artificial Sequence: Synthetic oligonucleotide
  Sense strand starting at position 1472 of SEQ ID NO: 1882871
ccggguuucuucccaggau

SEQ ID NO: 2153717 - RNA, 19 nt, Artificial Sequence
  Description of Artificial Sequence: Synthetic oligonucleotide
  Antisense strand to SEQ ID NO: 2153716
auccugggaagaaacccgg

SEQ ID NO: 2153718 - RNA, 19 nt, Artificial Sequence
  Description of Artificial Sequence: Synthetic oligonucleotide
  Sense strand starting at position 1475 of SEQ ID NO: 1882871
gguuucuucccaggaugga

SEQ ID NO: 2153719 - RNA, 19 nt, Artificial Sequence
  Description of Artificial Sequence: Synthetic oligonucleotide
  Antisense strand to SEQ ID NO: 2153718
uccauccugggaagaaacc

SEQ ID NO: 2153720 - RNA, 19 nt, Artificial Sequence
  Description of Artificial Sequence: Synthetic oligonucleotide
  Sense strand starting at position 1785 of SEQ ID NO: 1882871
ugcuguucgggaugcugaa

SEQ ID NO: 2153721 - RNA, 19 nt, Artificial Sequence
  Description of Artificial Sequence: Synthetic oligonucleotide
  Antisense strand to SEQ ID NO: 2153720
uucagcaucccgaacagca

SEQ ID NO: 2153722 - RNA, 19 nt, Artificial Sequence
  Description of Artificial Sequence: Synthetic oligonucleotide
  Sense strand starting at position 2725 of SEQ ID NO: 1882871
aauguaaguuuagaacaga

SEQ ID NO: 2153723 - RNA, 19 nt, Artificial Sequence
  Description of Artificial Sequence: Synthetic oligonucleotide
  Antisense strand to SEQ ID NO: 2153722
ucuguucuaaacuuacauu

SEQ ID NO: 2153724 - RNA, 19 nt, Artificial Sequence
  Description of Artificial Sequence: Synthetic oligonucleotide
  Sense strand starting at position 2809 of SEQ ID NO: 1882871
gacauauacgacuguauau

SEQ ID NO: 2153725 - RNA, 19 nt, Artificial Sequence
  Description of Artificial Sequence: Synthetic oligonucleotide
  Antisense strand to SEQ ID NO: 2153724
auauacagucguauauguc

SEQ ID NO: 2153726 - RNA, 19 nt, Artificial Sequence
  Description of Artificial Sequence: Synthetic oligonucleotide
  Sense strand starting at position 2822 of SEQ ID NO: 1882871
guauaugugagcgcuuauc

SEQ ID NO: 2153727 - RNA, 19 nt, Artificial Sequence
  Description of Artificial Sequence: Synthetic oligonucleotide
  Antisense strand to SEQ ID NO: 2153726
gauaagcgcucacauauac

SEQ ID NO: 2153728 - RNA, 19 nt, Artificial Sequence
  Description of Artificial Sequence: Synthetic oligonucleotide
  Sense strand starting at position 2846 of SEQ ID NO: 1882871
ucucuuguagaaugguuau

SEQ ID NO: 2153729 - RNA, 19 nt, Artificial Sequence
  Description of Artificial Sequence: Synthetic oligonucleotide
  Antisense strand to SEQ ID NO: 2153728
auaaccauucuacaagaga

SEQ ID NO: 2153730 - RNA, 19 nt, Artificial Sequence
  Description of Artificial Sequence: Synthetic oligonucleotide
  Sense strand starting at position 2849 of SEQ ID NO: 1882871
cuuguagaaugguuauuau

SEQ ID NO: 2153731 - RNA, 19 nt, Artificial Sequence
  Description of Artificial Sequence: Synthetic oligonucleotide
  Antisense strand to SEQ ID NO: 2153730
auaauaaccauucuacaag

SEQ ID NO: 2153732 - RNA, 19 nt, Artificial Sequence
  Description of Artificial Sequence: Synthetic oligonucleotide
  Sense strand starting at position 2869 of SEQ ID NO: 1882871
aaacuuauuugagagguga

SEQ ID NO: 2153733 - RNA, 19 nt, Artificial Sequence
  Description of Artificial Sequence: Synthetic oligonucleotide
  Antisense strand to SEQ ID NO: 2153732
ucaccucucaaauaaguuu

SEQ ID NO: 2153734 - RNA, 19 nt, Artificial Sequence
  Description of Artificial Sequence: Synthetic oligonucleotide
  Sense strand starting at position 2889 of SEQ ID NO: 1882871
gugauugacagccguugaa

SEQ ID NO: 2153735 - RNA, 19 nt, Artificial Sequence
  Description of Artificial Sequence: Synthetic oligonucleotide
  Antisense strand to SEQ ID NO: 2153734
uucaacggcugucaaucac

SEQ ID NO: 2153736 - RNA, 19 nt, Artificial Sequence
  Description of Artificial Sequence: Synthetic oligonucleotide
  Sense strand starting at position 2991 of SEQ ID NO: 1882871
ugugucaaccugcauaaua

SEQ ID NO: 2153737 - RNA, 19 nt, Artificial Sequence
  Description of Artificial Sequence: Synthetic oligonucleotide
  Antisense strand to SEQ ID NO: 2153736
uauuaugcagguugacaca

SEQ ID NO: 2153738 - RNA, 19 nt, Artificial Sequence
  Description of Artificial Sequence: Synthetic oligonucleotide
  Sense strand starting at position 3082 of SEQ ID NO: 1882871
ugaucucauuagguaguau

SEQ ID NO: 2153739 - RNA, 19 nt, Artificial Sequence
  Description of Artificial Sequence: Synthetic oligonucleotide
  Antisense strand to SEQ ID NO: 2153738
auacuaccuaaugagauca

SEQ ID NO: 2153740 - RNA, 19 nt, Artificial Sequence
  Description of Artificial Sequence: Synthetic oligonucleotide
  Sense strand starting at position 3093 of SEQ ID NO: 1882871
gguaguauugaguaacucu

SEQ ID NO: 2153741 - RNA, 19 nt, Artificial Sequence
  Description of Artificial Sequence: Synthetic oligonucleotide
  Antisense strand to SEQ ID NO: 2153740
agaguuacucaauacuacc

SEQ ID NO: 2153742 - RNA, 19 nt, Artificial Sequence
  Description of Artificial Sequence: Synthetic oligonucleotide
  Sense strand starting at position 3096 of SEQ ID NO: 1882871
aguauugaguaacucuaau

SEQ ID NO: 2153743 - RNA, 19 nt, Artificial Sequence
  Description of Artificial Sequence: Synthetic oligonucleotide
  Antisense strand to SEQ ID NO: 2153742
auuagaguuacucaauacu

SEQ ID NO: 2153744 - RNA, 19 nt, Artificial Sequence
  Description of Artificial Sequence: Synthetic oligonucleotide
  Sense strand starting at position 3620 of SEQ ID NO: 1882871
caugaacauucuguuggaa

SEQ ID NO: 2153745 - RNA, 19 nt, Artificial Sequence
  Description of Artificial Sequence: Synthetic oligonucleotide
  Antisense strand to SEQ ID NO: 2153744
uuccaacagaauguucaug

SEQ ID NO: 2153746 - RNA, 19 nt, Artificial Sequence
  Description of Artificial Sequence: Synthetic oligonucleotide
  Sense strand starting at position 3623 of SEQ ID NO: 1882871
gaacauucuguuggaaauu

SEQ ID NO: 2153747 - RNA, 19 nt, Artificial Sequence
  Description of Artificial Sequence: Synthetic oligonucleotide
  Antisense strand to SEQ ID NO: 2153746
aauuuccaacagaauguuc

SEQ ID NO: 2153748 - RNA, 19 nt, Artificial Sequence
  Description of Artificial Sequence: Synthetic oligonucleotide
  Sense strand starting at position 30 of SEQ ID NO: 1882872
ccuggaaccucuuaacagu

SEQ ID NO: 2153749 - RNA, 19 nt, Artificial Sequence
  Description of Artificial Sequence: Synthetic oligonucleotide
  Antisense strand to SEQ ID NO: 2153748
acuguuaagagguuccagg

SEQ ID NO: 2153750 - RNA, 19 nt, Artificial Sequence
  Description of Artificial Sequence: Synthetic oligonucleotide
  Sense strand starting at position 33 of SEQ ID NO: 1882872
ggaaccucuuaacaguaaa

SEQ ID NO: 2153751 - RNA, 19 nt, Artificial Sequence
  Description of Artificial Sequence: Synthetic oligonucleotide
  Antisense strand to SEQ ID NO: 2153750
uuuacuguuaagagguucc

SEQ ID NO: 2153752 - RNA, 19 nt, Artificial Sequence
  Description of Artificial Sequence: Synthetic oligonucleotide
  Sense strand starting at position 69 of SEQ ID NO: 1882872
auaguaauguucuuaccaa

SEQ ID NO: 2153753 - RNA, 19 nt, Artificial Sequence
  Description of Artificial Sequence: Synthetic oligonucleotide
  Antisense strand to SEQ ID NO: 2153752
uugguaagaacauuacuau

SEQ ID NO: 2153754 - RNA, 19 nt, Artificial Sequence
  Description of Artificial Sequence: Synthetic oligonucleotide
  Sense strand starting at position 275 of SEQ ID NO: 1882872
gucauuucgucaggacuua

SEQ ID NO: 2153755 - RNA, 19 nt, Artificial Sequence
  Description of Artificial Sequence: Synthetic oligonucleotide
  Antisense strand to SEQ ID NO: 2153754
uaaguccugacgaaaugac

SEQ ID NO: 2153756 - RNA, 19 nt, Artificial Sequence
  Description of Artificial Sequence: Synthetic oligonucleotide
  Sense strand starting at position 286 of SEQ ID NO: 1882872
aggacuuaugguggccaua

SEQ ID NO: 2153757 - RNA, 19 nt, Artificial Sequence
  Description of Artificial Sequence: Synthetic oligonucleotide
  Antisense strand to SEQ ID NO: 2153756
uauggccaccauaaguccu

SEQ ID NO: 2153758 - RNA, 19 nt, Artificial Sequence
  Description of Artificial Sequence: Synthetic oligonucleotide
  Sense strand starting at position 288 of SEQ ID NO: 1882872
gacuuaugguggccauaug

SEQ ID NO: 2153759 - RNA, 19 nt, Artificial Sequence
  Description of Artificial Sequence: Synthetic oligonucleotide
  Antisense strand to SEQ ID NO: 2153758
cauauggccaccauaaguc

SEQ ID NO: 2153760 - RNA, 19 nt, Artificial Sequence
  Description of Artificial Sequence: Synthetic oligonucleotide
  Sense strand starting at position 299 of SEQ ID NO: 1882872
gccauaugguguuccaaau

SEQ ID NO: 2153761 - RNA, 19 nt, Artificial Sequence
  Description of Artificial Sequence: Synthetic oligonucleotide
  Antisense strand to SEQ ID NO: 2153760
auuuggaacaccauauggc

SEQ ID NO: 2153762 - RNA, 19 nt, Artificial Sequence
  Description of Artificial Sequence: Synthetic oligonucleotide
  Sense strand starting at position 311 of SEQ ID NO: 1882872
uccaaaugcuaacaggaaa

SEQ ID NO: 2153763 - RNA, 19 nt, Artificial Sequence
  Description of Artificial Sequence: Synthetic oligonucleotide
  Antisense strand to SEQ ID NO: 2153762
uuuccuguuagcauuugga

SEQ ID NO: 2153764 - RNA, 19 nt, Artificial Sequence
  Description of Artificial Sequence: Synthetic oligonucleotide
  Sense strand starting at position 334 of SEQ ID NO: 1882872
ugagucaacuuaugcacau

SEQ ID NO: 2153765 - RNA, 19 nt, Artificial Sequence
  Description of Artificial Sequence: Synthetic oligonucleotide
  Antisense strand to SEQ ID NO: 2153764
augugcauaaguugacuca

SEQ ID NO: 2153766 - RNA, 19 nt, Artificial Sequence
  Description of Artificial Sequence: Synthetic oligonucleotide
  Sense strand starting at position 448 of SEQ ID NO: 1882872
guaucuucuuuauggccua

SEQ ID NO: 2153767 - RNA, 19 nt, Artificial Sequence
  Description of Artificial Sequence: Synthetic oligonucleotide
  Antisense strand to SEQ ID NO: 2153766
uaggccauaaagaagauac

SEQ ID NO: 2153768 - RNA, 19 nt, Artificial Sequence
  Description of Artificial Sequence: Synthetic oligonucleotide
  Sense strand starting at position 453 of SEQ ID NO: 1882872
uucuuuauggccuaaggaa

SEQ ID NO: 2153769 - RNA, 19 nt, Artificial Sequence
  Description of Artificial Sequence: Synthetic oligonucleotide
  Antisense strand to SEQ ID NO: 2153768
uuccuuaggccauaaagaa

SEQ ID NO: 2153770 - RNA, 19 nt, Artificial Sequence
  Description of Artificial Sequence: Synthetic oligonucleotide
  Sense strand starting at position 506 of SEQ ID NO: 1882872
agagaaugcugugagauuc

SEQ ID NO: 2153771 - RNA, 19 nt, Artificial Sequence
  Description of Artificial Sequence: Synthetic oligonucleotide
  Antisense strand to SEQ ID NO: 2153770
gaaucucacagcauucucu

SEQ ID NO: 2153772 - RNA, 19 nt, Artificial Sequence
  Description of Artificial Sequence: Synthetic oligonucleotide
  Sense strand starting at position 514 of SEQ ID NO: 1882872
cugugagauucuuaaguug

SEQ ID NO: 2153773 - RNA, 19 nt, Artificial Sequence
  Description of Artificial Sequence: Synthetic oligonucleotide
  Antisense strand to SEQ ID NO: 2153772
caacuuaagaaucucacag

SEQ ID NO: 2153774 - RNA, 19 nt, Artificial Sequence
  Description of Artificial Sequence: Synthetic oligonucleotide
  Sense strand starting at position 517 of SEQ ID NO: 1882872
ugagauucuuaaguugcua

SEQ ID NO: 2153775 - RNA, 19 nt, Artificial Sequence
  Description of Artificial Sequence: Synthetic oligonucleotide
  Antisense strand to SEQ ID NO: 2153774
uagcaacuuaagaaucuca

SEQ ID NO: 2153776 - RNA, 19 nt, Artificial Sequence
  Description of Artificial Sequence: Synthetic oligonucleotide
  Sense strand starting at position 521 of SEQ ID NO: 1882872
auucuuaaguugcuagacu

SEQ ID NO: 2153777 - RNA, 19 nt, Artificial Sequence
  Description of Artificial Sequence: Synthetic oligonucleotide
  Antisense strand to SEQ ID NO: 2153776
agucuagcaacuuaagaau

SEQ ID NO: 2153778 - RNA, 19 nt, Artificial Sequence
  Description of Artificial Sequence: Synthetic oligonucleotide
  Sense strand starting at position 572 of SEQ ID NO: 1882872
gccgucaaauucuacacaa

SEQ ID NO: 2153779 - RNA, 19 nt, Artificial Sequence
  Description of Artificial Sequence: Synthetic oligonucleotide
  Antisense strand to SEQ ID NO: 2153778
uuguguagaauuugacggc

SEQ ID NO: 2153780 - RNA, 19 nt, Artificial Sequence
  Description of Artificial Sequence: Synthetic oligonucleotide
  Sense strand starting at position 664 of SEQ ID NO: 1882872
cuacuaggauuagccauaa

SEQ ID NO: 2153781 - RNA, 19 nt, Artificial Sequence
  Description of Artificial Sequence: Synthetic oligonucleotide
  Antisense strand to SEQ ID NO: 2153780
uuauggcuaauccuaguag

SEQ ID NO: 2153782 - RNA, 19 nt, Artificial Sequence
  Description of Artificial Sequence: Synthetic oligonucleotide
  Sense strand starting at position 668 of SEQ ID NO: 1882872
uaggauuagccauaacugu

SEQ ID NO: 2153783 - RNA, 19 nt, Artificial Sequence
  Description of Artificial Sequence: Synthetic oligonucleotide
  Antisense strand to SEQ ID NO: 2153782
acaguuauggcuaauccua

SEQ ID NO: 2153784 - RNA, 19 nt, Artificial Sequence
  Description of Artificial Sequence: Synthetic oligonucleotide
  Sense strand starting at position 675 of SEQ ID NO: 1882872
agccauaacuguccacagu

SEQ ID NO: 2153785 - RNA, 19 nt, Artificial Sequence
  Description of Artificial Sequence: Synthetic oligonucleotide
  Antisense strand to SEQ ID NO: 2153784
acuguggacaguuauggcu

SEQ ID NO: 2153786 - RNA, 19 nt, Artificial Sequence
  Description of Artificial Sequence: Synthetic oligonucleotide
  Sense strand starting at position 676 of SEQ ID NO: 1882872
gccauaacuguccacaguu

SEQ ID NO: 2153787 - RNA, 19 nt, Artificial Sequence
  Description of Artificial Sequence: Synthetic oligonucleotide
  Antisense strand to SEQ ID NO: 2153786
aacuguggacaguuauggc

SEQ ID NO: 2153788 - RNA, 19 nt, Artificial Sequence
  Description of Artificial Sequence: Synthetic oligonucleotide
  Sense strand starting at position 923 of SEQ ID NO: 1882872
aggguucccucauauauaa

SEQ ID NO: 2153789 - RNA, 19 nt, Artificial Sequence
  Description of Artificial Sequence: Synthetic oligonucleotide
  Antisense strand to SEQ ID NO: 2153788
uuauauaugagggaacccu

SEQ ID NO: 2153790 - RNA, 19 nt, Artificial Sequence
  Description of Artificial Sequence: Synthetic oligonucleotide
  Sense strand starting at position 1822 of SEQ ID NO: 1882872
gacagucuuuccgcacacu

SEQ ID NO: 2153791 - RNA, 19 nt, Artificial Sequence
  Description of Artificial Sequence: Synthetic oligonucleotide
  Antisense strand to SEQ ID NO: 2153790
agugugcggaaagacuguc

SEQ ID NO: 2153792 - RNA, 19 nt, Artificial Sequence
  Description of Artificial Sequence: Synthetic oligonucleotide
  Sense strand starting at position 1867 of SEQ ID NO: 1882872
ccgacaucuucccaaugga

SEQ ID NO: 2153793 - RNA, 19 nt, Artificial Sequence
  Description of Artificial Sequence: Synthetic oligonucleotide
  Antisense strand to SEQ ID NO: 2153792
uccauugggaagaugucgg

SEQ ID NO: 2153794 - RNA, 19 nt, Artificial Sequence
  Description of Artificial Sequence: Synthetic oligonucleotide
  Sense strand starting at position 2154 of SEQ ID NO: 1882872
uguguuccugccugggaca

SEQ ID NO: 2153795 - RNA, 19 nt, Artificial Sequence
  Description of Artificial Sequence: Synthetic oligonucleotide
  Antisense strand to SEQ ID NO: 2153794
ugucccaggcaggaacaca

SEQ ID NO: 2153796 - RNA, 19 nt, Artificial Sequence
  Description of Artificial Sequence: Synthetic oligonucleotide
  Sense strand starting at position 2177 of SEQ ID NO: 1882872
gcccgaaggacguguguuu

SEQ ID NO: 2153797 - RNA, 19 nt, Artificial Sequence
  Description of Artificial Sequence: Synthetic oligonucleotide
  Antisense strand to SEQ ID NO: 2153796
aaacacacguccuucgggc

SEQ ID NO: 2153798 - RNA, 19 nt, Artificial Sequence
  Description of Artificial Sequence: Synthetic oligonucleotide
  Sense strand starting at position 2286 of SEQ ID NO: 1882872
gugccuuuccaguguucca

SEQ ID NO: 2153799 - RNA, 19 nt, Artificial Sequence
  Description of Artificial Sequence: Synthetic oligonucleotide
  Antisense strand to SEQ ID NO: 2153798
uggaacacuggaaaggcac

SEQ ID NO: 2153800 - RNA, 19 nt, Artificial Sequence
  Description of Artificial Sequence: Synthetic oligonucleotide
  Sense strand starting at position 2317 of SEQ ID NO: 1882872
ugcacuuccugaguucuuu

SEQ ID NO: 2153801 - RNA, 19 nt, Artificial Sequence
  Description of Artificial Sequence: Synthetic oligonucleotide
  Antisense strand to SEQ ID NO: 2153800
aaagaacucaggaagugca

SEQ ID NO: 2153802 - RNA, 19 nt, Artificial Sequence
  Description of Artificial Sequence: Synthetic oligonucleotide
  Sense strand starting at position 2321 of SEQ ID NO: 1882872
cuuccugaguucuuucuga

SEQ ID NO: 2153803 - RNA, 19 nt, Artificial Sequence
  Description of Artificial Sequence: Synthetic oligonucleotide
  Antisense strand to SEQ ID NO: 2153802
ucagaaagaacucaggaag

SEQ ID NO: 2153804 - RNA, 19 nt, Artificial Sequence
  Description of Artificial Sequence: Synthetic oligonucleotide
  Sense strand starting at position 2395 of SEQ ID NO: 1882872
ggcagccauuuccaauaga

SEQ ID NO: 2153805 - RNA, 19 nt, Artificial Sequence
  Description of Artificial Sequence: Synthetic oligonucleotide
  Antisense strand to SEQ ID NO: 2153804
ucuauuggaaauggcugcc

SEQ ID NO: 2153806 - RNA, 19 nt, Artificial Sequence
  Description of Artificial Sequence: Synthetic oligonucleotide
  Sense strand starting at position 2426 of SEQ ID NO: 1882872
gugagccaugcgugucauu

SEQ ID NO: 2153807 - RNA, 19 nt, Artificial Sequence
  Description of Artificial Sequence: Synthetic oligonucleotide
  Antisense strand to SEQ ID NO: 2153806
aaugacacgcauggcucac

SEQ ID NO: 2153808 - RNA, 19 nt, Artificial Sequence
  Description of Artificial Sequence: Synthetic oligonucleotide
  Sense strand starting at position 2429 of SEQ ID NO: 1882872
agccaugcgugucauuuaa

SEQ ID NO: 2153809 - RNA, 19 nt, Artificial Sequence
  Description of Artificial Sequence: Synthetic oligonucleotide
  Antisense strand to SEQ ID NO: 2153808
uuaaaugacacgcauggcu

SEQ ID NO: 2153810 - RNA, 19 nt, Artificial Sequence
  Description of Artificial Sequence: Synthetic oligonucleotide
  Sense strand starting at position 2431 of SEQ ID NO: 1882872
ccaugcgugucauuuaaau

SEQ ID NO: 2153811 - RNA, 19 nt, Artificial Sequence
  Description of Artificial Sequence: Synthetic oligonucleotide
  Antisense strand to SEQ ID NO: 2153810
auuuaaaugacacgcaugg

SEQ ID NO: 2153812 - RNA, 19 nt, Artificial Sequence
  Description of Artificial Sequence: Synthetic oligonucleotide
  Sense strand starting at position 2786 of SEQ ID NO: 1882872
aggugaaauugacugcaau

SEQ ID NO: 2153813 - RNA, 19 nt, Artificial Sequence
  Description of Artificial Sequence: Synthetic oligonucleotide
  Antisense strand to SEQ ID NO: 2153812
auugcagucaauuucaccu

SEQ ID NO: 2153814 - RNA, 19 nt, Artificial Sequence
  Description of Artificial Sequence: Synthetic oligonucleotide
  Sense strand starting at position 3163 of SEQ ID NO: 1882872
gggccuuugguaggaaauc

SEQ ID NO: 2153815 - RNA, 19 nt, Artificial Sequence
  Description of Artificial Sequence: Synthetic oligonucleotide
  Antisense strand to SEQ ID NO: 2153814
gauuuccuaccaaaggccc

SEQ ID NO: 2153816 - RNA, 19 nt, Artificial Sequence
  Description of Artificial Sequence: Synthetic oligonucleotide
  Sense strand starting at position 3164 of SEQ ID NO: 1882872
ggccuuugguaggaaaucu

SEQ ID NO: 2153817 - RNA, 19 nt, Artificial Sequence
  Description of Artificial Sequence: Synthetic oligonucleotide
  Antisense strand to SEQ ID NO: 2153816
agauuuccuaccaaaggcc

SEQ ID NO: 2153818 - RNA, 19 nt, Artificial Sequence
  Description of Artificial Sequence: Synthetic oligonucleotide
  Sense strand starting at position 3588 of SEQ ID NO: 1882872
cccugaccuccaggguuua

SEQ ID NO: 2153819 - RNA, 19 nt, Artificial Sequence
  Description of Artificial Sequence: Synthetic oligonucleotide
  Antisense strand to SEQ ID NO: 2153818
uaaacccuggaggucaggg

SEQ ID NO: 2153820 - RNA, 19 nt, Artificial Sequence
  Description of Artificial Sequence: Synthetic oligonucleotide
  Sense strand starting at position 3600 of SEQ ID NO: 1882872
ggguuuagauguggaggga

SEQ ID NO: 2153821 - RNA, 19 nt, Artificial Sequence
  Description of Artificial Sequence: Synthetic oligonucleotide
  Antisense strand to SEQ ID NO: 2153820
ucccuccacaucuaaaccc

SEQ ID NO: 2153822 - RNA, 19 nt, Artificial Sequence
  Description of Artificial Sequence: Synthetic oligonucleotide
  Sense strand starting at position 3863 of SEQ ID NO: 1882872
ugcauaccaccgcauaaau

SEQ ID NO: 2153823 - RNA, 19 nt, Artificial Sequence
  Description of Artificial Sequence: Synthetic oligonucleotide
  Antisense strand to SEQ ID NO: 2153822
auuuaugcggugguaugca

SEQ ID NO: 2153824 - RNA, 19 nt, Artificial Sequence
  Description of Artificial Sequence: Synthetic oligonucleotide
  Sense strand starting at position 3872 of SEQ ID NO: 1882872
ccgcauaaauaagugauau

SEQ ID NO: 2153825 - RNA, 19 nt, Artificial Sequence
  Description of Artificial Sequence: Synthetic oligonucleotide
  Antisense strand to SEQ ID NO: 2153824
auaucacuuauuuaugcgg

SEQ ID NO: 2153826 - RNA, 19 nt, Artificial Sequence
  Description of Artificial Sequence: Synthetic oligonucleotide
  Sense strand starting at position 3924 of SEQ ID NO: 1882872
gggaacuuguaaucaaccu

SEQ ID NO: 2153827 - RNA, 19 nt, Artificial Sequence
  Description of Artificial Sequence: Synthetic oligonucleotide
  Antisense strand to SEQ ID NO: 2153826
agguugauuacaaguuccc

SEQ ID NO: 2153828 - RNA, 19 nt, Artificial Sequence
  Description of Artificial Sequence: Synthetic oligonucleotide
  Sense strand starting at position 321 of SEQ ID NO: 1882873
gggaauugguguuccucuu

SEQ ID NO: 2153829 - RNA, 19 nt, Artificial Sequence
  Description of Artificial Sequence: Synthetic oligonucleotide
  Antisense strand to SEQ ID NO: 2153828
aagaggaacaccaauuccc

SEQ ID NO: 2153830 - RNA, 19 nt, Artificial Sequence
  Description of Artificial Sequence: Synthetic oligonucleotide
  Sense strand starting at position 389 of SEQ ID NO: 1882873
agggcaccuucuccuagaa

SEQ ID NO: 2153831 - RNA, 19 nt, Artificial Sequence
  Description of Artificial Sequence: Synthetic oligonucleotide
  Antisense strand to SEQ ID NO: 2153830
uucuaggagaaggugcccu

SEQ ID NO: 2153832 - RNA, 19 nt, Artificial Sequence
  Description of Artificial Sequence: Synthetic oligonucleotide
  Sense strand starting at position 458 of SEQ ID NO: 1882873
uguggcucucacugaucau

SEQ ID NO: 2153833 - RNA, 19 nt, Artificial Sequence
  Description of Artificial Sequence: Synthetic oligonucleotide
  Antisense strand to SEQ ID NO: 2153832
augaucagugagagccaca

SEQ ID NO: 2153834 - RNA, 19 nt, Artificial Sequence
  Description of Artificial Sequence: Synthetic oligonucleotide
  Sense strand starting at position 461 of SEQ ID NO: 1882873
ggcucucacugaucauacu

SEQ ID NO: 2153835 - RNA, 19 nt, Artificial Sequence
  Description of Artificial Sequence: Synthetic oligonucleotide
  Antisense strand to SEQ ID NO: 2153834
aguaugaucagugagagcc

SEQ ID NO: 2153836 - RNA, 19 nt, Artificial Sequence
  Description of Artificial Sequence: Synthetic oligonucleotide
  Sense strand starting at position 604 of SEQ ID NO: 1882873
ugaugaguuucaguuagga

SEQ ID NO: 2153837 - RNA, 19 nt, Artificial Sequence
  Description of Artificial Sequence: Synthetic oligonucleotide
  Antisense strand to SEQ ID NO: 2153836
uccuaacugaaacucauca

SEQ ID NO: 2153838 - RNA, 19 nt, Artificial Sequence
  Description of Artificial Sequence: Synthetic oligonucleotide
  Sense strand starting at position 652 of SEQ ID NO: 1882873
caguuaccuucgucuagau

SEQ ID NO: 2153839 - RNA, 19 nt, Artificial Sequence
  Description of Artificial Sequence: Synthetic oligonucleotide
  Antisense strand to SEQ ID NO: 2153838
aucuagacgaagguaacug

SEQ ID NO: 2153840 - RNA, 19 nt, Artificial Sequence
  Description of Artificial Sequence: Synthetic oligonucleotide
  Sense strand starting at position 654 of SEQ ID NO: 1882873
guuaccuucgucuagauau

SEQ ID NO: 2153841 - RNA, 19 nt, Artificial Sequence
  Description of Artificial Sequence: Synthetic oligonucleotide
  Antisense strand to SEQ ID NO: 2153840
auaucuagacgaagguaac

SEQ ID NO: 2153842 - RNA, 19 nt, Artificial Sequence
  Description of Artificial Sequence: Synthetic oligonucleotide
  Sense strand starting at position 656 of SEQ ID NO: 1882873
uaccuucgucuagauaugu

SEQ ID NO: 2153843 - RNA, 19 nt, Artificial Sequence
  Description of Artificial Sequence: Synthetic oligonucleotide
  Antisense strand to SEQ ID NO: 2153842
acauaucuagacgaaggua

SEQ ID NO: 2153844 - RNA, 19 nt, Artificial Sequence
  Description of Artificial Sequence: Synthetic oligonucleotide
  Sense strand starting at position 661 of SEQ ID NO: 1882873
ucgucuagauaugucuuau

SEQ ID NO: 2153845 - RNA, 19 nt, Artificial Sequence
  Description of Artificial Sequence: Synthetic oligonucleotide
  Antisense strand to SEQ ID NO: 2153844
auaagacauaucuagacga

SEQ ID NO: 2153846 - RNA, 19 nt, Artificial Sequence
  Description of Artificial Sequence: Synthetic oligonucleotide
  Sense strand starting at position 744 of SEQ ID NO: 1882873
guggcauuaucagugauuu

SEQ ID NO: 2153847 - RNA, 19 nt, Artificial Sequence
  Description of Artificial Sequence: Synthetic oligonucleotide
  Antisense strand to SEQ ID NO: 2153846
aaaucacugauaaugccac

SEQ ID NO: 2153848 - RNA, 19 nt, Artificial Sequence
  Description of Artificial Sequence: Synthetic oligonucleotide
  Sense strand starting at position 817 of SEQ ID NO: 1882873
gaaagugaccucgguuaaa

SEQ ID NO: 2153849 - RNA, 19 nt, Artificial Sequence
  Description of Artificial Sequence: Synthetic oligonucleotide
  Antisense strand to SEQ ID NO: 2153848
uuuaaccgaggucacuuuc

SEQ ID NO: 2153850 - RNA, 19 nt, Artificial Sequence
  Description of Artificial Sequence: Synthetic oligonucleotide
  Sense strand starting at position 820 of SEQ ID NO: 1882873
agugaccucgguuaaacau

SEQ ID NO: 2153851 - RNA, 19 nt, Artificial Sequence
  Description of Artificial Sequence: Synthetic oligonucleotide
  Antisense strand to SEQ ID NO: 2153850
auguuuaaccgaggucacu

SEQ ID NO: 2153852 - RNA, 19 nt, Artificial Sequence
  Description of Artificial Sequence: Synthetic oligonucleotide
  Sense strand starting at position 924 of SEQ ID NO: 1882873
gggacuggucucagcguga

SEQ ID NO: 2153853 - RNA, 19 nt, Artificial Sequence
  Description of Artificial Sequence: Synthetic oligonucleotide
  Antisense strand to SEQ ID NO: 2153852
ucacgcugagaccaguccc

SEQ ID NO: 2153854 - RNA, 19 nt, Artificial Sequence
  Description of Artificial Sequence: Synthetic oligonucleotide
  Sense strand starting at position 1078 of SEQ ID NO: 1882873
uuaaauuguuucccauugu

SEQ ID NO: 2153855 - RNA, 19 nt, Artificial Sequence
  Description of Artificial Sequence: Synthetic oligonucleotide
  Antisense strand to SEQ ID NO: 2153854
acaaugggaaacaauuuaa

SEQ ID NO: 2153856 - RNA, 19 nt, Artificial Sequence
  Description of Artificial Sequence: Synthetic oligonucleotide
  Sense strand starting at position 1170 of SEQ ID NO: 1882873
cagugaggucaacauacuu

SEQ ID NO: 2153857 - RNA, 19 nt, Artificial Sequence
  Description of Artificial Sequence: Synthetic oligonucleotide
  Antisense strand to SEQ ID NO: 2153856
aaguauguugaccucacug

SEQ ID NO: 2153858 - RNA, 19 nt, Artificial Sequence
  Description of Artificial Sequence: Synthetic oligonucleotide
  Sense strand starting at position 1263 of SEQ ID NO: 1882873
uguacuagcugcucaacaa

SEQ ID NO: 2153859 - RNA, 19 nt, Artificial Sequence
  Description of Artificial Sequence: Synthetic oligonucleotide
  Antisense strand to SEQ ID NO: 2153858
uuguugagcagcuaguaca

SEQ ID NO: 2153860 - RNA, 19 nt, Artificial Sequence
  Description of Artificial Sequence: Synthetic oligonucleotide
  Sense strand starting at position 1471 of SEQ ID NO: 1882873
agggaagccggcugaauau

SEQ ID NO: 2153861 - RNA, 19 nt, Artificial Sequence
  Description of Artificial Sequence: Synthetic oligonucleotide
  Antisense strand to SEQ ID NO: 2153860
auauucagccggcuucccu

SEQ ID NO: 2153862 - RNA, 19 nt, Artificial Sequence
  Description of Artificial Sequence: Synthetic oligonucleotide
  Sense strand starting at position 1483 of SEQ ID NO: 1882873
ugaauauuccacuggaccu

SEQ ID NO: 2153863 - RNA, 19 nt, Artificial Sequence
  Description of Artificial Sequence: Synthetic oligonucleotide
  Antisense strand to SEQ ID NO: 2153862
agguccaguggaauauuca

SEQ ID NO: 2153864 - RNA, 19 nt, Artificial Sequence
  Description of Artificial Sequence: Synthetic oligonucleotide
  Sense strand starting at position 2013 of SEQ ID NO: 1882873
agcugcauuaaucgggaga

SEQ ID NO: 2153865 - RNA, 19 nt, Artificial Sequence
  Description of Artificial Sequence: Synthetic oligonucleotide
  Antisense strand to SEQ ID NO: 2153864
ucucccgauuaaugcagcu

SEQ ID NO: 2153866 - RNA, 19 nt, Artificial Sequence
  Description of Artificial Sequence: Synthetic oligonucleotide
  Sense strand starting at position 2014 of SEQ ID NO: 1882873
gcugcauuaaucgggagag

SEQ ID NO: 2153867 - RNA, 19 nt, Artificial Sequence
  Description of Artificial Sequence: Synthetic oligonucleotide
  Antisense strand to SEQ ID NO: 2153866
cucucccgauuaaugcagc

SEQ ID NO: 2153868 - RNA, 19 nt, Artificial Sequence
  Description of Artificial Sequence: Synthetic oligonucleotide
  Sense strand starting at position 2016 of SEQ ID NO: 1882873
ugcauuaaucgggagagcu

SEQ ID NO: 2153869 - RNA, 19 nt, Artificial Sequence
  Description of Artificial Sequence: Synthetic oligonucleotide
  Antisense strand to SEQ ID NO: 2153868
agcucucccgauuaaugca

SEQ ID NO: 2153870 - RNA, 19 nt, Artificial Sequence
  Description of Artificial Sequence: Synthetic oligonucleotide
  Sense strand starting at position 2083 of SEQ ID NO: 1882873
cggagcaacccuggagaaa

SEQ ID NO: 2153871 - RNA, 19 nt, Artificial Sequence
  Description of Artificial Sequence: Synthetic oligonucleotide
  Antisense strand to SEQ ID NO: 2153870
uuucuccaggguugcuccg

SEQ ID NO: 2153872 - RNA, 19 nt, Artificial Sequence
  Description of Artificial Sequence: Synthetic oligonucleotide
  Sense strand starting at position 2095 of SEQ ID NO: 1882873
ggagaaauaugguaaacuc

SEQ ID NO: 2153873 - RNA, 19 nt, Artificial Sequence
  Description of Artificial Sequence: Synthetic oligonucleotide
  Antisense strand to SEQ ID NO: 2153872
gaguuuaccauauuucucc

SEQ ID NO: 2153874 - RNA, 19 nt, Artificial Sequence
  Description of Artificial Sequence: Synthetic oligonucleotide
  Sense strand starting at position 2253 of SEQ ID NO: 1882873
ccacgcaacccuggauaaa

SEQ ID NO: 2153875 - RNA, 19 nt, Artificial Sequence
  Description of Artificial Sequence: Synthetic oligonucleotide
  Antisense strand to SEQ ID NO: 2153874
uuuauccaggguugcgugg

SEQ ID NO: 2153876 - RNA, 19 nt, Artificial Sequence
  Description of Artificial Sequence: Synthetic oligonucleotide
  Sense strand starting at position 2263 of SEQ ID NO: 1882873
cuggauaaauacguaauua

SEQ ID NO: 2153877 - RNA, 19 nt, Artificial Sequence
  Description of Artificial Sequence: Synthetic oligonucleotide
  Antisense strand to SEQ ID NO: 2153876
uaauuacguauuuauccag

SEQ ID NO: 2153878 - RNA, 19 nt, Artificial Sequence
  Description of Artificial Sequence: Synthetic oligonucleotide
  Sense strand starting at position 2704 of SEQ ID NO: 1882873
gccugcauucggccguuau

SEQ ID NO: 2153879 - RNA, 19 nt, Artificial Sequence
  Description of Artificial Sequence: Synthetic oligonucleotide
  Antisense strand to SEQ ID NO: 2153878
auaacggccgaaugcaggc

SEQ ID NO: 2153880 - RNA, 19 nt, Artificial Sequence
  Description of Artificial Sequence: Synthetic oligonucleotide
  Sense strand starting at position 2934 of SEQ ID NO: 1882873
gccaaagucugccugacua

SEQ ID NO: 2153881 - RNA, 19 nt, Artificial Sequence
  Description of Artificial Sequence: Synthetic oligonucleotide
  Antisense strand to SEQ ID NO: 2153880
uagucaggcagacuuuggc

SEQ ID NO: 2153882 - RNA, 19 nt, Artificial Sequence
  Description of Artificial Sequence: Synthetic oligonucleotide
  Sense strand starting at position 2948 of SEQ ID NO: 1882873
gacuauauggccuggguua

SEQ ID NO: 2153883 - RNA, 19 nt, Artificial Sequence
  Description of Artificial Sequence: Synthetic oligonucleotide
  Antisense strand to SEQ ID NO: 2153882
uaacccaggccauauaguc

SEQ ID NO: 2153884 - RNA, 19 nt, Artificial Sequence
  Description of Artificial Sequence: Synthetic oligonucleotide
  Sense strand starting at position 2949 of SEQ ID NO: 1882873
acuauauggccuggguuau

SEQ ID NO: 2153885 - RNA, 19 nt, Artificial Sequence
  Description of Artificial Sequence: Synthetic oligonucleotide
  Antisense strand to SEQ ID NO: 2153884
auaacccaggccauauagu

SEQ ID NO: 2153886 - RNA, 19 nt, Artificial Sequence
  Description of Artificial Sequence: Synthetic oligonucleotide
  Sense strand starting at position 2950 of SEQ ID NO: 1882873
cuauauggccuggguuaua

SEQ ID NO: 2153887 - RNA, 19 nt, Artificial Sequence
  Description of Artificial Sequence: Synthetic oligonucleotide
  Antisense strand to SEQ ID NO: 2153886
uauaacccaggccauauag

SEQ ID NO: 2153888 - RNA, 19 nt, Artificial Sequence
  Description of Artificial Sequence: Synthetic oligonucleotide
  Sense strand starting at position 2960 of SEQ ID NO: 1882873
uggguuauaucacuagagu

SEQ ID NO: 2153889 - RNA, 19 nt, Artificial Sequence
  Description of Artificial Sequence: Synthetic oligonucleotide
  Antisense strand to SEQ ID NO: 2153888
acucuagugauauaaccca

SEQ ID NO: 2153890 - RNA, 19 nt, Artificial Sequence
  Description of Artificial Sequence: Synthetic oligonucleotide
  Sense strand starting at position 2961 of SEQ ID NO: 1882873
ggguuauaucacuagagug

SEQ ID NO: 2153891 - RNA, 19 nt, Artificial Sequence
  Description of Artificial Sequence: Synthetic oligonucleotide
  Antisense strand to SEQ ID NO: 2153890
cacucuagugauauaaccc

SEQ ID NO: 2153892 - RNA, 19 nt, Artificial Sequence
  Description of Artificial Sequence: Synthetic oligonucleotide
  Sense strand starting at position 2963 of SEQ ID NO: 1882873
guuauaucacuagagugac

SEQ ID NO: 2153893 - RNA, 19 nt, Artificial Sequence
  Description of Artificial Sequence: Synthetic oligonucleotide
  Antisense strand to SEQ ID NO: 2153892
gucacucuagugauauaac

SEQ ID NO: 2153894 - RNA, 19 nt, Artificial Sequence
  Description of Artificial Sequence: Synthetic oligonucleotide
  Sense strand starting at position 3042 of SEQ ID NO: 1882873
gcagucaagccagagauau

SEQ ID NO: 2153895 - RNA, 19 nt, Artificial Sequence
  Description of Artificial Sequence: Synthetic oligonucleotide
  Antisense strand to SEQ ID NO: 2153894
auaucucuggcuugacugc

SEQ ID NO: 2153896 - RNA, 19 nt, Artificial Sequence
  Description of Artificial Sequence: Synthetic oligonucleotide
  Sense strand starting at position 3137 of SEQ ID NO: 1882873
gccauuuaaugauaauguc

SEQ ID NO: 2153897 - RNA, 19 nt, Artificial Sequence
  Description of Artificial Sequence: Synthetic oligonucleotide
  Antisense strand to SEQ ID NO: 2153896
gacauuaucauuaaauggc

SEQ ID NO: 2153898 - RNA, 19 nt, Artificial Sequence
  Description of Artificial Sequence: Synthetic oligonucleotide
  Sense strand starting at position 3152 of SEQ ID NO: 1882873
ugucccuuacucggacaua

SEQ ID NO: 2153899 - RNA, 19 nt, Artificial Sequence
  Description of Artificial Sequence: Synthetic oligonucleotide
  Antisense strand to SEQ ID NO: 2153898
uauguccgaguaagggaca

SEQ ID NO: 2153900 - RNA, 19 nt, Artificial Sequence
  Description of Artificial Sequence: Synthetic oligonucleotide
  Sense strand starting at position 3155 of SEQ ID NO: 1882873
cccuuacucggacauaacu

SEQ ID NO: 2153901 - RNA, 19 nt, Artificial Sequence
  Description of Artificial Sequence: Synthetic oligonucleotide
  Antisense strand to SEQ ID NO: 2153900
aguuauguccgaguaaggg

SEQ ID NO: 2153902 - RNA, 19 nt, Artificial Sequence
  Description of Artificial Sequence: Synthetic oligonucleotide
  Sense strand starting at position 3163 of SEQ ID NO: 1882873
cggacauaacuuugccuuu

SEQ ID NO: 2153903 - RNA, 19 nt, Artificial Sequence
  Description of Artificial Sequence: Synthetic oligonucleotide
  Antisense strand to SEQ ID NO: 2153902
aaaggcaaaguuauguccg

SEQ ID NO: 2153904 - RNA, 19 nt, Artificial Sequence
  Description of Artificial Sequence: Synthetic oligonucleotide
  Sense strand starting at position 3482 of SEQ ID NO: 1882873
guguacauuugacagacaa

SEQ ID NO: 2153905 - RNA, 19 nt, Artificial Sequence
  Description of Artificial Sequence: Synthetic oligonucleotide
  Antisense strand to SEQ ID NO: 2153904
uugucugucaaauguacac

SEQ ID NO: 2153906 - RNA, 19 nt, Artificial Sequence
  Description of Artificial Sequence: Synthetic oligonucleotide
  Sense strand starting at position 3637 of SEQ ID NO: 1882873
ggauccuugcagcagacaa

SEQ ID NO: 2153907 - RNA, 19 nt, Artificial Sequence
  Description of Artificial Sequence: Synthetic oligonucleotide
  Antisense strand to SEQ ID NO: 2153906
uugucugcugcaaggaucc

SEQ ID NO: 2153908 - RNA, 19 nt, Artificial Sequence
  Description of Artificial Sequence: Synthetic oligonucleotide
  Sense strand starting at position 180 of SEQ ID NO: 1882874
uguuuaauacaauggcuca

SEQ ID NO: 2153909 - RNA, 19 nt, Artificial Sequence
  Description of Artificial Sequence: Synthetic oligonucleotide
  Antisense strand to SEQ ID NO: 2153908
ugagccauuguauuaaaca

SEQ ID NO: 2153910 - RNA, 19 nt, Artificial Sequence
  Description of Artificial Sequence: Synthetic oligonucleotide
  Sense strand starting at position 207 of SEQ ID NO: 1882874
augcuuguuguugauagga

SEQ ID NO: 2153911 - RNA, 19 nt, Artificial Sequence
  Description of Artificial Sequence: Synthetic oligonucleotide
  Antisense strand to SEQ ID NO: 2153910
uccuaucaacaacaagcau

SEQ ID NO: 2153912 - RNA, 19 nt, Artificial Sequence
  Description of Artificial Sequence: Synthetic oligonucleotide
  Sense strand starting at position 263 of SEQ ID NO: 1882874
aucauaaguucccugagaa

SEQ ID NO: 2153913 - RNA, 19 nt, Artificial Sequence
  Description of Artificial Sequence: Synthetic oligonucleotide
  Antisense strand to SEQ ID NO: 2153912
uucucagggaacuuaugau

SEQ ID NO: 2153914 - RNA, 19 nt, Artificial Sequence
  Description of Artificial Sequence: Synthetic oligonucleotide
  Sense strand starting at position 264 of SEQ ID NO: 1882874
ucauaaguucccugagaau

SEQ ID NO: 2153915 - RNA, 19 nt, Artificial Sequence
  Description of Artificial Sequence: Synthetic oligonucleotide
  Antisense strand to SEQ ID NO: 2153914
auucucagggaacuuauga

SEQ ID NO: 2153916 - RNA, 19 nt, Artificial Sequence
  Description of Artificial Sequence: Synthetic oligonucleotide
  Sense strand starting at position 315 of SEQ ID NO: 1882874
acugauugucuauaguucu

SEQ ID NO: 2153917 - RNA, 19 nt, Artificial Sequence
  Description of Artificial Sequence: Synthetic oligonucleotide
  Antisense strand to SEQ ID NO: 2153916
agaacuauagacaaucagu

SEQ ID NO: 2153918 - RNA, 19 nt, Artificial Sequence
  Description of Artificial Sequence: Synthetic oligonucleotide
  Sense strand starting at position 445 of SEQ ID NO: 1882874
augugaauucuugauccua

SEQ ID NO: 2153919 - RNA, 19 nt, Artificial Sequence
  Description of Artificial Sequence: Synthetic oligonucleotide
  Antisense strand to SEQ ID NO: 2153918
uaggaucaagaauucacau

SEQ ID NO: 2153920 - RNA, 19 nt, Artificial Sequence
  Description of Artificial Sequence: Synthetic oligonucleotide
  Sense strand starting at position 447 of SEQ ID NO: 1882874
gugaauucuugauccuaua

SEQ ID NO: 2153921 - RNA, 19 nt, Artificial Sequence
  Description of Artificial Sequence: Synthetic oligonucleotide
  Antisense strand to SEQ ID NO: 2153920
uauaggaucaagaauucac

SEQ ID NO: 2153922 - RNA, 19 nt, Artificial Sequence
  Description of Artificial Sequence: Synthetic oligonucleotide
  Sense strand starting at position 666 of SEQ ID NO: 1882874
gagucuguggcaugaagga

SEQ ID NO: 2153923 - RNA, 19 nt, Artificial Sequence
  Description of Artificial Sequence: Synthetic oligonucleotide
  Antisense strand to SEQ ID NO: 2153922
uccuucaugccacagacuc

SEQ ID NO: 2153924 - RNA, 19 nt, Artificial Sequence
  Description of Artificial Sequence: Synthetic oligonucleotide
  Sense strand starting at position 932 of SEQ ID NO: 1882874
aggcaauggcuaugguuua

SEQ ID NO: 2153925 - RNA, 19 nt, Artificial Sequence
  Description of Artificial Sequence: Synthetic oligonucleotide
  Antisense strand to SEQ ID NO: 2153924
uaaaccauagccauugccu

SEQ ID NO: 2153926 - RNA, 19 nt, Artificial Sequence
  Description of Artificial Sequence: Synthetic oligonucleotide
  Sense strand starting at position 937 of SEQ ID NO: 1882874
auggcuaugguuuaucauu

SEQ ID NO: 2153927 - RNA, 19 nt, Artificial Sequence
  Description of Artificial Sequence: Synthetic oligonucleotide
  Antisense strand to SEQ ID NO: 2153926
aaugauaaaccauagccau

SEQ ID NO: 2153928 - RNA, 19 nt, Artificial Sequence
  Description of Artificial Sequence: Synthetic oligonucleotide
  Sense strand starting at position 939 of SEQ ID NO: 1882874
ggcuaugguuuaucauuga

SEQ ID NO: 2153929 - RNA, 19 nt, Artificial Sequence
  Description of Artificial Sequence: Synthetic oligonucleotide
  Antisense strand to SEQ ID NO: 2153928
ucaaugauaaaccauagcc

SEQ ID NO: 2153930 - RNA, 19 nt, Artificial Sequence
  Description of Artificial Sequence: Synthetic oligonucleotide
  Sense strand starting at position 972 of SEQ ID NO: 1882874
cgguaucuaguguauagau

SEQ ID NO: 2153931 - RNA, 19 nt, Artificial Sequence
  Description of Artificial Sequence: Synthetic oligonucleotide
  Antisense strand to SEQ ID NO: 2153930
aucuauacacuagauaccg

SEQ ID NO: 2153932 - RNA, 19 nt, Artificial Sequence
  Description of Artificial Sequence: Synthetic oligonucleotide
  Sense strand starting at position 974 of SEQ ID NO: 1882874
guaucuaguguauagauac

SEQ ID NO: 2153933 - RNA, 19 nt, Artificial Sequence
  Description of Artificial Sequence: Synthetic oligonucleotide
  Antisense strand to SEQ ID NO: 2153932
guaucuauacacuagauac

SEQ ID NO: 2153934 - RNA, 19 nt, Artificial Sequence
  Description of Artificial Sequence: Synthetic oligonucleotide
  Sense strand starting at position 981 of SEQ ID NO: 1882874
guguauagauacucaguua

SEQ ID NO: 2153935 - RNA, 19 nt, Artificial Sequence
  Description of Artificial Sequence: Synthetic oligonucleotide
  Antisense strand to SEQ ID NO: 2153934
uaacugaguaucuauacac

SEQ ID NO: 2153936 - RNA, 19 nt, Artificial Sequence
  Description of Artificial Sequence: Synthetic oligonucleotide
  Sense strand starting at position 992 of SEQ ID NO: 1882874
cucaguuacuacuuauuga

SEQ ID NO: 2153937 - RNA, 19 nt, Artificial Sequence
  Description of Artificial Sequence: Synthetic oligonucleotide
  Antisense strand to SEQ ID NO: 2153936
ucaauaaguaguaacugag

SEQ ID NO: 2153938 - RNA, 19 nt, Artificial Sequence
  Description of Artificial Sequence: Synthetic oligonucleotide
  Sense strand starting at position 1027 of SEQ ID NO: 1882874
cagagcugguuuccagauu

SEQ ID NO: 2153939 - RNA, 19 nt, Artificial Sequence
  Description of Artificial Sequence: Synthetic oligonucleotide
  Antisense strand to SEQ ID NO: 2153938
aaucuggaaaccagcucug

SEQ ID NO: 2153940 - RNA, 19 nt, Artificial Sequence
  Description of Artificial Sequence: Synthetic oligonucleotide
  Sense strand starting at position 1236 of SEQ ID NO: 1882874
gaaggucugguuugagaag

SEQ ID NO: 2153941 - RNA, 19 nt, Artificial Sequence
  Description of Artificial Sequence: Synthetic oligonucleotide
  Antisense strand to SEQ ID NO: 2153940
cuucucaaaccagaccuuc

SEQ ID NO: 2153942 - RNA, 19 nt, Artificial Sequence
  Description of Artificial Sequence: Synthetic oligonucleotide
  Sense strand starting at position 1337 of SEQ ID NO: 1882874
aaccgcauuuggucuuaua

SEQ ID NO: 2153943 - RNA, 19 nt, Artificial Sequence
  Description of Artificial Sequence: Synthetic oligonucleotide
  Antisense strand to SEQ ID NO: 2153942
uauaagaccaaaugcgguu

SEQ ID NO: 2153944 - RNA, 19 nt, Artificial Sequence
  Description of Artificial Sequence: Synthetic oligonucleotide
  Sense strand starting at position 1658 of SEQ ID NO: 1882874
gcaagugagauccggugaa

SEQ ID NO: 2153945 - RNA, 19 nt, Artificial Sequence
  Description of Artificial Sequence: Synthetic oligonucleotide
  Antisense strand to SEQ ID NO: 2153944
uucaccggaucucacuugc

SEQ ID NO: 2153946 - RNA, 19 nt, Artificial Sequence
  Description of Artificial Sequence: Synthetic oligonucleotide
  Sense strand starting at position 1662 of SEQ ID NO: 1882874
gugagauccggugaaauau

SEQ ID NO: 2153947 - RNA, 19 nt, Artificial Sequence
  Description of Artificial Sequence: Synthetic oligonucleotide
  Antisense strand to SEQ ID NO: 2153946
auauuucaccggaucucac

SEQ ID NO: 2153948 - RNA, 19 nt, Artificial Sequence
  Description of Artificial Sequence: Synthetic oligonucleotide
  Sense strand starting at position 1699 of SEQ ID NO: 1882874
uuuaccaucucggcagaua

SEQ ID NO: 2153949 - RNA, 19 nt, Artificial Sequence
  Description of Artificial Sequence: Synthetic oligonucleotide
  Antisense strand to SEQ ID NO: 2153948
uaucugccgagaugguaaa

SEQ ID NO: 2153950 - RNA, 19 nt, Artificial Sequence
  Description of Artificial Sequence: Synthetic oligonucleotide
  Sense strand starting at position 1719 of SEQ ID NO: 1882874
ccauaaugcccuugaaguu

SEQ ID NO: 2153951 - RNA, 19 nt, Artificial Sequence
  Description of Artificial Sequence: Synthetic oligonucleotide
  Antisense strand to SEQ ID NO: 2153950
aacuucaagggcauuaugg

SEQ ID NO: 2153952 - RNA, 19 nt, Artificial Sequence
  Description of Artificial Sequence: Synthetic oligonucleotide
  Sense strand starting at position 1760 of SEQ ID NO: 1882874
uugccuugugaauaaauug

SEQ ID NO: 2153953 - RNA, 19 nt, Artificial Sequence
  Description of Artificial Sequence: Synthetic oligonucleotide
  Antisense strand to SEQ ID NO: 2153952
caauuuauucacaaggcaa

SEQ ID NO: 2153954 - RNA, 19 nt, Artificial Sequence
  Description of Artificial Sequence: Synthetic oligonucleotide
  Sense strand starting at position 1767 of SEQ ID NO: 1882874
gugaauaaauuguuccugu

SEQ ID NO: 2153955 - RNA, 19 nt, Artificial Sequence
  Description of Artificial Sequence: Synthetic oligonucleotide
  Antisense strand to SEQ ID NO: 2153954
acaggaacaauuuauucac

SEQ ID NO: 2153956 - RNA, 19 nt, Artificial Sequence
  Description of Artificial Sequence: Synthetic oligonucleotide
  Sense strand starting at position 1914 of SEQ ID NO: 1882874
aggaaucuauuguuucuuu

SEQ ID NO: 2153957 - RNA, 19 nt, Artificial Sequence
  Description of Artificial Sequence: Synthetic oligonucleotide
  Antisense strand to SEQ ID NO: 2153956
aaagaaacaauagauuccu

SEQ ID NO: 2153958 - RNA, 19 nt, Artificial Sequence
  Description of Artificial Sequence: Synthetic oligonucleotide
  Sense strand starting at position 2167 of SEQ ID NO: 1882874
uuccacuucuguguugaaa

SEQ ID NO: 2153959 - RNA, 19 nt, Artificial Sequence
  Description of Artificial Sequence: Synthetic oligonucleotide
  Antisense strand to SEQ ID NO: 2153958
uuucaacacagaaguggaa

SEQ ID NO: 2153960 - RNA, 19 nt, Artificial Sequence
  Description of Artificial Sequence: Synthetic oligonucleotide
  Sense strand starting at position 2215 of SEQ ID NO: 1882874
auauuuguauccuaggaac

SEQ ID NO: 2153961 - RNA, 19 nt, Artificial Sequence
  Description of Artificial Sequence: Synthetic oligonucleotide
  Antisense strand to SEQ ID NO: 2153960
guuccuaggauacaaauau

SEQ ID NO: 2153962 - RNA, 19 nt, Artificial Sequence
  Description of Artificial Sequence: Synthetic oligonucleotide
  Sense strand starting at position 2262 of SEQ ID NO: 1882874
agugguaacgacuguaauc

SEQ ID NO: 2153963 - RNA, 19 nt, Artificial Sequence
  Description of Artificial Sequence: Synthetic oligonucleotide
  Antisense strand to SEQ ID NO: 2153962
gauuacagucguuaccacu

SEQ ID NO: 2153964 - RNA, 19 nt, Artificial Sequence
  Description of Artificial Sequence: Synthetic oligonucleotide
  Sense strand starting at position 2638 of SEQ ID NO: 1882874
gacugaguuccucaaggcu

SEQ ID NO: 2153965 - RNA, 19 nt, Artificial Sequence
  Description of Artificial Sequence: Synthetic oligonucleotide
  Antisense strand to SEQ ID NO: 2153964
agccuugaggaacucaguc

SEQ ID NO: 2153966 - RNA, 19 nt, Artificial Sequence
  Description of Artificial Sequence: Synthetic oligonucleotide
  Sense strand starting at position 2644 of SEQ ID NO: 1882874
guuccucaaggcugagaau

SEQ ID NO: 2153967 - RNA, 19 nt, Artificial Sequence
  Description of Artificial Sequence: Synthetic oligonucleotide
  Antisense strand to SEQ ID NO: 2153966
auucucagccuugaggaac

SEQ ID NO: 2153968 - RNA, 19 nt, Artificial Sequence
  Description of Artificial Sequence: Synthetic oligonucleotide
  Sense strand starting at position 2645 of SEQ ID NO: 1882874
uuccucaaggcugagaauu

SEQ ID NO: 2153969 - RNA, 19 nt, Artificial Sequence
  Description of Artificial Sequence: Synthetic oligonucleotide
  Antisense strand to SEQ ID NO: 2153968
aauucucagccuugaggaa

SEQ ID NO: 2153970 - RNA, 19 nt, Artificial Sequence
  Description of Artificial Sequence: Synthetic oligonucleotide
  Sense strand starting at position 2673 of SEQ ID NO: 1882874
aguaguuuacgugauuaaa

SEQ ID NO: 2153971 - RNA, 19 nt, Artificial Sequence
  Description of Artificial Sequence: Synthetic oligonucleotide
  Antisense strand to SEQ ID NO: 2153970
uuuaaucacguaaacuacu

SEQ ID NO: 2153972 - RNA, 19 nt, Artificial Sequence
  Description of Artificial Sequence: Synthetic oligonucleotide
  Sense strand starting at position 2931 of SEQ ID NO: 1882874
auacaugaugucuggcuca

SEQ ID NO: 2153973 - RNA, 19 nt, Artificial Sequence
  Description of Artificial Sequence: Synthetic oligonucleotide
  Antisense strand to SEQ ID NO: 2153972
ugagccagacaucauguau

SEQ ID NO: 2153974 - RNA, 19 nt, Artificial Sequence
  Description of Artificial Sequence: Synthetic oligonucleotide
  Sense strand starting at position 2934 of SEQ ID NO: 1882874
caugaugucuggcucagag

SEQ ID NO: 2153975 - RNA, 19 nt, Artificial Sequence
  Description of Artificial Sequence: Synthetic oligonucleotide
  Antisense strand to SEQ ID NO: 2153974
cucugagccagacaucaug

SEQ ID NO: 2153976 - RNA, 19 nt, Artificial Sequence
  Description of Artificial Sequence: Synthetic oligonucleotide
  Sense strand starting at position 3087 of SEQ ID NO: 1882874
gcgccuaaugaauauucuu

SEQ ID NO: 2153977 - RNA, 19 nt, Artificial Sequence
  Description of Artificial Sequence: Synthetic oligonucleotide
  Antisense strand to SEQ ID NO: 2153976
aagaauauucauuaggcgc

SEQ ID NO: 2153978 - RNA, 19 nt, Artificial Sequence
  Description of Artificial Sequence: Synthetic oligonucleotide
  Sense strand starting at position 3181 of SEQ ID NO: 1882874
augccagauuuguuuguga

SEQ ID NO: 2153979 - RNA, 19 nt, Artificial Sequence
  Description of Artificial Sequence: Synthetic oligonucleotide
  Antisense strand to SEQ ID NO: 2153978
ucacaaacaaaucuggcau

SEQ ID NO: 2153980 - RNA, 19 nt, Artificial Sequence
  Description of Artificial Sequence: Synthetic oligonucleotide
  Sense strand starting at position 3183 of SEQ ID NO: 1882874
gccagauuuguuugugacg

SEQ ID NO: 2153981 - RNA, 19 nt, Artificial Sequence
  Description of Artificial Sequence: Synthetic oligonucleotide
  Antisense strand to SEQ ID NO: 2153980
cgucacaaacaaaucuggc

SEQ ID NO: 2153982 - RNA, 19 nt, Artificial Sequence
  Description of Artificial Sequence: Synthetic oligonucleotide
  Sense strand starting at position 3235 of SEQ ID NO: 1882874
guccaauccucauuugguu

SEQ ID NO: 2153983 - RNA, 19 nt, Artificial Sequence
  Description of Artificial Sequence: Synthetic oligonucleotide
  Antisense strand to SEQ ID NO: 2153982
aaccaaaugaggauuggac

SEQ ID NO: 2153984 - RNA, 19 nt, Artificial Sequence
  Description of Artificial Sequence: Synthetic oligonucleotide
  Sense strand starting at position 3866 of SEQ ID NO: 1882874
aauggagaguuguuaugaa

SEQ ID NO: 2153985 - RNA, 19 nt, Artificial Sequence
  Description of Artificial Sequence: Synthetic oligonucleotide
  Antisense strand to SEQ ID NO: 2153984
uucauaacaacucuccauu

SEQ ID NO: 2153986 - RNA, 19 nt, Artificial Sequence
  Description of Artificial Sequence: Synthetic oligonucleotide
  Sense strand starting at position 3894 of SEQ ID NO: 1882874
augucauagcucuaugucu

SEQ ID NO: 2153987 - RNA, 19 nt, Artificial Sequence
  Description of Artificial Sequence: Synthetic oligonucleotide
  Antisense strand to SEQ ID NO: 2153986
agacauagagcuaugacau

SEQ ID NO: 2153988 - RNA, 19 nt, Artificial Sequence
  Description of Artificial Sequence: Synthetic oligonucleotide
  Sense strand starting at position 52 of SEQ ID NO: 1882875
aucgguuuagggcaauauu

SEQ ID NO: 2153989 - RNA, 19 nt, Artificial Sequence
  Description of Artificial Sequence: Synthetic oligonucleotide
  Antisense strand to SEQ ID NO: 2153988
aauauugcccuaaaccgau

SEQ ID NO: 2153990 - RNA, 19 nt, Artificial Sequence
  Description of Artificial Sequence: Synthetic oligonucleotide
  Sense strand starting at position 104 of SEQ ID NO: 1882875
uugggaagucuuuacaccu

SEQ ID NO: 2153991 - RNA, 19 nt, Artificial Sequence
  Description of Artificial Sequence: Synthetic oligonucleotide
  Antisense strand to SEQ ID NO: 2153990
agguguaaagacuucccaa

SEQ ID NO: 2153992 - RNA, 19 nt, Artificial Sequence
  Description of Artificial Sequence: Synthetic oligonucleotide
  Sense strand starting at position 139 of SEQ ID NO: 1882875
gggccuaggacucaguauu

SEQ ID NO: 2153993 - RNA, 19 nt, Artificial Sequence
  Description of Artificial Sequence: Synthetic oligonucleotide
  Antisense strand to SEQ ID NO: 2153992
aauacugaguccuaggccc

SEQ ID NO: 2153994 - RNA, 19 nt, Artificial Sequence
  Description of Artificial Sequence: Synthetic oligonucleotide
  Sense strand starting at position 150 of SEQ ID NO: 1882875
ucaguauuguacccaaauu

SEQ ID NO: 2153995 - RNA, 19 nt, Artificial Sequence
  Description of Artificial Sequence: Synthetic oligonucleotide
  Antisense strand to SEQ ID NO: 2153994
aauuuggguacaauacuga

SEQ ID NO: 2153996 - RNA, 19 nt, Artificial Sequence
  Description of Artificial Sequence: Synthetic oligonucleotide
  Sense strand starting at position 179 of SEQ ID NO: 1882875
gcaagagcuaucgacacua

SEQ ID NO: 2153997 - RNA, 19 nt, Artificial Sequence
  Description of Artificial Sequence: Synthetic oligonucleotide
  Antisense strand to SEQ ID NO: 2153996
uagugucgauagcucuugc

SEQ ID NO: 2153998 - RNA, 19 nt, Artificial Sequence
  Description of Artificial Sequence: Synthetic oligonucleotide
  Sense strand starting at position 552 of SEQ ID NO: 1882875
gccaaaugugaggacguua

SEQ ID NO: 2153999 - RNA, 19 nt, Artificial Sequence
  Description of Artificial Sequence: Synthetic oligonucleotide
  Antisense strand to SEQ ID NO: 2153998
uaacguccucacauuuggc

SEQ ID NO: 2154000 - RNA, 19 nt, Artificial Sequence
  Description of Artificial Sequence: Synthetic oligonucleotide
  Sense strand starting at position 654 of SEQ ID NO: 1882875
gguauuuccugcccucaac

SEQ ID NO: 2154001 - RNA, 19 nt, Artificial Sequence
  Description of Artificial Sequence: Synthetic oligonucleotide
  Antisense strand to SEQ ID NO: 2154000
guugagggcaggaaauacc

SEQ ID NO: 2154002 - RNA, 19 nt, Artificial Sequence
  Description of Artificial Sequence: Synthetic oligonucleotide
  Sense strand starting at position 823 of SEQ ID NO: 1882875
guauuugaaucuguagugu

SEQ ID NO: 2154003 - RNA, 19 nt, Artificial Sequence
  Description of Artificial Sequence: Synthetic oligonucleotide
  Antisense strand to SEQ ID NO: 2154002
acacuacagauucaaauac

SEQ ID NO: 2154004 - RNA, 19 nt, Artificial Sequence
  Description of Artificial Sequence: Synthetic oligonucleotide
  Sense strand starting at position 1020 of SEQ ID NO: 1882875
cuuagaagccuuuagcuau

SEQ ID NO: 2154005 - RNA, 19 nt, Artificial Sequence
  Description of Artificial Sequence: Synthetic oligonucleotide
  Antisense strand to SEQ ID NO: 2154004
auagcuaaaggcuucuaag

SEQ ID NO: 2154006 - RNA, 19 nt, Artificial Sequence
  Description of Artificial Sequence: Synthetic oligonucleotide
  Sense strand starting at position 1023 of SEQ ID NO: 1882875
agaagccuuuagcuauaaa

SEQ ID NO: 2154007 - RNA, 19 nt, Artificial Sequence
  Description of Artificial Sequence: Synthetic oligonucleotide
  Antisense strand to SEQ ID NO: 2154006
uuuauagcuaaaggcuucu

SEQ ID NO: 2154008 - RNA, 19 nt, Artificial Sequence
  Description of Artificial Sequence: Synthetic oligonucleotide
  Sense strand starting at position 1170 of SEQ ID NO: 1882875
ucuauuuguuuagugauuc

SEQ ID NO: 2154009 - RNA, 19 nt, Artificial Sequence
  Description of Artificial Sequence: Synthetic oligonucleotide
  Antisense strand to SEQ ID NO: 2154008
gaaucacuaaacaaauaga

SEQ ID NO: 2154010 - RNA, 19 nt, Artificial Sequence
  Description of Artificial Sequence: Synthetic oligonucleotide
  Sense strand starting at position 1254 of SEQ ID NO: 1882875
cugauauuccauuguugag

SEQ ID NO: 2154011 - RNA, 19 nt, Artificial Sequence
  Description of Artificial Sequence: Synthetic oligonucleotide
  Antisense strand to SEQ ID NO: 2154010
cucaacaauggaauaucag

SEQ ID NO: 2154012 - RNA, 19 nt, Artificial Sequence
  Description of Artificial Sequence: Synthetic oligonucleotide
  Sense strand starting at position 1256 of SEQ ID NO: 1882875
gauauuccauuguugagaa

SEQ ID NO: 2154013 - RNA, 19 nt, Artificial Sequence
  Description of Artificial Sequence: Synthetic oligonucleotide
  Antisense strand to SEQ ID NO: 2154012
uucucaacaauggaauauc

SEQ ID NO: 2154014 - RNA, 19 nt, Artificial Sequence
  Description of Artificial Sequence: Synthetic oligonucleotide
  Sense strand starting at position 1269 of SEQ ID NO: 1882875
ugagaaacuaguggcaauu

SEQ ID NO: 2154015 - RNA, 19 nt, Artificial Sequence
  Description of Artificial Sequence: Synthetic oligonucleotide
  Antisense strand to SEQ ID NO: 2154014
aauugccacuaguuucuca

SEQ ID NO: 2154016 - RNA, 19 nt, Artificial Sequence
  Description of Artificial Sequence: Synthetic oligonucleotide
  Sense strand starting at position 1280 of SEQ ID NO: 1882875
uggcaauuguacuuugaga

SEQ ID NO: 2154017 - RNA, 19 nt, Artificial Sequence
  Description of Artificial Sequence: Synthetic oligonucleotide
  Antisense strand to SEQ ID NO: 2154016
ucucaaaguacaauugcca

SEQ ID NO: 2154018 - RNA, 19 nt, Artificial Sequence
  Description of Artificial Sequence: Synthetic oligonucleotide
  Sense strand starting at position 1282 of SEQ ID NO: 1882875
gcaauuguacuuugagaag

SEQ ID NO: 2154019 - RNA, 19 nt, Artificial Sequence
  Description of Artificial Sequence: Synthetic oligonucleotide
  Antisense strand to SEQ ID NO: 2154018
cuucucaaaguacaauugc

SEQ ID NO: 2154020 - RNA, 19 nt, Artificial Sequence
  Description of Artificial Sequence: Synthetic oligonucleotide
  Sense strand starting at position 1450 of SEQ ID NO: 1882875
gcugauaugguauaacuuu

SEQ ID NO: 2154021 - RNA, 19 nt, Artificial Sequence
  Description of Artificial Sequence: Synthetic oligonucleotide
  Antisense strand to SEQ ID NO: 2154020
aaaguuauaccauaucagc

SEQ ID NO: 2154022 - RNA, 19 nt, Artificial Sequence
  Description of Artificial Sequence: Synthetic oligonucleotide
  Sense strand starting at position 1498 of SEQ ID NO: 1882875
aaauuaagcuuugucgaga

SEQ ID NO: 2154023 - RNA, 19 nt, Artificial Sequence
  Description of Artificial Sequence: Synthetic oligonucleotide
  Antisense strand to SEQ ID NO: 2154022
ucucgacaaagcuuaauuu

SEQ ID NO: 2154024 - RNA, 19 nt, Artificial Sequence
  Description of Artificial Sequence: Synthetic oligonucleotide
  Sense strand starting at position 1521 of SEQ ID NO: 1882875
ugaggaaauggcuguucau

SEQ ID NO: 2154025 - RNA, 19 nt, Artificial Sequence
  Description of Artificial Sequence: Synthetic oligonucleotide
  Antisense strand to SEQ ID NO: 2154024
augaacagccauuuccuca

SEQ ID NO: 2154026 - RNA, 19 nt, Artificial Sequence
  Description of Artificial Sequence: Synthetic oligonucleotide
  Sense strand starting at position 1573 of SEQ ID NO: 1882875
auuaaauuguccuuagagc

SEQ ID NO: 2154027 - RNA, 19 nt, Artificial Sequence
  Description of Artificial Sequence: Synthetic oligonucleotide
  Antisense strand to SEQ ID NO: 2154026
gcucuaaggacaauuuaau

SEQ ID NO: 2154028 - RNA, 19 nt, Artificial Sequence
  Description of Artificial Sequence: Synthetic oligonucleotide
  Sense strand starting at position 1727 of SEQ ID NO: 1882875
auuacugaacugugauaga

SEQ ID NO: 2154029 - RNA, 19 nt, Artificial Sequence
  Description of Artificial Sequence: Synthetic oligonucleotide
  Antisense strand to SEQ ID NO: 2154028
ucuaucacaguucaguaau

SEQ ID NO: 2154030 - RNA, 19 nt, Artificial Sequence
  Description of Artificial Sequence: Synthetic oligonucleotide
  Sense strand starting at position 1760 of SEQ ID NO: 1882875
agggcaguucugcaugaua

SEQ ID NO: 2154031 - RNA, 19 nt, Artificial Sequence
  Description of Artificial Sequence: Synthetic oligonucleotide
  Antisense strand to SEQ ID NO: 2154030
uaucaugcagaacugcccu

SEQ ID NO: 2154032 - RNA, 19 nt, Artificial Sequence
  Description of Artificial Sequence: Synthetic oligonucleotide
  Sense strand starting at position 1771 of SEQ ID NO: 1882875
gcaugauauuuagcucgga

SEQ ID NO: 2154033 - RNA, 19 nt, Artificial Sequence
  Description of Artificial Sequence: Synthetic oligonucleotide
  Antisense strand to SEQ ID NO: 2154032
uccgagcuaaauaucaugc

SEQ ID NO: 2154034 - RNA, 19 nt, Artificial Sequence
  Description of Artificial Sequence: Synthetic oligonucleotide
  Sense strand starting at position 1774 of SEQ ID NO: 1882875
ugauauuuagcucggaguc

SEQ ID NO: 2154035 - RNA, 19 nt, Artificial Sequence
  Description of Artificial Sequence: Synthetic oligonucleotide
  Antisense strand to SEQ ID NO: 2154034
gacuccgagcuaaauauca

SEQ ID NO: 2154036 - RNA, 19 nt, Artificial Sequence
  Description of Artificial Sequence: Synthetic oligonucleotide
  Sense strand starting at position 2117 of SEQ ID NO: 1882875
caaugacaucauugguaug

SEQ ID NO: 2154037 - RNA, 19 nt, Artificial Sequence
  Description of Artificial Sequence: Synthetic oligonucleotide
  Antisense strand to SEQ ID NO: 2154036
cauaccaaugaugucauug

SEQ ID NO: 2154038 - RNA, 19 nt, Artificial Sequence
  Description of Artificial Sequence: Synthetic oligonucleotide
  Sense strand starting at position 2134 of SEQ ID NO: 1882875
uggguaggugcuuaggaaa

SEQ ID NO: 2154039 - RNA, 19 nt, Artificial Sequence
  Description of Artificial Sequence: Synthetic oligonucleotide
  Antisense strand to SEQ ID NO: 2154038
uuuccuaagcaccuaccca

SEQ ID NO: 2154040 - RNA, 19 nt, Artificial Sequence
  Description of Artificial Sequence: Synthetic oligonucleotide
  Sense strand starting at position 2160 of SEQ ID NO: 1882875
agaagcagcacugaguauu

SEQ ID NO: 2154041 - RNA, 19 nt, Artificial Sequence
  Description of Artificial Sequence: Synthetic oligonucleotide
  Antisense strand to SEQ ID NO: 2154040
aauacucagugcugcuucu

SEQ ID NO: 2154042 - RNA, 19 nt, Artificial Sequence
  Description of Artificial Sequence: Synthetic oligonucleotide
  Sense strand starting at position 2288 of SEQ ID NO: 1882875
auagacuugcucgaguaaa

SEQ ID NO: 2154043 - RNA, 19 nt, Artificial Sequence
  Description of Artificial Sequence: Synthetic oligonucleotide
  Antisense strand to SEQ ID NO: 2154042
uuuacucgagcaagucuau

SEQ ID NO: 2154044 - RNA, 19 nt, Artificial Sequence
  Description of Artificial Sequence: Synthetic oligonucleotide
  Sense strand starting at position 2588 of SEQ ID NO: 1882875
ggaagcugauaguuauuaa

SEQ ID NO: 2154045 - RNA, 19 nt, Artificial Sequence
  Description of Artificial Sequence: Synthetic oligonucleotide
  Antisense strand to SEQ ID NO: 2154044
uuaauaacuaucagcuucc

SEQ ID NO: 2154046 - RNA, 19 nt, Artificial Sequence
  Description of Artificial Sequence: Synthetic oligonucleotide
  Sense strand starting at position 2764 of SEQ ID NO: 1882875
guggaaaccugccuaugau

SEQ ID NO: 2154047 - RNA, 19 nt, Artificial Sequence
  Description of Artificial Sequence: Synthetic oligonucleotide
  Antisense strand to SEQ ID NO: 2154046
aucauaggcagguuuccac

SEQ ID NO: 2154048 - RNA, 19 nt, Artificial Sequence
  Description of Artificial Sequence: Synthetic oligonucleotide
  Sense strand starting at position 2765 of SEQ ID NO: 1882875
uggaaaccugccuaugauu

SEQ ID NO: 2154049 - RNA, 19 nt, Artificial Sequence
  Description of Artificial Sequence: Synthetic oligonucleotide
  Antisense strand to SEQ ID NO: 2154048
aaucauaggcagguuucca

SEQ ID NO: 2154050 - RNA, 19 nt, Artificial Sequence
  Description of Artificial Sequence: Synthetic oligonucleotide
  Sense strand starting at position 2795 of SEQ ID NO: 1882875
uggagugcucacuauggaa

SEQ ID NO: 2154051 - RNA, 19 nt, Artificial Sequence
  Description of Artificial Sequence: Synthetic oligonucleotide
  Antisense strand to SEQ ID NO: 2154050
uuccauagugagcacucca

SEQ ID NO: 2154052 - RNA, 19 nt, Artificial Sequence
  Description of Artificial Sequence: Synthetic oligonucleotide
  Sense strand starting at position 2797 of SEQ ID NO: 1882875
gagugcucacuauggaaau

SEQ ID NO: 2154053 - RNA, 19 nt, Artificial Sequence
  Description of Artificial Sequence: Synthetic oligonucleotide
  Antisense strand to SEQ ID NO: 2154052
auuuccauagugagcacuc

SEQ ID NO: 2154054 - RNA, 19 nt, Artificial Sequence
  Description of Artificial Sequence: Synthetic oligonucleotide
  Sense strand starting at position 2913 of SEQ ID NO: 1882875
uaguaaauucuuuggaggu

SEQ ID NO: 2154055 - RNA, 19 nt, Artificial Sequence
  Description of Artificial Sequence: Synthetic oligonucleotide
  Antisense strand to SEQ ID NO: 2154054
accuccaaagaauuuacua

SEQ ID NO: 2154056 - RNA, 19 nt, Artificial Sequence
  Description of Artificial Sequence: Synthetic oligonucleotide
  Sense strand starting at position 3344 of SEQ ID NO: 1882875
agucaaagcuguuugaaua

SEQ ID NO: 2154057 - RNA, 19 nt, Artificial Sequence
  Description of Artificial Sequence: Synthetic oligonucleotide
  Antisense strand to SEQ ID NO: 2154056
uauucaaacagcuuugacu

SEQ ID NO: 2154058 - RNA, 19 nt, Artificial Sequence
  Description of Artificial Sequence: Synthetic oligonucleotide
  Sense strand starting at position 3372 of SEQ ID NO: 1882875
cacagauaucuggguaaac

SEQ ID NO: 2154059 - RNA, 19 nt, Artificial Sequence
  Description of Artificial Sequence: Synthetic oligonucleotide
  Antisense strand to SEQ ID NO: 2154058
guuuacccagauaucugug

SEQ ID NO: 2154060 - RNA, 19 nt, Artificial Sequence
  Description of Artificial Sequence: Synthetic oligonucleotide
  Sense strand starting at position 3373 of SEQ ID NO: 1882875
acagauaucuggguaaacu

SEQ ID NO: 2154061 - RNA, 19 nt, Artificial Sequence
  Description of Artificial Sequence: Synthetic oligonucleotide
  Antisense strand to SEQ ID NO: 2154060
aguuuacccagauaucugu

SEQ ID NO: 2154062 - RNA, 19 nt, Artificial Sequence
  Description of Artificial Sequence: Synthetic oligonucleotide
  Sense strand starting at position 3403 of SEQ ID NO: 1882875
acaugaucaaggcaguguu

SEQ ID NO: 2154063 - RNA, 19 nt, Artificial Sequence
  Description of Artificial Sequence: Synthetic oligonucleotide
  Antisense strand to SEQ ID NO: 2154062
aacacugccuugaucaugu

SEQ ID NO: 2154064 - RNA, 19 nt, Artificial Sequence
  Description of Artificial Sequence: Synthetic oligonucleotide
  Sense strand starting at position 3721 of SEQ ID NO: 1882875
aagugagacuugcuacucu

SEQ ID NO: 2154065 - RNA, 19 nt, Artificial Sequence
  Description of Artificial Sequence: Synthetic oligonucleotide
  Antisense strand to SEQ ID NO: 2154064
agaguagcaagucucacuu

SEQ ID NO: 2154066 - RNA, 19 nt, Artificial Sequence
  Description of Artificial Sequence: Synthetic oligonucleotide
  Sense strand starting at position 3974 of SEQ ID NO: 1882875
acuugauuacccuguugag

SEQ ID NO: 2154067 - RNA, 19 nt, Artificial Sequence
  Description of Artificial Sequence: Synthetic oligonucleotide
  Antisense strand to SEQ ID NO: 2154066
cucaacaggguaaucaagu

SEQ ID NO: 2154068 - RNA, 19 nt, Artificial Sequence
  Description of Artificial Sequence: Synthetic oligonucleotide
  Sense strand starting at position 253 of SEQ ID NO: 1882876
gcaaguaagagccacugau

SEQ ID NO: 2154069 - RNA, 19 nt, Artificial Sequence
  Description of Artificial Sequence: Synthetic oligonucleotide
  Antisense strand to SEQ ID NO: 2154068
aucaguggcucuuacuugc

SEQ ID NO: 2154070 - RNA, 19 nt, Artificial Sequence
  Description of Artificial Sequence: Synthetic oligonucleotide
  Sense strand starting at position 349 of SEQ ID NO: 1882876
gauugaugugugcauccua

SEQ ID NO: 2154071 - RNA, 19 nt, Artificial Sequence
  Description of Artificial Sequence: Synthetic oligonucleotide
  Antisense strand to SEQ ID NO: 2154070
uaggaugcacacaucaauc

SEQ ID NO: 2154072 - RNA, 19 nt, Artificial Sequence
  Description of Artificial Sequence: Synthetic oligonucleotide
  Sense strand starting at position 383 of SEQ ID NO: 1882876
aggaaucauuaacaaauga

SEQ ID NO: 2154073 - RNA, 19 nt, Artificial Sequence
  Description of Artificial Sequence: Synthetic oligonucleotide
  Antisense strand to SEQ ID NO: 2154072
ucauuuguuaaugauuccu

SEQ ID NO: 2154074 - RNA, 19 nt, Artificial Sequence
  Description of Artificial Sequence: Synthetic oligonucleotide
  Sense strand starting at position 598 of SEQ ID NO: 1882876
ugaggacaucauugcccaa

SEQ ID NO: 2154075 - RNA, 19 nt, Artificial Sequence
  Description of Artificial Sequence: Synthetic oligonucleotide
  Antisense strand to SEQ ID NO: 2154074
uugggcaaugauguccuca

SEQ ID NO: 2154076 - RNA, 19 nt, Artificial Sequence
  Description of Artificial Sequence: Synthetic oligonucleotide
  Sense strand starting at position 601 of SEQ ID NO: 1882876
ggacaucauugcccaaugu

SEQ ID NO: 2154077 - RNA, 19 nt, Artificial Sequence
  Description of Artificial Sequence: Synthetic oligonucleotide
  Antisense strand to SEQ ID NO: 2154076
acauugggcaaugaugucc

SEQ ID NO: 2154078 - RNA, 19 nt, Artificial Sequence
  Description of Artificial Sequence: Synthetic oligonucleotide
  Sense strand starting at position 659 of SEQ ID NO: 1882876
ggauaaauaugccuuuaua

SEQ ID NO: 2154079 - RNA, 19 nt, Artificial Sequence
  Description of Artificial Sequence: Synthetic oligonucleotide
  Antisense strand to SEQ ID NO: 2154078
uauaaaggcauauuuaucc

SEQ ID NO: 2154080 - RNA, 19 nt, Artificial Sequence
  Description of Artificial Sequence: Synthetic oligonucleotide
  Sense strand starting at position 1065 of SEQ ID NO: 1882876
uaagauauguaguuacuga

SEQ ID NO: 2154081 - RNA, 19 nt, Artificial Sequence
  Description of Artificial Sequence: Synthetic oligonucleotide
  Antisense strand to SEQ ID NO: 2154080
ucaguaacuacauaucuua

SEQ ID NO: 2154082 - RNA, 19 nt, Artificial Sequence
  Description of Artificial Sequence: Synthetic oligonucleotide
  Sense strand starting at position 1147 of SEQ ID NO: 1882876
uauccugagcauggugaau

SEQ ID NO: 2154083 - RNA, 19 nt, Artificial Sequence
  Description of Artificial Sequence: Synthetic oligonucleotide
  Antisense strand to SEQ ID NO: 2154082
auucaccaugcucaggaua

SEQ ID NO: 2154084 - RNA, 19 nt, Artificial Sequence
  Description of Artificial Sequence: Synthetic oligonucleotide
  Sense strand starting at position 1217 of SEQ ID NO: 1882876
cucagauauuauguccauu

SEQ ID NO: 2154085 - RNA, 19 nt, Artificial Sequence
  Description of Artificial Sequence: Synthetic oligonucleotide
  Antisense strand to SEQ ID NO: 2154084
aauggacauaauaucugag

SEQ ID NO: 2154086 - RNA, 19 nt, Artificial Sequence
  Description of Artificial Sequence: Synthetic oligonucleotide
  Sense strand starting at position 1251 of SEQ ID NO: 1882876
ugucaauggccagaacaua

SEQ ID NO: 2154087 - RNA, 19 nt, Artificial Sequence
  Description of Artificial Sequence: Synthetic oligonucleotide
  Antisense strand to SEQ ID NO: 2154086
uauguucuggccauugaca

SEQ ID NO: 2154088 - RNA, 19 nt, Artificial Sequence
  Description of Artificial Sequence: Synthetic oligonucleotide
  Sense strand starting at position 1398 of SEQ ID NO: 1882876
aaagaauaaugggaggaau

SEQ ID NO: 2154089 - RNA, 19 nt, Artificial Sequence
  Description of Artificial Sequence: Synthetic oligonucleotide
  Antisense strand to SEQ ID NO: 2154088
auuccucccauuauucuuu

SEQ ID NO: 2154090 - RNA, 19 nt, Artificial Sequence
  Description of Artificial Sequence: Synthetic oligonucleotide
  Sense strand starting at position 1410 of SEQ ID NO: 1882876
gaggaauauuggguaggca

SEQ ID NO: 2154091 - RNA, 19 nt, Artificial Sequence
  Description of Artificial Sequence: Synthetic oligonucleotide
  Antisense strand to SEQ ID NO: 2154090
ugccuacccaauauuccuc

SEQ ID NO: 2154092 - RNA, 19 nt, Artificial Sequence
  Description of Artificial Sequence: Synthetic oligonucleotide
  Sense strand starting at position 1430 of SEQ ID NO: 1882876
cuagcagaauuugcuguaa

SEQ ID NO: 2154093 - RNA, 19 nt, Artificial Sequence
  Description of Artificial Sequence: Synthetic oligonucleotide
  Antisense strand to SEQ ID NO: 2154092
uuacagcaaauucugcuag

SEQ ID NO: 2154094 - RNA, 19 nt, Artificial Sequence
  Description of Artificial Sequence: Synthetic oligonucleotide
  Sense strand starting at position 1476 of SEQ ID NO: 1882876
cuugaaagaugcuuaugau

SEQ ID NO: 2154095 - RNA, 19 nt, Artificial Sequence
  Description of Artificial Sequence: Synthetic oligonucleotide
  Antisense strand to SEQ ID NO: 2154094
aucauaagcaucuuucaag

SEQ ID NO: 2154096 - RNA, 19 nt, Artificial Sequence
  Description of Artificial Sequence: Synthetic oligonucleotide
  Sense strand starting at position 1739 of SEQ ID NO: 1882876
ucaguauaucuguaguaaa

SEQ ID NO: 2154097 - RNA, 19 nt, Artificial Sequence
  Description of Artificial Sequence: Synthetic oligonucleotide
  Antisense strand to SEQ ID NO: 2154096
uuuacuacagauauacuga

SEQ ID NO: 2154098 - RNA, 19 nt, Artificial Sequence
  Description of Artificial Sequence: Synthetic oligonucleotide
  Sense strand starting at position 1839 of SEQ ID NO: 1882876
acauuaggugagugauucu

SEQ ID NO: 2154099 - RNA, 19 nt, Artificial Sequence
  Description of Artificial Sequence: Synthetic oligonucleotide
  Antisense strand to SEQ ID NO: 2154098
agaaucacucaccuaaugu

SEQ ID NO: 2154100 - RNA, 19 nt, Artificial Sequence
  Description of Artificial Sequence: Synthetic oligonucleotide
  Sense strand starting at position 1850 of SEQ ID NO: 1882876
gugauucuggcuuaccuua

SEQ ID NO: 2154101 - RNA, 19 nt, Artificial Sequence
  Description of Artificial Sequence: Synthetic oligonucleotide
  Antisense strand to SEQ ID NO: 2154100
uaagguaagccagaaucac

SEQ ID NO: 2154102 - RNA, 19 nt, Artificial Sequence
  Description of Artificial Sequence: Synthetic oligonucleotide
  Sense strand starting at position 2093 of SEQ ID NO: 1882876
gcaaguauugcugacugga

SEQ ID NO: 2154103 - RNA, 19 nt, Artificial Sequence
  Description of Artificial Sequence: Synthetic oligonucleotide
  Antisense strand to SEQ ID NO: 2154102
uccagucagcaauacuugc

SEQ ID NO: 2154104 - RNA, 19 nt, Artificial Sequence
  Description of Artificial Sequence: Synthetic oligonucleotide
  Sense strand starting at position 2095 of SEQ ID NO: 1882876
aaguauugcugacuggaaa

SEQ ID NO: 2154105 - RNA, 19 nt, Artificial Sequence
  Description of Artificial Sequence: Synthetic oligonucleotide
  Antisense strand to SEQ ID NO: 2154104
uuuccagucagcaauacuu

SEQ ID NO: 2154106 - RNA, 19 nt, Artificial Sequence
  Description of Artificial Sequence: Synthetic oligonucleotide
  Sense strand starting at position 2334 of SEQ ID NO: 1882876
ucagccauuccggauguaa

SEQ ID NO: 2154107 - RNA, 19 nt, Artificial Sequence
  Description of Artificial Sequence: Synthetic oligonucleotide
  Antisense strand to SEQ ID NO: 2154106
uuacauccggaauggcuga

SEQ ID NO: 2154108 - RNA, 19 nt, Artificial Sequence
  Description of Artificial Sequence: Synthetic oligonucleotide
  Sense strand starting at position 2811 of SEQ ID NO: 1882876
uggcucaauuucccuagua

SEQ ID NO: 2154109 - RNA, 19 nt, Artificial Sequence
  Description of Artificial Sequence: Synthetic oligonucleotide
  Antisense strand to SEQ ID NO: 2154108
uacuagggaaauugagcca

SEQ ID NO: 2154110 - RNA, 19 nt, Artificial Sequence
  Description of Artificial Sequence: Synthetic oligonucleotide
  Sense strand starting at position 2812 of SEQ ID NO: 1882876
ggcucaauuucccuaguau

SEQ ID NO: 2154111 - RNA, 19 nt, Artificial Sequence
  Description of Artificial Sequence: Synthetic oligonucleotide
  Antisense strand to SEQ ID NO: 2154110
auacuagggaaauugagcc

SEQ ID NO: 2154112 - RNA, 19 nt, Artificial Sequence
  Description of Artificial Sequence: Synthetic oligonucleotide
  Sense strand starting at position 2823 of SEQ ID NO: 1882876
ccuaguauauuugauugaa

SEQ ID NO: 2154113 - RNA, 19 nt, Artificial Sequence
  Description of Artificial Sequence: Synthetic oligonucleotide
  Antisense strand to SEQ ID NO: 2154112
uucaaucaaauauacuagg

SEQ ID NO: 2154114 - RNA, 19 nt, Artificial Sequence
  Description of Artificial Sequence: Synthetic oligonucleotide
  Sense strand starting at position 2902 of SEQ ID NO: 1882876
uucuuuccaguauggaaau

SEQ ID NO: 2154115 - RNA, 19 nt, Artificial Sequence
  Description of Artificial Sequence: Synthetic oligonucleotide
  Antisense strand to SEQ ID NO: 2154114
auuuccauacuggaaagaa

SEQ ID NO: 2154116 - RNA, 19 nt, Artificial Sequence
  Description of Artificial Sequence: Synthetic oligonucleotide
  Sense strand starting at position 3548 of SEQ ID NO: 1882876
aggauaaauuuaggaauac

SEQ ID NO: 2154117 - RNA, 19 nt, Artificial Sequence
  Description of Artificial Sequence: Synthetic oligonucleotide
  Antisense strand to SEQ ID NO: 2154116
guauuccuaaauuuauccu

SEQ ID NO: 2154118 - RNA, 19 nt, Artificial Sequence
  Description of Artificial Sequence: Synthetic oligonucleotide
  Sense strand starting at position 3583 of SEQ ID NO: 1882876
acagacuuggcaggcaauu

SEQ ID NO: 2154119 - RNA, 19 nt, Artificial Sequence
  Description of Artificial Sequence: Synthetic oligonucleotide
  Antisense strand to SEQ ID NO: 2154118
aauugccugccaagucugu

SEQ ID NO: 2154120 - RNA, 19 nt, Artificial Sequence
  Description of Artificial Sequence: Synthetic oligonucleotide
  Sense strand starting at position 3585 of SEQ ID NO: 1882876
agacuuggcaggcaauuau

SEQ ID NO: 2154121 - RNA, 19 nt, Artificial Sequence
  Description of Artificial Sequence: Synthetic oligonucleotide
  Antisense strand to SEQ ID NO: 2154120
auaauugccugccaagucu

SEQ ID NO: 2154122 - RNA, 19 nt, Artificial Sequence
  Description of Artificial Sequence: Synthetic oligonucleotide
  Sense strand starting at position 3599 of SEQ ID NO: 1882876
auuauugucucaguaaaug

SEQ ID NO: 2154123 - RNA, 19 nt, Artificial Sequence
  Description of Artificial Sequence: Synthetic oligonucleotide
  Antisense strand to SEQ ID NO: 2154122
cauuuacugagacaauaau

SEQ ID NO: 2154124 - RNA, 19 nt, Artificial Sequence
  Description of Artificial Sequence: Synthetic oligonucleotide
  Sense strand starting at position 3637 of SEQ ID NO: 1882876
ggcaguaaauguuugagaa

SEQ ID NO: 2154125 - RNA, 19 nt, Artificial Sequence
  Description of Artificial Sequence: Synthetic oligonucleotide
  Antisense strand to SEQ ID NO: 2154124
uucucaaacauuuacugcc

SEQ ID NO: 2154126 - RNA, 19 nt, Artificial Sequence
  Description of Artificial Sequence: Synthetic oligonucleotide
  Sense strand starting at position 3638 of SEQ ID NO: 1882876
gcaguaaauguuugagaag

SEQ ID NO: 2154127 - RNA, 19 nt, Artificial Sequence
  Description of Artificial Sequence: Synthetic oligonucleotide
  Antisense strand to SEQ ID NO: 2154126
cuucucaaacauuuacugc

SEQ ID NO: 2154128 - RNA, 19 nt, Artificial Sequence
  Description of Artificial Sequence: Synthetic oligonucleotide
  Sense strand starting at position 3688 of SEQ ID NO: 1882876
uuuaauggguuccugagua

SEQ ID NO: 2154129 - RNA, 19 nt, Artificial Sequence
  Description of Artificial Sequence: Synthetic oligonucleotide
  Antisense strand to SEQ ID NO: 2154128
uacucaggaacccauuaaa

SEQ ID NO: 2154130 - RNA, 19 nt, Artificial Sequence
  Description of Artificial Sequence: Synthetic oligonucleotide
  Sense strand starting at position 3692 of SEQ ID NO: 1882876
auggguuccugaguauauu

SEQ ID NO: 2154131 - RNA, 19 nt, Artificial Sequence
  Description of Artificial Sequence: Synthetic oligonucleotide
  Antisense strand to SEQ ID NO: 2154130
aauauacucaggaacccau

SEQ ID NO: 2154132 - RNA, 19 nt, Artificial Sequence
  Description of Artificial Sequence: Synthetic oligonucleotide
  Sense strand starting at position 3693 of SEQ ID NO: 1882876
uggguuccugaguauauug

SEQ ID NO: 2154133 - RNA, 19 nt, Artificial Sequence
  Description of Artificial Sequence: Synthetic oligonucleotide
  Antisense strand to SEQ ID NO: 2154132
caauauacucaggaaccca

SEQ ID NO: 2154134 - RNA, 19 nt, Artificial Sequence
  Description of Artificial Sequence: Synthetic oligonucleotide
  Sense strand starting at position 3695 of SEQ ID NO: 1882876
gguuccugaguauauugau

SEQ ID NO: 2154135 - RNA, 19 nt, Artificial Sequence
  Description of Artificial Sequence: Synthetic oligonucleotide
  Antisense strand to SEQ ID NO: 2154134
aucaauauacucaggaacc

SEQ ID NO: 2154136 - RNA, 19 nt, Artificial Sequence
  Description of Artificial Sequence: Synthetic oligonucleotide
  Sense strand starting at position 3794 of SEQ ID NO: 1882876
gauaaagaccuucgucacu

SEQ ID NO: 2154137 - RNA, 19 nt, Artificial Sequence
  Description of Artificial Sequence: Synthetic oligonucleotide
  Antisense strand to SEQ ID NO: 2154136
agugacgaaggucuuuauc

SEQ ID NO: 2154138 - RNA, 19 nt, Artificial Sequence
  Description of Artificial Sequence: Synthetic oligonucleotide
  Sense strand starting at position 3858 of SEQ ID NO: 1882876
agcaaaucauucgugacaa

SEQ ID NO: 2154139 - RNA, 19 nt, Artificial Sequence
  Description of Artificial Sequence: Synthetic oligonucleotide
  Antisense strand to SEQ ID NO: 2154138
uugucacgaaugauuugcu

SEQ ID NO: 2154140 - RNA, 19 nt, Artificial Sequence
  Description of Artificial Sequence: Synthetic oligonucleotide
  Sense strand starting at position 3893 of SEQ ID NO: 1882876
gugccaugugaguacaaug

SEQ ID NO: 2154141 - RNA, 19 nt, Artificial Sequence
  Description of Artificial Sequence: Synthetic oligonucleotide
  Antisense strand to SEQ ID NO: 2154140
cauuguacucacauggcac

SEQ ID NO: 2154142 - RNA, 19 nt, Artificial Sequence
  Description of Artificial Sequence: Synthetic oligonucleotide
  Sense strand starting at position 3905 of SEQ ID NO: 1882876
uacaaugggcaguauuaau

SEQ ID NO: 2154143 - RNA, 19 nt, Artificial Sequence
  Description of Artificial Sequence: Synthetic oligonucleotide
  Antisense strand to SEQ ID NO: 2154142
auuaauacugcccauugua

SEQ ID NO: 2154144 - RNA, 19 nt, Artificial Sequence
  Description of Artificial Sequence: Synthetic oligonucleotide
  Sense strand starting at position 3936 of SEQ ID NO: 1882876
agagauaaauguuuagcua

SEQ ID NO: 2154145 - RNA, 19 nt, Artificial Sequence
  Description of Artificial Sequence: Synthetic oligonucleotide
  Antisense strand to SEQ ID NO: 2154144
uagcuaaacauuuaucucu

SEQ ID NO: 2154146 - RNA, 19 nt, Artificial Sequence
  Description of Artificial Sequence: Synthetic oligonucleotide
  Sense strand starting at position 3937 of SEQ ID NO: 1882876
gagauaaauguuuagcuau

SEQ ID NO: 2154147 - RNA, 19 nt, Artificial Sequence
  Description of Artificial Sequence: Synthetic oligonucleotide
  Antisense strand to SEQ ID NO: 2154146
auagcuaaacauuuaucuc

SEQ ID NO: 2154148 - RNA, 19 nt, Artificial Sequence
  Description of Artificial Sequence: Synthetic oligonucleotide
  Sense strand starting at position 20 of SEQ ID NO: 1882878
caagauuuguagccuugca

SEQ ID NO: 2154149 - RNA, 19 nt, Artificial Sequence
  Description of Artificial Sequence: Synthetic oligonucleotide
  Antisense strand to SEQ ID NO: 2154148
ugcaaggcuacaaaucuug

SEQ ID NO: 2154150 - RNA, 19 nt, Artificial Sequence
  Description of Artificial Sequence: Synthetic oligonucleotide
  Sense strand starting at position 121 of SEQ ID NO: 1882878
uaaguauuauguguaaagc

SEQ ID NO: 2154151 - RNA, 19 nt, Artificial Sequence
  Description of Artificial Sequence: Synthetic oligonucleotide
  Antisense strand to SEQ ID NO: 2154150
gcuuuacacauaauacuua

SEQ ID NO: 2154152 - RNA, 19 nt, Artificial Sequence
  Description of Artificial Sequence: Synthetic oligonucleotide
  Sense strand starting at position 183 of SEQ ID NO: 1882878
uaguauauuccaugaaugg

SEQ ID NO: 2154153 - RNA, 19 nt, Artificial Sequence
  Description of Artificial Sequence: Synthetic oligonucleotide
  Antisense strand to SEQ ID NO: 2154152
ccauucauggaauauacua

SEQ ID NO: 2154154 - RNA, 19 nt, Artificial Sequence
  Description of Artificial Sequence: Synthetic oligonucleotide
  Sense strand starting at position 184 of SEQ ID NO: 1882878
aguauauuccaugaauggu

SEQ ID NO: 2154155 - RNA, 19 nt, Artificial Sequence
  Description of Artificial Sequence: Synthetic oligonucleotide
  Antisense strand to SEQ ID NO: 2154154
accauucauggaauauacu

SEQ ID NO: 2154156 - RNA, 19 nt, Artificial Sequence
  Description of Artificial Sequence: Synthetic oligonucleotide
  Sense strand starting at position 193 of SEQ ID NO: 1882878
caugaaugguagcuuguca

SEQ ID NO: 2154157 - RNA, 19 nt, Artificial Sequence
  Description of Artificial Sequence: Synthetic oligonucleotide
  Antisense strand to SEQ ID NO: 2154156
ugacaagcuaccauucaug

SEQ ID NO: 2154158 - RNA, 19 nt, Artificial Sequence
  Description of Artificial Sequence: Synthetic oligonucleotide
  Sense strand starting at position 200 of SEQ ID NO: 1882878
gguagcuugucauuugguu

SEQ ID NO: 2154159 - RNA, 19 nt, Artificial Sequence
  Description of Artificial Sequence: Synthetic oligonucleotide
  Antisense strand to SEQ ID NO: 2154158
aaccaaaugacaagcuacc

SEQ ID NO: 2154160 - RNA, 19 nt, Artificial Sequence
  Description of Artificial Sequence: Synthetic oligonucleotide
  Sense strand starting at position 231 of SEQ ID NO: 1882878
uauauucgguucucaugau

SEQ ID NO: 2154161 - RNA, 19 nt, Artificial Sequence
  Description of Artificial Sequence: Synthetic oligonucleotide
  Antisense strand to SEQ ID NO: 2154160
aucaugagaaccgaauaua

SEQ ID NO: 2154162 - RNA, 19 nt, Artificial Sequence
  Description of Artificial Sequence: Synthetic oligonucleotide
  Sense strand starting at position 235 of SEQ ID NO: 1882878
uucgguucucaugaugagu

SEQ ID NO: 2154163 - RNA, 19 nt, Artificial Sequence
  Description of Artificial Sequence: Synthetic oligonucleotide
  Antisense strand to SEQ ID NO: 2154162
acucaucaugagaaccgaa

SEQ ID NO: 2154164 - RNA, 19 nt, Artificial Sequence
  Description of Artificial Sequence: Synthetic oligonucleotide
  Sense strand starting at position 286 of SEQ ID NO: 1882878
acucaacuucucuggguga

SEQ ID NO: 2154165 - RNA, 19 nt, Artificial Sequence
  Description of Artificial Sequence: Synthetic oligonucleotide
  Antisense strand to SEQ ID NO: 2154164
ucacccagagaaguugagu

SEQ ID NO: 2154166 - RNA, 19 nt, Artificial Sequence
  Description of Artificial Sequence: Synthetic oligonucleotide
  Sense strand starting at position 288 of SEQ ID NO: 1882878
ucaacuucucugggugaga

SEQ ID NO: 2154167 - RNA, 19 nt, Artificial Sequence
  Description of Artificial Sequence: Synthetic oligonucleotide
  Antisense strand to SEQ ID NO: 2154166
ucucacccagagaaguuga

SEQ ID NO: 2154168 - RNA, 19 nt, Artificial Sequence
  Description of Artificial Sequence: Synthetic oligonucleotide
  Sense strand starting at position 289 of SEQ ID NO: 1882878
caacuucucugggugagau

SEQ ID NO: 2154169 - RNA, 19 nt, Artificial Sequence
  Description of Artificial Sequence: Synthetic oligonucleotide
  Antisense strand to SEQ ID NO: 2154168
aucucacccagagaaguug

SEQ ID NO: 2154170 - RNA, 19 nt, Artificial Sequence
  Description of Artificial Sequence: Synthetic oligonucleotide
  Sense strand starting at position 290 of SEQ ID NO: 1882878
aacuucucugggugagauu

SEQ ID NO: 2154171 - RNA, 19 nt, Artificial Sequence
  Description of Artificial Sequence: Synthetic oligonucleotide
  Antisense strand to SEQ ID NO: 2154170
aaucucacccagagaaguu

SEQ ID NO: 2154172 - RNA, 19 nt, Artificial Sequence
  Description of Artificial Sequence: Synthetic oligonucleotide
  Sense strand starting at position 303 of SEQ ID NO: 1882878
gagauuaggcuuugcuauc

SEQ ID NO: 2154173 - RNA, 19 nt, Artificial Sequence
  Description of Artificial Sequence: Synthetic oligonucleotide
  Antisense strand to SEQ ID NO: 2154172
gauagcaaagccuaaucuc

SEQ ID NO: 2154174 - RNA, 19 nt, Artificial Sequence
  Description of Artificial Sequence: Synthetic oligonucleotide
  Sense strand starting at position 304 of SEQ ID NO: 1882878
agauuaggcuuugcuauca

SEQ ID NO: 2154175 - RNA, 19 nt, Artificial Sequence
  Description of Artificial Sequence: Synthetic oligonucleotide
  Antisense strand to SEQ ID NO: 2154174
ugauagcaaagccuaaucu

SEQ ID NO: 2154176 - RNA, 19 nt, Artificial Sequence
  Description of Artificial Sequence: Synthetic oligonucleotide
  Sense strand starting at position 533 of SEQ ID NO: 1882878
aguuauaccuaagagggaa

SEQ ID NO: 2154177 - RNA, 19 nt, Artificial Sequence
  Description of Artificial Sequence: Synthetic oligonucleotide
  Antisense strand to SEQ ID NO: 2154176
uucccucuuagguauaacu

SEQ ID NO: 2154178 - RNA, 19 nt, Artificial Sequence
  Description of Artificial Sequence: Synthetic oligonucleotide
  Sense strand starting at position 641 of SEQ ID NO: 1882878
guccuaacagauuaguauu

SEQ ID NO: 2154179 - RNA, 19 nt, Artificial Sequence
  Description of Artificial Sequence: Synthetic oligonucleotide
  Antisense strand to SEQ ID NO: 2154178
aauacuaaucuguuaggac

SEQ ID NO: 2154180 - RNA, 19 nt, Artificial Sequence
  Description of Artificial Sequence: Synthetic oligonucleotide
  Sense strand starting at position 702 of SEQ ID NO: 1882878
ggucaagcaguuuacucaa

SEQ ID NO: 2154181 - RNA, 19 nt, Artificial Sequence
  Description of Artificial Sequence: Synthetic oligonucleotide
  Antisense strand to SEQ ID NO: 2154180
uugaguaaacugcuugacc

SEQ ID NO: 2154182 - RNA, 19 nt, Artificial Sequence
  Description of Artificial Sequence: Synthetic oligonucleotide
  Sense strand starting at position 704 of SEQ ID NO: 1882878
ucaagcaguuuacucaaga

SEQ ID NO: 2154183 - RNA, 19 nt, Artificial Sequence
  Description of Artificial Sequence: Synthetic oligonucleotide
  Antisense strand to SEQ ID NO: 2154182
ucuugaguaaacugcuuga

SEQ ID NO: 2154184 - RNA, 19 nt, Artificial Sequence
  Description of Artificial Sequence: Synthetic oligonucleotide
  Sense strand starting at position 749 of SEQ ID NO: 1882878
uggauugaaaccuggucuu

SEQ ID NO: 2154185 - RNA, 19 nt, Artificial Sequence
  Description of Artificial Sequence: Synthetic oligonucleotide
  Antisense strand to SEQ ID NO: 2154184
aagaccagguuucaaucca

SEQ ID NO: 2154186 - RNA, 19 nt, Artificial Sequence
  Description of Artificial Sequence: Synthetic oligonucleotide
  Sense strand starting at position 752 of SEQ ID NO: 1882878
auugaaaccuggucuuucu

SEQ ID NO: 2154187 - RNA, 19 nt, Artificial Sequence
  Description of Artificial Sequence: Synthetic oligonucleotide
  Antisense strand to SEQ ID NO: 2154186
agaaagaccagguuucaau

SEQ ID NO: 2154188 - RNA, 19 nt, Artificial Sequence
  Description of Artificial Sequence: Synthetic oligonucleotide
  Sense strand starting at position 768 of SEQ ID NO: 1882878
ucuguuugggucgacucaa

SEQ ID NO: 2154189 - RNA, 19 nt, Artificial Sequence
  Description of Artificial Sequence: Synthetic oligonucleotide
  Antisense strand to SEQ ID NO: 2154188
uugagucgacccaaacaga

SEQ ID NO: 2154190 - RNA, 19 nt, Artificial Sequence
  Description of Artificial Sequence: Synthetic oligonucleotide
  Sense strand starting at position 869 of SEQ ID NO: 1882878
ccgcuuuaaagagauaagu

SEQ ID NO: 2154191 - RNA, 19 nt, Artificial Sequence
  Description of Artificial Sequence: Synthetic oligonucleotide
  Antisense strand to SEQ ID NO: 2154190
acuuaucucuuuaaagcgg

SEQ ID NO: 2154192 - RNA, 19 nt, Artificial Sequence
  Description of Artificial Sequence: Synthetic oligonucleotide
  Sense strand starting at position 879 of SEQ ID NO: 1882878
gagauaagugggugcacaa

SEQ ID NO: 2154193 - RNA, 19 nt, Artificial Sequence
  Description of Artificial Sequence: Synthetic oligonucleotide
  Antisense strand to SEQ ID NO: 2154192
uugugcacccacuuaucuc

SEQ ID NO: 2154194 - RNA, 19 nt, Artificial Sequence
  Description of Artificial Sequence: Synthetic oligonucleotide
  Sense strand starting at position 1280 of SEQ ID NO: 1882878
gcaggucccugguuaaauu

SEQ ID NO: 2154195 - RNA, 19 nt, Artificial Sequence
  Description of Artificial Sequence: Synthetic oligonucleotide
  Antisense strand to SEQ ID NO: 2154194
aauuuaaccagggaccugc

SEQ ID NO: 2154196 - RNA, 19 nt, Artificial Sequence
  Description of Artificial Sequence: Synthetic oligonucleotide
  Sense strand starting at position 1289 of SEQ ID NO: 1882878
ugguuaaauugucaauuuc

SEQ ID NO: 2154197 - RNA, 19 nt, Artificial Sequence
  Description of Artificial Sequence: Synthetic oligonucleotide
  Antisense strand to SEQ ID NO: 2154196
gaaauugacaauuuaacca

SEQ ID NO: 2154198 - RNA, 19 nt, Artificial Sequence
  Description of Artificial Sequence: Synthetic oligonucleotide
  Sense strand starting at position 1297 of SEQ ID NO: 1882878
uugucaauuucucugcgga

SEQ ID NO: 2154199 - RNA, 19 nt, Artificial Sequence
  Description of Artificial Sequence: Synthetic oligonucleotide
  Antisense strand to SEQ ID NO: 2154198
uccgcagagaaauugacaa

SEQ ID NO: 2154200 - RNA, 19 nt, Artificial Sequence
  Description of Artificial Sequence: Synthetic oligonucleotide
  Sense strand starting at position 1298 of SEQ ID NO: 1882878
ugucaauuucucugcggag

SEQ ID NO: 2154201 - RNA, 19 nt, Artificial Sequence
  Description of Artificial Sequence: Synthetic oligonucleotide
  Antisense strand to SEQ ID NO: 2154200
cuccgcagagaaauugaca

SEQ ID NO: 2154202 - RNA, 19 nt, Artificial Sequence
  Description of Artificial Sequence: Synthetic oligonucleotide
  Sense strand starting at position 1427 of SEQ ID NO: 1882878
cgcagccguccgcuaaauu

SEQ ID NO: 2154203 - RNA, 19 nt, Artificial Sequence
  Description of Artificial Sequence: Synthetic oligonucleotide
  Antisense strand to SEQ ID NO: 2154202
aauuuagcggacggcugcg

SEQ ID NO: 2154204 - RNA, 19 nt, Artificial Sequence
  Description of Artificial Sequence: Synthetic oligonucleotide
  Sense strand starting at position 1508 of SEQ ID NO: 1882878
ugcguaaucaggguacgca

SEQ ID NO: 2154205 - RNA, 19 nt, Artificial Sequence
  Description of Artificial Sequence: Synthetic oligonucleotide
  Antisense strand to SEQ ID NO: 2154204
ugcguacccugauuacgca

SEQ ID NO: 2154206 - RNA, 19 nt, Artificial Sequence
  Description of Artificial Sequence: Synthetic oligonucleotide
  Sense strand starting at position 2676 of SEQ ID NO: 1882878
uagcaaaguccaugagagu

SEQ ID NO: 2154207 - RNA, 19 nt, Artificial Sequence
  Description of Artificial Sequence: Synthetic oligonucleotide
  Antisense strand to SEQ ID NO: 2154206
acucucauggacuuugcua

SEQ ID NO: 2154208 - RNA, 19 nt, Artificial Sequence
  Description of Artificial Sequence: Synthetic oligonucleotide
  Sense strand starting at position 2682 of SEQ ID NO: 1882878
aguccaugagagugucauu

SEQ ID NO: 2154209 - RNA, 19 nt, Artificial Sequence
  Description of Artificial Sequence: Synthetic oligonucleotide
  Antisense strand to SEQ ID NO: 2154208
aaugacacucucauggacu

SEQ ID NO: 2154210 - RNA, 19 nt, Artificial Sequence
  Description of Artificial Sequence: Synthetic oligonucleotide
  Sense strand starting at position 2687 of SEQ ID NO: 1882878
augagagugucauuggcag

SEQ ID NO: 2154211 - RNA, 19 nt, Artificial Sequence
  Description of Artificial Sequence: Synthetic oligonucleotide
  Antisense strand to SEQ ID NO: 2154210
cugccaaugacacucucau

SEQ ID NO: 2154212 - RNA, 19 nt, Artificial Sequence
  Description of Artificial Sequence: Synthetic oligonucleotide
  Sense strand starting at position 2689 of SEQ ID NO: 1882878
gagagugucauuggcagga

SEQ ID NO: 2154213 - RNA, 19 nt, Artificial Sequence
  Description of Artificial Sequence: Synthetic oligonucleotide
  Antisense strand to SEQ ID NO: 2154212
uccugccaaugacacucuc

SEQ ID NO: 2154214 - RNA, 19 nt, Artificial Sequence
  Description of Artificial Sequence: Synthetic oligonucleotide
  Sense strand starting at position 3449 of SEQ ID NO: 1882878
ccagcugucccuuagggau

SEQ ID NO: 2154215 - RNA, 19 nt, Artificial Sequence
  Description of Artificial Sequence: Synthetic oligonucleotide
  Antisense strand to SEQ ID NO: 2154214
aucccuaagggacagcugg

SEQ ID NO: 2154216 - RNA, 19 nt, Artificial Sequence
  Description of Artificial Sequence: Synthetic oligonucleotide
  Sense strand starting at position 3518 of SEQ ID NO: 1882878
uuugacgggucuucuguaa

SEQ ID NO: 2154217 - RNA, 19 nt, Artificial Sequence
  Description of Artificial Sequence: Synthetic oligonucleotide
  Antisense strand to SEQ ID NO: 2154216
uuacagaagacccgucaaa

SEQ ID NO: 2154218 - RNA, 19 nt, Artificial Sequence
  Description of Artificial Sequence: Synthetic oligonucleotide
  Sense strand starting at position 3522 of SEQ ID NO: 1882878
acgggucuucuguaacuuu

SEQ ID NO: 2154219 - RNA, 19 nt, Artificial Sequence
  Description of Artificial Sequence: Synthetic oligonucleotide
  Antisense strand to SEQ ID NO: 2154218
aaaguuacagaagacccgu

SEQ ID NO: 2154220 - RNA, 19 nt, Artificial Sequence
  Description of Artificial Sequence: Synthetic oligonucleotide
  Sense strand starting at position 3711 of SEQ ID NO: 1882878
ggaggagaugaaugguugu

SEQ ID NO: 2154221 - RNA, 19 nt, Artificial Sequence
  Description of Artificial Sequence: Synthetic oligonucleotide
  Antisense strand to SEQ ID NO: 2154220
acaaccauucaucuccucc

SEQ ID NO: 2154222 - RNA, 19 nt, Artificial Sequence
  Description of Artificial Sequence: Synthetic oligonucleotide
  Sense strand starting at position 3722 of SEQ ID NO: 1882878
augguugucggaggagaug

SEQ ID NO: 2154223 - RNA, 19 nt, Artificial Sequence
  Description of Artificial Sequence: Synthetic oligonucleotide
  Antisense strand to SEQ ID NO: 2154222
caucuccuccgacaaccau

SEQ ID NO: 2154224 - RNA, 19 nt, Artificial Sequence
  Description of Artificial Sequence: Synthetic oligonucleotide
  Sense strand starting at position 3774 of SEQ ID NO: 1882878
gcccucauugaguggaagu

SEQ ID NO: 2154225 - RNA, 19 nt, Artificial Sequence
  Description of Artificial Sequence: Synthetic oligonucleotide
  Antisense strand to SEQ ID NO: 2154224
acuuccacucaaugagggc

SEQ ID NO: 2154226 - RNA, 19 nt, Artificial Sequence
  Description of Artificial Sequence: Synthetic oligonucleotide
  Sense strand starting at position 3968 of SEQ ID NO: 1882878
cugucuuugcucgaaagaa

SEQ ID NO: 2154227 - RNA, 19 nt, Artificial Sequence
  Description of Artificial Sequence: Synthetic oligonucleotide
  Antisense strand to SEQ ID NO: 2154226
uucuuucgagcaaagacag

SEQ ID NO: 2154228 - RNA, 19 nt, Artificial Sequence
  Description of Artificial Sequence: Synthetic oligonucleotide
  Sense strand starting at position 294 of SEQ ID NO: 1882877
uugucaauuucucugcgga

SEQ ID NO: 2154229 - RNA, 19 nt, Artificial Sequence
  Description of Artificial Sequence: Synthetic oligonucleotide
  Antisense strand to SEQ ID NO: 2154228
uccgcagagaaauugacaa

SEQ ID NO: 2154230 - RNA, 19 nt, Artificial Sequence
  Description of Artificial Sequence: Synthetic oligonucleotide
  Sense strand starting at position 295 of SEQ ID NO: 1882877
ugucaauuucucugcggag

SEQ ID NO: 2154231 - RNA, 19 nt, Artificial Sequence
  Description of Artificial Sequence: Synthetic oligonucleotide
  Antisense strand to SEQ ID NO: 2154230
cuccgcagagaaauugaca

SEQ ID NO: 2154232 - RNA, 19 nt, Artificial Sequence
  Description of Artificial Sequence: Synthetic oligonucleotide
  Sense strand starting at position 424 of SEQ ID NO: 1882877
cgcagccguccgcuaaauu

SEQ ID NO: 2154233 - RNA, 19 nt, Artificial Sequence
  Description of Artificial Sequence: Synthetic oligonucleotide
  Antisense strand to SEQ ID NO: 2154232
aauuuagcggacggcugcg

SEQ ID NO: 2154234 - RNA, 19 nt, Artificial Sequence
  Description of Artificial Sequence: Synthetic oligonucleotide
  Sense strand starting at position 505 of SEQ ID NO: 1882877
ugcguaaucaggguacgca

SEQ ID NO: 2154235 - RNA, 19 nt, Artificial Sequence
  Description of Artificial Sequence: Synthetic oligonucleotide
  Antisense strand to SEQ ID NO: 2154234
ugcguacccugauuacgca

SEQ ID NO: 2154236 - RNA, 19 nt, Artificial Sequence
  Description of Artificial Sequence: Synthetic oligonucleotide
  Sense strand starting at position 1673 of SEQ ID NO: 1882877
uagcaaaguccaugagagu

SEQ ID NO: 2154237 - RNA, 19 nt, Artificial Sequence
  Description of Artificial Sequence: Synthetic oligonucleotide
  Antisense strand to SEQ ID NO: 2154236
acucucauggacuuugcua

SEQ ID NO: 2154238 - RNA, 19 nt, Artificial Sequence
  Description of Artificial Sequence: Synthetic oligonucleotide
  Sense strand starting at position 1679 of SEQ ID NO: 1882877
aguccaugagagugucauu

SEQ ID NO: 2154239 - RNA, 19 nt, Artificial Sequence
  Description of Artificial Sequence: Synthetic oligonucleotide
  Antisense strand to SEQ ID NO: 2154238
aaugacacucucauggacu

SEQ ID NO: 2154240 - RNA, 19 nt, Artificial Sequence
  Description of Artificial Sequence: Synthetic oligonucleotide
  Sense strand starting at position 1684 of SEQ ID NO: 1882877
augagagugucauuggcag

SEQ ID NO: 2154241 - RNA, 19 nt, Artificial Sequence
  Description of Artificial Sequence: Synthetic oligonucleotide
  Antisense strand to SEQ ID NO: 2154240
cugccaaugacacucucau

SEQ ID NO: 2154242 - RNA, 19 nt, Artificial Sequence
  Description of Artificial Sequence: Synthetic oligonucleotide
  Sense strand starting at position 1686 of SEQ ID NO: 1882877
gagagugucauuggcagga

SEQ ID NO: 2154243 - RNA, 19 nt, Artificial Sequence
  Description of Artificial Sequence: Synthetic oligonucleotide
  Antisense strand to SEQ ID NO: 2154242
uccugccaaugacacucuc

SEQ ID NO: 2154244 - RNA, 19 nt, Artificial Sequence
  Description of Artificial Sequence: Synthetic oligonucleotide
  Sense strand starting at position 2446 of SEQ ID NO: 1882877
ccagcugucccuuagggau

SEQ ID NO: 2154245 - RNA, 19 nt, Artificial Sequence
  Description of Artificial Sequence: Synthetic oligonucleotide
  Antisense strand to SEQ ID NO: 2154244
aucccuaagggacagcugg

SEQ ID NO: 2154246 - RNA, 19 nt, Artificial Sequence
  Description of Artificial Sequence: Synthetic oligonucleotide
  Sense strand starting at position 2519 of SEQ ID NO: 1882877
acgggucuucuguaacuuu

SEQ ID NO: 2154247 - RNA, 19 nt, Artificial Sequence
  Description of Artificial Sequence: Synthetic oligonucleotide
  Antisense strand to SEQ ID NO: 2154246
aaaguuacagaagacccgu

SEQ ID NO: 2154248 - RNA, 19 nt, Artificial Sequence
  Description of Artificial Sequence: Synthetic oligonucleotide
  Sense strand starting at position 2708 of SEQ ID NO: 1882877
ggaggagaugaaugguugu

SEQ ID NO: 2154249 - RNA, 19 nt, Artificial Sequence
  Description of Artificial Sequence: Synthetic oligonucleotide
  Antisense strand to SEQ ID NO: 2154248
acaaccauucaucuccucc

SEQ ID NO: 2154250 - RNA, 19 nt, Artificial Sequence
  Description of Artificial Sequence: Synthetic oligonucleotide
  Sense strand starting at position 2719 of SEQ ID NO: 1882877
augguugucggaggagaug

SEQ ID NO: 2154251 - RNA, 19 nt, Artificial Sequence
  Description of Artificial Sequence: Synthetic oligonucleotide
  Antisense strand to SEQ ID NO: 2154250
caucuccuccgacaaccau

SEQ ID NO: 2154252 - RNA, 19 nt, Artificial Sequence
  Description of Artificial Sequence: Synthetic oligonucleotide
  Sense strand starting at position 2965 of SEQ ID NO: 1882877
cugucuuugcucgaaagaa

SEQ ID NO: 2154253 - RNA, 19 nt, Artificial Sequence
  Description of Artificial Sequence: Synthetic oligonucleotide
  Antisense strand to SEQ ID NO: 2154252
uucuuucgagcaaagacag

SEQ ID NO: 2154254 - RNA, 19 nt, Artificial Sequence
  Description of Artificial Sequence: Synthetic oligonucleotide
  Sense strand starting at position 3134 of SEQ ID NO: 1882877
ggcauauuagcauaagggu

SEQ ID NO: 2154255 - RNA, 19 nt, Artificial Sequence
  Description of Artificial Sequence: Synthetic oligonucleotide
  Antisense strand to SEQ ID NO: 2154254
acccuuaugcuaauaugcc

SEQ ID NO: 2154256 - RNA, 19 nt, Artificial Sequence
  Description of Artificial Sequence: Synthetic oligonucleotide
  Sense strand starting at position 3174 of SEQ ID NO: 1882877
acuguuuguccugacucaa

SEQ ID NO: 2154257 - RNA, 19 nt, Artificial Sequence
  Description of Artificial Sequence: Synthetic oligonucleotide
  Antisense strand to SEQ ID NO: 2154256
uugagucaggacaaacagu

SEQ ID NO: 2154258 - RNA, 19 nt, Artificial Sequence
  Description of Artificial Sequence: Synthetic oligonucleotide
  Sense strand starting at position 3184 of SEQ ID NO: 1882877
cugacucaaagguggaauu

SEQ ID NO: 2154259 - RNA, 19 nt, Artificial Sequence
  Description of Artificial Sequence: Synthetic oligonucleotide
  Antisense strand to SEQ ID NO: 2154258
aauuccaccuuugagucag

SEQ ID NO: 2154260 - RNA, 19 nt, Artificial Sequence
  Description of Artificial Sequence: Synthetic oligonucleotide
  Sense strand starting at position 3194 of SEQ ID NO: 1882877
gguggaauugagcauguca

SEQ ID NO: 2154261 - RNA, 19 nt, Artificial Sequence
  Description of Artificial Sequence: Synthetic oligonucleotide
  Antisense strand to SEQ ID NO: 2154260
ugacaugcucaauuccacc

SEQ ID NO: 2154262 - RNA, 19 nt, Artificial Sequence
  Description of Artificial Sequence: Synthetic oligonucleotide
  Sense strand starting at position 3196 of SEQ ID NO: 1882877
uggaauugagcaugucauu

SEQ ID NO: 2154263 - RNA, 19 nt, Artificial Sequence
  Description of Artificial Sequence: Synthetic oligonucleotide
  Antisense strand to SEQ ID NO: 2154262
aaugacaugcucaauucca

SEQ ID NO: 2154264 - RNA, 19 nt, Artificial Sequence
  Description of Artificial Sequence: Synthetic oligonucleotide
  Sense strand starting at position 3227 of SEQ ID NO: 1882877
ccgcuuaaucaugaucaac

SEQ ID NO: 2154265 - RNA, 19 nt, Artificial Sequence
  Description of Artificial Sequence: Synthetic oligonucleotide
  Antisense strand to SEQ ID NO: 2154264
guugaucaugauuaagcgg

SEQ ID NO: 2154266 - RNA, 19 nt, Artificial Sequence
  Description of Artificial Sequence: Synthetic oligonucleotide
  Sense strand starting at position 3265 of SEQ ID NO: 1882877
ggagauguaccgcacuguu

SEQ ID NO: 2154267 - RNA, 19 nt, Artificial Sequence
  Description of Artificial Sequence: Synthetic oligonucleotide
  Antisense strand to SEQ ID NO: 2154266
aacagugcgguacaucucc

SEQ ID NO: 2154268 - RNA, 19 nt, Artificial Sequence
  Description of Artificial Sequence: Synthetic oligonucleotide
  Sense strand starting at position 3336 of SEQ ID NO: 1882877
ugggcaagguuucuuaaau

SEQ ID NO: 2154269 - RNA, 19 nt, Artificial Sequence
  Description of Artificial Sequence: Synthetic oligonucleotide
  Antisense strand to SEQ ID NO: 2154268
auuuaagaaaccuugccca

SEQ ID NO: 2154270 - RNA, 19 nt, Artificial Sequence
  Description of Artificial Sequence: Synthetic oligonucleotide
  Sense strand starting at position 3337 of SEQ ID NO: 1882877
gggcaagguuucuuaaaug

SEQ ID NO: 2154271 - RNA, 19 nt, Artificial Sequence
  Description of Artificial Sequence: Synthetic oligonucleotide
  Antisense strand to SEQ ID NO: 2154270
cauuuaagaaaccuugccc

SEQ ID NO: 2154272 - RNA, 19 nt, Artificial Sequence
  Description of Artificial Sequence: Synthetic oligonucleotide
  Sense strand starting at position 3354 of SEQ ID NO: 1882877
uguaaauugccauacaaga

SEQ ID NO: 2154273 - RNA, 19 nt, Artificial Sequence
  Description of Artificial Sequence: Synthetic oligonucleotide
  Antisense strand to SEQ ID NO: 2154272
ucuuguauggcaauuuaca

SEQ ID NO: 2154274 - RNA, 19 nt, Artificial Sequence
  Description of Artificial Sequence: Synthetic oligonucleotide
  Sense strand starting at position 3384 of SEQ ID NO: 1882877
uuggguauucuugaguauu

SEQ ID NO: 2154275 - RNA, 19 nt, Artificial Sequence
  Description of Artificial Sequence: Synthetic oligonucleotide
  Antisense strand to SEQ ID NO: 2154274
aauacucaagaauacccaa

SEQ ID NO: 2154276 - RNA, 19 nt, Artificial Sequence
  Description of Artificial Sequence: Synthetic oligonucleotide
  Sense strand starting at position 3386 of SEQ ID NO: 1882877
ggguauucuugaguauuaa

SEQ ID NO: 2154277 - RNA, 19 nt, Artificial Sequence
  Description of Artificial Sequence: Synthetic oligonucleotide
  Antisense strand to SEQ ID NO: 2154276
uuaauacucaagaauaccc

SEQ ID NO: 2154278 - RNA, 19 nt, Artificial Sequence
  Description of Artificial Sequence: Synthetic oligonucleotide
  Sense strand starting at position 3387 of SEQ ID NO: 1882877
gguauucuugaguauuaag

SEQ ID NO: 2154279 - RNA, 19 nt, Artificial Sequence
  Description of Artificial Sequence: Synthetic oligonucleotide
  Antisense strand to SEQ ID NO: 2154278
cuuaauacucaagaauacc

SEQ ID NO: 2154280 - RNA, 19 nt, Artificial Sequence
  Description of Artificial Sequence: Synthetic oligonucleotide
  Sense strand starting at position 3395 of SEQ ID NO: 1882877
ugaguauuaagagguaaua

SEQ ID NO: 2154281 - RNA, 19 nt, Artificial Sequence
  Description of Artificial Sequence: Synthetic oligonucleotide
  Antisense strand to SEQ ID NO: 2154280
uauuaccucuuaauacuca

SEQ ID NO: 2154282 - RNA, 19 nt, Artificial Sequence
  Description of Artificial Sequence: Synthetic oligonucleotide
  Sense strand starting at position 3423 of SEQ ID NO: 1882877
agguuauuauaagucaaca

SEQ ID NO: 2154283 - RNA, 19 nt, Artificial Sequence
  Description of Artificial Sequence: Synthetic oligonucleotide
  Antisense strand to SEQ ID NO: 2154282
uguugacuuauaauaaccu

SEQ ID NO: 2154284 - RNA, 19 nt, Artificial Sequence
  Description of Artificial Sequence: Synthetic oligonucleotide
  Sense strand starting at position 3554 of SEQ ID NO: 1882877
uaacauguucgaugucaaa

SEQ ID NO: 2154285 - RNA, 19 nt, Artificial Sequence
  Description of Artificial Sequence: Synthetic oligonucleotide
  Antisense strand to SEQ ID NO: 2154284
uuugacaucgaacauguua

SEQ ID NO: 2154286 - RNA, 19 nt, Artificial Sequence
  Description of Artificial Sequence: Synthetic oligonucleotide
  Sense strand starting at position 3600 of SEQ ID NO: 1882877
uggaaagaucuuuggguac

SEQ ID NO: 2154287 - RNA, 19 nt, Artificial Sequence
  Description of Artificial Sequence: Synthetic oligonucleotide
  Antisense strand to SEQ ID NO: 2154286
guacccaaagaucuuucca

SEQ ID NO: 2154288 - RNA, 19 nt, Artificial Sequence
  Description of Artificial Sequence: Synthetic oligonucleotide
  Sense strand starting at position 3603 of SEQ ID NO: 1882877
aaagaucuuuggguacgaa

SEQ ID NO: 2154289 - RNA, 19 nt, Artificial Sequence
  Description of Artificial Sequence: Synthetic oligonucleotide
  Antisense strand to SEQ ID NO: 2154288
uucguacccaaagaucuuu

SEQ ID NO: 2154290 - RNA, 19 nt, Artificial Sequence
  Description of Artificial Sequence: Synthetic oligonucleotide
  Sense strand starting at position 3655 of SEQ ID NO: 1882877
uuggccaaaugcuugauau

SEQ ID NO: 2154291 - RNA, 19 nt, Artificial Sequence
  Description of Artificial Sequence: Synthetic oligonucleotide
  Antisense strand to SEQ ID NO: 2154290
auaucaagcauuuggccaa

SEQ ID NO: 2154292 - RNA, 19 nt, Artificial Sequence
  Description of Artificial Sequence: Synthetic oligonucleotide
  Sense strand starting at position 3666 of SEQ ID NO: 1882877
cuugauauuugucauggaa

SEQ ID NO: 2154293 - RNA, 19 nt, Artificial Sequence
  Description of Artificial Sequence: Synthetic oligonucleotide
  Antisense strand to SEQ ID NO: 2154292
uuccaugacaaauaucaag

SEQ ID NO: 2154294 - RNA, 19 nt, Artificial Sequence
  Description of Artificial Sequence: Synthetic oligonucleotide
  Sense strand starting at position 3745 of SEQ ID NO: 1882877
ccuauuauaguuugcaaug

SEQ ID NO: 2154295 - RNA, 19 nt, Artificial Sequence
  Description of Artificial Sequence: Synthetic oligonucleotide
  Antisense strand to SEQ ID NO: 2154294
cauugcaaacuauaauagg

SEQ ID NO: 2154296 - RNA, 19 nt, Artificial Sequence
  Description of Artificial Sequence: Synthetic oligonucleotide
  Sense strand starting at position 3746 of SEQ ID NO: 1882877
cuauuauaguuugcaauga

SEQ ID NO: 2154297 - RNA, 19 nt, Artificial Sequence
  Description of Artificial Sequence: Synthetic oligonucleotide
  Antisense strand to SEQ ID NO: 2154296
ucauugcaaacuauaauag

SEQ ID NO: 2154298 - RNA, 19 nt, Artificial Sequence
  Description of Artificial Sequence: Synthetic oligonucleotide
  Sense strand starting at position 3754 of SEQ ID NO: 1882877
guuugcaaugaucaucaca

SEQ ID NO: 2154299 - RNA, 19 nt, Artificial Sequence
  Description of Artificial Sequence: Synthetic oligonucleotide
  Antisense strand to SEQ ID NO: 2154298
ugugaugaucauugcaaac

SEQ ID NO: 2154300 - RNA, 19 nt, Artificial Sequence
  Description of Artificial Sequence: Synthetic oligonucleotide
  Sense strand starting at position 3888 of SEQ ID NO: 1882877
agauguauucuaugaaaug

SEQ ID NO: 2154301 - RNA, 19 nt, Artificial Sequence
  Description of Artificial Sequence: Synthetic oligonucleotide
  Antisense strand to SEQ ID NO: 2154300
cauuucauagaauacaucu

SEQ ID NO: 2154302 - RNA, 19 nt, Artificial Sequence
  Description of Artificial Sequence: Synthetic oligonucleotide
  Sense strand starting at position 3898 of SEQ ID NO: 1882877
uaugaaaugccguggaaag

SEQ ID NO: 2154303 - RNA, 19 nt, Artificial Sequence
  Description of Artificial Sequence: Synthetic oligonucleotide
  Antisense strand to SEQ ID NO: 2154302
cuuuccacggcauuucaua

SEQ ID NO: 2154304 - RNA, 19 nt, Artificial Sequence
  Description of Artificial Sequence: Synthetic oligonucleotide
  Sense strand starting at position 3899 of SEQ ID NO: 1882877
augaaaugccguggaaaga

SEQ ID NO: 2154305 - RNA, 19 nt, Artificial Sequence
  Description of Artificial Sequence: Synthetic oligonucleotide
  Antisense strand to SEQ ID NO: 2154304
ucuuuccacggcauuucau

SEQ ID NO: 2154306 - RNA, 19 nt, Artificial Sequence
  Description of Artificial Sequence: Synthetic oligonucleotide
  Sense strand starting at position 3915 of SEQ ID NO: 1882877
agacuuaacguggagaagu

SEQ ID NO: 2154307 - RNA, 19 nt, Artificial Sequence
  Description of Artificial Sequence: Synthetic oligonucleotide
  Antisense strand to SEQ ID NO: 2154306
acuucuccacguuaagucu

SEQ ID NO: 2154308 - RNA, 19 nt, Artificial Sequence
  Description of Artificial Sequence: Synthetic oligonucleotide
  Sense strand starting at position 294 of SEQ ID NO: 1882879
uaguaauuuccgugagagc

SEQ ID NO: 2154309 - RNA, 19 nt, Artificial Sequence
  Description of Artificial Sequence: Synthetic oligonucleotide
  Antisense strand to SEQ ID NO: 2154308
gcucucacggaaauuacua

SEQ ID NO: 2154310 - RNA, 19 nt, Artificial Sequence
  Description of Artificial Sequence: Synthetic oligonucleotide
  Sense strand starting at position 356 of SEQ ID NO: 1882879
gcucaauaaauaugucgga

SEQ ID NO: 2154311 - RNA, 19 nt, Artificial Sequence
  Description of Artificial Sequence: Synthetic oligonucleotide
  Antisense strand to SEQ ID NO: 2154310
uccgacauauuuauugagc

SEQ ID NO: 2154312 - RNA, 19 nt, Artificial Sequence
  Description of Artificial Sequence: Synthetic oligonucleotide
  Sense strand starting at position 360 of SEQ ID NO: 1882879
aauaaauaugucggauauc

SEQ ID NO: 2154313 - RNA, 19 nt, Artificial Sequence
  Description of Artificial Sequence: Synthetic oligonucleotide
  Antisense strand to SEQ ID NO: 2154312
gauauccgacauauuuauu

SEQ ID NO: 2154314 - RNA, 19 nt, Artificial Sequence
  Description of Artificial Sequence: Synthetic oligonucleotide
  Sense strand starting at position 371 of SEQ ID NO: 1882879
cggauaucugaagguccua

SEQ ID NO: 2154315 - RNA, 19 nt, Artificial Sequence
  Description of Artificial Sequence: Synthetic oligonucleotide
  Antisense strand to SEQ ID NO: 2154314
uaggaccuucagauauccg

SEQ ID NO: 2154316 - RNA, 19 nt, Artificial Sequence
  Description of Artificial Sequence: Synthetic oligonucleotide
  Sense strand starting at position 376 of SEQ ID NO: 1882879
aucugaagguccuaccaaa

SEQ ID NO: 2154317 - RNA, 19 nt, Artificial Sequence
  Description of Artificial Sequence: Synthetic oligonucleotide
  Antisense strand to SEQ ID NO: 2154316
uuugguaggaccuucagau

SEQ ID NO: 2154318 - RNA, 19 nt, Artificial Sequence
  Description of Artificial Sequence: Synthetic oligonucleotide
  Sense strand starting at position 591 of SEQ ID NO: 1882879
cuucucacuuaucuuggua

SEQ ID NO: 2154319 - RNA, 19 nt, Artificial Sequence
  Description of Artificial Sequence: Synthetic oligonucleotide
  Antisense strand to SEQ ID NO: 2154318
uaccaagauaagugagaag

SEQ ID NO: 2154320 - RNA, 19 nt, Artificial Sequence
  Description of Artificial Sequence: Synthetic oligonucleotide
  Sense strand starting at position 655 of SEQ ID NO: 1882879
auguacuuaucuguauaca

SEQ ID NO: 2154321 - RNA, 19 nt, Artificial Sequence
  Description of Artificial Sequence: Synthetic oligonucleotide
  Antisense strand to SEQ ID NO: 2154320
uguauacagauaaguacau

SEQ ID NO: 2154322 - RNA, 19 nt, Artificial Sequence
  Description of Artificial Sequence: Synthetic oligonucleotide
  Sense strand starting at position 656 of SEQ ID NO: 1882879
uguacuuaucuguauacag

SEQ ID NO: 2154323 - RNA, 19 nt, Artificial Sequence
  Description of Artificial Sequence: Synthetic oligonucleotide
  Antisense strand to SEQ ID NO: 2154322
cuguauacagauaaguaca

SEQ ID NO: 2154324 - RNA, 19 nt, Artificial Sequence
  Description of Artificial Sequence: Synthetic oligonucleotide
  Sense strand starting at position 739 of SEQ ID NO: 1882879
gugggaacccauugcaagu

SEQ ID NO: 2154325 - RNA, 19 nt, Artificial Sequence
  Description of Artificial Sequence: Synthetic oligonucleotide
  Antisense strand to SEQ ID NO: 2154324
acuugcaauggguucccac

SEQ ID NO: 2154326 - RNA, 19 nt, Artificial Sequence
  Description of Artificial Sequence: Synthetic oligonucleotide
  Sense strand starting at position 821 of SEQ ID NO: 1882879
ggaaguagccaucaaucca

SEQ ID NO: 2154327 - RNA, 19 nt, Artificial Sequence
  Description of Artificial Sequence: Synthetic oligonucleotide
  Antisense strand to SEQ ID NO: 2154326
uggauugauggcuacuucc

SEQ ID NO: 2154328 - RNA, 19 nt, Artificial Sequence
  Description of Artificial Sequence: Synthetic oligonucleotide
  Sense strand starting at position 829 of SEQ ID NO: 1882879
ccaucaauccaggagcauu

SEQ ID NO: 2154329 - RNA, 19 nt, Artificial Sequence
  Description of Artificial Sequence: Synthetic oligonucleotide
  Antisense strand to SEQ ID NO: 2154328
aaugcuccuggauugaugg

SEQ ID NO: 2154330 - RNA, 19 nt, Artificial Sequence
  Description of Artificial Sequence: Synthetic oligonucleotide
  Sense strand starting at position 884 of SEQ ID NO: 1882879
acucgagaacuucgaugau

SEQ ID NO: 2154331 - RNA, 19 nt, Artificial Sequence
  Description of Artificial Sequence: Synthetic oligonucleotide
  Antisense strand to SEQ ID NO: 2154330
aucaucgaaguucucgagu

SEQ ID NO: 2154332 - RNA, 19 nt, Artificial Sequence
  Description of Artificial Sequence: Synthetic oligonucleotide
  Sense strand starting at position 887 of SEQ ID NO: 1882879
cgagaacuucgaugauaaa

SEQ ID NO: 2154333 - RNA, 19 nt, Artificial Sequence
  Description of Artificial Sequence: Synthetic oligonucleotide
  Antisense strand to SEQ ID NO: 2154332
uuuaucaucgaaguucucg

SEQ ID NO: 2154334 - RNA, 19 nt, Artificial Sequence
  Description of Artificial Sequence: Synthetic oligonucleotide
  Sense strand starting at position 931 of SEQ ID NO: 1882879
cccucuugggcgucguaau

SEQ ID NO: 2154335 - RNA, 19 nt, Artificial Sequence
  Description of Artificial Sequence: Synthetic oligonucleotide
  Antisense strand to SEQ ID NO: 2154334
auuacgacgcccaagaggg

SEQ ID NO: 2154336 - RNA, 19 nt, Artificial Sequence
  Description of Artificial Sequence: Synthetic oligonucleotide
  Sense strand starting at position 1520 of SEQ ID NO: 1882879
gcagguccucugggaaauc

SEQ ID NO: 2154337 - RNA, 19 nt, Artificial Sequence
  Description of Artificial Sequence: Synthetic oligonucleotide
  Antisense strand to SEQ ID NO: 2154336
gauuucccagaggaccugc

SEQ ID NO: 2154338 - RNA, 19 nt, Artificial Sequence
  Description of Artificial Sequence: Synthetic oligonucleotide
  Sense strand starting at position 1996 of SEQ ID NO: 1882879
ccgggaucucgugagauca

SEQ ID NO: 2154339 - RNA, 19 nt, Artificial Sequence
  Description of Artificial Sequence: Synthetic oligonucleotide
  Antisense strand to SEQ ID NO: 2154338
ugaucucacgagaucccgg

SEQ ID NO: 2154340 - RNA, 19 nt, Artificial Sequence
  Description of Artificial Sequence: Synthetic oligonucleotide
  Sense strand starting at position 2068 of SEQ ID NO: 1882879
gguguuuggcuggguucua

SEQ ID NO: 2154341 - RNA, 19 nt, Artificial Sequence
  Description of Artificial Sequence: Synthetic oligonucleotide
  Antisense strand to SEQ ID NO: 2154340
uagaacccagccaaacacc

SEQ ID NO: 2154342 - RNA, 19 nt, Artificial Sequence
  Description of Artificial Sequence: Synthetic oligonucleotide
  Sense strand starting at position 2342 of SEQ ID NO: 1882879
cucugagcuccggaaaggu

SEQ ID NO: 2154343 - RNA, 19 nt, Artificial Sequence
  Description of Artificial Sequence: Synthetic oligonucleotide
  Antisense strand to SEQ ID NO: 2154342
accuuuccggagcucagag

SEQ ID NO: 2154344 - RNA, 19 nt, Artificial Sequence
  Description of Artificial Sequence: Synthetic oligonucleotide
  Sense strand starting at position 2508 of SEQ ID NO: 1882879
gcuuuagaggaccacuauu

SEQ ID NO: 2154345 - RNA, 19 nt, Artificial Sequence
  Description of Artificial Sequence: Synthetic oligonucleotide
  Antisense strand to SEQ ID NO: 2154344
aauagugguccucuaaagc

SEQ ID NO: 2154346 - RNA, 19 nt, Artificial Sequence
  Description of Artificial Sequence: Synthetic oligonucleotide
  Sense strand starting at position 2518 of SEQ ID NO: 1882879
accacuauucuguguucca

SEQ ID NO: 2154347 - RNA, 19 nt, Artificial Sequence
  Description of Artificial Sequence: Synthetic oligonucleotide
  Antisense strand to SEQ ID NO: 2154346
uggaacacagaauaguggu

SEQ ID NO: 2154348 - RNA, 19 nt, Artificial Sequence
  Description of Artificial Sequence: Synthetic oligonucleotide
  Sense strand starting at position 2519 of SEQ ID NO: 1882879
ccacuauucuguguuccag

SEQ ID NO: 2154349 - RNA, 19 nt, Artificial Sequence
  Description of Artificial Sequence: Synthetic oligonucleotide
  Antisense strand to SEQ ID NO: 2154348
cuggaacacagaauagugg

SEQ ID NO: 2154350 - RNA, 19 nt, Artificial Sequence
  Description of Artificial Sequence: Synthetic oligonucleotide
  Sense strand starting at position 2521 of SEQ ID NO: 1882879
acuauucuguguuccagau

SEQ ID NO: 2154351 - RNA, 19 nt, Artificial Sequence
  Description of Artificial Sequence: Synthetic oligonucleotide
  Antisense strand to SEQ ID NO: 2154350
aucuggaacacagaauagu

SEQ ID NO: 2154352 - RNA, 19 nt, Artificial Sequence
  Description of Artificial Sequence: Synthetic oligonucleotide
  Sense strand starting at position 2527 of SEQ ID NO: 1882879
cuguguuccagaugagcaa

SEQ ID NO: 2154353 - RNA, 19 nt, Artificial Sequence
  Description of Artificial Sequence: Synthetic oligonucleotide
  Antisense strand to SEQ ID NO: 2154352
uugcucaucuggaacacag

SEQ ID NO: 2154354 - RNA, 19 nt, Artificial Sequence
  Description of Artificial Sequence: Synthetic oligonucleotide
  Sense strand starting at position 2528 of SEQ ID NO: 1882879
uguguuccagaugagcaaa

SEQ ID NO: 2154355 - RNA, 19 nt, Artificial Sequence
  Description of Artificial Sequence: Synthetic oligonucleotide
  Antisense strand to SEQ ID NO: 2154354
uuugcucaucuggaacaca

SEQ ID NO: 2154356 - RNA, 19 nt, Artificial Sequence
  Description of Artificial Sequence: Synthetic oligonucleotide
  Sense strand starting at position 2560 of SEQ ID NO: 1882879
caacaacuuccguggucau

SEQ ID NO: 2154357 - RNA, 19 nt, Artificial Sequence
  Description of Artificial Sequence: Synthetic oligonucleotide
  Antisense strand to SEQ ID NO: 2154356
augaccacggaaguuguug

SEQ ID NO: 2154358 - RNA, 19 nt, Artificial Sequence
  Description of Artificial Sequence: Synthetic oligonucleotide
  Sense strand starting at position 2561 of SEQ ID NO: 1882879
aacaacuuccguggucaua

SEQ ID NO: 2154359 - RNA, 19 nt, Artificial Sequence
  Description of Artificial Sequence: Synthetic oligonucleotide
  Antisense strand to SEQ ID NO: 2154358
uaugaccacggaaguuguu

SEQ ID NO: 2154360 - RNA, 19 nt, Artificial Sequence
  Description of Artificial Sequence: Synthetic oligonucleotide
  Sense strand starting at position 2563 of SEQ ID NO: 1882879
caacuuccguggucauaca

SEQ ID NO: 2154361 - RNA, 19 nt, Artificial Sequence
  Description of Artificial Sequence: Synthetic oligonucleotide
  Antisense strand to SEQ ID NO: 2154360
uguaugaccacggaaguug

SEQ ID NO: 2154362 - RNA, 19 nt, Artificial Sequence
  Description of Artificial Sequence: Synthetic oligonucleotide
  Sense strand starting at position 2625 of SEQ ID NO: 1882879
cacuguuucugcuuuacga

SEQ ID NO: 2154363 - RNA, 19 nt, Artificial Sequence
  Description of Artificial Sequence: Synthetic oligonucleotide
  Antisense strand to SEQ ID NO: 2154362
ucguaaagcagaaacagug

SEQ ID NO: 2154364 - RNA, 19 nt, Artificial Sequence
  Description of Artificial Sequence: Synthetic oligonucleotide
  Sense strand starting at position 2627 of SEQ ID NO: 1882879
cuguuucugcuuuacgaau

SEQ ID NO: 2154365 - RNA, 19 nt, Artificial Sequence
  Description of Artificial Sequence: Synthetic oligonucleotide
  Antisense strand to SEQ ID NO: 2154364
auucguaaagcagaaacag

SEQ ID NO: 2154366 - RNA, 19 nt, Artificial Sequence
  Description of Artificial Sequence: Synthetic oligonucleotide
  Sense strand starting at position 2633 of SEQ ID NO: 1882879
cugcuuuacgaauaaagac

SEQ ID NO: 2154367 - RNA, 19 nt, Artificial Sequence
  Description of Artificial Sequence: Synthetic oligonucleotide
  Antisense strand to SEQ ID NO: 2154366
gucuuuauucguaaagcag

SEQ ID NO: 2154368 - RNA, 19 nt, Artificial Sequence
  Description of Artificial Sequence: Synthetic oligonucleotide
  Sense strand starting at position 2676 of SEQ ID NO: 1882879
uguagaguuuacgcagaca

SEQ ID NO: 2154369 - RNA, 19 nt, Artificial Sequence
  Description of Artificial Sequence: Synthetic oligonucleotide
  Antisense strand to SEQ ID NO: 2154368
ugucugcguaaacucuaca

SEQ ID NO: 2154370 - RNA, 19 nt, Artificial Sequence
  Description of Artificial Sequence: Synthetic oligonucleotide
  Sense strand starting at position 2679 of SEQ ID NO: 1882879
agaguuuacgcagacagaa

SEQ ID NO: 2154371 - RNA, 19 nt, Artificial Sequence
  Description of Artificial Sequence: Synthetic oligonucleotide
  Antisense strand to SEQ ID NO: 2154370
uucugucugcguaaacucu

SEQ ID NO: 2154372 - RNA, 19 nt, Artificial Sequence
  Description of Artificial Sequence: Synthetic oligonucleotide
  Sense strand starting at position 2703 of SEQ ID NO: 1882879
aguagaauuccuugcucac

SEQ ID NO: 2154373 - RNA, 19 nt, Artificial Sequence
  Description of Artificial Sequence: Synthetic oligonucleotide
  Antisense strand to SEQ ID NO: 2154372
gugagcaaggaauucuacu

SEQ ID NO: 2154374 - RNA, 19 nt, Artificial Sequence
  Description of Artificial Sequence: Synthetic oligonucleotide
  Sense strand starting at position 2712 of SEQ ID NO: 1882879
ccuugcucacaaugaguuu

SEQ ID NO: 2154375 - RNA, 19 nt, Artificial Sequence
  Description of Artificial Sequence: Synthetic oligonucleotide
  Antisense strand to SEQ ID NO: 2154374
aaacucauugugagcaagg

SEQ ID NO: 2154376 - RNA, 19 nt, Artificial Sequence
  Description of Artificial Sequence: Synthetic oligonucleotide
  Sense strand starting at position 2715 of SEQ ID NO: 1882879
ugcucacaaugaguuuauu

SEQ ID NO: 2154377 - RNA, 19 nt, Artificial Sequence
  Description of Artificial Sequence: Synthetic oligonucleotide
  Antisense strand to SEQ ID NO: 2154376
aauaaacucauugugagca

SEQ ID NO: 2154378 - RNA, 19 nt, Artificial Sequence
  Description of Artificial Sequence: Synthetic oligonucleotide
  Sense strand starting at position 3764 of SEQ ID NO: 1882879
gcuggaagaguagguguuu

SEQ ID NO: 2154379 - RNA, 19 nt, Artificial Sequence
  Description of Artificial Sequence: Synthetic oligonucleotide
  Antisense strand to SEQ ID NO: 2154378
aaacaccuacucuuccagc

SEQ ID NO: 2154380 - RNA, 19 nt, Artificial Sequence
  Description of Artificial Sequence: Synthetic oligonucleotide
  Sense strand starting at position 3769 of SEQ ID NO: 1882879
aagaguagguguuucucaa

SEQ ID NO: 2154381 - RNA, 19 nt, Artificial Sequence
  Description of Artificial Sequence: Synthetic oligonucleotide
  Antisense strand to SEQ ID NO: 2154380
uugagaaacaccuacucuu

SEQ ID NO: 2154382 - RNA, 19 nt, Artificial Sequence
  Description of Artificial Sequence: Synthetic oligonucleotide
  Sense strand starting at position 3776 of SEQ ID NO: 1882879
gguguuucucaauggaaca

SEQ ID NO: 2154383 - RNA, 19 nt, Artificial Sequence
  Description of Artificial Sequence: Synthetic oligonucleotide
  Antisense strand to SEQ ID NO: 2154382
uguuccauugagaaacacc

SEQ ID NO: 2154384 - RNA, 19 nt, Artificial Sequence
  Description of Artificial Sequence: Synthetic oligonucleotide
  Sense strand starting at position 3853 of SEQ ID NO: 1882879
gcacuagggccugagcauu

SEQ ID NO: 2154385 - RNA, 19 nt, Artificial Sequence
  Description of Artificial Sequence: Synthetic oligonucleotide
  Antisense strand to SEQ ID NO: 2154384
aaugcucaggcccuagugc

SEQ ID NO: 2154386 - RNA, 19 nt, Artificial Sequence
  Description of Artificial Sequence: Synthetic oligonucleotide
  Sense strand starting at position 3879 of SEQ ID NO: 1882879
gggaaauguuuagacagga

SEQ ID NO: 2154387 - RNA, 19 nt, Artificial Sequence
  Description of Artificial Sequence: Synthetic oligonucleotide
  Antisense strand to SEQ ID NO: 2154386
uccugucuaaacauuuccc

SEQ ID NO: 2154388 - RNA, 19 nt, Artificial Sequence
  Description of Artificial Sequence: Synthetic oligonucleotide
  Sense strand starting at position 114 of SEQ ID NO: 1882880
gaguauauguuaccaagga

SEQ ID NO: 2154389 - RNA, 19 nt, Artificial Sequence
  Description of Artificial Sequence: Synthetic oligonucleotide
  Antisense strand to SEQ ID NO: 2154388
uccuugguaacauauacuc

SEQ ID NO: 2154390 - RNA, 19 nt, Artificial Sequence
  Description of Artificial Sequence: Synthetic oligonucleotide
  Sense strand starting at position 187 of SEQ ID NO: 1882880
uuugaaguuccaugacaac

SEQ ID NO: 2154391 - RNA, 19 nt, Artificial Sequence
  Description of Artificial Sequence: Synthetic oligonucleotide
  Antisense strand to SEQ ID NO: 2154390
guugucauggaacuucaaa

SEQ ID NO: 2154392 - RNA, 19 nt, Artificial Sequence
  Description of Artificial Sequence: Synthetic oligonucleotide
  Sense strand starting at position 463 of SEQ ID NO: 1882880
gcaagagcuaaguagcuua

SEQ ID NO: 2154393 - RNA, 19 nt, Artificial Sequence
  Description of Artificial Sequence: Synthetic oligonucleotide
  Antisense strand to SEQ ID NO: 2154392
uaagcuacuuagcucuugc

SEQ ID NO: 2154394 - RNA, 19 nt, Artificial Sequence
  Description of Artificial Sequence: Synthetic oligonucleotide
  Sense strand starting at position 534 of SEQ ID NO: 1882880
acaugaaauguuggcauua

SEQ ID NO: 2154395 - RNA, 19 nt, Artificial Sequence
  Description of Artificial Sequence: Synthetic oligonucleotide
  Antisense strand to SEQ ID NO: 2154394
uaaugccaacauuucaugu

SEQ ID NO: 2154396 - RNA, 19 nt, Artificial Sequence
  Description of Artificial Sequence: Synthetic oligonucleotide
  Sense strand starting at position 535 of SEQ ID NO: 1882880
caugaaauguuggcauuaa

SEQ ID NO: 2154397 - RNA, 19 nt, Artificial Sequence
  Description of Artificial Sequence: Synthetic oligonucleotide
  Antisense strand to SEQ ID NO: 2154396
uuaaugccaacauuucaug

SEQ ID NO: 2154398 - RNA, 19 nt, Artificial Sequence
  Description of Artificial Sequence: Synthetic oligonucleotide
  Sense strand starting at position 725 of SEQ ID NO: 1882880
ggaugugaacacugaagua

SEQ ID NO: 2154399 - RNA, 19 nt, Artificial Sequence
  Description of Artificial Sequence: Synthetic oligonucleotide
  Antisense strand to SEQ ID NO: 2154398
uacuucaguguucacaucc

SEQ ID NO: 2154400 - RNA, 19 nt, Artificial Sequence
  Description of Artificial Sequence: Synthetic oligonucleotide
  Sense strand starting at position 741 of SEQ ID NO: 1882880
guagcuauuauaggaaaug

SEQ ID NO: 2154401 - RNA, 19 nt, Artificial Sequence
  Description of Artificial Sequence: Synthetic oligonucleotide
  Antisense strand to SEQ ID NO: 2154400
cauuuccuauaauagcuac

SEQ ID NO: 2154402 - RNA, 19 nt, Artificial Sequence
  Description of Artificial Sequence: Synthetic oligonucleotide
  Sense strand starting at position 1102 of SEQ ID NO: 1882880
uggaaugacuuccuccuuu

SEQ ID NO: 2154403 - RNA, 19 nt, Artificial Sequence
  Description of Artificial Sequence: Synthetic oligonucleotide
  Antisense strand to SEQ ID NO: 2154402
aaaggaggaagucauucca

SEQ ID NO: 2154404 - RNA, 19 nt, Artificial Sequence
  Description of Artificial Sequence: Synthetic oligonucleotide
  Sense strand starting at position 1207 of SEQ ID NO: 1882880
cuggacagguuguuaacau

SEQ ID NO: 2154405 - RNA, 19 nt, Artificial Sequence
  Description of Artificial Sequence: Synthetic oligonucleotide
  Antisense strand to SEQ ID NO: 2154404
auguuaacaaccuguccag

SEQ ID NO: 2154406 - RNA, 19 nt, Artificial Sequence
  Description of Artificial Sequence: Synthetic oligonucleotide
  Sense strand starting at position 1322 of SEQ ID NO: 1882880
gcugguuaccugcaacaca

SEQ ID NO: 2154407 - RNA, 19 nt, Artificial Sequence
  Description of Artificial Sequence: Synthetic oligonucleotide
  Antisense strand to SEQ ID NO: 2154406
uguguugcagguaaccagc

SEQ ID NO: 2154408 - RNA, 19 nt, Artificial Sequence
  Description of Artificial Sequence: Synthetic oligonucleotide
  Sense strand starting at position 1333 of SEQ ID NO: 1882880
gcaacacacugguuaaauu

SEQ ID NO: 2154409 - RNA, 19 nt, Artificial Sequence
  Description of Artificial Sequence: Synthetic oligonucleotide
  Antisense strand to SEQ ID NO: 2154408
aauuuaaccaguguguugc

SEQ ID NO: 2154410 - RNA, 19 nt, Artificial Sequence
  Description of Artificial Sequence: Synthetic oligonucleotide
  Sense strand starting at position 1432 of SEQ ID NO: 1882880
uacugaugucugcagauca

SEQ ID NO: 2154411 - RNA, 19 nt, Artificial Sequence
  Description of Artificial Sequence: Synthetic oligonucleotide
  Antisense strand to SEQ ID NO: 2154410
ugaucugcagacaucagua

SEQ ID NO: 2154412 - RNA, 19 nt, Artificial Sequence
  Description of Artificial Sequence: Synthetic oligonucleotide
  Sense strand starting at position 1440 of SEQ ID NO: 1882880
ucugcagaucaugaguaau

SEQ ID NO: 2154413 - RNA, 19 nt, Artificial Sequence
  Description of Artificial Sequence: Synthetic oligonucleotide
  Antisense strand to SEQ ID NO: 2154412
auuacucaugaucugcaga

SEQ ID NO: 2154414 - RNA, 19 nt, Artificial Sequence
  Description of Artificial Sequence: Synthetic oligonucleotide
  Sense strand starting at position 1494 of SEQ ID NO: 1882880
uuuaguugacagcauuaua

SEQ ID NO: 2154415 - RNA, 19 nt, Artificial Sequence
  Description of Artificial Sequence: Synthetic oligonucleotide
  Antisense strand to SEQ ID NO: 2154414
uauaaugcugucaacuaaa

SEQ ID NO: 2154416 - RNA, 19 nt, Artificial Sequence
  Description of Artificial Sequence: Synthetic oligonucleotide
  Sense strand starting at position 1497 of SEQ ID NO: 1882880
aguugacagcauuauauua

SEQ ID NO: 2154417 - RNA, 19 nt, Artificial Sequence
  Description of Artificial Sequence: Synthetic oligonucleotide
  Antisense strand to SEQ ID NO: 2154416
uaauauaaugcugucaacu

SEQ ID NO: 2154418 - RNA, 19 nt, Artificial Sequence
  Description of Artificial Sequence: Synthetic oligonucleotide
  Sense strand starting at position 1627 of SEQ ID NO: 1882880
uuuaguguugcucuuugua

SEQ ID NO: 2154419 - RNA, 19 nt, Artificial Sequence
  Description of Artificial Sequence: Synthetic oligonucleotide
  Antisense strand to SEQ ID NO: 2154418
uacaaagagcaacacuaaa

SEQ ID NO: 2154420 - RNA, 19 nt, Artificial Sequence
  Description of Artificial Sequence: Synthetic oligonucleotide
  Sense strand starting at position 1704 of SEQ ID NO: 1882880
aaauauuccgacgauauug

SEQ ID NO: 2154421 - RNA, 19 nt, Artificial Sequence
  Description of Artificial Sequence: Synthetic oligonucleotide
  Antisense strand to SEQ ID NO: 2154420
caauaucgucggaauauuu

SEQ ID NO: 2154422 - RNA, 19 nt, Artificial Sequence
  Description of Artificial Sequence: Synthetic oligonucleotide
  Sense strand starting at position 1817 of SEQ ID NO: 1882880
gccauccugcgagugcuua

SEQ ID NO: 2154423 - RNA, 19 nt, Artificial Sequence
  Description of Artificial Sequence: Synthetic oligonucleotide
  Antisense strand to SEQ ID NO: 2154422
uaagcacucgcaggauggc

SEQ ID NO: 2154424 - RNA, 19 nt, Artificial Sequence
  Description of Artificial Sequence: Synthetic oligonucleotide
  Sense strand starting at position 1918 of SEQ ID NO: 1882880
aagucuuaccgucagacuu

SEQ ID NO: 2154425 - RNA, 19 nt, Artificial Sequence
  Description of Artificial Sequence: Synthetic oligonucleotide
  Antisense strand to SEQ ID NO: 2154424
aagucugacgguaagacuu

SEQ ID NO: 2154426 - RNA, 19 nt, Artificial Sequence
  Description of Artificial Sequence: Synthetic oligonucleotide
  Sense strand starting at position 2068 of SEQ ID NO: 1882880
gaaagcagcgcuuacaaau

SEQ ID NO: 2154427 - RNA, 19 nt, Artificial Sequence
  Description of Artificial Sequence: Synthetic oligonucleotide
  Antisense strand to SEQ ID NO: 2154426
auuuguaagcgcugcuuuc

SEQ ID NO: 2154428 - RNA, 19 nt, Artificial Sequence
  Description of Artificial Sequence: Synthetic oligonucleotide
  Sense strand starting at position 2117 of SEQ ID NO: 1882880
cccaccucugagcaauaga

SEQ ID NO: 2154429 - RNA, 19 nt, Artificial Sequence
  Description of Artificial Sequence: Synthetic oligonucleotide
  Antisense strand to SEQ ID NO: 2154428
ucuauugcucagagguggg

SEQ ID NO: 2154430 - RNA, 19 nt, Artificial Sequence
  Description of Artificial Sequence: Synthetic oligonucleotide
  Sense strand starting at position 2207 of SEQ ID NO: 1882880
gauagugaggcuuaagcaa

SEQ ID NO: 2154431 - RNA, 19 nt, Artificial Sequence
  Description of Artificial Sequence: Synthetic oligonucleotide
  Antisense strand to SEQ ID NO: 2154430
uugcuuaagccucacuauc

SEQ ID NO: 2154432 - RNA, 19 nt, Artificial Sequence
  Description of Artificial Sequence: Synthetic oligonucleotide
  Sense strand starting at position 2454 of SEQ ID NO: 1882880
agauauucuccugaugcga

SEQ ID NO: 2154433 - RNA, 19 nt, Artificial Sequence
  Description of Artificial Sequence: Synthetic oligonucleotide
  Antisense strand to SEQ ID NO: 2154432
ucgcaucaggagaauaucu

SEQ ID NO: 2154434 - RNA, 19 nt, Artificial Sequence
  Description of Artificial Sequence: Synthetic oligonucleotide
  Sense strand starting at position 2686 of SEQ ID NO: 1882880
uugggagcuaucgaaaugu

SEQ ID NO: 2154435 - RNA, 19 nt, Artificial Sequence
  Description of Artificial Sequence: Synthetic oligonucleotide
  Antisense strand to SEQ ID NO: 2154434
acauuucgauagcucccaa

SEQ ID NO: 2154436 - RNA, 19 nt, Artificial Sequence
  Description of Artificial Sequence: Synthetic oligonucleotide
  Sense strand starting at position 2692 of SEQ ID NO: 1882880
gcuaucgaaauguaagaau

SEQ ID NO: 2154437 - RNA, 19 nt, Artificial Sequence
  Description of Artificial Sequence: Synthetic oligonucleotide
  Antisense strand to SEQ ID NO: 2154436
auucuuacauuucgauagc

SEQ ID NO: 2154438 - RNA, 19 nt, Artificial Sequence
  Description of Artificial Sequence: Synthetic oligonucleotide
  Sense strand starting at position 2701 of SEQ ID NO: 1882880
auguaagaauucucaguaa

SEQ ID NO: 2154439 - RNA, 19 nt, Artificial Sequence
  Description of Artificial Sequence: Synthetic oligonucleotide
  Antisense strand to SEQ ID NO: 2154438
uuacugagaauucuuacau

SEQ ID NO: 2154440 - RNA, 19 nt, Artificial Sequence
  Description of Artificial Sequence: Synthetic oligonucleotide
  Sense strand starting at position 2730 of SEQ ID NO: 1882880
ggugguaaggaaugcauua

SEQ ID NO: 2154441 - RNA, 19 nt, Artificial Sequence
  Description of Artificial Sequence: Synthetic oligonucleotide
  Antisense strand to SEQ ID NO: 2154440
uaaugcauuccuuaccacc

SEQ ID NO: 2154442 - RNA, 19 nt, Artificial Sequence
  Description of Artificial Sequence: Synthetic oligonucleotide
  Sense strand starting at position 2828 of SEQ ID NO: 1882880
cuagaaaugcgcgugcaau

SEQ ID NO: 2154443 - RNA, 19 nt, Artificial Sequence
  Description of Artificial Sequence: Synthetic oligonucleotide
  Antisense strand to SEQ ID NO: 2154442
auugcacgcgcauuucuag

SEQ ID NO: 2154444 - RNA, 19 nt, Artificial Sequence
  Description of Artificial Sequence: Synthetic oligonucleotide
  Sense strand starting at position 2853 of SEQ ID NO: 1882880
aucucauaugaccgggaca

SEQ ID NO: 2154445 - RNA, 19 nt, Artificial Sequence
  Description of Artificial Sequence: Synthetic oligonucleotide
  Antisense strand to SEQ ID NO: 2154444
ugucccggucauaugagau

SEQ ID NO: 2154446 - RNA, 19 nt, Artificial Sequence
  Description of Artificial Sequence: Synthetic oligonucleotide
  Sense strand starting at position 2855 of SEQ ID NO: 1882880
cucauaugaccgggacaca

SEQ ID NO: 2154447 - RNA, 19 nt, Artificial Sequence
  Description of Artificial Sequence: Synthetic oligonucleotide
  Antisense strand to SEQ ID NO: 2154446
ugugucccggucauaugag

SEQ ID NO: 2154448 - RNA, 19 nt, Artificial Sequence
  Description of Artificial Sequence: Synthetic oligonucleotide
  Sense strand starting at position 2866 of SEQ ID NO: 1882880
gggacacaaucgcuuggaa

SEQ ID NO: 2154449 - RNA, 19 nt, Artificial Sequence
  Description of Artificial Sequence: Synthetic oligonucleotide
  Antisense strand to SEQ ID NO: 2154448
uuccaagcgauuguguccc

SEQ ID NO: 2154450 - RNA, 19 nt, Artificial Sequence
  Description of Artificial Sequence: Synthetic oligonucleotide
  Sense strand starting at position 2868 of SEQ ID NO: 1882880
gacacaaucgcuuggaaau

SEQ ID NO: 2154451 - RNA, 19 nt, Artificial Sequence
  Description of Artificial Sequence: Synthetic oligonucleotide
  Antisense strand to SEQ ID NO: 2154450
auuuccaagcgauuguguc

SEQ ID NO: 2154452 - RNA, 19 nt, Artificial Sequence
  Description of Artificial Sequence: Synthetic oligonucleotide
  Sense strand starting at position 2869 of SEQ ID NO: 1882880
acacaaucgcuuggaaaua

SEQ ID NO: 2154453 - RNA, 19 nt, Artificial Sequence
  Description of Artificial Sequence: Synthetic oligonucleotide
  Antisense strand to SEQ ID NO: 2154452
uauuuccaagcgauugugu

SEQ ID NO: 2154454 - RNA, 19 nt, Artificial Sequence
  Description of Artificial Sequence: Synthetic oligonucleotide
  Sense strand starting at position 3063 of SEQ ID NO: 1882880
uucuuucugcacugagaac

SEQ ID NO: 2154455 - RNA, 19 nt, Artificial Sequence
  Description of Artificial Sequence: Synthetic oligonucleotide
  Antisense strand to SEQ ID NO: 2154454
guucucagugcagaaagaa

SEQ ID NO: 2154456 - RNA, 19 nt, Artificial Sequence
  Description of Artificial Sequence: Synthetic oligonucleotide
  Sense strand starting at position 3278 of SEQ ID NO: 1882880
uuucguguuccugaaagga

SEQ ID NO: 2154457 - RNA, 19 nt, Artificial Sequence
  Description of Artificial Sequence: Synthetic oligonucleotide
  Antisense strand to SEQ ID NO: 2154456
uccuuucaggaacacgaaa

SEQ ID NO: 2154458 - RNA, 19 nt, Artificial Sequence
  Description of Artificial Sequence: Synthetic oligonucleotide
  Sense strand starting at position 3321 of SEQ ID NO: 1882880
aggugacaguucccaaaug

SEQ ID NO: 2154459 - RNA, 19 nt, Artificial Sequence
  Description of Artificial Sequence: Synthetic oligonucleotide
  Antisense strand to SEQ ID NO: 2154458
cauuugggaacugucaccu

SEQ ID NO: 2154460 - RNA, 19 nt, Artificial Sequence
  Description of Artificial Sequence: Synthetic oligonucleotide
  Sense strand starting at position 3746 of SEQ ID NO: 1882880
uugacaucugaguagcuca

SEQ ID NO: 2154461 - RNA, 19 nt, Artificial Sequence
  Description of Artificial Sequence: Synthetic oligonucleotide
  Antisense strand to SEQ ID NO: 2154460
ugagcuacucagaugucaa

SEQ ID NO: 2154462 - RNA, 19 nt, Artificial Sequence
  Description of Artificial Sequence: Synthetic oligonucleotide
  Sense strand starting at position 3817 of SEQ ID NO: 1882880
ggcucaggaccgggauuau

SEQ ID NO: 2154463 - RNA, 19 nt, Artificial Sequence
  Description of Artificial Sequence: Synthetic oligonucleotide
  Antisense strand to SEQ ID NO: 2154462
auaaucccgguccugagcc

SEQ ID NO: 2154464 - RNA, 19 nt, Artificial Sequence
  Description of Artificial Sequence: Synthetic oligonucleotide
  Sense strand starting at position 3861 of SEQ ID NO: 1882880
auugcuuugggagguuaaa

SEQ ID NO: 2154465 - RNA, 19 nt, Artificial Sequence
  Description of Artificial Sequence: Synthetic oligonucleotide
  Antisense strand to SEQ ID NO: 2154464
uuuaaccucccaaagcaau

SEQ ID NO: 2154466 - RNA, 19 nt, Artificial Sequence
  Description of Artificial Sequence: Synthetic oligonucleotide
  Sense strand starting at position 3942 of SEQ ID NO: 1882880
gaagucuucugccuggaac

SEQ ID NO: 2154467 - RNA, 19 nt, Artificial Sequence
  Description of Artificial Sequence: Synthetic oligonucleotide
  Antisense strand to SEQ ID NO: 2154466
guuccaggcagaagacuuc

SEQ ID NO: 2154468 - RNA, 19 nt, Artificial Sequence
  Description of Artificial Sequence: Synthetic oligonucleotide
  Sense strand starting at position 5 of SEQ ID NO: 1882881
auaauaaaugcagagcuuu

SEQ ID NO: 2154469 - RNA, 19 nt, Artificial Sequence
  Description of Artificial Sequence: Synthetic oligonucleotide
  Antisense strand to SEQ ID NO: 2154468
aaagcucugcauuuauuau

SEQ ID NO: 2154470 - RNA, 19 nt, Artificial Sequence
  Description of Artificial Sequence: Synthetic oligonucleotide
  Sense strand starting at position 70 of SEQ ID NO: 1882881
cuguguuagacuuggaaug

SEQ ID NO: 2154471 - RNA, 19 nt, Artificial Sequence
  Description of Artificial Sequence: Synthetic oligonucleotide
  Antisense strand to SEQ ID NO: 2154470
cauuccaagucuaacacag

SEQ ID NO: 2154472 - RNA, 19 nt, Artificial Sequence
  Description of Artificial Sequence: Synthetic oligonucleotide
  Sense strand starting at position 88 of SEQ ID NO: 1882881
gugacaagaaugugugaua

SEQ ID NO: 2154473 - RNA, 19 nt, Artificial Sequence
  Description of Artificial Sequence: Synthetic oligonucleotide
  Antisense strand to SEQ ID NO: 2154472
uaucacacauucuugucac

SEQ ID NO: 2154474 - RNA, 19 nt, Artificial Sequence
  Description of Artificial Sequence: Synthetic oligonucleotide
  Sense strand starting at position 89 of SEQ ID NO: 1882881
ugacaagaaugugugauaa

SEQ ID NO: 2154475 - RNA, 19 nt, Artificial Sequence
  Description of Artificial Sequence: Synthetic oligonucleotide
  Antisense strand to SEQ ID NO: 2154474
uuaucacacauucuuguca

SEQ ID NO: 2154476 - RNA, 19 nt, Artificial Sequence
  Description of Artificial Sequence: Synthetic oligonucleotide
  Sense strand starting at position 123 of SEQ ID NO: 1882881
aguacuacugcaugagaua

SEQ ID NO: 2154477 - RNA, 19 nt, Artificial Sequence
  Description of Artificial Sequence: Synthetic oligonucleotide
  Antisense strand to SEQ ID NO: 2154476
uaucucaugcaguaguacu

SEQ ID NO: 2154478 - RNA, 19 nt, Artificial Sequence
  Description of Artificial Sequence: Synthetic oligonucleotide
  Sense strand starting at position 124 of SEQ ID NO: 1882881
guacuacugcaugagauau

SEQ ID NO: 2154479 - RNA, 19 nt, Artificial Sequence
  Description of Artificial Sequence: Synthetic oligonucleotide
  Antisense strand to SEQ ID NO: 2154478
auaucucaugcaguaguac

SEQ ID NO: 2154480 - RNA, 19 nt, Artificial Sequence
  Description of Artificial Sequence: Synthetic oligonucleotide
  Sense strand starting at position 135 of SEQ ID NO: 1882881
ugagauauccugcacaguc

SEQ ID NO: 2154481 - RNA, 19 nt, Artificial Sequence
  Description of Artificial Sequence: Synthetic oligonucleotide
  Antisense strand to SEQ ID NO: 2154480
gacugugcaggauaucuca

SEQ ID NO: 2154482 - RNA, 19 nt, Artificial Sequence
  Description of Artificial Sequence: Synthetic oligonucleotide
  Sense strand starting at position 155 of SEQ ID NO: 1882881
aggauagcaucuguccaga

SEQ ID NO: 2154483 - RNA, 19 nt, Artificial Sequence
  Description of Artificial Sequence: Synthetic oligonucleotide
  Antisense strand to SEQ ID NO: 2154482
ucuggacagaugcuauccu

SEQ ID NO: 2154484 - RNA, 19 nt, Artificial Sequence
  Description of Artificial Sequence: Synthetic oligonucleotide
  Sense strand starting at position 158 of SEQ ID NO: 1882881
auagcaucuguccagagga

SEQ ID NO: 2154485 - RNA, 19 nt, Artificial Sequence
  Description of Artificial Sequence: Synthetic oligonucleotide
  Antisense strand to SEQ ID NO: 2154484
uccucuggacagaugcuau

SEQ ID NO: 2154486 - RNA, 19 nt, Artificial Sequence
  Description of Artificial Sequence: Synthetic oligonucleotide
  Sense strand starting at position 216 of SEQ ID NO: 1882881
ugaauuuauguguggcugu

SEQ ID NO: 2154487 - RNA, 19 nt, Artificial Sequence
  Description of Artificial Sequence: Synthetic oligonucleotide
  Antisense strand to SEQ ID NO: 2154486
acagccacacauaaauuca

SEQ ID NO: 2154488 - RNA, 19 nt, Artificial Sequence
  Description of Artificial Sequence: Synthetic oligonucleotide
  Sense strand starting at position 259 of SEQ ID NO: 1882881
uuuauaccuugggucaaau

SEQ ID NO: 2154489 - RNA, 19 nt, Artificial Sequence
  Description of Artificial Sequence: Synthetic oligonucleotide
  Antisense strand to SEQ ID NO: 2154488
auuugacccaagguauaaa

SEQ ID NO: 2154490 - RNA, 19 nt, Artificial Sequence
  Description of Artificial Sequence: Synthetic oligonucleotide
  Sense strand starting at position 295 of SEQ ID NO: 1882881
agcuccuuucuggaaguaa

SEQ ID NO: 2154491 - RNA, 19 nt, Artificial Sequence
  Description of Artificial Sequence: Synthetic oligonucleotide
  Antisense strand to SEQ ID NO: 2154490
uuacuuccagaaaggagcu

SEQ ID NO: 2154492 - RNA, 19 nt, Artificial Sequence
  Description of Artificial Sequence: Synthetic oligonucleotide
  Sense strand starting at position 324 of SEQ ID NO: 1882881
uuuagaagauucguuaacu

SEQ ID NO: 2154493 - RNA, 19 nt, Artificial Sequence
  Description of Artificial Sequence: Synthetic oligonucleotide
  Antisense strand to SEQ ID NO: 2154492
aguuaacgaaucuucuaaa

SEQ ID NO: 2154494 - RNA, 19 nt, Artificial Sequence
  Description of Artificial Sequence: Synthetic oligonucleotide
  Sense strand starting at position 325 of SEQ ID NO: 1882881
uuagaagauucguuaacuc

SEQ ID NO: 2154495 - RNA, 19 nt, Artificial Sequence
  Description of Artificial Sequence: Synthetic oligonucleotide
  Antisense strand to SEQ ID NO: 2154494
gaguuaacgaaucuucuaa

SEQ ID NO: 2154496 - RNA, 19 nt, Artificial Sequence
  Description of Artificial Sequence: Synthetic oligonucleotide
  Sense strand starting at position 381 of SEQ ID NO: 1882881
uuagacuucccacagcgaa

SEQ ID NO: 2154497 - RNA, 19 nt, Artificial Sequence
  Description of Artificial Sequence: Synthetic oligonucleotide
  Antisense strand to SEQ ID NO: 2154496
uucgcugugggaagucuaa

SEQ ID NO: 2154498 - RNA, 19 nt, Artificial Sequence
  Description of Artificial Sequence: Synthetic oligonucleotide
  Sense strand starting at position 418 of SEQ ID NO: 1882881
ugauaucuuugagcugacu

SEQ ID NO: 2154499 - RNA, 19 nt, Artificial Sequence
  Description of Artificial Sequence: Synthetic oligonucleotide
  Antisense strand to SEQ ID NO: 2154498
agucagcucaaagauauca

SEQ ID NO: 2154500 - RNA, 19 nt, Artificial Sequence
  Description of Artificial Sequence: Synthetic oligonucleotide
  Sense strand starting at position 459 of SEQ ID NO: 1882881
acaggaauaugcuuucucu

SEQ ID NO: 2154501 - RNA, 19 nt, Artificial Sequence
  Description of Artificial Sequence: Synthetic oligonucleotide
  Antisense strand to SEQ ID NO: 2154500
agagaaagcauauuccugu

SEQ ID NO: 2154502 - RNA, 19 nt, Artificial Sequence
  Description of Artificial Sequence: Synthetic oligonucleotide
  Sense strand starting at position 478 of SEQ ID NO: 1882881
gccuaagaucuggguucca

SEQ ID NO: 2154503 - RNA, 19 nt, Artificial Sequence
  Description of Artificial Sequence: Synthetic oligonucleotide
  Antisense strand to SEQ ID NO: 2154502
uggaacccagaucuuaggc

SEQ ID NO: 2154504 - RNA, 19 nt, Artificial Sequence
  Description of Artificial Sequence: Synthetic oligonucleotide
  Sense strand starting at position 546 of SEQ ID NO: 1882881
ucggccagacaucaauaau

SEQ ID NO: 2154505 - RNA, 19 nt, Artificial Sequence
  Description of Artificial Sequence: Synthetic oligonucleotide
  Antisense strand to SEQ ID NO: 2154504
auuauugaugucuggccga

SEQ ID NO: 2154506 - RNA, 19 nt, Artificial Sequence
  Description of Artificial Sequence: Synthetic oligonucleotide
  Sense strand starting at position 549 of SEQ ID NO: 1882881
gccagacaucaauaauguc

SEQ ID NO: 2154507 - RNA, 19 nt, Artificial Sequence
  Description of Artificial Sequence: Synthetic oligonucleotide
  Antisense strand to SEQ ID NO: 2154506
gacauuauugaugucuggc

SEQ ID NO: 2154508 - RNA, 19 nt, Artificial Sequence
  Description of Artificial Sequence: Synthetic oligonucleotide
  Sense strand starting at position 688 of SEQ ID NO: 1882881
gauccauguggguagacau

SEQ ID NO: 2154509 - RNA, 19 nt, Artificial Sequence
  Description of Artificial Sequence: Synthetic oligonucleotide
  Antisense strand to SEQ ID NO: 2154508
augucuacccacauggauc

SEQ ID NO: 2154510 - RNA, 19 nt, Artificial Sequence
  Description of Artificial Sequence: Synthetic oligonucleotide
  Sense strand starting at position 822 of SEQ ID NO: 1882881
guuuguaggacucaaaguu

SEQ ID NO: 2154511 - RNA, 19 nt, Artificial Sequence
  Description of Artificial Sequence: Synthetic oligonucleotide
  Antisense strand to SEQ ID NO: 2154510
aacuuugaguccuacaaac

SEQ ID NO: 2154512 - RNA, 19 nt, Artificial Sequence
  Description of Artificial Sequence: Synthetic oligonucleotide
  Sense strand starting at position 985 of SEQ ID NO: 1882881
auagguaaucuuugacuug

SEQ ID NO: 2154513 - RNA, 19 nt, Artificial Sequence
  Description of Artificial Sequence: Synthetic oligonucleotide
  Antisense strand to SEQ ID NO: 2154512
caagucaaagauuaccuau

SEQ ID NO: 2154514 - RNA, 19 nt, Artificial Sequence
  Description of Artificial Sequence: Synthetic oligonucleotide
  Sense strand starting at position 988 of SEQ ID NO: 1882881
gguaaucuuugacuuguaa

SEQ ID NO: 2154515 - RNA, 19 nt, Artificial Sequence
  Description of Artificial Sequence: Synthetic oligonucleotide
  Antisense strand to SEQ ID NO: 2154514
uuacaagucaaagauuacc

SEQ ID NO: 2154516 - RNA, 19 nt, Artificial Sequence
  Description of Artificial Sequence: Synthetic oligonucleotide
  Sense strand starting at position 1097 of SEQ ID NO: 1882881
ccuaauucccuacgaugaa

SEQ ID NO: 2154517 - RNA, 19 nt, Artificial Sequence
  Description of Artificial Sequence: Synthetic oligonucleotide
  Antisense strand to SEQ ID NO: 2154516
uucaucguagggaauuagg

SEQ ID NO: 2154518 - RNA, 19 nt, Artificial Sequence
  Description of Artificial Sequence: Synthetic oligonucleotide
  Sense strand starting at position 1300 of SEQ ID NO: 1882881
cccugugcgcccucaaauu

SEQ ID NO: 2154519 - RNA, 19 nt, Artificial Sequence
  Description of Artificial Sequence: Synthetic oligonucleotide
  Antisense strand to SEQ ID NO: 2154518
aauuugagggcgcacaggg

SEQ ID NO: 2154520 - RNA, 19 nt, Artificial Sequence
  Description of Artificial Sequence: Synthetic oligonucleotide
  Sense strand starting at position 1459 of SEQ ID NO: 1882881
cacaaacgucgcuaggaaa

SEQ ID NO: 2154521 - RNA, 19 nt, Artificial Sequence
  Description of Artificial Sequence: Synthetic oligonucleotide
  Antisense strand to SEQ ID NO: 2154520
uuuccuagcgacguuugug

SEQ ID NO: 2154522 - RNA, 19 nt, Artificial Sequence
  Description of Artificial Sequence: Synthetic oligonucleotide
  Sense strand starting at position 1603 of SEQ ID NO: 1882881
gugcuaaaucagcauuugu

SEQ ID NO: 2154523 - RNA, 19 nt, Artificial Sequence
  Description of Artificial Sequence: Synthetic oligonucleotide
  Antisense strand to SEQ ID NO: 2154522
acaaaugcugauuuagcac

SEQ ID NO: 2154524 - RNA, 19 nt, Artificial Sequence
  Description of Artificial Sequence: Synthetic oligonucleotide
  Sense strand starting at position 1670 of SEQ ID NO: 1882881
cuguguugugccagagguu

SEQ ID NO: 2154525 - RNA, 19 nt, Artificial Sequence
  Description of Artificial Sequence: Synthetic oligonucleotide
  Antisense strand to SEQ ID NO: 2154524
aaccucuggcacaacacag

SEQ ID NO: 2154526 - RNA, 19 nt, Artificial Sequence
  Description of Artificial Sequence: Synthetic oligonucleotide
  Sense strand starting at position 1687 of SEQ ID NO: 1882881
uucugaugauaggcuuaua

SEQ ID NO: 2154527 - RNA, 19 nt, Artificial Sequence
  Description of Artificial Sequence: Synthetic oligonucleotide
  Antisense strand to SEQ ID NO: 2154526
uauaagccuaucaucagaa

SEQ ID NO: 2154528 - RNA, 19 nt, Artificial Sequence
  Description of Artificial Sequence: Synthetic oligonucleotide
  Sense strand starting at position 2364 of SEQ ID NO: 1882881
gugguuaccgguaguuaag

SEQ ID NO: 2154529 - RNA, 19 nt, Artificial Sequence
  Description of Artificial Sequence: Synthetic oligonucleotide
  Antisense strand to SEQ ID NO: 2154528
cuuaacuaccgguaaccac

SEQ ID NO: 2154530 - RNA, 19 nt, Artificial Sequence
  Description of Artificial Sequence: Synthetic oligonucleotide
  Sense strand starting at position 2643 of SEQ ID NO: 1882881
ggguuucugcagcagaauc

SEQ ID NO: 2154531 - RNA, 19 nt, Artificial Sequence
  Description of Artificial Sequence: Synthetic oligonucleotide
  Antisense strand to SEQ ID NO: 2154530
gauucugcugcagaaaccc

SEQ ID NO: 2154532 - RNA, 19 nt, Artificial Sequence
  Description of Artificial Sequence: Synthetic oligonucleotide
  Sense strand starting at position 3403 of SEQ ID NO: 1882881
gaucgucguggugagauuu

SEQ ID NO: 2154533 - RNA, 19 nt, Artificial Sequence
  Description of Artificial Sequence: Synthetic oligonucleotide
  Antisense strand to SEQ ID NO: 2154532
aaaucucaccacgacgauc

SEQ ID NO: 2154534 - RNA, 19 nt, Artificial Sequence
  Description of Artificial Sequence: Synthetic oligonucleotide
  Sense strand starting at position 3411 of SEQ ID NO: 1882881
uggugagauuuaggauuuc

SEQ ID NO: 2154535 - RNA, 19 nt, Artificial Sequence
  Description of Artificial Sequence: Synthetic oligonucleotide
  Antisense strand to SEQ ID NO: 2154534
gaaauccuaaaucucacca

SEQ ID NO: 2154536 - RNA, 19 nt, Artificial Sequence
  Description of Artificial Sequence: Synthetic oligonucleotide
  Sense strand starting at position 3437 of SEQ ID NO: 1882881
cagcgucaucuugauauga

SEQ ID NO: 2154537 - RNA, 19 nt, Artificial Sequence
  Description of Artificial Sequence: Synthetic oligonucleotide
  Antisense strand to SEQ ID NO: 2154536
ucauaucaagaugacgcug

SEQ ID NO: 2154538 - RNA, 19 nt, Artificial Sequence
  Description of Artificial Sequence: Synthetic oligonucleotide
  Sense strand starting at position 3485 of SEQ ID NO: 1882881
ccugaugcgaauugggauu

SEQ ID NO: 2154539 - RNA, 19 nt, Artificial Sequence
  Description of Artificial Sequence: Synthetic oligonucleotide
  Antisense strand to SEQ ID NO: 2154538
aaucccaauucgcaucagg

SEQ ID NO: 2154540 - RNA, 19 nt, Artificial Sequence
  Description of Artificial Sequence: Synthetic oligonucleotide
  Sense strand starting at position 3554 of SEQ ID NO: 1882881
auugcugcagcaugauuua

SEQ ID NO: 2154541 - RNA, 19 nt, Artificial Sequence
  Description of Artificial Sequence: Synthetic oligonucleotide
  Antisense strand to SEQ ID NO: 2154540
uaaaucaugcugcagcaau

SEQ ID NO: 2154542 - RNA, 19 nt, Artificial Sequence
  Description of Artificial Sequence: Synthetic oligonucleotide
  Sense strand starting at position 3687 of SEQ ID NO: 1882881
uuuauagaucccggcaaag

SEQ ID NO: 2154543 - RNA, 19 nt, Artificial Sequence
  Description of Artificial Sequence: Synthetic oligonucleotide
  Antisense strand to SEQ ID NO: 2154542
cuuugccgggaucuauaaa

SEQ ID NO: 2154544 - RNA, 19 nt, Artificial Sequence
  Description of Artificial Sequence: Synthetic oligonucleotide
  Sense strand starting at position 3745 of SEQ ID NO: 1882881
ucuggugcgacuuaaagga

SEQ ID NO: 2154545 - RNA, 19 nt, Artificial Sequence
  Description of Artificial Sequence: Synthetic oligonucleotide
  Antisense strand to SEQ ID NO: 2154544
uccuuuaagucgcaccaga

SEQ ID NO: 2154546 - RNA, 19 nt, Artificial Sequence
  Description of Artificial Sequence: Synthetic oligonucleotide
  Sense strand starting at position 3946 of SEQ ID NO: 1882881
ccgucagccgccuuaagua

SEQ ID NO: 2154547 - RNA, 19 nt, Artificial Sequence
  Description of Artificial Sequence: Synthetic oligonucleotide
  Antisense strand to SEQ ID NO: 2154546
uacuuaaggcggcugacgg

SEQ ID NO: 2154548 - RNA, 19 nt, Artificial Sequence
  Description of Artificial Sequence: Synthetic oligonucleotide
  Sense strand starting at position 2 of SEQ ID NO: 1882882
ucuacagaagugugaacuu

SEQ ID NO: 2154549 - RNA, 19 nt, Artificial Sequence
  Description of Artificial Sequence: Synthetic oligonucleotide
  Antisense strand to SEQ ID NO: 2154548
aaguucacacuucuguaga

SEQ ID NO: 2154550 - RNA, 19 nt, Artificial Sequence
  Description of Artificial Sequence: Synthetic oligonucleotide
  Sense strand starting at position 47 of SEQ ID NO: 1882882
gagagcuauuugccaugca

SEQ ID NO: 2154551 - RNA, 19 nt, Artificial Sequence
  Description of Artificial Sequence: Synthetic oligonucleotide
  Antisense strand to SEQ ID NO: 2154550
ugcauggcaaauagcucuc

SEQ ID NO: 2154552 - RNA, 19 nt, Artificial Sequence
  Description of Artificial Sequence: Synthetic oligonucleotide
  Sense strand starting at position 101 of SEQ ID NO: 1882882
cuaagauuaugacaaugau

SEQ ID NO: 2154553 - RNA, 19 nt, Artificial Sequence
  Description of Artificial Sequence: Synthetic oligonucleotide
  Antisense strand to SEQ ID NO: 2154552
aucauugucauaaucuuag

SEQ ID NO: 2154554 - RNA, 19 nt, Artificial Sequence
  Description of Artificial Sequence: Synthetic oligonucleotide
  Sense strand starting at position 121 of SEQ ID NO: 1882882
gcaagcuaucgcuugcaga

SEQ ID NO: 2154555 - RNA, 19 nt, Artificial Sequence
  Description of Artificial Sequence: Synthetic oligonucleotide
  Antisense strand to SEQ ID NO: 2154554
ucugcaagcgauagcuugc

SEQ ID NO: 2154556 - RNA, 19 nt, Artificial Sequence
  Description of Artificial Sequence: Synthetic oligonucleotide
  Sense strand starting at position 177 of SEQ ID NO: 1882882
agguguuuggaccauguuu

SEQ ID NO: 2154557 - RNA, 19 nt, Artificial Sequence
  Description of Artificial Sequence: Synthetic oligonucleotide
  Antisense strand to SEQ ID NO: 2154556
aaacaugguccaaacaccu

SEQ ID NO: 2154558 - RNA, 19 nt, Artificial Sequence
  Description of Artificial Sequence: Synthetic oligonucleotide
  Sense strand starting at position 179 of SEQ ID NO: 1882882
guguuuggaccauguuuac

SEQ ID NO: 2154559 - RNA, 19 nt, Artificial Sequence
  Description of Artificial Sequence: Synthetic oligonucleotide
  Antisense strand to SEQ ID NO: 2154558
guaaacaugguccaaacac

SEQ ID NO: 2154560 - RNA, 19 nt, Artificial Sequence
  Description of Artificial Sequence: Synthetic oligonucleotide
  Sense strand starting at position 188 of SEQ ID NO: 1882882
ccauguuuaccagaagcaa

SEQ ID NO: 2154561 - RNA, 19 nt, Artificial Sequence
  Description of Artificial Sequence: Synthetic oligonucleotide
  Antisense strand to SEQ ID NO: 2154560
uugcuucugguaaacaugg

SEQ ID NO: 2154562 - RNA, 19 nt, Artificial Sequence
  Description of Artificial Sequence: Synthetic oligonucleotide
  Sense strand starting at position 223 of SEQ ID NO: 1882882
gccaauagcccauauagau

SEQ ID NO: 2154563 - RNA, 19 nt, Artificial Sequence
  Description of Artificial Sequence: Synthetic oligonucleotide
  Antisense strand to SEQ ID NO: 2154562
aucuauaugggcuauuggc

SEQ ID NO: 2154564 - RNA, 19 nt, Artificial Sequence
  Description of Artificial Sequence: Synthetic oligonucleotide
  Sense strand starting at position 253 of SEQ ID NO: 1882882
uuuaaagggucagagagua

SEQ ID NO: 2154565 - RNA, 19 nt, Artificial Sequence
  Description of Artificial Sequence: Synthetic oligonucleotide
  Antisense strand to SEQ ID NO: 2154564
uacucucugacccuuuaaa

SEQ ID NO: 2154566 - RNA, 19 nt, Artificial Sequence
  Description of Artificial Sequence: Synthetic oligonucleotide
  Sense strand starting at position 267 of SEQ ID NO: 1882882
gaguaauacuugcuagaca

SEQ ID NO: 2154567 - RNA, 19 nt, Artificial Sequence
  Description of Artificial Sequence: Synthetic oligonucleotide
  Antisense strand to SEQ ID NO: 2154566
ugucuagcaaguauuacuc

SEQ ID NO: 2154568 - RNA, 19 nt, Artificial Sequence
  Description of Artificial Sequence: Synthetic oligonucleotide
  Sense strand starting at position 445 of SEQ ID NO: 1882882
uccuguuuccuguaaguau

SEQ ID NO: 2154569 - RNA, 19 nt, Artificial Sequence
  Description of Artificial Sequence: Synthetic oligonucleotide
  Antisense strand to SEQ ID NO: 2154568
auacuuacaggaaacagga

SEQ ID NO: 2154570 - RNA, 19 nt, Artificial Sequence
  Description of Artificial Sequence: Synthetic oligonucleotide
  Sense strand starting at position 463 of SEQ ID NO: 1882882
ugguguauuucccaaacca

SEQ ID NO: 2154571 - RNA, 19 nt, Artificial Sequence
  Description of Artificial Sequence: Synthetic oligonucleotide
  Antisense strand to SEQ ID NO: 2154570
ugguuugggaaauacacca

SEQ ID NO: 2154572 - RNA, 19 nt, Artificial Sequence
  Description of Artificial Sequence: Synthetic oligonucleotide
  Sense strand starting at position 489 of SEQ ID NO: 1882882
gguauauuggcuugcuuaa

SEQ ID NO: 2154573 - RNA, 19 nt, Artificial Sequence
  Description of Artificial Sequence: Synthetic oligonucleotide
  Antisense strand to SEQ ID NO: 2154572
uuaagcaagccaauauacc

SEQ ID NO: 2154574 - RNA, 19 nt, Artificial Sequence
  Description of Artificial Sequence: Synthetic oligonucleotide
  Sense strand starting at position 498 of SEQ ID NO: 1882882
gcuugcuuaagggauagaa

SEQ ID NO: 2154575 - RNA, 19 nt, Artificial Sequence
  Description of Artificial Sequence: Synthetic oligonucleotide
  Antisense strand to SEQ ID NO: 2154574
uucuaucccuuaagcaagc

SEQ ID NO: 2154576 - RNA, 19 nt, Artificial Sequence
  Description of Artificial Sequence: Synthetic oligonucleotide
  Sense strand starting at position 552 of SEQ ID NO: 1882882
gcuagaacacuugaucucu

SEQ ID NO: 2154577 - RNA, 19 nt, Artificial Sequence
  Description of Artificial Sequence: Synthetic oligonucleotide
  Antisense strand to SEQ ID NO: 2154576
agagaucaaguguucuagc

SEQ ID NO: 2154578 - RNA, 19 nt, Artificial Sequence
  Description of Artificial Sequence: Synthetic oligonucleotide
  Sense strand starting at position 611 of SEQ ID NO: 1882882
cauagaguacuuugugcuu

SEQ ID NO: 2154579 - RNA, 19 nt, Artificial Sequence
  Description of Artificial Sequence: Synthetic oligonucleotide
  Antisense strand to SEQ ID NO: 2154578
aagcacaaaguacucuaug

SEQ ID NO: 2154580 - RNA, 19 nt, Artificial Sequence
  Description of Artificial Sequence: Synthetic oligonucleotide
  Sense strand starting at position 614 of SEQ ID NO: 1882882
agaguacuuugugcuuaug

SEQ ID NO: 2154581 - RNA, 19 nt, Artificial Sequence
  Description of Artificial Sequence: Synthetic oligonucleotide
  Antisense strand to SEQ ID NO: 2154580
cauaagcacaaaguacucu

SEQ ID NO: 2154582 - RNA, 19 nt, Artificial Sequence
  Description of Artificial Sequence: Synthetic oligonucleotide
  Sense strand starting at position 616 of SEQ ID NO: 1882882
aguacuuugugcuuaugaa

SEQ ID NO: 2154583 - RNA, 19 nt, Artificial Sequence
  Description of Artificial Sequence: Synthetic oligonucleotide
  Antisense strand to SEQ ID NO: 2154582
uucauaagcacaaaguacu

SEQ ID NO: 2154584 - RNA, 19 nt, Artificial Sequence
  Description of Artificial Sequence: Synthetic oligonucleotide
  Sense strand starting at position 617 of SEQ ID NO: 1882882
guacuuugugcuuaugaag

SEQ ID NO: 2154585 - RNA, 19 nt, Artificial Sequence
  Description of Artificial Sequence: Synthetic oligonucleotide
  Antisense strand to SEQ ID NO: 2154584
cuucauaagcacaaaguac

SEQ ID NO: 2154586 - RNA, 19 nt, Artificial Sequence
  Description of Artificial Sequence: Synthetic oligonucleotide
  Sense strand starting at position 672 of SEQ ID NO: 1882882
cugcaaguaucagucuaau

SEQ ID NO: 2154587 - RNA, 19 nt, Artificial Sequence
  Description of Artificial Sequence: Synthetic oligonucleotide
  Antisense strand to SEQ ID NO: 2154586
auuagacugauacuugcag

SEQ ID NO: 2154588 - RNA, 19 nt, Artificial Sequence
  Description of Artificial Sequence: Synthetic oligonucleotide
  Sense strand starting at position 2151 of SEQ ID NO: 1882882
ccauguguugccuauagau

SEQ ID NO: 2154589 - RNA, 19 nt, Artificial Sequence
  Description of Artificial Sequence: Synthetic oligonucleotide
  Antisense strand to SEQ ID NO: 2154588
aucuauaggcaacacaugg

SEQ ID NO: 2154590 - RNA, 19 nt, Artificial Sequence
  Description of Artificial Sequence: Synthetic oligonucleotide
  Sense strand starting at position 2153 of SEQ ID NO: 1882882
auguguugccuauagauca

SEQ ID NO: 2154591 - RNA, 19 nt, Artificial Sequence
  Description of Artificial Sequence: Synthetic oligonucleotide
  Antisense strand to SEQ ID NO: 2154590
ugaucuauaggcaacacau

SEQ ID NO: 2154592 - RNA, 19 nt, Artificial Sequence
  Description of Artificial Sequence: Synthetic oligonucleotide
  Sense strand starting at position 2167 of SEQ ID NO: 1882882
gaucacuugcuccgucuau

SEQ ID NO: 2154593 - RNA, 19 nt, Artificial Sequence
  Description of Artificial Sequence: Synthetic oligonucleotide
  Antisense strand to SEQ ID NO: 2154592
auagacggagcaagugauc

SEQ ID NO: 2154594 - RNA, 19 nt, Artificial Sequence
  Description of Artificial Sequence: Synthetic oligonucleotide
  Sense strand starting at position 2171 of SEQ ID NO: 1882882
acuugcuccgucuaucaca

SEQ ID NO: 2154595 - RNA, 19 nt, Artificial Sequence
  Description of Artificial Sequence: Synthetic oligonucleotide
  Antisense strand to SEQ ID NO: 2154594
ugugauagacggagcaagu

SEQ ID NO: 2154596 - RNA, 19 nt, Artificial Sequence
  Description of Artificial Sequence: Synthetic oligonucleotide
  Sense strand starting at position 2260 of SEQ ID NO: 1882882
cgguucuugagacacaagu

SEQ ID NO: 2154597 - RNA, 19 nt, Artificial Sequence
  Description of Artificial Sequence: Synthetic oligonucleotide
  Antisense strand to SEQ ID NO: 2154596
acuugugucucaagaaccg

SEQ ID NO: 2154598 - RNA, 19 nt, Artificial Sequence
  Description of Artificial Sequence: Synthetic oligonucleotide
  Sense strand starting at position 2363 of SEQ ID NO: 1882882
aguacaucauagcugaaau

SEQ ID NO: 2154599 - RNA, 19 nt, Artificial Sequence
  Description of Artificial Sequence: Synthetic oligonucleotide
  Antisense strand to SEQ ID NO: 2154598
auuucagcuaugauguacu

SEQ ID NO: 2154600 - RNA, 19 nt, Artificial Sequence
  Description of Artificial Sequence: Synthetic oligonucleotide
  Sense strand starting at position 2431 of SEQ ID NO: 1882882
cauuaaagauagggagaaa

SEQ ID NO: 2154601 - RNA, 19 nt, Artificial Sequence
  Description of Artificial Sequence: Synthetic oligonucleotide
  Antisense strand to SEQ ID NO: 2154600
uuucucccuaucuuuaaug

SEQ ID NO: 2154602 - RNA, 19 nt, Artificial Sequence
  Description of Artificial Sequence: Synthetic oligonucleotide
  Sense strand starting at position 2711 of SEQ ID NO: 1882882
guggauaugccagaaguag

SEQ ID NO: 2154603 - RNA, 19 nt, Artificial Sequence
  Description of Artificial Sequence: Synthetic oligonucleotide
  Antisense strand to SEQ ID NO: 2154602
cuacuucuggcauauccac

SEQ ID NO: 2154604 - RNA, 19 nt, Artificial Sequence
  Description of Artificial Sequence: Synthetic oligonucleotide
  Sense strand starting at position 2766 of SEQ ID NO: 1882882
uuuggauugccacagguca

SEQ ID NO: 2154605 - RNA, 19 nt, Artificial Sequence
  Description of Artificial Sequence: Synthetic oligonucleotide
  Antisense strand to SEQ ID NO: 2154604
ugaccuguggcaauccaaa

SEQ ID NO: 2154606 - RNA, 19 nt, Artificial Sequence
  Description of Artificial Sequence: Synthetic oligonucleotide
  Sense strand starting at position 2898 of SEQ ID NO: 1882882
cggaaacauccugacuucu

SEQ ID NO: 2154607 - RNA, 19 nt, Artificial Sequence
  Description of Artificial Sequence: Synthetic oligonucleotide
  Antisense strand to SEQ ID NO: 2154606
agaagucaggauguuuccg

SEQ ID NO: 2154608 - RNA, 19 nt, Artificial Sequence
  Description of Artificial Sequence: Synthetic oligonucleotide
  Sense strand starting at position 2944 of SEQ ID NO: 1882882
guauuauaauuggaaacag

SEQ ID NO: 2154609 - RNA, 19 nt, Artificial Sequence
  Description of Artificial Sequence: Synthetic oligonucleotide
  Antisense strand to SEQ ID NO: 2154608
cuguuuccaauuauaauac

SEQ ID NO: 2154610 - RNA, 19 nt, Artificial Sequence
  Description of Artificial Sequence: Synthetic oligonucleotide
  Sense strand starting at position 3673 of SEQ ID NO: 1882882
aggaguaaauaagcuauua

SEQ ID NO: 2154611 - RNA, 19 nt, Artificial Sequence
  Description of Artificial Sequence: Synthetic oligonucleotide
  Antisense strand to SEQ ID NO: 2154610
uaauagcuuauuuacuccu

SEQ ID NO: 2154612 - RNA, 19 nt, Artificial Sequence
  Description of Artificial Sequence: Synthetic oligonucleotide
  Sense strand starting at position 3685 of SEQ ID NO: 1882882
gcuauuagaagagguaaga

SEQ ID NO: 2154613 - RNA, 19 nt, Artificial Sequence
  Description of Artificial Sequence: Synthetic oligonucleotide
  Antisense strand to SEQ ID NO: 2154612
ucuuaccucuucuaauagc

SEQ ID NO: 2154614 - RNA, 19 nt, Artificial Sequence
  Description of Artificial Sequence: Synthetic oligonucleotide
  Sense strand starting at position 3731 of SEQ ID NO: 1882882
ucacuuucgaggcagaguu

SEQ ID NO: 2154615 - RNA, 19 nt, Artificial Sequence
  Description of Artificial Sequence: Synthetic oligonucleotide
  Antisense strand to SEQ ID NO: 2154614
aacucugccucgaaaguga

SEQ ID NO: 2154616 - RNA, 19 nt, Artificial Sequence
  Description of Artificial Sequence: Synthetic oligonucleotide
  Sense strand starting at position 3788 of SEQ ID NO: 1882882
aguggagucuuccauuuga

SEQ ID NO: 2154617 - RNA, 19 nt, Artificial Sequence
  Description of Artificial Sequence: Synthetic oligonucleotide
  Antisense strand to SEQ ID NO: 2154616
ucaaauggaagacuccacu

SEQ ID NO: 2154618 - RNA, 19 nt, Artificial Sequence
  Description of Artificial Sequence: Synthetic oligonucleotide
  Sense strand starting at position 3805 of SEQ ID NO: 1882882
gaauacugaugacaguaaa

SEQ ID NO: 2154619 - RNA, 19 nt, Artificial Sequence
  Description of Artificial Sequence: Synthetic oligonucleotide
  Antisense strand to SEQ ID NO: 2154618
uuuacugucaucaguauuc

SEQ ID NO: 2154620 - RNA, 19 nt, Artificial Sequence
  Description of Artificial Sequence: Synthetic oligonucleotide
  Sense strand starting at position 3869 of SEQ ID NO: 1882882
gugaacauaugcucuacuu

SEQ ID NO: 2154621 - RNA, 19 nt, Artificial Sequence
  Description of Artificial Sequence: Synthetic oligonucleotide
  Antisense strand to SEQ ID NO: 2154620
aaguagagcauauguucac

SEQ ID NO: 2154622 - RNA, 19 nt, Artificial Sequence
  Description of Artificial Sequence: Synthetic oligonucleotide
  Sense strand starting at position 3932 of SEQ ID NO: 1882882
ucagauagauauccugguu

SEQ ID NO: 2154623 - RNA, 19 nt, Artificial Sequence
  Description of Artificial Sequence: Synthetic oligonucleotide
  Antisense strand to SEQ ID NO: 2154622
aaccaggauaucuaucuga

SEQ ID NO: 2154624 - RNA, 19 nt, Artificial Sequence
  Description of Artificial Sequence: Synthetic oligonucleotide
  Sense strand starting at position 3966 of SEQ ID NO: 1882882
acugauaacguuugauaga

SEQ ID NO: 2154625 - RNA, 19 nt, Artificial Sequence
  Description of Artificial Sequence: Synthetic oligonucleotide
  Antisense strand to SEQ ID NO: 2154624
ucuaucaaacguuaucagu

SEQ ID NO: 2154626 - RNA, 19 nt, Artificial Sequence
  Description of Artificial Sequence: Synthetic oligonucleotide
  Sense strand starting at position 3969 of SEQ ID NO: 1882882
gauaacguuugauagauuu

SEQ ID NO: 2154627 - RNA, 19 nt, Artificial Sequence
  Description of Artificial Sequence: Synthetic oligonucleotide
  Antisense strand to SEQ ID NO: 2154626
aaaucuaucaaacguuauc

SEQ ID NO: 2154628 - RNA, 19 nt, Artificial Sequence
  Description of Artificial Sequence: Synthetic oligonucleotide
  Sense strand starting at position 178 of SEQ ID NO: 1882883
ggagaugacugucugguac

SEQ ID NO: 2154629 - RNA, 19 nt, Artificial Sequence
  Description of Artificial Sequence: Synthetic oligonucleotide
  Antisense strand to SEQ ID NO: 2154628
guaccagacagucaucucc

SEQ ID NO: 2154630 - RNA, 19 nt, Artificial Sequence
  Description of Artificial Sequence: Synthetic oligonucleotide
  Sense strand starting at position 280 of SEQ ID NO: 1882883
uucuuauaguggcucauga

SEQ ID NO: 2154631 - RNA, 19 nt, Artificial Sequence
  Description of Artificial Sequence: Synthetic oligonucleotide
  Antisense strand to SEQ ID NO: 2154630
ucaugagccacuauaagaa

SEQ ID NO: 2154632 - RNA, 19 nt, Artificial Sequence
  Description of Artificial Sequence: Synthetic oligonucleotide
  Sense strand starting at position 282 of SEQ ID NO: 1882883
cuuauaguggcucaugauc

SEQ ID NO: 2154633 - RNA, 19 nt, Artificial Sequence
  Description of Artificial Sequence: Synthetic oligonucleotide
  Antisense strand to SEQ ID NO: 2154632
gaucaugagccacuauaag

SEQ ID NO: 2154634 - RNA, 19 nt, Artificial Sequence
  Description of Artificial Sequence: Synthetic oligonucleotide
  Sense strand starting at position 338 of SEQ ID NO: 1882883
gccacaauggcauaugcuu

SEQ ID NO: 2154635 - RNA, 19 nt, Artificial Sequence
  Description of Artificial Sequence: Synthetic oligonucleotide
  Antisense strand to SEQ ID NO: 2154634
aagcauaugccauuguggc

SEQ ID NO: 2154636 - RNA, 19 nt, Artificial Sequence
  Description of Artificial Sequence: Synthetic oligonucleotide
  Sense strand starting at position 467 of SEQ ID NO: 1882883
acuugagugcuggauaaca

SEQ ID NO: 2154637 - RNA, 19 nt, Artificial Sequence
  Description of Artificial Sequence: Synthetic oligonucleotide
  Antisense strand to SEQ ID NO: 2154636
uguuauccagcacucaagu

SEQ ID NO: 2154638 - RNA, 19 nt, Artificial Sequence
  Description of Artificial Sequence: Synthetic oligonucleotide
  Sense strand starting at position 469 of SEQ ID NO: 1882883
uugagugcuggauaacacu

SEQ ID NO: 2154639 - RNA, 19 nt, Artificial Sequence
  Description of Artificial Sequence: Synthetic oligonucleotide
  Antisense strand to SEQ ID NO: 2154638
aguguuauccagcacucaa

SEQ ID NO: 2154640 - RNA, 19 nt, Artificial Sequence
  Description of Artificial Sequence: Synthetic oligonucleotide
  Sense strand starting at position 573 of SEQ ID NO: 1882883
ugaacagcaguuuauuauu

SEQ ID NO: 2154641 - RNA, 19 nt, Artificial Sequence
  Description of Artificial Sequence: Synthetic oligonucleotide
  Antisense strand to SEQ ID NO: 2154640
aauaauaaacugcuguuca

SEQ ID NO: 2154642 - RNA, 19 nt, Artificial Sequence
  Description of Artificial Sequence: Synthetic oligonucleotide
  Sense strand starting at position 625 of SEQ ID NO: 1882883
aggaaaugacucuguuguc

SEQ ID NO: 2154643 - RNA, 19 nt, Artificial Sequence
  Description of Artificial Sequence: Synthetic oligonucleotide
  Antisense strand to SEQ ID NO: 2154642
gacaacagagucauuuccu

SEQ ID NO: 2154644 - RNA, 19 nt, Artificial Sequence
  Description of Artificial Sequence: Synthetic oligonucleotide
  Sense strand starting at position 705 of SEQ ID NO: 1882883
uccuacuacgaguaaauca

SEQ ID NO: 2154645 - RNA, 19 nt, Artificial Sequence
  Description of Artificial Sequence: Synthetic oligonucleotide
  Antisense strand to SEQ ID NO: 2154644
ugauuuacucguaguagga

SEQ ID NO: 2154646 - RNA, 19 nt, Artificial Sequence
  Description of Artificial Sequence: Synthetic oligonucleotide
  Sense strand starting at position 713 of SEQ ID NO: 1882883
cgaguaaaucaauguuagg

SEQ ID NO: 2154647 - RNA, 19 nt, Artificial Sequence
  Description of Artificial Sequence: Synthetic oligonucleotide
  Antisense strand to SEQ ID NO: 2154646
ccuaacauugauuuacucg

SEQ ID NO: 2154648 - RNA, 19 nt, Artificial Sequence
  Description of Artificial Sequence: Synthetic oligonucleotide
  Sense strand starting at position 1082 of SEQ ID NO: 1882883
augccaaaguaaucagacu

SEQ ID NO: 2154649 - RNA, 19 nt, Artificial Sequence
  Description of Artificial Sequence: Synthetic oligonucleotide
  Antisense strand to SEQ ID NO: 2154648
agucugauuacuuuggcau

SEQ ID NO: 2154650 - RNA, 19 nt, Artificial Sequence
  Description of Artificial Sequence: Synthetic oligonucleotide
  Sense strand starting at position 1090 of SEQ ID NO: 1882883
guaaucagacuauaccagu

SEQ ID NO: 2154651 - RNA, 19 nt, Artificial Sequence
  Description of Artificial Sequence: Synthetic oligonucleotide
  Antisense strand to SEQ ID NO: 2154650
acugguauagucugauuac

SEQ ID NO: 2154652 - RNA, 19 nt, Artificial Sequence
  Description of Artificial Sequence: Synthetic oligonucleotide
  Sense strand starting at position 1096 of SEQ ID NO: 1882883
agacuauaccaguagcuca

SEQ ID NO: 2154653 - RNA, 19 nt, Artificial Sequence
  Description of Artificial Sequence: Synthetic oligonucleotide
  Antisense strand to SEQ ID NO: 2154652
ugagcuacugguauagucu

SEQ ID NO: 2154654 - RNA, 19 nt, Artificial Sequence
  Description of Artificial Sequence: Synthetic oligonucleotide
  Sense strand starting at position 1119 of SEQ ID NO: 1882883
augucuggucaccaaguaa

SEQ ID NO: 2154655 - RNA, 19 nt, Artificial Sequence
  Description of Artificial Sequence: Synthetic oligonucleotide
  Antisense strand to SEQ ID NO: 2154654
uuacuuggugaccagacau

SEQ ID NO: 2154656 - RNA, 19 nt, Artificial Sequence
  Description of Artificial Sequence: Synthetic oligonucleotide
  Sense strand starting at position 1209 of SEQ ID NO: 1882883
ggaugugaauaacuucuaa

SEQ ID NO: 2154657 - RNA, 19 nt, Artificial Sequence
  Description of Artificial Sequence: Synthetic oligonucleotide
  Antisense strand to SEQ ID NO: 2154656
uuagaaguuauucacaucc

SEQ ID NO: 2154658 - RNA, 19 nt, Artificial Sequence
  Description of Artificial Sequence: Synthetic oligonucleotide
  Sense strand starting at position 1228 of SEQ ID NO: 1882883
acuggucagccuuggacaa

SEQ ID NO: 2154659 - RNA, 19 nt, Artificial Sequence
  Description of Artificial Sequence: Synthetic oligonucleotide
  Antisense strand to SEQ ID NO: 2154658
uuguccaaggcugaccagu

SEQ ID NO: 2154660 - RNA, 19 nt, Artificial Sequence
  Description of Artificial Sequence: Synthetic oligonucleotide
  Sense strand starting at position 1229 of SEQ ID NO: 1882883
cuggucagccuuggacaaa

SEQ ID NO: 2154661 - RNA, 19 nt, Artificial Sequence
  Description of Artificial Sequence: Synthetic oligonucleotide
  Antisense strand to SEQ ID NO: 2154660
uuuguccaaggcugaccag

SEQ ID NO: 2154662 - RNA, 19 nt, Artificial Sequence
  Description of Artificial Sequence: Synthetic oligonucleotide
  Sense strand starting at position 1263 of SEQ ID NO: 1882883
cucgacuuggccugagaga

SEQ ID NO: 2154663 - RNA, 19 nt, Artificial Sequence
  Description of Artificial Sequence: Synthetic oligonucleotide
  Antisense strand to SEQ ID NO: 2154662
ucucucaggccaagucgag

SEQ ID NO: 2154664 - RNA, 19 nt, Artificial Sequence
  Description of Artificial Sequence: Synthetic oligonucleotide
  Sense strand starting at position 1264 of SEQ ID NO: 1882883
ucgacuuggccugagagaa

SEQ ID NO: 2154665 - RNA, 19 nt, Artificial Sequence
  Description of Artificial Sequence: Synthetic oligonucleotide
  Antisense strand to SEQ ID NO: 2154664
uucucucaggccaagucga

SEQ ID NO: 2154666 - RNA, 19 nt, Artificial Sequence
  Description of Artificial Sequence: Synthetic oligonucleotide
  Sense strand starting at position 1306 of SEQ ID NO: 1882883
ccaauuaaggcugaguuga

SEQ ID NO: 2154667 - RNA, 19 nt, Artificial Sequence
  Description of Artificial Sequence: Synthetic oligonucleotide
  Antisense strand to SEQ ID NO: 2154666
ucaacucagccuuaauugg

SEQ ID NO: 2154668 - RNA, 19 nt, Artificial Sequence
  Description of Artificial Sequence: Synthetic oligonucleotide
  Sense strand starting at position 1308 of SEQ ID NO: 1882883
aauuaaggcugaguugaaa

SEQ ID NO: 2154669 - RNA, 19 nt, Artificial Sequence
  Description of Artificial Sequence: Synthetic oligonucleotide
  Antisense strand to SEQ ID NO: 2154668
uuucaacucagccuuaauu

SEQ ID NO: 2154670 - RNA, 19 nt, Artificial Sequence
  Description of Artificial Sequence: Synthetic oligonucleotide
  Sense strand starting at position 1328 of SEQ ID NO: 1882883
ggagcugggcaucaucaaa

SEQ ID NO: 2154671 - RNA, 19 nt, Artificial Sequence
  Description of Artificial Sequence: Synthetic oligonucleotide
  Antisense strand to SEQ ID NO: 2154670
uuugaugaugcccagcucc

SEQ ID NO: 2154672 - RNA, 19 nt, Artificial Sequence
  Description of Artificial Sequence: Synthetic oligonucleotide
  Sense strand starting at position 1403 of SEQ ID NO: 1882883
aggagcagucuauggagaa

SEQ ID NO: 2154673 - RNA, 19 nt, Artificial Sequence
  Description of Artificial Sequence: Synthetic oligonucleotide
  Antisense strand to SEQ ID NO: 2154672
uucuccauagacugcuccu

SEQ ID NO: 2154674 - RNA, 19 nt, Artificial Sequence
  Description of Artificial Sequence: Synthetic oligonucleotide
  Sense strand starting at position 1547 of SEQ ID NO: 1882883
ggagcuuaagacugcagau

SEQ ID NO: 2154675 - RNA, 19 nt, Artificial Sequence
  Description of Artificial Sequence: Synthetic oligonucleotide
  Antisense strand to SEQ ID NO: 2154674
aucugcagucuuaagcucc

SEQ ID NO: 2154676 - RNA, 19 nt, Artificial Sequence
  Description of Artificial Sequence: Synthetic oligonucleotide
  Sense strand starting at position 1600 of SEQ ID NO: 1882883
uccucugucuccucagaca

SEQ ID NO: 2154677 - RNA, 19 nt, Artificial Sequence
  Description of Artificial Sequence: Synthetic oligonucleotide
  Antisense strand to SEQ ID NO: 2154676
ugucugaggagacagagga

SEQ ID NO: 2154678 - RNA, 19 nt, Artificial Sequence
  Description of Artificial Sequence: Synthetic oligonucleotide
  Sense strand starting at position 2023 of SEQ ID NO: 1882883
ccuugucuuggauguuaag

SEQ ID NO: 2154679 - RNA, 19 nt, Artificial Sequence
  Description of Artificial Sequence: Synthetic oligonucleotide
  Antisense strand to SEQ ID NO: 2154678
cuuaacauccaagacaagg

SEQ ID NO: 2154680 - RNA, 19 nt, Artificial Sequence
  Description of Artificial Sequence: Synthetic oligonucleotide
  Sense strand starting at position 2153 of SEQ ID NO: 1882883
caaucauagguaugagacu

SEQ ID NO: 2154681 - RNA, 19 nt, Artificial Sequence
  Description of Artificial Sequence: Synthetic oligonucleotide
  Antisense strand to SEQ ID NO: 2154680
agucucauaccuaugauug

SEQ ID NO: 2154682 - RNA, 19 nt, Artificial Sequence
  Description of Artificial Sequence: Synthetic oligonucleotide
  Sense strand starting at position 2345 of SEQ ID NO: 1882883
augguaagguguuccaaag

SEQ ID NO: 2154683 - RNA, 19 nt, Artificial Sequence
  Description of Artificial Sequence: Synthetic oligonucleotide
  Antisense strand to SEQ ID NO: 2154682
cuuuggaacaccuuaccau

SEQ ID NO: 2154684 - RNA, 19 nt, Artificial Sequence
  Description of Artificial Sequence: Synthetic oligonucleotide
  Sense strand starting at position 2515 of SEQ ID NO: 1882883
agaaucugacaauguuauc

SEQ ID NO: 2154685 - RNA, 19 nt, Artificial Sequence
  Description of Artificial Sequence: Synthetic oligonucleotide
  Antisense strand to SEQ ID NO: 2154684
gauaacauugucagauucu

SEQ ID NO: 2154686 - RNA, 19 nt, Artificial Sequence
  Description of Artificial Sequence: Synthetic oligonucleotide
  Sense strand starting at position 2520 of SEQ ID NO: 1882883
cugacaauguuaucugaau

SEQ ID NO: 2154687 - RNA, 19 nt, Artificial Sequence
  Description of Artificial Sequence: Synthetic oligonucleotide
  Antisense strand to SEQ ID NO: 2154686
auucagauaacauugucag

SEQ ID NO: 2154688 - RNA, 19 nt, Artificial Sequence
  Description of Artificial Sequence: Synthetic oligonucleotide
  Sense strand starting at position 2521 of SEQ ID NO: 1882883
ugacaauguuaucugaaug

SEQ ID NO: 2154689 - RNA, 19 nt, Artificial Sequence
  Description of Artificial Sequence: Synthetic oligonucleotide
  Antisense strand to SEQ ID NO: 2154688
cauucagauaacauuguca

SEQ ID NO: 2154690 - RNA, 19 nt, Artificial Sequence
  Description of Artificial Sequence: Synthetic oligonucleotide
  Sense strand starting at position 2526 of SEQ ID NO: 1882883
auguuaucugaaugaacac

SEQ ID NO: 2154691 - RNA, 19 nt, Artificial Sequence
  Description of Artificial Sequence: Synthetic oligonucleotide
  Antisense strand to SEQ ID NO: 2154690
guguucauucagauaacau

SEQ ID NO: 2154692 - RNA, 19 nt, Artificial Sequence
  Description of Artificial Sequence: Synthetic oligonucleotide
  Sense strand starting at position 2590 of SEQ ID NO: 1882883
aagauauucguguacuagg

SEQ ID NO: 2154693 - RNA, 19 nt, Artificial Sequence
  Description of Artificial Sequence: Synthetic oligonucleotide
  Antisense strand to SEQ ID NO: 2154692
ccuaguacacgaauaucuu

SEQ ID NO: 2154694 - RNA, 19 nt, Artificial Sequence
  Description of Artificial Sequence: Synthetic oligonucleotide
  Sense strand starting at position 2658 of SEQ ID NO: 1882883
accugacuggcagguuaua

SEQ ID NO: 2154695 - RNA, 19 nt, Artificial Sequence
  Description of Artificial Sequence: Synthetic oligonucleotide
  Antisense strand to SEQ ID NO: 2154694
uauaaccugccagucaggu

SEQ ID NO: 2154696 - RNA, 19 nt, Artificial Sequence
  Description of Artificial Sequence: Synthetic oligonucleotide
  Sense strand starting at position 2780 of SEQ ID NO: 1882883
aagucaugucucgagguga

SEQ ID NO: 2154697 - RNA, 19 nt, Artificial Sequence
  Description of Artificial Sequence: Synthetic oligonucleotide
  Antisense strand to SEQ ID NO: 2154696
ucaccucgagacaugacuu

SEQ ID NO: 2154698 - RNA, 19 nt, Artificial Sequence
  Description of Artificial Sequence: Synthetic oligonucleotide
  Sense strand starting at position 2791 of SEQ ID NO: 1882883
cgaggugaacuuggagaua

SEQ ID NO: 2154699 - RNA, 19 nt, Artificial Sequence
  Description of Artificial Sequence: Synthetic oligonucleotide
  Antisense strand to SEQ ID NO: 2154698
uaucuccaaguucaccucg

SEQ ID NO: 2154700 - RNA, 19 nt, Artificial Sequence
  Description of Artificial Sequence: Synthetic oligonucleotide
  Sense strand starting at position 2914 of SEQ ID NO: 1882883
aagauauugcgaugaaaua

SEQ ID NO: 2154701 - RNA, 19 nt, Artificial Sequence
  Description of Artificial Sequence: Synthetic oligonucleotide
  Antisense strand to SEQ ID NO: 2154700
uauuucaucgcaauaucuu

SEQ ID NO: 2154702 - RNA, 19 nt, Artificial Sequence
  Description of Artificial Sequence: Synthetic oligonucleotide
  Sense strand starting at position 3252 of SEQ ID NO: 1882883
agcaaugguucugucaaag

SEQ ID NO: 2154703 - RNA, 19 nt, Artificial Sequence
  Description of Artificial Sequence: Synthetic oligonucleotide
  Antisense strand to SEQ ID NO: 2154702
cuuugacagaaccauugcu

SEQ ID NO: 2154704 - RNA, 19 nt, Artificial Sequence
  Description of Artificial Sequence: Synthetic oligonucleotide
  Sense strand starting at position 3439 of SEQ ID NO: 1882883
ugucuacaggagugaacaa

SEQ ID NO: 2154705 - RNA, 19 nt, Artificial Sequence
  Description of Artificial Sequence: Synthetic oligonucleotide
  Antisense strand to SEQ ID NO: 2154704
uuguucacuccuguagaca

SEQ ID NO: 2154706 - RNA, 19 nt, Artificial Sequence
  Description of Artificial Sequence: Synthetic oligonucleotide
  Sense strand starting at position 3951 of SEQ ID NO: 1882883
uacuuuagauagucuggga

SEQ ID NO: 2154707 - RNA, 19 nt, Artificial Sequence
  Description of Artificial Sequence: Synthetic oligonucleotide
  Antisense strand to SEQ ID NO: 2154706
ucccagacuaucuaaagua

SEQ ID NO: 2154708 - RNA, 19 nt, Artificial Sequence
  Description of Artificial Sequence: Synthetic oligonucleotide
  Sense strand starting at position 487 of SEQ ID NO: 1882884
ucuugugucgcacaugcua

SEQ ID NO: 2154709 - RNA, 19 nt, Artificial Sequence
  Description of Artificial Sequence: Synthetic oligonucleotide
  Antisense strand to SEQ ID NO: 2154708
uagcaugugcgacacaaga

SEQ ID NO: 2154710 - RNA, 19 nt, Artificial Sequence
  Description of Artificial Sequence: Synthetic oligonucleotide
  Sense strand starting at position 489 of SEQ ID NO: 1882884
uugugucgcacaugcuaau

SEQ ID NO: 2154711 - RNA, 19 nt, Artificial Sequence
  Description of Artificial Sequence: Synthetic oligonucleotide
  Antisense strand to SEQ ID NO: 2154710
auuagcaugugcgacacaa

SEQ ID NO: 2154712 - RNA, 19 nt, Artificial Sequence
  Description of Artificial Sequence: Synthetic oligonucleotide
  Sense strand starting at position 495 of SEQ ID NO: 1882884
cgcacaugcuaaugacaaa

SEQ ID NO: 2154713 - RNA, 19 nt, Artificial Sequence
  Description of Artificial Sequence: Synthetic oligonucleotide
  Antisense strand to SEQ ID NO: 2154712
uuugucauuagcaugugcg

SEQ ID NO: 2154714 - RNA, 19 nt, Artificial Sequence
  Description of Artificial Sequence: Synthetic oligonucleotide
  Sense strand starting at position 658 of SEQ ID NO: 1882884
ggaauuaucucaucauugu

SEQ ID NO: 2154715 - RNA, 19 nt, Artificial Sequence
  Description of Artificial Sequence: Synthetic oligonucleotide
  Antisense strand to SEQ ID NO: 2154714
acaaugaugagauaauucc

SEQ ID NO: 2154716 - RNA, 19 nt, Artificial Sequence
  Description of Artificial Sequence: Synthetic oligonucleotide
  Sense strand starting at position 677 of SEQ ID NO: 1882884
gcaaauacugcccaacagu

SEQ ID NO: 2154717 - RNA, 19 nt, Artificial Sequence
  Description of Artificial Sequence: Synthetic oligonucleotide
  Antisense strand to SEQ ID NO: 2154716
acuguugggcaguauuugc

SEQ ID NO: 2154718 - RNA, 19 nt, Artificial Sequence
  Description of Artificial Sequence: Synthetic oligonucleotide
  Sense strand starting at position 707 of SEQ ID NO: 1882884
uucgauagucaauaaguca

SEQ ID NO: 2154719 - RNA, 19 nt, Artificial Sequence
  Description of Artificial Sequence: Synthetic oligonucleotide
  Antisense strand to SEQ ID NO: 2154718
ugacuuauugacuaucgaa

SEQ ID NO: 2154720 - RNA, 19 nt, Artificial Sequence
  Description of Artificial Sequence: Synthetic oligonucleotide
  Sense strand starting at position 714 of SEQ ID NO: 1882884
gucaauaagucacaucuga

SEQ ID NO: 2154721 - RNA, 19 nt, Artificial Sequence
  Description of Artificial Sequence: Synthetic oligonucleotide
  Antisense strand to SEQ ID NO: 2154720
ucagaugugacuuauugac

SEQ ID NO: 2154722 - RNA, 19 nt, Artificial Sequence
  Description of Artificial Sequence: Synthetic oligonucleotide
  Sense strand starting at position 784 of SEQ ID NO: 1882884
agagcuaaucuguaauaca

SEQ ID NO: 2154723 - RNA, 19 nt, Artificial Sequence
  Description of Artificial Sequence: Synthetic oligonucleotide
  Antisense strand to SEQ ID NO: 2154722
uguauuacagauuagcucu

SEQ ID NO: 2154724 - RNA, 19 nt, Artificial Sequence
  Description of Artificial Sequence: Synthetic oligonucleotide
  Sense strand starting at position 808 of SEQ ID NO: 1882884
gcuuguaagaaauaaaggu

SEQ ID NO: 2154725 - RNA, 19 nt, Artificial Sequence
  Description of Artificial Sequence: Synthetic oligonucleotide
  Antisense strand to SEQ ID NO: 2154724
accuuuauuucuuacaagc

SEQ ID NO: 2154726 - RNA, 19 nt, Artificial Sequence
  Description of Artificial Sequence: Synthetic oligonucleotide
  Sense strand starting at position 816 of SEQ ID NO: 1882884
gaaauaaagguuugcacau

SEQ ID NO: 2154727 - RNA, 19 nt, Artificial Sequence
  Description of Artificial Sequence: Synthetic oligonucleotide
  Antisense strand to SEQ ID NO: 2154726
augugcaaaccuuuauuuc

SEQ ID NO: 2154728 - RNA, 19 nt, Artificial Sequence
  Description of Artificial Sequence: Synthetic oligonucleotide
  Sense strand starting at position 828 of SEQ ID NO: 1882884
ugcacaucugcagacacau

SEQ ID NO: 2154729 - RNA, 19 nt, Artificial Sequence
  Description of Artificial Sequence: Synthetic oligonucleotide
  Antisense strand to SEQ ID NO: 2154728
augugucugcagaugugca

SEQ ID NO: 2154730 - RNA, 19 nt, Artificial Sequence
  Description of Artificial Sequence: Synthetic oligonucleotide
  Sense strand starting at position 1237 of SEQ ID NO: 1882884
cugacuugcugguaacgaa

SEQ ID NO: 2154731 - RNA, 19 nt, Artificial Sequence
  Description of Artificial Sequence: Synthetic oligonucleotide
  Antisense strand to SEQ ID NO: 2154730
uucguuaccagcaagucag

SEQ ID NO: 2154732 - RNA, 19 nt, Artificial Sequence
  Description of Artificial Sequence: Synthetic oligonucleotide
  Sense strand starting at position 1319 of SEQ ID NO: 1882884
acacgugucccggaacuua

SEQ ID NO: 2154733 - RNA, 19 nt, Artificial Sequence
  Description of Artificial Sequence: Synthetic oligonucleotide
  Antisense strand to SEQ ID NO: 2154732
uaaguuccgggacacgugu

SEQ ID NO: 2154734 - RNA, 19 nt, Artificial Sequence
  Description of Artificial Sequence: Synthetic oligonucleotide
  Sense strand starting at position 1347 of SEQ ID NO: 1882884
acacgugucccguaacuaa

SEQ ID NO: 2154735 - RNA, 19 nt, Artificial Sequence
  Description of Artificial Sequence: Synthetic oligonucleotide
  Antisense strand to SEQ ID NO: 2154734
uuaguuacgggacacgugu

SEQ ID NO: 2154736 - RNA, 19 nt, Artificial Sequence
  Description of Artificial Sequence: Synthetic oligonucleotide
  Sense strand starting at position 1383 of SEQ ID NO: 1882884
acacgugucccggaacuaa

SEQ ID NO: 2154737 - RNA, 19 nt, Artificial Sequence
  Description of Artificial Sequence: Synthetic oligonucleotide
  Antisense strand to SEQ ID NO: 2154736
uuaguuccgggacacgugu

SEQ ID NO: 2154738 - RNA, 19 nt, Artificial Sequence
  Description of Artificial Sequence: Synthetic oligonucleotide
  Sense strand starting at position 1403 of SEQ ID NO: 1882884
uuuccucauuugggugaaa

SEQ ID NO: 2154739 - RNA, 19 nt, Artificial Sequence
  Description of Artificial Sequence: Synthetic oligonucleotide
  Antisense strand to SEQ ID NO: 2154738
uuucacccaaaugaggaaa

SEQ ID NO: 2154740 - RNA, 19 nt, Artificial Sequence
  Description of Artificial Sequence: Synthetic oligonucleotide
  Sense strand starting at position 1605 of SEQ ID NO: 1882884
ggcuuuauuccauagacag

SEQ ID NO: 2154741 - RNA, 19 nt, Artificial Sequence
  Description of Artificial Sequence: Synthetic oligonucleotide
  Antisense strand to SEQ ID NO: 2154740
cugucuauggaauaaagcc

SEQ ID NO: 2154742 - RNA, 19 nt, Artificial Sequence
  Description of Artificial Sequence: Synthetic oligonucleotide
  Sense strand starting at position 2103 of SEQ ID NO: 1882884
gucuguuucccggccgagu

SEQ ID NO: 2154743 - RNA, 19 nt, Artificial Sequence
  Description of Artificial Sequence: Synthetic oligonucleotide
  Antisense strand to SEQ ID NO: 2154742
acucggccgggaaacagac

SEQ ID NO: 2154744 - RNA, 19 nt, Artificial Sequence
  Description of Artificial Sequence: Synthetic oligonucleotide
  Sense strand starting at position 2167 of SEQ ID NO: 1882884
gguugcgcguuucaggaaa

SEQ ID NO: 2154745 - RNA, 19 nt, Artificial Sequence
  Description of Artificial Sequence: Synthetic oligonucleotide
  Antisense strand to SEQ ID NO: 2154744
uuuccugaaacgcgcaacc

SEQ ID NO: 2154746 - RNA, 19 nt, Artificial Sequence
  Description of Artificial Sequence: Synthetic oligonucleotide
  Sense strand starting at position 2459 of SEQ ID NO: 1882884
uccgauuauaggcgugaga

SEQ ID NO: 2154747 - RNA, 19 nt, Artificial Sequence
  Description of Artificial Sequence: Synthetic oligonucleotide
  Antisense strand to SEQ ID NO: 2154746
ucucacgccuauaaucgga

SEQ ID NO: 2154748 - RNA, 19 nt, Artificial Sequence
  Description of Artificial Sequence: Synthetic oligonucleotide
  Sense strand starting at position 2814 of SEQ ID NO: 1882884
gccucuguuacuggaugga

SEQ ID NO: 2154749 - RNA, 19 nt, Artificial Sequence
  Description of Artificial Sequence: Synthetic oligonucleotide
  Antisense strand to SEQ ID NO: 2154748
uccauccaguaacagaggc

SEQ ID NO: 2154750 - RNA, 19 nt, Artificial Sequence
  Description of Artificial Sequence: Synthetic oligonucleotide
  Sense strand starting at position 3018 of SEQ ID NO: 1882884
gauagcacccgucaggauu

SEQ ID NO: 2154751 - RNA, 19 nt, Artificial Sequence
  Description of Artificial Sequence: Synthetic oligonucleotide
  Antisense strand to SEQ ID NO: 2154750
aauccugacgggugcuauc

SEQ ID NO: 2154752 - RNA, 19 nt, Artificial Sequence
  Description of Artificial Sequence: Synthetic oligonucleotide
  Sense strand starting at position 156 of SEQ ID NO: 1882885
aagggauaguaagcagauu

SEQ ID NO: 2154753 - RNA, 19 nt, Artificial Sequence
  Description of Artificial Sequence: Synthetic oligonucleotide
  Antisense strand to SEQ ID NO: 2154752
aaucugcuuacuaucccuu

SEQ ID NO: 2154754 - RNA, 19 nt, Artificial Sequence
  Description of Artificial Sequence: Synthetic oligonucleotide
  Sense strand starting at position 276 of SEQ ID NO: 1882885
uaggaaguggucuaaaggu

SEQ ID NO: 2154755 - RNA, 19 nt, Artificial Sequence
  Description of Artificial Sequence: Synthetic oligonucleotide
  Antisense strand to SEQ ID NO: 2154754
accuuuagaccacuuccua

SEQ ID NO: 2154756 - RNA, 19 nt, Artificial Sequence
  Description of Artificial Sequence: Synthetic oligonucleotide
  Sense strand starting at position 283 of SEQ ID NO: 1882885
uggucuaaagguugggauu

SEQ ID NO: 2154757 - RNA, 19 nt, Artificial Sequence
  Description of Artificial Sequence: Synthetic oligonucleotide
  Antisense strand to SEQ ID NO: 2154756
aaucccaaccuuuagacca

SEQ ID NO: 2154758 - RNA, 19 nt, Artificial Sequence
  Description of Artificial Sequence: Synthetic oligonucleotide
  Sense strand starting at position 289 of SEQ ID NO: 1882885
aaagguugggauugcugua

SEQ ID NO: 2154759 - RNA, 19 nt, Artificial Sequence
  Description of Artificial Sequence: Synthetic oligonucleotide
  Antisense strand to SEQ ID NO: 2154758
uacagcaaucccaaccuuu

SEQ ID NO: 2154760 - RNA, 19 nt, Artificial Sequence
  Description of Artificial Sequence: Synthetic oligonucleotide
  Sense strand starting at position 294 of SEQ ID NO: 1882885
uugggauugcuguauguga

SEQ ID NO: 2154761 - RNA, 19 nt, Artificial Sequence
  Description of Artificial Sequence: Synthetic oligonucleotide
  Antisense strand to SEQ ID NO: 2154760
ucacauacagcaaucccaa

SEQ ID NO: 2154762 - RNA, 19 nt, Artificial Sequence
  Description of Artificial Sequence: Synthetic oligonucleotide
  Sense strand starting at position 345 of SEQ ID NO: 1882885
agagcuuuagagugggagu

SEQ ID NO: 2154763 - RNA, 19 nt, Artificial Sequence
  Description of Artificial Sequence: Synthetic oligonucleotide
  Antisense strand to SEQ ID NO: 2154762
acucccacucuaaagcucu

SEQ ID NO: 2154764 - RNA, 19 nt, Artificial Sequence
  Description of Artificial Sequence: Synthetic oligonucleotide
  Sense strand starting at position 346 of SEQ ID NO: 1882885
gagcuuuagagugggaguu

SEQ ID NO: 2154765 - RNA, 19 nt, Artificial Sequence
  Description of Artificial Sequence: Synthetic oligonucleotide
  Antisense strand to SEQ ID NO: 2154764
aacucccacucuaaagcuc

SEQ ID NO: 2154766 - RNA, 19 nt, Artificial Sequence
  Description of Artificial Sequence: Synthetic oligonucleotide
  Sense strand starting at position 375 of SEQ ID NO: 1882885
uaaugaccugucugcuaga

SEQ ID NO: 2154767 - RNA, 19 nt, Artificial Sequence
  Description of Artificial Sequence: Synthetic oligonucleotide
  Antisense strand to SEQ ID NO: 2154766
ucuagcagacaggucauua

SEQ ID NO: 2154768 - RNA, 19 nt, Artificial Sequence
  Description of Artificial Sequence: Synthetic oligonucleotide
  Sense strand starting at position 376 of SEQ ID NO: 1882885
aaugaccugucugcuagaa

SEQ ID NO: 2154769 - RNA, 19 nt, Artificial Sequence
  Description of Artificial Sequence: Synthetic oligonucleotide
  Antisense strand to SEQ ID NO: 2154768
uucuagcagacaggucauu

SEQ ID NO: 2154770 - RNA, 19 nt, Artificial Sequence
  Description of Artificial Sequence: Synthetic oligonucleotide
  Sense strand starting at position 593 of SEQ ID NO: 1882885
gaugcacuuuacucaggua

SEQ ID NO: 2154771 - RNA, 19 nt, Artificial Sequence
  Description of Artificial Sequence: Synthetic oligonucleotide
  Antisense strand to SEQ ID NO: 2154770
uaccugaguaaagugcauc

SEQ ID NO: 2154772 - RNA, 19 nt, Artificial Sequence
  Description of Artificial Sequence: Synthetic oligonucleotide
  Sense strand starting at position 970 of SEQ ID NO: 1882885
cgcugcucugccucagaga

SEQ ID NO: 2154773 - RNA, 19 nt, Artificial Sequence
  Description of Artificial Sequence: Synthetic oligonucleotide
  Antisense strand to SEQ ID NO: 2154772
ucucugaggcagagcagcg

SEQ ID NO: 2154774 - RNA, 19 nt, Artificial Sequence
  Description of Artificial Sequence: Synthetic oligonucleotide
  Sense strand starting at position 1065 of SEQ ID NO: 1882885
ggaaaugagugggugugua

SEQ ID NO: 2154775 - RNA, 19 nt, Artificial Sequence
  Description of Artificial Sequence: Synthetic oligonucleotide
  Antisense strand to SEQ ID NO: 2154774
uacacacccacucauuucc

SEQ ID NO: 2154776 - RNA, 19 nt, Artificial Sequence
  Description of Artificial Sequence: Synthetic oligonucleotide
  Sense strand starting at position 1079 of SEQ ID NO: 1882885
guguaaggucaggauacaa

SEQ ID NO: 2154777 - RNA, 19 nt, Artificial Sequence
  Description of Artificial Sequence: Synthetic oligonucleotide
  Antisense strand to SEQ ID NO: 2154776
uuguauccugaccuuacac

SEQ ID NO: 2154778 - RNA, 19 nt, Artificial Sequence
  Description of Artificial Sequence: Synthetic oligonucleotide
  Sense strand starting at position 1098 of SEQ ID NO: 1882885
acaggaaugcucgacauca

SEQ ID NO: 2154779 - RNA, 19 nt, Artificial Sequence
  Description of Artificial Sequence: Synthetic oligonucleotide
  Antisense strand to SEQ ID NO: 2154778
ugaugucgagcauuccugu

SEQ ID NO: 2154780 - RNA, 19 nt, Artificial Sequence
  Description of Artificial Sequence: Synthetic oligonucleotide
  Sense strand starting at position 1100 of SEQ ID NO: 1882885
aggaaugcucgacaucaac

SEQ ID NO: 2154781 - RNA, 19 nt, Artificial Sequence
  Description of Artificial Sequence: Synthetic oligonucleotide
  Antisense strand to SEQ ID NO: 2154780
guugaugucgagcauuccu

SEQ ID NO: 2154782 - RNA, 19 nt, Artificial Sequence
  Description of Artificial Sequence: Synthetic oligonucleotide
  Sense strand starting at position 1244 of SEQ ID NO: 1882885
aagagaguccuuugacauc

SEQ ID NO: 2154783 - RNA, 19 nt, Artificial Sequence
  Description of Artificial Sequence: Synthetic oligonucleotide
  Antisense strand to SEQ ID NO: 2154782
gaugucaaaggacucucuu

SEQ ID NO: 2154784 - RNA, 19 nt, Artificial Sequence
  Description of Artificial Sequence: Synthetic oligonucleotide
  Sense strand starting at position 1532 of SEQ ID NO: 1882885
ccagcaauugcccaagucu

SEQ ID NO: 2154785 - RNA, 19 nt, Artificial Sequence
  Description of Artificial Sequence: Synthetic oligonucleotide
  Antisense strand to SEQ ID NO: 2154784
agacuugggcaauugcugg

SEQ ID NO: 2154786 - RNA, 19 nt, Artificial Sequence
  Description of Artificial Sequence: Synthetic oligonucleotide
  Sense strand starting at position 2188 of SEQ ID NO: 1882885
ccacguaugcugcugugau

SEQ ID NO: 2154787 - RNA, 19 nt, Artificial Sequence
  Description of Artificial Sequence: Synthetic oligonucleotide
  Antisense strand to SEQ ID NO: 2154786
aucacagcagcauacgugg

SEQ ID NO: 2154788 - RNA, 19 nt, Artificial Sequence
  Description of Artificial Sequence: Synthetic oligonucleotide
  Sense strand starting at position 2204 of SEQ ID NO: 1882885
gauguagucagccagagac

SEQ ID NO: 2154789 - RNA, 19 nt, Artificial Sequence
  Description of Artificial Sequence: Synthetic oligonucleotide
  Antisense strand to SEQ ID NO: 2154788
gucucuggcugacuacauc

SEQ ID NO: 2154790 - RNA, 19 nt, Artificial Sequence
  Description of Artificial Sequence: Synthetic oligonucleotide
  Sense strand starting at position 2395 of SEQ ID NO: 1882885
acacaaauuagugggugau

SEQ ID NO: 2154791 - RNA, 19 nt, Artificial Sequence
  Description of Artificial Sequence: Synthetic oligonucleotide
  Antisense strand to SEQ ID NO: 2154790
aucacccacuaauuugugu

SEQ ID NO: 2154792 - RNA, 19 nt, Artificial Sequence
  Description of Artificial Sequence: Synthetic oligonucleotide
  Sense strand starting at position 2396 of SEQ ID NO: 1882885
cacaaauuagugggugauu

SEQ ID NO: 2154793 - RNA, 19 nt, Artificial Sequence
  Description of Artificial Sequence: Synthetic oligonucleotide
  Antisense strand to SEQ ID NO: 2154792
aaucacccacuaauuugug

SEQ ID NO: 2154794 - RNA, 19 nt, Artificial Sequence
  Description of Artificial Sequence: Synthetic oligonucleotide
  Sense strand starting at position 2397 of SEQ ID NO: 1882885
acaaauuagugggugauua

SEQ ID NO: 2154795 - RNA, 19 nt, Artificial Sequence
  Description of Artificial Sequence: Synthetic oligonucleotide
  Antisense strand to SEQ ID NO: 2154794
uaaucacccacuaauuugu

SEQ ID NO: 2154796 - RNA, 19 nt, Artificial Sequence
  Description of Artificial Sequence: Synthetic oligonucleotide
  Sense strand starting at position 2398 of SEQ ID NO: 1882885
caaauuagugggugauuau

SEQ ID NO: 2154797 - RNA, 19 nt, Artificial Sequence
  Description of Artificial Sequence: Synthetic oligonucleotide
  Antisense strand to SEQ ID NO: 2154796
auaaucacccacuaauuug

SEQ ID NO: 2154798 - RNA, 19 nt, Artificial Sequence
  Description of Artificial Sequence: Synthetic oligonucleotide
  Sense strand starting at position 2409 of SEQ ID NO: 1882885
gugauuauuugcuuggcuu

SEQ ID NO: 2154799 - RNA, 19 nt, Artificial Sequence
  Description of Artificial Sequence: Synthetic oligonucleotide
  Antisense strand to SEQ ID NO: 2154798
aagccaagcaaauaaucac

SEQ ID NO: 2154800 - RNA, 19 nt, Artificial Sequence
  Description of Artificial Sequence: Synthetic oligonucleotide
  Sense strand starting at position 2411 of SEQ ID NO: 1882885
gauuauuugcuuggcuuga

SEQ ID NO: 2154801 - RNA, 19 nt, Artificial Sequence
  Description of Artificial Sequence: Synthetic oligonucleotide
  Antisense strand to SEQ ID NO: 2154800
ucaagccaagcaaauaauc

SEQ ID NO: 2154802 - RNA, 19 nt, Artificial Sequence
  Description of Artificial Sequence: Synthetic oligonucleotide
  Sense strand starting at position 2412 of SEQ ID NO: 1882885
auuauuugcuuggcuugaa

SEQ ID NO: 2154803 - RNA, 19 nt, Artificial Sequence
  Description of Artificial Sequence: Synthetic oligonucleotide
  Antisense strand to SEQ ID NO: 2154802
uucaagccaagcaaauaau

SEQ ID NO: 2154804 - RNA, 19 nt, Artificial Sequence
  Description of Artificial Sequence: Synthetic oligonucleotide
  Sense strand starting at position 2413 of SEQ ID NO: 1882885
uuauuugcuuggcuugaau

SEQ ID NO: 2154805 - RNA, 19 nt, Artificial Sequence
  Description of Artificial Sequence: Synthetic oligonucleotide
  Antisense strand to SEQ ID NO: 2154804
auucaagccaagcaaauaa

SEQ ID NO: 2154806 - RNA, 19 nt, Artificial Sequence
  Description of Artificial Sequence: Synthetic oligonucleotide
  Sense strand starting at position 2415 of SEQ ID NO: 1882885
auuugcuuggcuugaauau

SEQ ID NO: 2154807 - RNA, 19 nt, Artificial Sequence
  Description of Artificial Sequence: Synthetic oligonucleotide
  Antisense strand to SEQ ID NO: 2154806
auauucaagccaagcaaau

SEQ ID NO: 2154808 - RNA, 19 nt, Artificial Sequence
  Description of Artificial Sequence: Synthetic oligonucleotide
  Sense strand starting at position 2466 of SEQ ID NO: 1882885
accaguauccuccaaguua

SEQ ID NO: 2154809 - RNA, 19 nt, Artificial Sequence
  Description of Artificial Sequence: Synthetic oligonucleotide
  Antisense strand to SEQ ID NO: 2154808
uaacuuggaggauacuggu

SEQ ID NO: 2154810 - RNA, 19 nt, Artificial Sequence
  Description of Artificial Sequence: Synthetic oligonucleotide
  Sense strand starting at position 2525 of SEQ ID NO: 1882885
uccgucugucauuaagaga

SEQ ID NO: 2154811 - RNA, 19 nt, Artificial Sequence
  Description of Artificial Sequence: Synthetic oligonucleotide
  Antisense strand to SEQ ID NO: 2154810
ucucuuaaugacagacgga

SEQ ID NO: 2154812 - RNA, 19 nt, Artificial Sequence
  Description of Artificial Sequence: Synthetic oligonucleotide
  Sense strand starting at position 2669 of SEQ ID NO: 1882885
agcgauagagauuaucauc

SEQ ID NO: 2154813 - RNA, 19 nt, Artificial Sequence
  Description of Artificial Sequence: Synthetic oligonucleotide
  Antisense strand to SEQ ID NO: 2154812
gaugauaaucucuaucgcu

SEQ ID NO: 2154814 - RNA, 19 nt, Artificial Sequence
  Description of Artificial Sequence: Synthetic oligonucleotide
  Sense strand starting at position 2733 of SEQ ID NO: 1882885
uuugcauaugcaugagaua

SEQ ID NO: 2154815 - RNA, 19 nt, Artificial Sequence
  Description of Artificial Sequence: Synthetic oligonucleotide
  Antisense strand to SEQ ID NO: 2154814
uaucucaugcauaugcaaa

SEQ ID NO: 2154816 - RNA, 19 nt, Artificial Sequence
  Description of Artificial Sequence: Synthetic oligonucleotide
  Sense strand starting at position 2734 of SEQ ID NO: 1882885
uugcauaugcaugagauag

SEQ ID NO: 2154817 - RNA, 19 nt, Artificial Sequence
  Description of Artificial Sequence: Synthetic oligonucleotide
  Antisense strand to SEQ ID NO: 2154816
cuaucucaugcauaugcaa

SEQ ID NO: 2154818 - RNA, 19 nt, Artificial Sequence
  Description of Artificial Sequence: Synthetic oligonucleotide
  Sense strand starting at position 3144 of SEQ ID NO: 1882885
ugauaugaaguguggaauu

SEQ ID NO: 2154819 - RNA, 19 nt, Artificial Sequence
  Description of Artificial Sequence: Synthetic oligonucleotide
  Antisense strand to SEQ ID NO: 2154818
aauuccacacuucauauca

SEQ ID NO: 2154820 - RNA, 19 nt, Artificial Sequence
  Description of Artificial Sequence: Synthetic oligonucleotide
  Sense strand starting at position 3501 of SEQ ID NO: 1882885
ggacaagcuuucccgggaa

SEQ ID NO: 2154821 - RNA, 19 nt, Artificial Sequence
  Description of Artificial Sequence: Synthetic oligonucleotide
  Antisense strand to SEQ ID NO: 2154820
uucccgggaaagcuugucc

SEQ ID NO: 2154822 - RNA, 19 nt, Artificial Sequence
  Description of Artificial Sequence: Synthetic oligonucleotide
  Sense strand starting at position 3503 of SEQ ID NO: 1882885
acaagcuuucccgggaaau

SEQ ID NO: 2154823 - RNA, 19 nt, Artificial Sequence
  Description of Artificial Sequence: Synthetic oligonucleotide
  Antisense strand to SEQ ID NO: 2154822
auuucccgggaaagcuugu

SEQ ID NO: 2154824 - RNA, 19 nt, Artificial Sequence
  Description of Artificial Sequence: Synthetic oligonucleotide
  Sense strand starting at position 3504 of SEQ ID NO: 1882885
caagcuuucccgggaaauc

SEQ ID NO: 2154825 - RNA, 19 nt, Artificial Sequence
  Description of Artificial Sequence: Synthetic oligonucleotide
  Antisense strand to SEQ ID NO: 2154824
gauuucccgggaaagcuug

SEQ ID NO: 2154826 - RNA, 19 nt, Artificial Sequence
  Description of Artificial Sequence: Synthetic oligonucleotide
  Sense strand starting at position 3515 of SEQ ID NO: 1882885
gggaaauccucaucagcau

SEQ ID NO: 2154827 - RNA, 19 nt, Artificial Sequence
  Description of Artificial Sequence: Synthetic oligonucleotide
  Antisense strand to SEQ ID NO: 2154826
augcugaugaggauuuccc

SEQ ID NO: 2154828 - RNA, 19 nt, Artificial Sequence
  Description of Artificial Sequence: Synthetic oligonucleotide
  Sense strand starting at position 3516 of SEQ ID NO: 1882885
ggaaauccucaucagcauu

SEQ ID NO: 2154829 - RNA, 19 nt, Artificial Sequence
  Description of Artificial Sequence: Synthetic oligonucleotide
  Antisense strand to SEQ ID NO: 2154828
aaugcugaugaggauuucc

SEQ ID NO: 2154830 - RNA, 19 nt, Artificial Sequence
  Description of Artificial Sequence: Synthetic oligonucleotide
  Sense strand starting at position 3950 of SEQ ID NO: 1882885
ugucgaacucaucaaugca

SEQ ID NO: 2154831 - RNA, 19 nt, Artificial Sequence
  Description of Artificial Sequence: Synthetic oligonucleotide
  Antisense strand to SEQ ID NO: 2154830
ugcauugaugaguucgaca

SEQ ID NO: 2154832 - RNA, 19 nt, Artificial Sequence
  Description of Artificial Sequence: Synthetic oligonucleotide
  Sense strand starting at position 828 of SEQ ID NO: 1882886
gguucugacuucucauucu

SEQ ID NO: 2154833 - RNA, 19 nt, Artificial Sequence
  Description of Artificial Sequence: Synthetic oligonucleotide
  Antisense strand to SEQ ID NO: 2154832
agaaugagaagucagaacc

SEQ ID NO: 2154834 - RNA, 19 nt, Artificial Sequence
  Description of Artificial Sequence: Synthetic oligonucleotide
  Sense strand starting at position 890 of SEQ ID NO: 1882886
ugcuauguguaagcugauu

SEQ ID NO: 2154835 - RNA, 19 nt, Artificial Sequence
  Description of Artificial Sequence: Synthetic oligonucleotide
  Antisense strand to SEQ ID NO: 2154834
aaucagcuuacacauagca

SEQ ID NO: 2154836 - RNA, 19 nt, Artificial Sequence
  Description of Artificial Sequence: Synthetic oligonucleotide
  Sense strand starting at position 895 of SEQ ID NO: 1882886
uguguaagcugauuaacuc

SEQ ID NO: 2154837 - RNA, 19 nt, Artificial Sequence
  Description of Artificial Sequence: Synthetic oligonucleotide
  Antisense strand to SEQ ID NO: 2154836
gaguuaaucagcuuacaca

SEQ ID NO: 2154838 - RNA, 19 nt, Artificial Sequence
  Description of Artificial Sequence: Synthetic oligonucleotide
  Sense strand starting at position 896 of SEQ ID NO: 1882886
guguaagcugauuaacuca

SEQ ID NO: 2154839 - RNA, 19 nt, Artificial Sequence
  Description of Artificial Sequence: Synthetic oligonucleotide
  Antisense strand to SEQ ID NO: 2154838
ugaguuaaucagcuuacac

SEQ ID NO: 2154840 - RNA, 19 nt, Artificial Sequence
  Description of Artificial Sequence: Synthetic oligonucleotide
  Sense strand starting at position 1126 of SEQ ID NO: 1882886
uuauaucuacuauguggua

SEQ ID NO: 2154841 - RNA, 19 nt, Artificial Sequence
  Description of Artificial Sequence: Synthetic oligonucleotide
  Antisense strand to SEQ ID NO: 2154840
uaccacauaguagauauaa

SEQ ID NO: 2154842 - RNA, 19 nt, Artificial Sequence
  Description of Artificial Sequence: Synthetic oligonucleotide
  Sense strand starting at position 1146 of SEQ ID NO: 1882886
ggcacuuuacuggauguuu

SEQ ID NO: 2154843 - RNA, 19 nt, Artificial Sequence
  Description of Artificial Sequence: Synthetic oligonucleotide
  Antisense strand to SEQ ID NO: 2154842
aaacauccaguaaagugcc

SEQ ID NO: 2154844 - RNA, 19 nt, Artificial Sequence
  Description of Artificial Sequence: Synthetic oligonucleotide
  Sense strand starting at position 1182 of SEQ ID NO: 1882886
aucccuaugggcuaaauau

SEQ ID NO: 2154845 - RNA, 19 nt, Artificial Sequence
  Description of Artificial Sequence: Synthetic oligonucleotide
  Antisense strand to SEQ ID NO: 2154844
auauuuagcccauagggau

SEQ ID NO: 2154846 - RNA, 19 nt, Artificial Sequence
  Description of Artificial Sequence: Synthetic oligonucleotide
  Sense strand starting at position 1277 of SEQ ID NO: 1882886
ggcuuacuguagccucuaa

SEQ ID NO: 2154847 - RNA, 19 nt, Artificial Sequence
  Description of Artificial Sequence: Synthetic oligonucleotide
  Antisense strand to SEQ ID NO: 2154846
uuagaggcuacaguaagcc

SEQ ID NO: 2154848 - RNA, 19 nt, Artificial Sequence
  Description of Artificial Sequence: Synthetic oligonucleotide
  Sense strand starting at position 1392 of SEQ ID NO: 1882886
gagauuaugucucacuaug

SEQ ID NO: 2154849 - RNA, 19 nt, Artificial Sequence
  Description of Artificial Sequence: Synthetic oligonucleotide
  Antisense strand to SEQ ID NO: 2154848
cauagugagacauaaucuc

SEQ ID NO: 2154850 - RNA, 19 nt, Artificial Sequence
  Description of Artificial Sequence: Synthetic oligonucleotide
  Sense strand starting at position 1652 of SEQ ID NO: 1882886
aucuauguugaucauaagu

SEQ ID NO: 2154851 - RNA, 19 nt, Artificial Sequence
  Description of Artificial Sequence: Synthetic oligonucleotide
  Antisense strand to SEQ ID NO: 2154850
acuuaugaucaacauagau

SEQ ID NO: 2154852 - RNA, 19 nt, Artificial Sequence
  Description of Artificial Sequence: Synthetic oligonucleotide
  Sense strand starting at position 1662 of SEQ ID NO: 1882886
aucauaagucccuguuaag

SEQ ID NO: 2154853 - RNA, 19 nt, Artificial Sequence
  Description of Artificial Sequence: Synthetic oligonucleotide
  Antisense strand to SEQ ID NO: 2154852
cuuaacagggacuuaugau

SEQ ID NO: 2154854 - RNA, 19 nt, Artificial Sequence
  Description of Artificial Sequence: Synthetic oligonucleotide
  Sense strand starting at position 1829 of SEQ ID NO: 1882886
ucacaauaaggucaguauu

SEQ ID NO: 2154855 - RNA, 19 nt, Artificial Sequence
  Description of Artificial Sequence: Synthetic oligonucleotide
  Antisense strand to SEQ ID NO: 2154854
aauacugaccuuauuguga

SEQ ID NO: 2154856 - RNA, 19 nt, Artificial Sequence
  Description of Artificial Sequence: Synthetic oligonucleotide
  Sense strand starting at position 1839 of SEQ ID NO: 1882886
gucaguauuucuuagcaua

SEQ ID NO: 2154857 - RNA, 19 nt, Artificial Sequence
  Description of Artificial Sequence: Synthetic oligonucleotide
  Antisense strand to SEQ ID NO: 2154856
uaugcuaagaaauacugac

SEQ ID NO: 2154858 - RNA, 19 nt, Artificial Sequence
  Description of Artificial Sequence: Synthetic oligonucleotide
  Sense strand starting at position 1842 of SEQ ID NO: 1882886
aguauuucuuagcauagua

SEQ ID NO: 2154859 - RNA, 19 nt, Artificial Sequence
  Description of Artificial Sequence: Synthetic oligonucleotide
  Antisense strand to SEQ ID NO: 2154858
uacuaugcuaagaaauacu

SEQ ID NO: 2154860 - RNA, 19 nt, Artificial Sequence
  Description of Artificial Sequence: Synthetic oligonucleotide
  Sense strand starting at position 1989 of SEQ ID NO: 1882886
gcauuugaauaauauagcu

SEQ ID NO: 2154861 - RNA, 19 nt, Artificial Sequence
  Description of Artificial Sequence: Synthetic oligonucleotide
  Antisense strand to SEQ ID NO: 2154860
agcuauauuauucaaaugc

SEQ ID NO: 2154862 - RNA, 19 nt, Artificial Sequence
  Description of Artificial Sequence: Synthetic oligonucleotide
  Sense strand starting at position 2042 of SEQ ID NO: 1882886
ucucccuuggucugacaaa

SEQ ID NO: 2154863 - RNA, 19 nt, Artificial Sequence
  Description of Artificial Sequence: Synthetic oligonucleotide
  Antisense strand to SEQ ID NO: 2154862
uuugucagaccaagggaga

SEQ ID NO: 2154864 - RNA, 19 nt, Artificial Sequence
  Description of Artificial Sequence: Synthetic oligonucleotide
  Sense strand starting at position 2145 of SEQ ID NO: 1882886
auuucuugguauuguaacu

SEQ ID NO: 2154865 - RNA, 19 nt, Artificial Sequence
  Description of Artificial Sequence: Synthetic oligonucleotide
  Antisense strand to SEQ ID NO: 2154864
aguuacaauaccaagaaau

SEQ ID NO: 2154866 - RNA, 19 nt, Artificial Sequence
  Description of Artificial Sequence: Synthetic oligonucleotide
  Sense strand starting at position 2150 of SEQ ID NO: 1882886
uugguauuguaacuacaca

SEQ ID NO: 2154867 - RNA, 19 nt, Artificial Sequence
  Description of Artificial Sequence: Synthetic oligonucleotide
  Antisense strand to SEQ ID NO: 2154866
uguguaguuacaauaccaa

SEQ ID NO: 2154868 - RNA, 19 nt, Artificial Sequence
  Description of Artificial Sequence: Synthetic oligonucleotide
  Sense strand starting at position 2161 of SEQ ID NO: 1882886
acuacacauuauggugaaa

SEQ ID NO: 2154869 - RNA, 19 nt, Artificial Sequence
  Description of Artificial Sequence: Synthetic oligonucleotide
  Antisense strand to SEQ ID NO: 2154868
uuucaccauaauguguagu

SEQ ID NO: 2154870 - RNA, 19 nt, Artificial Sequence
  Description of Artificial Sequence: Synthetic oligonucleotide
  Sense strand starting at position 2345 of SEQ ID NO: 1882886
gacaguuuguugguaggua

SEQ ID NO: 2154871 - RNA, 19 nt, Artificial Sequence
  Description of Artificial Sequence: Synthetic oligonucleotide
  Antisense strand to SEQ ID NO: 2154870
uaccuaccaacaaacuguc

SEQ ID NO: 2154872 - RNA, 19 nt, Artificial Sequence
  Description of Artificial Sequence: Synthetic oligonucleotide
  Sense strand starting at position 2349 of SEQ ID NO: 1882886
guuuguugguagguaguaa

SEQ ID NO: 2154873 - RNA, 19 nt, Artificial Sequence
  Description of Artificial Sequence: Synthetic oligonucleotide
  Antisense strand to SEQ ID NO: 2154872
uuacuaccuaccaacaaac

SEQ ID NO: 2154874 - RNA, 19 nt, Artificial Sequence
  Description of Artificial Sequence: Synthetic oligonucleotide
  Sense strand starting at position 2393 of SEQ ID NO: 1882886
caagaucuagcuuguugga

SEQ ID NO: 2154875 - RNA, 19 nt, Artificial Sequence
  Description of Artificial Sequence: Synthetic oligonucleotide
  Antisense strand to SEQ ID NO: 2154874
uccaacaagcuagaucuug

SEQ ID NO: 2154876 - RNA, 19 nt, Artificial Sequence
  Description of Artificial Sequence: Synthetic oligonucleotide
  Sense strand starting at position 2395 of SEQ ID NO: 1882886
agaucuagcuuguuggaca

SEQ ID NO: 2154877 - RNA, 19 nt, Artificial Sequence
  Description of Artificial Sequence: Synthetic oligonucleotide
  Antisense strand to SEQ ID NO: 2154876
uguccaacaagcuagaucu

SEQ ID NO: 2154878 - RNA, 19 nt, Artificial Sequence
  Description of Artificial Sequence: Synthetic oligonucleotide
  Sense strand starting at position 2406 of SEQ ID NO: 1882886
guuggacauuucuugcuca

SEQ ID NO: 2154879 - RNA, 19 nt, Artificial Sequence
  Description of Artificial Sequence: Synthetic oligonucleotide
  Antisense strand to SEQ ID NO: 2154878
ugagcaagaaauguccaac

SEQ ID NO: 2154880 - RNA, 19 nt, Artificial Sequence
  Description of Artificial Sequence: Synthetic oligonucleotide
  Sense strand starting at position 2407 of SEQ ID NO: 1882886
uuggacauuucuugcucau

SEQ ID NO: 2154881 - RNA, 19 nt, Artificial Sequence
  Description of Artificial Sequence: Synthetic oligonucleotide
  Antisense strand to SEQ ID NO: 2154880
augagcaagaaauguccaa

SEQ ID NO: 2154882 - RNA, 19 nt, Artificial Sequence
  Description of Artificial Sequence: Synthetic oligonucleotide
  Sense strand starting at position 2451 of SEQ ID NO: 1882886
gccuuaguagaguaguaaa

SEQ ID NO: 2154883 - RNA, 19 nt, Artificial Sequence
  Description of Artificial Sequence: Synthetic oligonucleotide
  Antisense strand to SEQ ID NO: 2154882
uuuacuacucuacuaaggc

SEQ ID NO: 2154884 - RNA, 19 nt, Artificial Sequence
  Description of Artificial Sequence: Synthetic oligonucleotide
  Sense strand starting at position 2513 of SEQ ID NO: 1882886
ucagguuuagcugguaaag

SEQ ID NO: 2154885 - RNA, 19 nt, Artificial Sequence
  Description of Artificial Sequence: Synthetic oligonucleotide
  Antisense strand to SEQ ID NO: 2154884
cuuuaccagcuaaaccuga

SEQ ID NO: 2154886 - RNA, 19 nt, Artificial Sequence
  Description of Artificial Sequence: Synthetic oligonucleotide
  Sense strand starting at position 2515 of SEQ ID NO: 1882886
agguuuagcugguaaagga

SEQ ID NO: 2154887 - RNA, 19 nt, Artificial Sequence
  Description of Artificial Sequence: Synthetic oligonucleotide
  Antisense strand to SEQ ID NO: 2154886
uccuuuaccagcuaaaccu

SEQ ID NO: 2154888 - RNA, 19 nt, Artificial Sequence
  Description of Artificial Sequence: Synthetic oligonucleotide
  Sense strand starting at position 2557 of SEQ ID NO: 1882886
aaccuaguucucuggauug

SEQ ID NO: 2154889 - RNA, 19 nt, Artificial Sequence
  Description of Artificial Sequence: Synthetic oligonucleotide
  Antisense strand to SEQ ID NO: 2154888
caauccagagaacuagguu

SEQ ID NO: 2154890 - RNA, 19 nt, Artificial Sequence
  Description of Artificial Sequence: Synthetic oligonucleotide
  Sense strand starting at position 2646 of SEQ ID NO: 1882886
ucucaagaauugguugaau

SEQ ID NO: 2154891 - RNA, 19 nt, Artificial Sequence
  Description of Artificial Sequence: Synthetic oligonucleotide
  Antisense strand to SEQ ID NO: 2154890
auucaaccaauucuugaga

SEQ ID NO: 2154892 - RNA, 19 nt, Artificial Sequence
  Description of Artificial Sequence: Synthetic oligonucleotide
  Sense strand starting at position 2648 of SEQ ID NO: 1882886
ucaagaauugguugaauua

SEQ ID NO: 2154893 - RNA, 19 nt, Artificial Sequence
  Description of Artificial Sequence: Synthetic oligonucleotide
  Antisense strand to SEQ ID NO: 2154892
uaauucaaccaauucuuga

SEQ ID NO: 2154894 - RNA, 19 nt, Artificial Sequence
  Description of Artificial Sequence: Synthetic oligonucleotide
  Sense strand starting at position 2671 of SEQ ID NO: 1882886
uuaaguauuucuggucuua

SEQ ID NO: 2154895 - RNA, 19 nt, Artificial Sequence
  Description of Artificial Sequence: Synthetic oligonucleotide
  Antisense strand to SEQ ID NO: 2154894
uaagaccagaaauacuuaa

SEQ ID NO: 2154896 - RNA, 19 nt, Artificial Sequence
  Description of Artificial Sequence: Synthetic oligonucleotide
  Sense strand starting at position 2682 of SEQ ID NO: 1882886
uggucuuacuaguaagaca

SEQ ID NO: 2154897 - RNA, 19 nt, Artificial Sequence
  Description of Artificial Sequence: Synthetic oligonucleotide
  Antisense strand to SEQ ID NO: 2154896
ugucuuacuaguaagacca

SEQ ID NO: 2154898 - RNA, 19 nt, Artificial Sequence
  Description of Artificial Sequence: Synthetic oligonucleotide
  Sense strand starting at position 2822 of SEQ ID NO: 1882886
gaaaguacuuaaugaaugu

SEQ ID NO: 2154899 - RNA, 19 nt, Artificial Sequence
  Description of Artificial Sequence: Synthetic oligonucleotide
  Antisense strand to SEQ ID NO: 2154898
acauucauuaaguacuuuc

SEQ ID NO: 2154900 - RNA, 19 nt, Artificial Sequence
  Description of Artificial Sequence: Synthetic oligonucleotide
  Sense strand starting at position 2882 of SEQ ID NO: 1882886
auagaagcuuucuuacgaa

SEQ ID NO: 2154901 - RNA, 19 nt, Artificial Sequence
  Description of Artificial Sequence: Synthetic oligonucleotide
  Antisense strand to SEQ ID NO: 2154900
uucguaagaaagcuucuau

SEQ ID NO: 2154902 - RNA, 19 nt, Artificial Sequence
  Description of Artificial Sequence: Synthetic oligonucleotide
  Sense strand starting at position 3027 of SEQ ID NO: 1882886
ugauauggcagucagauca

SEQ ID NO: 2154903 - RNA, 19 nt, Artificial Sequence
  Description of Artificial Sequence: Synthetic oligonucleotide
  Antisense strand to SEQ ID NO: 2154902
ugaucugacugccauauca

SEQ ID NO: 2154904 - RNA, 19 nt, Artificial Sequence
  Description of Artificial Sequence: Synthetic oligonucleotide
  Sense strand starting at position 3103 of SEQ ID NO: 1882886
ucucucagguaucagauuu

SEQ ID NO: 2154905 - RNA, 19 nt, Artificial Sequence
  Description of Artificial Sequence: Synthetic oligonucleotide
  Antisense strand to SEQ ID NO: 2154904
aaaucugauaccugagaga

SEQ ID NO: 2154906 - RNA, 19 nt, Artificial Sequence
  Description of Artificial Sequence: Synthetic oligonucleotide
  Sense strand starting at position 3529 of SEQ ID NO: 1882886
acuugccauuuagggaaua

SEQ ID NO: 2154907 - RNA, 19 nt, Artificial Sequence
  Description of Artificial Sequence: Synthetic oligonucleotide
  Antisense strand to SEQ ID NO: 2154906
uauucccuaaauggcaagu

SEQ ID NO: 2154908 - RNA, 19 nt, Artificial Sequence
  Description of Artificial Sequence: Synthetic oligonucleotide
  Sense strand starting at position 3542 of SEQ ID NO: 1882886
ggaauaggcuaagauuucu

SEQ ID NO: 2154909 - RNA, 19 nt, Artificial Sequence
  Description of Artificial Sequence: Synthetic oligonucleotide
  Antisense strand to SEQ ID NO: 2154908
agaaaucuuagccuauucc

SEQ ID NO: 2154910 - RNA, 19 nt, Artificial Sequence
  Description of Artificial Sequence: Synthetic oligonucleotide
  Sense strand starting at position 3928 of SEQ ID NO: 1882886
acuguacuguuagauauuu

SEQ ID NO: 2154911 - RNA, 19 nt, Artificial Sequence
  Description of Artificial Sequence: Synthetic oligonucleotide
  Antisense strand to SEQ ID NO: 2154910
aaauaucuaacaguacagu

SEQ ID NO: 2154912 - RNA, 19 nt, Artificial Sequence
  Description of Artificial Sequence: Synthetic oligonucleotide
  Sense strand starting at position 104 of SEQ ID NO: 1882887
ugcucaaacugacuaguaa

SEQ ID NO: 2154913 - RNA, 19 nt, Artificial Sequence
  Description of Artificial Sequence: Synthetic oligonucleotide
  Antisense strand to SEQ ID NO: 2154912
uuacuagucaguuugagca

SEQ ID NO: 2154914 - RNA, 19 nt, Artificial Sequence
  Description of Artificial Sequence: Synthetic oligonucleotide
  Sense strand starting at position 105 of SEQ ID NO: 1882887
gcucaaacugacuaguaau

SEQ ID NO: 2154915 - RNA, 19 nt, Artificial Sequence
  Description of Artificial Sequence: Synthetic oligonucleotide
  Antisense strand to SEQ ID NO: 2154914
auuacuagucaguuugagc

SEQ ID NO: 2154916 - RNA, 19 nt, Artificial Sequence
  Description of Artificial Sequence: Synthetic oligonucleotide
  Sense strand starting at position 455 of SEQ ID NO: 1882887
auauuaugcaaauguggga

SEQ ID NO: 2154917 - RNA, 19 nt, Artificial Sequence
  Description of Artificial Sequence: Synthetic oligonucleotide
  Antisense strand to SEQ ID NO: 2154916
ucccacauuugcauaauau

SEQ ID NO: 2154918 - RNA, 19 nt, Artificial Sequence
  Description of Artificial Sequence: Synthetic oligonucleotide
  Sense strand starting at position 668 of SEQ ID NO: 1882887
ggaaauggguguagggaau

SEQ ID NO: 2154919 - RNA, 19 nt, Artificial Sequence
  Description of Artificial Sequence: Synthetic oligonucleotide
  Antisense strand to SEQ ID NO: 2154918
auucccuacacccauuucc

SEQ ID NO: 2154920 - RNA, 19 nt, Artificial Sequence
  Description of Artificial Sequence: Synthetic oligonucleotide
  Sense strand starting at position 732 of SEQ ID NO: 1882887
uggccuuagggugacaaua

SEQ ID NO: 2154921 - RNA, 19 nt, Artificial Sequence
  Description of Artificial Sequence: Synthetic oligonucleotide
  Antisense strand to SEQ ID NO: 2154920
uauugucacccuaaggcca

SEQ ID NO: 2154922 - RNA, 19 nt, Artificial Sequence
  Description of Artificial Sequence: Synthetic oligonucleotide
  Sense strand starting at position 756 of SEQ ID NO: 1882887
ugaacugagcaguaugcau

SEQ ID NO: 2154923 - RNA, 19 nt, Artificial Sequence
  Description of Artificial Sequence: Synthetic oligonucleotide
  Antisense strand to SEQ ID NO: 2154922
augcauacugcucaguuca

SEQ ID NO: 2154924 - RNA, 19 nt, Artificial Sequence
  Description of Artificial Sequence: Synthetic oligonucleotide
  Sense strand starting at position 783 of SEQ ID NO: 1882887
uccauaucugagggccaau

SEQ ID NO: 2154925 - RNA, 19 nt, Artificial Sequence
  Description of Artificial Sequence: Synthetic oligonucleotide
  Antisense strand to SEQ ID NO: 2154924
auuggcccucagauaugga

SEQ ID NO: 2154926 - RNA, 19 nt, Artificial Sequence
  Description of Artificial Sequence: Synthetic oligonucleotide
  Sense strand starting at position 820 of SEQ ID NO: 1882887
ugaguucuuguacagauua

SEQ ID NO: 2154927 - RNA, 19 nt, Artificial Sequence
  Description of Artificial Sequence: Synthetic oligonucleotide
  Antisense strand to SEQ ID NO: 2154926
uaaucuguacaagaacuca

SEQ ID NO: 2154928 - RNA, 19 nt, Artificial Sequence
  Description of Artificial Sequence: Synthetic oligonucleotide
  Sense strand starting at position 873 of SEQ ID NO: 1882887
ggaggugcucaacaccuau

SEQ ID NO: 2154929 - RNA, 19 nt, Artificial Sequence
  Description of Artificial Sequence: Synthetic oligonucleotide
  Antisense strand to SEQ ID NO: 2154928
auagguguugagcaccucc

SEQ ID NO: 2154930 - RNA, 19 nt, Artificial Sequence
  Description of Artificial Sequence: Synthetic oligonucleotide
  Sense strand starting at position 976 of SEQ ID NO: 1882887
gucucaagagaaugaggua

SEQ ID NO: 2154931 - RNA, 19 nt, Artificial Sequence
  Description of Artificial Sequence: Synthetic oligonucleotide
  Antisense strand to SEQ ID NO: 2154930
uaccucauucucuugagac

SEQ ID NO: 2154932 - RNA, 19 nt, Artificial Sequence
  Description of Artificial Sequence: Synthetic oligonucleotide
  Sense strand starting at position 1001 of SEQ ID NO: 1882887
guagcacucagauaugagu

SEQ ID NO: 2154933 - RNA, 19 nt, Artificial Sequence
  Description of Artificial Sequence: Synthetic oligonucleotide
  Antisense strand to SEQ ID NO: 2154932
acucauaucugagugcuac

SEQ ID NO: 2154934 - RNA, 19 nt, Artificial Sequence
  Description of Artificial Sequence: Synthetic oligonucleotide
  Sense strand starting at position 1007 of SEQ ID NO: 1882887
cucagauaugaguguagaa

SEQ ID NO: 2154935 - RNA, 19 nt, Artificial Sequence
  Description of Artificial Sequence: Synthetic oligonucleotide
  Antisense strand to SEQ ID NO: 2154934
uucuacacucauaucugag

SEQ ID NO: 2154936 - RNA, 19 nt, Artificial Sequence
  Description of Artificial Sequence: Synthetic oligonucleotide
  Sense strand starting at position 1341 of SEQ ID NO: 1882887
augauuaguguauacagua

SEQ ID NO: 2154937 - RNA, 19 nt, Artificial Sequence
  Description of Artificial Sequence: Synthetic oligonucleotide
  Antisense strand to SEQ ID NO: 2154936
uacuguauacacuaaucau

SEQ ID NO: 2154938 - RNA, 19 nt, Artificial Sequence
  Description of Artificial Sequence: Synthetic oligonucleotide
  Sense strand starting at position 1490 of SEQ ID NO: 1882887
uugguuuacccauagcaag

SEQ ID NO: 2154939 - RNA, 19 nt, Artificial Sequence
  Description of Artificial Sequence: Synthetic oligonucleotide
  Antisense strand to SEQ ID NO: 2154938
cuugcuauggguaaaccaa

SEQ ID NO: 2154940 - RNA, 19 nt, Artificial Sequence
  Description of Artificial Sequence: Synthetic oligonucleotide
  Sense strand starting at position 1607 of SEQ ID NO: 1882887
cuuuauucuagggaugguu

SEQ ID NO: 2154941 - RNA, 19 nt, Artificial Sequence
  Description of Artificial Sequence: Synthetic oligonucleotide
  Antisense strand to SEQ ID NO: 2154940
aaccaucccuagaauaaag

SEQ ID NO: 2154942 - RNA, 19 nt, Artificial Sequence
  Description of Artificial Sequence: Synthetic oligonucleotide
  Sense strand starting at position 1616 of SEQ ID NO: 1882887
agggaugguucagcuaacu

SEQ ID NO: 2154943 - RNA, 19 nt, Artificial Sequence
  Description of Artificial Sequence: Synthetic oligonucleotide
  Antisense strand to SEQ ID NO: 2154942
aguuagcugaaccaucccu

SEQ ID NO: 2154944 - RNA, 19 nt, Artificial Sequence
  Description of Artificial Sequence: Synthetic oligonucleotide
  Sense strand starting at position 1751 of SEQ ID NO: 1882887
cagagaauguaacucuguu

SEQ ID NO: 2154945 - RNA, 19 nt, Artificial Sequence
  Description of Artificial Sequence: Synthetic oligonucleotide
  Antisense strand to SEQ ID NO: 2154944
aacagaguuacauucucug

SEQ ID NO: 2154946 - RNA, 19 nt, Artificial Sequence
  Description of Artificial Sequence: Synthetic oligonucleotide
  Sense strand starting at position 1755 of SEQ ID NO: 1882887
gaauguaacucuguugaau

SEQ ID NO: 2154947 - RNA, 19 nt, Artificial Sequence
  Description of Artificial Sequence: Synthetic oligonucleotide
  Antisense strand to SEQ ID NO: 2154946
auucaacagaguuacauuc

SEQ ID NO: 2154948 - RNA, 19 nt, Artificial Sequence
  Description of Artificial Sequence: Synthetic oligonucleotide
  Sense strand starting at position 1805 of SEQ ID NO: 1882887
gguuaauagugacuaggau

SEQ ID NO: 2154949 - RNA, 19 nt, Artificial Sequence
  Description of Artificial Sequence: Synthetic oligonucleotide
  Antisense strand to SEQ ID NO: 2154948
auccuagucacuauuaacc

SEQ ID NO: 2154950 - RNA, 19 nt, Artificial Sequence
  Description of Artificial Sequence: Synthetic oligonucleotide
  Sense strand starting at position 1882 of SEQ ID NO: 1882887
uucuaacacugcucagaug

SEQ ID NO: 2154951 - RNA, 19 nt, Artificial Sequence
  Description of Artificial Sequence: Synthetic oligonucleotide
  Antisense strand to SEQ ID NO: 2154950
caucugagcaguguuagaa

SEQ ID NO: 2154952 - RNA, 19 nt, Artificial Sequence
  Description of Artificial Sequence: Synthetic oligonucleotide
  Sense strand starting at position 1903 of SEQ ID NO: 1882887
ggcugaagacuuugggacu

SEQ ID NO: 2154953 - RNA, 19 nt, Artificial Sequence
  Description of Artificial Sequence: Synthetic oligonucleotide
  Antisense strand to SEQ ID NO: 2154952
agucccaaagucuucagcc

SEQ ID NO: 2154954 - RNA, 19 nt, Artificial Sequence
  Description of Artificial Sequence: Synthetic oligonucleotide
  Sense strand starting at position 1922 of SEQ ID NO: 1882887
ucaggcuaucccugacaaa

SEQ ID NO: 2154955 - RNA, 19 nt, Artificial Sequence
  Description of Artificial Sequence: Synthetic oligonucleotide
  Antisense strand to SEQ ID NO: 2154954
uuugucagggauagccuga

SEQ ID NO: 2154956 - RNA, 19 nt, Artificial Sequence
  Description of Artificial Sequence: Synthetic oligonucleotide
  Sense strand starting at position 1965 of SEQ ID NO: 1882887
gugauugaggcucagaaug

SEQ ID NO: 2154957 - RNA, 19 nt, Artificial Sequence
  Description of Artificial Sequence: Synthetic oligonucleotide
  Antisense strand to SEQ ID NO: 2154956
cauucugagccucaaucac

SEQ ID NO: 2154958 - RNA, 19 nt, Artificial Sequence
  Description of Artificial Sequence: Synthetic oligonucleotide
  Sense strand starting at position 2270 of SEQ ID NO: 1882887
augaaacucuaguuuguau

SEQ ID NO: 2154959 - RNA, 19 nt, Artificial Sequence
  Description of Artificial Sequence: Synthetic oligonucleotide
  Antisense strand to SEQ ID NO: 2154958
auacaaacuagaguuucau

SEQ ID NO: 2154960 - RNA, 19 nt, Artificial Sequence
  Description of Artificial Sequence: Synthetic oligonucleotide
  Sense strand starting at position 2503 of SEQ ID NO: 1882887
cugggaacgcccuaugaga

SEQ ID NO: 2154961 - RNA, 19 nt, Artificial Sequence
  Description of Artificial Sequence: Synthetic oligonucleotide
  Antisense strand to SEQ ID NO: 2154960
ucucauagggcguucccag

SEQ ID NO: 2154962 - RNA, 19 nt, Artificial Sequence
  Description of Artificial Sequence: Synthetic oligonucleotide
  Sense strand starting at position 2602 of SEQ ID NO: 1882887
cuggaaugauguccaauca

SEQ ID NO: 2154963 - RNA, 19 nt, Artificial Sequence
  Description of Artificial Sequence: Synthetic oligonucleotide
  Antisense strand to SEQ ID NO: 2154962
ugauuggacaucauuccag

SEQ ID NO: 2154964 - RNA, 19 nt, Artificial Sequence
  Description of Artificial Sequence: Synthetic oligonucleotide
  Sense strand starting at position 2775 of SEQ ID NO: 1882887
aauagaagucaaugaguau

SEQ ID NO: 2154965 - RNA, 19 nt, Artificial Sequence
  Description of Artificial Sequence: Synthetic oligonucleotide
  Antisense strand to SEQ ID NO: 2154964
auacucauugacuucuauu

SEQ ID NO: 2154966 - RNA, 19 nt, Artificial Sequence
  Description of Artificial Sequence: Synthetic oligonucleotide
  Sense strand starting at position 2779 of SEQ ID NO: 1882887
gaagucaaugaguauguga

SEQ ID NO: 2154967 - RNA, 19 nt, Artificial Sequence
  Description of Artificial Sequence: Synthetic oligonucleotide
  Antisense strand to SEQ ID NO: 2154966
ucacauacucauugacuuc

SEQ ID NO: 2154968 - RNA, 19 nt, Artificial Sequence
  Description of Artificial Sequence: Synthetic oligonucleotide
  Sense strand starting at position 2781 of SEQ ID NO: 1882887
agucaaugaguaugugaaa

SEQ ID NO: 2154969 - RNA, 19 nt, Artificial Sequence
  Description of Artificial Sequence: Synthetic oligonucleotide
  Antisense strand to SEQ ID NO: 2154968
uuucacauacucauugacu

SEQ ID NO: 2154970 - RNA, 19 nt, Artificial Sequence
  Description of Artificial Sequence: Synthetic oligonucleotide
  Sense strand starting at position 2832 of SEQ ID NO: 1882887
cucaucucugaaugagauu

SEQ ID NO: 2154971 - RNA, 19 nt, Artificial Sequence
  Description of Artificial Sequence: Synthetic oligonucleotide
  Antisense strand to SEQ ID NO: 2154970
aaucucauucagagaugag

SEQ ID NO: 2154972 - RNA, 19 nt, Artificial Sequence
  Description of Artificial Sequence: Synthetic oligonucleotide
  Sense strand starting at position 2916 of SEQ ID NO: 1882887
ggaagaggcugaccucaua

SEQ ID NO: 2154973 - RNA, 19 nt, Artificial Sequence
  Description of Artificial Sequence: Synthetic oligonucleotide
  Antisense strand to SEQ ID NO: 2154972
uaugaggucagccucuucc

SEQ ID NO: 2154974 - RNA, 19 nt, Artificial Sequence
  Description of Artificial Sequence: Synthetic oligonucleotide
  Sense strand starting at position 3025 of SEQ ID NO: 1882887
acuagaugguucuuuaaag

SEQ ID NO: 2154975 - RNA, 19 nt, Artificial Sequence
  Description of Artificial Sequence: Synthetic oligonucleotide
  Antisense strand to SEQ ID NO: 2154974
cuuuaaagaaccaucuagu

SEQ ID NO: 2154976 - RNA, 19 nt, Artificial Sequence
  Description of Artificial Sequence: Synthetic oligonucleotide
  Sense strand starting at position 3042 of SEQ ID NO: 1882887
aguuaaucacaacaugguu

SEQ ID NO: 2154977 - RNA, 19 nt, Artificial Sequence
  Description of Artificial Sequence: Synthetic oligonucleotide
  Antisense strand to SEQ ID NO: 2154976
aaccauguugugauuaacu

SEQ ID NO: 2154978 - RNA, 19 nt, Artificial Sequence
  Description of Artificial Sequence: Synthetic oligonucleotide
  Sense strand starting at position 3247 of SEQ ID NO: 1882887
augguaauuuaagaacaga

SEQ ID NO: 2154979 - RNA, 19 nt, Artificial Sequence
  Description of Artificial Sequence: Synthetic oligonucleotide
  Antisense strand to SEQ ID NO: 2154978
ucuguucuuaaauuaccau

SEQ ID NO: 2154980 - RNA, 19 nt, Artificial Sequence
  Description of Artificial Sequence: Synthetic oligonucleotide
  Sense strand starting at position 3330 of SEQ ID NO: 1882887
ccugaaaugccgucuugcu

SEQ ID NO: 2154981 - RNA, 19 nt, Artificial Sequence
  Description of Artificial Sequence: Synthetic oligonucleotide
  Antisense strand to SEQ ID NO: 2154980
agcaagacggcauuucagg

SEQ ID NO: 2154982 - RNA, 19 nt, Artificial Sequence
  Description of Artificial Sequence: Synthetic oligonucleotide
  Sense strand starting at position 3331 of SEQ ID NO: 1882887
cugaaaugccgucuugcuu

SEQ ID NO: 2154983 - RNA, 19 nt, Artificial Sequence
  Description of Artificial Sequence: Synthetic oligonucleotide
  Antisense strand to SEQ ID NO: 2154982
aagcaagacggcauuucag

SEQ ID NO: 2154984 - RNA, 19 nt, Artificial Sequence
  Description of Artificial Sequence: Synthetic oligonucleotide
  Sense strand starting at position 3412 of SEQ ID NO: 1882887
auaggucuccaugagcagu

SEQ ID NO: 2154985 - RNA, 19 nt, Artificial Sequence
  Description of Artificial Sequence: Synthetic oligonucleotide
  Antisense strand to SEQ ID NO: 2154984
acugcucauggagaccuau

SEQ ID NO: 2154986 - RNA, 19 nt, Artificial Sequence
  Description of Artificial Sequence: Synthetic oligonucleotide
  Sense strand starting at position 3571 of SEQ ID NO: 1882887
ugaauaggguuacugaagu

SEQ ID NO: 2154987 - RNA, 19 nt, Artificial Sequence
  Description of Artificial Sequence: Synthetic oligonucleotide
  Antisense strand to SEQ ID NO: 2154986
acuucaguaacccuauuca

SEQ ID NO: 2154988 - RNA, 19 nt, Artificial Sequence
  Description of Artificial Sequence: Synthetic oligonucleotide
  Sense strand starting at position 3807 of SEQ ID NO: 1882887
acacaaugucuuugagaag

SEQ ID NO: 2154989 - RNA, 19 nt, Artificial Sequence
  Description of Artificial Sequence: Synthetic oligonucleotide
  Antisense strand to SEQ ID NO: 2154988
cuucucaaagacauugugu

SEQ ID NO: 2154990 - RNA, 19 nt, Artificial Sequence
  Description of Artificial Sequence: Synthetic oligonucleotide
  Sense strand starting at position 3910 of SEQ ID NO: 1882887
agcugauacaggcaaguua

SEQ ID NO: 2154991 - RNA, 19 nt, Artificial Sequence
  Description of Artificial Sequence: Synthetic oligonucleotide
  Antisense strand to SEQ ID NO: 2154990
uaacuugccuguaucagcu

SEQ ID NO: 2154992 - RNA, 19 nt, Artificial Sequence
  Description of Artificial Sequence: Synthetic oligonucleotide
  Sense strand starting at position 4 of SEQ ID NO: 1882888
aguuuaugcaacuggguua

SEQ ID NO: 2154993 - RNA, 19 nt, Artificial Sequence
  Description of Artificial Sequence: Synthetic oligonucleotide
  Antisense strand to SEQ ID NO: 2154992
uaacccaguugcauaaacu

SEQ ID NO: 2154994 - RNA, 19 nt, Artificial Sequence
  Description of Artificial Sequence: Synthetic oligonucleotide
  Sense strand starting at position 5 of SEQ ID NO: 1882888
guuuaugcaacuggguuaa

SEQ ID NO: 2154995 - RNA, 19 nt, Artificial Sequence
  Description of Artificial Sequence: Synthetic oligonucleotide
  Antisense strand to SEQ ID NO: 2154994
uuaacccaguugcauaaac

SEQ ID NO: 2154996 - RNA, 19 nt, Artificial Sequence
  Description of Artificial Sequence: Synthetic oligonucleotide
  Sense strand starting at position 17 of SEQ ID NO: 1882888
ggguuaacauguuuacuuc

SEQ ID NO: 2154997 - RNA, 19 nt, Artificial Sequence
  Description of Artificial Sequence: Synthetic oligonucleotide
  Antisense strand to SEQ ID NO: 2154996
gaaguaaacauguuaaccc

SEQ ID NO: 2154998 - RNA, 19 nt, Artificial Sequence
  Description of Artificial Sequence: Synthetic oligonucleotide
  Sense strand starting at position 182 of SEQ ID NO: 1882888
aacuguaauugauugugau

SEQ ID NO: 2154999 - RNA, 19 nt, Artificial Sequence
  Description of Artificial Sequence: Synthetic oligonucleotide
  Antisense strand to SEQ ID NO: 2154998
aucacaaucaauuacaguu

SEQ ID NO: 2155000 - RNA, 19 nt, Artificial Sequence
  Description of Artificial Sequence: Synthetic oligonucleotide
  Sense strand starting at position 183 of SEQ ID NO: 1882888
acuguaauugauugugauc

SEQ ID NO: 2155001 - RNA, 19 nt, Artificial Sequence
  Description of Artificial Sequence: Synthetic oligonucleotide
  Antisense strand to SEQ ID NO: 2155000
gaucacaaucaauuacagu

SEQ ID NO: 2155002 - RNA, 19 nt, Artificial Sequence
  Description of Artificial Sequence: Synthetic oligonucleotide
  Sense strand starting at position 648 of SEQ ID NO: 1882888
aagugagguucugugaaug

SEQ ID NO: 2155003 - RNA, 19 nt, Artificial Sequence
  Description of Artificial Sequence: Synthetic oligonucleotide
  Antisense strand to SEQ ID NO: 2155002
cauucacagaaccucacuu

SEQ ID NO: 2155004 - RNA, 19 nt, Artificial Sequence
  Description of Artificial Sequence: Synthetic oligonucleotide
  Sense strand starting at position 653 of SEQ ID NO: 1882888
agguucugugaaugaaaca

SEQ ID NO: 2155005 - RNA, 19 nt, Artificial Sequence
  Description of Artificial Sequence: Synthetic oligonucleotide
  Antisense strand to SEQ ID NO: 2155004
uguuucauucacagaaccu

SEQ ID NO: 2155006 - RNA, 19 nt, Artificial Sequence
  Description of Artificial Sequence: Synthetic oligonucleotide
  Sense strand starting at position 684 of SEQ ID NO: 1882888
gugaguauacauuaaguau

SEQ ID NO: 2155007 - RNA, 19 nt, Artificial Sequence
  Description of Artificial Sequence: Synthetic oligonucleotide
  Antisense strand to SEQ ID NO: 2155006
auacuuaauguauacucac

SEQ ID NO: 2155008 - RNA, 19 nt, Artificial Sequence
  Description of Artificial Sequence: Synthetic oligonucleotide
  Sense strand starting at position 1002 of SEQ ID NO: 1882888
cugagccuguaguuauaga

SEQ ID NO: 2155009 - RNA, 19 nt, Artificial Sequence
  Description of Artificial Sequence: Synthetic oligonucleotide
  Antisense strand to SEQ ID NO: 2155008
ucuauaacuacaggcucag

SEQ ID NO: 2155010 - RNA, 19 nt, Artificial Sequence
  Description of Artificial Sequence: Synthetic oligonucleotide
  Sense strand starting at position 1003 of SEQ ID NO: 1882888
ugagccuguaguuauagaa

SEQ ID NO: 2155011 - RNA, 19 nt, Artificial Sequence
  Description of Artificial Sequence: Synthetic oligonucleotide
  Antisense strand to SEQ ID NO: 2155010
uucuauaacuacaggcuca

SEQ ID NO: 2155012 - RNA, 19 nt, Artificial Sequence
  Description of Artificial Sequence: Synthetic oligonucleotide
  Sense strand starting at position 1007 of SEQ ID NO: 1882888
ccuguaguuauagaaggua

SEQ ID NO: 2155013 - RNA, 19 nt, Artificial Sequence
  Description of Artificial Sequence: Synthetic oligonucleotide
  Antisense strand to SEQ ID NO: 2155012
uaccuucuauaacuacagg

SEQ ID NO: 2155014 - RNA, 19 nt, Artificial Sequence
  Description of Artificial Sequence: Synthetic oligonucleotide
  Sense strand starting at position 1010 of SEQ ID NO: 1882888
guaguuauagaagguagaa

SEQ ID NO: 2155015 - RNA, 19 nt, Artificial Sequence
  Description of Artificial Sequence: Synthetic oligonucleotide
  Antisense strand to SEQ ID NO: 2155014
uucuaccuucuauaacuac

SEQ ID NO: 2155016 - RNA, 19 nt, Artificial Sequence
  Description of Artificial Sequence: Synthetic oligonucleotide
  Sense strand starting at position 1083 of SEQ ID NO: 1882888
uaauguaucccauguagug

SEQ ID NO: 2155017 - RNA, 19 nt, Artificial Sequence
  Description of Artificial Sequence: Synthetic oligonucleotide
  Antisense strand to SEQ ID NO: 2155016
cacuacaugggauacauua

SEQ ID NO: 2155018 - RNA, 19 nt, Artificial Sequence
  Description of Artificial Sequence: Synthetic oligonucleotide
  Sense strand starting at position 1130 of SEQ ID NO: 1882888
agaugaagguguuugcuau

SEQ ID NO: 2155019 - RNA, 19 nt, Artificial Sequence
  Description of Artificial Sequence: Synthetic oligonucleotide
  Antisense strand to SEQ ID NO: 2155018
auagcaaacaccuucaucu

SEQ ID NO: 2155020 - RNA, 19 nt, Artificial Sequence
  Description of Artificial Sequence: Synthetic oligonucleotide
  Sense strand starting at position 1131 of SEQ ID NO: 1882888
gaugaagguguuugcuaug

SEQ ID NO: 2155021 - RNA, 19 nt, Artificial Sequence
  Description of Artificial Sequence: Synthetic oligonucleotide
  Antisense strand to SEQ ID NO: 2155020
cauagcaaacaccuucauc

SEQ ID NO: 2155022 - RNA, 19 nt, Artificial Sequence
  Description of Artificial Sequence: Synthetic oligonucleotide
  Sense strand starting at position 1176 of SEQ ID NO: 1882888
ccuaguagaccuuggugaa

SEQ ID NO: 2155023 - RNA, 19 nt, Artificial Sequence
  Description of Artificial Sequence: Synthetic oligonucleotide
  Antisense strand to SEQ ID NO: 2155022
uucaccaaggucuacuagg

SEQ ID NO: 2155024 - RNA, 19 nt, Artificial Sequence
  Description of Artificial Sequence: Synthetic oligonucleotide
  Sense strand starting at position 1177 of SEQ ID NO: 1882888
cuaguagaccuuggugaau

SEQ ID NO: 2155025 - RNA, 19 nt, Artificial Sequence
  Description of Artificial Sequence: Synthetic oligonucleotide
  Antisense strand to SEQ ID NO: 2155024
auucaccaaggucuacuag

SEQ ID NO: 2155026 - RNA, 19 nt, Artificial Sequence
  Description of Artificial Sequence: Synthetic oligonucleotide
  Sense strand starting at position 1180 of SEQ ID NO: 1882888
guagaccuuggugaaucua

SEQ ID NO: 2155027 - RNA, 19 nt, Artificial Sequence
  Description of Artificial Sequence: Synthetic oligonucleotide
  Antisense strand to SEQ ID NO: 2155026
uagauucaccaaggucuac

SEQ ID NO: 2155028 - RNA, 19 nt, Artificial Sequence
  Description of Artificial Sequence: Synthetic oligonucleotide
  Sense strand starting at position 1275 of SEQ ID NO: 1882888
ccauaaauuuaucaguggu

SEQ ID NO: 2155029 - RNA, 19 nt, Artificial Sequence
  Description of Artificial Sequence: Synthetic oligonucleotide
  Antisense strand to SEQ ID NO: 2155028
accacugauaaauuuaugg

SEQ ID NO: 2155030 - RNA, 19 nt, Artificial Sequence
  Description of Artificial Sequence: Synthetic oligonucleotide
  Sense strand starting at position 1283 of SEQ ID NO: 1882888
uuaucagugguuuacagag

SEQ ID NO: 2155031 - RNA, 19 nt, Artificial Sequence
  Description of Artificial Sequence: Synthetic oligonucleotide
  Antisense strand to SEQ ID NO: 2155030
cucuguaaaccacugauaa

SEQ ID NO: 2155032 - RNA, 19 nt, Artificial Sequence
  Description of Artificial Sequence: Synthetic oligonucleotide
  Sense strand starting at position 1356 of SEQ ID NO: 1882888
cuguuuagauacccaagga

SEQ ID NO: 2155033 - RNA, 19 nt, Artificial Sequence
  Description of Artificial Sequence: Synthetic oligonucleotide
  Antisense strand to SEQ ID NO: 2155032
uccuuggguaucuaaacag

SEQ ID NO: 2155034 - RNA, 19 nt, Artificial Sequence
  Description of Artificial Sequence: Synthetic oligonucleotide
  Sense strand starting at position 1426 of SEQ ID NO: 1882888
gcagacuguuaauuaagaa

SEQ ID NO: 2155035 - RNA, 19 nt, Artificial Sequence
  Description of Artificial Sequence: Synthetic oligonucleotide
  Antisense strand to SEQ ID NO: 2155034
uucuuaauuaacagucugc

SEQ ID NO: 2155036 - RNA, 19 nt, Artificial Sequence
  Description of Artificial Sequence: Synthetic oligonucleotide
  Sense strand starting at position 1483 of SEQ ID NO: 1882888
uuauuugaauccuggauca

SEQ ID NO: 2155037 - RNA, 19 nt, Artificial Sequence
  Description of Artificial Sequence: Synthetic oligonucleotide
  Antisense strand to SEQ ID NO: 2155036
ugauccaggauucaaauaa

SEQ ID NO: 2155038 - RNA, 19 nt, Artificial Sequence
  Description of Artificial Sequence: Synthetic oligonucleotide
  Sense strand starting at position 1627 of SEQ ID NO: 1882888
aguuuagagaaauggcaca

SEQ ID NO: 2155039 - RNA, 19 nt, Artificial Sequence
  Description of Artificial Sequence: Synthetic oligonucleotide
  Antisense strand to SEQ ID NO: 2155038
ugugccauuucucuaaacu

SEQ ID NO: 2155040 - RNA, 19 nt, Artificial Sequence
  Description of Artificial Sequence: Synthetic oligonucleotide
  Sense strand starting at position 1667 of SEQ ID NO: 1882888
aagaaugauuugcagaugu

SEQ ID NO: 2155041 - RNA, 19 nt, Artificial Sequence
  Description of Artificial Sequence: Synthetic oligonucleotide
  Antisense strand to SEQ ID NO: 2155040
acaucugcaaaucauucuu

SEQ ID NO: 2155042 - RNA, 19 nt, Artificial Sequence
  Description of Artificial Sequence: Synthetic oligonucleotide
  Sense strand starting at position 1675 of SEQ ID NO: 1882888
uuugcagauguugguauaa

SEQ ID NO: 2155043 - RNA, 19 nt, Artificial Sequence
  Description of Artificial Sequence: Synthetic oligonucleotide
  Antisense strand to SEQ ID NO: 2155042
uuauaccaacaucugcaaa

SEQ ID NO: 2155044 - RNA, 19 nt, Artificial Sequence
  Description of Artificial Sequence: Synthetic oligonucleotide
  Sense strand starting at position 1904 of SEQ ID NO: 1882888
gugggagaaucaccuugua

SEQ ID NO: 2155045 - RNA, 19 nt, Artificial Sequence
  Description of Artificial Sequence: Synthetic oligonucleotide
  Antisense strand to SEQ ID NO: 2155044
uacaaggugauucucccac

SEQ ID NO: 2155046 - RNA, 19 nt, Artificial Sequence
  Description of Artificial Sequence: Synthetic oligonucleotide
  Sense strand starting at position 2274 of SEQ ID NO: 1882888
ggcagacaauucuuccaca

SEQ ID NO: 2155047 - RNA, 19 nt, Artificial Sequence
  Description of Artificial Sequence: Synthetic oligonucleotide
  Antisense strand to SEQ ID NO: 2155046
uguggaagaauugucugcc

SEQ ID NO: 2155048 - RNA, 19 nt, Artificial Sequence
  Description of Artificial Sequence: Synthetic oligonucleotide
  Sense strand starting at position 2628 of SEQ ID NO: 1882888
agugauagggagugcugua

SEQ ID NO: 2155049 - RNA, 19 nt, Artificial Sequence
  Description of Artificial Sequence: Synthetic oligonucleotide
  Antisense strand to SEQ ID NO: 2155048
uacagcacucccuaucacu

SEQ ID NO: 2155050 - RNA, 19 nt, Artificial Sequence
  Description of Artificial Sequence: Synthetic oligonucleotide
  Sense strand starting at position 2633 of SEQ ID NO: 1882888
uagggagugcuguaaauac

SEQ ID NO: 2155051 - RNA, 19 nt, Artificial Sequence
  Description of Artificial Sequence: Synthetic oligonucleotide
  Antisense strand to SEQ ID NO: 2155050
guauuuacagcacucccua

SEQ ID NO: 2155052 - RNA, 19 nt, Artificial Sequence
  Description of Artificial Sequence: Synthetic oligonucleotide
  Sense strand starting at position 2765 of SEQ ID NO: 1882888
gaaauuaagcuccagguca

SEQ ID NO: 2155053 - RNA, 19 nt, Artificial Sequence
  Description of Artificial Sequence: Synthetic oligonucleotide
  Antisense strand to SEQ ID NO: 2155052
ugaccuggagcuuaauuuc

SEQ ID NO: 2155054 - RNA, 19 nt, Artificial Sequence
  Description of Artificial Sequence: Synthetic oligonucleotide
  Sense strand starting at position 2772 of SEQ ID NO: 1882888
agcuccaggucauuacuaa

SEQ ID NO: 2155055 - RNA, 19 nt, Artificial Sequence
  Description of Artificial Sequence: Synthetic oligonucleotide
  Antisense strand to SEQ ID NO: 2155054
uuaguaaugaccuggagcu

SEQ ID NO: 2155056 - RNA, 19 nt, Artificial Sequence
  Description of Artificial Sequence: Synthetic oligonucleotide
  Sense strand starting at position 2773 of SEQ ID NO: 1882888
gcuccaggucauuacuaaa

SEQ ID NO: 2155057 - RNA, 19 nt, Artificial Sequence
  Description of Artificial Sequence: Synthetic oligonucleotide
  Antisense strand to SEQ ID NO: 2155056
uuuaguaaugaccuggagc

SEQ ID NO: 2155058 - RNA, 19 nt, Artificial Sequence
  Description of Artificial Sequence: Synthetic oligonucleotide
  Sense strand starting at position 2856 of SEQ ID NO: 1882888
aguaacuguugcccuuaaa

SEQ ID NO: 2155059 - RNA, 19 nt, Artificial Sequence
  Description of Artificial Sequence: Synthetic oligonucleotide
  Antisense strand to SEQ ID NO: 2155058
uuuaagggcaacaguuacu

SEQ ID NO: 2155060 - RNA, 19 nt, Artificial Sequence
  Description of Artificial Sequence: Synthetic oligonucleotide
  Sense strand starting at position 2915 of SEQ ID NO: 1882888
ugggauauuucaggaguua

SEQ ID NO: 2155061 - RNA, 19 nt, Artificial Sequence
  Description of Artificial Sequence: Synthetic oligonucleotide
  Antisense strand to SEQ ID NO: 2155060
uaacuccugaaauauccca

SEQ ID NO: 2155062 - RNA, 19 nt, Artificial Sequence
  Description of Artificial Sequence: Synthetic oligonucleotide
  Sense strand starting at position 2924 of SEQ ID NO: 1882888
ucaggaguuaugugauuau

SEQ ID NO: 2155063 - RNA, 19 nt, Artificial Sequence
  Description of Artificial Sequence: Synthetic oligonucleotide
  Antisense strand to SEQ ID NO: 2155062
auaaucacauaacuccuga

SEQ ID NO: 2155064 - RNA, 19 nt, Artificial Sequence
  Description of Artificial Sequence: Synthetic oligonucleotide
  Sense strand starting at position 2927 of SEQ ID NO: 1882888
ggaguuaugugauuauaaa

SEQ ID NO: 2155065 - RNA, 19 nt, Artificial Sequence
  Description of Artificial Sequence: Synthetic oligonucleotide
  Antisense strand to SEQ ID NO: 2155064
uuuauaaucacauaacucc

SEQ ID NO: 2155066 - RNA, 19 nt, Artificial Sequence
  Description of Artificial Sequence: Synthetic oligonucleotide
  Sense strand starting at position 3296 of SEQ ID NO: 1882888
cuggguuuacagugaaauu

SEQ ID NO: 2155067 - RNA, 19 nt, Artificial Sequence
  Description of Artificial Sequence: Synthetic oligonucleotide
  Antisense strand to SEQ ID NO: 2155066
aauuucacuguaaacccag

SEQ ID NO: 2155068 - RNA, 19 nt, Artificial Sequence
  Description of Artificial Sequence: Synthetic oligonucleotide
  Sense strand starting at position 3815 of SEQ ID NO: 1882888
agagcucuaaagugggauu

SEQ ID NO: 2155069 - RNA, 19 nt, Artificial Sequence
  Description of Artificial Sequence: Synthetic oligonucleotide
  Antisense strand to SEQ ID NO: 2155068
aaucccacuuuagagcucu

SEQ ID NO: 2155070 - RNA, 19 nt, Artificial Sequence
  Description of Artificial Sequence: Synthetic oligonucleotide
  Sense strand starting at position 3817 of SEQ ID NO: 1882888
agcucuaaagugggauuga

SEQ ID NO: 2155071 - RNA, 19 nt, Artificial Sequence
  Description of Artificial Sequence: Synthetic oligonucleotide
  Antisense strand to SEQ ID NO: 2155070
ucaaucccacuuuagagcu

SEQ ID NO: 2155072 - RNA, 19 nt, Artificial Sequence
  Description of Artificial Sequence: Synthetic oligonucleotide
  Sense strand starting at position 40 of SEQ ID NO: 1882889
cguggucacagguauuauu

SEQ ID NO: 2155073 - RNA, 19 nt, Artificial Sequence
  Description of Artificial Sequence: Synthetic oligonucleotide
  Antisense strand to SEQ ID NO: 2155072
aauaauaccugugaccacg

SEQ ID NO: 2155074 - RNA, 19 nt, Artificial Sequence
  Description of Artificial Sequence: Synthetic oligonucleotide
  Sense strand starting at position 148 of SEQ ID NO: 1882889
ugcaguaauuguuccugga

SEQ ID NO: 2155075 - RNA, 19 nt, Artificial Sequence
  Description of Artificial Sequence: Synthetic oligonucleotide
  Antisense strand to SEQ ID NO: 2155074
uccaggaacaauuacugca

SEQ ID NO: 2155076 - RNA, 19 nt, Artificial Sequence
  Description of Artificial Sequence: Synthetic oligonucleotide
  Sense strand starting at position 295 of SEQ ID NO: 1882889
gcagcuucugcuuagggaa

SEQ ID NO: 2155077 - RNA, 19 nt, Artificial Sequence
  Description of Artificial Sequence: Synthetic oligonucleotide
  Antisense strand to SEQ ID NO: 2155076
uucccuaagcagaagcugc

SEQ ID NO: 2155078 - RNA, 19 nt, Artificial Sequence
  Description of Artificial Sequence: Synthetic oligonucleotide
  Sense strand starting at position 347 of SEQ ID NO: 1882889
guggcucugcagcaguaaa

SEQ ID NO: 2155079 - RNA, 19 nt, Artificial Sequence
  Description of Artificial Sequence: Synthetic oligonucleotide
  Antisense strand to SEQ ID NO: 2155078
uuuacugcugcagagccac

SEQ ID NO: 2155080 - RNA, 19 nt, Artificial Sequence
  Description of Artificial Sequence: Synthetic oligonucleotide
  Sense strand starting at position 438 of SEQ ID NO: 1882889
gugggaggauuccagauaa

SEQ ID NO: 2155081 - RNA, 19 nt, Artificial Sequence
  Description of Artificial Sequence: Synthetic oligonucleotide
  Antisense strand to SEQ ID NO: 2155080
uuaucuggaauccucccac

SEQ ID NO: 2155082 - RNA, 19 nt, Artificial Sequence
  Description of Artificial Sequence: Synthetic oligonucleotide
  Sense strand starting at position 476 of SEQ ID NO: 1882889
gccauuuccuggccgcaga

SEQ ID NO: 2155083 - RNA, 19 nt, Artificial Sequence
  Description of Artificial Sequence: Synthetic oligonucleotide
  Antisense strand to SEQ ID NO: 2155082
ucugcggccaggaaauggc

SEQ ID NO: 2155084 - RNA, 19 nt, Artificial Sequence
  Description of Artificial Sequence: Synthetic oligonucleotide
  Sense strand starting at position 533 of SEQ ID NO: 1882889
ucucauugucaguggugga

SEQ ID NO: 2155085 - RNA, 19 nt, Artificial Sequence
  Description of Artificial Sequence: Synthetic oligonucleotide
  Antisense strand to SEQ ID NO: 2155084
uccaccacugacaaugaga

SEQ ID NO: 2155086 - RNA, 19 nt, Artificial Sequence
  Description of Artificial Sequence: Synthetic oligonucleotide
  Sense strand starting at position 558 of SEQ ID NO: 1882889
gauggauguccgugugguc

SEQ ID NO: 2155087 - RNA, 19 nt, Artificial Sequence
  Description of Artificial Sequence: Synthetic oligonucleotide
  Antisense strand to SEQ ID NO: 2155086
gaccacacggacauccauc

SEQ ID NO: 2155088 - RNA, 19 nt, Artificial Sequence
  Description of Artificial Sequence: Synthetic oligonucleotide
  Sense strand starting at position 1310 of SEQ ID NO: 1882889
aggacuuuauuugaaggau

SEQ ID NO: 2155089 - RNA, 19 nt, Artificial Sequence
  Description of Artificial Sequence: Synthetic oligonucleotide
  Antisense strand to SEQ ID NO: 2155088
auccuucaaauaaaguccu

SEQ ID NO: 2155090 - RNA, 19 nt, Artificial Sequence
  Description of Artificial Sequence: Synthetic oligonucleotide
  Sense strand starting at position 1390 of SEQ ID NO: 1882889
uaggcaagucagugauaca

SEQ ID NO: 2155091 - RNA, 19 nt, Artificial Sequence
  Description of Artificial Sequence: Synthetic oligonucleotide
  Antisense strand to SEQ ID NO: 2155090
uguaucacugacuugccua

SEQ ID NO: 2155092 - RNA, 19 nt, Artificial Sequence
  Description of Artificial Sequence: Synthetic oligonucleotide
  Sense strand starting at position 1391 of SEQ ID NO: 1882889
aggcaagucagugauacag

SEQ ID NO: 2155093 - RNA, 19 nt, Artificial Sequence
  Description of Artificial Sequence: Synthetic oligonucleotide
  Antisense strand to SEQ ID NO: 2155092
cuguaucacugacuugccu

SEQ ID NO: 2155094 - RNA, 19 nt, Artificial Sequence
  Description of Artificial Sequence: Synthetic oligonucleotide
  Sense strand starting at position 1412 of SEQ ID NO: 1882889
aguggaagcuugucaucuu

SEQ ID NO: 2155095 - RNA, 19 nt, Artificial Sequence
  Description of Artificial Sequence: Synthetic oligonucleotide
  Antisense strand to SEQ ID NO: 2155094
aagaugacaagcuuccacu

SEQ ID NO: 2155096 - RNA, 19 nt, Artificial Sequence
  Description of Artificial Sequence: Synthetic oligonucleotide
  Sense strand starting at position 1423 of SEQ ID NO: 1882889
gucaucuucucgccauaca

SEQ ID NO: 2155097 - RNA, 19 nt, Artificial Sequence
  Description of Artificial Sequence: Synthetic oligonucleotide
  Antisense strand to SEQ ID NO: 2155096
uguauggcgagaagaugac

SEQ ID NO: 2155098 - RNA, 19 nt, Artificial Sequence
  Description of Artificial Sequence: Synthetic oligonucleotide
  Sense strand starting at position 1446 of SEQ ID NO: 1882889
ugggaucaaucagcaucaa

SEQ ID NO: 2155099 - RNA, 19 nt, Artificial Sequence
  Description of Artificial Sequence: Synthetic oligonucleotide
  Antisense strand to SEQ ID NO: 2155098
uugaugcugauugauccca

SEQ ID NO: 2155100 - RNA, 19 nt, Artificial Sequence
  Description of Artificial Sequence: Synthetic oligonucleotide
  Sense strand starting at position 1481 of SEQ ID NO: 1882889
cucaguauccuuuacagau

SEQ ID NO: 2155101 - RNA, 19 nt, Artificial Sequence
  Description of Artificial Sequence: Synthetic oligonucleotide
  Antisense strand to SEQ ID NO: 2155100
aucuguaaaggauacugag

SEQ ID NO: 2155102 - RNA, 19 nt, Artificial Sequence
  Description of Artificial Sequence: Synthetic oligonucleotide
  Sense strand starting at position 1537 of SEQ ID NO: 1882889
aggaccucuugagugacaa

SEQ ID NO: 2155103 - RNA, 19 nt, Artificial Sequence
  Description of Artificial Sequence: Synthetic oligonucleotide
  Antisense strand to SEQ ID NO: 2155102
uugucacucaagagguccu

SEQ ID NO: 2155104 - RNA, 19 nt, Artificial Sequence
  Description of Artificial Sequence: Synthetic oligonucleotide
  Sense strand starting at position 1538 of SEQ ID NO: 1882889
ggaccucuugagugacaac

SEQ ID NO: 2155105 - RNA, 19 nt, Artificial Sequence
  Description of Artificial Sequence: Synthetic oligonucleotide
  Antisense strand to SEQ ID NO: 2155104
guugucacucaagaggucc

SEQ ID NO: 2155106 - RNA, 19 nt, Artificial Sequence
  Description of Artificial Sequence: Synthetic oligonucleotide
  Sense strand starting at position 1611 of SEQ ID NO: 1882889
aggagaucaucuguauaca

SEQ ID NO: 2155107 - RNA, 19 nt, Artificial Sequence
  Description of Artificial Sequence: Synthetic oligonucleotide
  Antisense strand to SEQ ID NO: 2155106
uguauacagaugaucuccu

SEQ ID NO: 2155108 - RNA, 19 nt, Artificial Sequence
  Description of Artificial Sequence: Synthetic oligonucleotide
  Sense strand starting at position 1644 of SEQ ID NO: 1882889
gggagagcugugugaccuu

SEQ ID NO: 2155109 - RNA, 19 nt, Artificial Sequence
  Description of Artificial Sequence: Synthetic oligonucleotide
  Antisense strand to SEQ ID NO: 2155108
aaggucacacagcucuccc

SEQ ID NO: 2155110 - RNA, 19 nt, Artificial Sequence
  Description of Artificial Sequence: Synthetic oligonucleotide
  Sense strand starting at position 1724 of SEQ ID NO: 1882889
uggagucucucacuugaca

SEQ ID NO: 2155111 - RNA, 19 nt, Artificial Sequence
  Description of Artificial Sequence: Synthetic oligonucleotide
  Antisense strand to SEQ ID NO: 2155110
ugucaagugagagacucca

SEQ ID NO: 2155112 - RNA, 19 nt, Artificial Sequence
  Description of Artificial Sequence: Synthetic oligonucleotide
  Sense strand starting at position 1739 of SEQ ID NO: 1882889
gacauugcccacugguaaa

SEQ ID NO: 2155113 - RNA, 19 nt, Artificial Sequence
  Description of Artificial Sequence: Synthetic oligonucleotide
  Antisense strand to SEQ ID NO: 2155112
uuuaccagugggcaauguc

SEQ ID NO: 2155114 - RNA, 19 nt, Artificial Sequence
  Description of Artificial Sequence: Synthetic oligonucleotide
  Sense strand starting at position 1791 of SEQ ID NO: 1882889
aggcucagugcuggacuua

SEQ ID NO: 2155115 - RNA, 19 nt, Artificial Sequence
  Description of Artificial Sequence: Synthetic oligonucleotide
  Antisense strand to SEQ ID NO: 2155114
uaaguccagcacugagccu

SEQ ID NO: 2155116 - RNA, 19 nt, Artificial Sequence
  Description of Artificial Sequence: Synthetic oligonucleotide
  Sense strand starting at position 1792 of SEQ ID NO: 1882889
ggcucagugcuggacuuaa

SEQ ID NO: 2155117 - RNA, 19 nt, Artificial Sequence
  Description of Artificial Sequence: Synthetic oligonucleotide
  Antisense strand to SEQ ID NO: 2155116
uuaaguccagcacugagcc

SEQ ID NO: 2155118 - RNA, 19 nt, Artificial Sequence
  Description of Artificial Sequence: Synthetic oligonucleotide
  Sense strand starting at position 1866 of SEQ ID NO: 1882889
uuggguuugcugugacuca

SEQ ID NO: 2155119 - RNA, 19 nt, Artificial Sequence
  Description of Artificial Sequence: Synthetic oligonucleotide
  Antisense strand to SEQ ID NO: 2155118
ugagucacagcaaacccaa

SEQ ID NO: 2155120 - RNA, 19 nt, Artificial Sequence
  Description of Artificial Sequence: Synthetic oligonucleotide
  Sense strand starting at position 2257 of SEQ ID NO: 1882889
uccuucuuaugagacagaa

SEQ ID NO: 2155121 - RNA, 19 nt, Artificial Sequence
  Description of Artificial Sequence: Synthetic oligonucleotide
  Antisense strand to SEQ ID NO: 2155120
uucugucucauaagaagga

SEQ ID NO: 2155122 - RNA, 19 nt, Artificial Sequence
  Description of Artificial Sequence: Synthetic oligonucleotide
  Sense strand starting at position 2639 of SEQ ID NO: 1882889
gccaacuuagccugauuaa

SEQ ID NO: 2155123 - RNA, 19 nt, Artificial Sequence
  Description of Artificial Sequence: Synthetic oligonucleotide
  Antisense strand to SEQ ID NO: 2155122
uuaaucaggcuaaguuggc

SEQ ID NO: 2155124 - RNA, 19 nt, Artificial Sequence
  Description of Artificial Sequence: Synthetic oligonucleotide
  Sense strand starting at position 2661 of SEQ ID NO: 1882889
gcuccuggcugucucaaau

SEQ ID NO: 2155125 - RNA, 19 nt, Artificial Sequence
  Description of Artificial Sequence: Synthetic oligonucleotide
  Antisense strand to SEQ ID NO: 2155124
auuugagacagccaggagc

SEQ ID NO: 2155126 - RNA, 19 nt, Artificial Sequence
  Description of Artificial Sequence: Synthetic oligonucleotide
  Sense strand starting at position 2679 of SEQ ID NO: 1882889
ugagcuguuucuccaaggu

SEQ ID NO: 2155127 - RNA, 19 nt, Artificial Sequence
  Description of Artificial Sequence: Synthetic oligonucleotide
  Antisense strand to SEQ ID NO: 2155126
accuuggagaaacagcuca

SEQ ID NO: 2155128 - RNA, 19 nt, Artificial Sequence
  Description of Artificial Sequence: Synthetic oligonucleotide
  Sense strand starting at position 2901 of SEQ ID NO: 1882889
cucagcaugcaaugguuua

SEQ ID NO: 2155129 - RNA, 19 nt, Artificial Sequence
  Description of Artificial Sequence: Synthetic oligonucleotide
  Antisense strand to SEQ ID NO: 2155128
uaaaccauugcaugcugag

SEQ ID NO: 2155130 - RNA, 19 nt, Artificial Sequence
  Description of Artificial Sequence: Synthetic oligonucleotide
  Sense strand starting at position 3064 of SEQ ID NO: 1882889
ugcaaucugguccagggaa

SEQ ID NO: 2155131 - RNA, 19 nt, Artificial Sequence
  Description of Artificial Sequence: Synthetic oligonucleotide
  Antisense strand to SEQ ID NO: 2155130
uucccuggaccagauugca

SEQ ID NO: 2155132 - RNA, 19 nt, Artificial Sequence
  Description of Artificial Sequence: Synthetic oligonucleotide
  Sense strand starting at position 3087 of SEQ ID NO: 1882889
cccagaaugugagugugua

SEQ ID NO: 2155133 - RNA, 19 nt, Artificial Sequence
  Description of Artificial Sequence: Synthetic oligonucleotide
  Antisense strand to SEQ ID NO: 2155132
uacacacucacauucuggg

SEQ ID NO: 2155134 - RNA, 19 nt, Artificial Sequence
  Description of Artificial Sequence: Synthetic oligonucleotide
  Sense strand starting at position 3225 of SEQ ID NO: 1882889
gguuacucucaggaguaag

SEQ ID NO: 2155135 - RNA, 19 nt, Artificial Sequence
  Description of Artificial Sequence: Synthetic oligonucleotide
  Antisense strand to SEQ ID NO: 2155134
cuuacuccugagaguaacc

SEQ ID NO: 2155136 - RNA, 19 nt, Artificial Sequence
  Description of Artificial Sequence: Synthetic oligonucleotide
  Sense strand starting at position 3367 of SEQ ID NO: 1882889
uguggucuuccacggaaug

SEQ ID NO: 2155137 - RNA, 19 nt, Artificial Sequence
  Description of Artificial Sequence: Synthetic oligonucleotide
  Antisense strand to SEQ ID NO: 2155136
cauuccguggaagaccaca

SEQ ID NO: 2155138 - RNA, 19 nt, Artificial Sequence
  Description of Artificial Sequence: Synthetic oligonucleotide
  Sense strand starting at position 3369 of SEQ ID NO: 1882889
uggucuuccacggaaugga

SEQ ID NO: 2155139 - RNA, 19 nt, Artificial Sequence
  Description of Artificial Sequence: Synthetic oligonucleotide
  Antisense strand to SEQ ID NO: 2155138
uccauuccguggaagacca

SEQ ID NO: 2155140 - RNA, 19 nt, Artificial Sequence
  Description of Artificial Sequence: Synthetic oligonucleotide
  Sense strand starting at position 3449 of SEQ ID NO: 1882889
ccagcaugguucccaugaa

SEQ ID NO: 2155141 - RNA, 19 nt, Artificial Sequence
  Description of Artificial Sequence: Synthetic oligonucleotide
  Antisense strand to SEQ ID NO: 2155140
uucaugggaaccaugcugg

SEQ ID NO: 2155142 - RNA, 19 nt, Artificial Sequence
  Description of Artificial Sequence: Synthetic oligonucleotide
  Sense strand starting at position 3463 of SEQ ID NO: 1882889
augaaaucucuuggaacuc

SEQ ID NO: 2155143 - RNA, 19 nt, Artificial Sequence
  Description of Artificial Sequence: Synthetic oligonucleotide
  Antisense strand to SEQ ID NO: 2155142
gaguuccaagagauuucau

SEQ ID NO: 2155144 - RNA, 19 nt, Artificial Sequence
  Description of Artificial Sequence: Synthetic oligonucleotide
  Sense strand starting at position 3746 of SEQ ID NO: 1882889
ggcuucuccuccguggauu

SEQ ID NO: 2155145 - RNA, 19 nt, Artificial Sequence
  Description of Artificial Sequence: Synthetic oligonucleotide
  Antisense strand to SEQ ID NO: 2155144
aauccacggaggagaagcc

SEQ ID NO: 2155146 - RNA, 19 nt, Artificial Sequence
  Description of Artificial Sequence: Synthetic oligonucleotide
  Sense strand starting at position 3783 of SEQ ID NO: 1882889
cguguauccagugcucacu

SEQ ID NO: 2155147 - RNA, 19 nt, Artificial Sequence
  Description of Artificial Sequence: Synthetic oligonucleotide
  Antisense strand to SEQ ID NO: 2155146
agugagcacuggauacacg

SEQ ID NO: 2155148 - RNA, 19 nt, Artificial Sequence
  Description of Artificial Sequence: Synthetic oligonucleotide
  Sense strand starting at position 3816 of SEQ ID NO: 1882889
gugggcuuucccuguggga

SEQ ID NO: 2155149 - RNA, 19 nt, Artificial Sequence
  Description of Artificial Sequence: Synthetic oligonucleotide
  Antisense strand to SEQ ID NO: 2155148
ucccacagggaaagcccac

SEQ ID NO: 2155150 - RNA, 19 nt, Artificial Sequence
  Description of Artificial Sequence: Synthetic oligonucleotide
  Sense strand starting at position 3818 of SEQ ID NO: 1882889
gggcuuucccugugggauc

SEQ ID NO: 2155151 - RNA, 19 nt, Artificial Sequence
  Description of Artificial Sequence: Synthetic oligonucleotide
  Antisense strand to SEQ ID NO: 2155150
gaucccacagggaaagccc

SEQ ID NO: 2155152 - RNA, 19 nt, Artificial Sequence
  Description of Artificial Sequence: Synthetic oligonucleotide
  Sense strand starting at position 29 of SEQ ID NO: 1882890
cagagauccucuguugaga

SEQ ID NO: 2155153 - RNA, 19 nt, Artificial Sequence
  Description of Artificial Sequence: Synthetic oligonucleotide
  Antisense strand to SEQ ID NO: 2155152
ucucaacagaggaucucug

SEQ ID NO: 2155154 - RNA, 19 nt, Artificial Sequence
  Description of Artificial Sequence: Synthetic oligonucleotide
  Sense strand starting at position 81 of SEQ ID NO: 1882890
uuuccaagggaauguauau

SEQ ID NO: 2155155 - RNA, 19 nt, Artificial Sequence
  Description of Artificial Sequence: Synthetic oligonucleotide
  Antisense strand to SEQ ID NO: 2155154
auauacauucccuuggaaa

SEQ ID NO: 2155156 - RNA, 19 nt, Artificial Sequence
  Description of Artificial Sequence: Synthetic oligonucleotide
  Sense strand starting at position 448 of SEQ ID NO: 1882890
guuggccguguuccauuaa

SEQ ID NO: 2155157 - RNA, 19 nt, Artificial Sequence
  Description of Artificial Sequence: Synthetic oligonucleotide
  Antisense strand to SEQ ID NO: 2155156
uuaauggaacacggccaac

SEQ ID NO: 2155158 - RNA, 19 nt, Artificial Sequence
  Description of Artificial Sequence: Synthetic oligonucleotide
  Sense strand starting at position 466 of SEQ ID NO: 1882890
acacuuuagcuauggacaa

SEQ ID NO: 2155159 - RNA, 19 nt, Artificial Sequence
  Description of Artificial Sequence: Synthetic oligonucleotide
  Antisense strand to SEQ ID NO: 2155158
uuguccauagcuaaagugu

SEQ ID NO: 2155160 - RNA, 19 nt, Artificial Sequence
  Description of Artificial Sequence: Synthetic oligonucleotide
  Sense strand starting at position 645 of SEQ ID NO: 1882890
uggcuaucauuuguuuauu

SEQ ID NO: 2155161 - RNA, 19 nt, Artificial Sequence
  Description of Artificial Sequence: Synthetic oligonucleotide
  Antisense strand to SEQ ID NO: 2155160
aauaaacaaaugauagcca

SEQ ID NO: 2155162 - RNA, 19 nt, Artificial Sequence
  Description of Artificial Sequence: Synthetic oligonucleotide
  Sense strand starting at position 656 of SEQ ID NO: 1882890
uguuuauuuguuggucuau

SEQ ID NO: 2155163 - RNA, 19 nt, Artificial Sequence
  Description of Artificial Sequence: Synthetic oligonucleotide
  Antisense strand to SEQ ID NO: 2155162
auagaccaacaaauaaaca

SEQ ID NO: 2155164 - RNA, 19 nt, Artificial Sequence
  Description of Artificial Sequence: Synthetic oligonucleotide
  Sense strand starting at position 657 of SEQ ID NO: 1882890
guuuauuuguuggucuauc

SEQ ID NO: 2155165 - RNA, 19 nt, Artificial Sequence
  Description of Artificial Sequence: Synthetic oligonucleotide
  Antisense strand to SEQ ID NO: 2155164
gauagaccaacaaauaaac

SEQ ID NO: 2155166 - RNA, 19 nt, Artificial Sequence
  Description of Artificial Sequence: Synthetic oligonucleotide
  Sense strand starting at position 658 of SEQ ID NO: 1882890
uuuauuuguuggucuaucu

SEQ ID NO: 2155167 - RNA, 19 nt, Artificial Sequence
  Description of Artificial Sequence: Synthetic oligonucleotide
  Antisense strand to SEQ ID NO: 2155166
agauagaccaacaaauaaa

SEQ ID NO: 2155168 - RNA, 19 nt, Artificial Sequence
  Description of Artificial Sequence: Synthetic oligonucleotide
  Sense strand starting at position 714 of SEQ ID NO: 1882890
gaagaaaucugguuccauu

SEQ ID NO: 2155169 - RNA, 19 nt, Artificial Sequence
  Description of Artificial Sequence: Synthetic oligonucleotide
  Antisense strand to SEQ ID NO: 2155168
aauggaaccagauuucuuc

SEQ ID NO: 2155170 - RNA, 19 nt, Artificial Sequence
  Description of Artificial Sequence: Synthetic oligonucleotide
  Sense strand starting at position 1086 of SEQ ID NO: 1882890
cuuggauagcuguauauua

SEQ ID NO: 2155171 - RNA, 19 nt, Artificial Sequence
  Description of Artificial Sequence: Synthetic oligonucleotide
  Antisense strand to SEQ ID NO: 2155170
uaauauacagcuauccaag

SEQ ID NO: 2155172 - RNA, 19 nt, Artificial Sequence
  Description of Artificial Sequence: Synthetic oligonucleotide
  Sense strand starting at position 1088 of SEQ ID NO: 1882890
uggauagcuguauauuacu

SEQ ID NO: 2155173 - RNA, 19 nt, Artificial Sequence
  Description of Artificial Sequence: Synthetic oligonucleotide
  Antisense strand to SEQ ID NO: 2155172
aguaauauacagcuaucca

SEQ ID NO: 2155174 - RNA, 19 nt, Artificial Sequence
  Description of Artificial Sequence: Synthetic oligonucleotide
  Sense strand starting at position 1175 of SEQ ID NO: 1882890
gagcuuugugcuuuguauu

SEQ ID NO: 2155175 - RNA, 19 nt, Artificial Sequence
  Description of Artificial Sequence: Synthetic oligonucleotide
  Antisense strand to SEQ ID NO: 2155174
aauacaaagcacaaagcuc

SEQ ID NO: 2155176 - RNA, 19 nt, Artificial Sequence
  Description of Artificial Sequence: Synthetic oligonucleotide
  Sense strand starting at position 1376 of SEQ ID NO: 1882890
uaguuuauuggccacagaa

SEQ ID NO: 2155177 - RNA, 19 nt, Artificial Sequence
  Description of Artificial Sequence: Synthetic oligonucleotide
  Antisense strand to SEQ ID NO: 2155176
uucuguggccaauaaacua

SEQ ID NO: 2155178 - RNA, 19 nt, Artificial Sequence
  Description of Artificial Sequence: Synthetic oligonucleotide
  Sense strand starting at position 1397 of SEQ ID NO: 1882890
uccaaucauucuguggaaa

SEQ ID NO: 2155179 - RNA, 19 nt, Artificial Sequence
  Description of Artificial Sequence: Synthetic oligonucleotide
  Antisense strand to SEQ ID NO: 2155178
uuuccacagaaugauugga

SEQ ID NO: 2155180 - RNA, 19 nt, Artificial Sequence
  Description of Artificial Sequence: Synthetic oligonucleotide
  Sense strand starting at position 1398 of SEQ ID NO: 1882890
ccaaucauucuguggaaac

SEQ ID NO: 2155181 - RNA, 19 nt, Artificial Sequence
  Description of Artificial Sequence: Synthetic oligonucleotide
  Antisense strand to SEQ ID NO: 2155180
guuuccacagaaugauugg

SEQ ID NO: 2155182 - RNA, 19 nt, Artificial Sequence
  Description of Artificial Sequence: Synthetic oligonucleotide
  Sense strand starting at position 1418 of SEQ ID NO: 1882890
accaauuucugagagugag

SEQ ID NO: 2155183 - RNA, 19 nt, Artificial Sequence
  Description of Artificial Sequence: Synthetic oligonucleotide
  Antisense strand to SEQ ID NO: 2155182
cucacucucagaaauuggu

SEQ ID NO: 2155184 - RNA, 19 nt, Artificial Sequence
  Description of Artificial Sequence: Synthetic oligonucleotide
  Sense strand starting at position 1452 of SEQ ID NO: 1882890
ggcugucaauuugcucuaa

SEQ ID NO: 2155185 - RNA, 19 nt, Artificial Sequence
  Description of Artificial Sequence: Synthetic oligonucleotide
  Antisense strand to SEQ ID NO: 2155184
uuagagcaaauugacagcc

SEQ ID NO: 2155186 - RNA, 19 nt, Artificial Sequence
  Description of Artificial Sequence: Synthetic oligonucleotide
  Sense strand starting at position 1453 of SEQ ID NO: 1882890
gcugucaauuugcucuaaa

SEQ ID NO: 2155187 - RNA, 19 nt, Artificial Sequence
  Description of Artificial Sequence: Synthetic oligonucleotide
  Antisense strand to SEQ ID NO: 2155186
uuuagagcaaauugacagc

SEQ ID NO: 2155188 - RNA, 19 nt, Artificial Sequence
  Description of Artificial Sequence: Synthetic oligonucleotide
  Sense strand starting at position 1490 of SEQ ID NO: 1882890
cuguauuucuguuuggauu

SEQ ID NO: 2155189 - RNA, 19 nt, Artificial Sequence
  Description of Artificial Sequence: Synthetic oligonucleotide
  Antisense strand to SEQ ID NO: 2155188
aauccaaacagaaauacag

SEQ ID NO: 2155190 - RNA, 19 nt, Artificial Sequence
  Description of Artificial Sequence: Synthetic oligonucleotide
  Sense strand starting at position 1522 of SEQ ID NO: 1882890
guuugauuauaagcuaaga

SEQ ID NO: 2155191 - RNA, 19 nt, Artificial Sequence
  Description of Artificial Sequence: Synthetic oligonucleotide
  Antisense strand to SEQ ID NO: 2155190
ucuuagcuuauaaucaaac

SEQ ID NO: 2155192 - RNA, 19 nt, Artificial Sequence
  Description of Artificial Sequence: Synthetic oligonucleotide
  Sense strand starting at position 1594 of SEQ ID NO: 1882890
auuaguaaucugcaugaaa

SEQ ID NO: 2155193 - RNA, 19 nt, Artificial Sequence
  Description of Artificial Sequence: Synthetic oligonucleotide
  Antisense strand to SEQ ID NO: 2155192
uuucaugcagauuacuaau

SEQ ID NO: 2155194 - RNA, 19 nt, Artificial Sequence
  Description of Artificial Sequence: Synthetic oligonucleotide
  Sense strand starting at position 1628 of SEQ ID NO: 1882890
ccaaguuagcuccagacaa

SEQ ID NO: 2155195 - RNA, 19 nt, Artificial Sequence
  Description of Artificial Sequence: Synthetic oligonucleotide
  Antisense strand to SEQ ID NO: 2155194
uugucuggagcuaacuugg

SEQ ID NO: 2155196 - RNA, 19 nt, Artificial Sequence
  Description of Artificial Sequence: Synthetic oligonucleotide
  Sense strand starting at position 1687 of SEQ ID NO: 1882890
uauugaugccugggcauuu

SEQ ID NO: 2155197 - RNA, 19 nt, Artificial Sequence
  Description of Artificial Sequence: Synthetic oligonucleotide
  Antisense strand to SEQ ID NO: 2155196
aaaugcccaggcaucaaua

SEQ ID NO: 2155198 - RNA, 19 nt, Artificial Sequence
  Description of Artificial Sequence: Synthetic oligonucleotide
  Sense strand starting at position 1729 of SEQ ID NO: 1882890
gcagcaaugcuguuagguu

SEQ ID NO: 2155199 - RNA, 19 nt, Artificial Sequence
  Description of Artificial Sequence: Synthetic oligonucleotide
  Antisense strand to SEQ ID NO: 2155198
aaccuaacagcauugcugc

SEQ ID NO: 2155200 - RNA, 19 nt, Artificial Sequence
  Description of Artificial Sequence: Synthetic oligonucleotide
  Sense strand starting at position 1776 of SEQ ID NO: 1882890
cuugcauaagaucauugau

SEQ ID NO: 2155201 - RNA, 19 nt, Artificial Sequence
  Description of Artificial Sequence: Synthetic oligonucleotide
  Antisense strand to SEQ ID NO: 2155200
aucaaugaucuuaugcaag

SEQ ID NO: 2155202 - RNA, 19 nt, Artificial Sequence
  Description of Artificial Sequence: Synthetic oligonucleotide
  Sense strand starting at position 1778 of SEQ ID NO: 1882890
ugcauaagaucauugauag

SEQ ID NO: 2155203 - RNA, 19 nt, Artificial Sequence
  Description of Artificial Sequence: Synthetic oligonucleotide
  Antisense strand to SEQ ID NO: 2155202
cuaucaaugaucuuaugca

SEQ ID NO: 2155204 - RNA, 19 nt, Artificial Sequence
  Description of Artificial Sequence: Synthetic oligonucleotide
  Sense strand starting at position 1779 of SEQ ID NO: 1882890
gcauaagaucauugauaga

SEQ ID NO: 2155205 - RNA, 19 nt, Artificial Sequence
  Description of Artificial Sequence: Synthetic oligonucleotide
  Antisense strand to SEQ ID NO: 2155204
ucuaucaaugaucuuaugc

SEQ ID NO: 2155206 - RNA, 19 nt, Artificial Sequence
  Description of Artificial Sequence: Synthetic oligonucleotide
  Sense strand starting at position 1789 of SEQ ID NO: 1882890
auugauagagcugggauau

SEQ ID NO: 2155207 - RNA, 19 nt, Artificial Sequence
  Description of Artificial Sequence: Synthetic oligonucleotide
  Antisense strand to SEQ ID NO: 2155206
auaucccagcucuaucaau

SEQ ID NO: 2155208 - RNA, 19 nt, Artificial Sequence
  Description of Artificial Sequence: Synthetic oligonucleotide
  Sense strand starting at position 1790 of SEQ ID NO: 1882890
uugauagagcugggauaug

SEQ ID NO: 2155209 - RNA, 19 nt, Artificial Sequence
  Description of Artificial Sequence: Synthetic oligonucleotide
  Antisense strand to SEQ ID NO: 2155208
cauaucccagcucuaucaa

SEQ ID NO: 2155210 - RNA, 19 nt, Artificial Sequence
  Description of Artificial Sequence: Synthetic oligonucleotide
  Sense strand starting at position 2102 of SEQ ID NO: 1882890
cauuaagucuguccaggaa

SEQ ID NO: 2155211 - RNA, 19 nt, Artificial Sequence
  Description of Artificial Sequence: Synthetic oligonucleotide
  Antisense strand to SEQ ID NO: 2155210
uuccuggacagacuuaaug

SEQ ID NO: 2155212 - RNA, 19 nt, Artificial Sequence
  Description of Artificial Sequence: Synthetic oligonucleotide
  Sense strand starting at position 2476 of SEQ ID NO: 1882890
gaaccuguuggugacuuua

SEQ ID NO: 2155213 - RNA, 19 nt, Artificial Sequence
  Description of Artificial Sequence: Synthetic oligonucleotide
  Antisense strand to SEQ ID NO: 2155212
uaaagucaccaacagguuc

SEQ ID NO: 2155214 - RNA, 19 nt, Artificial Sequence
  Description of Artificial Sequence: Synthetic oligonucleotide
  Sense strand starting at position 2846 of SEQ ID NO: 1882890
gcccaaacucuaggaaacu

SEQ ID NO: 2155215 - RNA, 19 nt, Artificial Sequence
  Description of Artificial Sequence: Synthetic oligonucleotide
  Antisense strand to SEQ ID NO: 2155214
aguuuccuagaguuugggc

SEQ ID NO: 2155216 - RNA, 19 nt, Artificial Sequence
  Description of Artificial Sequence: Synthetic oligonucleotide
  Sense strand starting at position 2896 of SEQ ID NO: 1882890
cuuggaaaccacuggguaa

SEQ ID NO: 2155217 - RNA, 19 nt, Artificial Sequence
  Description of Artificial Sequence: Synthetic oligonucleotide
  Antisense strand to SEQ ID NO: 2155216
uuacccagugguuuccaag

SEQ ID NO: 2155218 - RNA, 19 nt, Artificial Sequence
  Description of Artificial Sequence: Synthetic oligonucleotide
  Sense strand starting at position 2907 of SEQ ID NO: 1882890
cuggguaaaucaguaggau

SEQ ID NO: 2155219 - RNA, 19 nt, Artificial Sequence
  Description of Artificial Sequence: Synthetic oligonucleotide
  Antisense strand to SEQ ID NO: 2155218
auccuacugauuuacccag

SEQ ID NO: 2155220 - RNA, 19 nt, Artificial Sequence
  Description of Artificial Sequence: Synthetic oligonucleotide
  Sense strand starting at position 3022 of SEQ ID NO: 1882890
cugcaauaagaaugauagu

SEQ ID NO: 2155221 - RNA, 19 nt, Artificial Sequence
  Description of Artificial Sequence: Synthetic oligonucleotide
  Antisense strand to SEQ ID NO: 2155220
acuaucauucuuauugcag

SEQ ID NO: 2155222 - RNA, 19 nt, Artificial Sequence
  Description of Artificial Sequence: Synthetic oligonucleotide
  Sense strand starting at position 3427 of SEQ ID NO: 1882890
gaagauagcuucuuaaugg

SEQ ID NO: 2155223 - RNA, 19 nt, Artificial Sequence
  Description of Artificial Sequence: Synthetic oligonucleotide
  Antisense strand to SEQ ID NO: 2155222
ccauuaagaagcuaucuuc

SEQ ID NO: 2155224 - RNA, 19 nt, Artificial Sequence
  Description of Artificial Sequence: Synthetic oligonucleotide
  Sense strand starting at position 3472 of SEQ ID NO: 1882890
uuaugauuaguacagcuga

SEQ ID NO: 2155225 - RNA, 19 nt, Artificial Sequence
  Description of Artificial Sequence: Synthetic oligonucleotide
  Antisense strand to SEQ ID NO: 2155224
ucagcuguacuaaucauaa

SEQ ID NO: 2155226 - RNA, 19 nt, Artificial Sequence
  Description of Artificial Sequence: Synthetic oligonucleotide
  Sense strand starting at position 3761 of SEQ ID NO: 1882890
agaacaaugcugugauuga

SEQ ID NO: 2155227 - RNA, 19 nt, Artificial Sequence
  Description of Artificial Sequence: Synthetic oligonucleotide
  Antisense strand to SEQ ID NO: 2155226
ucaaucacagcauuguucu

SEQ ID NO: 2155228 - RNA, 19 nt, Artificial Sequence
  Description of Artificial Sequence: Synthetic oligonucleotide
  Sense strand starting at position 3821 of SEQ ID NO: 1882890
cuacuauuuguauggcuau

SEQ ID NO: 2155229 - RNA, 19 nt, Artificial Sequence
  Description of Artificial Sequence: Synthetic oligonucleotide
  Antisense strand to SEQ ID NO: 2155228
auagccauacaaauaguag

SEQ ID NO: 2155230 - RNA, 19 nt, Artificial Sequence
  Description of Artificial Sequence: Synthetic oligonucleotide
  Sense strand starting at position 3879 of SEQ ID NO: 1882890
ugaguauaauccucauuga

SEQ ID NO: 2155231 - RNA, 19 nt, Artificial Sequence
  Description of Artificial Sequence: Synthetic oligonucleotide
  Antisense strand to SEQ ID NO: 2155230
ucaaugaggauuauacuca

SEQ ID NO: 2155232 - RNA, 19 nt, Artificial Sequence
  Description of Artificial Sequence: Synthetic oligonucleotide
  Sense strand starting at position 97 of SEQ ID NO: 1882891
cuaccucuugcaugagaaa

SEQ ID NO: 2155233 - RNA, 19 nt, Artificial Sequence
  Description of Artificial Sequence: Synthetic oligonucleotide
  Antisense strand to SEQ ID NO: 2155232
uuucucaugcaagagguag

SEQ ID NO: 2155234 - RNA, 19 nt, Artificial Sequence
  Description of Artificial Sequence: Synthetic oligonucleotide
  Sense strand starting at position 302 of SEQ ID NO: 1882891
uccuuagcaccagaguaaa

SEQ ID NO: 2155235 - RNA, 19 nt, Artificial Sequence
  Description of Artificial Sequence: Synthetic oligonucleotide
  Antisense strand to SEQ ID NO: 2155234
uuuacucuggugcuaagga

SEQ ID NO: 2155236 - RNA, 19 nt, Artificial Sequence
  Description of Artificial Sequence: Synthetic oligonucleotide
  Sense strand starting at position 336 of SEQ ID NO: 1882891
uugguuaguccuuaacuca

SEQ ID NO: 2155237 - RNA, 19 nt, Artificial Sequence
  Description of Artificial Sequence: Synthetic oligonucleotide
  Antisense strand to SEQ ID NO: 2155236
ugaguuaaggacuaaccaa

SEQ ID NO: 2155238 - RNA, 19 nt, Artificial Sequence
  Description of Artificial Sequence: Synthetic oligonucleotide
  Sense strand starting at position 350 of SEQ ID NO: 1882891
acucacuuguggucacaaa

SEQ ID NO: 2155239 - RNA, 19 nt, Artificial Sequence
  Description of Artificial Sequence: Synthetic oligonucleotide
  Antisense strand to SEQ ID NO: 2155238
uuugugaccacaagugagu

SEQ ID NO: 2155240 - RNA, 19 nt, Artificial Sequence
  Description of Artificial Sequence: Synthetic oligonucleotide
  Sense strand starting at position 383 of SEQ ID NO: 1882891
aucacuuaagcauagaagu

SEQ ID NO: 2155241 - RNA, 19 nt, Artificial Sequence
  Description of Artificial Sequence: Synthetic oligonucleotide
  Antisense strand to SEQ ID NO: 2155240
acuucuaugcuuaagugau

SEQ ID NO: 2155242 - RNA, 19 nt, Artificial Sequence
  Description of Artificial Sequence: Synthetic oligonucleotide
  Sense strand starting at position 438 of SEQ ID NO: 1882891
ugccuuucucuggagguga

SEQ ID NO: 2155243 - RNA, 19 nt, Artificial Sequence
  Description of Artificial Sequence: Synthetic oligonucleotide
  Antisense strand to SEQ ID NO: 2155242
ucaccuccagagaaaggca

SEQ ID NO: 2155244 - RNA, 19 nt, Artificial Sequence
  Description of Artificial Sequence: Synthetic oligonucleotide
  Sense strand starting at position 440 of SEQ ID NO: 1882891
ccuuucucuggaggugaga

SEQ ID NO: 2155245 - RNA, 19 nt, Artificial Sequence
  Description of Artificial Sequence: Synthetic oligonucleotide
  Antisense strand to SEQ ID NO: 2155244
ucucaccuccagagaaagg

SEQ ID NO: 2155246 - RNA, 19 nt, Artificial Sequence
  Description of Artificial Sequence: Synthetic oligonucleotide
  Sense strand starting at position 470 of SEQ ID NO: 1882891
aauuccuuuguauggauga

SEQ ID NO: 2155247 - RNA, 19 nt, Artificial Sequence
  Description of Artificial Sequence: Synthetic oligonucleotide
  Antisense strand to SEQ ID NO: 2155246
ucauccauacaaaggaauu

SEQ ID NO: 2155248 - RNA, 19 nt, Artificial Sequence
  Description of Artificial Sequence: Synthetic oligonucleotide
  Sense strand starting at position 574 of SEQ ID NO: 1882891
gacuaucuuguggagaugu

SEQ ID NO: 2155249 - RNA, 19 nt, Artificial Sequence
  Description of Artificial Sequence: Synthetic oligonucleotide
  Antisense strand to SEQ ID NO: 2155248
acaucuccacaagauaguc

SEQ ID NO: 2155250 - RNA, 19 nt, Artificial Sequence
  Description of Artificial Sequence: Synthetic oligonucleotide
  Sense strand starting at position 660 of SEQ ID NO: 1882891
acaagacguacuugaguuu

SEQ ID NO: 2155251 - RNA, 19 nt, Artificial Sequence
  Description of Artificial Sequence: Synthetic oligonucleotide
  Antisense strand to SEQ ID NO: 2155250
aaacucaaguacgucuugu

SEQ ID NO: 2155252 - RNA, 19 nt, Artificial Sequence
  Description of Artificial Sequence: Synthetic oligonucleotide
  Sense strand starting at position 663 of SEQ ID NO: 1882891
agacguacuugaguuugga

SEQ ID NO: 2155253 - RNA, 19 nt, Artificial Sequence
  Description of Artificial Sequence: Synthetic oligonucleotide
  Antisense strand to SEQ ID NO: 2155252
uccaaacucaaguacgucu

SEQ ID NO: 2155254 - RNA, 19 nt, Artificial Sequence
  Description of Artificial Sequence: Synthetic oligonucleotide
  Sense strand starting at position 673 of SEQ ID NO: 1882891
gaguuuggaucacuuuauu

SEQ ID NO: 2155255 - RNA, 19 nt, Artificial Sequence
  Description of Artificial Sequence: Synthetic oligonucleotide
  Antisense strand to SEQ ID NO: 2155254
aauaaagugauccaaacuc

SEQ ID NO: 2155256 - RNA, 19 nt, Artificial Sequence
  Description of Artificial Sequence: Synthetic oligonucleotide
  Sense strand starting at position 808 of SEQ ID NO: 1882891
cugccuuaggaucaauaca

SEQ ID NO: 2155257 - RNA, 19 nt, Artificial Sequence
  Description of Artificial Sequence: Synthetic oligonucleotide
  Antisense strand to SEQ ID NO: 2155256
uguauugauccuaaggcag

SEQ ID NO: 2155258 - RNA, 19 nt, Artificial Sequence
  Description of Artificial Sequence: Synthetic oligonucleotide
  Sense strand starting at position 925 of SEQ ID NO: 1882891
ucccucucccgaugauaaa

SEQ ID NO: 2155259 - RNA, 19 nt, Artificial Sequence
  Description of Artificial Sequence: Synthetic oligonucleotide
  Antisense strand to SEQ ID NO: 2155258
uuuaucaucgggagaggga

SEQ ID NO: 2155260 - RNA, 19 nt, Artificial Sequence
  Description of Artificial Sequence: Synthetic oligonucleotide
  Sense strand starting at position 1156 of SEQ ID NO: 1882891
gggcaauguccauggaaca

SEQ ID NO: 2155261 - RNA, 19 nt, Artificial Sequence
  Description of Artificial Sequence: Synthetic oligonucleotide
  Antisense strand to SEQ ID NO: 2155260
uguuccauggacauugccc

SEQ ID NO: 2155262 - RNA, 19 nt, Artificial Sequence
  Description of Artificial Sequence: Synthetic oligonucleotide
  Sense strand starting at position 1209 of SEQ ID NO: 1882891
uagagagcaggcuauugau

SEQ ID NO: 2155263 - RNA, 19 nt, Artificial Sequence
  Description of Artificial Sequence: Synthetic oligonucleotide
  Antisense strand to SEQ ID NO: 2155262
aucaauagccugcucucua

SEQ ID NO: 2155264 - RNA, 19 nt, Artificial Sequence
  Description of Artificial Sequence: Synthetic oligonucleotide
  Sense strand starting at position 1269 of SEQ ID NO: 1882891
agagcagucucuccaccua

SEQ ID NO: 2155265 - RNA, 19 nt, Artificial Sequence
  Description of Artificial Sequence: Synthetic oligonucleotide
  Antisense strand to SEQ ID NO: 2155264
uagguggagagacugcucu

SEQ ID NO: 2155266 - RNA, 19 nt, Artificial Sequence
  Description of Artificial Sequence: Synthetic oligonucleotide
  Sense strand starting at position 1462 of SEQ ID NO: 1882891
ggcugucauuuauccagca

SEQ ID NO: 2155267 - RNA, 19 nt, Artificial Sequence
  Description of Artificial Sequence: Synthetic oligonucleotide
  Antisense strand to SEQ ID NO: 2155266
ugcuggauaaaugacagcc

SEQ ID NO: 2155268 - RNA, 19 nt, Artificial Sequence
  Description of Artificial Sequence: Synthetic oligonucleotide
  Sense strand starting at position 1535 of SEQ ID NO: 1882891
ucuuuaaggguagagaguu

SEQ ID NO: 2155269 - RNA, 19 nt, Artificial Sequence
  Description of Artificial Sequence: Synthetic oligonucleotide
  Antisense strand to SEQ ID NO: 2155268
aacucucuacccuuaaaga

SEQ ID NO: 2155270 - RNA, 19 nt, Artificial Sequence
  Description of Artificial Sequence: Synthetic oligonucleotide
  Sense strand starting at position 1549 of SEQ ID NO: 1882891
gaguuuaaauuccugcaag

SEQ ID NO: 2155271 - RNA, 19 nt, Artificial Sequence
  Description of Artificial Sequence: Synthetic oligonucleotide
  Antisense strand to SEQ ID NO: 2155270
cuugcaggaauuuaaacuc

SEQ ID NO: 2155272 - RNA, 19 nt, Artificial Sequence
  Description of Artificial Sequence: Synthetic oligonucleotide
  Sense strand starting at position 1552 of SEQ ID NO: 1882891
uuuaaauuccugcaaggca

SEQ ID NO: 2155273 - RNA, 19 nt, Artificial Sequence
  Description of Artificial Sequence: Synthetic oligonucleotide
  Antisense strand to SEQ ID NO: 2155272
ugccuugcaggaauuuaaa

SEQ ID NO: 2155274 - RNA, 19 nt, Artificial Sequence
  Description of Artificial Sequence: Synthetic oligonucleotide
  Sense strand starting at position 1935 of SEQ ID NO: 1882891
gacaaaguucuguagugca

SEQ ID NO: 2155275 - RNA, 19 nt, Artificial Sequence
  Description of Artificial Sequence: Synthetic oligonucleotide
  Antisense strand to SEQ ID NO: 2155274
ugcacuacagaacuuuguc

SEQ ID NO: 2155276 - RNA, 19 nt, Artificial Sequence
  Description of Artificial Sequence: Synthetic oligonucleotide
  Sense strand starting at position 1958 of SEQ ID NO: 1882891
cuucuaucauacucagagu

SEQ ID NO: 2155277 - RNA, 19 nt, Artificial Sequence
  Description of Artificial Sequence: Synthetic oligonucleotide
  Antisense strand to SEQ ID NO: 2155276
acucugaguaugauagaag

SEQ ID NO: 2155278 - RNA, 19 nt, Artificial Sequence
  Description of Artificial Sequence: Synthetic oligonucleotide
  Sense strand starting at position 2017 of SEQ ID NO: 1882891
ugucuuccuccagaaguuu

SEQ ID NO: 2155279 - RNA, 19 nt, Artificial Sequence
  Description of Artificial Sequence: Synthetic oligonucleotide
  Antisense strand to SEQ ID NO: 2155278
aaacuucuggaggaagaca

SEQ ID NO: 2155280 - RNA, 19 nt, Artificial Sequence
  Description of Artificial Sequence: Synthetic oligonucleotide
  Sense strand starting at position 2106 of SEQ ID NO: 1882891
ucaggaugcgaccgauaau

SEQ ID NO: 2155281 - RNA, 19 nt, Artificial Sequence
  Description of Artificial Sequence: Synthetic oligonucleotide
  Antisense strand to SEQ ID NO: 2155280
auuaucggucgcauccuga

SEQ ID NO: 2155282 - RNA, 19 nt, Artificial Sequence
  Description of Artificial Sequence: Synthetic oligonucleotide
  Sense strand starting at position 2107 of SEQ ID NO: 1882891
caggaugcgaccgauaaug

SEQ ID NO: 2155283 - RNA, 19 nt, Artificial Sequence
  Description of Artificial Sequence: Synthetic oligonucleotide
  Antisense strand to SEQ ID NO: 2155282
cauuaucggucgcauccug

SEQ ID NO: 2155284 - RNA, 19 nt, Artificial Sequence
  Description of Artificial Sequence: Synthetic oligonucleotide
  Sense strand starting at position 2109 of SEQ ID NO: 1882891
ggaugcgaccgauaaugga

SEQ ID NO: 2155285 - RNA, 19 nt, Artificial Sequence
  Description of Artificial Sequence: Synthetic oligonucleotide
  Antisense strand to SEQ ID NO: 2155284
uccauuaucggucgcaucc

SEQ ID NO: 2155286 - RNA, 19 nt, Artificial Sequence
  Description of Artificial Sequence: Synthetic oligonucleotide
  Sense strand starting at position 2119 of SEQ ID NO: 1882891
gauaauggaacgggucauu

SEQ ID NO: 2155287 - RNA, 19 nt, Artificial Sequence
  Description of Artificial Sequence: Synthetic oligonucleotide
  Antisense strand to SEQ ID NO: 2155286
aaugacccguuccauuauc

SEQ ID NO: 2155288 - RNA, 19 nt, Artificial Sequence
  Description of Artificial Sequence: Synthetic oligonucleotide
  Sense strand starting at position 2124 of SEQ ID NO: 1882891
uggaacgggucauuaauua

SEQ ID NO: 2155289 - RNA, 19 nt, Artificial Sequence
  Description of Artificial Sequence: Synthetic oligonucleotide
  Antisense strand to SEQ ID NO: 2155288
uaauuaaugacccguucca

SEQ ID NO: 2155290 - RNA, 19 nt, Artificial Sequence
  Description of Artificial Sequence: Synthetic oligonucleotide
  Sense strand starting at position 2128 of SEQ ID NO: 1882891
acgggucauuaauuaugga

SEQ ID NO: 2155291 - RNA, 19 nt, Artificial Sequence
  Description of Artificial Sequence: Synthetic oligonucleotide
  Antisense strand to SEQ ID NO: 2155290
uccauaauuaaugacccgu

SEQ ID NO: 2155292 - RNA, 19 nt, Artificial Sequence
  Description of Artificial Sequence: Synthetic oligonucleotide
  Sense strand starting at position 2211 of SEQ ID NO: 1882891
gacaaauucuggucgcaau

SEQ ID NO: 2155293 - RNA, 19 nt, Artificial Sequence
  Description of Artificial Sequence: Synthetic oligonucleotide
  Antisense strand to SEQ ID NO: 2155292
auugcgaccagaauuuguc

SEQ ID NO: 2155294 - RNA, 19 nt, Artificial Sequence
  Description of Artificial Sequence: Synthetic oligonucleotide
  Sense strand starting at position 2292 of SEQ ID NO: 1882891
gaacccauuccuggucgaa

SEQ ID NO: 2155295 - RNA, 19 nt, Artificial Sequence
  Description of Artificial Sequence: Synthetic oligonucleotide
  Antisense strand to SEQ ID NO: 2155294
uucgaccaggaauggguuc

SEQ ID NO: 2155296 - RNA, 19 nt, Artificial Sequence
  Description of Artificial Sequence: Synthetic oligonucleotide
  Sense strand starting at position 2318 of SEQ ID NO: 1882891
cucccucgguaguuauuua

SEQ ID NO: 2155297 - RNA, 19 nt, Artificial Sequence
  Description of Artificial Sequence: Synthetic oligonucleotide
  Antisense strand to SEQ ID NO: 2155296
uaaauaacuaccgagggag

SEQ ID NO: 2155298 - RNA, 19 nt, Artificial Sequence
  Description of Artificial Sequence: Synthetic oligonucleotide
  Sense strand starting at position 2322 of SEQ ID NO: 1882891
cucgguaguuauuuaaacu

SEQ ID NO: 2155299 - RNA, 19 nt, Artificial Sequence
  Description of Artificial Sequence: Synthetic oligonucleotide
  Antisense strand to SEQ ID NO: 2155298
aguuuaaauaacuaccgag

SEQ ID NO: 2155300 - RNA, 19 nt, Artificial Sequence
  Description of Artificial Sequence: Synthetic oligonucleotide
  Sense strand starting at position 2549 of SEQ ID NO: 1882891
agccauucccaguacucua

SEQ ID NO: 2155301 - RNA, 19 nt, Artificial Sequence
  Description of Artificial Sequence: Synthetic oligonucleotide
  Antisense strand to SEQ ID NO: 2155300
uagaguacugggaauggcu

SEQ ID NO: 2155302 - RNA, 19 nt, Artificial Sequence
  Description of Artificial Sequence: Synthetic oligonucleotide
  Sense strand starting at position 2641 of SEQ ID NO: 1882891
ccacccacucuuugggauu

SEQ ID NO: 2155303 - RNA, 19 nt, Artificial Sequence
  Description of Artificial Sequence: Synthetic oligonucleotide
  Antisense strand to SEQ ID NO: 2155302
aaucccaaagagugggugg

SEQ ID NO: 2155304 - RNA, 19 nt, Artificial Sequence
  Description of Artificial Sequence: Synthetic oligonucleotide
  Sense strand starting at position 3198 of SEQ ID NO: 1882891
gacgaccugcgcucuuauu

SEQ ID NO: 2155305 - RNA, 19 nt, Artificial Sequence
  Description of Artificial Sequence: Synthetic oligonucleotide
  Antisense strand to SEQ ID NO: 2155304
aauaagagcgcaggucguc

SEQ ID NO: 2155306 - RNA, 19 nt, Artificial Sequence
  Description of Artificial Sequence: Synthetic oligonucleotide
  Sense strand starting at position 3781 of SEQ ID NO: 1882891
uugagaacuaaaugcgaga

SEQ ID NO: 2155307 - RNA, 19 nt, Artificial Sequence
  Description of Artificial Sequence: Synthetic oligonucleotide
  Antisense strand to SEQ ID NO: 2155306
ucucgcauuuaguucucaa

SEQ ID NO: 2155308 - RNA, 19 nt, Artificial Sequence
  Description of Artificial Sequence: Synthetic oligonucleotide
  Sense strand starting at position 3795 of SEQ ID NO: 1882891
cgagauucccgguaaggga

SEQ ID NO: 2155309 - RNA, 19 nt, Artificial Sequence
  Description of Artificial Sequence: Synthetic oligonucleotide
  Antisense strand to SEQ ID NO: 2155308
ucccuuaccgggaaucucg

SEQ ID NO: 2155310 - RNA, 19 nt, Artificial Sequence
  Description of Artificial Sequence: Synthetic oligonucleotide
  Sense strand starting at position 3809 of SEQ ID NO: 1882891
agggaauucuaggacaaag

SEQ ID NO: 2155311 - RNA, 19 nt, Artificial Sequence
  Description of Artificial Sequence: Synthetic oligonucleotide
  Antisense strand to SEQ ID NO: 2155310
cuuuguccuagaauucccu

SEQ ID NO: 2155312 - RNA, 19 nt, Artificial Sequence
  Description of Artificial Sequence: Synthetic oligonucleotide
  Sense strand starting at position 20 of SEQ ID NO: 1882892
caccaaagaguccguggaa

SEQ ID NO: 2155313 - RNA, 19 nt, Artificial Sequence
  Description of Artificial Sequence: Synthetic oligonucleotide
  Antisense strand to SEQ ID NO: 2155312
uuccacggacucuuuggug

SEQ ID NO: 2155314 - RNA, 19 nt, Artificial Sequence
  Description of Artificial Sequence: Synthetic oligonucleotide
  Sense strand starting at position 21 of SEQ ID NO: 1882892
accaaagaguccguggaaa

SEQ ID NO: 2155315 - RNA, 19 nt, Artificial Sequence
  Description of Artificial Sequence: Synthetic oligonucleotide
  Antisense strand to SEQ ID NO: 2155314
uuuccacggacucuuuggu

SEQ ID NO: 2155316 - RNA, 19 nt, Artificial Sequence
  Description of Artificial Sequence: Synthetic oligonucleotide
  Sense strand starting at position 23 of SEQ ID NO: 1882892
caaagaguccguggaaagu

SEQ ID NO: 2155317 - RNA, 19 nt, Artificial Sequence
  Description of Artificial Sequence: Synthetic oligonucleotide
  Antisense strand to SEQ ID NO: 2155316
acuuuccacggacucuuug

SEQ ID NO: 2155318 - RNA, 19 nt, Artificial Sequence
  Description of Artificial Sequence: Synthetic oligonucleotide
  Sense strand starting at position 29 of SEQ ID NO: 1882892
guccguggaaaguaaacau

SEQ ID NO: 2155319 - RNA, 19 nt, Artificial Sequence
  Description of Artificial Sequence: Synthetic oligonucleotide
  Antisense strand to SEQ ID NO: 2155318
auguuuacuuuccacggac

SEQ ID NO: 2155320 - RNA, 19 nt, Artificial Sequence
  Description of Artificial Sequence: Synthetic oligonucleotide
  Sense strand starting at position 232 of SEQ ID NO: 1882892
uucugaugggagugugaau

SEQ ID NO: 2155321 - RNA, 19 nt, Artificial Sequence
  Description of Artificial Sequence: Synthetic oligonucleotide
  Antisense strand to SEQ ID NO: 2155320
auucacacucccaucagaa

SEQ ID NO: 2155322 - RNA, 19 nt, Artificial Sequence
  Description of Artificial Sequence: Synthetic oligonucleotide
  Sense strand starting at position 369 of SEQ ID NO: 1882892
cccucuggucugugaaaca

SEQ ID NO: 2155323 - RNA, 19 nt, Artificial Sequence
  Description of Artificial Sequence: Synthetic oligonucleotide
  Antisense strand to SEQ ID NO: 2155322
uguuucacagaccagaggg

SEQ ID NO: 2155324 - RNA, 19 nt, Artificial Sequence
  Description of Artificial Sequence: Synthetic oligonucleotide
  Sense strand starting at position 452 of SEQ ID NO: 1882892
cgugucaccguuucuguua

SEQ ID NO: 2155325 - RNA, 19 nt, Artificial Sequence
  Description of Artificial Sequence: Synthetic oligonucleotide
  Antisense strand to SEQ ID NO: 2155324
uaacagaaacggugacacg

SEQ ID NO: 2155326 - RNA, 19 nt, Artificial Sequence
  Description of Artificial Sequence: Synthetic oligonucleotide
  Sense strand starting at position 590 of SEQ ID NO: 1882892
cauucuuggucccuggaga

SEQ ID NO: 2155327 - RNA, 19 nt, Artificial Sequence
  Description of Artificial Sequence: Synthetic oligonucleotide
  Antisense strand to SEQ ID NO: 2155326
ucuccagggaccaagaaug

SEQ ID NO: 2155328 - RNA, 19 nt, Artificial Sequence
  Description of Artificial Sequence: Synthetic oligonucleotide
  Sense strand starting at position 591 of SEQ ID NO: 1882892
auucuuggucccuggagaa

SEQ ID NO: 2155329 - RNA, 19 nt, Artificial Sequence
  Description of Artificial Sequence: Synthetic oligonucleotide
  Antisense strand to SEQ ID NO: 2155328
uucuccagggaccaagaau

SEQ ID NO: 2155330 - RNA, 19 nt, Artificial Sequence
  Description of Artificial Sequence: Synthetic oligonucleotide
  Sense strand starting at position 826 of SEQ ID NO: 1882892
acgugugcacguguagaau

SEQ ID NO: 2155331 - RNA, 19 nt, Artificial Sequence
  Description of Artificial Sequence: Synthetic oligonucleotide
  Antisense strand to SEQ ID NO: 2155330
auucuacacgugcacacgu

SEQ ID NO: 2155332 - RNA, 19 nt, Artificial Sequence
  Description of Artificial Sequence: Synthetic oligonucleotide
  Sense strand starting at position 871 of SEQ ID NO: 1882892
uggugaguggcuuugcuuu

SEQ ID NO: 2155333 - RNA, 19 nt, Artificial Sequence
  Description of Artificial Sequence: Synthetic oligonucleotide
  Antisense strand to SEQ ID NO: 2155332
aaagcaaagccacucacca

SEQ ID NO: 2155334 - RNA, 19 nt, Artificial Sequence
  Description of Artificial Sequence: Synthetic oligonucleotide
  Sense strand starting at position 900 of SEQ ID NO: 1882892
uugccuuuggcagaggagu

SEQ ID NO: 2155335 - RNA, 19 nt, Artificial Sequence
  Description of Artificial Sequence: Synthetic oligonucleotide
  Antisense strand to SEQ ID NO: 2155334
acuccucugccaaaggcaa

SEQ ID NO: 2155336 - RNA, 19 nt, Artificial Sequence
  Description of Artificial Sequence: Synthetic oligonucleotide
  Sense strand starting at position 1280 of SEQ ID NO: 1882892
gcuccuagccagugaauuu

SEQ ID NO: 2155337 - RNA, 19 nt, Artificial Sequence
  Description of Artificial Sequence: Synthetic oligonucleotide
  Antisense strand to SEQ ID NO: 2155336
aaauucacuggcuaggagc

SEQ ID NO: 2155338 - RNA, 19 nt, Artificial Sequence
  Description of Artificial Sequence: Synthetic oligonucleotide
  Sense strand starting at position 1287 of SEQ ID NO: 1882892
gccagugaauuuguggcua

SEQ ID NO: 2155339 - RNA, 19 nt, Artificial Sequence
  Description of Artificial Sequence: Synthetic oligonucleotide
  Antisense strand to SEQ ID NO: 2155338
uagccacaaauucacuggc

SEQ ID NO: 2155340 - RNA, 19 nt, Artificial Sequence
  Description of Artificial Sequence: Synthetic oligonucleotide
  Sense strand starting at position 1291 of SEQ ID NO: 1882892
gugaauuuguggcuacgau

SEQ ID NO: 2155341 - RNA, 19 nt, Artificial Sequence
  Description of Artificial Sequence: Synthetic oligonucleotide
  Antisense strand to SEQ ID NO: 2155340
aucguagccacaaauucac

SEQ ID NO: 2155342 - RNA, 19 nt, Artificial Sequence
  Description of Artificial Sequence: Synthetic oligonucleotide
  Sense strand starting at position 1528 of SEQ ID NO: 1882892
ggacuuuauuuacaaagga

SEQ ID NO: 2155343 - RNA, 19 nt, Artificial Sequence
  Description of Artificial Sequence: Synthetic oligonucleotide
  Antisense strand to SEQ ID NO: 2155342
uccuuuguaaauaaagucc

SEQ ID NO: 2155344 - RNA, 19 nt, Artificial Sequence
  Description of Artificial Sequence: Synthetic oligonucleotide
  Sense strand starting at position 1636 of SEQ ID NO: 1882892
agauguagaccacgaguua

SEQ ID NO: 2155345 - RNA, 19 nt, Artificial Sequence
  Description of Artificial Sequence: Synthetic oligonucleotide
  Antisense strand to SEQ ID NO: 2155344
uaacucguggucuacaucu

SEQ ID NO: 2155346 - RNA, 19 nt, Artificial Sequence
  Description of Artificial Sequence: Synthetic oligonucleotide
  Sense strand starting at position 1637 of SEQ ID NO: 1882892
gauguagaccacgaguuau

SEQ ID NO: 2155347 - RNA, 19 nt, Artificial Sequence
  Description of Artificial Sequence: Synthetic oligonucleotide
  Antisense strand to SEQ ID NO: 2155346
auaacucguggucuacauc

SEQ ID NO: 2155348 - RNA, 19 nt, Artificial Sequence
  Description of Artificial Sequence: Synthetic oligonucleotide
  Sense strand starting at position 1648 of SEQ ID NO: 1882892
cgaguuauucaggaaggug

SEQ ID NO: 2155349 - RNA, 19 nt, Artificial Sequence
  Description of Artificial Sequence: Synthetic oligonucleotide
  Antisense strand to SEQ ID NO: 2155348
caccuuccugaauaacucg

SEQ ID NO: 2155350 - RNA, 19 nt, Artificial Sequence
  Description of Artificial Sequence: Synthetic oligonucleotide
  Sense strand starting at position 1944 of SEQ ID NO: 1882892
ugcaacugggcucauauua

SEQ ID NO: 2155351 - RNA, 19 nt, Artificial Sequence
  Description of Artificial Sequence: Synthetic oligonucleotide
  Antisense strand to SEQ ID NO: 2155350
uaauaugagcccaguugca

SEQ ID NO: 2155352 - RNA, 19 nt, Artificial Sequence
  Description of Artificial Sequence: Synthetic oligonucleotide
  Sense strand starting at position 2158 of SEQ ID NO: 1882892
gcaguuucucuuuaaagug

SEQ ID NO: 2155353 - RNA, 19 nt, Artificial Sequence
  Description of Artificial Sequence: Synthetic oligonucleotide
  Antisense strand to SEQ ID NO: 2155352
cacuuuaaagagaaacugc

SEQ ID NO: 2155354 - RNA, 19 nt, Artificial Sequence
  Description of Artificial Sequence: Synthetic oligonucleotide
  Sense strand starting at position 2187 of SEQ ID NO: 1882892
cccucugggcuccagaaau

SEQ ID NO: 2155355 - RNA, 19 nt, Artificial Sequence
  Description of Artificial Sequence: Synthetic oligonucleotide
  Antisense strand to SEQ ID NO: 2155354
auuucuggagcccagaggg

SEQ ID NO: 2155356 - RNA, 19 nt, Artificial Sequence
  Description of Artificial Sequence: Synthetic oligonucleotide
  Sense strand starting at position 2249 of SEQ ID NO: 1882892
agugagaacgcgucgucua

SEQ ID NO: 2155357 - RNA, 19 nt, Artificial Sequence
  Description of Artificial Sequence: Synthetic oligonucleotide
  Antisense strand to SEQ ID NO: 2155356
uagacgacgcguucucacu

SEQ ID NO: 2155358 - RNA, 19 nt, Artificial Sequence
  Description of Artificial Sequence: Synthetic oligonucleotide
  Sense strand starting at position 2251 of SEQ ID NO: 1882892
ugagaacgcgucgucuauu

SEQ ID NO: 2155359 - RNA, 19 nt, Artificial Sequence
  Description of Artificial Sequence: Synthetic oligonucleotide
  Antisense strand to SEQ ID NO: 2155358
aauagacgacgcguucuca

SEQ ID NO: 2155360 - RNA, 19 nt, Artificial Sequence
  Description of Artificial Sequence: Synthetic oligonucleotide
  Sense strand starting at position 2632 of SEQ ID NO: 1882892
uuucuuggugaugaaucau

SEQ ID NO: 2155361 - RNA, 19 nt, Artificial Sequence
  Description of Artificial Sequence: Synthetic oligonucleotide
  Antisense strand to SEQ ID NO: 2155360
augauucaucaccaagaaa

SEQ ID NO: 2155362 - RNA, 19 nt, Artificial Sequence
  Description of Artificial Sequence: Synthetic oligonucleotide
  Sense strand starting at position 2776 of SEQ ID NO: 1882892
gccgucuuuguaguuacau

SEQ ID NO: 2155363 - RNA, 19 nt, Artificial Sequence
  Description of Artificial Sequence: Synthetic oligonucleotide
  Antisense strand to SEQ ID NO: 2155362
auguaacuacaaagacggc

SEQ ID NO: 2155364 - RNA, 19 nt, Artificial Sequence
  Description of Artificial Sequence: Synthetic oligonucleotide
  Sense strand starting at position 2872 of SEQ ID NO: 1882892
agaaauaaauccguauuga

SEQ ID NO: 2155365 - RNA, 19 nt, Artificial Sequence
  Description of Artificial Sequence: Synthetic oligonucleotide
  Antisense strand to SEQ ID NO: 2155364
ucaauacggauuuauuucu

SEQ ID NO: 2155366 - RNA, 19 nt, Artificial Sequence
  Description of Artificial Sequence: Synthetic oligonucleotide
  Sense strand starting at position 2881 of SEQ ID NO: 1882892
uccguauugacagaaugua

SEQ ID NO: 2155367 - RNA, 19 nt, Artificial Sequence
  Description of Artificial Sequence: Synthetic oligonucleotide
  Antisense strand to SEQ ID NO: 2155366
uacauucugucaauacgga

SEQ ID NO: 2155368 - RNA, 19 nt, Artificial Sequence
  Description of Artificial Sequence: Synthetic oligonucleotide
  Sense strand starting at position 2899 of SEQ ID NO: 1882892
acauaauggccaggaaauu

SEQ ID NO: 2155369 - RNA, 19 nt, Artificial Sequence
  Description of Artificial Sequence: Synthetic oligonucleotide
  Antisense strand to SEQ ID NO: 2155368
aauuuccuggccauuaugu

SEQ ID NO: 2155370 - RNA, 19 nt, Artificial Sequence
  Description of Artificial Sequence: Synthetic oligonucleotide
  Sense strand starting at position 2910 of SEQ ID NO: 1882892
aggaaauuagcguggguga

SEQ ID NO: 2155371 - RNA, 19 nt, Artificial Sequence
  Description of Artificial Sequence: Synthetic oligonucleotide
  Antisense strand to SEQ ID NO: 2155370
ucacccacgcuaauuuccu

SEQ ID NO: 2155372 - RNA, 19 nt, Artificial Sequence
  Description of Artificial Sequence: Synthetic oligonucleotide
  Sense strand starting at position 2930 of SEQ ID NO: 1882892
gaaggagccguguacagua

SEQ ID NO: 2155373 - RNA, 19 nt, Artificial Sequence
  Description of Artificial Sequence: Synthetic oligonucleotide
  Antisense strand to SEQ ID NO: 2155372
uacuguacacggcuccuuc

SEQ ID NO: 2155374 - RNA, 19 nt, Artificial Sequence
  Description of Artificial Sequence: Synthetic oligonucleotide
  Sense strand starting at position 3259 of SEQ ID NO: 1882892
ccaguuacauaacuguaga

SEQ ID NO: 2155375 - RNA, 19 nt, Artificial Sequence
  Description of Artificial Sequence: Synthetic oligonucleotide
  Antisense strand to SEQ ID NO: 2155374
ucuacaguuauguaacugg

SEQ ID NO: 2155376 - RNA, 19 nt, Artificial Sequence
  Description of Artificial Sequence: Synthetic oligonucleotide
  Sense strand starting at position 3274 of SEQ ID NO: 1882892
uagacucgagaaugaguaa

SEQ ID NO: 2155377 - RNA, 19 nt, Artificial Sequence
  Description of Artificial Sequence: Synthetic oligonucleotide
  Antisense strand to SEQ ID NO: 2155376
uuacucauucucgagucua

SEQ ID NO: 2155378 - RNA, 19 nt, Artificial Sequence
  Description of Artificial Sequence: Synthetic oligonucleotide
  Sense strand starting at position 3281 of SEQ ID NO: 1882892
gagaaugaguaacuguuaa

SEQ ID NO: 2155379 - RNA, 19 nt, Artificial Sequence
  Description of Artificial Sequence: Synthetic oligonucleotide
  Antisense strand to SEQ ID NO: 2155378
uuaacaguuacucauucuc

SEQ ID NO: 2155380 - RNA, 19 nt, Artificial Sequence
  Description of Artificial Sequence: Synthetic oligonucleotide
  Sense strand starting at position 3400 of SEQ ID NO: 1882892
guagacuucugaucaguua

SEQ ID NO: 2155381 - RNA, 19 nt, Artificial Sequence
  Description of Artificial Sequence: Synthetic oligonucleotide
  Antisense strand to SEQ ID NO: 2155380
uaacugaucagaagucuac

SEQ ID NO: 2155382 - RNA, 19 nt, Artificial Sequence
  Description of Artificial Sequence: Synthetic oligonucleotide
  Sense strand starting at position 3440 of SEQ ID NO: 1882892
aauuuagagcuucgucacu

SEQ ID NO: 2155383 - RNA, 19 nt, Artificial Sequence
  Description of Artificial Sequence: Synthetic oligonucleotide
  Antisense strand to SEQ ID NO: 2155382
agugacgaagcucuaaauu

SEQ ID NO: 2155384 - RNA, 19 nt, Artificial Sequence
  Description of Artificial Sequence: Synthetic oligonucleotide
  Sense strand starting at position 3528 of SEQ ID NO: 1882892
accgacuguuuaccacaau

SEQ ID NO: 2155385 - RNA, 19 nt, Artificial Sequence
  Description of Artificial Sequence: Synthetic oligonucleotide
  Antisense strand to SEQ ID NO: 2155384
auugugguaaacagucggu

SEQ ID NO: 2155386 - RNA, 19 nt, Artificial Sequence
  Description of Artificial Sequence: Synthetic oligonucleotide
  Sense strand starting at position 3598 of SEQ ID NO: 1882892
uaagacagagucuagcauu

SEQ ID NO: 2155387 - RNA, 19 nt, Artificial Sequence
  Description of Artificial Sequence: Synthetic oligonucleotide
  Antisense strand to SEQ ID NO: 2155386
aaugcuagacucugucuua

SEQ ID NO: 2155388 - RNA, 19 nt, Artificial Sequence
  Description of Artificial Sequence: Synthetic oligonucleotide
  Sense strand starting at position 3671 of SEQ ID NO: 1882892
ggcugacuggagcaaugaa

SEQ ID NO: 2155389 - RNA, 19 nt, Artificial Sequence
  Description of Artificial Sequence: Synthetic oligonucleotide
  Antisense strand to SEQ ID NO: 2155388
uucauugcuccagucagcc

SEQ ID NO: 2155390 - RNA, 19 nt, Artificial Sequence
  Description of Artificial Sequence: Synthetic oligonucleotide
  Sense strand starting at position 3874 of SEQ ID NO: 1882892
aucaauauccuguggcaca

SEQ ID NO: 2155391 - RNA, 19 nt, Artificial Sequence
  Description of Artificial Sequence: Synthetic oligonucleotide
  Antisense strand to SEQ ID NO: 2155390
ugugccacaggauauugau

SEQ ID NO: 2155392 - RNA, 19 nt, Artificial Sequence
  Description of Artificial Sequence: Synthetic oligonucleotide
  Sense strand starting at position 204 of SEQ ID NO: 1882893
gcauguauccaagguccuu

SEQ ID NO: 2155393 - RNA, 19 nt, Artificial Sequence
  Description of Artificial Sequence: Synthetic oligonucleotide
  Antisense strand to SEQ ID NO: 2155392
aaggaccuuggauacaugc

SEQ ID NO: 2155394 - RNA, 19 nt, Artificial Sequence
  Description of Artificial Sequence: Synthetic oligonucleotide
  Sense strand starting at position 243 of SEQ ID NO: 1882893
ucugccaucguggacuuaa

SEQ ID NO: 2155395 - RNA, 19 nt, Artificial Sequence
  Description of Artificial Sequence: Synthetic oligonucleotide
  Antisense strand to SEQ ID NO: 2155394
uuaaguccacgauggcaga

SEQ ID NO: 2155396 - RNA, 19 nt, Artificial Sequence
  Description of Artificial Sequence: Synthetic oligonucleotide
  Sense strand starting at position 364 of SEQ ID NO: 1882893
guccuuagguucgggaaca

SEQ ID NO: 2155397 - RNA, 19 nt, Artificial Sequence
  Description of Artificial Sequence: Synthetic oligonucleotide
  Antisense strand to SEQ ID NO: 2155396
uguucccgaaccuaaggac

SEQ ID NO: 2155398 - RNA, 19 nt, Artificial Sequence
  Description of Artificial Sequence: Synthetic oligonucleotide
  Sense strand starting at position 365 of SEQ ID NO: 1882893
uccuuagguucgggaacaa

SEQ ID NO: 2155399 - RNA, 19 nt, Artificial Sequence
  Description of Artificial Sequence: Synthetic oligonucleotide
  Antisense strand to SEQ ID NO: 2155398
uuguucccgaaccuaagga

SEQ ID NO: 2155400 - RNA, 19 nt, Artificial Sequence
  Description of Artificial Sequence: Synthetic oligonucleotide
  Sense strand starting at position 426 of SEQ ID NO: 1882893
ccaggaaaucugugugcuc

SEQ ID NO: 2155401 - RNA, 19 nt, Artificial Sequence
  Description of Artificial Sequence: Synthetic oligonucleotide
  Antisense strand to SEQ ID NO: 2155400
gagcacacagauuuccugg

SEQ ID NO: 2155402 - RNA, 19 nt, Artificial Sequence
  Description of Artificial Sequence: Synthetic oligonucleotide
  Sense strand starting at position 427 of SEQ ID NO: 1882893
caggaaaucugugugcucu

SEQ ID NO: 2155403 - RNA, 19 nt, Artificial Sequence
  Description of Artificial Sequence: Synthetic oligonucleotide
  Antisense strand to SEQ ID NO: 2155402
agagcacacagauuuccug

SEQ ID NO: 2155404 - RNA, 19 nt, Artificial Sequence
  Description of Artificial Sequence: Synthetic oligonucleotide
  Sense strand starting at position 428 of SEQ ID NO: 1882893
aggaaaucugugugcucuc

SEQ ID NO: 2155405 - RNA, 19 nt, Artificial Sequence
  Description of Artificial Sequence: Synthetic oligonucleotide
  Antisense strand to SEQ ID NO: 2155404
gagagcacacagauuuccu

SEQ ID NO: 2155406 - RNA, 19 nt, Artificial Sequence
  Description of Artificial Sequence: Synthetic oligonucleotide
  Sense strand starting at position 471 of SEQ ID NO: 1882893
gagggucacucaucuucca

SEQ ID NO: 2155407 - RNA, 19 nt, Artificial Sequence
  Description of Artificial Sequence: Synthetic oligonucleotide
  Antisense strand to SEQ ID NO: 2155406
uggaagaugagugacccuc

SEQ ID NO: 2155408 - RNA, 19 nt, Artificial Sequence
  Description of Artificial Sequence: Synthetic oligonucleotide
  Sense strand starting at position 593 of SEQ ID NO: 1882893
uugugcucacggcauguaa

SEQ ID NO: 2155409 - RNA, 19 nt, Artificial Sequence
  Description of Artificial Sequence: Synthetic oligonucleotide
  Antisense strand to SEQ ID NO: 2155408
uuacaugccgugagcacaa

SEQ ID NO: 2155410 - RNA, 19 nt, Artificial Sequence
  Description of Artificial Sequence: Synthetic oligonucleotide
  Sense strand starting at position 595 of SEQ ID NO: 1882893
gugcucacggcauguaaca

SEQ ID NO: 2155411 - RNA, 19 nt, Artificial Sequence
  Description of Artificial Sequence: Synthetic oligonucleotide
  Antisense strand to SEQ ID NO: 2155410
uguuacaugccgugagcac

SEQ ID NO: 2155412 - RNA, 19 nt, Artificial Sequence
  Description of Artificial Sequence: Synthetic oligonucleotide
  Sense strand starting at position 1254 of SEQ ID NO: 1882893
guggaaugcuggaggcaua

SEQ ID NO: 2155413 - RNA, 19 nt, Artificial Sequence
  Description of Artificial Sequence: Synthetic oligonucleotide
  Antisense strand to SEQ ID NO: 2155412
uaugccuccagcauuccac

SEQ ID NO: 2155414 - RNA, 19 nt, Artificial Sequence
  Description of Artificial Sequence: Synthetic oligonucleotide
  Sense strand starting at position 1403 of SEQ ID NO: 1882893
acuggauguccgugaugca

SEQ ID NO: 2155415 - RNA, 19 nt, Artificial Sequence
  Description of Artificial Sequence: Synthetic oligonucleotide
  Antisense strand to SEQ ID NO: 2155414
ugcaucacggacauccagu

SEQ ID NO: 2155416 - RNA, 19 nt, Artificial Sequence
  Description of Artificial Sequence: Synthetic oligonucleotide
  Sense strand starting at position 1475 of SEQ ID NO: 1882893
cucuuagugaccuguggaa

SEQ ID NO: 2155417 - RNA, 19 nt, Artificial Sequence
  Description of Artificial Sequence: Synthetic oligonucleotide
  Antisense strand to SEQ ID NO: 2155416
uuccacaggucacuaagag

SEQ ID NO: 2155418 - RNA, 19 nt, Artificial Sequence
  Description of Artificial Sequence: Synthetic oligonucleotide
  Sense strand starting at position 1479 of SEQ ID NO: 1882893
uagugaccuguggaagguu

SEQ ID NO: 2155419 - RNA, 19 nt, Artificial Sequence
  Description of Artificial Sequence: Synthetic oligonucleotide
  Antisense strand to SEQ ID NO: 2155418
aaccuuccacaggucacua

SEQ ID NO: 2155420 - RNA, 19 nt, Artificial Sequence
  Description of Artificial Sequence: Synthetic oligonucleotide
  Sense strand starting at position 1825 of SEQ ID NO: 1882893
ccuccuuccucgcggagaa

SEQ ID NO: 2155421 - RNA, 19 nt, Artificial Sequence
  Description of Artificial Sequence: Synthetic oligonucleotide
  Antisense strand to SEQ ID NO: 2155420
uucuccgcgaggaaggagg

SEQ ID NO: 2155422 - RNA, 19 nt, Artificial Sequence
  Description of Artificial Sequence: Synthetic oligonucleotide
  Sense strand starting at position 1954 of SEQ ID NO: 1882893
cagugugaguucuaccauu

SEQ ID NO: 2155423 - RNA, 19 nt, Artificial Sequence
  Description of Artificial Sequence: Synthetic oligonucleotide
  Antisense strand to SEQ ID NO: 2155422
aaugguagaacucacacug

SEQ ID NO: 2155424 - RNA, 19 nt, Artificial Sequence
  Description of Artificial Sequence: Synthetic oligonucleotide
  Sense strand starting at position 2021 of SEQ ID NO: 1882893
cucggucugugcugaggaa

SEQ ID NO: 2155425 - RNA, 19 nt, Artificial Sequence
  Description of Artificial Sequence: Synthetic oligonucleotide
  Antisense strand to SEQ ID NO: 2155424
uuccucagcacagaccgag

SEQ ID NO: 2155426 - RNA, 19 nt, Artificial Sequence
  Description of Artificial Sequence: Synthetic oligonucleotide
  Sense strand starting at position 2025 of SEQ ID NO: 1882893
gucugugcugaggaagaga

SEQ ID NO: 2155427 - RNA, 19 nt, Artificial Sequence
  Description of Artificial Sequence: Synthetic oligonucleotide
  Antisense strand to SEQ ID NO: 2155426
ucucuuccucagcacagac

SEQ ID NO: 2155428 - RNA, 19 nt, Artificial Sequence
  Description of Artificial Sequence: Synthetic oligonucleotide
  Sense strand starting at position 2482 of SEQ ID NO: 1882893
gagagaugcucccaagcca

SEQ ID NO: 2155429 - RNA, 19 nt, Artificial Sequence
  Description of Artificial Sequence: Synthetic oligonucleotide
  Antisense strand to SEQ ID NO: 2155428
uggcuugggagcaucucuc

SEQ ID NO: 2155430 - RNA, 19 nt, Artificial Sequence
  Description of Artificial Sequence: Synthetic oligonucleotide
  Sense strand starting at position 2546 of SEQ ID NO: 1882893
gagggaaguugcuacacaa

SEQ ID NO: 2155431 - RNA, 19 nt, Artificial Sequence
  Description of Artificial Sequence: Synthetic oligonucleotide
  Antisense strand to SEQ ID NO: 2155430
uuguguagcaacuucccuc

SEQ ID NO: 2155432 - RNA, 19 nt, Artificial Sequence
  Description of Artificial Sequence: Synthetic oligonucleotide
  Sense strand starting at position 2833 of SEQ ID NO: 1882893
gcgaucugauucucggagu

SEQ ID NO: 2155433 - RNA, 19 nt, Artificial Sequence
  Description of Artificial Sequence: Synthetic oligonucleotide
  Antisense strand to SEQ ID NO: 2155432
acuccgagaaucagaucgc

SEQ ID NO: 2155434 - RNA, 19 nt, Artificial Sequence
  Description of Artificial Sequence: Synthetic oligonucleotide
  Sense strand starting at position 2839 of SEQ ID NO: 1882893
ugauucucggaguggcauu

SEQ ID NO: 2155435 - RNA, 19 nt, Artificial Sequence
  Description of Artificial Sequence: Synthetic oligonucleotide
  Antisense strand to SEQ ID NO: 2155434
aaugccacuccgagaauca

SEQ ID NO: 2155436 - RNA, 19 nt, Artificial Sequence
  Description of Artificial Sequence: Synthetic oligonucleotide
  Sense strand starting at position 3644 of SEQ ID NO: 1882893
cugggauaauggccuggaa

SEQ ID NO: 2155437 - RNA, 19 nt, Artificial Sequence
  Description of Artificial Sequence: Synthetic oligonucleotide
  Antisense strand to SEQ ID NO: 2155436
uuccaggccauuaucccag

SEQ ID NO: 2155438 - RNA, 19 nt, Artificial Sequence
  Description of Artificial Sequence: Synthetic oligonucleotide
  Sense strand starting at position 3646 of SEQ ID NO: 1882893
gggauaauggccuggaaug

SEQ ID NO: 2155439 - RNA, 19 nt, Artificial Sequence
  Description of Artificial Sequence: Synthetic oligonucleotide
  Antisense strand to SEQ ID NO: 2155438
cauuccaggccauuauccc

SEQ ID NO: 2155440 - RNA, 19 nt, Artificial Sequence
  Description of Artificial Sequence: Synthetic oligonucleotide
  Sense strand starting at position 3647 of SEQ ID NO: 1882893
ggauaauggccuggaauga

SEQ ID NO: 2155441 - RNA, 19 nt, Artificial Sequence
  Description of Artificial Sequence: Synthetic oligonucleotide
  Antisense strand to SEQ ID NO: 2155440
ucauuccaggccauuaucc

SEQ ID NO: 2155442 - RNA, 19 nt, Artificial Sequence
  Description of Artificial Sequence: Synthetic oligonucleotide
  Sense strand starting at position 269 of SEQ ID NO: 1882894
uggagagcuucuguagaga

SEQ ID NO: 2155443 - RNA, 19 nt, Artificial Sequence
  Description of Artificial Sequence: Synthetic oligonucleotide
  Antisense strand to SEQ ID NO: 2155442
ucucuacagaagcucucca

SEQ ID NO: 2155444 - RNA, 19 nt, Artificial Sequence
  Description of Artificial Sequence: Synthetic oligonucleotide
  Sense strand starting at position 332 of SEQ ID NO: 1882894
gcgguuuggugauagcuaa

SEQ ID NO: 2155445 - RNA, 19 nt, Artificial Sequence
  Description of Artificial Sequence: Synthetic oligonucleotide
  Antisense strand to SEQ ID NO: 2155444
uuagcuaucaccaaaccgc

SEQ ID NO: 2155446 - RNA, 19 nt, Artificial Sequence
  Description of Artificial Sequence: Synthetic oligonucleotide
  Sense strand starting at position 336 of SEQ ID NO: 1882894
uuuggugauagcuaacuga

SEQ ID NO: 2155447 - RNA, 19 nt, Artificial Sequence
  Description of Artificial Sequence: Synthetic oligonucleotide
  Antisense strand to SEQ ID NO: 2155446
ucaguuagcuaucaccaaa

SEQ ID NO: 2155448 - RNA, 19 nt, Artificial Sequence
  Description of Artificial Sequence: Synthetic oligonucleotide
  Sense strand starting at position 339 of SEQ ID NO: 1882894
ggugauagcuaacugacaa

SEQ ID NO: 2155449 - RNA, 19 nt, Artificial Sequence
  Description of Artificial Sequence: Synthetic oligonucleotide
  Antisense strand to SEQ ID NO: 2155448
uugucaguuagcuaucacc

SEQ ID NO: 2155450 - RNA, 19 nt, Artificial Sequence
  Description of Artificial Sequence: Synthetic oligonucleotide
  Sense strand starting at position 340 of SEQ ID NO: 1882894
gugauagcuaacugacaag

SEQ ID NO: 2155451 - RNA, 19 nt, Artificial Sequence
  Description of Artificial Sequence: Synthetic oligonucleotide
  Antisense strand to SEQ ID NO: 2155450
cuugucaguuagcuaucac

SEQ ID NO: 2155452 - RNA, 19 nt, Artificial Sequence
  Description of Artificial Sequence: Synthetic oligonucleotide
  Sense strand starting at position 343 of SEQ ID NO: 1882894
auagcuaacugacaagaaa

SEQ ID NO: 2155453 - RNA, 19 nt, Artificial Sequence
  Description of Artificial Sequence: Synthetic oligonucleotide
  Antisense strand to SEQ ID NO: 2155452
uuucuugucaguuagcuau

SEQ ID NO: 2155454 - RNA, 19 nt, Artificial Sequence
  Description of Artificial Sequence: Synthetic oligonucleotide
  Sense strand starting at position 983 of SEQ ID NO: 1882894
ggugggaacuguugggauu

SEQ ID NO: 2155455 - RNA, 19 nt, Artificial Sequence
  Description of Artificial Sequence: Synthetic oligonucleotide
  Antisense strand to SEQ ID NO: 2155454
aaucccaacaguucccacc

SEQ ID NO: 2155456 - RNA, 19 nt, Artificial Sequence
  Description of Artificial Sequence: Synthetic oligonucleotide
  Sense strand starting at position 984 of SEQ ID NO: 1882894
gugggaacuguugggauua

SEQ ID NO: 2155457 - RNA, 19 nt, Artificial Sequence
  Description of Artificial Sequence: Synthetic oligonucleotide
  Antisense strand to SEQ ID NO: 2155456
uaaucccaacaguucccac

SEQ ID NO: 2155458 - RNA, 19 nt, Artificial Sequence
  Description of Artificial Sequence: Synthetic oligonucleotide
  Sense strand starting at position 985 of SEQ ID NO: 1882894
ugggaacuguugggauuau

SEQ ID NO: 2155459 - RNA, 19 nt, Artificial Sequence
  Description of Artificial Sequence: Synthetic oligonucleotide
  Antisense strand to SEQ ID NO: 2155458
auaaucccaacaguuccca

SEQ ID NO: 2155460 - RNA, 19 nt, Artificial Sequence
  Description of Artificial Sequence: Synthetic oligonucleotide
  Sense strand starting at position 986 of SEQ ID NO: 1882894
gggaacuguugggauuaua

SEQ ID NO: 2155461 - RNA, 19 nt, Artificial Sequence
  Description of Artificial Sequence: Synthetic oligonucleotide
  Antisense strand to SEQ ID NO: 2155460
uauaaucccaacaguuccc

SEQ ID NO: 2155462 - RNA, 19 nt, Artificial Sequence
  Description of Artificial Sequence: Synthetic oligonucleotide
  Sense strand starting at position 995 of SEQ ID NO: 1882894
ugggauuauauauguaaug

SEQ ID NO: 2155463 - RNA, 19 nt, Artificial Sequence
  Description of Artificial Sequence: Synthetic oligonucleotide
  Antisense strand to SEQ ID NO: 2155462
cauuacauauauaauccca

SEQ ID NO: 2155464 - RNA, 19 nt, Artificial Sequence
  Description of Artificial Sequence: Synthetic oligonucleotide
  Sense strand starting at position 996 of SEQ ID NO: 1882894
gggauuauauauguaaugu

SEQ ID NO: 2155465 - RNA, 19 nt, Artificial Sequence
  Description of Artificial Sequence: Synthetic oligonucleotide
  Antisense strand to SEQ ID NO: 2155464
acauuacauauauaauccc

SEQ ID NO: 2155466 - RNA, 19 nt, Artificial Sequence
  Description of Artificial Sequence: Synthetic oligonucleotide
  Sense strand starting at position 1042 of SEQ ID NO: 1882894
gccaguuagucauagccca

SEQ ID NO: 2155467 - RNA, 19 nt, Artificial Sequence
  Description of Artificial Sequence: Synthetic oligonucleotide
  Antisense strand to SEQ ID NO: 2155466
ugggcuaugacuaacuggc

SEQ ID NO: 2155468 - RNA, 19 nt, Artificial Sequence
  Description of Artificial Sequence: Synthetic oligonucleotide
  Sense strand starting at position 1192 of SEQ ID NO: 1882894
cuuggagcuguucggagau

SEQ ID NO: 2155469 - RNA, 19 nt, Artificial Sequence
  Description of Artificial Sequence: Synthetic oligonucleotide
  Antisense strand to SEQ ID NO: 2155468
aucuccgaacagcuccaag

SEQ ID NO: 2155470 - RNA, 19 nt, Artificial Sequence
  Description of Artificial Sequence: Synthetic oligonucleotide
  Sense strand starting at position 1194 of SEQ ID NO: 1882894
uggagcuguucggagauga

SEQ ID NO: 2155471 - RNA, 19 nt, Artificial Sequence
  Description of Artificial Sequence: Synthetic oligonucleotide
  Antisense strand to SEQ ID NO: 2155470
ucaucuccgaacagcucca

SEQ ID NO: 2155472 - RNA, 19 nt, Artificial Sequence
  Description of Artificial Sequence: Synthetic oligonucleotide
  Sense strand starting at position 1698 of SEQ ID NO: 1882894
caugauugcucagagcgga

SEQ ID NO: 2155473 - RNA, 19 nt, Artificial Sequence
  Description of Artificial Sequence: Synthetic oligonucleotide
  Antisense strand to SEQ ID NO: 2155472
uccgcucugagcaaucaug

SEQ ID NO: 2155474 - RNA, 19 nt, Artificial Sequence
  Description of Artificial Sequence: Synthetic oligonucleotide
  Sense strand starting at position 1899 of SEQ ID NO: 1882894
cugucucugcucuguuuau

SEQ ID NO: 2155475 - RNA, 19 nt, Artificial Sequence
  Description of Artificial Sequence: Synthetic oligonucleotide
  Antisense strand to SEQ ID NO: 2155474
auaaacagagcagagacag

SEQ ID NO: 2155476 - RNA, 19 nt, Artificial Sequence
  Description of Artificial Sequence: Synthetic oligonucleotide
  Sense strand starting at position 2334 of SEQ ID NO: 1882894
ccaucuccuugccagagua

SEQ ID NO: 2155477 - RNA, 19 nt, Artificial Sequence
  Description of Artificial Sequence: Synthetic oligonucleotide
  Antisense strand to SEQ ID NO: 2155476
uacucuggcaaggagaugg

SEQ ID NO: 2155478 - RNA, 19 nt, Artificial Sequence
  Description of Artificial Sequence: Synthetic oligonucleotide
  Sense strand starting at position 2488 of SEQ ID NO: 1882894
gcacuuuggucuccauuau

SEQ ID NO: 2155479 - RNA, 19 nt, Artificial Sequence
  Description of Artificial Sequence: Synthetic oligonucleotide
  Antisense strand to SEQ ID NO: 2155478
auaauggagaccaaagugc

SEQ ID NO: 2155480 - RNA, 19 nt, Artificial Sequence
  Description of Artificial Sequence: Synthetic oligonucleotide
  Sense strand starting at position 2821 of SEQ ID NO: 1882894
cugggaagguugcaucagu

SEQ ID NO: 2155481 - RNA, 19 nt, Artificial Sequence
  Description of Artificial Sequence: Synthetic oligonucleotide
  Antisense strand to SEQ ID NO: 2155480
acugaugcaaccuucccag

SEQ ID NO: 2155482 - RNA, 19 nt, Artificial Sequence
  Description of Artificial Sequence: Synthetic oligonucleotide
  Sense strand starting at position 3103 of SEQ ID NO: 1882894
agaccucuuggcgauguua

SEQ ID NO: 2155483 - RNA, 19 nt, Artificial Sequence
  Description of Artificial Sequence: Synthetic oligonucleotide
  Antisense strand to SEQ ID NO: 2155482
uaacaucgccaagaggucu

SEQ ID NO: 2155484 - RNA, 19 nt, Artificial Sequence
  Description of Artificial Sequence: Synthetic oligonucleotide
  Sense strand starting at position 3323 of SEQ ID NO: 1882894
uggugaucucaggaaguca

SEQ ID NO: 2155485 - RNA, 19 nt, Artificial Sequence
  Description of Artificial Sequence: Synthetic oligonucleotide
  Antisense strand to SEQ ID NO: 2155484
ugacuuccugagaucacca

SEQ ID NO: 2155486 - RNA, 19 nt, Artificial Sequence
  Description of Artificial Sequence: Synthetic oligonucleotide
  Sense strand starting at position 3356 of SEQ ID NO: 1882894
gccucaguuucccuuacua

SEQ ID NO: 2155487 - RNA, 19 nt, Artificial Sequence
  Description of Artificial Sequence: Synthetic oligonucleotide
  Antisense strand to SEQ ID NO: 2155486
uaguaagggaaacugaggc

SEQ ID NO: 2155488 - RNA, 19 nt, Artificial Sequence
  Description of Artificial Sequence: Synthetic oligonucleotide
  Sense strand starting at position 3381 of SEQ ID NO: 1882894
ucugaacucuacuaaggaa

SEQ ID NO: 2155489 - RNA, 19 nt, Artificial Sequence
  Description of Artificial Sequence: Synthetic oligonucleotide
  Antisense strand to SEQ ID NO: 2155488
uuccuuaguagaguucaga

SEQ ID NO: 2155490 - RNA, 19 nt, Artificial Sequence
  Description of Artificial Sequence: Synthetic oligonucleotide
  Sense strand starting at position 3439 of SEQ ID NO: 1882894
gggugauggcaggguguua

SEQ ID NO: 2155491 - RNA, 19 nt, Artificial Sequence
  Description of Artificial Sequence: Synthetic oligonucleotide
  Antisense strand to SEQ ID NO: 2155490
uaacacccugccaucaccc

SEQ ID NO: 2155492 - RNA, 19 nt, Artificial Sequence
  Description of Artificial Sequence: Synthetic oligonucleotide
  Sense strand starting at position 3451 of SEQ ID NO: 1882894
gguguuagcaaagaguaug

SEQ ID NO: 2155493 - RNA, 19 nt, Artificial Sequence
  Description of Artificial Sequence: Synthetic oligonucleotide
  Antisense strand to SEQ ID NO: 2155492
cauacucuuugcuaacacc

SEQ ID NO: 2155494 - RNA, 19 nt, Artificial Sequence
  Description of Artificial Sequence: Synthetic oligonucleotide
  Sense strand starting at position 3472 of SEQ ID NO: 1882894
guggguaguuaugaacauu

SEQ ID NO: 2155495 - RNA, 19 nt, Artificial Sequence
  Description of Artificial Sequence: Synthetic oligonucleotide
  Antisense strand to SEQ ID NO: 2155494
aauguucauaacuacccac

SEQ ID NO: 2155496 - RNA, 19 nt, Artificial Sequence
  Description of Artificial Sequence: Synthetic oligonucleotide
  Sense strand starting at position 3484 of SEQ ID NO: 1882894
gaacauugcuuagggugua

SEQ ID NO: 2155497 - RNA, 19 nt, Artificial Sequence
  Description of Artificial Sequence: Synthetic oligonucleotide
  Antisense strand to SEQ ID NO: 2155496
uacacccuaagcaauguuc

SEQ ID NO: 2155498 - RNA, 19 nt, Artificial Sequence
  Description of Artificial Sequence: Synthetic oligonucleotide
  Sense strand starting at position 3518 of SEQ ID NO: 1882894
caaggagccuguugaaaug

SEQ ID NO: 2155499 - RNA, 19 nt, Artificial Sequence
  Description of Artificial Sequence: Synthetic oligonucleotide
  Antisense strand to SEQ ID NO: 2155498
cauuucaacaggcuccuug

SEQ ID NO: 2155500 - RNA, 19 nt, Artificial Sequence
  Description of Artificial Sequence: Synthetic oligonucleotide
  Sense strand starting at position 3527 of SEQ ID NO: 1882894
uguugaaauguagauucuu

SEQ ID NO: 2155501 - RNA, 19 nt, Artificial Sequence
  Description of Artificial Sequence: Synthetic oligonucleotide
  Antisense strand to SEQ ID NO: 2155500
aagaaucuacauuucaaca

SEQ ID NO: 2155502 - RNA, 19 nt, Artificial Sequence
  Description of Artificial Sequence: Synthetic oligonucleotide
  Sense strand starting at position 3533 of SEQ ID NO: 1882894
aauguagauucuugagccu

SEQ ID NO: 2155503 - RNA, 19 nt, Artificial Sequence
  Description of Artificial Sequence: Synthetic oligonucleotide
  Antisense strand to SEQ ID NO: 2155502
aggcucaagaaucuacauu

SEQ ID NO: 2155504 - RNA, 19 nt, Artificial Sequence
  Description of Artificial Sequence: Synthetic oligonucleotide
  Sense strand starting at position 3542 of SEQ ID NO: 1882894
ucuugagccugccuggaaa

SEQ ID NO: 2155505 - RNA, 19 nt, Artificial Sequence
  Description of Artificial Sequence: Synthetic oligonucleotide
  Antisense strand to SEQ ID NO: 2155504
uuuccaggcaggcucaaga

SEQ ID NO: 2155506 - RNA, 19 nt, Artificial Sequence
  Description of Artificial Sequence: Synthetic oligonucleotide
  Sense strand starting at position 3628 of SEQ ID NO: 1882894
agaaaucuuucccaagaag

SEQ ID NO: 2155507 - RNA, 19 nt, Artificial Sequence
  Description of Artificial Sequence: Synthetic oligonucleotide
  Antisense strand to SEQ ID NO: 2155506
cuucuugggaaagauuucu

SEQ ID NO: 2155508 - RNA, 19 nt, Artificial Sequence
  Description of Artificial Sequence: Synthetic oligonucleotide
  Sense strand starting at position 3643 of SEQ ID NO: 1882894
gaagccucacccugggaua

SEQ ID NO: 2155509 - RNA, 19 nt, Artificial Sequence
  Description of Artificial Sequence: Synthetic oligonucleotide
  Antisense strand to SEQ ID NO: 2155508
uaucccagggugaggcuuc

SEQ ID NO: 2155510 - RNA, 19 nt, Artificial Sequence
  Description of Artificial Sequence: Synthetic oligonucleotide
  Sense strand starting at position 3645 of SEQ ID NO: 1882894
agccucacccugggauaau

SEQ ID NO: 2155511 - RNA, 19 nt, Artificial Sequence
  Description of Artificial Sequence: Synthetic oligonucleotide
  Antisense strand to SEQ ID NO: 2155510
auuaucccagggugaggcu

SEQ ID NO: 2155512 - RNA, 19 nt, Artificial Sequence
  Description of Artificial Sequence: Synthetic oligonucleotide
  Sense strand starting at position 3646 of SEQ ID NO: 1882894
gccucacccugggauaauu

SEQ ID NO: 2155513 - RNA, 19 nt, Artificial Sequence
  Description of Artificial Sequence: Synthetic oligonucleotide
  Antisense strand to SEQ ID NO: 2155512
aauuaucccagggugaggc

SEQ ID NO: 2155514 - RNA, 19 nt, Artificial Sequence
  Description of Artificial Sequence: Synthetic oligonucleotide
  Sense strand starting at position 138 of SEQ ID NO: 1882895
uugaguguuaagcagaugu

SEQ ID NO: 2155515 - RNA, 19 nt, Artificial Sequence
  Description of Artificial Sequence: Synthetic oligonucleotide
  Antisense strand to SEQ ID NO: 2155514
acaucugcuuaacacucaa

SEQ ID NO: 2155516 - RNA, 19 nt, Artificial Sequence
  Description of Artificial Sequence: Synthetic oligonucleotide
  Sense strand starting at position 140 of SEQ ID NO: 1882895
gaguguuaagcagauguua

SEQ ID NO: 2155517 - RNA, 19 nt, Artificial Sequence
  Description of Artificial Sequence: Synthetic oligonucleotide
  Antisense strand to SEQ ID NO: 2155516
uaacaucugcuuaacacuc

SEQ ID NO: 2155518 - RNA, 19 nt, Artificial Sequence
  Description of Artificial Sequence: Synthetic oligonucleotide
  Sense strand starting at position 142 of SEQ ID NO: 1882895
guguuaagcagauguuacu

SEQ ID NO: 2155519 - RNA, 19 nt, Artificial Sequence
  Description of Artificial Sequence: Synthetic oligonucleotide
  Antisense strand to SEQ ID NO: 2155518
aguaacaucugcuuaacac

SEQ ID NO: 2155520 - RNA, 19 nt, Artificial Sequence
  Description of Artificial Sequence: Synthetic oligonucleotide
  Sense strand starting at position 154 of SEQ ID NO: 1882895
uguuacuggugccuagaaa

SEQ ID NO: 2155521 - RNA, 19 nt, Artificial Sequence
  Description of Artificial Sequence: Synthetic oligonucleotide
  Antisense strand to SEQ ID NO: 2155520
uuucuaggcaccaguaaca

SEQ ID NO: 2155522 - RNA, 19 nt, Artificial Sequence
  Description of Artificial Sequence: Synthetic oligonucleotide
  Sense strand starting at position 155 of SEQ ID NO: 1882895
guuacuggugccuagaaag

SEQ ID NO: 2155523 - RNA, 19 nt, Artificial Sequence
  Description of Artificial Sequence: Synthetic oligonucleotide
  Antisense strand to SEQ ID NO: 2155522
cuuucuaggcaccaguaac

SEQ ID NO: 2155524 - RNA, 19 nt, Artificial Sequence
  Description of Artificial Sequence: Synthetic oligonucleotide
  Sense strand starting at position 225 of SEQ ID NO: 1882895
gagccagaauagucugacu

SEQ ID NO: 2155525 - RNA, 19 nt, Artificial Sequence
  Description of Artificial Sequence: Synthetic oligonucleotide
  Antisense strand to SEQ ID NO: 2155524
agucagacuauucuggcuc

SEQ ID NO: 2155526 - RNA, 19 nt, Artificial Sequence
  Description of Artificial Sequence: Synthetic oligonucleotide
  Sense strand starting at position 227 of SEQ ID NO: 1882895
gccagaauagucugacuuu

SEQ ID NO: 2155527 - RNA, 19 nt, Artificial Sequence
  Description of Artificial Sequence: Synthetic oligonucleotide
  Antisense strand to SEQ ID NO: 2155526
aaagucagacuauucuggc

SEQ ID NO: 2155528 - RNA, 19 nt, Artificial Sequence
  Description of Artificial Sequence: Synthetic oligonucleotide
  Sense strand starting at position 267 of SEQ ID NO: 1882895
agugaaagagauugcguau

SEQ ID NO: 2155529 - RNA, 19 nt, Artificial Sequence
  Description of Artificial Sequence: Synthetic oligonucleotide
  Antisense strand to SEQ ID NO: 2155528
auacgcaaucucuuucacu

SEQ ID NO: 2155530 - RNA, 19 nt, Artificial Sequence
  Description of Artificial Sequence: Synthetic oligonucleotide
  Sense strand starting at position 270 of SEQ ID NO: 1882895
gaaagagauugcguaugca

SEQ ID NO: 2155531 - RNA, 19 nt, Artificial Sequence
  Description of Artificial Sequence: Synthetic oligonucleotide
  Antisense strand to SEQ ID NO: 2155530
ugcauacgcaaucucuuuc

SEQ ID NO: 2155532 - RNA, 19 nt, Artificial Sequence
  Description of Artificial Sequence: Synthetic oligonucleotide
  Sense strand starting at position 273 of SEQ ID NO: 1882895
agagauugcguaugcauaa

SEQ ID NO: 2155533 - RNA, 19 nt, Artificial Sequence
  Description of Artificial Sequence: Synthetic oligonucleotide
  Antisense strand to SEQ ID NO: 2155532
uuaugcauacgcaaucucu

SEQ ID NO: 2155534 - RNA, 19 nt, Artificial Sequence
  Description of Artificial Sequence: Synthetic oligonucleotide
  Sense strand starting at position 274 of SEQ ID NO: 1882895
gagauugcguaugcauaaa

SEQ ID NO: 2155535 - RNA, 19 nt, Artificial Sequence
  Description of Artificial Sequence: Synthetic oligonucleotide
  Antisense strand to SEQ ID NO: 2155534
uuuaugcauacgcaaucuc

SEQ ID NO: 2155536 - RNA, 19 nt, Artificial Sequence
  Description of Artificial Sequence: Synthetic oligonucleotide
  Sense strand starting at position 343 of SEQ ID NO: 1882895
cugaaacugugaucucuga

SEQ ID NO: 2155537 - RNA, 19 nt, Artificial Sequence
  Description of Artificial Sequence: Synthetic oligonucleotide
  Antisense strand to SEQ ID NO: 2155536
ucagagaucacaguuucag

SEQ ID NO: 2155538 - RNA, 19 nt, Artificial Sequence
  Description of Artificial Sequence: Synthetic oligonucleotide
  Sense strand starting at position 499 of SEQ ID NO: 1882895
cagcuuugugggcacgaau

SEQ ID NO: 2155539 - RNA, 19 nt, Artificial Sequence
  Description of Artificial Sequence: Synthetic oligonucleotide
  Antisense strand to SEQ ID NO: 2155538
auucgugcccacaaagcug

SEQ ID NO: 2155540 - RNA, 19 nt, Artificial Sequence
  Description of Artificial Sequence: Synthetic oligonucleotide
  Sense strand starting at position 629 of SEQ ID NO: 1882895
aguuuauaucaauggcucu

SEQ ID NO: 2155541 - RNA, 19 nt, Artificial Sequence
  Description of Artificial Sequence: Synthetic oligonucleotide
  Antisense strand to SEQ ID NO: 2155540
agagccauugauauaaacu

SEQ ID NO: 2155542 - RNA, 19 nt, Artificial Sequence
  Description of Artificial Sequence: Synthetic oligonucleotide
  Sense strand starting at position 636 of SEQ ID NO: 1882895
aucaauggcucuggaauuu

SEQ ID NO: 2155543 - RNA, 19 nt, Artificial Sequence
  Description of Artificial Sequence: Synthetic oligonucleotide
  Antisense strand to SEQ ID NO: 2155542
aaauuccagagccauugau

SEQ ID NO: 2155544 - RNA, 19 nt, Artificial Sequence
  Description of Artificial Sequence: Synthetic oligonucleotide
  Sense strand starting at position 645 of SEQ ID NO: 1882895
ucuggaauuugggauucuu

SEQ ID NO: 2155545 - RNA, 19 nt, Artificial Sequence
  Description of Artificial Sequence: Synthetic oligonucleotide
  Antisense strand to SEQ ID NO: 2155544
aagaaucccaaauuccaga

SEQ ID NO: 2155546 - RNA, 19 nt, Artificial Sequence
  Description of Artificial Sequence: Synthetic oligonucleotide
  Sense strand starting at position 727 of SEQ ID NO: 1882895
aggugcuguauggaacaua

SEQ ID NO: 2155547 - RNA, 19 nt, Artificial Sequence
  Description of Artificial Sequence: Synthetic oligonucleotide
  Antisense strand to SEQ ID NO: 2155546
uauguuccauacagcaccu

SEQ ID NO: 2155548 - RNA, 19 nt, Artificial Sequence
  Description of Artificial Sequence: Synthetic oligonucleotide
  Sense strand starting at position 1040 of SEQ ID NO: 1882895
ccauccggucgugaucaua

SEQ ID NO: 2155549 - RNA, 19 nt, Artificial Sequence
  Description of Artificial Sequence: Synthetic oligonucleotide
  Antisense strand to SEQ ID NO: 2155548
uaugaucacgaccggaugg

SEQ ID NO: 2155550 - RNA, 19 nt, Artificial Sequence
  Description of Artificial Sequence: Synthetic oligonucleotide
  Sense strand starting at position 1062 of SEQ ID NO: 1882895
gaggccuugucugcagagu

SEQ ID NO: 2155551 - RNA, 19 nt, Artificial Sequence
  Description of Artificial Sequence: Synthetic oligonucleotide
  Antisense strand to SEQ ID NO: 2155550
acucugcagacaaggccuc

SEQ ID NO: 2155552 - RNA, 19 nt, Artificial Sequence
  Description of Artificial Sequence: Synthetic oligonucleotide
  Sense strand starting at position 1063 of SEQ ID NO: 1882895
aggccuugucugcagagua

SEQ ID NO: 2155553 - RNA, 19 nt, Artificial Sequence
  Description of Artificial Sequence: Synthetic oligonucleotide
  Antisense strand to SEQ ID NO: 2155552
uacucugcagacaaggccu

SEQ ID NO: 2155554 - RNA, 19 nt, Artificial Sequence
  Description of Artificial Sequence: Synthetic oligonucleotide
  Sense strand starting at position 1226 of SEQ ID NO: 1882895
augcuuugggaaggagaua

SEQ ID NO: 2155555 - RNA, 19 nt, Artificial Sequence
  Description of Artificial Sequence: Synthetic oligonucleotide
  Antisense strand to SEQ ID NO: 2155554
uaucuccuucccaaagcau

SEQ ID NO: 2155556 - RNA, 19 nt, Artificial Sequence
  Description of Artificial Sequence: Synthetic oligonucleotide
  Sense strand starting at position 1254 of SEQ ID NO: 1882895
gauagaaucuggcagagac

SEQ ID NO: 2155557 - RNA, 19 nt, Artificial Sequence
  Description of Artificial Sequence: Synthetic oligonucleotide
  Antisense strand to SEQ ID NO: 2155556
gucucugccagauucuauc

SEQ ID NO: 2155558 - RNA, 19 nt, Artificial Sequence
  Description of Artificial Sequence: Synthetic oligonucleotide
  Sense strand starting at position 1495 of SEQ ID NO: 1882895
gaaggagguucuuuccuga

SEQ ID NO: 2155559 - RNA, 19 nt, Artificial Sequence
  Description of Artificial Sequence: Synthetic oligonucleotide
  Antisense strand to SEQ ID NO: 2155558
ucaggaaagaaccuccuuc

SEQ ID NO: 2155560 - RNA, 19 nt, Artificial Sequence
  Description of Artificial Sequence: Synthetic oligonucleotide
  Sense strand starting at position 1498 of SEQ ID NO: 1882895
ggagguucuuuccugagcu

SEQ ID NO: 2155561 - RNA, 19 nt, Artificial Sequence
  Description of Artificial Sequence: Synthetic oligonucleotide
  Antisense strand to SEQ ID NO: 2155560
agcucaggaaagaaccucc

SEQ ID NO: 2155562 - RNA, 19 nt, Artificial Sequence
  Description of Artificial Sequence: Synthetic oligonucleotide
  Sense strand starting at position 1500 of SEQ ID NO: 1882895
agguucuuuccugagcuca

SEQ ID NO: 2155563 - RNA, 19 nt, Artificial Sequence
  Description of Artificial Sequence: Synthetic oligonucleotide
  Antisense strand to SEQ ID NO: 2155562
ugagcucaggaaagaaccu

SEQ ID NO: 2155564 - RNA, 19 nt, Artificial Sequence
  Description of Artificial Sequence: Synthetic oligonucleotide
  Sense strand starting at position 1502 of SEQ ID NO: 1882895
guucuuuccugagcucaca

SEQ ID NO: 2155565 - RNA, 19 nt, Artificial Sequence
  Description of Artificial Sequence: Synthetic oligonucleotide
  Antisense strand to SEQ ID NO: 2155564
ugugagcucaggaaagaac

SEQ ID NO: 2155566 - RNA, 19 nt, Artificial Sequence
  Description of Artificial Sequence: Synthetic oligonucleotide
  Sense strand starting at position 1567 of SEQ ID NO: 1882895
guguuccagccuuacaaga

SEQ ID NO: 2155567 - RNA, 19 nt, Artificial Sequence
  Description of Artificial Sequence: Synthetic oligonucleotide
  Antisense strand to SEQ ID NO: 2155566
ucuuguaaggcuggaacac

SEQ ID NO: 2155568 - RNA, 19 nt, Artificial Sequence
  Description of Artificial Sequence: Synthetic oligonucleotide
  Sense strand starting at position 2676 of SEQ ID NO: 1882895
gauugagggucaucuguga

SEQ ID NO: 2155569 - RNA, 19 nt, Artificial Sequence
  Description of Artificial Sequence: Synthetic oligonucleotide
  Antisense strand to SEQ ID NO: 2155568
ucacagaugacccucaauc

SEQ ID NO: 2155570 - RNA, 19 nt, Artificial Sequence
  Description of Artificial Sequence: Synthetic oligonucleotide
  Sense strand starting at position 2680 of SEQ ID NO: 1882895
gagggucaucugugaccca

SEQ ID NO: 2155571 - RNA, 19 nt, Artificial Sequence
  Description of Artificial Sequence: Synthetic oligonucleotide
  Antisense strand to SEQ ID NO: 2155570
ugggucacagaugacccuc

SEQ ID NO: 2155572 - RNA, 19 nt, Artificial Sequence
  Description of Artificial Sequence: Synthetic oligonucleotide
  Sense strand starting at position 2747 of SEQ ID NO: 1882895
aagaaauccuguuuggcuu

SEQ ID NO: 2155573 - RNA, 19 nt, Artificial Sequence
  Description of Artificial Sequence: Synthetic oligonucleotide
  Antisense strand to SEQ ID NO: 2155572
aagccaaacaggauuucuu

SEQ ID NO: 2155574 - RNA, 19 nt, Artificial Sequence
  Description of Artificial Sequence: Synthetic oligonucleotide
  Sense strand starting at position 2758 of SEQ ID NO: 1882895
uuuggcuuccucugucuau

SEQ ID NO: 2155575 - RNA, 19 nt, Artificial Sequence
  Description of Artificial Sequence: Synthetic oligonucleotide
  Antisense strand to SEQ ID NO: 2155574
auagacagaggaagccaaa

SEQ ID NO: 2155576 - RNA, 19 nt, Artificial Sequence
  Description of Artificial Sequence: Synthetic oligonucleotide
  Sense strand starting at position 2761 of SEQ ID NO: 1882895
ggcuuccucugucuaugua

SEQ ID NO: 2155577 - RNA, 19 nt, Artificial Sequence
  Description of Artificial Sequence: Synthetic oligonucleotide
  Antisense strand to SEQ ID NO: 2155576
uacauagacagaggaagcc

SEQ ID NO: 2155578 - RNA, 19 nt, Artificial Sequence
  Description of Artificial Sequence: Synthetic oligonucleotide
  Sense strand starting at position 2794 of SEQ ID NO: 1882895
ugaaaucacugguccaaga

SEQ ID NO: 2155579 - RNA, 19 nt, Artificial Sequence
  Description of Artificial Sequence: Synthetic oligonucleotide
  Antisense strand to SEQ ID NO: 2155578
ucuuggaccagugauuuca

SEQ ID NO: 2155580 - RNA, 19 nt, Artificial Sequence
  Description of Artificial Sequence: Synthetic oligonucleotide
  Sense strand starting at position 2902 of SEQ ID NO: 1882895
uacgaccgucuagguaaua

SEQ ID NO: 2155581 - RNA, 19 nt, Artificial Sequence
  Description of Artificial Sequence: Synthetic oligonucleotide
  Antisense strand to SEQ ID NO: 2155580
uauuaccuagacggucgua

SEQ ID NO: 2155582 - RNA, 19 nt, Artificial Sequence
  Description of Artificial Sequence: Synthetic oligonucleotide
  Sense strand starting at position 2903 of SEQ ID NO: 1882895
acgaccgucuagguaauau

SEQ ID NO: 2155583 - RNA, 19 nt, Artificial Sequence
  Description of Artificial Sequence: Synthetic oligonucleotide
  Antisense strand to SEQ ID NO: 2155582
auauuaccuagacggucgu

SEQ ID NO: 2155584 - RNA, 19 nt, Artificial Sequence
  Description of Artificial Sequence: Synthetic oligonucleotide
  Sense strand starting at position 2907 of SEQ ID NO: 1882895
ccgucuagguaauauuuaa

SEQ ID NO: 2155585 - RNA, 19 nt, Artificial Sequence
  Description of Artificial Sequence: Synthetic oligonucleotide
  Antisense strand to SEQ ID NO: 2155584
uuaaauauuaccuagacgg

SEQ ID NO: 2155586 - RNA, 19 nt, Artificial Sequence
  Description of Artificial Sequence: Synthetic oligonucleotide
  Sense strand starting at position 2953 of SEQ ID NO: 1882895
ucggguuaguccuccuguu

SEQ ID NO: 2155587 - RNA, 19 nt, Artificial Sequence
  Description of Artificial Sequence: Synthetic oligonucleotide
  Antisense strand to SEQ ID NO: 2155586
aacaggaggacuaacccga

SEQ ID NO: 2155588 - RNA, 19 nt, Artificial Sequence
  Description of Artificial Sequence: Synthetic oligonucleotide
  Sense strand starting at position 3569 of SEQ ID NO: 1882895
uauggaaauuuagagguaa

SEQ ID NO: 2155589 - RNA, 19 nt, Artificial Sequence
  Description of Artificial Sequence: Synthetic oligonucleotide
  Antisense strand to SEQ ID NO: 2155588
uuaccucuaaauuuccaua

SEQ ID NO: 2155590 - RNA, 19 nt, Artificial Sequence
  Description of Artificial Sequence: Synthetic oligonucleotide
  Sense strand starting at position 3598 of SEQ ID NO: 1882895
uuagucaggcaauguaaga

SEQ ID NO: 2155591 - RNA, 19 nt, Artificial Sequence
  Description of Artificial Sequence: Synthetic oligonucleotide
  Antisense strand to SEQ ID NO: 2155590
ucuuacauugccugacuaa

SEQ ID NO: 2155592 - RNA, 19 nt, Artificial Sequence
  Description of Artificial Sequence: Synthetic oligonucleotide
  Sense strand starting at position 3680 of SEQ ID NO: 1882895
ugggauaucuuacagagga

SEQ ID NO: 2155593 - RNA, 19 nt, Artificial Sequence
  Description of Artificial Sequence: Synthetic oligonucleotide
  Antisense strand to SEQ ID NO: 2155592
uccucuguaagauauccca

SEQ ID NO: 2155594 - RNA, 19 nt, Artificial Sequence
  Description of Artificial Sequence: Synthetic oligonucleotide
  Sense strand starting at position 587 of SEQ ID NO: 1882896
aagggauaguaagcagauu

SEQ ID NO: 2155595 - RNA, 19 nt, Artificial Sequence
  Description of Artificial Sequence: Synthetic oligonucleotide
  Antisense strand to SEQ ID NO: 2155594
aaucugcuuacuaucccuu

SEQ ID NO: 2155596 - RNA, 19 nt, Artificial Sequence
  Description of Artificial Sequence: Synthetic oligonucleotide
  Sense strand starting at position 707 of SEQ ID NO: 1882896
uaggaaguggucuaaaggu

SEQ ID NO: 2155597 - RNA, 19 nt, Artificial Sequence
  Description of Artificial Sequence: Synthetic oligonucleotide
  Antisense strand to SEQ ID NO: 2155596
accuuuagaccacuuccua

SEQ ID NO: 2155598 - RNA, 19 nt, Artificial Sequence
  Description of Artificial Sequence: Synthetic oligonucleotide
  Sense strand starting at position 714 of SEQ ID NO: 1882896
uggucuaaagguugggauu

SEQ ID NO: 2155599 - RNA, 19 nt, Artificial Sequence
  Description of Artificial Sequence: Synthetic oligonucleotide
  Antisense strand to SEQ ID NO: 2155598
aaucccaaccuuuagacca

SEQ ID NO: 2155600 - RNA, 19 nt, Artificial Sequence
  Description of Artificial Sequence: Synthetic oligonucleotide
  Sense strand starting at position 720 of SEQ ID NO: 1882896
aaagguugggauugcugua

SEQ ID NO: 2155601 - RNA, 19 nt, Artificial Sequence
  Description of Artificial Sequence: Synthetic oligonucleotide
  Antisense strand to SEQ ID NO: 2155600
uacagcaaucccaaccuuu

SEQ ID NO: 2155602 - RNA, 19 nt, Artificial Sequence
  Description of Artificial Sequence: Synthetic oligonucleotide
  Sense strand starting at position 725 of SEQ ID NO: 1882896
uugggauugcuguauguga

SEQ ID NO: 2155603 - RNA, 19 nt, Artificial Sequence
  Description of Artificial Sequence: Synthetic oligonucleotide
  Antisense strand to SEQ ID NO: 2155602
ucacauacagcaaucccaa

SEQ ID NO: 2155604 - RNA, 19 nt, Artificial Sequence
  Description of Artificial Sequence: Synthetic oligonucleotide
  Sense strand starting at position 776 of SEQ ID NO: 1882896
agagcuuuagagugggagu

SEQ ID NO: 2155605 - RNA, 19 nt, Artificial Sequence
  Description of Artificial Sequence: Synthetic oligonucleotide
  Antisense strand to SEQ ID NO: 2155604
acucccacucuaaagcucu

SEQ ID NO: 2155606 - RNA, 19 nt, Artificial Sequence
  Description of Artificial Sequence: Synthetic oligonucleotide
  Sense strand starting at position 777 of SEQ ID NO: 1882896
gagcuuuagagugggaguu

SEQ ID NO: 2155607 - RNA, 19 nt, Artificial Sequence
  Description of Artificial Sequence: Synthetic oligonucleotide
  Antisense strand to SEQ ID NO: 2155606
aacucccacucuaaagcuc

SEQ ID NO: 2155608 - RNA, 19 nt, Artificial Sequence
  Description of Artificial Sequence: Synthetic oligonucleotide
  Sense strand starting at position 806 of SEQ ID NO: 1882896
uaaugaccugucugcuaga

SEQ ID NO: 2155609 - RNA, 19 nt, Artificial Sequence
  Description of Artificial Sequence: Synthetic oligonucleotide
  Antisense strand to SEQ ID NO: 2155608
ucuagcagacaggucauua

SEQ ID NO: 2155610 - RNA, 19 nt, Artificial Sequence
  Description of Artificial Sequence: Synthetic oligonucleotide
  Sense strand starting at position 807 of SEQ ID NO: 1882896
aaugaccugucugcuagaa

SEQ ID NO: 2155611 - RNA, 19 nt, Artificial Sequence
  Description of Artificial Sequence: Synthetic oligonucleotide
  Antisense strand to SEQ ID NO: 2155610
uucuagcagacaggucauu

SEQ ID NO: 2155612 - RNA, 19 nt, Artificial Sequence
  Description of Artificial Sequence: Synthetic oligonucleotide
  Sense strand starting at position 973 of SEQ ID NO: 1882896
cgcuuaguccuugccgcau

SEQ ID NO: 2155613 - RNA, 19 nt, Artificial Sequence
  Description of Artificial Sequence: Synthetic oligonucleotide
  Antisense strand to SEQ ID NO: 2155612
augcggcaaggacuaagcg

SEQ ID NO: 2155614 - RNA, 19 nt, Artificial Sequence
  Description of Artificial Sequence: Synthetic oligonucleotide
  Sense strand starting at position 1024 of SEQ ID NO: 1882896
gaugcacuuuacucaggua

SEQ ID NO: 2155615 - RNA, 19 nt, Artificial Sequence
  Description of Artificial Sequence: Synthetic oligonucleotide
  Antisense strand to SEQ ID NO: 2155614
uaccugaguaaagugcauc

SEQ ID NO: 2155616 - RNA, 19 nt, Artificial Sequence
  Description of Artificial Sequence: Synthetic oligonucleotide
  Sense strand starting at position 1401 of SEQ ID NO: 1882896
cgcugcucugccucagaga

SEQ ID NO: 2155617 - RNA, 19 nt, Artificial Sequence
  Description of Artificial Sequence: Synthetic oligonucleotide
  Antisense strand to SEQ ID NO: 2155616
ucucugaggcagagcagcg

SEQ ID NO: 2155618 - RNA, 19 nt, Artificial Sequence
  Description of Artificial Sequence: Synthetic oligonucleotide
  Sense strand starting at position 1496 of SEQ ID NO: 1882896
ggaaaugagugggugugua

SEQ ID NO: 2155619 - RNA, 19 nt, Artificial Sequence
  Description of Artificial Sequence: Synthetic oligonucleotide
  Antisense strand to SEQ ID NO: 2155618
uacacacccacucauuucc

SEQ ID NO: 2155620 - RNA, 19 nt, Artificial Sequence
  Description of Artificial Sequence: Synthetic oligonucleotide
  Sense strand starting at position 1510 of SEQ ID NO: 1882896
guguaaggucaggauacaa

SEQ ID NO: 2155621 - RNA, 19 nt, Artificial Sequence
  Description of Artificial Sequence: Synthetic oligonucleotide
  Antisense strand to SEQ ID NO: 2155620
uuguauccugaccuuacac

SEQ ID NO: 2155622 - RNA, 19 nt, Artificial Sequence
  Description of Artificial Sequence: Synthetic oligonucleotide
  Sense strand starting at position 1529 of SEQ ID NO: 1882896
acaggaaugcucgacauca

SEQ ID NO: 2155623 - RNA, 19 nt, Artificial Sequence
  Description of Artificial Sequence: Synthetic oligonucleotide
  Antisense strand to SEQ ID NO: 2155622
ugaugucgagcauuccugu

SEQ ID NO: 2155624 - RNA, 19 nt, Artificial Sequence
  Description of Artificial Sequence: Synthetic oligonucleotide
  Sense strand starting at position 1531 of SEQ ID NO: 1882896
aggaaugcucgacaucaac

SEQ ID NO: 2155625 - RNA, 19 nt, Artificial Sequence
  Description of Artificial Sequence: Synthetic oligonucleotide
  Antisense strand to SEQ ID NO: 2155624
guugaugucgagcauuccu

SEQ ID NO: 2155626 - RNA, 19 nt, Artificial Sequence
  Description of Artificial Sequence: Synthetic oligonucleotide
  Sense strand starting at position 1675 of SEQ ID NO: 1882896
aagagaguccuuugacauc

SEQ ID NO: 2155627 - RNA, 19 nt, Artificial Sequence
  Description of Artificial Sequence: Synthetic oligonucleotide
  Antisense strand to SEQ ID NO: 2155626
gaugucaaaggacucucuu

SEQ ID NO: 2155628 - RNA, 19 nt, Artificial Sequence
  Description of Artificial Sequence: Synthetic oligonucleotide
  Sense strand starting at position 1963 of SEQ ID NO: 1882896
ccagcaauugcccaagucu

SEQ ID NO: 2155629 - RNA, 19 nt, Artificial Sequence
  Description of Artificial Sequence: Synthetic oligonucleotide
  Antisense strand to SEQ ID NO: 2155628
agacuugggcaauugcugg

SEQ ID NO: 2155630 - RNA, 19 nt, Artificial Sequence
  Description of Artificial Sequence: Synthetic oligonucleotide
  Sense strand starting at position 2619 of SEQ ID NO: 1882896
ccacguaugcugcugugau

SEQ ID NO: 2155631 - RNA, 19 nt, Artificial Sequence
  Description of Artificial Sequence: Synthetic oligonucleotide
  Antisense strand to SEQ ID NO: 2155630
aucacagcagcauacgugg

SEQ ID NO: 2155632 - RNA, 19 nt, Artificial Sequence
  Description of Artificial Sequence: Synthetic oligonucleotide
  Sense strand starting at position 2635 of SEQ ID NO: 1882896
gauguagucagccagagac

SEQ ID NO: 2155633 - RNA, 19 nt, Artificial Sequence
  Description of Artificial Sequence: Synthetic oligonucleotide
  Antisense strand to SEQ ID NO: 2155632
gucucuggcugacuacauc

SEQ ID NO: 2155634 - RNA, 19 nt, Artificial Sequence
  Description of Artificial Sequence: Synthetic oligonucleotide
  Sense strand starting at position 2826 of SEQ ID NO: 1882896
acacaaauuagugggugau

SEQ ID NO: 2155635 - RNA, 19 nt, Artificial Sequence
  Description of Artificial Sequence: Synthetic oligonucleotide
  Antisense strand to SEQ ID NO: 2155634
aucacccacuaauuugugu

SEQ ID NO: 2155636 - RNA, 19 nt, Artificial Sequence
  Description of Artificial Sequence: Synthetic oligonucleotide
  Sense strand starting at position 2827 of SEQ ID NO: 1882896
cacaaauuagugggugauu

SEQ ID NO: 2155637 - RNA, 19 nt, Artificial Sequence
  Description of Artificial Sequence: Synthetic oligonucleotide
  Antisense strand to SEQ ID NO: 2155636
aaucacccacuaauuugug

SEQ ID NO: 2155638 - RNA, 19 nt, Artificial Sequence
  Description of Artificial Sequence: Synthetic oligonucleotide
  Sense strand starting at position 2828 of SEQ ID NO: 1882896
acaaauuagugggugauua

SEQ ID NO: 2155639 - RNA, 19 nt, Artificial Sequence
  Description of Artificial Sequence: Synthetic oligonucleotide
  Antisense strand to SEQ ID NO: 2155638
uaaucacccacuaauuugu

SEQ ID NO: 2155640 - RNA, 19 nt, Artificial Sequence
  Description of Artificial Sequence: Synthetic oligonucleotide
  Sense strand starting at position 2829 of SEQ ID NO: 1882896
caaauuagugggugauuau

SEQ ID NO: 2155641 - RNA, 19 nt, Artificial Sequence
  Description of Artificial Sequence: Synthetic oligonucleotide
  Antisense strand to SEQ ID NO: 2155640
auaaucacccacuaauuug

SEQ ID NO: 2155642 - RNA, 19 nt, Artificial Sequence
  Description of Artificial Sequence: Synthetic oligonucleotide
  Sense strand starting at position 2840 of SEQ ID NO: 1882896
gugauuauuugcuuggcuu

SEQ ID NO: 2155643 - RNA, 19 nt, Artificial Sequence
  Description of Artificial Sequence: Synthetic oligonucleotide
  Antisense strand to SEQ ID NO: 2155642
aagccaagcaaauaaucac

SEQ ID NO: 2155644 - RNA, 19 nt, Artificial Sequence
  Description of Artificial Sequence: Synthetic oligonucleotide
  Sense strand starting at position 2842 of SEQ ID NO: 1882896
gauuauuugcuuggcuuga

SEQ ID NO: 2155645 - RNA, 19 nt, Artificial Sequence
  Description of Artificial Sequence: Synthetic oligonucleotide
  Antisense strand to SEQ ID NO: 2155644
ucaagccaagcaaauaauc

SEQ ID NO: 2155646 - RNA, 19 nt, Artificial Sequence
  Description of Artificial Sequence: Synthetic oligonucleotide
  Sense strand starting at position 2843 of SEQ ID NO: 1882896
auuauuugcuuggcuugaa

SEQ ID NO: 2155647 - RNA, 19 nt, Artificial Sequence
  Description of Artificial Sequence: Synthetic oligonucleotide
  Antisense strand to SEQ ID NO: 2155646
uucaagccaagcaaauaau

SEQ ID NO: 2155648 - RNA, 19 nt, Artificial Sequence
  Description of Artificial Sequence: Synthetic oligonucleotide
  Sense strand starting at position 2844 of SEQ ID NO: 1882896
uuauuugcuuggcuugaau

SEQ ID NO: 2155649 - RNA, 19 nt, Artificial Sequence
  Description of Artificial Sequence: Synthetic oligonucleotide
  Antisense strand to SEQ ID NO: 2155648
auucaagccaagcaaauaa

SEQ ID NO: 2155650 - RNA, 19 nt, Artificial Sequence
  Description of Artificial Sequence: Synthetic oligonucleotide
  Sense strand starting at position 2846 of SEQ ID NO: 1882896
auuugcuuggcuugaauau

SEQ ID NO: 2155651 - RNA, 19 nt, Artificial Sequence
  Description of Artificial Sequence: Synthetic oligonucleotide
  Antisense strand to SEQ ID NO: 2155650
auauucaagccaagcaaau

SEQ ID NO: 2155652 - RNA, 19 nt, Artificial Sequence
  Description of Artificial Sequence: Synthetic oligonucleotide
  Sense strand starting at position 2897 of SEQ ID NO: 1882896
accaguauccuccaaguua

SEQ ID NO: 2155653 - RNA, 19 nt, Artificial Sequence
  Description of Artificial Sequence: Synthetic oligonucleotide
  Antisense strand to SEQ ID NO: 2155652
uaacuuggaggauacuggu

SEQ ID NO: 2155654 - RNA, 19 nt, Artificial Sequence
  Description of Artificial Sequence: Synthetic oligonucleotide
  Sense strand starting at position 2956 of SEQ ID NO: 1882896
uccgucugucauuaagaga

SEQ ID NO: 2155655 - RNA, 19 nt, Artificial Sequence
  Description of Artificial Sequence: Synthetic oligonucleotide
  Antisense strand to SEQ ID NO: 2155654
ucucuuaaugacagacgga

SEQ ID NO: 2155656 - RNA, 19 nt, Artificial Sequence
  Description of Artificial Sequence: Synthetic oligonucleotide
  Sense strand starting at position 3100 of SEQ ID NO: 1882896
agcgauagagauuaucauc

SEQ ID NO: 2155657 - RNA, 19 nt, Artificial Sequence
  Description of Artificial Sequence: Synthetic oligonucleotide
  Antisense strand to SEQ ID NO: 2155656
gaugauaaucucuaucgcu

SEQ ID NO: 2155658 - RNA, 19 nt, Artificial Sequence
  Description of Artificial Sequence: Synthetic oligonucleotide
  Sense strand starting at position 3164 of SEQ ID NO: 1882896
uuugcauaugcaugagaua

SEQ ID NO: 2155659 - RNA, 19 nt, Artificial Sequence
  Description of Artificial Sequence: Synthetic oligonucleotide
  Antisense strand to SEQ ID NO: 2155658
uaucucaugcauaugcaaa

SEQ ID NO: 2155660 - RNA, 19 nt, Artificial Sequence
  Description of Artificial Sequence: Synthetic oligonucleotide
  Sense strand starting at position 3165 of SEQ ID NO: 1882896
uugcauaugcaugagauag

SEQ ID NO: 2155661 - RNA, 19 nt, Artificial Sequence
  Description of Artificial Sequence: Synthetic oligonucleotide
  Antisense strand to SEQ ID NO: 2155660
cuaucucaugcauaugcaa

SEQ ID NO: 2155662 - RNA, 19 nt, Artificial Sequence
  Description of Artificial Sequence: Synthetic oligonucleotide
  Sense strand starting at position 3575 of SEQ ID NO: 1882896
ugauaugaaguguggaauu

SEQ ID NO: 2155663 - RNA, 19 nt, Artificial Sequence
  Description of Artificial Sequence: Synthetic oligonucleotide
  Antisense strand to SEQ ID NO: 2155662
aauuccacacuucauauca

SEQ ID NO: 2155664 - RNA, 19 nt, Artificial Sequence
  Description of Artificial Sequence: Synthetic oligonucleotide
  Sense strand starting at position 3932 of SEQ ID NO: 1882896
ggacaagcuuucccgggaa

SEQ ID NO: 2155665 - RNA, 19 nt, Artificial Sequence
  Description of Artificial Sequence: Synthetic oligonucleotide
  Antisense strand to SEQ ID NO: 2155664
uucccgggaaagcuugucc

SEQ ID NO: 2155666 - RNA, 19 nt, Artificial Sequence
  Description of Artificial Sequence: Synthetic oligonucleotide
  Sense strand starting at position 3934 of SEQ ID NO: 1882896
acaagcuuucccgggaaau

SEQ ID NO: 2155667 - RNA, 19 nt, Artificial Sequence
  Description of Artificial Sequence: Synthetic oligonucleotide
  Antisense strand to SEQ ID NO: 2155666
auuucccgggaaagcuugu

SEQ ID NO: 2155668 - RNA, 19 nt, Artificial Sequence
  Description of Artificial Sequence: Synthetic oligonucleotide
  Sense strand starting at position 3935 of SEQ ID NO: 1882896
caagcuuucccgggaaauc

SEQ ID NO: 2155669 - RNA, 19 nt, Artificial Sequence
  Description of Artificial Sequence: Synthetic oligonucleotide
  Antisense strand to SEQ ID NO: 2155668
gauuucccgggaaagcuug

SEQ ID NO: 2155670 - RNA, 19 nt, Artificial Sequence
  Description of Artificial Sequence: Synthetic oligonucleotide
  Sense strand starting at position 3946 of SEQ ID NO: 1882896
gggaaauccucaucagcau

SEQ ID NO: 2155671 - RNA, 19 nt, Artificial Sequence
  Description of Artificial Sequence: Synthetic oligonucleotide
  Antisense strand to SEQ ID NO: 2155670
augcugaugaggauuuccc

SEQ ID NO: 2155672 - RNA, 19 nt, Artificial Sequence
  Description of Artificial Sequence: Synthetic oligonucleotide
  Sense strand starting at position 3947 of SEQ ID NO: 1882896
ggaaauccucaucagcauu

SEQ ID NO: 2155673 - RNA, 19 nt, Artificial Sequence
  Description of Artificial Sequence: Synthetic oligonucleotide
  Antisense strand to SEQ ID NO: 2155672
aaugcugaugaggauuucc

SEQ ID NO: 2155674 - RNA, 19 nt, Artificial Sequence
  Description of Artificial Sequence: Synthetic oligonucleotide
  Sense strand starting at position 402 of SEQ ID NO: 1882897
gaaugauccugauucucgu

SEQ ID NO: 2155675 - RNA, 19 nt, Artificial Sequence
  Description of Artificial Sequence: Synthetic oligonucleotide
  Antisense strand to SEQ ID NO: 2155674
acgagaaucaggaucauuc

SEQ ID NO: 2155676 - RNA, 19 nt, Artificial Sequence
  Description of Artificial Sequence: Synthetic oligonucleotide
  Sense strand starting at position 409 of SEQ ID NO: 1882897
ccugauucucguuggauuu

SEQ ID NO: 2155677 - RNA, 19 nt, Artificial Sequence
  Description of Artificial Sequence: Synthetic oligonucleotide
  Antisense strand to SEQ ID NO: 2155676
aaauccaacgagaaucagg

SEQ ID NO: 2155678 - RNA, 19 nt, Artificial Sequence
  Description of Artificial Sequence: Synthetic oligonucleotide
  Sense strand starting at position 419 of SEQ ID NO: 1882897
guuggauuugugugguaga

SEQ ID NO: 2155679 - RNA, 19 nt, Artificial Sequence
  Description of Artificial Sequence: Synthetic oligonucleotide
  Antisense strand to SEQ ID NO: 2155678
ucuaccacacaaauccaac

SEQ ID NO: 2155680 - RNA, 19 nt, Artificial Sequence
  Description of Artificial Sequence: Synthetic oligonucleotide
  Sense strand starting at position 548 of SEQ ID NO: 1882897
aagcuuaagcaggguagau

SEQ ID NO: 2155681 - RNA, 19 nt, Artificial Sequence
  Description of Artificial Sequence: Synthetic oligonucleotide
  Antisense strand to SEQ ID NO: 2155680
aucuacccugcuuaagcuu

SEQ ID NO: 2155682 - RNA, 19 nt, Artificial Sequence
  Description of Artificial Sequence: Synthetic oligonucleotide
  Sense strand starting at position 570 of SEQ ID NO: 1882897
auauuaacucuugauugug

SEQ ID NO: 2155683 - RNA, 19 nt, Artificial Sequence
  Description of Artificial Sequence: Synthetic oligonucleotide
  Antisense strand to SEQ ID NO: 2155682
cacaaucaagaguuaauau

SEQ ID NO: 2155684 - RNA, 19 nt, Artificial Sequence
  Description of Artificial Sequence: Synthetic oligonucleotide
  Sense strand starting at position 754 of SEQ ID NO: 1882897
cgagauggcucauucuuga

SEQ ID NO: 2155685 - RNA, 19 nt, Artificial Sequence
  Description of Artificial Sequence: Synthetic oligonucleotide
  Antisense strand to SEQ ID NO: 2155684
ucaagaaugagccaucucg

SEQ ID NO: 2155686 - RNA, 19 nt, Artificial Sequence
  Description of Artificial Sequence: Synthetic oligonucleotide
  Sense strand starting at position 996 of SEQ ID NO: 1882897
cuggguaauuuauauagua

SEQ ID NO: 2155687 - RNA, 19 nt, Artificial Sequence
  Description of Artificial Sequence: Synthetic oligonucleotide
  Antisense strand to SEQ ID NO: 2155686
uacuauauaaauuacccag

SEQ ID NO: 2155688 - RNA, 19 nt, Artificial Sequence
  Description of Artificial Sequence: Synthetic oligonucleotide
  Sense strand starting at position 1225 of SEQ ID NO: 1882897
gcaggaacucguuaaguga

SEQ ID NO: 2155689 - RNA, 19 nt, Artificial Sequence
  Description of Artificial Sequence: Synthetic oligonucleotide
  Antisense strand to SEQ ID NO: 2155688
ucacuuaacgaguuccugc

SEQ ID NO: 2155690 - RNA, 19 nt, Artificial Sequence
  Description of Artificial Sequence: Synthetic oligonucleotide
  Sense strand starting at position 1228 of SEQ ID NO: 1882897
ggaacucguuaagugagga

SEQ ID NO: 2155691 - RNA, 19 nt, Artificial Sequence
  Description of Artificial Sequence: Synthetic oligonucleotide
  Antisense strand to SEQ ID NO: 2155690
uccucacuuaacgaguucc

SEQ ID NO: 2155692 - RNA, 19 nt, Artificial Sequence
  Description of Artificial Sequence: Synthetic oligonucleotide
  Sense strand starting at position 1233 of SEQ ID NO: 1882897
ucguuaagugaggacauca

SEQ ID NO: 2155693 - RNA, 19 nt, Artificial Sequence
  Description of Artificial Sequence: Synthetic oligonucleotide
  Antisense strand to SEQ ID NO: 2155692
ugauguccucacuuaacga

SEQ ID NO: 2155694 - RNA, 19 nt, Artificial Sequence
  Description of Artificial Sequence: Synthetic oligonucleotide
  Sense strand starting at position 1457 of SEQ ID NO: 1882897
cugucucagccauagaaac

SEQ ID NO: 2155695 - RNA, 19 nt, Artificial Sequence
  Description of Artificial Sequence: Synthetic oligonucleotide
  Antisense strand to SEQ ID NO: 2155694
guuucuauggcugagacag

SEQ ID NO: 2155696 - RNA, 19 nt, Artificial Sequence
  Description of Artificial Sequence: Synthetic oligonucleotide
  Sense strand starting at position 1476 of SEQ ID NO: 1882897
ccaguuucucuggaccauu

SEQ ID NO: 2155697 - RNA, 19 nt, Artificial Sequence
  Description of Artificial Sequence: Synthetic oligonucleotide
  Antisense strand to SEQ ID NO: 2155696
aaugguccagagaaacugg

SEQ ID NO: 2155698 - RNA, 19 nt, Artificial Sequence
  Description of Artificial Sequence: Synthetic oligonucleotide
  Sense strand starting at position 1513 of SEQ ID NO: 1882897
ugaccuguuuaaccaugga

SEQ ID NO: 2155699 - RNA, 19 nt, Artificial Sequence
  Description of Artificial Sequence: Synthetic oligonucleotide
  Antisense strand to SEQ ID NO: 2155698
uccaugguuaaacagguca

SEQ ID NO: 2155700 - RNA, 19 nt, Artificial Sequence
  Description of Artificial Sequence: Synthetic oligonucleotide
  Sense strand starting at position 1517 of SEQ ID NO: 1882897
cuguuuaaccauggaggga

SEQ ID NO: 2155701 - RNA, 19 nt, Artificial Sequence
  Description of Artificial Sequence: Synthetic oligonucleotide
  Antisense strand to SEQ ID NO: 2155700
ucccuccaugguuaaacag

SEQ ID NO: 2155702 - RNA, 19 nt, Artificial Sequence
  Description of Artificial Sequence: Synthetic oligonucleotide
  Sense strand starting at position 1632 of SEQ ID NO: 1882897
cuaagccagucaucgauuu

SEQ ID NO: 2155703 - RNA, 19 nt, Artificial Sequence
  Description of Artificial Sequence: Synthetic oligonucleotide
  Antisense strand to SEQ ID NO: 2155702
aaaucgaugacuggcuuag

SEQ ID NO: 2155704 - RNA, 19 nt, Artificial Sequence
  Description of Artificial Sequence: Synthetic oligonucleotide
  Sense strand starting at position 1666 of SEQ ID NO: 1882897
cuagguauccgucaccaaa

SEQ ID NO: 2155705 - RNA, 19 nt, Artificial Sequence
  Description of Artificial Sequence: Synthetic oligonucleotide
  Antisense strand to SEQ ID NO: 2155704
uuuggugacggauaccuag

SEQ ID NO: 2155706 - RNA, 19 nt, Artificial Sequence
  Description of Artificial Sequence: Synthetic oligonucleotide
  Sense strand starting at position 1694 of SEQ ID NO: 1882897
ccaccaagucuauggaauu

SEQ ID NO: 2155707 - RNA, 19 nt, Artificial Sequence
  Description of Artificial Sequence: Synthetic oligonucleotide
  Antisense strand to SEQ ID NO: 2155706
aauuccauagacuuggugg

SEQ ID NO: 2155708 - RNA, 19 nt, Artificial Sequence
  Description of Artificial Sequence: Synthetic oligonucleotide
  Sense strand starting at position 1831 of SEQ ID NO: 1882897
gcauuauugcuuugcauuu

SEQ ID NO: 2155709 - RNA, 19 nt, Artificial Sequence
  Description of Artificial Sequence: Synthetic oligonucleotide
  Antisense strand to SEQ ID NO: 2155708
aaaugcaaagcaauaaugc

SEQ ID NO: 2155710 - RNA, 19 nt, Artificial Sequence
  Description of Artificial Sequence: Synthetic oligonucleotide
  Sense strand starting at position 1941 of SEQ ID NO: 1882897
ccgauuucagauggugcua

SEQ ID NO: 2155711 - RNA, 19 nt, Artificial Sequence
  Description of Artificial Sequence: Synthetic oligonucleotide
  Antisense strand to SEQ ID NO: 2155710
uagcaccaucugaaaucgg

SEQ ID NO: 2155712 - RNA, 19 nt, Artificial Sequence
  Description of Artificial Sequence: Synthetic oligonucleotide
  Sense strand starting at position 2090 of SEQ ID NO: 1882897
auggaaugagucuguacua

SEQ ID NO: 2155713 - RNA, 19 nt, Artificial Sequence
  Description of Artificial Sequence: Synthetic oligonucleotide
  Antisense strand to SEQ ID NO: 2155712
uaguacagacucauuccau

SEQ ID NO: 2155714 - RNA, 19 nt, Artificial Sequence
  Description of Artificial Sequence: Synthetic oligonucleotide
  Sense strand starting at position 2091 of SEQ ID NO: 1882897
uggaaugagucuguacuau

SEQ ID NO: 2155715 - RNA, 19 nt, Artificial Sequence
  Description of Artificial Sequence: Synthetic oligonucleotide
  Antisense strand to SEQ ID NO: 2155714
auaguacagacucauucca

SEQ ID NO: 2155716 - RNA, 19 nt, Artificial Sequence
  Description of Artificial Sequence: Synthetic oligonucleotide
  Sense strand starting at position 2111 of SEQ ID NO: 1882897
uauuaagugcuauagguuu

SEQ ID NO: 2155717 - RNA, 19 nt, Artificial Sequence
  Description of Artificial Sequence: Synthetic oligonucleotide
  Antisense strand to SEQ ID NO: 2155716
aaaccuauagcacuuaaua

SEQ ID NO: 2155718 - RNA, 19 nt, Artificial Sequence
  Description of Artificial Sequence: Synthetic oligonucleotide
  Sense strand starting at position 2117 of SEQ ID NO: 1882897
gugcuauagguuuauucca

SEQ ID NO: 2155719 - RNA, 19 nt, Artificial Sequence
  Description of Artificial Sequence: Synthetic oligonucleotide
  Antisense strand to SEQ ID NO: 2155718
uggaauaaaccuauagcac

SEQ ID NO: 2155720 - RNA, 19 nt, Artificial Sequence
  Description of Artificial Sequence: Synthetic oligonucleotide
  Sense strand starting at position 2160 of SEQ ID NO: 1882897
ugcgauauccuguacaauu

SEQ ID NO: 2155721 - RNA, 19 nt, Artificial Sequence
  Description of Artificial Sequence: Synthetic oligonucleotide
  Antisense strand to SEQ ID NO: 2155720
aauuguacaggauaucgca

SEQ ID NO: 2155722 - RNA, 19 nt, Artificial Sequence
  Description of Artificial Sequence: Synthetic oligonucleotide
  Sense strand starting at position 2320 of SEQ ID NO: 1882897
gucucuagauuacuuagaa

SEQ ID NO: 2155723 - RNA, 19 nt, Artificial Sequence
  Description of Artificial Sequence: Synthetic oligonucleotide
  Antisense strand to SEQ ID NO: 2155722
uucuaaguaaucuagagac

SEQ ID NO: 2155724 - RNA, 19 nt, Artificial Sequence
  Description of Artificial Sequence: Synthetic oligonucleotide
  Sense strand starting at position 2804 of SEQ ID NO: 1882897
gaaaccuagcugugaguua

SEQ ID NO: 2155725 - RNA, 19 nt, Artificial Sequence
  Description of Artificial Sequence: Synthetic oligonucleotide
  Antisense strand to SEQ ID NO: 2155724
uaacucacagcuagguuuc

SEQ ID NO: 2155726 - RNA, 19 nt, Artificial Sequence
  Description of Artificial Sequence: Synthetic oligonucleotide
  Sense strand starting at position 2821 of SEQ ID NO: 1882897
uacucaguggucuaaacag

SEQ ID NO: 2155727 - RNA, 19 nt, Artificial Sequence
  Description of Artificial Sequence: Synthetic oligonucleotide
  Antisense strand to SEQ ID NO: 2155726
cuguuuagaccacugagua

SEQ ID NO: 2155728 - RNA, 19 nt, Artificial Sequence
  Description of Artificial Sequence: Synthetic oligonucleotide
  Sense strand starting at position 2907 of SEQ ID NO: 1882897
cugggacucccuuauucuu

SEQ ID NO: 2155729 - RNA, 19 nt, Artificial Sequence
  Description of Artificial Sequence: Synthetic oligonucleotide
  Antisense strand to SEQ ID NO: 2155728
aagaauaagggagucccag

SEQ ID NO: 2155730 - RNA, 19 nt, Artificial Sequence
  Description of Artificial Sequence: Synthetic oligonucleotide
  Sense strand starting at position 2909 of SEQ ID NO: 1882897
gggacucccuuauucuuaa

SEQ ID NO: 2155731 - RNA, 19 nt, Artificial Sequence
  Description of Artificial Sequence: Synthetic oligonucleotide
  Antisense strand to SEQ ID NO: 2155730
uuaagaauaagggaguccc

SEQ ID NO: 2155732 - RNA, 19 nt, Artificial Sequence
  Description of Artificial Sequence: Synthetic oligonucleotide
  Sense strand starting at position 2916 of SEQ ID NO: 1882897
ccuuauucuuaaguuaagu

SEQ ID NO: 2155733 - RNA, 19 nt, Artificial Sequence
  Description of Artificial Sequence: Synthetic oligonucleotide
  Antisense strand to SEQ ID NO: 2155732
acuuaacuuaagaauaagg

SEQ ID NO: 2155734 - RNA, 19 nt, Artificial Sequence
  Description of Artificial Sequence: Synthetic oligonucleotide
  Sense strand starting at position 2926 of SEQ ID NO: 1882897
aaguuaaguugcccagaca

SEQ ID NO: 2155735 - RNA, 19 nt, Artificial Sequence
  Description of Artificial Sequence: Synthetic oligonucleotide
  Antisense strand to SEQ ID NO: 2155734
ugucugggcaacuuaacuu

SEQ ID NO: 2155736 - RNA, 19 nt, Artificial Sequence
  Description of Artificial Sequence: Synthetic oligonucleotide
  Sense strand starting at position 2927 of SEQ ID NO: 1882897
aguuaaguugcccagacaa

SEQ ID NO: 2155737 - RNA, 19 nt, Artificial Sequence
  Description of Artificial Sequence: Synthetic oligonucleotide
  Antisense strand to SEQ ID NO: 2155736
uugucugggcaacuuaacu

SEQ ID NO: 2155738 - RNA, 19 nt, Artificial Sequence
  Description of Artificial Sequence: Synthetic oligonucleotide
  Sense strand starting at position 2929 of SEQ ID NO: 1882897
uuaaguugcccagacaaag

SEQ ID NO: 2155739 - RNA, 19 nt, Artificial Sequence
  Description of Artificial Sequence: Synthetic oligonucleotide
  Antisense strand to SEQ ID NO: 2155738
cuuugucugggcaacuuaa

SEQ ID NO: 2155740 - RNA, 19 nt, Artificial Sequence
  Description of Artificial Sequence: Synthetic oligonucleotide
  Sense strand starting at position 3049 of SEQ ID NO: 1882897
agaggcauccugugaucaa

SEQ ID NO: 2155741 - RNA, 19 nt, Artificial Sequence
  Description of Artificial Sequence: Synthetic oligonucleotide
  Antisense strand to SEQ ID NO: 2155740
uugaucacaggaugccucu

SEQ ID NO: 2155742 - RNA, 19 nt, Artificial Sequence
  Description of Artificial Sequence: Synthetic oligonucleotide
  Sense strand starting at position 3144 of SEQ ID NO: 1882897
gcaagugcuccauagaagu

SEQ ID NO: 2155743 - RNA, 19 nt, Artificial Sequence
  Description of Artificial Sequence: Synthetic oligonucleotide
  Antisense strand to SEQ ID NO: 2155742
acuucuauggagcacuugc

SEQ ID NO: 2155744 - RNA, 19 nt, Artificial Sequence
  Description of Artificial Sequence: Synthetic oligonucleotide
  Sense strand starting at position 3302 of SEQ ID NO: 1882897
ugcuaaugucgcuuccgga

SEQ ID NO: 2155745 - RNA, 19 nt, Artificial Sequence
  Description of Artificial Sequence: Synthetic oligonucleotide
  Antisense strand to SEQ ID NO: 2155744
uccggaagcgacauuagca

SEQ ID NO: 2155746 - RNA, 19 nt, Artificial Sequence
  Description of Artificial Sequence: Synthetic oligonucleotide
  Sense strand starting at position 3303 of SEQ ID NO: 1882897
gcuaaugucgcuuccggaa

SEQ ID NO: 2155747 - RNA, 19 nt, Artificial Sequence
  Description of Artificial Sequence: Synthetic oligonucleotide
  Antisense strand to SEQ ID NO: 2155746
uuccggaagcgacauuagc

SEQ ID NO: 2155748 - RNA, 19 nt, Artificial Sequence
  Description of Artificial Sequence: Synthetic oligonucleotide
  Sense strand starting at position 3317 of SEQ ID NO: 1882897
cggaaugaauuccuuagac

SEQ ID NO: 2155749 - RNA, 19 nt, Artificial Sequence
  Description of Artificial Sequence: Synthetic oligonucleotide
  Antisense strand to SEQ ID NO: 2155748
gucuaaggaauucauuccg

SEQ ID NO: 2155750 - RNA, 19 nt, Artificial Sequence
  Description of Artificial Sequence: Synthetic oligonucleotide
  Sense strand starting at position 3358 of SEQ ID NO: 1882897
uugugagcuuuacuuaaga

SEQ ID NO: 2155751 - RNA, 19 nt, Artificial Sequence
  Description of Artificial Sequence: Synthetic oligonucleotide
  Antisense strand to SEQ ID NO: 2155750
ucuuaaguaaagcucacaa

SEQ ID NO: 2155752 - RNA, 19 nt, Artificial Sequence
  Description of Artificial Sequence: Synthetic oligonucleotide
  Sense strand starting at position 3945 of SEQ ID NO: 1882897
cccagaucgcaucaagguu

SEQ ID NO: 2155753 - RNA, 19 nt, Artificial Sequence
  Description of Artificial Sequence: Synthetic oligonucleotide
  Antisense strand to SEQ ID NO: 2155752
aaccuugaugcgaucuggg

SEQ ID NO: 2155754 - RNA, 19 nt, Artificial Sequence
  Description of Artificial Sequence: Synthetic oligonucleotide
  Sense strand starting at position 496 of SEQ ID NO: 1882898
gcaggaacucguuaaguga

SEQ ID NO: 2155755 - RNA, 19 nt, Artificial Sequence
  Description of Artificial Sequence: Synthetic oligonucleotide
  Antisense strand to SEQ ID NO: 2155754
ucacuuaacgaguuccugc

SEQ ID NO: 2155756 - RNA, 19 nt, Artificial Sequence
  Description of Artificial Sequence: Synthetic oligonucleotide
  Sense strand starting at position 499 of SEQ ID NO: 1882898
ggaacucguuaagugagga

SEQ ID NO: 2155757 - RNA, 19 nt, Artificial Sequence
  Description of Artificial Sequence: Synthetic oligonucleotide
  Antisense strand to SEQ ID NO: 2155756
uccucacuuaacgaguucc

SEQ ID NO: 2155758 - RNA, 19 nt, Artificial Sequence
  Description of Artificial Sequence: Synthetic oligonucleotide
  Sense strand starting at position 504 of SEQ ID NO: 1882898
ucguuaagugaggacauca

SEQ ID NO: 2155759 - RNA, 19 nt, Artificial Sequence
  Description of Artificial Sequence: Synthetic oligonucleotide
  Antisense strand to SEQ ID NO: 2155758
ugauguccucacuuaacga

SEQ ID NO: 2155760 - RNA, 19 nt, Artificial Sequence
  Description of Artificial Sequence: Synthetic oligonucleotide
  Sense strand starting at position 728 of SEQ ID NO: 1882898
cugucucagccauagaaac

SEQ ID NO: 2155761 - RNA, 19 nt, Artificial Sequence
  Description of Artificial Sequence: Synthetic oligonucleotide
  Antisense strand to SEQ ID NO: 2155760
guuucuauggcugagacag

SEQ ID NO: 2155762 - RNA, 19 nt, Artificial Sequence
  Description of Artificial Sequence: Synthetic oligonucleotide
  Sense strand starting at position 747 of SEQ ID NO: 1882898
ccaguuucucuggaccauu

SEQ ID NO: 2155763 - RNA, 19 nt, Artificial Sequence
  Description of Artificial Sequence: Synthetic oligonucleotide
  Antisense strand to SEQ ID NO: 2155762
aaugguccagagaaacugg

SEQ ID NO: 2155764 - RNA, 19 nt, Artificial Sequence
  Description of Artificial Sequence: Synthetic oligonucleotide
  Sense strand starting at position 784 of SEQ ID NO: 1882898
ugaccuguuuaaccaugga

SEQ ID NO: 2155765 - RNA, 19 nt, Artificial Sequence
  Description of Artificial Sequence: Synthetic oligonucleotide
  Antisense strand to SEQ ID NO: 2155764
uccaugguuaaacagguca

SEQ ID NO: 2155766 - RNA, 19 nt, Artificial Sequence
  Description of Artificial Sequence: Synthetic oligonucleotide
  Sense strand starting at position 788 of SEQ ID NO: 1882898
cuguuuaaccauggaggga

SEQ ID NO: 2155767 - RNA, 19 nt, Artificial Sequence
  Description of Artificial Sequence: Synthetic oligonucleotide
  Antisense strand to SEQ ID NO: 2155766
ucccuccaugguuaaacag

SEQ ID NO: 2155768 - RNA, 19 nt, Artificial Sequence
  Description of Artificial Sequence: Synthetic oligonucleotide
  Sense strand starting at position 903 of SEQ ID NO: 1882898
cuaagccagucaucgauuu

SEQ ID NO: 2155769 - RNA, 19 nt, Artificial Sequence
  Description of Artificial Sequence: Synthetic oligonucleotide
  Antisense strand to SEQ ID NO: 2155768
aaaucgaugacuggcuuag

SEQ ID NO: 2155770 - RNA, 19 nt, Artificial Sequence
  Description of Artificial Sequence: Synthetic oligonucleotide
  Sense strand starting at position 937 of SEQ ID NO: 1882898
cuagguauccgucaccaaa

SEQ ID NO: 2155771 - RNA, 19 nt, Artificial Sequence
  Description of Artificial Sequence: Synthetic oligonucleotide
  Antisense strand to SEQ ID NO: 2155770
uuuggugacggauaccuag

SEQ ID NO: 2155772 - RNA, 19 nt, Artificial Sequence
  Description of Artificial Sequence: Synthetic oligonucleotide
  Sense strand starting at position 965 of SEQ ID NO: 1882898
ccaccaagucuauggaauu

SEQ ID NO: 2155773 - RNA, 19 nt, Artificial Sequence
  Description of Artificial Sequence: Synthetic oligonucleotide
  Antisense strand to SEQ ID NO: 2155772
aauuccauagacuuggugg

SEQ ID NO: 2155774 - RNA, 19 nt, Artificial Sequence
  Description of Artificial Sequence: Synthetic oligonucleotide
  Sense strand starting at position 1102 of SEQ ID NO: 1882898
gcauuauugcuuugcauuu

SEQ ID NO: 2155775 - RNA, 19 nt, Artificial Sequence
  Description of Artificial Sequence: Synthetic oligonucleotide
  Antisense strand to SEQ ID NO: 2155774
aaaugcaaagcaauaaugc

SEQ ID NO: 2155776 - RNA, 19 nt, Artificial Sequence
  Description of Artificial Sequence: Synthetic oligonucleotide
  Sense strand starting at position 1212 of SEQ ID NO: 1882898
ccgauuucagauggugcua

SEQ ID NO: 2155777 - RNA, 19 nt, Artificial Sequence
  Description of Artificial Sequence: Synthetic oligonucleotide
  Antisense strand to SEQ ID NO: 2155776
uagcaccaucugaaaucgg

SEQ ID NO: 2155778 - RNA, 19 nt, Artificial Sequence
  Description of Artificial Sequence: Synthetic oligonucleotide
  Sense strand starting at position 1361 of SEQ ID NO: 1882898
auggaaugagucuguacua

SEQ ID NO: 2155779 - RNA, 19 nt, Artificial Sequence
  Description of Artificial Sequence: Synthetic oligonucleotide
  Antisense strand to SEQ ID NO: 2155778
uaguacagacucauuccau

SEQ ID NO: 2155780 - RNA, 19 nt, Artificial Sequence
  Description of Artificial Sequence: Synthetic oligonucleotide
  Sense strand starting at position 1362 of SEQ ID NO: 1882898
uggaaugagucuguacuau

SEQ ID NO: 2155781 - RNA, 19 nt, Artificial Sequence
  Description of Artificial Sequence: Synthetic oligonucleotide
  Antisense strand to SEQ ID NO: 2155780
auaguacagacucauucca

SEQ ID NO: 2155782 - RNA, 19 nt, Artificial Sequence
  Description of Artificial Sequence: Synthetic oligonucleotide
  Sense strand starting at position 1382 of SEQ ID NO: 1882898
uauuaagugcuauagguuu

SEQ ID NO: 2155783 - RNA, 19 nt, Artificial Sequence
  Description of Artificial Sequence: Synthetic oligonucleotide
  Antisense strand to SEQ ID NO: 2155782
aaaccuauagcacuuaaua

SEQ ID NO: 2155784 - RNA, 19 nt, Artificial Sequence
  Description of Artificial Sequence: Synthetic oligonucleotide
  Sense strand starting at position 1591 of SEQ ID NO: 1882898
gucucuagauuacuuagaa

SEQ ID NO: 2155785 - RNA, 19 nt, Artificial Sequence
  Description of Artificial Sequence: Synthetic oligonucleotide
  Antisense strand to SEQ ID NO: 2155784
uucuaaguaaucuagagac

SEQ ID NO: 2155786 - RNA, 19 nt, Artificial Sequence
  Description of Artificial Sequence: Synthetic oligonucleotide
  Sense strand starting at position 2092 of SEQ ID NO: 1882898
uacucaguggucuaaacag

SEQ ID NO: 2155787 - RNA, 19 nt, Artificial Sequence
  Description of Artificial Sequence: Synthetic oligonucleotide
  Antisense strand to SEQ ID NO: 2155786
cuguuuagaccacugagua

SEQ ID NO: 2155788 - RNA, 19 nt, Artificial Sequence
  Description of Artificial Sequence: Synthetic oligonucleotide
  Sense strand starting at position 2178 of SEQ ID NO: 1882898
cugggacucccuuauucuu

SEQ ID NO: 2155789 - RNA, 19 nt, Artificial Sequence
  Description of Artificial Sequence: Synthetic oligonucleotide
  Antisense strand to SEQ ID NO: 2155788
aagaauaagggagucccag

SEQ ID NO: 2155790 - RNA, 19 nt, Artificial Sequence
  Description of Artificial Sequence: Synthetic oligonucleotide
  Sense strand starting at position 2180 of SEQ ID NO: 1882898
gggacucccuuauucuuaa

SEQ ID NO: 2155791 - RNA, 19 nt, Artificial Sequence
  Description of Artificial Sequence: Synthetic oligonucleotide
  Antisense strand to SEQ ID NO: 2155790
uuaagaauaagggaguccc

SEQ ID NO: 2155792 - RNA, 19 nt, Artificial Sequence
  Description of Artificial Sequence: Synthetic oligonucleotide
  Sense strand starting at position 2197 of SEQ ID NO: 1882898
aaguuaaguugcccagaca

SEQ ID NO: 2155793 - RNA, 19 nt, Artificial Sequence
  Description of Artificial Sequence: Synthetic oligonucleotide
  Antisense strand to SEQ ID NO: 2155792
ugucugggcaacuuaacuu

SEQ ID NO: 2155794 - RNA, 19 nt, Artificial Sequence
  Description of Artificial Sequence: Synthetic oligonucleotide
  Sense strand starting at position 2198 of SEQ ID NO: 1882898
aguuaaguugcccagacaa

SEQ ID NO: 2155795 - RNA, 19 nt, Artificial Sequence
  Description of Artificial Sequence: Synthetic oligonucleotide
  Antisense strand to SEQ ID NO: 2155794
uugucugggcaacuuaacu

SEQ ID NO: 2155796 - RNA, 19 nt, Artificial Sequence
  Description of Artificial Sequence: Synthetic oligonucleotide
  Sense strand starting at position 2200 of SEQ ID NO: 1882898
uuaaguugcccagacaaag

SEQ ID NO: 2155797 - RNA, 19 nt, Artificial Sequence
  Description of Artificial Sequence: Synthetic oligonucleotide
  Antisense strand to SEQ ID NO: 2155796
cuuugucugggcaacuuaa

SEQ ID NO: 2155798 - RNA, 19 nt, Artificial Sequence
  Description of Artificial Sequence: Synthetic oligonucleotide
  Sense strand starting at position 2320 of SEQ ID NO: 1882898
agaggcauccugugaucaa

SEQ ID NO: 2155799 - RNA, 19 nt, Artificial Sequence
  Description of Artificial Sequence: Synthetic oligonucleotide
  Antisense strand to SEQ ID NO: 2155798
uugaucacaggaugccucu

SEQ ID NO: 2155800 - RNA, 19 nt, Artificial Sequence
  Description of Artificial Sequence: Synthetic oligonucleotide
  Sense strand starting at position 2573 of SEQ ID NO: 1882898
ugcuaaugucgcuuccgga

SEQ ID NO: 2155801 - RNA, 19 nt, Artificial Sequence
  Description of Artificial Sequence: Synthetic oligonucleotide
  Antisense strand to SEQ ID NO: 2155800
uccggaagcgacauuagca

SEQ ID NO: 2155802 - RNA, 19 nt, Artificial Sequence
  Description of Artificial Sequence: Synthetic oligonucleotide
  Sense strand starting at position 2574 of SEQ ID NO: 1882898
gcuaaugucgcuuccggaa

SEQ ID NO: 2155803 - RNA, 19 nt, Artificial Sequence
  Description of Artificial Sequence: Synthetic oligonucleotide
  Antisense strand to SEQ ID NO: 2155802
uuccggaagcgacauuagc

SEQ ID NO: 2155804 - RNA, 19 nt, Artificial Sequence
  Description of Artificial Sequence: Synthetic oligonucleotide
  Sense strand starting at position 2588 of SEQ ID NO: 1882898
cggaaugaauuccuuagac

SEQ ID NO: 2155805 - RNA, 19 nt, Artificial Sequence
  Description of Artificial Sequence: Synthetic oligonucleotide
  Antisense strand to SEQ ID NO: 2155804
gucuaaggaauucauuccg

SEQ ID NO: 2155806 - RNA, 19 nt, Artificial Sequence
  Description of Artificial Sequence: Synthetic oligonucleotide
  Sense strand starting at position 2629 of SEQ ID NO: 1882898
uugugagcuuuacuuaaga

SEQ ID NO: 2155807 - RNA, 19 nt, Artificial Sequence
  Description of Artificial Sequence: Synthetic oligonucleotide
  Antisense strand to SEQ ID NO: 2155806
ucuuaaguaaagcucacaa

SEQ ID NO: 2155808 - RNA, 19 nt, Artificial Sequence
  Description of Artificial Sequence: Synthetic oligonucleotide
  Sense strand starting at position 3216 of SEQ ID NO: 1882898
cccagaucgcaucaagguu

SEQ ID NO: 2155809 - RNA, 19 nt, Artificial Sequence
  Description of Artificial Sequence: Synthetic oligonucleotide
  Antisense strand to SEQ ID NO: 2155808
aaccuugaugcgaucuggg

SEQ ID NO: 2155810 - RNA, 19 nt, Artificial Sequence
  Description of Artificial Sequence: Synthetic oligonucleotide
  Sense strand starting at position 3407 of SEQ ID NO: 1882898
gucugacuuuccucauaua

SEQ ID NO: 2155811 - RNA, 19 nt, Artificial Sequence
  Description of Artificial Sequence: Synthetic oligonucleotide
  Antisense strand to SEQ ID NO: 2155810
uauaugaggaaagucagac

SEQ ID NO: 2155812 - RNA, 19 nt, Artificial Sequence
  Description of Artificial Sequence: Synthetic oligonucleotide
  Sense strand starting at position 3437 of SEQ ID NO: 1882898
uuacaaucucacuaugugu

SEQ ID NO: 2155813 - RNA, 19 nt, Artificial Sequence
  Description of Artificial Sequence: Synthetic oligonucleotide
  Antisense strand to SEQ ID NO: 2155812
acacauagugagauuguaa

SEQ ID NO: 2155814 - RNA, 19 nt, Artificial Sequence
  Description of Artificial Sequence: Synthetic oligonucleotide
  Sense strand starting at position 3439 of SEQ ID NO: 1882898
acaaucucacuauguguau

SEQ ID NO: 2155815 - RNA, 19 nt, Artificial Sequence
  Description of Artificial Sequence: Synthetic oligonucleotide
  Antisense strand to SEQ ID NO: 2155814
auacacauagugagauugu

SEQ ID NO: 2155816 - RNA, 19 nt, Artificial Sequence
  Description of Artificial Sequence: Synthetic oligonucleotide
  Sense strand starting at position 3443 of SEQ ID NO: 1882898
ucucacuauguguauuaga

SEQ ID NO: 2155817 - RNA, 19 nt, Artificial Sequence
  Description of Artificial Sequence: Synthetic oligonucleotide
  Antisense strand to SEQ ID NO: 2155816
ucuaauacacauagugaga

SEQ ID NO: 2155818 - RNA, 19 nt, Artificial Sequence
  Description of Artificial Sequence: Synthetic oligonucleotide
  Sense strand starting at position 3555 of SEQ ID NO: 1882898
gucugauuagcauaacauu

SEQ ID NO: 2155819 - RNA, 19 nt, Artificial Sequence
  Description of Artificial Sequence: Synthetic oligonucleotide
  Antisense strand to SEQ ID NO: 2155818
aauguuaugcuaaucagac

SEQ ID NO: 2155820 - RNA, 19 nt, Artificial Sequence
  Description of Artificial Sequence: Synthetic oligonucleotide
  Sense strand starting at position 3786 of SEQ ID NO: 1882898
cagugaaaggcacauacuu

SEQ ID NO: 2155821 - RNA, 19 nt, Artificial Sequence
  Description of Artificial Sequence: Synthetic oligonucleotide
  Antisense strand to SEQ ID NO: 2155820
aaguaugugccuuucacug

SEQ ID NO: 2155822 - RNA, 19 nt, Artificial Sequence
  Description of Artificial Sequence: Synthetic oligonucleotide
  Sense strand starting at position 3831 of SEQ ID NO: 1882898
ucaaguggauaguaaauuu

SEQ ID NO: 2155823 - RNA, 19 nt, Artificial Sequence
  Description of Artificial Sequence: Synthetic oligonucleotide
  Antisense strand to SEQ ID NO: 2155822
aaauuuacuauccacuuga

SEQ ID NO: 2155824 - RNA, 19 nt, Artificial Sequence
  Description of Artificial Sequence: Synthetic oligonucleotide
  Sense strand starting at position 3921 of SEQ ID NO: 1882898
cugugauuccuuuagggac

SEQ ID NO: 2155825 - RNA, 19 nt, Artificial Sequence
  Description of Artificial Sequence: Synthetic oligonucleotide
  Antisense strand to SEQ ID NO: 2155824
gucccuaaaggaaucacag

SEQ ID NO: 2155826 - RNA, 19 nt, Artificial Sequence
  Description of Artificial Sequence: Synthetic oligonucleotide
  Sense strand starting at position 3973 of SEQ ID NO: 1882898
cgcaguaucagugacugaa

SEQ ID NO: 2155827 - RNA, 19 nt, Artificial Sequence
  Description of Artificial Sequence: Synthetic oligonucleotide
  Antisense strand to SEQ ID NO: 2155826
uucagucacugauacugcg

SEQ ID NO: 2155828 - RNA, 19 nt, Artificial Sequence
  Description of Artificial Sequence: Synthetic oligonucleotide
  Sense strand starting at position 3975 of SEQ ID NO: 1882898
caguaucagugacugaagu

SEQ ID NO: 2155829 - RNA, 19 nt, Artificial Sequence
  Description of Artificial Sequence: Synthetic oligonucleotide
  Antisense strand to SEQ ID NO: 2155828
acuucagucacugauacug

SEQ ID NO: 2155830 - RNA, 19 nt, Artificial Sequence
  Description of Artificial Sequence: Synthetic oligonucleotide
  Sense strand starting at position 3976 of SEQ ID NO: 1882898
aguaucagugacugaagua

SEQ ID NO: 2155831 - RNA, 19 nt, Artificial Sequence
  Description of Artificial Sequence: Synthetic oligonucleotide
  Antisense strand to SEQ ID NO: 2155830
uacuucagucacugauacu

SEQ ID NO: 2155832 - RNA, 19 nt, Artificial Sequence
  Description of Artificial Sequence: Synthetic oligonucleotide
  Sense strand starting at position 3977 of SEQ ID NO: 1882898
guaucagugacugaaguac

SEQ ID NO: 2155833 - RNA, 19 nt, Artificial Sequence
  Description of Artificial Sequence: Synthetic oligonucleotide
  Antisense strand to SEQ ID NO: 2155832
guacuucagucacugauac

SEQ ID NO: 2155834 - RNA, 19 nt, Artificial Sequence
  Description of Artificial Sequence: Synthetic oligonucleotide
  Sense strand starting at position 63 of SEQ ID NO: 1882899
gaucuuguaguagguagau

SEQ ID NO: 2155835 - RNA, 19 nt, Artificial Sequence
  Description of Artificial Sequence: Synthetic oligonucleotide
  Antisense strand to SEQ ID NO: 2155834
aucuaccuacuacaagauc

SEQ ID NO: 2155836 - RNA, 19 nt, Artificial Sequence
  Description of Artificial Sequence: Synthetic oligonucleotide
  Sense strand starting at position 65 of SEQ ID NO: 1882899
ucuuguaguagguagauua

SEQ ID NO: 2155837 - RNA, 19 nt, Artificial Sequence
  Description of Artificial Sequence: Synthetic oligonucleotide
  Antisense strand to SEQ ID NO: 2155836
uaaucuaccuacuacaaga

SEQ ID NO: 2155838 - RNA, 19 nt, Artificial Sequence
  Description of Artificial Sequence: Synthetic oligonucleotide
  Sense strand starting at position 120 of SEQ ID NO: 1882899
cuguuauuuccauguacau

SEQ ID NO: 2155839 - RNA, 19 nt, Artificial Sequence
  Description of Artificial Sequence: Synthetic oligonucleotide
  Antisense strand to SEQ ID NO: 2155838
auguacauggaaauaacag

SEQ ID NO: 2155840 - RNA, 19 nt, Artificial Sequence
  Description of Artificial Sequence: Synthetic oligonucleotide
  Sense strand starting at position 139 of SEQ ID NO: 1882899
guauauauguuauuuccgu

SEQ ID NO: 2155841 - RNA, 19 nt, Artificial Sequence
  Description of Artificial Sequence: Synthetic oligonucleotide
  Antisense strand to SEQ ID NO: 2155840
acggaaauaacauauauac

SEQ ID NO: 2155842 - RNA, 19 nt, Artificial Sequence
  Description of Artificial Sequence: Synthetic oligonucleotide
  Sense strand starting at position 144 of SEQ ID NO: 1882899
uauguuauuuccguguaug

SEQ ID NO: 2155843 - RNA, 19 nt, Artificial Sequence
  Description of Artificial Sequence: Synthetic oligonucleotide
  Antisense strand to SEQ ID NO: 2155842
cauacacggaaauaacaua

SEQ ID NO: 2155844 - RNA, 19 nt, Artificial Sequence
  Description of Artificial Sequence: Synthetic oligonucleotide
  Sense strand starting at position 493 of SEQ ID NO: 1882899
guagaugaaaguuaaguuu

SEQ ID NO: 2155845 - RNA, 19 nt, Artificial Sequence
  Description of Artificial Sequence: Synthetic oligonucleotide
  Antisense strand to SEQ ID NO: 2155844
aaacuuaacuuucaucuac

SEQ ID NO: 2155846 - RNA, 19 nt, Artificial Sequence
  Description of Artificial Sequence: Synthetic oligonucleotide
  Sense strand starting at position 496 of SEQ ID NO: 1882899
gaugaaaguuaaguuuguu

SEQ ID NO: 2155847 - RNA, 19 nt, Artificial Sequence
  Description of Artificial Sequence: Synthetic oligonucleotide
  Antisense strand to SEQ ID NO: 2155846
aacaaacuuaacuuucauc

SEQ ID NO: 2155848 - RNA, 19 nt, Artificial Sequence
  Description of Artificial Sequence: Synthetic oligonucleotide
  Sense strand starting at position 541 of SEQ ID NO: 1882899
acuuuaguaguccaguuau

SEQ ID NO: 2155849 - RNA, 19 nt, Artificial Sequence
  Description of Artificial Sequence: Synthetic oligonucleotide
  Antisense strand to SEQ ID NO: 2155848
auaacuggacuacuaaagu

SEQ ID NO: 2155850 - RNA, 19 nt, Artificial Sequence
  Description of Artificial Sequence: Synthetic oligonucleotide
  Sense strand starting at position 762 of SEQ ID NO: 1882899
auacgaacauguguauaca

SEQ ID NO: 2155851 - RNA, 19 nt, Artificial Sequence
  Description of Artificial Sequence: Synthetic oligonucleotide
  Antisense strand to SEQ ID NO: 2155850
uguauacacauguucguau

SEQ ID NO: 2155852 - RNA, 19 nt, Artificial Sequence
  Description of Artificial Sequence: Synthetic oligonucleotide
  Sense strand starting at position 1252 of SEQ ID NO: 1882899
agucccaagguauauauua

SEQ ID NO: 2155853 - RNA, 19 nt, Artificial Sequence
  Description of Artificial Sequence: Synthetic oligonucleotide
  Antisense strand to SEQ ID NO: 2155852
uaauauauaccuugggacu

SEQ ID NO: 2155854 - RNA, 19 nt, Artificial Sequence
  Description of Artificial Sequence: Synthetic oligonucleotide
  Sense strand starting at position 1398 of SEQ ID NO: 1882899
agaugaauguguccuugau

SEQ ID NO: 2155855 - RNA, 19 nt, Artificial Sequence
  Description of Artificial Sequence: Synthetic oligonucleotide
  Antisense strand to SEQ ID NO: 2155854
aucaaggacacauucaucu

SEQ ID NO: 2155856 - RNA, 19 nt, Artificial Sequence
  Description of Artificial Sequence: Synthetic oligonucleotide
  Sense strand starting at position 1400 of SEQ ID NO: 1882899
augaauguguccuugauca

SEQ ID NO: 2155857 - RNA, 19 nt, Artificial Sequence
  Description of Artificial Sequence: Synthetic oligonucleotide
  Antisense strand to SEQ ID NO: 2155856
ugaucaaggacacauucau

SEQ ID NO: 2155858 - RNA, 19 nt, Artificial Sequence
  Description of Artificial Sequence: Synthetic oligonucleotide
  Sense strand starting at position 1402 of SEQ ID NO: 1882899
gaauguguccuugaucauc

SEQ ID NO: 2155859 - RNA, 19 nt, Artificial Sequence
  Description of Artificial Sequence: Synthetic oligonucleotide
  Antisense strand to SEQ ID NO: 2155858
gaugaucaaggacacauuc

SEQ ID NO: 2155860 - RNA, 19 nt, Artificial Sequence
  Description of Artificial Sequence: Synthetic oligonucleotide
  Sense strand starting at position 1452 of SEQ ID NO: 1882899
auguuaucauaugcaauag

SEQ ID NO: 2155861 - RNA, 19 nt, Artificial Sequence
  Description of Artificial Sequence: Synthetic oligonucleotide
  Antisense strand to SEQ ID NO: 2155860
cuauugcauaugauaacau

SEQ ID NO: 2155862 - RNA, 19 nt, Artificial Sequence
  Description of Artificial Sequence: Synthetic oligonucleotide
  Sense strand starting at position 1776 of SEQ ID NO: 1882899
aguauaugauuagucugua

SEQ ID NO: 2155863 - RNA, 19 nt, Artificial Sequence
  Description of Artificial Sequence: Synthetic oligonucleotide
  Antisense strand to SEQ ID NO: 2155862
uacagacuaaucauauacu

SEQ ID NO: 2155864 - RNA, 19 nt, Artificial Sequence
  Description of Artificial Sequence: Synthetic oligonucleotide
  Sense strand starting at position 1777 of SEQ ID NO: 1882899
guauaugauuagucuguaa

SEQ ID NO: 2155865 - RNA, 19 nt, Artificial Sequence
  Description of Artificial Sequence: Synthetic oligonucleotide
  Antisense strand to SEQ ID NO: 2155864
uuacagacuaaucauauac

SEQ ID NO: 2155866 - RNA, 19 nt, Artificial Sequence
  Description of Artificial Sequence: Synthetic oligonucleotide
  Sense strand starting at position 1781 of SEQ ID NO: 1882899
augauuagucuguaacaac

SEQ ID NO: 2155867 - RNA, 19 nt, Artificial Sequence
  Description of Artificial Sequence: Synthetic oligonucleotide
  Antisense strand to SEQ ID NO: 2155866
guuguuacagacuaaucau

SEQ ID NO: 2155868 - RNA, 19 nt, Artificial Sequence
  Description of Artificial Sequence: Synthetic oligonucleotide
  Sense strand starting at position 1790 of SEQ ID NO: 1882899
cuguaacaacuuuaguagu

SEQ ID NO: 2155869 - RNA, 19 nt, Artificial Sequence
  Description of Artificial Sequence: Synthetic oligonucleotide
  Antisense strand to SEQ ID NO: 2155868
acuacuaaaguuguuacag

SEQ ID NO: 2155870 - RNA, 19 nt, Artificial Sequence
  Description of Artificial Sequence: Synthetic oligonucleotide
  Sense strand starting at position 1889 of SEQ ID NO: 1882899
augcauuagcaguaaauca

SEQ ID NO: 2155871 - RNA, 19 nt, Artificial Sequence
  Description of Artificial Sequence: Synthetic oligonucleotide
  Antisense strand to SEQ ID NO: 2155870
ugauuuacugcuaaugcau

SEQ ID NO: 2155872 - RNA, 19 nt, Artificial Sequence
  Description of Artificial Sequence: Synthetic oligonucleotide
  Sense strand starting at position 2011 of SEQ ID NO: 1882899
uguaucucuguggacauga

SEQ ID NO: 2155873 - RNA, 19 nt, Artificial Sequence
  Description of Artificial Sequence: Synthetic oligonucleotide
  Antisense strand to SEQ ID NO: 2155872
ucauguccacagagauaca

SEQ ID NO: 2155874 - RNA, 19 nt, Artificial Sequence
  Description of Artificial Sequence: Synthetic oligonucleotide
  Sense strand starting at position 2467 of SEQ ID NO: 1882899
acccacuacuuguuggaga

SEQ ID NO: 2155875 - RNA, 19 nt, Artificial Sequence
  Description of Artificial Sequence: Synthetic oligonucleotide
  Antisense strand to SEQ ID NO: 2155874
ucuccaacaaguagugggu

SEQ ID NO: 2155876 - RNA, 19 nt, Artificial Sequence
  Description of Artificial Sequence: Synthetic oligonucleotide
  Sense strand starting at position 2469 of SEQ ID NO: 1882899
ccacuacuuguuggagaaa

SEQ ID NO: 2155877 - RNA, 19 nt, Artificial Sequence
  Description of Artificial Sequence: Synthetic oligonucleotide
  Antisense strand to SEQ ID NO: 2155876
uuucuccaacaaguagugg

SEQ ID NO: 2155878 - RNA, 19 nt, Artificial Sequence
  Description of Artificial Sequence: Synthetic oligonucleotide
  Sense strand starting at position 2698 of SEQ ID NO: 1882899
aacagauguuguuuaguaa

SEQ ID NO: 2155879 - RNA, 19 nt, Artificial Sequence
  Description of Artificial Sequence: Synthetic oligonucleotide
  Antisense strand to SEQ ID NO: 2155878
uuacuaaacaacaucuguu

SEQ ID NO: 2155880 - RNA, 19 nt, Artificial Sequence
  Description of Artificial Sequence: Synthetic oligonucleotide
  Sense strand starting at position 2699 of SEQ ID NO: 1882899
acagauguuguuuaguaaa

SEQ ID NO: 2155881 - RNA, 19 nt, Artificial Sequence
  Description of Artificial Sequence: Synthetic oligonucleotide
  Antisense strand to SEQ ID NO: 2155880
uuuacuaaacaacaucugu

SEQ ID NO: 2155882 - RNA, 19 nt, Artificial Sequence
  Description of Artificial Sequence: Synthetic oligonucleotide
  Sense strand starting at position 2812 of SEQ ID NO: 1882899
uuaauuuccgcauguggca

SEQ ID NO: 2155883 - RNA, 19 nt, Artificial Sequence
  Description of Artificial Sequence: Synthetic oligonucleotide
  Antisense strand to SEQ ID NO: 2155882
ugccacaugcggaaauuaa

SEQ ID NO: 2155884 - RNA, 19 nt, Artificial Sequence
  Description of Artificial Sequence: Synthetic oligonucleotide
  Sense strand starting at position 2830 of SEQ ID NO: 1882899
auuccuaagcuggaaucau

SEQ ID NO: 2155885 - RNA, 19 nt, Artificial Sequence
  Description of Artificial Sequence: Synthetic oligonucleotide
  Antisense strand to SEQ ID NO: 2155884
augauuccagcuuaggaau

SEQ ID NO: 2155886 - RNA, 19 nt, Artificial Sequence
  Description of Artificial Sequence: Synthetic oligonucleotide
  Sense strand starting at position 2971 of SEQ ID NO: 1882899
caaguaucagagugauucu

SEQ ID NO: 2155887 - RNA, 19 nt, Artificial Sequence
  Description of Artificial Sequence: Synthetic oligonucleotide
  Antisense strand to SEQ ID NO: 2155886
agaaucacucugauacuug

SEQ ID NO: 2155888 - RNA, 19 nt, Artificial Sequence
  Description of Artificial Sequence: Synthetic oligonucleotide
  Sense strand starting at position 2974 of SEQ ID NO: 1882899
guaucagagugauucucaa

SEQ ID NO: 2155889 - RNA, 19 nt, Artificial Sequence
  Description of Artificial Sequence: Synthetic oligonucleotide
  Antisense strand to SEQ ID NO: 2155888
uugagaaucacucugauac

SEQ ID NO: 2155890 - RNA, 19 nt, Artificial Sequence
  Description of Artificial Sequence: Synthetic oligonucleotide
  Sense strand starting at position 3034 of SEQ ID NO: 1882899
guggaaauuugugauacua

SEQ ID NO: 2155891 - RNA, 19 nt, Artificial Sequence
  Description of Artificial Sequence: Synthetic oligonucleotide
  Antisense strand to SEQ ID NO: 2155890
uaguaucacaaauuuccac

SEQ ID NO: 2155892 - RNA, 19 nt, Artificial Sequence
  Description of Artificial Sequence: Synthetic oligonucleotide
  Sense strand starting at position 3036 of SEQ ID NO: 1882899
ggaaauuugugauacuagu

SEQ ID NO: 2155893 - RNA, 19 nt, Artificial Sequence
  Description of Artificial Sequence: Synthetic oligonucleotide
  Antisense strand to SEQ ID NO: 2155892
acuaguaucacaaauuucc

SEQ ID NO: 2155894 - RNA, 19 nt, Artificial Sequence
  Description of Artificial Sequence: Synthetic oligonucleotide
  Sense strand starting at position 3043 of SEQ ID NO: 1882899
ugugauacuagucaugguu

SEQ ID NO: 2155895 - RNA, 19 nt, Artificial Sequence
  Description of Artificial Sequence: Synthetic oligonucleotide
  Antisense strand to SEQ ID NO: 2155894
aaccaugacuaguaucaca

SEQ ID NO: 2155896 - RNA, 19 nt, Artificial Sequence
  Description of Artificial Sequence: Synthetic oligonucleotide
  Sense strand starting at position 3046 of SEQ ID NO: 1882899
gauacuagucaugguuauc

SEQ ID NO: 2155897 - RNA, 19 nt, Artificial Sequence
  Description of Artificial Sequence: Synthetic oligonucleotide
  Antisense strand to SEQ ID NO: 2155896
gauaaccaugacuaguauc

SEQ ID NO: 2155898 - RNA, 19 nt, Artificial Sequence
  Description of Artificial Sequence: Synthetic oligonucleotide
  Sense strand starting at position 3049 of SEQ ID NO: 1882899
acuagucaugguuaucaca

SEQ ID NO: 2155899 - RNA, 19 nt, Artificial Sequence
  Description of Artificial Sequence: Synthetic oligonucleotide
  Antisense strand to SEQ ID NO: 2155898
ugugauaaccaugacuagu

SEQ ID NO: 2155900 - RNA, 19 nt, Artificial Sequence
  Description of Artificial Sequence: Synthetic oligonucleotide
  Sense strand starting at position 3094 of SEQ ID NO: 1882899
gagucugucauguacagga

SEQ ID NO: 2155901 - RNA, 19 nt, Artificial Sequence
  Description of Artificial Sequence: Synthetic oligonucleotide
  Antisense strand to SEQ ID NO: 2155900
uccuguacaugacagacuc

SEQ ID NO: 2155902 - RNA, 19 nt, Artificial Sequence
  Description of Artificial Sequence: Synthetic oligonucleotide
  Sense strand starting at position 3305 of SEQ ID NO: 1882899
gucaucagauaugugaaca

SEQ ID NO: 2155903 - RNA, 19 nt, Artificial Sequence
  Description of Artificial Sequence: Synthetic oligonucleotide
  Antisense strand to SEQ ID NO: 2155902
uguucacauaucugaugac

SEQ ID NO: 2155904 - RNA, 19 nt, Artificial Sequence
  Description of Artificial Sequence: Synthetic oligonucleotide
  Sense strand starting at position 3527 of SEQ ID NO: 1882899
aggagugguguccagaucu

SEQ ID NO: 2155905 - RNA, 19 nt, Artificial Sequence
  Description of Artificial Sequence: Synthetic oligonucleotide
  Antisense strand to SEQ ID NO: 2155904
agaucuggacaccacuccu

SEQ ID NO: 2155906 - RNA, 19 nt, Artificial Sequence
  Description of Artificial Sequence: Synthetic oligonucleotide
  Sense strand starting at position 3551 of SEQ ID NO: 1882899
gagccacucugcgugauuu

SEQ ID NO: 2155907 - RNA, 19 nt, Artificial Sequence
  Description of Artificial Sequence: Synthetic oligonucleotide
  Antisense strand to SEQ ID NO: 2155906
aaaucacgcagaguggcuc

SEQ ID NO: 2155908 - RNA, 19 nt, Artificial Sequence
  Description of Artificial Sequence: Synthetic oligonucleotide
  Sense strand starting at position 3593 of SEQ ID NO: 1882899
ggcaguacugguuacagaa

SEQ ID NO: 2155909 - RNA, 19 nt, Artificial Sequence
  Description of Artificial Sequence: Synthetic oligonucleotide
  Antisense strand to SEQ ID NO: 2155908
uucuguaaccaguacugcc

SEQ ID NO: 2155910 - RNA, 19 nt, Artificial Sequence
  Description of Artificial Sequence: Synthetic oligonucleotide
  Sense strand starting at position 3754 of SEQ ID NO: 1882899
uuugguagcuaaccauuaa

SEQ ID NO: 2155911 - RNA, 19 nt, Artificial Sequence
  Description of Artificial Sequence: Synthetic oligonucleotide
  Antisense strand to SEQ ID NO: 2155910
uuaaugguuagcuaccaaa

SEQ ID NO: 2155912 - RNA, 19 nt, Artificial Sequence
  Description of Artificial Sequence: Synthetic oligonucleotide
  Sense strand starting at position 3758 of SEQ ID NO: 1882899
guagcuaaccauuaaguaa

SEQ ID NO: 2155913 - RNA, 19 nt, Artificial Sequence
  Description of Artificial Sequence: Synthetic oligonucleotide
  Antisense strand to SEQ ID NO: 2155912
uuacuuaaugguuagcuac

SEQ ID NO: 2155914 - RNA, 19 nt, Artificial Sequence
  Description of Artificial Sequence: Synthetic oligonucleotide
  Sense strand starting at position 39 of SEQ ID NO: 1882900
acuguaaggguccacauua

SEQ ID NO: 2155915 - RNA, 19 nt, Artificial Sequence
  Description of Artificial Sequence: Synthetic oligonucleotide
  Antisense strand to SEQ ID NO: 2155914
uaauguggacccuuacagu

SEQ ID NO: 2155916 - RNA, 19 nt, Artificial Sequence
  Description of Artificial Sequence: Synthetic oligonucleotide
  Sense strand starting at position 107 of SEQ ID NO: 1882900
aggaauaauguccaugugu

SEQ ID NO: 2155917 - RNA, 19 nt, Artificial Sequence
  Description of Artificial Sequence: Synthetic oligonucleotide
  Antisense strand to SEQ ID NO: 2155916
acacauggacauuauuccu

SEQ ID NO: 2155918 - RNA, 19 nt, Artificial Sequence
  Description of Artificial Sequence: Synthetic oligonucleotide
  Sense strand starting at position 109 of SEQ ID NO: 1882900
gaauaauguccaugugucc

SEQ ID NO: 2155919 - RNA, 19 nt, Artificial Sequence
  Description of Artificial Sequence: Synthetic oligonucleotide
  Antisense strand to SEQ ID NO: 2155918
ggacacauggacauuauuc

SEQ ID NO: 2155920 - RNA, 19 nt, Artificial Sequence
  Description of Artificial Sequence: Synthetic oligonucleotide
  Sense strand starting at position 115 of SEQ ID NO: 1882900
uguccauguguccaaagau

SEQ ID NO: 2155921 - RNA, 19 nt, Artificial Sequence
  Description of Artificial Sequence: Synthetic oligonucleotide
  Antisense strand to SEQ ID NO: 2155920
aucuuuggacacauggaca

SEQ ID NO: 2155922 - RNA, 19 nt, Artificial Sequence
  Description of Artificial Sequence: Synthetic oligonucleotide
  Sense strand starting at position 156 of SEQ ID NO: 1882900
gccugaggugcaugagaau

SEQ ID NO: 2155923 - RNA, 19 nt, Artificial Sequence
  Description of Artificial Sequence: Synthetic oligonucleotide
  Antisense strand to SEQ ID NO: 2155922
auucucaugcaccucaggc

SEQ ID NO: 2155924 - RNA, 19 nt, Artificial Sequence
  Description of Artificial Sequence: Synthetic oligonucleotide
  Sense strand starting at position 162 of SEQ ID NO: 1882900
ggugcaugagaaugagauc

SEQ ID NO: 2155925 - RNA, 19 nt, Artificial Sequence
  Description of Artificial Sequence: Synthetic oligonucleotide
  Antisense strand to SEQ ID NO: 2155924
gaucucauucucaugcacc

SEQ ID NO: 2155926 - RNA, 19 nt, Artificial Sequence
  Description of Artificial Sequence: Synthetic oligonucleotide
  Sense strand starting at position 165 of SEQ ID NO: 1882900
gcaugagaaugagaucuau

SEQ ID NO: 2155927 - RNA, 19 nt, Artificial Sequence
  Description of Artificial Sequence: Synthetic oligonucleotide
  Antisense strand to SEQ ID NO: 2155926
auagaucucauucucaugc

SEQ ID NO: 2155928 - RNA, 19 nt, Artificial Sequence
  Description of Artificial Sequence: Synthetic oligonucleotide
  Sense strand starting at position 548 of SEQ ID NO: 1882900
gugccucuugaacacagau

SEQ ID NO: 2155929 - RNA, 19 nt, Artificial Sequence
  Description of Artificial Sequence: Synthetic oligonucleotide
  Antisense strand to SEQ ID NO: 2155928
aucuguguucaagaggcac

SEQ ID NO: 2155930 - RNA, 19 nt, Artificial Sequence
  Description of Artificial Sequence: Synthetic oligonucleotide
  Sense strand starting at position 584 of SEQ ID NO: 1882900
ucaucuuuaaggugacgga

SEQ ID NO: 2155931 - RNA, 19 nt, Artificial Sequence
  Description of Artificial Sequence: Synthetic oligonucleotide
  Antisense strand to SEQ ID NO: 2155930
uccgucaccuuaaagauga

SEQ ID NO: 2155932 - RNA, 19 nt, Artificial Sequence
  Description of Artificial Sequence: Synthetic oligonucleotide
  Sense strand starting at position 689 of SEQ ID NO: 1882900
agaguagaaugagaauauu

SEQ ID NO: 2155933 - RNA, 19 nt, Artificial Sequence
  Description of Artificial Sequence: Synthetic oligonucleotide
  Antisense strand to SEQ ID NO: 2155932
aauauucucauucuacucu

SEQ ID NO: 2155934 - RNA, 19 nt, Artificial Sequence
  Description of Artificial Sequence: Synthetic oligonucleotide
  Sense strand starting at position 852 of SEQ ID NO: 1882900
gcugaugagcccgugugua

SEQ ID NO: 2155935 - RNA, 19 nt, Artificial Sequence
  Description of Artificial Sequence: Synthetic oligonucleotide
  Antisense strand to SEQ ID NO: 2155934
uacacacgggcucaucagc

SEQ ID NO: 2155936 - RNA, 19 nt, Artificial Sequence
  Description of Artificial Sequence: Synthetic oligonucleotide
  Sense strand starting at position 864 of SEQ ID NO: 1882900
guguguaauugauccugaa

SEQ ID NO: 2155937 - RNA, 19 nt, Artificial Sequence
  Description of Artificial Sequence: Synthetic oligonucleotide
  Antisense strand to SEQ ID NO: 2155936
uucaggaucaauuacacac

SEQ ID NO: 2155938 - RNA, 19 nt, Artificial Sequence
  Description of Artificial Sequence: Synthetic oligonucleotide
  Sense strand starting at position 977 of SEQ ID NO: 1882900
agaaaugaagccuguugga

SEQ ID NO: 2155939 - RNA, 19 nt, Artificial Sequence
  Description of Artificial Sequence: Synthetic oligonucleotide
  Antisense strand to SEQ ID NO: 2155938
uccaacaggcuucauuucu

SEQ ID NO: 2155940 - RNA, 19 nt, Artificial Sequence
  Description of Artificial Sequence: Synthetic oligonucleotide
  Sense strand starting at position 1132 of SEQ ID NO: 1882900
aucaauuauuaggaagcua

SEQ ID NO: 2155941 - RNA, 19 nt, Artificial Sequence
  Description of Artificial Sequence: Synthetic oligonucleotide
  Antisense strand to SEQ ID NO: 2155940
uagcuuccuaauaauugau

SEQ ID NO: 2155942 - RNA, 19 nt, Artificial Sequence
  Description of Artificial Sequence: Synthetic oligonucleotide
  Sense strand starting at position 1309 of SEQ ID NO: 1882900
agugcucuauaccuugaaa

SEQ ID NO: 2155943 - RNA, 19 nt, Artificial Sequence
  Description of Artificial Sequence: Synthetic oligonucleotide
  Antisense strand to SEQ ID NO: 2155942
uuucaagguauagagcacu

SEQ ID NO: 2155944 - RNA, 19 nt, Artificial Sequence
  Description of Artificial Sequence: Synthetic oligonucleotide
  Sense strand starting at position 1311 of SEQ ID NO: 1882900
ugcucuauaccuugaaagu

SEQ ID NO: 2155945 - RNA, 19 nt, Artificial Sequence
  Description of Artificial Sequence: Synthetic oligonucleotide
  Antisense strand to SEQ ID NO: 2155944
acuuucaagguauagagca

SEQ ID NO: 2155946 - RNA, 19 nt, Artificial Sequence
  Description of Artificial Sequence: Synthetic oligonucleotide
  Sense strand starting at position 1312 of SEQ ID NO: 1882900
gcucuauaccuugaaaguc

SEQ ID NO: 2155947 - RNA, 19 nt, Artificial Sequence
  Description of Artificial Sequence: Synthetic oligonucleotide
  Antisense strand to SEQ ID NO: 2155946
gacuuucaagguauagagc

SEQ ID NO: 2155948 - RNA, 19 nt, Artificial Sequence
  Description of Artificial Sequence: Synthetic oligonucleotide
  Sense strand starting at position 1322 of SEQ ID NO: 1882900
uugaaagucgcucacacaa

SEQ ID NO: 2155949 - RNA, 19 nt, Artificial Sequence
  Description of Artificial Sequence: Synthetic oligonucleotide
  Antisense strand to SEQ ID NO: 2155948
uugugugagcgacuuucaa

SEQ ID NO: 2155950 - RNA, 19 nt, Artificial Sequence
  Description of Artificial Sequence: Synthetic oligonucleotide
  Sense strand starting at position 1351 of SEQ ID NO: 1882900
ccaccuguuccugagaauc

SEQ ID NO: 2155951 - RNA, 19 nt, Artificial Sequence
  Description of Artificial Sequence: Synthetic oligonucleotide
  Antisense strand to SEQ ID NO: 2155950
gauucucaggaacaggugg

SEQ ID NO: 2155952 - RNA, 19 nt, Artificial Sequence
  Description of Artificial Sequence: Synthetic oligonucleotide
  Sense strand starting at position 1362 of SEQ ID NO: 1882900
ugagaaucagguugccauu

SEQ ID NO: 2155953 - RNA, 19 nt, Artificial Sequence
  Description of Artificial Sequence: Synthetic oligonucleotide
  Antisense strand to SEQ ID NO: 2155952
aauggcaaccugauucuca

SEQ ID NO: 2155954 - RNA, 19 nt, Artificial Sequence
  Description of Artificial Sequence: Synthetic oligonucleotide
  Sense strand starting at position 1375 of SEQ ID NO: 1882900
gccauugugucuuugagac

SEQ ID NO: 2155955 - RNA, 19 nt, Artificial Sequence
  Description of Artificial Sequence: Synthetic oligonucleotide
  Antisense strand to SEQ ID NO: 2155954
gucucaaagacacaauggc

SEQ ID NO: 2155956 - RNA, 19 nt, Artificial Sequence
  Description of Artificial Sequence: Synthetic oligonucleotide
  Sense strand starting at position 1530 of SEQ ID NO: 1882900
acgccugggaugugagauu

SEQ ID NO: 2155957 - RNA, 19 nt, Artificial Sequence
  Description of Artificial Sequence: Synthetic oligonucleotide
  Antisense strand to SEQ ID NO: 2155956
aaucucacaucccaggcgu

SEQ ID NO: 2155958 - RNA, 19 nt, Artificial Sequence
  Description of Artificial Sequence: Synthetic oligonucleotide
  Sense strand starting at position 1851 of SEQ ID NO: 1882900
aggcgugauguccaggaaa

SEQ ID NO: 2155959 - RNA, 19 nt, Artificial Sequence
  Description of Artificial Sequence: Synthetic oligonucleotide
  Antisense strand to SEQ ID NO: 2155958
uuuccuggacaucacgccu

SEQ ID NO: 2155960 - RNA, 19 nt, Artificial Sequence
  Description of Artificial Sequence: Synthetic oligonucleotide
  Sense strand starting at position 1853 of SEQ ID NO: 1882900
gcgugauguccaggaaaga

SEQ ID NO: 2155961 - RNA, 19 nt, Artificial Sequence
  Description of Artificial Sequence: Synthetic oligonucleotide
  Antisense strand to SEQ ID NO: 2155960
ucuuuccuggacaucacgc

SEQ ID NO: 2155962 - RNA, 19 nt, Artificial Sequence
  Description of Artificial Sequence: Synthetic oligonucleotide
  Sense strand starting at position 1854 of SEQ ID NO: 1882900
cgugauguccaggaaagac

SEQ ID NO: 2155963 - RNA, 19 nt, Artificial Sequence
  Description of Artificial Sequence: Synthetic oligonucleotide
  Antisense strand to SEQ ID NO: 2155962
gucuuuccuggacaucacg

SEQ ID NO: 2155964 - RNA, 19 nt, Artificial Sequence
  Description of Artificial Sequence: Synthetic oligonucleotide
  Sense strand starting at position 2627 of SEQ ID NO: 1882900
gcuugucuuaucguguaau

SEQ ID NO: 2155965 - RNA, 19 nt, Artificial Sequence
  Description of Artificial Sequence: Synthetic oligonucleotide
  Antisense strand to SEQ ID NO: 2155964
auuacacgauaagacaagc

SEQ ID NO: 2155966 - RNA, 19 nt, Artificial Sequence
  Description of Artificial Sequence: Synthetic oligonucleotide
  Sense strand starting at position 2630 of SEQ ID NO: 1882900
ugucuuaucguguaauuau

SEQ ID NO: 2155967 - RNA, 19 nt, Artificial Sequence
  Description of Artificial Sequence: Synthetic oligonucleotide
  Antisense strand to SEQ ID NO: 2155966
auaauuacacgauaagaca

SEQ ID NO: 2155968 - RNA, 19 nt, Artificial Sequence
  Description of Artificial Sequence: Synthetic oligonucleotide
  Sense strand starting at position 2637 of SEQ ID NO: 1882900
ucguguaauuaugucacua

SEQ ID NO: 2155969 - RNA, 19 nt, Artificial Sequence
  Description of Artificial Sequence: Synthetic oligonucleotide
  Antisense strand to SEQ ID NO: 2155968
uagugacauaauuacacga

SEQ ID NO: 2155970 - RNA, 19 nt, Artificial Sequence
  Description of Artificial Sequence: Synthetic oligonucleotide
  Sense strand starting at position 2684 of SEQ ID NO: 1882900
ucgucauugccagaaguuu

SEQ ID NO: 2155971 - RNA, 19 nt, Artificial Sequence
  Description of Artificial Sequence: Synthetic oligonucleotide
  Antisense strand to SEQ ID NO: 2155970
aaacuucuggcaaugacga

SEQ ID NO: 2155972 - RNA, 19 nt, Artificial Sequence
  Description of Artificial Sequence: Synthetic oligonucleotide
  Sense strand starting at position 2907 of SEQ ID NO: 1882900
gggcuaaucgccagguguc

SEQ ID NO: 2155973 - RNA, 19 nt, Artificial Sequence
  Description of Artificial Sequence: Synthetic oligonucleotide
  Antisense strand to SEQ ID NO: 2155972
gacaccuggcgauuagccc

SEQ ID NO: 2155974 - RNA, 19 nt, Artificial Sequence
  Description of Artificial Sequence: Synthetic oligonucleotide
  Sense strand starting at position 2921 of SEQ ID NO: 1882900
gugucugacuguucuccga

SEQ ID NO: 2155975 - RNA, 19 nt, Artificial Sequence
  Description of Artificial Sequence: Synthetic oligonucleotide
  Antisense strand to SEQ ID NO: 2155974
ucggagaacagucagacac

SEQ ID NO: 2155976 - RNA, 19 nt, Artificial Sequence
  Description of Artificial Sequence: Synthetic oligonucleotide
  Sense strand starting at position 2923 of SEQ ID NO: 1882900
gucugacuguucuccgacu

SEQ ID NO: 2155977 - RNA, 19 nt, Artificial Sequence
  Description of Artificial Sequence: Synthetic oligonucleotide
  Antisense strand to SEQ ID NO: 2155976
agucggagaacagucagac

SEQ ID NO: 2155978 - RNA, 19 nt, Artificial Sequence
  Description of Artificial Sequence: Synthetic oligonucleotide
  Sense strand starting at position 2987 of SEQ ID NO: 1882900
guccguucgcugccagaaa

SEQ ID NO: 2155979 - RNA, 19 nt, Artificial Sequence
  Description of Artificial Sequence: Synthetic oligonucleotide
  Antisense strand to SEQ ID NO: 2155978
uuucuggcagcgaacggac

SEQ ID NO: 2155980 - RNA, 19 nt, Artificial Sequence
  Description of Artificial Sequence: Synthetic oligonucleotide
  Sense strand starting at position 2995 of SEQ ID NO: 1882900
gcugccagaaauggauaua

SEQ ID NO: 2155981 - RNA, 19 nt, Artificial Sequence
  Description of Artificial Sequence: Synthetic oligonucleotide
  Antisense strand to SEQ ID NO: 2155980
uauauccauuucuggcagc

SEQ ID NO: 2155982 - RNA, 19 nt, Artificial Sequence
  Description of Artificial Sequence: Synthetic oligonucleotide
  Sense strand starting at position 3009 of SEQ ID NO: 1882900
auauaugcguucccugaua

SEQ ID NO: 2155983 - RNA, 19 nt, Artificial Sequence
  Description of Artificial Sequence: Synthetic oligonucleotide
  Antisense strand to SEQ ID NO: 2155982
uaucagggaacgcauauau

SEQ ID NO: 2155984 - RNA, 19 nt, Artificial Sequence
  Description of Artificial Sequence: Synthetic oligonucleotide
  Sense strand starting at position 3011 of SEQ ID NO: 1882900
auaugcguucccugauaac

SEQ ID NO: 2155985 - RNA, 19 nt, Artificial Sequence
  Description of Artificial Sequence: Synthetic oligonucleotide
  Antisense strand to SEQ ID NO: 2155984
guuaucagggaacgcauau

SEQ ID NO: 2155986 - RNA, 19 nt, Artificial Sequence
  Description of Artificial Sequence: Synthetic oligonucleotide
  Sense strand starting at position 3419 of SEQ ID NO: 1882900
uggugaggucaugaacagu

SEQ ID NO: 2155987 - RNA, 19 nt, Artificial Sequence
  Description of Artificial Sequence: Synthetic oligonucleotide
  Antisense strand to SEQ ID NO: 2155986
acuguucaugaccucacca

SEQ ID NO: 2155988 - RNA, 19 nt, Artificial Sequence
  Description of Artificial Sequence: Synthetic oligonucleotide
  Sense strand starting at position 3441 of SEQ ID NO: 1882900
ugcguuucugcugugaaua

SEQ ID NO: 2155989 - RNA, 19 nt, Artificial Sequence
  Description of Artificial Sequence: Synthetic oligonucleotide
  Antisense strand to SEQ ID NO: 2155988
uauucacagcagaaacgca

SEQ ID NO: 2155990 - RNA, 19 nt, Artificial Sequence
  Description of Artificial Sequence: Synthetic oligonucleotide
  Sense strand starting at position 3504 of SEQ ID NO: 1882900
uggaaccacguuuaauaau

SEQ ID NO: 2155991 - RNA, 19 nt, Artificial Sequence
  Description of Artificial Sequence: Synthetic oligonucleotide
  Antisense strand to SEQ ID NO: 2155990
auuauuaaacgugguucca

SEQ ID NO: 2155992 - RNA, 19 nt, Artificial Sequence
  Description of Artificial Sequence: Synthetic oligonucleotide
  Sense strand starting at position 3915 of SEQ ID NO: 1882900
acgacuacacgcuaaugaa

SEQ ID NO: 2155993 - RNA, 19 nt, Artificial Sequence
  Description of Artificial Sequence: Synthetic oligonucleotide
  Antisense strand to SEQ ID NO: 2155992
uucauuagcguguagucgu

SEQ ID NO: 2155994 - RNA, 19 nt, Artificial Sequence
  Description of Artificial Sequence: Synthetic oligonucleotide
  Sense strand starting at position 90 of SEQ ID NO: 1882901
gcugcuuaccgguuuguca

SEQ ID NO: 2155995 - RNA, 19 nt, Artificial Sequence
  Description of Artificial Sequence: Synthetic oligonucleotide
  Antisense strand to SEQ ID NO: 2155994
ugacaaaccgguaagcagc

SEQ ID NO: 2155996 - RNA, 19 nt, Artificial Sequence
  Description of Artificial Sequence: Synthetic oligonucleotide
  Sense strand starting at position 259 of SEQ ID NO: 1882901
ccuaucuuggcuuaacaga

SEQ ID NO: 2155997 - RNA, 19 nt, Artificial Sequence
  Description of Artificial Sequence: Synthetic oligonucleotide
  Antisense strand to SEQ ID NO: 2155996
ucuguuaagccaagauagg

SEQ ID NO: 2155998 - RNA, 19 nt, Artificial Sequence
  Description of Artificial Sequence: Synthetic oligonucleotide
  Sense strand starting at position 318 of SEQ ID NO: 1882901
cacagaugauccucuugga

SEQ ID NO: 2155999 - RNA, 19 nt, Artificial Sequence
  Description of Artificial Sequence: Synthetic oligonucleotide
  Antisense strand to SEQ ID NO: 2155998
uccaagaggaucaucugug

SEQ ID NO: 2156000 - RNA, 19 nt, Artificial Sequence
  Description of Artificial Sequence: Synthetic oligonucleotide
  Sense strand starting at position 843 of SEQ ID NO: 1882901
gacauaguaggacguagaa

SEQ ID NO: 2156001 - RNA, 19 nt, Artificial Sequence
  Description of Artificial Sequence: Synthetic oligonucleotide
  Antisense strand to SEQ ID NO: 2156000
uucuacguccuacuauguc

SEQ ID NO: 2156002 - RNA, 19 nt, Artificial Sequence
  Description of Artificial Sequence: Synthetic oligonucleotide
  Sense strand starting at position 845 of SEQ ID NO: 1882901
cauaguaggacguagaagu

SEQ ID NO: 2156003 - RNA, 19 nt, Artificial Sequence
  Description of Artificial Sequence: Synthetic oligonucleotide
  Antisense strand to SEQ ID NO: 2156002
acuucuacguccuacuaug

SEQ ID NO: 2156004 - RNA, 19 nt, Artificial Sequence
  Description of Artificial Sequence: Synthetic oligonucleotide
  Sense strand starting at position 1578 of SEQ ID NO: 1882901
gguaaacauuuagacaaua

SEQ ID NO: 2156005 - RNA, 19 nt, Artificial Sequence
  Description of Artificial Sequence: Synthetic oligonucleotide
  Antisense strand to SEQ ID NO: 2156004
uauugucuaaauguuuacc

SEQ ID NO: 2156006 - RNA, 19 nt, Artificial Sequence
  Description of Artificial Sequence: Synthetic oligonucleotide
  Sense strand starting at position 1605 of SEQ ID NO: 1882901
gcuaauaguaugggauuag

SEQ ID NO: 2156007 - RNA, 19 nt, Artificial Sequence
  Description of Artificial Sequence: Synthetic oligonucleotide
  Antisense strand to SEQ ID NO: 2156006
cuaaucccauacuauuagc

SEQ ID NO: 2156008 - RNA, 19 nt, Artificial Sequence
  Description of Artificial Sequence: Synthetic oligonucleotide
  Sense strand starting at position 1704 of SEQ ID NO: 1882901
uuguauauacuuuagccua

SEQ ID NO: 2156009 - RNA, 19 nt, Artificial Sequence
  Description of Artificial Sequence: Synthetic oligonucleotide
  Antisense strand to SEQ ID NO: 2156008
uaggcuaaaguauauacaa

SEQ ID NO: 2156010 - RNA, 19 nt, Artificial Sequence
  Description of Artificial Sequence: Synthetic oligonucleotide
  Sense strand starting at position 1733 of SEQ ID NO: 1882901
ucuugagaaucugugcaaa

SEQ ID NO: 2156011 - RNA, 19 nt, Artificial Sequence
  Description of Artificial Sequence: Synthetic oligonucleotide
  Antisense strand to SEQ ID NO: 2156010
uuugcacagauucucaaga

SEQ ID NO: 2156012 - RNA, 19 nt, Artificial Sequence
  Description of Artificial Sequence: Synthetic oligonucleotide
  Sense strand starting at position 1735 of SEQ ID NO: 1882901
uugagaaucugugcaaaua

SEQ ID NO: 2156013 - RNA, 19 nt, Artificial Sequence
  Description of Artificial Sequence: Synthetic oligonucleotide
  Antisense strand to SEQ ID NO: 2156012
uauuugcacagauucucaa

SEQ ID NO: 2156014 - RNA, 19 nt, Artificial Sequence
  Description of Artificial Sequence: Synthetic oligonucleotide
  Sense strand starting at position 1771 of SEQ ID NO: 1882901
caaguaguauaguuugaaa

SEQ ID NO: 2156015 - RNA, 19 nt, Artificial Sequence
  Description of Artificial Sequence: Synthetic oligonucleotide
  Antisense strand to SEQ ID NO: 2156014
uuucaaacuauacuacuug

SEQ ID NO: 2156016 - RNA, 19 nt, Artificial Sequence
  Description of Artificial Sequence: Synthetic oligonucleotide
  Sense strand starting at position 2125 of SEQ ID NO: 1882901
ugguaauuacuugauaagu

SEQ ID NO: 2156017 - RNA, 19 nt, Artificial Sequence
  Description of Artificial Sequence: Synthetic oligonucleotide
  Antisense strand to SEQ ID NO: 2156016
acuuaucaaguaauuacca

SEQ ID NO: 2156018 - RNA, 19 nt, Artificial Sequence
  Description of Artificial Sequence: Synthetic oligonucleotide
  Sense strand starting at position 2138 of SEQ ID NO: 1882901
auaaguaguggucauaaua

SEQ ID NO: 2156019 - RNA, 19 nt, Artificial Sequence
  Description of Artificial Sequence: Synthetic oligonucleotide
  Antisense strand to SEQ ID NO: 2156018
uauuaugaccacuacuuau

SEQ ID NO: 2156020 - RNA, 19 nt, Artificial Sequence
  Description of Artificial Sequence: Synthetic oligonucleotide
  Sense strand starting at position 2260 of SEQ ID NO: 1882901
gagagaaccaauggugguu

SEQ ID NO: 2156021 - RNA, 19 nt, Artificial Sequence
  Description of Artificial Sequence: Synthetic oligonucleotide
  Antisense strand to SEQ ID NO: 2156020
aaccaccauugguucucuc

SEQ ID NO: 2156022 - RNA, 19 nt, Artificial Sequence
  Description of Artificial Sequence: Synthetic oligonucleotide
  Sense strand starting at position 2263 of SEQ ID NO: 1882901
agaaccaauggugguuaua

SEQ ID NO: 2156023 - RNA, 19 nt, Artificial Sequence
  Description of Artificial Sequence: Synthetic oligonucleotide
  Antisense strand to SEQ ID NO: 2156022
uauaaccaccauugguucu

SEQ ID NO: 2156024 - RNA, 19 nt, Artificial Sequence
  Description of Artificial Sequence: Synthetic oligonucleotide
  Sense strand starting at position 2265 of SEQ ID NO: 1882901
aaccaauggugguuauauc

SEQ ID NO: 2156025 - RNA, 19 nt, Artificial Sequence
  Description of Artificial Sequence: Synthetic oligonucleotide
  Antisense strand to SEQ ID NO: 2156024
gauauaaccaccauugguu

SEQ ID NO: 2156026 - RNA, 19 nt, Artificial Sequence
  Description of Artificial Sequence: Synthetic oligonucleotide
  Sense strand starting at position 2541 of SEQ ID NO: 1882901
ggacuuaugugaccgauac

SEQ ID NO: 2156027 - RNA, 19 nt, Artificial Sequence
  Description of Artificial Sequence: Synthetic oligonucleotide
  Antisense strand to SEQ ID NO: 2156026
guaucggucacauaagucc

SEQ ID NO: 2156028 - RNA, 19 nt, Artificial Sequence
  Description of Artificial Sequence: Synthetic oligonucleotide
  Sense strand starting at position 2542 of SEQ ID NO: 1882901
gacuuaugugaccgauaca

SEQ ID NO: 2156029 - RNA, 19 nt, Artificial Sequence
  Description of Artificial Sequence: Synthetic oligonucleotide
  Antisense strand to SEQ ID NO: 2156028
uguaucggucacauaaguc

SEQ ID NO: 2156030 - RNA, 19 nt, Artificial Sequence
  Description of Artificial Sequence: Synthetic oligonucleotide
  Sense strand starting at position 2581 of SEQ ID NO: 1882901
acuucuuaccuugguagaa

SEQ ID NO: 2156031 - RNA, 19 nt, Artificial Sequence
  Description of Artificial Sequence: Synthetic oligonucleotide
  Antisense strand to SEQ ID NO: 2156030
uucuaccaagguaagaagu

SEQ ID NO: 2156032 - RNA, 19 nt, Artificial Sequence
  Description of Artificial Sequence: Synthetic oligonucleotide
  Sense strand starting at position 2582 of SEQ ID NO: 1882901
cuucuuaccuugguagaag

SEQ ID NO: 2156033 - RNA, 19 nt, Artificial Sequence
  Description of Artificial Sequence: Synthetic oligonucleotide
  Antisense strand to SEQ ID NO: 2156032
cuucuaccaagguaagaag

SEQ ID NO: 2156034 - RNA, 19 nt, Artificial Sequence
  Description of Artificial Sequence: Synthetic oligonucleotide
  Sense strand starting at position 2736 of SEQ ID NO: 1882901
ucccucauccuguaggaaa

SEQ ID NO: 2156035 - RNA, 19 nt, Artificial Sequence
  Description of Artificial Sequence: Synthetic oligonucleotide
  Antisense strand to SEQ ID NO: 2156034
uuuccuacaggaugaggga

SEQ ID NO: 2156036 - RNA, 19 nt, Artificial Sequence
  Description of Artificial Sequence: Synthetic oligonucleotide
  Sense strand starting at position 2766 of SEQ ID NO: 1882901
acuguaagcagucagguaa

SEQ ID NO: 2156037 - RNA, 19 nt, Artificial Sequence
  Description of Artificial Sequence: Synthetic oligonucleotide
  Antisense strand to SEQ ID NO: 2156036
uuaccugacugcuuacagu

SEQ ID NO: 2156038 - RNA, 19 nt, Artificial Sequence
  Description of Artificial Sequence: Synthetic oligonucleotide
  Sense strand starting at position 2780 of SEQ ID NO: 1882901
gguaacauuguccacucau

SEQ ID NO: 2156039 - RNA, 19 nt, Artificial Sequence
  Description of Artificial Sequence: Synthetic oligonucleotide
  Antisense strand to SEQ ID NO: 2156038
augaguggacaauguuacc

SEQ ID NO: 2156040 - RNA, 19 nt, Artificial Sequence
  Description of Artificial Sequence: Synthetic oligonucleotide
  Sense strand starting at position 3212 of SEQ ID NO: 1882901
auauaugugcuauaucuca

SEQ ID NO: 2156041 - RNA, 19 nt, Artificial Sequence
  Description of Artificial Sequence: Synthetic oligonucleotide
  Antisense strand to SEQ ID NO: 2156040
ugagauauagcacauauau

SEQ ID NO: 2156042 - RNA, 19 nt, Artificial Sequence
  Description of Artificial Sequence: Synthetic oligonucleotide
  Sense strand starting at position 3251 of SEQ ID NO: 1882901
uguaguaacuuaucacaug

SEQ ID NO: 2156043 - RNA, 19 nt, Artificial Sequence
  Description of Artificial Sequence: Synthetic oligonucleotide
  Antisense strand to SEQ ID NO: 2156042
caugugauaaguuacuaca

SEQ ID NO: 2156044 - RNA, 19 nt, Artificial Sequence
  Description of Artificial Sequence: Synthetic oligonucleotide
  Sense strand starting at position 3351 of SEQ ID NO: 1882901
cugagaaacugcucagggu

SEQ ID NO: 2156045 - RNA, 19 nt, Artificial Sequence
  Description of Artificial Sequence: Synthetic oligonucleotide
  Antisense strand to SEQ ID NO: 2156044
acccugagcaguuucucag

SEQ ID NO: 2156046 - RNA, 19 nt, Artificial Sequence
  Description of Artificial Sequence: Synthetic oligonucleotide
  Sense strand starting at position 3355 of SEQ ID NO: 1882901
gaaacugcucaggguaaac

SEQ ID NO: 2156047 - RNA, 19 nt, Artificial Sequence
  Description of Artificial Sequence: Synthetic oligonucleotide
  Antisense strand to SEQ ID NO: 2156046
guuuacccugagcaguuuc

SEQ ID NO: 2156048 - RNA, 19 nt, Artificial Sequence
  Description of Artificial Sequence: Synthetic oligonucleotide
  Sense strand starting at position 3366 of SEQ ID NO: 1882901
ggguaaacagucugugaaa

SEQ ID NO: 2156049 - RNA, 19 nt, Artificial Sequence
  Description of Artificial Sequence: Synthetic oligonucleotide
  Antisense strand to SEQ ID NO: 2156048
uuucacagacuguuuaccc

SEQ ID NO: 2156050 - RNA, 19 nt, Artificial Sequence
  Description of Artificial Sequence: Synthetic oligonucleotide
  Sense strand starting at position 3367 of SEQ ID NO: 1882901
gguaaacagucugugaaag

SEQ ID NO: 2156051 - RNA, 19 nt, Artificial Sequence
  Description of Artificial Sequence: Synthetic oligonucleotide
  Antisense strand to SEQ ID NO: 2156050
cuuucacagacuguuuacc

SEQ ID NO: 2156052 - RNA, 19 nt, Artificial Sequence
  Description of Artificial Sequence: Synthetic oligonucleotide
  Sense strand starting at position 3423 of SEQ ID NO: 1882901
uugucaugacccugaauau

SEQ ID NO: 2156053 - RNA, 19 nt, Artificial Sequence
  Description of Artificial Sequence: Synthetic oligonucleotide
  Antisense strand to SEQ ID NO: 2156052
auauucagggucaugacaa

SEQ ID NO: 2156054 - RNA, 19 nt, Artificial Sequence
  Description of Artificial Sequence: Synthetic oligonucleotide
  Sense strand starting at position 3424 of SEQ ID NO: 1882901
ugucaugacccugaauauc

SEQ ID NO: 2156055 - RNA, 19 nt, Artificial Sequence
  Description of Artificial Sequence: Synthetic oligonucleotide
  Antisense strand to SEQ ID NO: 2156054
gauauucagggucaugaca

SEQ ID NO: 2156056 - RNA, 19 nt, Artificial Sequence
  Description of Artificial Sequence: Synthetic oligonucleotide
  Sense strand starting at position 3455 of SEQ ID NO: 1882901
aggucaaggcgguagauua

SEQ ID NO: 2156057 - RNA, 19 nt, Artificial Sequence
  Description of Artificial Sequence: Synthetic oligonucleotide
  Antisense strand to SEQ ID NO: 2156056
uaaucuaccgccuugaccu

SEQ ID NO: 2156058 - RNA, 19 nt, Artificial Sequence
  Description of Artificial Sequence: Synthetic oligonucleotide
  Sense strand starting at position 3650 of SEQ ID NO: 1882901
ucaguuuauccacauugac

SEQ ID NO: 2156059 - RNA, 19 nt, Artificial Sequence
  Description of Artificial Sequence: Synthetic oligonucleotide
  Antisense strand to SEQ ID NO: 2156058
gucaauguggauaaacuga

SEQ ID NO: 2156060 - RNA, 19 nt, Artificial Sequence
  Description of Artificial Sequence: Synthetic oligonucleotide
  Sense strand starting at position 3653 of SEQ ID NO: 1882901
guuuauccacauugacaag

SEQ ID NO: 2156061 - RNA, 19 nt, Artificial Sequence
  Description of Artificial Sequence: Synthetic oligonucleotide
  Antisense strand to SEQ ID NO: 2156060
cuugucaauguggauaaac

SEQ ID NO: 2156062 - RNA, 19 nt, Artificial Sequence
  Description of Artificial Sequence: Synthetic oligonucleotide
  Sense strand starting at position 3705 of SEQ ID NO: 1882901
ucaagucuaugacuucuga

SEQ ID NO: 2156063 - RNA, 19 nt, Artificial Sequence
  Description of Artificial Sequence: Synthetic oligonucleotide
  Antisense strand to SEQ ID NO: 2156062
ucagaagucauagacuuga

SEQ ID NO: 2156064 - RNA, 19 nt, Artificial Sequence
  Description of Artificial Sequence: Synthetic oligonucleotide
  Sense strand starting at position 3713 of SEQ ID NO: 1882901
augacuucugauggucaac

SEQ ID NO: 2156065 - RNA, 19 nt, Artificial Sequence
  Description of Artificial Sequence: Synthetic oligonucleotide
  Antisense strand to SEQ ID NO: 2156064
guugaccaucagaagucau

SEQ ID NO: 2156066 - RNA, 19 nt, Artificial Sequence
  Description of Artificial Sequence: Synthetic oligonucleotide
  Sense strand starting at position 3733 of SEQ ID NO: 1882901
gaucaagaauugucaguag

SEQ ID NO: 2156067 - RNA, 19 nt, Artificial Sequence
  Description of Artificial Sequence: Synthetic oligonucleotide
  Antisense strand to SEQ ID NO: 2156066
cuacugacaauucuugauc

SEQ ID NO: 2156068 - RNA, 19 nt, Artificial Sequence
  Description of Artificial Sequence: Synthetic oligonucleotide
  Sense strand starting at position 3736 of SEQ ID NO: 1882901
caagaauugucaguagaau

SEQ ID NO: 2156069 - RNA, 19 nt, Artificial Sequence
  Description of Artificial Sequence: Synthetic oligonucleotide
  Antisense strand to SEQ ID NO: 2156068
auucuacugacaauucuug

SEQ ID NO: 2156070 - RNA, 19 nt, Artificial Sequence
  Description of Artificial Sequence: Synthetic oligonucleotide
  Sense strand starting at position 3804 of SEQ ID NO: 1882901
aaauuagaguugucauaga

SEQ ID NO: 2156071 - RNA, 19 nt, Artificial Sequence
  Description of Artificial Sequence: Synthetic oligonucleotide
  Antisense strand to SEQ ID NO: 2156070
ucuaugacaacucuaauuu

SEQ ID NO: 2156072 - RNA, 19 nt, Artificial Sequence
  Description of Artificial Sequence: Synthetic oligonucleotide
  Sense strand starting at position 3809 of SEQ ID NO: 1882901
agaguugucauagagcuga

SEQ ID NO: 2156073 - RNA, 19 nt, Artificial Sequence
  Description of Artificial Sequence: Synthetic oligonucleotide
  Antisense strand to SEQ ID NO: 2156072
ucagcucuaugacaacucu

SEQ ID NO: 2156074 - RNA, 19 nt, Artificial Sequence
  Description of Artificial Sequence: Synthetic oligonucleotide
  Sense strand starting at position 328 of SEQ ID NO: 1882902
accugaccuugacagagau

SEQ ID NO: 2156075 - RNA, 19 nt, Artificial Sequence
  Description of Artificial Sequence: Synthetic oligonucleotide
  Antisense strand to SEQ ID NO: 2156074
aucucugucaaggucaggu

SEQ ID NO: 2156076 - RNA, 19 nt, Artificial Sequence
  Description of Artificial Sequence: Synthetic oligonucleotide
  Sense strand starting at position 340 of SEQ ID NO: 1882902
cagagaugauauugcggau

SEQ ID NO: 2156077 - RNA, 19 nt, Artificial Sequence
  Description of Artificial Sequence: Synthetic oligonucleotide
  Antisense strand to SEQ ID NO: 2156076
auccgcaauaucaucucug

SEQ ID NO: 2156078 - RNA, 19 nt, Artificial Sequence
  Description of Artificial Sequence: Synthetic oligonucleotide
  Sense strand starting at position 343 of SEQ ID NO: 1882902
agaugauauugcggauuuc

SEQ ID NO: 2156079 - RNA, 19 nt, Artificial Sequence
  Description of Artificial Sequence: Synthetic oligonucleotide
  Antisense strand to SEQ ID NO: 2156078
gaaauccgcaauaucaucu

SEQ ID NO: 2156080 - RNA, 19 nt, Artificial Sequence
  Description of Artificial Sequence: Synthetic oligonucleotide
  Sense strand starting at position 352 of SEQ ID NO: 1882902
ugcggauuucagugacuga

SEQ ID NO: 2156081 - RNA, 19 nt, Artificial Sequence
  Description of Artificial Sequence: Synthetic oligonucleotide
  Antisense strand to SEQ ID NO: 2156080
ucagucacugaaauccgca

SEQ ID NO: 2156082 - RNA, 19 nt, Artificial Sequence
  Description of Artificial Sequence: Synthetic oligonucleotide
  Sense strand starting at position 451 of SEQ ID NO: 1882902
ggcugcugcuuugacaaga

SEQ ID NO: 2156083 - RNA, 19 nt, Artificial Sequence
  Description of Artificial Sequence: Synthetic oligonucleotide
  Antisense strand to SEQ ID NO: 2156082
ucuugucaaagcagcagcc

SEQ ID NO: 2156084 - RNA, 19 nt, Artificial Sequence
  Description of Artificial Sequence: Synthetic oligonucleotide
  Sense strand starting at position 537 of SEQ ID NO: 1882902
agcugucagucaucaauca

SEQ ID NO: 2156085 - RNA, 19 nt, Artificial Sequence
  Description of Artificial Sequence: Synthetic oligonucleotide
  Antisense strand to SEQ ID NO: 2156084
ugauugaugacugacagcu

SEQ ID NO: 2156086 - RNA, 19 nt, Artificial Sequence
  Description of Artificial Sequence: Synthetic oligonucleotide
  Sense strand starting at position 538 of SEQ ID NO: 1882902
gcugucagucaucaaucau

SEQ ID NO: 2156087 - RNA, 19 nt, Artificial Sequence
  Description of Artificial Sequence: Synthetic oligonucleotide
  Antisense strand to SEQ ID NO: 2156086
augauugaugacugacagc

SEQ ID NO: 2156088 - RNA, 19 nt, Artificial Sequence
  Description of Artificial Sequence: Synthetic oligonucleotide
  Sense strand starting at position 686 of SEQ ID NO: 1882902
cccuacuugucaccagaca

SEQ ID NO: 2156089 - RNA, 19 nt, Artificial Sequence
  Description of Artificial Sequence: Synthetic oligonucleotide
  Antisense strand to SEQ ID NO: 2156088
ugucuggugacaaguaggg

SEQ ID NO: 2156090 - RNA, 19 nt, Artificial Sequence
  Description of Artificial Sequence: Synthetic oligonucleotide
  Sense strand starting at position 1113 of SEQ ID NO: 1882902
cugcacuguucgugagcca

SEQ ID NO: 2156091 - RNA, 19 nt, Artificial Sequence
  Description of Artificial Sequence: Synthetic oligonucleotide
  Antisense strand to SEQ ID NO: 2156090
uggcucacgaacagugcag

SEQ ID NO: 2156092 - RNA, 19 nt, Artificial Sequence
  Description of Artificial Sequence: Synthetic oligonucleotide
  Sense strand starting at position 1342 of SEQ ID NO: 1882902
uacggauucuguuccaauu

SEQ ID NO: 2156093 - RNA, 19 nt, Artificial Sequence
  Description of Artificial Sequence: Synthetic oligonucleotide
  Antisense strand to SEQ ID NO: 2156092
aauuggaacagaauccgua

SEQ ID NO: 2156094 - RNA, 19 nt, Artificial Sequence
  Description of Artificial Sequence: Synthetic oligonucleotide
  Sense strand starting at position 1344 of SEQ ID NO: 1882902
cggauucuguuccaauuua

SEQ ID NO: 2156095 - RNA, 19 nt, Artificial Sequence
  Description of Artificial Sequence: Synthetic oligonucleotide
  Antisense strand to SEQ ID NO: 2156094
uaaauuggaacagaauccg

SEQ ID NO: 2156096 - RNA, 19 nt, Artificial Sequence
  Description of Artificial Sequence: Synthetic oligonucleotide
  Sense strand starting at position 1397 of SEQ ID NO: 1882902
uuagaaucccacggcguua

SEQ ID NO: 2156097 - RNA, 19 nt, Artificial Sequence
  Description of Artificial Sequence: Synthetic oligonucleotide
  Antisense strand to SEQ ID NO: 2156096
uaacgccgugggauucuaa

SEQ ID NO: 2156098 - RNA, 19 nt, Artificial Sequence
  Description of Artificial Sequence: Synthetic oligonucleotide
  Sense strand starting at position 1409 of SEQ ID NO: 1882902
ggcguuaacucacaguagu

SEQ ID NO: 2156099 - RNA, 19 nt, Artificial Sequence
  Description of Artificial Sequence: Synthetic oligonucleotide
  Antisense strand to SEQ ID NO: 2156098
acuacugugaguuaacgcc

SEQ ID NO: 2156100 - RNA, 19 nt, Artificial Sequence
  Description of Artificial Sequence: Synthetic oligonucleotide
  Sense strand starting at position 1412 of SEQ ID NO: 1882902
guuaacucacaguaguaaa

SEQ ID NO: 2156101 - RNA, 19 nt, Artificial Sequence
  Description of Artificial Sequence: Synthetic oligonucleotide
  Antisense strand to SEQ ID NO: 2156100
uuuacuacugugaguuaac

SEQ ID NO: 2156102 - RNA, 19 nt, Artificial Sequence
  Description of Artificial Sequence: Synthetic oligonucleotide
  Sense strand starting at position 1790 of SEQ ID NO: 1882902
cuuccauguugauaccgaa

SEQ ID NO: 2156103 - RNA, 19 nt, Artificial Sequence
  Description of Artificial Sequence: Synthetic oligonucleotide
  Antisense strand to SEQ ID NO: 2156102
uucgguaucaacauggaag

SEQ ID NO: 2156104 - RNA, 19 nt, Artificial Sequence
  Description of Artificial Sequence: Synthetic oligonucleotide
  Sense strand starting at position 1793 of SEQ ID NO: 1882902
ccauguugauaccgaauaa

SEQ ID NO: 2156105 - RNA, 19 nt, Artificial Sequence
  Description of Artificial Sequence: Synthetic oligonucleotide
  Antisense strand to SEQ ID NO: 2156104
uuauucgguaucaacaugg

SEQ ID NO: 2156106 - RNA, 19 nt, Artificial Sequence
  Description of Artificial Sequence: Synthetic oligonucleotide
  Sense strand starting at position 2222 of SEQ ID NO: 1882902
gagcgcaagugauguguga

SEQ ID NO: 2156107 - RNA, 19 nt, Artificial Sequence
  Description of Artificial Sequence: Synthetic oligonucleotide
  Antisense strand to SEQ ID NO: 2156106
ucacacaucacuugcgcuc

SEQ ID NO: 2156108 - RNA, 19 nt, Artificial Sequence
  Description of Artificial Sequence: Synthetic oligonucleotide
  Sense strand starting at position 2302 of SEQ ID NO: 1882902
ucgugucagcuggagguua

SEQ ID NO: 2156109 - RNA, 19 nt, Artificial Sequence
  Description of Artificial Sequence: Synthetic oligonucleotide
  Antisense strand to SEQ ID NO: 2156108
uaaccuccagcugacacga

SEQ ID NO: 2156110 - RNA, 19 nt, Artificial Sequence
  Description of Artificial Sequence: Synthetic oligonucleotide
  Sense strand starting at position 2492 of SEQ ID NO: 1882902
gaaggagguuccugcccua

SEQ ID NO: 2156111 - RNA, 19 nt, Artificial Sequence
  Description of Artificial Sequence: Synthetic oligonucleotide
  Antisense strand to SEQ ID NO: 2156110
uagggcaggaaccuccuuc

SEQ ID NO: 2156112 - RNA, 19 nt, Artificial Sequence
  Description of Artificial Sequence: Synthetic oligonucleotide
  Sense strand starting at position 2690 of SEQ ID NO: 1882902
cuccucguucuacagagaa

SEQ ID NO: 2156113 - RNA, 19 nt, Artificial Sequence
  Description of Artificial Sequence: Synthetic oligonucleotide
  Antisense strand to SEQ ID NO: 2156112
uucucuguagaacgaggag

SEQ ID NO: 2156114 - RNA, 19 nt, Artificial Sequence
  Description of Artificial Sequence: Synthetic oligonucleotide
  Sense strand starting at position 3469 of SEQ ID NO: 1882902
ugcugaauuucgcaagcaa

SEQ ID NO: 2156115 - RNA, 19 nt, Artificial Sequence
  Description of Artificial Sequence: Synthetic oligonucleotide
  Antisense strand to SEQ ID NO: 2156114
uugcuugcgaaauucagca

SEQ ID NO: 2156116 - RNA, 19 nt, Artificial Sequence
  Description of Artificial Sequence: Synthetic oligonucleotide
  Sense strand starting at position 3515 of SEQ ID NO: 1882902
cucuuaacccaagggugaa

SEQ ID NO: 2156117 - RNA, 19 nt, Artificial Sequence
  Description of Artificial Sequence: Synthetic oligonucleotide
  Antisense strand to SEQ ID NO: 2156116
uucacccuuggguuaagag

SEQ ID NO: 2156118 - RNA, 19 nt, Artificial Sequence
  Description of Artificial Sequence: Synthetic oligonucleotide
  Sense strand starting at position 157 of SEQ ID NO: 1882903
gcccacagccaauagaaau

SEQ ID NO: 2156119 - RNA, 19 nt, Artificial Sequence
  Description of Artificial Sequence: Synthetic oligonucleotide
  Antisense strand to SEQ ID NO: 2156118
auuucuauuggcugugggc

SEQ ID NO: 2156120 - RNA, 19 nt, Artificial Sequence
  Description of Artificial Sequence: Synthetic oligonucleotide
  Sense strand starting at position 188 of SEQ ID NO: 1882903
aucccaaauguuggcuuua

SEQ ID NO: 2156121 - RNA, 19 nt, Artificial Sequence
  Description of Artificial Sequence: Synthetic oligonucleotide
  Antisense strand to SEQ ID NO: 2156120
uaaagccaacauuugggau

SEQ ID NO: 2156122 - RNA, 19 nt, Artificial Sequence
  Description of Artificial Sequence: Synthetic oligonucleotide
  Sense strand starting at position 189 of SEQ ID NO: 1882903
ucccaaauguuggcuuuaa

SEQ ID NO: 2156123 - RNA, 19 nt, Artificial Sequence
  Description of Artificial Sequence: Synthetic oligonucleotide
  Antisense strand to SEQ ID NO: 2156122
uuaaagccaacauuuggga

SEQ ID NO: 2156124 - RNA, 19 nt, Artificial Sequence
  Description of Artificial Sequence: Synthetic oligonucleotide
  Sense strand starting at position 407 of SEQ ID NO: 1882903
cagcaaguugcagauaaua

SEQ ID NO: 2156125 - RNA, 19 nt, Artificial Sequence
  Description of Artificial Sequence: Synthetic oligonucleotide
  Antisense strand to SEQ ID NO: 2156124
uauuaucugcaacuugcug

SEQ ID NO: 2156126 - RNA, 19 nt, Artificial Sequence
  Description of Artificial Sequence: Synthetic oligonucleotide
  Sense strand starting at position 434 of SEQ ID NO: 1882903
cucagaagaucagaaauua

SEQ ID NO: 2156127 - RNA, 19 nt, Artificial Sequence
  Description of Artificial Sequence: Synthetic oligonucleotide
  Antisense strand to SEQ ID NO: 2156126
uaauuucugaucuucugag

SEQ ID NO: 2156128 - RNA, 19 nt, Artificial Sequence
  Description of Artificial Sequence: Synthetic oligonucleotide
  Sense strand starting at position 552 of SEQ ID NO: 1882903
uagagaaaguucuugcuug

SEQ ID NO: 2156129 - RNA, 19 nt, Artificial Sequence
  Description of Artificial Sequence: Synthetic oligonucleotide
  Antisense strand to SEQ ID NO: 2156128
caagcaagaacuuucucua

SEQ ID NO: 2156130 - RNA, 19 nt, Artificial Sequence
  Description of Artificial Sequence: Synthetic oligonucleotide
  Sense strand starting at position 556 of SEQ ID NO: 1882903
gaaaguucuugcuugauca

SEQ ID NO: 2156131 - RNA, 19 nt, Artificial Sequence
  Description of Artificial Sequence: Synthetic oligonucleotide
  Antisense strand to SEQ ID NO: 2156130
ugaucaagcaagaacuuuc

SEQ ID NO: 2156132 - RNA, 19 nt, Artificial Sequence
  Description of Artificial Sequence: Synthetic oligonucleotide
  Sense strand starting at position 558 of SEQ ID NO: 1882903
aaguucuugcuugaucaag

SEQ ID NO: 2156133 - RNA, 19 nt, Artificial Sequence
  Description of Artificial Sequence: Synthetic oligonucleotide
  Antisense strand to SEQ ID NO: 2156132
cuugaucaagcaagaacuu

SEQ ID NO: 2156134 - RNA, 19 nt, Artificial Sequence
  Description of Artificial Sequence: Synthetic oligonucleotide
  Sense strand starting at position 560 of SEQ ID NO: 1882903
guucuugcuugaucaaggu

SEQ ID NO: 2156135 - RNA, 19 nt, Artificial Sequence
  Description of Artificial Sequence: Synthetic oligonucleotide
  Antisense strand to SEQ ID NO: 2156134
accuugaucaagcaagaac

SEQ ID NO: 2156136 - RNA, 19 nt, Artificial Sequence
  Description of Artificial Sequence: Synthetic oligonucleotide
  Sense strand starting at position 576 of SEQ ID NO: 1882903
ggucacagauguucuaauu

SEQ ID NO: 2156137 - RNA, 19 nt, Artificial Sequence
  Description of Artificial Sequence: Synthetic oligonucleotide
  Antisense strand to SEQ ID NO: 2156136
aauuagaacaucugugacc

SEQ ID NO: 2156138 - RNA, 19 nt, Artificial Sequence
  Description of Artificial Sequence: Synthetic oligonucleotide
  Sense strand starting at position 672 of SEQ ID NO: 1882903
acauaaaucugagugcauc

SEQ ID NO: 2156139 - RNA, 19 nt, Artificial Sequence
  Description of Artificial Sequence: Synthetic oligonucleotide
  Antisense strand to SEQ ID NO: 2156138
gaugcacucagauuuaugu

SEQ ID NO: 2156140 - RNA, 19 nt, Artificial Sequence
  Description of Artificial Sequence: Synthetic oligonucleotide
  Sense strand starting at position 1016 of SEQ ID NO: 1882903
augcuaucaccuugagagg

SEQ ID NO: 2156141 - RNA, 19 nt, Artificial Sequence
  Description of Artificial Sequence: Synthetic oligonucleotide
  Antisense strand to SEQ ID NO: 2156140
ccucucaaggugauagcau

SEQ ID NO: 2156142 - RNA, 19 nt, Artificial Sequence
  Description of Artificial Sequence: Synthetic oligonucleotide
  Sense strand starting at position 1316 of SEQ ID NO: 1882903
gaauaaaucugagugcauc

SEQ ID NO: 2156143 - RNA, 19 nt, Artificial Sequence
  Description of Artificial Sequence: Synthetic oligonucleotide
  Antisense strand to SEQ ID NO: 2156142
gaugcacucagauuuauuc

SEQ ID NO: 2156144 - RNA, 19 nt, Artificial Sequence
  Description of Artificial Sequence: Synthetic oligonucleotide
  Sense strand starting at position 1437 of SEQ ID NO: 1882903
ucgcuaucaccagcgugaa

SEQ ID NO: 2156145 - RNA, 19 nt, Artificial Sequence
  Description of Artificial Sequence: Synthetic oligonucleotide
  Antisense strand to SEQ ID NO: 2156144
uucacgcuggugauagcga

SEQ ID NO: 2156146 - RNA, 19 nt, Artificial Sequence
  Description of Artificial Sequence: Synthetic oligonucleotide
  Sense strand starting at position 1440 of SEQ ID NO: 1882903
cuaucaccagcgugaagau

SEQ ID NO: 2156147 - RNA, 19 nt, Artificial Sequence
  Description of Artificial Sequence: Synthetic oligonucleotide
  Antisense strand to SEQ ID NO: 2156146
aucuucacgcuggugauag

SEQ ID NO: 2156148 - RNA, 19 nt, Artificial Sequence
  Description of Artificial Sequence: Synthetic oligonucleotide
  Sense strand starting at position 1521 of SEQ ID NO: 1882903
agacaaugaucuuugaguu

SEQ ID NO: 2156149 - RNA, 19 nt, Artificial Sequence
  Description of Artificial Sequence: Synthetic oligonucleotide
  Antisense strand to SEQ ID NO: 2156148
aacucaaagaucauugucu

SEQ ID NO: 2156150 - RNA, 19 nt, Artificial Sequence
  Description of Artificial Sequence: Synthetic oligonucleotide
  Sense strand starting at position 1522 of SEQ ID NO: 1882903
gacaaugaucuuugaguug

SEQ ID NO: 2156151 - RNA, 19 nt, Artificial Sequence
  Description of Artificial Sequence: Synthetic oligonucleotide
  Antisense strand to SEQ ID NO: 2156150
caacucaaagaucauuguc

SEQ ID NO: 2156152 - RNA, 19 nt, Artificial Sequence
  Description of Artificial Sequence: Synthetic oligonucleotide
  Sense strand starting at position 1525 of SEQ ID NO: 1882903
aaugaucuuugaguugcua

SEQ ID NO: 2156153 - RNA, 19 nt, Artificial Sequence
  Description of Artificial Sequence: Synthetic oligonucleotide
  Antisense strand to SEQ ID NO: 2156152
uagcaacucaaagaucauu

SEQ ID NO: 2156154 - RNA, 19 nt, Artificial Sequence
  Description of Artificial Sequence: Synthetic oligonucleotide
  Sense strand starting at position 1529 of SEQ ID NO: 1882903
aucuuugaguugcuaguaa

SEQ ID NO: 2156155 - RNA, 19 nt, Artificial Sequence
  Description of Artificial Sequence: Synthetic oligonucleotide
  Antisense strand to SEQ ID NO: 2156154
uuacuagcaacucaaagau

SEQ ID NO: 2156156 - RNA, 19 nt, Artificial Sequence
  Description of Artificial Sequence: Synthetic oligonucleotide
  Sense strand starting at position 1694 of SEQ ID NO: 1882903
agcaucagguaauugaaau

SEQ ID NO: 2156157 - RNA, 19 nt, Artificial Sequence
  Description of Artificial Sequence: Synthetic oligonucleotide
  Antisense strand to SEQ ID NO: 2156156
auuucaauuaccugaugcu

SEQ ID NO: 2156158 - RNA, 19 nt, Artificial Sequence
  Description of Artificial Sequence: Synthetic oligonucleotide
  Sense strand starting at position 1774 of SEQ ID NO: 1882903
aucuuaucaguuugacugu

SEQ ID NO: 2156159 - RNA, 19 nt, Artificial Sequence
  Description of Artificial Sequence: Synthetic oligonucleotide
  Antisense strand to SEQ ID NO: 2156158
acagucaaacugauaagau

SEQ ID NO: 2156160 - RNA, 19 nt, Artificial Sequence
  Description of Artificial Sequence: Synthetic oligonucleotide
  Sense strand starting at position 1777 of SEQ ID NO: 1882903
uuaucaguuugacugucau

SEQ ID NO: 2156161 - RNA, 19 nt, Artificial Sequence
  Description of Artificial Sequence: Synthetic oligonucleotide
  Antisense strand to SEQ ID NO: 2156160
augacagucaaacugauaa

SEQ ID NO: 2156162 - RNA, 19 nt, Artificial Sequence
  Description of Artificial Sequence: Synthetic oligonucleotide
  Sense strand starting at position 1788 of SEQ ID NO: 1882903
acugucauggccuaauaga

SEQ ID NO: 2156163 - RNA, 19 nt, Artificial Sequence
  Description of Artificial Sequence: Synthetic oligonucleotide
  Antisense strand to SEQ ID NO: 2156162
ucuauuaggccaugacagu

SEQ ID NO: 2156164 - RNA, 19 nt, Artificial Sequence
  Description of Artificial Sequence: Synthetic oligonucleotide
  Sense strand starting at position 1844 of SEQ ID NO: 1882903
uuuguacucccagacauac

SEQ ID NO: 2156165 - RNA, 19 nt, Artificial Sequence
  Description of Artificial Sequence: Synthetic oligonucleotide
  Antisense strand to SEQ ID NO: 2156164
guaugucugggaguacaaa

SEQ ID NO: 2156166 - RNA, 19 nt, Artificial Sequence
  Description of Artificial Sequence: Synthetic oligonucleotide
  Sense strand starting at position 1996 of SEQ ID NO: 1882903
uguuacgauuaaucucaaa

SEQ ID NO: 2156167 - RNA, 19 nt, Artificial Sequence
  Description of Artificial Sequence: Synthetic oligonucleotide
  Antisense strand to SEQ ID NO: 2156166
uuugagauuaaucguaaca

SEQ ID NO: 2156168 - RNA, 19 nt, Artificial Sequence
  Description of Artificial Sequence: Synthetic oligonucleotide
  Sense strand starting at position 2029 of SEQ ID NO: 1882903
agcugagauaaauguguca

SEQ ID NO: 2156169 - RNA, 19 nt, Artificial Sequence
  Description of Artificial Sequence: Synthetic oligonucleotide
  Antisense strand to SEQ ID NO: 2156168
ugacacauuuaucucagcu

SEQ ID NO: 2156170 - RNA, 19 nt, Artificial Sequence
  Description of Artificial Sequence: Synthetic oligonucleotide
  Sense strand starting at position 2032 of SEQ ID NO: 1882903
ugagauaaaugugucauau

SEQ ID NO: 2156171 - RNA, 19 nt, Artificial Sequence
  Description of Artificial Sequence: Synthetic oligonucleotide
  Antisense strand to SEQ ID NO: 2156170
auaugacacauuuaucuca

SEQ ID NO: 2156172 - RNA, 19 nt, Artificial Sequence
  Description of Artificial Sequence: Synthetic oligonucleotide
  Sense strand starting at position 2042 of SEQ ID NO: 1882903
gugucauauuuaugcauuu

SEQ ID NO: 2156173 - RNA, 19 nt, Artificial Sequence
  Description of Artificial Sequence: Synthetic oligonucleotide
  Antisense strand to SEQ ID NO: 2156172
aaaugcauaaauaugacac

SEQ ID NO: 2156174 - RNA, 19 nt, Artificial Sequence
  Description of Artificial Sequence: Synthetic oligonucleotide
  Sense strand starting at position 2573 of SEQ ID NO: 1882903
agcauagaguuagucaauu

SEQ ID NO: 2156175 - RNA, 19 nt, Artificial Sequence
  Description of Artificial Sequence: Synthetic oligonucleotide
  Antisense strand to SEQ ID NO: 2156174
aauugacuaacucuaugcu

SEQ ID NO: 2156176 - RNA, 19 nt, Artificial Sequence
  Description of Artificial Sequence: Synthetic oligonucleotide
  Sense strand starting at position 2605 of SEQ ID NO: 1882903
ggaucacaaucucugugaa

SEQ ID NO: 2156177 - RNA, 19 nt, Artificial Sequence
  Description of Artificial Sequence: Synthetic oligonucleotide
  Antisense strand to SEQ ID NO: 2156176
uucacagagauugugaucc

SEQ ID NO: 2156178 - RNA, 19 nt, Artificial Sequence
  Description of Artificial Sequence: Synthetic oligonucleotide
  Sense strand starting at position 2640 of SEQ ID NO: 1882903
cuacauaaucgauacgcuu

SEQ ID NO: 2156179 - RNA, 19 nt, Artificial Sequence
  Description of Artificial Sequence: Synthetic oligonucleotide
  Antisense strand to SEQ ID NO: 2156178
aagcguaucgauuauguag

SEQ ID NO: 2156180 - RNA, 19 nt, Artificial Sequence
  Description of Artificial Sequence: Synthetic oligonucleotide
  Sense strand starting at position 2787 of SEQ ID NO: 1882903
uuucucuuucucugaguca

SEQ ID NO: 2156181 - RNA, 19 nt, Artificial Sequence
  Description of Artificial Sequence: Synthetic oligonucleotide
  Antisense strand to SEQ ID NO: 2156180
ugacucagagaaagagaaa

SEQ ID NO: 2156182 - RNA, 19 nt, Artificial Sequence
  Description of Artificial Sequence: Synthetic oligonucleotide
  Sense strand starting at position 2891 of SEQ ID NO: 1882903
cugcuauaaccagaaagca

SEQ ID NO: 2156183 - RNA, 19 nt, Artificial Sequence
  Description of Artificial Sequence: Synthetic oligonucleotide
  Antisense strand to SEQ ID NO: 2156182
ugcuuucugguuauagcag

SEQ ID NO: 2156184 - RNA, 19 nt, Artificial Sequence
  Description of Artificial Sequence: Synthetic oligonucleotide
  Sense strand starting at position 2934 of SEQ ID NO: 1882903
aaaugaggcuguguuccaa

SEQ ID NO: 2156185 - RNA, 19 nt, Artificial Sequence
  Description of Artificial Sequence: Synthetic oligonucleotide
  Antisense strand to SEQ ID NO: 2156184
uuggaacacagccucauuu

SEQ ID NO: 2156186 - RNA, 19 nt, Artificial Sequence
  Description of Artificial Sequence: Synthetic oligonucleotide
  Sense strand starting at position 3443 of SEQ ID NO: 1882903
acgugugacugguuuccaa

SEQ ID NO: 2156187 - RNA, 19 nt, Artificial Sequence
  Description of Artificial Sequence: Synthetic oligonucleotide
  Antisense strand to SEQ ID NO: 2156186
uuggaaaccagucacacgu

SEQ ID NO: 2156188 - RNA, 19 nt, Artificial Sequence
  Description of Artificial Sequence: Synthetic oligonucleotide
  Sense strand starting at position 3446 of SEQ ID NO: 1882903
ugugacugguuuccaaacu

SEQ ID NO: 2156189 - RNA, 19 nt, Artificial Sequence
  Description of Artificial Sequence: Synthetic oligonucleotide
  Antisense strand to SEQ ID NO: 2156188
aguuuggaaaccagucaca

SEQ ID NO: 2156190 - RNA, 19 nt, Artificial Sequence
  Description of Artificial Sequence: Synthetic oligonucleotide
  Sense strand starting at position 3554 of SEQ ID NO: 1882903
auaaauucuguuuguagcu

SEQ ID NO: 2156191 - RNA, 19 nt, Artificial Sequence
  Description of Artificial Sequence: Synthetic oligonucleotide
  Antisense strand to SEQ ID NO: 2156190
agcuacaaacagaauuuau

SEQ ID NO: 2156192 - RNA, 19 nt, Artificial Sequence
  Description of Artificial Sequence: Synthetic oligonucleotide
  Sense strand starting at position 3616 of SEQ ID NO: 1882903
gauggagacuugguuucua

SEQ ID NO: 2156193 - RNA, 19 nt, Artificial Sequence
  Description of Artificial Sequence: Synthetic oligonucleotide
  Antisense strand to SEQ ID NO: 2156192
uagaaaccaagucuccauc

SEQ ID NO: 2156194 - RNA, 19 nt, Artificial Sequence
  Description of Artificial Sequence: Synthetic oligonucleotide
  Sense strand starting at position 3651 of SEQ ID NO: 1882903
aaaguaucccgagaagcug

SEQ ID NO: 2156195 - RNA, 19 nt, Artificial Sequence
  Description of Artificial Sequence: Synthetic oligonucleotide
  Antisense strand to SEQ ID NO: 2156194
cagcuucucgggauacuuu

SEQ ID NO: 2156196 - RNA, 19 nt, Artificial Sequence
  Description of Artificial Sequence: Synthetic oligonucleotide
  Sense strand starting at position 3657 of SEQ ID NO: 1882903
ucccgagaagcuggugaaa

SEQ ID NO: 2156197 - RNA, 19 nt, Artificial Sequence
  Description of Artificial Sequence: Synthetic oligonucleotide
  Antisense strand to SEQ ID NO: 2156196
uuucaccagcuucucggga

SEQ ID NO: 2156198 - RNA, 19 nt, Artificial Sequence
  Description of Artificial Sequence: Synthetic oligonucleotide
  Sense strand starting at position 8 of SEQ ID NO: 1882904
aguguuaacucuccaaacu

SEQ ID NO: 2156199 - RNA, 19 nt, Artificial Sequence
  Description of Artificial Sequence: Synthetic oligonucleotide
  Antisense strand to SEQ ID NO: 2156198
aguuuggagaguuaacacu

SEQ ID NO: 2156200 - RNA, 19 nt, Artificial Sequence
  Description of Artificial Sequence: Synthetic oligonucleotide
  Sense strand starting at position 9 of SEQ ID NO: 1882904
guguuaacucuccaaacua

SEQ ID NO: 2156201 - RNA, 19 nt, Artificial Sequence
  Description of Artificial Sequence: Synthetic oligonucleotide
  Antisense strand to SEQ ID NO: 2156200
uaguuuggagaguuaacac

SEQ ID NO: 2156202 - RNA, 19 nt, Artificial Sequence
  Description of Artificial Sequence: Synthetic oligonucleotide
  Sense strand starting at position 71 of SEQ ID NO: 1882904
aaugguccugugugaccaa

SEQ ID NO: 2156203 - RNA, 19 nt, Artificial Sequence
  Description of Artificial Sequence: Synthetic oligonucleotide
  Antisense strand to SEQ ID NO: 2156202
uuggucacacaggaccauu

SEQ ID NO: 2156204 - RNA, 19 nt, Artificial Sequence
  Description of Artificial Sequence: Synthetic oligonucleotide
  Sense strand starting at position 74 of SEQ ID NO: 1882904
gguccugugugaccaagaa

SEQ ID NO: 2156205 - RNA, 19 nt, Artificial Sequence
  Description of Artificial Sequence: Synthetic oligonucleotide
  Antisense strand to SEQ ID NO: 2156204
uucuuggucacacaggacc

SEQ ID NO: 2156206 - RNA, 19 nt, Artificial Sequence
  Description of Artificial Sequence: Synthetic oligonucleotide
  Sense strand starting at position 107 of SEQ ID NO: 1882904
augcccuaaguguaauauu

SEQ ID NO: 2156207 - RNA, 19 nt, Artificial Sequence
  Description of Artificial Sequence: Synthetic oligonucleotide
  Antisense strand to SEQ ID NO: 2156206
aauauuacacuuagggcau

SEQ ID NO: 2156208 - RNA, 19 nt, Artificial Sequence
  Description of Artificial Sequence: Synthetic oligonucleotide
  Sense strand starting at position 157 of SEQ ID NO: 1882904
auggcaucucauuauguaa

SEQ ID NO: 2156209 - RNA, 19 nt, Artificial Sequence
  Description of Artificial Sequence: Synthetic oligonucleotide
  Antisense strand to SEQ ID NO: 2156208
uuacauaaugagaugccau

SEQ ID NO: 2156210 - RNA, 19 nt, Artificial Sequence
  Description of Artificial Sequence: Synthetic oligonucleotide
  Sense strand starting at position 259 of SEQ ID NO: 1882904
gcuauuguuacacaguagu

SEQ ID NO: 2156211 - RNA, 19 nt, Artificial Sequence
  Description of Artificial Sequence: Synthetic oligonucleotide
  Antisense strand to SEQ ID NO: 2156210
acuacuguguaacaauagc

SEQ ID NO: 2156212 - RNA, 19 nt, Artificial Sequence
  Description of Artificial Sequence: Synthetic oligonucleotide
  Sense strand starting at position 350 of SEQ ID NO: 1882904
aguucucagccagguaaau

SEQ ID NO: 2156213 - RNA, 19 nt, Artificial Sequence
  Description of Artificial Sequence: Synthetic oligonucleotide
  Antisense strand to SEQ ID NO: 2156212
auuuaccuggcugagaacu

SEQ ID NO: 2156214 - RNA, 19 nt, Artificial Sequence
  Description of Artificial Sequence: Synthetic oligonucleotide
  Sense strand starting at position 571 of SEQ ID NO: 1882904
ucuaaagugguacaguauu

SEQ ID NO: 2156215 - RNA, 19 nt, Artificial Sequence
  Description of Artificial Sequence: Synthetic oligonucleotide
  Antisense strand to SEQ ID NO: 2156214
aauacuguaccacuuuaga

SEQ ID NO: 2156216 - RNA, 19 nt, Artificial Sequence
  Description of Artificial Sequence: Synthetic oligonucleotide
  Sense strand starting at position 676 of SEQ ID NO: 1882904
ugguuuguaugaccacaga

SEQ ID NO: 2156217 - RNA, 19 nt, Artificial Sequence
  Description of Artificial Sequence: Synthetic oligonucleotide
  Antisense strand to SEQ ID NO: 2156216
ucuguggucauacaaacca

SEQ ID NO: 2156218 - RNA, 19 nt, Artificial Sequence
  Description of Artificial Sequence: Synthetic oligonucleotide
  Sense strand starting at position 947 of SEQ ID NO: 1882904
ugauguccuagagggauga

SEQ ID NO: 2156219 - RNA, 19 nt, Artificial Sequence
  Description of Artificial Sequence: Synthetic oligonucleotide
  Antisense strand to SEQ ID NO: 2156218
ucaucccucuaggacauca

SEQ ID NO: 2156220 - RNA, 19 nt, Artificial Sequence
  Description of Artificial Sequence: Synthetic oligonucleotide
  Sense strand starting at position 960 of SEQ ID NO: 1882904
ggaugagggcuccauuauu

SEQ ID NO: 2156221 - RNA, 19 nt, Artificial Sequence
  Description of Artificial Sequence: Synthetic oligonucleotide
  Antisense strand to SEQ ID NO: 2156220
aauaauggagcccucaucc

SEQ ID NO: 2156222 - RNA, 19 nt, Artificial Sequence
  Description of Artificial Sequence: Synthetic oligonucleotide
  Sense strand starting at position 1024 of SEQ ID NO: 1882904
acuccaggucucugugaga

SEQ ID NO: 2156223 - RNA, 19 nt, Artificial Sequence
  Description of Artificial Sequence: Synthetic oligonucleotide
  Antisense strand to SEQ ID NO: 2156222
ucucacagagaccuggagu

SEQ ID NO: 2156224 - RNA, 19 nt, Artificial Sequence
  Description of Artificial Sequence: Synthetic oligonucleotide
  Sense strand starting at position 1135 of SEQ ID NO: 1882904
agauuaccgucuuuaagag

SEQ ID NO: 2156225 - RNA, 19 nt, Artificial Sequence
  Description of Artificial Sequence: Synthetic oligonucleotide
  Antisense strand to SEQ ID NO: 2156224
cucuuaaagacgguaaucu

SEQ ID NO: 2156226 - RNA, 19 nt, Artificial Sequence
  Description of Artificial Sequence: Synthetic oligonucleotide
  Sense strand starting at position 1136 of SEQ ID NO: 1882904
gauuaccgucuuuaagaga

SEQ ID NO: 2156227 - RNA, 19 nt, Artificial Sequence
  Description of Artificial Sequence: Synthetic oligonucleotide
  Antisense strand to SEQ ID NO: 2156226
ucucuuaaagacgguaauc

SEQ ID NO: 2156228 - RNA, 19 nt, Artificial Sequence
  Description of Artificial Sequence: Synthetic oligonucleotide
  Sense strand starting at position 1215 of SEQ ID NO: 1882904
caggauagcgcuugaccau

SEQ ID NO: 2156229 - RNA, 19 nt, Artificial Sequence
  Description of Artificial Sequence: Synthetic oligonucleotide
  Antisense strand to SEQ ID NO: 2156228
auggucaagcgcuauccug

SEQ ID NO: 2156230 - RNA, 19 nt, Artificial Sequence
  Description of Artificial Sequence: Synthetic oligonucleotide
  Sense strand starting at position 1216 of SEQ ID NO: 1882904
aggauagcgcuugaccauu

SEQ ID NO: 2156231 - RNA, 19 nt, Artificial Sequence
  Description of Artificial Sequence: Synthetic oligonucleotide
  Antisense strand to SEQ ID NO: 2156230
aauggucaagcgcuauccu

SEQ ID NO: 2156232 - RNA, 19 nt, Artificial Sequence
  Description of Artificial Sequence: Synthetic oligonucleotide
  Sense strand starting at position 1218 of SEQ ID NO: 1882904
gauagcgcuugaccauuua

SEQ ID NO: 2156233 - RNA, 19 nt, Artificial Sequence
  Description of Artificial Sequence: Synthetic oligonucleotide
  Antisense strand to SEQ ID NO: 2156232
uaaauggucaagcgcuauc

SEQ ID NO: 2156234 - RNA, 19 nt, Artificial Sequence
  Description of Artificial Sequence: Synthetic oligonucleotide
  Sense strand starting at position 1253 of SEQ ID NO: 1882904
augacaauaucagaaugaa

SEQ ID NO: 2156235 - RNA, 19 nt, Artificial Sequence
  Description of Artificial Sequence: Synthetic oligonucleotide
  Antisense strand to SEQ ID NO: 2156234
uucauucugauauugucau

SEQ ID NO: 2156236 - RNA, 19 nt, Artificial Sequence
  Description of Artificial Sequence: Synthetic oligonucleotide
  Sense strand starting at position 1699 of SEQ ID NO: 1882904
aagaucuugccgugauuga

SEQ ID NO: 2156237 - RNA, 19 nt, Artificial Sequence
  Description of Artificial Sequence: Synthetic oligonucleotide
  Antisense strand to SEQ ID NO: 2156236
ucaaucacggcaagaucuu

SEQ ID NO: 2156238 - RNA, 19 nt, Artificial Sequence
  Description of Artificial Sequence: Synthetic oligonucleotide
  Sense strand starting at position 1700 of SEQ ID NO: 1882904
agaucuugccgugauugaa

SEQ ID NO: 2156239 - RNA, 19 nt, Artificial Sequence
  Description of Artificial Sequence: Synthetic oligonucleotide
  Antisense strand to SEQ ID NO: 2156238
uucaaucacggcaagaucu

SEQ ID NO: 2156240 - RNA, 19 nt, Artificial Sequence
  Description of Artificial Sequence: Synthetic oligonucleotide
  Sense strand starting at position 2476 of SEQ ID NO: 1882904
ucuagaaccugcuuauaga

SEQ ID NO: 2156241 - RNA, 19 nt, Artificial Sequence
  Description of Artificial Sequence: Synthetic oligonucleotide
  Antisense strand to SEQ ID NO: 2156240
ucuauaagcagguucuaga

SEQ ID NO: 2156242 - RNA, 19 nt, Artificial Sequence
  Description of Artificial Sequence: Synthetic oligonucleotide
  Sense strand starting at position 2831 of SEQ ID NO: 1882904
ggaccuugccggcaggaaa

SEQ ID NO: 2156243 - RNA, 19 nt, Artificial Sequence
  Description of Artificial Sequence: Synthetic oligonucleotide
  Antisense strand to SEQ ID NO: 2156242
uuuccugccggcaaggucc

SEQ ID NO: 2156244 - RNA, 19 nt, Artificial Sequence
  Description of Artificial Sequence: Synthetic oligonucleotide
  Sense strand starting at position 2843 of SEQ ID NO: 1882904
caggaaauuugcgaagaaa

SEQ ID NO: 2156245 - RNA, 19 nt, Artificial Sequence
  Description of Artificial Sequence: Synthetic oligonucleotide
  Antisense strand to SEQ ID NO: 2156244
uuucuucgcaaauuuccug

SEQ ID NO: 2156246 - RNA, 19 nt, Artificial Sequence
  Description of Artificial Sequence: Synthetic oligonucleotide
  Sense strand starting at position 3160 of SEQ ID NO: 1882904
ucgcuaggcaauugagauu

SEQ ID NO: 2156247 - RNA, 19 nt, Artificial Sequence
  Description of Artificial Sequence: Synthetic oligonucleotide
  Antisense strand to SEQ ID NO: 2156246
aaucucaauugccuagcga

SEQ ID NO: 2156248 - RNA, 19 nt, Artificial Sequence
  Description of Artificial Sequence: Synthetic oligonucleotide
  Sense strand starting at position 3242 of SEQ ID NO: 1882904
cuguuaguguaaguaaaca

SEQ ID NO: 2156249 - RNA, 19 nt, Artificial Sequence
  Description of Artificial Sequence: Synthetic oligonucleotide
  Antisense strand to SEQ ID NO: 2156248
uguuuacuuacacuaacag

SEQ ID NO: 2156250 - RNA, 19 nt, Artificial Sequence
  Description of Artificial Sequence: Synthetic oligonucleotide
  Sense strand starting at position 3673 of SEQ ID NO: 1882904
cauggcaaaguauguuuaa

SEQ ID NO: 2156251 - RNA, 19 nt, Artificial Sequence
  Description of Artificial Sequence: Synthetic oligonucleotide
  Antisense strand to SEQ ID NO: 2156250
uuaaacauacuuugccaug

SEQ ID NO: 2156252 - RNA, 19 nt, Artificial Sequence
  Description of Artificial Sequence: Synthetic oligonucleotide
  Sense strand starting at position 3674 of SEQ ID NO: 1882904
auggcaaaguauguuuaau

SEQ ID NO: 2156253 - RNA, 19 nt, Artificial Sequence
  Description of Artificial Sequence: Synthetic oligonucleotide
  Antisense strand to SEQ ID NO: 2156252
auuaaacauacuuugccau

SEQ ID NO: 2156254 - RNA, 19 nt, Artificial Sequence
  Description of Artificial Sequence: Synthetic oligonucleotide
  Sense strand starting at position 3676 of SEQ ID NO: 1882904
ggcaaaguauguuuaauaa

SEQ ID NO: 2156255 - RNA, 19 nt, Artificial Sequence
  Description of Artificial Sequence: Synthetic oligonucleotide
  Antisense strand to SEQ ID NO: 2156254
uuauuaaacauacuuugcc

SEQ ID NO: 2156256 - RNA, 19 nt, Artificial Sequence
  Description of Artificial Sequence: Synthetic oligonucleotide
  Sense strand starting at position 3726 of SEQ ID NO: 1882904
cugacuacccucugugacu

SEQ ID NO: 2156257 - RNA, 19 nt, Artificial Sequence
  Description of Artificial Sequence: Synthetic oligonucleotide
  Antisense strand to SEQ ID NO: 2156256
agucacagaggguagucag

SEQ ID NO: 2156258 - RNA, 19 nt, Artificial Sequence
  Description of Artificial Sequence: Synthetic oligonucleotide
  Sense strand starting at position 3727 of SEQ ID NO: 1882904
ugacuacccucugugacuu

SEQ ID NO: 2156259 - RNA, 19 nt, Artificial Sequence
  Description of Artificial Sequence: Synthetic oligonucleotide
  Antisense strand to SEQ ID NO: 2156258
aagucacagaggguaguca

SEQ ID NO: 2156260 - RNA, 19 nt, Artificial Sequence
  Description of Artificial Sequence: Synthetic oligonucleotide
  Sense strand starting at position 3766 of SEQ ID NO: 1882904
cuaauaagguuucucuuga

SEQ ID NO: 2156261 - RNA, 19 nt, Artificial Sequence
  Description of Artificial Sequence: Synthetic oligonucleotide
  Antisense strand to SEQ ID NO: 2156260
ucaagagaaaccuuauuag

SEQ ID NO: 2156262 - RNA, 19 nt, Artificial Sequence
  Description of Artificial Sequence: Synthetic oligonucleotide
  Sense strand starting at position 3786 of SEQ ID NO: 1882904
gaugaaaugccguagaaug

SEQ ID NO: 2156263 - RNA, 19 nt, Artificial Sequence
  Description of Artificial Sequence: Synthetic oligonucleotide
  Antisense strand to SEQ ID NO: 2156262
cauucuacggcauuucauc

SEQ ID NO: 2156264 - RNA, 19 nt, Artificial Sequence
  Description of Artificial Sequence: Synthetic oligonucleotide
  Sense strand starting at position 3898 of SEQ ID NO: 1882904
acugaugcuguauaacauu

SEQ ID NO: 2156265 - RNA, 19 nt, Artificial Sequence
  Description of Artificial Sequence: Synthetic oligonucleotide
  Antisense strand to SEQ ID NO: 2156264
aauguuauacagcaucagu

SEQ ID NO: 2156266 - RNA, 19 nt, Artificial Sequence
  Description of Artificial Sequence: Synthetic oligonucleotide
  Sense strand starting at position 3925 of SEQ ID NO: 1882904
ccaguacuauaguuugcaa

SEQ ID NO: 2156267 - RNA, 19 nt, Artificial Sequence
  Description of Artificial Sequence: Synthetic oligonucleotide
  Antisense strand to SEQ ID NO: 2156266
uugcaaacuauaguacugg

SEQ ID NO: 2156268 - RNA, 19 nt, Artificial Sequence
  Description of Artificial Sequence: Synthetic oligonucleotide
  Sense strand starting at position 3927 of SEQ ID NO: 1882904
aguacuauaguuugcaaga

SEQ ID NO: 2156269 - RNA, 19 nt, Artificial Sequence
  Description of Artificial Sequence: Synthetic oligonucleotide
  Antisense strand to SEQ ID NO: 2156268
ucuugcaaacuauaguacu

SEQ ID NO: 2156270 - RNA, 19 nt, Artificial Sequence
  Description of Artificial Sequence: Synthetic oligonucleotide
  Sense strand starting at position 3928 of SEQ ID NO: 1882904
guacuauaguuugcaagag

SEQ ID NO: 2156271 - RNA, 19 nt, Artificial Sequence
  Description of Artificial Sequence: Synthetic oligonucleotide
  Antisense strand to SEQ ID NO: 2156270
cucuugcaaacuauaguac

SEQ ID NO: 2156272 - RNA, 19 nt, Artificial Sequence
  Description of Artificial Sequence: Synthetic oligonucleotide
  Sense strand starting at position 3937 of SEQ ID NO: 1882904
uuugcaagagacuguuuaa

SEQ ID NO: 2156273 - RNA, 19 nt, Artificial Sequence
  Description of Artificial Sequence: Synthetic oligonucleotide
  Antisense strand to SEQ ID NO: 2156272
uuaaacagucucuugcaaa

SEQ ID NO: 2156274 - RNA, 19 nt, Artificial Sequence
  Description of Artificial Sequence: Synthetic oligonucleotide
  Sense strand starting at position 3940 of SEQ ID NO: 1882904
gcaagagacuguuuaaagc

SEQ ID NO: 2156275 - RNA, 19 nt, Artificial Sequence
  Description of Artificial Sequence: Synthetic oligonucleotide
  Antisense strand to SEQ ID NO: 2156274
gcuuuaaacagucucuugc

SEQ ID NO: 2156276 - RNA, 19 nt, Artificial Sequence
  Description of Artificial Sequence: Synthetic oligonucleotide
  Sense strand starting at position 3969 of SEQ ID NO: 1882904
ucagaaugucaacaugcua

SEQ ID NO: 2156277 - RNA, 19 nt, Artificial Sequence
  Description of Artificial Sequence: Synthetic oligonucleotide
  Antisense strand to SEQ ID NO: 2156276
uagcauguugacauucuga

SEQ ID NO: 2156278 - RNA, 19 nt, Artificial Sequence
  Description of Artificial Sequence: Synthetic oligonucleotide
  Sense strand starting at position 92 of SEQ ID NO: 1882905
auggauuuaugagacaauu

SEQ ID NO: 2156279 - RNA, 19 nt, Artificial Sequence
  Description of Artificial Sequence: Synthetic oligonucleotide
  Antisense strand to SEQ ID NO: 2156278
aauugucucauaaauccau

SEQ ID NO: 2156280 - RNA, 19 nt, Artificial Sequence
  Description of Artificial Sequence: Synthetic oligonucleotide
  Sense strand starting at position 349 of SEQ ID NO: 1882905
gcagaaauagcuuagcaga

SEQ ID NO: 2156281 - RNA, 19 nt, Artificial Sequence
  Description of Artificial Sequence: Synthetic oligonucleotide
  Antisense strand to SEQ ID NO: 2156280
ucugcuaagcuauuucugc

SEQ ID NO: 2156282 - RNA, 19 nt, Artificial Sequence
  Description of Artificial Sequence: Synthetic oligonucleotide
  Sense strand starting at position 354 of SEQ ID NO: 1882905
aauagcuuagcagaguuua

SEQ ID NO: 2156283 - RNA, 19 nt, Artificial Sequence
  Description of Artificial Sequence: Synthetic oligonucleotide
  Antisense strand to SEQ ID NO: 2156282
uaaacucugcuaagcuauu

SEQ ID NO: 2156284 - RNA, 19 nt, Artificial Sequence
  Description of Artificial Sequence: Synthetic oligonucleotide
  Sense strand starting at position 359 of SEQ ID NO: 1882905
cuuagcagaguuuaaauau

SEQ ID NO: 2156285 - RNA, 19 nt, Artificial Sequence
  Description of Artificial Sequence: Synthetic oligonucleotide
  Antisense strand to SEQ ID NO: 2156284
auauuuaaacucugcuaag

SEQ ID NO: 2156286 - RNA, 19 nt, Artificial Sequence
  Description of Artificial Sequence: Synthetic oligonucleotide
  Sense strand starting at position 615 of SEQ ID NO: 1882905
aguugauuacucuaaguuu

SEQ ID NO: 2156287 - RNA, 19 nt, Artificial Sequence
  Description of Artificial Sequence: Synthetic oligonucleotide
  Antisense strand to SEQ ID NO: 2156286
aaacuuagaguaaucaacu

SEQ ID NO: 2156288 - RNA, 19 nt, Artificial Sequence
  Description of Artificial Sequence: Synthetic oligonucleotide
  Sense strand starting at position 642 of SEQ ID NO: 1882905
acaucagcugaaugagaua

SEQ ID NO: 2156289 - RNA, 19 nt, Artificial Sequence
  Description of Artificial Sequence: Synthetic oligonucleotide
  Antisense strand to SEQ ID NO: 2156288
uaucucauucagcugaugu

SEQ ID NO: 2156290 - RNA, 19 nt, Artificial Sequence
  Description of Artificial Sequence: Synthetic oligonucleotide
  Sense strand starting at position 683 of SEQ ID NO: 1882905
uguguaucugacuacauua

SEQ ID NO: 2156291 - RNA, 19 nt, Artificial Sequence
  Description of Artificial Sequence: Synthetic oligonucleotide
  Antisense strand to SEQ ID NO: 2156290
uaauguagucagauacaca

SEQ ID NO: 2156292 - RNA, 19 nt, Artificial Sequence
  Description of Artificial Sequence: Synthetic oligonucleotide
  Sense strand starting at position 685 of SEQ ID NO: 1882905
uguaucugacuacauuauu

SEQ ID NO: 2156293 - RNA, 19 nt, Artificial Sequence
  Description of Artificial Sequence: Synthetic oligonucleotide
  Antisense strand to SEQ ID NO: 2156292
aauaauguagucagauaca

SEQ ID NO: 2156294 - RNA, 19 nt, Artificial Sequence
  Description of Artificial Sequence: Synthetic oligonucleotide
  Sense strand starting at position 697 of SEQ ID NO: 1882905
cauuauuagguugagcuua

SEQ ID NO: 2156295 - RNA, 19 nt, Artificial Sequence
  Description of Artificial Sequence: Synthetic oligonucleotide
  Antisense strand to SEQ ID NO: 2156294
uaagcucaaccuaauaaug

SEQ ID NO: 2156296 - RNA, 19 nt, Artificial Sequence
  Description of Artificial Sequence: Synthetic oligonucleotide
  Sense strand starting at position 702 of SEQ ID NO: 1882905
uuagguugagcuuaaaucu

SEQ ID NO: 2156297 - RNA, 19 nt, Artificial Sequence
  Description of Artificial Sequence: Synthetic oligonucleotide
  Antisense strand to SEQ ID NO: 2156296
agauuuaagcucaaccuaa

SEQ ID NO: 2156298 - RNA, 19 nt, Artificial Sequence
  Description of Artificial Sequence: Synthetic oligonucleotide
  Sense strand starting at position 935 of SEQ ID NO: 1882905
guaucuuaugauugaucug

SEQ ID NO: 2156299 - RNA, 19 nt, Artificial Sequence
  Description of Artificial Sequence: Synthetic oligonucleotide
  Antisense strand to SEQ ID NO: 2156298
cagaucaaucauaagauac

SEQ ID NO: 2156300 - RNA, 19 nt, Artificial Sequence
  Description of Artificial Sequence: Synthetic oligonucleotide
  Sense strand starting at position 985 of SEQ ID NO: 1882905
ugugauuuguacguuacua

SEQ ID NO: 2156301 - RNA, 19 nt, Artificial Sequence
  Description of Artificial Sequence: Synthetic oligonucleotide
  Antisense strand to SEQ ID NO: 2156300
uaguaacguacaaaucaca

SEQ ID NO: 2156302 - RNA, 19 nt, Artificial Sequence
  Description of Artificial Sequence: Synthetic oligonucleotide
  Sense strand starting at position 1504 of SEQ ID NO: 1882905
cuugccucagaauaaugau

SEQ ID NO: 2156303 - RNA, 19 nt, Artificial Sequence
  Description of Artificial Sequence: Synthetic oligonucleotide
  Antisense strand to SEQ ID NO: 2156302
aucauuauucugaggcaag

SEQ ID NO: 2156304 - RNA, 19 nt, Artificial Sequence
  Description of Artificial Sequence: Synthetic oligonucleotide
  Sense strand starting at position 2057 of SEQ ID NO: 1882905
caccgaagacuguaucauc

SEQ ID NO: 2156305 - RNA, 19 nt, Artificial Sequence
  Description of Artificial Sequence: Synthetic oligonucleotide
  Antisense strand to SEQ ID NO: 2156304
gaugauacagucuucggug

SEQ ID NO: 2156306 - RNA, 19 nt, Artificial Sequence
  Description of Artificial Sequence: Synthetic oligonucleotide
  Sense strand starting at position 2068 of SEQ ID NO: 1882905
guaucaucagcugaacucu

SEQ ID NO: 2156307 - RNA, 19 nt, Artificial Sequence
  Description of Artificial Sequence: Synthetic oligonucleotide
  Antisense strand to SEQ ID NO: 2156306
agaguucagcugaugauac

SEQ ID NO: 2156308 - RNA, 19 nt, Artificial Sequence
  Description of Artificial Sequence: Synthetic oligonucleotide
  Sense strand starting at position 2140 of SEQ ID NO: 1882905
aaacuuuaacagugauggu

SEQ ID NO: 2156309 - RNA, 19 nt, Artificial Sequence
  Description of Artificial Sequence: Synthetic oligonucleotide
  Antisense strand to SEQ ID NO: 2156308
accaucacuguuaaaguuu

SEQ ID NO: 2156310 - RNA, 19 nt, Artificial Sequence
  Description of Artificial Sequence: Synthetic oligonucleotide
  Sense strand starting at position 2345 of SEQ ID NO: 1882905
gccuuaaaggcuuaguaaa

SEQ ID NO: 2156311 - RNA, 19 nt, Artificial Sequence
  Description of Artificial Sequence: Synthetic oligonucleotide
  Antisense strand to SEQ ID NO: 2156310
uuuacuaagccuuuaaggc

SEQ ID NO: 2156312 - RNA, 19 nt, Artificial Sequence
  Description of Artificial Sequence: Synthetic oligonucleotide
  Sense strand starting at position 2376 of SEQ ID NO: 1882905
ucagacuuugggugacaua

SEQ ID NO: 2156313 - RNA, 19 nt, Artificial Sequence
  Description of Artificial Sequence: Synthetic oligonucleotide
  Antisense strand to SEQ ID NO: 2156312
uaugucacccaaagucuga

SEQ ID NO: 2156314 - RNA, 19 nt, Artificial Sequence
  Description of Artificial Sequence: Synthetic oligonucleotide
  Sense strand starting at position 2388 of SEQ ID NO: 1882905
ugacauaauugcuuucuga

SEQ ID NO: 2156315 - RNA, 19 nt, Artificial Sequence
  Description of Artificial Sequence: Synthetic oligonucleotide
  Antisense strand to SEQ ID NO: 2156314
ucagaaagcaauuauguca

SEQ ID NO: 2156316 - RNA, 19 nt, Artificial Sequence
  Description of Artificial Sequence: Synthetic oligonucleotide
  Sense strand starting at position 2404 of SEQ ID NO: 1882905
ugauuaguucuauggauuc

SEQ ID NO: 2156317 - RNA, 19 nt, Artificial Sequence
  Description of Artificial Sequence: Synthetic oligonucleotide
  Antisense strand to SEQ ID NO: 2156316
gaauccauagaacuaauca

SEQ ID NO: 2156318 - RNA, 19 nt, Artificial Sequence
  Description of Artificial Sequence: Synthetic oligonucleotide
  Sense strand starting at position 2494 of SEQ ID NO: 1882905
acaacauguguguauuauc

SEQ ID NO: 2156319 - RNA, 19 nt, Artificial Sequence
  Description of Artificial Sequence: Synthetic oligonucleotide
  Antisense strand to SEQ ID NO: 2156318
gauaauacacacauguugu

SEQ ID NO: 2156320 - RNA, 19 nt, Artificial Sequence
  Description of Artificial Sequence: Synthetic oligonucleotide
  Sense strand starting at position 2638 of SEQ ID NO: 1882905
auauuacaggcaugauauu

SEQ ID NO: 2156321 - RNA, 19 nt, Artificial Sequence
  Description of Artificial Sequence: Synthetic oligonucleotide
  Antisense strand to SEQ ID NO: 2156320
aauaucaugccuguaauau

SEQ ID NO: 2156322 - RNA, 19 nt, Artificial Sequence
  Description of Artificial Sequence: Synthetic oligonucleotide
  Sense strand starting at position 2653 of SEQ ID NO: 1882905
uauuguaaagacuggucau

SEQ ID NO: 2156323 - RNA, 19 nt, Artificial Sequence
  Description of Artificial Sequence: Synthetic oligonucleotide
  Antisense strand to SEQ ID NO: 2156322
augaccagucuuuacaaua

SEQ ID NO: 2156324 - RNA, 19 nt, Artificial Sequence
  Description of Artificial Sequence: Synthetic oligonucleotide
  Sense strand starting at position 2754 of SEQ ID NO: 1882905
gggaguuuggucuaaccug

SEQ ID NO: 2156325 - RNA, 19 nt, Artificial Sequence
  Description of Artificial Sequence: Synthetic oligonucleotide
  Antisense strand to SEQ ID NO: 2156324
cagguuagaccaaacuccc

SEQ ID NO: 2156326 - RNA, 19 nt, Artificial Sequence
  Description of Artificial Sequence: Synthetic oligonucleotide
  Sense strand starting at position 2790 of SEQ ID NO: 1882905
aucugacuacuuugggaua

SEQ ID NO: 2156327 - RNA, 19 nt, Artificial Sequence
  Description of Artificial Sequence: Synthetic oligonucleotide
  Antisense strand to SEQ ID NO: 2156326
uaucccaaaguagucagau

SEQ ID NO: 2156328 - RNA, 19 nt, Artificial Sequence
  Description of Artificial Sequence: Synthetic oligonucleotide
  Sense strand starting at position 2877 of SEQ ID NO: 1882905
uccuuccuggguuaucaau

SEQ ID NO: 2156329 - RNA, 19 nt, Artificial Sequence
  Description of Artificial Sequence: Synthetic oligonucleotide
  Antisense strand to SEQ ID NO: 2156328
auugauaacccaggaagga

SEQ ID NO: 2156330 - RNA, 19 nt, Artificial Sequence
  Description of Artificial Sequence: Synthetic oligonucleotide
  Sense strand starting at position 2879 of SEQ ID NO: 1882905
cuuccuggguuaucaauaa

SEQ ID NO: 2156331 - RNA, 19 nt, Artificial Sequence
  Description of Artificial Sequence: Synthetic oligonucleotide
  Antisense strand to SEQ ID NO: 2156330
uuauugauaacccaggaag

SEQ ID NO: 2156332 - RNA, 19 nt, Artificial Sequence
  Description of Artificial Sequence: Synthetic oligonucleotide
  Sense strand starting at position 2928 of SEQ ID NO: 1882905
auguaucuccauuaguauu

SEQ ID NO: 2156333 - RNA, 19 nt, Artificial Sequence
  Description of Artificial Sequence: Synthetic oligonucleotide
  Antisense strand to SEQ ID NO: 2156332
aauacuaauggagauacau

SEQ ID NO: 2156334 - RNA, 19 nt, Artificial Sequence
  Description of Artificial Sequence: Synthetic oligonucleotide
  Sense strand starting at position 2938 of SEQ ID NO: 1882905
auuaguauugaauggcuaa

SEQ ID NO: 2156335 - RNA, 19 nt, Artificial Sequence
  Description of Artificial Sequence: Synthetic oligonucleotide
  Antisense strand to SEQ ID NO: 2156334
uuagccauucaauacuaau

SEQ ID NO: 2156336 - RNA, 19 nt, Artificial Sequence
  Description of Artificial Sequence: Synthetic oligonucleotide
  Sense strand starting at position 2939 of SEQ ID NO: 1882905
uuaguauugaauggcuaag

SEQ ID NO: 2156337 - RNA, 19 nt, Artificial Sequence
  Description of Artificial Sequence: Synthetic oligonucleotide
  Antisense strand to SEQ ID NO: 2156336
cuuagccauucaauacuaa

SEQ ID NO: 2156338 - RNA, 19 nt, Artificial Sequence
  Description of Artificial Sequence: Synthetic oligonucleotide
  Sense strand starting at position 2982 of SEQ ID NO: 1882905
ccagaaucugcucaguacu

SEQ ID NO: 2156339 - RNA, 19 nt, Artificial Sequence
  Description of Artificial Sequence: Synthetic oligonucleotide
  Antisense strand to SEQ ID NO: 2156338
aguacugagcagauucugg

SEQ ID NO: 2156340 - RNA, 19 nt, Artificial Sequence
  Description of Artificial Sequence: Synthetic oligonucleotide
  Sense strand starting at position 3133 of SEQ ID NO: 1882905
uguuaaggugccuaaacaa

SEQ ID NO: 2156341 - RNA, 19 nt, Artificial Sequence
  Description of Artificial Sequence: Synthetic oligonucleotide
  Antisense strand to SEQ ID NO: 2156340
uuguuuaggcaccuuaaca

SEQ ID NO: 2156342 - RNA, 19 nt, Artificial Sequence
  Description of Artificial Sequence: Synthetic oligonucleotide
  Sense strand starting at position 3174 of SEQ ID NO: 1882905
uaaagugaugucgaucuua

SEQ ID NO: 2156343 - RNA, 19 nt, Artificial Sequence
  Description of Artificial Sequence: Synthetic oligonucleotide
  Antisense strand to SEQ ID NO: 2156342
uaagaucgacaucacuuua

SEQ ID NO: 2156344 - RNA, 19 nt, Artificial Sequence
  Description of Artificial Sequence: Synthetic oligonucleotide
  Sense strand starting at position 3293 of SEQ ID NO: 1882905
ugcuuacguguugugugaa

SEQ ID NO: 2156345 - RNA, 19 nt, Artificial Sequence
  Description of Artificial Sequence: Synthetic oligonucleotide
  Antisense strand to SEQ ID NO: 2156344
uucacacaacacguaagca

SEQ ID NO: 2156346 - RNA, 19 nt, Artificial Sequence
  Description of Artificial Sequence: Synthetic oligonucleotide
  Sense strand starting at position 3580 of SEQ ID NO: 1882905
ugggaugugguaugaauua

SEQ ID NO: 2156347 - RNA, 19 nt, Artificial Sequence
  Description of Artificial Sequence: Synthetic oligonucleotide
  Antisense strand to SEQ ID NO: 2156346
uaauucauaccacauccca

SEQ ID NO: 2156348 - RNA, 19 nt, Artificial Sequence
  Description of Artificial Sequence: Synthetic oligonucleotide
  Sense strand starting at position 3585 of SEQ ID NO: 1882905
ugugguaugaauuagguaa

SEQ ID NO: 2156349 - RNA, 19 nt, Artificial Sequence
  Description of Artificial Sequence: Synthetic oligonucleotide
  Antisense strand to SEQ ID NO: 2156348
uuaccuaauucauaccaca

SEQ ID NO: 2156350 - RNA, 19 nt, Artificial Sequence
  Description of Artificial Sequence: Synthetic oligonucleotide
  Sense strand starting at position 3596 of SEQ ID NO: 1882905
uuagguaaagauggcaaau

SEQ ID NO: 2156351 - RNA, 19 nt, Artificial Sequence
  Description of Artificial Sequence: Synthetic oligonucleotide
  Antisense strand to SEQ ID NO: 2156350
auuugccaucuuuaccuaa

SEQ ID NO: 2156352 - RNA, 19 nt, Artificial Sequence
  Description of Artificial Sequence: Synthetic oligonucleotide
  Sense strand starting at position 3727 of SEQ ID NO: 1882905
guguucuaacuaggagaca

SEQ ID NO: 2156353 - RNA, 19 nt, Artificial Sequence
  Description of Artificial Sequence: Synthetic oligonucleotide
  Antisense strand to SEQ ID NO: 2156352
ugucuccuaguuagaacac

SEQ ID NO: 2156354 - RNA, 19 nt, Artificial Sequence
  Description of Artificial Sequence: Synthetic oligonucleotide
  Sense strand starting at position 3810 of SEQ ID NO: 1882905
uugaauaugcauuagucua

SEQ ID NO: 2156355 - RNA, 19 nt, Artificial Sequence
  Description of Artificial Sequence: Synthetic oligonucleotide
  Antisense strand to SEQ ID NO: 2156354
uagacuaaugcauauucaa

SEQ ID NO: 2156356 - RNA, 19 nt, Artificial Sequence
  Description of Artificial Sequence: Synthetic oligonucleotide
  Sense strand starting at position 3840 of SEQ ID NO: 1882905
ucuauacgauguuuaaaga

SEQ ID NO: 2156357 - RNA, 19 nt, Artificial Sequence
  Description of Artificial Sequence: Synthetic oligonucleotide
  Antisense strand to SEQ ID NO: 2156356
ucuuuaaacaucguauaga

SEQ ID NO: 2156358 - RNA, 19 nt, Artificial Sequence
  Description of Artificial Sequence: Synthetic oligonucleotide
  Sense strand starting at position 89 of SEQ ID NO: 1882906
guaauauccaggugaggau

SEQ ID NO: 2156359 - RNA, 19 nt, Artificial Sequence
  Description of Artificial Sequence: Synthetic oligonucleotide
  Antisense strand to SEQ ID NO: 2156358
auccucaccuggauauuac

SEQ ID NO: 2156360 - RNA, 19 nt, Artificial Sequence
  Description of Artificial Sequence: Synthetic oligonucleotide
  Sense strand starting at position 175 of SEQ ID NO: 1882906
gggagcagagguugauauu

SEQ ID NO: 2156361 - RNA, 19 nt, Artificial Sequence
  Description of Artificial Sequence: Synthetic oligonucleotide
  Antisense strand to SEQ ID NO: 2156360
aauaucaaccucugcuccc

SEQ ID NO: 2156362 - RNA, 19 nt, Artificial Sequence
  Description of Artificial Sequence: Synthetic oligonucleotide
  Sense strand starting at position 237 of SEQ ID NO: 1882906
ucguaauaucaagggaaga

SEQ ID NO: 2156363 - RNA, 19 nt, Artificial Sequence
  Description of Artificial Sequence: Synthetic oligonucleotide
  Antisense strand to SEQ ID NO: 2156362
ucuucccuugauauuacga

SEQ ID NO: 2156364 - RNA, 19 nt, Artificial Sequence
  Description of Artificial Sequence: Synthetic oligonucleotide
  Sense strand starting at position 259 of SEQ ID NO: 1882906
gguugauauuaaucccaau

SEQ ID NO: 2156365 - RNA, 19 nt, Artificial Sequence
  Description of Artificial Sequence: Synthetic oligonucleotide
  Antisense strand to SEQ ID NO: 2156364
auugggauuaauaucaacc

SEQ ID NO: 2156366 - RNA, 19 nt, Artificial Sequence
  Description of Artificial Sequence: Synthetic oligonucleotide
  Sense strand starting at position 288 of SEQ ID NO: 1882906
ucauacacccucugugaua

SEQ ID NO: 2156367 - RNA, 19 nt, Artificial Sequence
  Description of Artificial Sequence: Synthetic oligonucleotide
  Antisense strand to SEQ ID NO: 2156366
uaucacagaggguguauga

SEQ ID NO: 2156368 - RNA, 19 nt, Artificial Sequence
  Description of Artificial Sequence: Synthetic oligonucleotide
  Sense strand starting at position 349 of SEQ ID NO: 1882906
cucaauaucgcagaggaau

SEQ ID NO: 2156369 - RNA, 19 nt, Artificial Sequence
  Description of Artificial Sequence: Synthetic oligonucleotide
  Antisense strand to SEQ ID NO: 2156368
auuccucugcgauauugag

SEQ ID NO: 2156370 - RNA, 19 nt, Artificial Sequence
  Description of Artificial Sequence: Synthetic oligonucleotide
  Sense strand starting at position 489 of SEQ ID NO: 1882906
uguacaccuucuucugaua

SEQ ID NO: 2156371 - RNA, 19 nt, Artificial Sequence
  Description of Artificial Sequence: Synthetic oligonucleotide
  Antisense strand to SEQ ID NO: 2156370
uaucagaagaagguguaca

SEQ ID NO: 2156372 - RNA, 19 nt, Artificial Sequence
  Description of Artificial Sequence: Synthetic oligonucleotide
  Sense strand starting at position 510 of SEQ ID NO: 1882906
guuugugauauccauagug

SEQ ID NO: 2156373 - RNA, 19 nt, Artificial Sequence
  Description of Artificial Sequence: Synthetic oligonucleotide
  Antisense strand to SEQ ID NO: 2156372
cacuauggauaucacaaac

SEQ ID NO: 2156374 - RNA, 19 nt, Artificial Sequence
  Description of Artificial Sequence: Synthetic oligonucleotide
  Sense strand starting at position 512 of SEQ ID NO: 1882906
uugugauauccauagugga

SEQ ID NO: 2156375 - RNA, 19 nt, Artificial Sequence
  Description of Artificial Sequence: Synthetic oligonucleotide
  Antisense strand to SEQ ID NO: 2156374
uccacuauggauaucacaa

SEQ ID NO: 2156376 - RNA, 19 nt, Artificial Sequence
  Description of Artificial Sequence: Synthetic oligonucleotide
  Sense strand starting at position 526 of SEQ ID NO: 1882906
guggaagaggaugguauua

SEQ ID NO: 2156377 - RNA, 19 nt, Artificial Sequence
  Description of Artificial Sequence: Synthetic oligonucleotide
  Antisense strand to SEQ ID NO: 2156376
uaauaccauccucuuccac

SEQ ID NO: 2156378 - RNA, 19 nt, Artificial Sequence
  Description of Artificial Sequence: Synthetic oligonucleotide
  Sense strand starting at position 711 of SEQ ID NO: 1882906
uuuaccuucuaugugauau

SEQ ID NO: 2156379 - RNA, 19 nt, Artificial Sequence
  Description of Artificial Sequence: Synthetic oligonucleotide
  Antisense strand to SEQ ID NO: 2156378
auaucacauagaagguaaa

SEQ ID NO: 2156380 - RNA, 19 nt, Artificial Sequence
  Description of Artificial Sequence: Synthetic oligonucleotide
  Sense strand starting at position 734 of SEQ ID NO: 1882906
caugauauccaagguggca

SEQ ID NO: 2156381 - RNA, 19 nt, Artificial Sequence
  Description of Artificial Sequence: Synthetic oligonucleotide
  Antisense strand to SEQ ID NO: 2156380
ugccaccuuggauaucaug

SEQ ID NO: 2156382 - RNA, 19 nt, Artificial Sequence
  Description of Artificial Sequence: Synthetic oligonucleotide
  Sense strand starting at position 852 of SEQ ID NO: 1882906
auguacaaccucugugaua

SEQ ID NO: 2156383 - RNA, 19 nt, Artificial Sequence
  Description of Artificial Sequence: Synthetic oligonucleotide
  Antisense strand to SEQ ID NO: 2156382
uaucacagagguuguacau

SEQ ID NO: 2156384 - RNA, 19 nt, Artificial Sequence
  Description of Artificial Sequence: Synthetic oligonucleotide
  Sense strand starting at position 1025 of SEQ ID NO: 1882906
cuaauaucccaaggguaga

SEQ ID NO: 2156385 - RNA, 19 nt, Artificial Sequence
  Description of Artificial Sequence: Synthetic oligonucleotide
  Antisense strand to SEQ ID NO: 2156384
ucuacccuugggauauuag

SEQ ID NO: 2156386 - RNA, 19 nt, Artificial Sequence
  Description of Artificial Sequence: Synthetic oligonucleotide
  Sense strand starting at position 1068 of SEQ ID NO: 1882906
agguauacauccucuguga

SEQ ID NO: 2156387 - RNA, 19 nt, Artificial Sequence
  Description of Artificial Sequence: Synthetic oligonucleotide
  Antisense strand to SEQ ID NO: 2156386
ucacagaggauguauaccu

SEQ ID NO: 2156388 - RNA, 19 nt, Artificial Sequence
  Description of Artificial Sequence: Synthetic oligonucleotide
  Sense strand starting at position 1072 of SEQ ID NO: 1882906
auacauccucugugauauu

SEQ ID NO: 2156389 - RNA, 19 nt, Artificial Sequence
  Description of Artificial Sequence: Synthetic oligonucleotide
  Antisense strand to SEQ ID NO: 2156388
aauaucacagaggauguau

SEQ ID NO: 2156390 - RNA, 19 nt, Artificial Sequence
  Description of Artificial Sequence: Synthetic oligonucleotide
  Sense strand starting at position 1237 of SEQ ID NO: 1882906
guucguaauauccaaggag

SEQ ID NO: 2156391 - RNA, 19 nt, Artificial Sequence
  Description of Artificial Sequence: Synthetic oligonucleotide
  Antisense strand to SEQ ID NO: 2156390
cuccuuggauauuacgaac

SEQ ID NO: 2156392 - RNA, 19 nt, Artificial Sequence
  Description of Artificial Sequence: Synthetic oligonucleotide
  Sense strand starting at position 1240 of SEQ ID NO: 1882906
cguaauauccaaggaggga

SEQ ID NO: 2156393 - RNA, 19 nt, Artificial Sequence
  Description of Artificial Sequence: Synthetic oligonucleotide
  Antisense strand to SEQ ID NO: 2156392
ucccuccuuggauauuacg

SEQ ID NO: 2156394 - RNA, 19 nt, Artificial Sequence
  Description of Artificial Sequence: Synthetic oligonucleotide
  Sense strand starting at position 1356 of SEQ ID NO: 1882906
aggaguacccugugauauu

SEQ ID NO: 2156395 - RNA, 19 nt, Artificial Sequence
  Description of Artificial Sequence: Synthetic oligonucleotide
  Antisense strand to SEQ ID NO: 2156394
aauaucacaggguacuccu

SEQ ID NO: 2156396 - RNA, 19 nt, Artificial Sequence
  Description of Artificial Sequence: Synthetic oligonucleotide
  Sense strand starting at position 1647 of SEQ ID NO: 1882906
cucugugcuauuguuugua

SEQ ID NO: 2156397 - RNA, 19 nt, Artificial Sequence
  Description of Artificial Sequence: Synthetic oligonucleotide
  Antisense strand to SEQ ID NO: 2156396
uacaaacaauagcacagag

SEQ ID NO: 2156398 - RNA, 19 nt, Artificial Sequence
  Description of Artificial Sequence: Synthetic oligonucleotide
  Sense strand starting at position 1788 of SEQ ID NO: 1882906
cucugugaugcuguucgua

SEQ ID NO: 2156399 - RNA, 19 nt, Artificial Sequence
  Description of Artificial Sequence: Synthetic oligonucleotide
  Antisense strand to SEQ ID NO: 2156398
uacgaacagcaucacagag

SEQ ID NO: 2156400 - RNA, 19 nt, Artificial Sequence
  Description of Artificial Sequence: Synthetic oligonucleotide
  Sense strand starting at position 1871 of SEQ ID NO: 1882906
gugugugauacccaagaug

SEQ ID NO: 2156401 - RNA, 19 nt, Artificial Sequence
  Description of Artificial Sequence: Synthetic oligonucleotide
  Antisense strand to SEQ ID NO: 2156400
caucuuggguaucacacac

SEQ ID NO: 2156402 - RNA, 19 nt, Artificial Sequence
  Description of Artificial Sequence: Synthetic oligonucleotide
  Sense strand starting at position 2080 of SEQ ID NO: 1882906
auugauuugugauauccaa

SEQ ID NO: 2156403 - RNA, 19 nt, Artificial Sequence
  Description of Artificial Sequence: Synthetic oligonucleotide
  Antisense strand to SEQ ID NO: 2156402
uuggauaucacaaaucaau

SEQ ID NO: 2156404 - RNA, 19 nt, Artificial Sequence
  Description of Artificial Sequence: Synthetic oligonucleotide
  Sense strand starting at position 2278 of SEQ ID NO: 1882906
guacauuccaaggguggau

SEQ ID NO: 2156405 - RNA, 19 nt, Artificial Sequence
  Description of Artificial Sequence: Synthetic oligonucleotide
  Antisense strand to SEQ ID NO: 2156404
auccacccuuggaauguac

SEQ ID NO: 2156406 - RNA, 19 nt, Artificial Sequence
  Description of Artificial Sequence: Synthetic oligonucleotide
  Sense strand starting at position 2281 of SEQ ID NO: 1882906
cauuccaaggguggauaua

SEQ ID NO: 2156407 - RNA, 19 nt, Artificial Sequence
  Description of Artificial Sequence: Synthetic oligonucleotide
  Antisense strand to SEQ ID NO: 2156406
uauauccacccuuggaaug

SEQ ID NO: 2156408 - RNA, 19 nt, Artificial Sequence
  Description of Artificial Sequence: Synthetic oligonucleotide
  Sense strand starting at position 2393 of SEQ ID NO: 1882906
ggauguacauccucuguga

SEQ ID NO: 2156409 - RNA, 19 nt, Artificial Sequence
  Description of Artificial Sequence: Synthetic oligonucleotide
  Antisense strand to SEQ ID NO: 2156408
ucacagaggauguacaucc

SEQ ID NO: 2156410 - RNA, 19 nt, Artificial Sequence
  Description of Artificial Sequence: Synthetic oligonucleotide
  Sense strand starting at position 2527 of SEQ ID NO: 1882906
cuuaauauccaagguggga

SEQ ID NO: 2156411 - RNA, 19 nt, Artificial Sequence
  Description of Artificial Sequence: Synthetic oligonucleotide
  Antisense strand to SEQ ID NO: 2156410
ucccaccuuggauauuaag

SEQ ID NO: 2156412 - RNA, 19 nt, Artificial Sequence
  Description of Artificial Sequence: Synthetic oligonucleotide
  Sense strand starting at position 2807 of SEQ ID NO: 1882906
ugcaauaugcaauggagga

SEQ ID NO: 2156413 - RNA, 19 nt, Artificial Sequence
  Description of Artificial Sequence: Synthetic oligonucleotide
  Antisense strand to SEQ ID NO: 2156412
uccuccauugcauauugca

SEQ ID NO: 2156414 - RNA, 19 nt, Artificial Sequence
  Description of Artificial Sequence: Synthetic oligonucleotide
  Sense strand starting at position 2929 of SEQ ID NO: 1882906
guauacacucucuguaaua

SEQ ID NO: 2156415 - RNA, 19 nt, Artificial Sequence
  Description of Artificial Sequence: Synthetic oligonucleotide
  Antisense strand to SEQ ID NO: 2156414
uauuacagagaguguauac

SEQ ID NO: 2156416 - RNA, 19 nt, Artificial Sequence
  Description of Artificial Sequence: Synthetic oligonucleotide
  Sense strand starting at position 3144 of SEQ ID NO: 1882906
guggacacccucugugaua

SEQ ID NO: 2156417 - RNA, 19 nt, Artificial Sequence
  Description of Artificial Sequence: Synthetic oligonucleotide
  Antisense strand to SEQ ID NO: 2156416
uaucacagaggguguccac

SEQ ID NO: 2156418 - RNA, 19 nt, Artificial Sequence
  Description of Artificial Sequence: Synthetic oligonucleotide
  Sense strand starting at position 3145 of SEQ ID NO: 1882906
uggacacccucugugauau

SEQ ID NO: 2156419 - RNA, 19 nt, Artificial Sequence
  Description of Artificial Sequence: Synthetic oligonucleotide
  Antisense strand to SEQ ID NO: 2156418
auaucacagagggugucca

SEQ ID NO: 2156420 - RNA, 19 nt, Artificial Sequence
  Description of Artificial Sequence: Synthetic oligonucleotide
  Sense strand starting at position 3146 of SEQ ID NO: 1882906
ggacacccucugugauauu

SEQ ID NO: 2156421 - RNA, 19 nt, Artificial Sequence
  Description of Artificial Sequence: Synthetic oligonucleotide
  Antisense strand to SEQ ID NO: 2156420
aauaucacagagggugucc

SEQ ID NO: 2156422 - RNA, 19 nt, Artificial Sequence
  Description of Artificial Sequence: Synthetic oligonucleotide
  Sense strand starting at position 3341 of SEQ ID NO: 1882906
caaauuucgcagcggauga

SEQ ID NO: 2156423 - RNA, 19 nt, Artificial Sequence
  Description of Artificial Sequence: Synthetic oligonucleotide
  Antisense strand to SEQ ID NO: 2156422
ucauccgcugcgaaauuug

SEQ ID NO: 2156424 - RNA, 19 nt, Artificial Sequence
  Description of Artificial Sequence: Synthetic oligonucleotide
  Sense strand starting at position 3342 of SEQ ID NO: 1882906
aaauuucgcagcggaugaa

SEQ ID NO: 2156425 - RNA, 19 nt, Artificial Sequence
  Description of Artificial Sequence: Synthetic oligonucleotide
  Antisense strand to SEQ ID NO: 2156424
uucauccgcugcgaaauuu

SEQ ID NO: 2156426 - RNA, 19 nt, Artificial Sequence
  Description of Artificial Sequence: Synthetic oligonucleotide
  Sense strand starting at position 3356 of SEQ ID NO: 1882906
augaacacccucugugaua

SEQ ID NO: 2156427 - RNA, 19 nt, Artificial Sequence
  Description of Artificial Sequence: Synthetic oligonucleotide
  Antisense strand to SEQ ID NO: 2156426
uaucacagaggguguucau

SEQ ID NO: 2156428 - RNA, 19 nt, Artificial Sequence
  Description of Artificial Sequence: Synthetic oligonucleotide
  Sense strand starting at position 3357 of SEQ ID NO: 1882906
ugaacacccucugugauau

SEQ ID NO: 2156429 - RNA, 19 nt, Artificial Sequence
  Description of Artificial Sequence: Synthetic oligonucleotide
  Antisense strand to SEQ ID NO: 2156428
auaucacagaggguguuca

SEQ ID NO: 2156430 - RNA, 19 nt, Artificial Sequence
  Description of Artificial Sequence: Synthetic oligonucleotide
  Sense strand starting at position 3499 of SEQ ID NO: 1882906
guguauacccucuaugaua

SEQ ID NO: 2156431 - RNA, 19 nt, Artificial Sequence
  Description of Artificial Sequence: Synthetic oligonucleotide
  Antisense strand to SEQ ID NO: 2156430
uaucauagaggguauacac

SEQ ID NO: 2156432 - RNA, 19 nt, Artificial Sequence
  Description of Artificial Sequence: Synthetic oligonucleotide
  Sense strand starting at position 3501 of SEQ ID NO: 1882906
guauacccucuaugauauu

SEQ ID NO: 2156433 - RNA, 19 nt, Artificial Sequence
  Description of Artificial Sequence: Synthetic oligonucleotide
  Antisense strand to SEQ ID NO: 2156432
aauaucauagaggguauac

SEQ ID NO: 2156434 - RNA, 19 nt, Artificial Sequence
  Description of Artificial Sequence: Synthetic oligonucleotide
  Sense strand starting at position 3541 of SEQ ID NO: 1882906
agaugauacuacucccagu

SEQ ID NO: 2156435 - RNA, 19 nt, Artificial Sequence
  Description of Artificial Sequence: Synthetic oligonucleotide
  Antisense strand to SEQ ID NO: 2156434
acugggaguaguaucaucu

SEQ ID NO: 2156436 - RNA, 19 nt, Artificial Sequence
  Description of Artificial Sequence: Synthetic oligonucleotide
  Sense strand starting at position 3712 of SEQ ID NO: 1882906
uuuauacccucugugauau

SEQ ID NO: 2156437 - RNA, 19 nt, Artificial Sequence
  Description of Artificial Sequence: Synthetic oligonucleotide
  Antisense strand to SEQ ID NO: 2156436
auaucacagaggguauaaa

SEQ ID NO: 2156438 - RNA, 19 nt, Artificial Sequence
  Description of Artificial Sequence: Synthetic oligonucleotide
  Sense strand starting at position 49 of SEQ ID NO: 1882907
ucgaaaccauccuuccaga

SEQ ID NO: 2156439 - RNA, 19 nt, Artificial Sequence
  Description of Artificial Sequence: Synthetic oligonucleotide
  Antisense strand to SEQ ID NO: 2156438
ucuggaaggaugguuucga

SEQ ID NO: 2156440 - RNA, 19 nt, Artificial Sequence
  Description of Artificial Sequence: Synthetic oligonucleotide
  Sense strand starting at position 94 of SEQ ID NO: 1882907
caagauuagccaugaggau

SEQ ID NO: 2156441 - RNA, 19 nt, Artificial Sequence
  Description of Artificial Sequence: Synthetic oligonucleotide
  Antisense strand to SEQ ID NO: 2156440
auccucauggcuaaucuug

SEQ ID NO: 2156442 - RNA, 19 nt, Artificial Sequence
  Description of Artificial Sequence: Synthetic oligonucleotide
  Sense strand starting at position 942 of SEQ ID NO: 1882907
aucucuuguagucaggagu

SEQ ID NO: 2156443 - RNA, 19 nt, Artificial Sequence
  Description of Artificial Sequence: Synthetic oligonucleotide
  Antisense strand to SEQ ID NO: 2156442
acuccugacuacaagagau

SEQ ID NO: 2156444 - RNA, 19 nt, Artificial Sequence
  Description of Artificial Sequence: Synthetic oligonucleotide
  Sense strand starting at position 1182 of SEQ ID NO: 1882907
acacuccuguucccugaua

SEQ ID NO: 2156445 - RNA, 19 nt, Artificial Sequence
  Description of Artificial Sequence: Synthetic oligonucleotide
  Antisense strand to SEQ ID NO: 2156444
uaucagggaacaggagugu

SEQ ID NO: 2156446 - RNA, 19 nt, Artificial Sequence
  Description of Artificial Sequence: Synthetic oligonucleotide
  Sense strand starting at position 1184 of SEQ ID NO: 1882907
acuccuguucccugauaag

SEQ ID NO: 2156447 - RNA, 19 nt, Artificial Sequence
  Description of Artificial Sequence: Synthetic oligonucleotide
  Antisense strand to SEQ ID NO: 2156446
cuuaucagggaacaggagu

SEQ ID NO: 2156448 - RNA, 19 nt, Artificial Sequence
  Description of Artificial Sequence: Synthetic oligonucleotide
  Sense strand starting at position 1326 of SEQ ID NO: 1882907
gugccauggucacacaaca

SEQ ID NO: 2156449 - RNA, 19 nt, Artificial Sequence
  Description of Artificial Sequence: Synthetic oligonucleotide
  Antisense strand to SEQ ID NO: 2156448
uguugugugaccauggcac

SEQ ID NO: 2156450 - RNA, 19 nt, Artificial Sequence
  Description of Artificial Sequence: Synthetic oligonucleotide
  Sense strand starting at position 1536 of SEQ ID NO: 1882907
caggacaagucuuuacaga

SEQ ID NO: 2156451 - RNA, 19 nt, Artificial Sequence
  Description of Artificial Sequence: Synthetic oligonucleotide
  Antisense strand to SEQ ID NO: 2156450
ucuguaaagacuuguccug

SEQ ID NO: 2156452 - RNA, 19 nt, Artificial Sequence
  Description of Artificial Sequence: Synthetic oligonucleotide
  Sense strand starting at position 1682 of SEQ ID NO: 1882907
acuggagguccaggauagu

SEQ ID NO: 2156453 - RNA, 19 nt, Artificial Sequence
  Description of Artificial Sequence: Synthetic oligonucleotide
  Antisense strand to SEQ ID NO: 2156452
acuauccuggaccuccagu

SEQ ID NO: 2156454 - RNA, 19 nt, Artificial Sequence
  Description of Artificial Sequence: Synthetic oligonucleotide
  Sense strand starting at position 1788 of SEQ ID NO: 1882907
caccaucucugagacgagu

SEQ ID NO: 2156455 - RNA, 19 nt, Artificial Sequence
  Description of Artificial Sequence: Synthetic oligonucleotide
  Antisense strand to SEQ ID NO: 2156454
acucgucucagagauggug

SEQ ID NO: 2156456 - RNA, 19 nt, Artificial Sequence
  Description of Artificial Sequence: Synthetic oligonucleotide
  Sense strand starting at position 1790 of SEQ ID NO: 1882907
ccaucucugagacgaguga

SEQ ID NO: 2156457 - RNA, 19 nt, Artificial Sequence
  Description of Artificial Sequence: Synthetic oligonucleotide
  Antisense strand to SEQ ID NO: 2156456
ucacucgucucagagaugg

SEQ ID NO: 2156458 - RNA, 19 nt, Artificial Sequence
  Description of Artificial Sequence: Synthetic oligonucleotide
  Sense strand starting at position 1801 of SEQ ID NO: 1882907
acgagugaggcuugucaug

SEQ ID NO: 2156459 - RNA, 19 nt, Artificial Sequence
  Description of Artificial Sequence: Synthetic oligonucleotide
  Antisense strand to SEQ ID NO: 2156458
caugacaagccucacucgu

SEQ ID NO: 2156460 - RNA, 19 nt, Artificial Sequence
  Description of Artificial Sequence: Synthetic oligonucleotide
  Sense strand starting at position 2062 of SEQ ID NO: 1882907
cccuguggugggcaagaaa

SEQ ID NO: 2156461 - RNA, 19 nt, Artificial Sequence
  Description of Artificial Sequence: Synthetic oligonucleotide
  Antisense strand to SEQ ID NO: 2156460
uuucuugcccaccacaggg

SEQ ID NO: 2156462 - RNA, 19 nt, Artificial Sequence
  Description of Artificial Sequence: Synthetic oligonucleotide
  Sense strand starting at position 2104 of SEQ ID NO: 1882907
acaugaggguucucacaug

SEQ ID NO: 2156463 - RNA, 19 nt, Artificial Sequence
  Description of Artificial Sequence: Synthetic oligonucleotide
  Antisense strand to SEQ ID NO: 2156462
caugugagaacccucaugu

SEQ ID NO: 2156464 - RNA, 19 nt, Artificial Sequence
  Description of Artificial Sequence: Synthetic oligonucleotide
  Sense strand starting at position 2331 of SEQ ID NO: 1882907
gggucaugccugggcugau

SEQ ID NO: 2156465 - RNA, 19 nt, Artificial Sequence
  Description of Artificial Sequence: Synthetic oligonucleotide
  Antisense strand to SEQ ID NO: 2156464
aucagcccaggcaugaccc

SEQ ID NO: 2156466 - RNA, 19 nt, Artificial Sequence
  Description of Artificial Sequence: Synthetic oligonucleotide
  Sense strand starting at position 2472 of SEQ ID NO: 1882907
ggcguuaccuccuugacaa

SEQ ID NO: 2156467 - RNA, 19 nt, Artificial Sequence
  Description of Artificial Sequence: Synthetic oligonucleotide
  Antisense strand to SEQ ID NO: 2156466
uugucaaggagguaacgcc

SEQ ID NO: 2156468 - RNA, 19 nt, Artificial Sequence
  Description of Artificial Sequence: Synthetic oligonucleotide
  Sense strand starting at position 2473 of SEQ ID NO: 1882907
gcguuaccuccuugacaag

SEQ ID NO: 2156469 - RNA, 19 nt, Artificial Sequence
  Description of Artificial Sequence: Synthetic oligonucleotide
  Antisense strand to SEQ ID NO: 2156468
cuugucaaggagguaacgc

SEQ ID NO: 2156470 - RNA, 19 nt, Artificial Sequence
  Description of Artificial Sequence: Synthetic oligonucleotide
  Sense strand starting at position 2492 of SEQ ID NO: 1882907
ggcuuacauuuguguaaga

SEQ ID NO: 2156471 - RNA, 19 nt, Artificial Sequence
  Description of Artificial Sequence: Synthetic oligonucleotide
  Antisense strand to SEQ ID NO: 2156470
ucuuacacaaauguaagcc

SEQ ID NO: 2156472 - RNA, 19 nt, Artificial Sequence
  Description of Artificial Sequence: Synthetic oligonucleotide
  Sense strand starting at position 2497 of SEQ ID NO: 1882907
acauuuguguaagaguaag

SEQ ID NO: 2156473 - RNA, 19 nt, Artificial Sequence
  Description of Artificial Sequence: Synthetic oligonucleotide
  Antisense strand to SEQ ID NO: 2156472
cuuacucuuacacaaaugu

SEQ ID NO: 2156474 - RNA, 19 nt, Artificial Sequence
  Description of Artificial Sequence: Synthetic oligonucleotide
  Sense strand starting at position 2503 of SEQ ID NO: 1882907
guguaagaguaagagucuu

SEQ ID NO: 2156475 - RNA, 19 nt, Artificial Sequence
  Description of Artificial Sequence: Synthetic oligonucleotide
  Antisense strand to SEQ ID NO: 2156474
aagacucuuacucuuacac

SEQ ID NO: 2156476 - RNA, 19 nt, Artificial Sequence
  Description of Artificial Sequence: Synthetic oligonucleotide
  Sense strand starting at position 2513 of SEQ ID NO: 1882907
aagagucuuaggcggcaaa

SEQ ID NO: 2156477 - RNA, 19 nt, Artificial Sequence
  Description of Artificial Sequence: Synthetic oligonucleotide
  Antisense strand to SEQ ID NO: 2156476
uuugccgccuaagacucuu

SEQ ID NO: 2156478 - RNA, 19 nt, Artificial Sequence
  Description of Artificial Sequence: Synthetic oligonucleotide
  Sense strand starting at position 3027 of SEQ ID NO: 1882907
gcauauaacccauguguau

SEQ ID NO: 2156479 - RNA, 19 nt, Artificial Sequence
  Description of Artificial Sequence: Synthetic oligonucleotide
  Antisense strand to SEQ ID NO: 2156478
auacacauggguuauaugc

SEQ ID NO: 2156480 - RNA, 19 nt, Artificial Sequence
  Description of Artificial Sequence: Synthetic oligonucleotide
  Sense strand starting at position 3036 of SEQ ID NO: 1882907
ccauguguauccucccaua

SEQ ID NO: 2156481 - RNA, 19 nt, Artificial Sequence
  Description of Artificial Sequence: Synthetic oligonucleotide
  Antisense strand to SEQ ID NO: 2156480
uaugggaggauacacaugg

SEQ ID NO: 2156482 - RNA, 19 nt, Artificial Sequence
  Description of Artificial Sequence: Synthetic oligonucleotide
  Sense strand starting at position 3041 of SEQ ID NO: 1882907
uguauccucccauauauag

SEQ ID NO: 2156483 - RNA, 19 nt, Artificial Sequence
  Description of Artificial Sequence: Synthetic oligonucleotide
  Antisense strand to SEQ ID NO: 2156482
cuauauaugggaggauaca

SEQ ID NO: 2156484 - RNA, 19 nt, Artificial Sequence
  Description of Artificial Sequence: Synthetic oligonucleotide
  Sense strand starting at position 3079 of SEQ ID NO: 1882907
gucaguaaguucuugggaa

SEQ ID NO: 2156485 - RNA, 19 nt, Artificial Sequence
  Description of Artificial Sequence: Synthetic oligonucleotide
  Antisense strand to SEQ ID NO: 2156484
uucccaagaacuuacugac

SEQ ID NO: 2156486 - RNA, 19 nt, Artificial Sequence
  Description of Artificial Sequence: Synthetic oligonucleotide
  Sense strand starting at position 3101 of SEQ ID NO: 1882907
uggcuuuaagcacaugaua

SEQ ID NO: 2156487 - RNA, 19 nt, Artificial Sequence
  Description of Artificial Sequence: Synthetic oligonucleotide
  Antisense strand to SEQ ID NO: 2156486
uaucaugugcuuaaagcca

SEQ ID NO: 2156488 - RNA, 19 nt, Artificial Sequence
  Description of Artificial Sequence: Synthetic oligonucleotide
  Sense strand starting at position 3168 of SEQ ID NO: 1882907
ugaacaagaugacauauuu

SEQ ID NO: 2156489 - RNA, 19 nt, Artificial Sequence
  Description of Artificial Sequence: Synthetic oligonucleotide
  Antisense strand to SEQ ID NO: 2156488
aaauaugucaucuuguuca

SEQ ID NO: 2156490 - RNA, 19 nt, Artificial Sequence
  Description of Artificial Sequence: Synthetic oligonucleotide
  Sense strand starting at position 3268 of SEQ ID NO: 1882907
ucgaaaucaucuccagauu

SEQ ID NO: 2156491 - RNA, 19 nt, Artificial Sequence
  Description of Artificial Sequence: Synthetic oligonucleotide
  Antisense strand to SEQ ID NO: 2156490
aaucuggagaugauuucga

SEQ ID NO: 2156492 - RNA, 19 nt, Artificial Sequence
  Description of Artificial Sequence: Synthetic oligonucleotide
  Sense strand starting at position 3306 of SEQ ID NO: 1882907
acauaaacgcuauguaaau

SEQ ID NO: 2156493 - RNA, 19 nt, Artificial Sequence
  Description of Artificial Sequence: Synthetic oligonucleotide
  Antisense strand to SEQ ID NO: 2156492
auuuacauagcguuuaugu

SEQ ID NO: 2156494 - RNA, 19 nt, Artificial Sequence
  Description of Artificial Sequence: Synthetic oligonucleotide
  Sense strand starting at position 3510 of SEQ ID NO: 1882907
ccuugaaccucuguaguau

SEQ ID NO: 2156495 - RNA, 19 nt, Artificial Sequence
  Description of Artificial Sequence: Synthetic oligonucleotide
  Antisense strand to SEQ ID NO: 2156494
auacuacagagguucaagg

SEQ ID NO: 2156496 - RNA, 19 nt, Artificial Sequence
  Description of Artificial Sequence: Synthetic oligonucleotide
  Sense strand starting at position 3511 of SEQ ID NO: 1882907
cuugaaccucuguaguaua

SEQ ID NO: 2156497 - RNA, 19 nt, Artificial Sequence
  Description of Artificial Sequence: Synthetic oligonucleotide
  Antisense strand to SEQ ID NO: 2156496
uauacuacagagguucaag

SEQ ID NO: 2156498 - RNA, 19 nt, Artificial Sequence
  Description of Artificial Sequence: Synthetic oligonucleotide
  Sense strand starting at position 3521 of SEQ ID NO: 1882907
uguaguauagacggcaaau

SEQ ID NO: 2156499 - RNA, 19 nt, Artificial Sequence
  Description of Artificial Sequence: Synthetic oligonucleotide
  Antisense strand to SEQ ID NO: 2156498
auuugccgucuauacuaca

SEQ ID NO: 2156500 - RNA, 19 nt, Artificial Sequence
  Description of Artificial Sequence: Synthetic oligonucleotide
  Sense strand starting at position 3531 of SEQ ID NO: 1882907
acggcaaauuguuccucaa

SEQ ID NO: 2156501 - RNA, 19 nt, Artificial Sequence
  Description of Artificial Sequence: Synthetic oligonucleotide
  Antisense strand to SEQ ID NO: 2156500
uugaggaacaauuugccgu

SEQ ID NO: 2156502 - RNA, 19 nt, Artificial Sequence
  Description of Artificial Sequence: Synthetic oligonucleotide
  Sense strand starting at position 3533 of SEQ ID NO: 1882907
ggcaaauuguuccucaauu

SEQ ID NO: 2156503 - RNA, 19 nt, Artificial Sequence
  Description of Artificial Sequence: Synthetic oligonucleotide
  Antisense strand to SEQ ID NO: 2156502
aauugaggaacaauuugcc

SEQ ID NO: 2156504 - RNA, 19 nt, Artificial Sequence
  Description of Artificial Sequence: Synthetic oligonucleotide
  Sense strand starting at position 3542 of SEQ ID NO: 1882907
uuccucaauugcuucgaua

SEQ ID NO: 2156505 - RNA, 19 nt, Artificial Sequence
  Description of Artificial Sequence: Synthetic oligonucleotide
  Antisense strand to SEQ ID NO: 2156504
uaucgaagcaauugaggaa

SEQ ID NO: 2156506 - RNA, 19 nt, Artificial Sequence
  Description of Artificial Sequence: Synthetic oligonucleotide
  Sense strand starting at position 3736 of SEQ ID NO: 1882907
cagcuugcccuuuguagaa

SEQ ID NO: 2156507 - RNA, 19 nt, Artificial Sequence
  Description of Artificial Sequence: Synthetic oligonucleotide
  Antisense strand to SEQ ID NO: 2156506
uucuacaaagggcaagcug

SEQ ID NO: 2156508 - RNA, 19 nt, Artificial Sequence
  Description of Artificial Sequence: Synthetic oligonucleotide
  Sense strand starting at position 3759 of SEQ ID NO: 1882907
ggcgauaauaucuaccuga

SEQ ID NO: 2156509 - RNA, 19 nt, Artificial Sequence
  Description of Artificial Sequence: Synthetic oligonucleotide
  Antisense strand to SEQ ID NO: 2156508
ucagguagauauuaucgcc

SEQ ID NO: 2156510 - RNA, 19 nt, Artificial Sequence
  Description of Artificial Sequence: Synthetic oligonucleotide
  Sense strand starting at position 3827 of SEQ ID NO: 1882907
cucagaggauaguugcaaa

SEQ ID NO: 2156511 - RNA, 19 nt, Artificial Sequence
  Description of Artificial Sequence: Synthetic oligonucleotide
  Antisense strand to SEQ ID NO: 2156510
uuugcaacuauccucugag

SEQ ID NO: 2156512 - RNA, 19 nt, Artificial Sequence
  Description of Artificial Sequence: Synthetic oligonucleotide
  Sense strand starting at position 3888 of SEQ ID NO: 1882907
cuugguugaccaggaggaa

SEQ ID NO: 2156513 - RNA, 19 nt, Artificial Sequence
  Description of Artificial Sequence: Synthetic oligonucleotide
  Antisense strand to SEQ ID NO: 2156512
uuccuccuggucaaccaag

SEQ ID NO: 2156514 - RNA, 19 nt, Artificial Sequence
  Description of Artificial Sequence: Synthetic oligonucleotide
  Sense strand starting at position 3959 of SEQ ID NO: 1882907
cuacuuucuguccaggagu

SEQ ID NO: 2156515 - RNA, 19 nt, Artificial Sequence
  Description of Artificial Sequence: Synthetic oligonucleotide
  Antisense strand to SEQ ID NO: 2156514
acuccuggacagaaaguag

SEQ ID NO: 2156516 - RNA, 19 nt, Artificial Sequence
  Description of Artificial Sequence: Synthetic oligonucleotide
  Sense strand starting at position 3961 of SEQ ID NO: 1882907
acuuucuguccaggaguga

SEQ ID NO: 2156517 - RNA, 19 nt, Artificial Sequence
  Description of Artificial Sequence: Synthetic oligonucleotide
  Antisense strand to SEQ ID NO: 2156516
ucacuccuggacagaaagu

SEQ ID NO: 2156518 - RNA, 19 nt, Artificial Sequence
  Description of Artificial Sequence: Synthetic oligonucleotide
  Sense strand starting at position 369 of SEQ ID NO: 1882908
gaaccuaggcggcagaaau

SEQ ID NO: 2156519 - RNA, 19 nt, Artificial Sequence
  Description of Artificial Sequence: Synthetic oligonucleotide
  Antisense strand to SEQ ID NO: 2156518
auuucugccgccuagguuc

SEQ ID NO: 2156520 - RNA, 19 nt, Artificial Sequence
  Description of Artificial Sequence: Synthetic oligonucleotide
  Sense strand starting at position 745 of SEQ ID NO: 1882908
cuuagaauaucguccucaa

SEQ ID NO: 2156521 - RNA, 19 nt, Artificial Sequence
  Description of Artificial Sequence: Synthetic oligonucleotide
  Antisense strand to SEQ ID NO: 2156520
uugaggacgauauucuaag

SEQ ID NO: 2156522 - RNA, 19 nt, Artificial Sequence
  Description of Artificial Sequence: Synthetic oligonucleotide
  Sense strand starting at position 748 of SEQ ID NO: 1882908
agaauaucguccucaaagu

SEQ ID NO: 2156523 - RNA, 19 nt, Artificial Sequence
  Description of Artificial Sequence: Synthetic oligonucleotide
  Antisense strand to SEQ ID NO: 2156522
acuuugaggacgauauucu

SEQ ID NO: 2156524 - RNA, 19 nt, Artificial Sequence
  Description of Artificial Sequence: Synthetic oligonucleotide
  Sense strand starting at position 749 of SEQ ID NO: 1882908
gaauaucguccucaaaguu

SEQ ID NO: 2156525 - RNA, 19 nt, Artificial Sequence
  Description of Artificial Sequence: Synthetic oligonucleotide
  Antisense strand to SEQ ID NO: 2156524
aacuuugaggacgauauuc

SEQ ID NO: 2156526 - RNA, 19 nt, Artificial Sequence
  Description of Artificial Sequence: Synthetic oligonucleotide
  Sense strand starting at position 1373 of SEQ ID NO: 1882908
gguuuaugcccagaaguaa

SEQ ID NO: 2156527 - RNA, 19 nt, Artificial Sequence
  Description of Artificial Sequence: Synthetic oligonucleotide
  Antisense strand to SEQ ID NO: 2156526
uuacuucugggcauaaacc

SEQ ID NO: 2156528 - RNA, 19 nt, Artificial Sequence
  Description of Artificial Sequence: Synthetic oligonucleotide
  Sense strand starting at position 1626 of SEQ ID NO: 1882908
ggguauauguuauuacacu

SEQ ID NO: 2156529 - RNA, 19 nt, Artificial Sequence
  Description of Artificial Sequence: Synthetic oligonucleotide
  Antisense strand to SEQ ID NO: 2156528
aguguaauaacauauaccc

SEQ ID NO: 2156530 - RNA, 19 nt, Artificial Sequence
  Description of Artificial Sequence: Synthetic oligonucleotide
  Sense strand starting at position 1650 of SEQ ID NO: 1882908
cuggcuuacagaggcaaua

SEQ ID NO: 2156531 - RNA, 19 nt, Artificial Sequence
  Description of Artificial Sequence: Synthetic oligonucleotide
  Antisense strand to SEQ ID NO: 2156530
uauugccucuguaagccag

SEQ ID NO: 2156532 - RNA, 19 nt, Artificial Sequence
  Description of Artificial Sequence: Synthetic oligonucleotide
  Sense strand starting at position 1674 of SEQ ID NO: 1882908
cacuuucugccaugagaga

SEQ ID NO: 2156533 - RNA, 19 nt, Artificial Sequence
  Description of Artificial Sequence: Synthetic oligonucleotide
  Antisense strand to SEQ ID NO: 2156532
ucucucauggcagaaagug

SEQ ID NO: 2156534 - RNA, 19 nt, Artificial Sequence
  Description of Artificial Sequence: Synthetic oligonucleotide
  Sense strand starting at position 1751 of SEQ ID NO: 1882908
uaucaagugcuaugauaga

SEQ ID NO: 2156535 - RNA, 19 nt, Artificial Sequence
  Description of Artificial Sequence: Synthetic oligonucleotide
  Antisense strand to SEQ ID NO: 2156534
ucuaucauagcacuugaua

SEQ ID NO: 2156536 - RNA, 19 nt, Artificial Sequence
  Description of Artificial Sequence: Synthetic oligonucleotide
  Sense strand starting at position 1792 of SEQ ID NO: 1882908
aguggaugcaaucgaggaa

SEQ ID NO: 2156537 - RNA, 19 nt, Artificial Sequence
  Description of Artificial Sequence: Synthetic oligonucleotide
  Antisense strand to SEQ ID NO: 2156536
uuccucgauugcauccacu

SEQ ID NO: 2156538 - RNA, 19 nt, Artificial Sequence
  Description of Artificial Sequence: Synthetic oligonucleotide
  Sense strand starting at position 1807 of SEQ ID NO: 1882908
ggaagacuuccuggucuuc

SEQ ID NO: 2156539 - RNA, 19 nt, Artificial Sequence
  Description of Artificial Sequence: Synthetic oligonucleotide
  Antisense strand to SEQ ID NO: 2156538
gaagaccaggaagucuucc

SEQ ID NO: 2156540 - RNA, 19 nt, Artificial Sequence
  Description of Artificial Sequence: Synthetic oligonucleotide
  Sense strand starting at position 1879 of SEQ ID NO: 1882908
aagaccugucucuggagua

SEQ ID NO: 2156541 - RNA, 19 nt, Artificial Sequence
  Description of Artificial Sequence: Synthetic oligonucleotide
  Antisense strand to SEQ ID NO: 2156540
uacuccagagacaggucuu

SEQ ID NO: 2156542 - RNA, 19 nt, Artificial Sequence
  Description of Artificial Sequence: Synthetic oligonucleotide
  Sense strand starting at position 2007 of SEQ ID NO: 1882908
uggugaguauugguuagag

SEQ ID NO: 2156543 - RNA, 19 nt, Artificial Sequence
  Description of Artificial Sequence: Synthetic oligonucleotide
  Antisense strand to SEQ ID NO: 2156542
cucuaaccaauacucacca

SEQ ID NO: 2156544 - RNA, 19 nt, Artificial Sequence
  Description of Artificial Sequence: Synthetic oligonucleotide
  Sense strand starting at position 2009 of SEQ ID NO: 1882908
gugaguauugguuagagca

SEQ ID NO: 2156545 - RNA, 19 nt, Artificial Sequence
  Description of Artificial Sequence: Synthetic oligonucleotide
  Antisense strand to SEQ ID NO: 2156544
ugcucuaaccaauacucac

SEQ ID NO: 2156546 - RNA, 19 nt, Artificial Sequence
  Description of Artificial Sequence: Synthetic oligonucleotide
  Sense strand starting at position 2040 of SEQ ID NO: 1882908
uagaacaaugcuuaugagu

SEQ ID NO: 2156547 - RNA, 19 nt, Artificial Sequence
  Description of Artificial Sequence: Synthetic oligonucleotide
  Antisense strand to SEQ ID NO: 2156546
acucauaagcauuguucua

SEQ ID NO: 2156548 - RNA, 19 nt, Artificial Sequence
  Description of Artificial Sequence: Synthetic oligonucleotide
  Sense strand starting at position 2047 of SEQ ID NO: 1882908
augcuuaugagugaagcau

SEQ ID NO: 2156549 - RNA, 19 nt, Artificial Sequence
  Description of Artificial Sequence: Synthetic oligonucleotide
  Antisense strand to SEQ ID NO: 2156548
augcuucacucauaagcau

SEQ ID NO: 2156550 - RNA, 19 nt, Artificial Sequence
  Description of Artificial Sequence: Synthetic oligonucleotide
  Sense strand starting at position 2095 of SEQ ID NO: 1882908
cuggcucugggagauugua

SEQ ID NO: 2156551 - RNA, 19 nt, Artificial Sequence
  Description of Artificial Sequence: Synthetic oligonucleotide
  Antisense strand to SEQ ID NO: 2156550
uacaaucucccagagccag

SEQ ID NO: 2156552 - RNA, 19 nt, Artificial Sequence
  Description of Artificial Sequence: Synthetic oligonucleotide
  Sense strand starting at position 2104 of SEQ ID NO: 1882908
ggagauuguaaagguuacu

SEQ ID NO: 2156553 - RNA, 19 nt, Artificial Sequence
  Description of Artificial Sequence: Synthetic oligonucleotide
  Antisense strand to SEQ ID NO: 2156552
aguaaccuuuacaaucucc

SEQ ID NO: 2156554 - RNA, 19 nt, Artificial Sequence
  Description of Artificial Sequence: Synthetic oligonucleotide
  Sense strand starting at position 2115 of SEQ ID NO: 1882908
agguuacuucauugggaug

SEQ ID NO: 2156555 - RNA, 19 nt, Artificial Sequence
  Description of Artificial Sequence: Synthetic oligonucleotide
  Antisense strand to SEQ ID NO: 2156554
caucccaaugaaguaaccu

SEQ ID NO: 2156556 - RNA, 19 nt, Artificial Sequence
  Description of Artificial Sequence: Synthetic oligonucleotide
  Sense strand starting at position 2129 of SEQ ID NO: 1882908
ggaugcuuagaucacaguu

SEQ ID NO: 2156557 - RNA, 19 nt, Artificial Sequence
  Description of Artificial Sequence: Synthetic oligonucleotide
  Antisense strand to SEQ ID NO: 2156556
aacugugaucuaagcaucc

SEQ ID NO: 2156558 - RNA, 19 nt, Artificial Sequence
  Description of Artificial Sequence: Synthetic oligonucleotide
  Sense strand starting at position 2137 of SEQ ID NO: 1882908
agaucacaguuucugguua

SEQ ID NO: 2156559 - RNA, 19 nt, Artificial Sequence
  Description of Artificial Sequence: Synthetic oligonucleotide
  Antisense strand to SEQ ID NO: 2156558
uaaccagaaacugugaucu

SEQ ID NO: 2156560 - RNA, 19 nt, Artificial Sequence
  Description of Artificial Sequence: Synthetic oligonucleotide
  Sense strand starting at position 2142 of SEQ ID NO: 1882908
acaguuucugguuauuaga

SEQ ID NO: 2156561 - RNA, 19 nt, Artificial Sequence
  Description of Artificial Sequence: Synthetic oligonucleotide
  Antisense strand to SEQ ID NO: 2156560
ucuaauaaccagaaacugu

SEQ ID NO: 2156562 - RNA, 19 nt, Artificial Sequence
  Description of Artificial Sequence: Synthetic oligonucleotide
  Sense strand starting at position 2144 of SEQ ID NO: 1882908
aguuucugguuauuagaaa

SEQ ID NO: 2156563 - RNA, 19 nt, Artificial Sequence
  Description of Artificial Sequence: Synthetic oligonucleotide
  Antisense strand to SEQ ID NO: 2156562
uuucuaauaaccagaaacu

SEQ ID NO: 2156564 - RNA, 19 nt, Artificial Sequence
  Description of Artificial Sequence: Synthetic oligonucleotide
  Sense strand starting at position 2264 of SEQ ID NO: 1882908
cauccaauucugggaaguc

SEQ ID NO: 2156565 - RNA, 19 nt, Artificial Sequence
  Description of Artificial Sequence: Synthetic oligonucleotide
  Antisense strand to SEQ ID NO: 2156564
gacuucccagaauuggaug

SEQ ID NO: 2156566 - RNA, 19 nt, Artificial Sequence
  Description of Artificial Sequence: Synthetic oligonucleotide
  Sense strand starting at position 2329 of SEQ ID NO: 1882908
cuggaaagcuuagugacaa

SEQ ID NO: 2156567 - RNA, 19 nt, Artificial Sequence
  Description of Artificial Sequence: Synthetic oligonucleotide
  Antisense strand to SEQ ID NO: 2156566
uugucacuaagcuuuccag

SEQ ID NO: 2156568 - RNA, 19 nt, Artificial Sequence
  Description of Artificial Sequence: Synthetic oligonucleotide
  Sense strand starting at position 2430 of SEQ ID NO: 1882908
uuugucaagccuugaagga

SEQ ID NO: 2156569 - RNA, 19 nt, Artificial Sequence
  Description of Artificial Sequence: Synthetic oligonucleotide
  Antisense strand to SEQ ID NO: 2156568
uccuucaaggcuugacaaa

SEQ ID NO: 2156570 - RNA, 19 nt, Artificial Sequence
  Description of Artificial Sequence: Synthetic oligonucleotide
  Sense strand starting at position 2431 of SEQ ID NO: 1882908
uugucaagccuugaaggau

SEQ ID NO: 2156571 - RNA, 19 nt, Artificial Sequence
  Description of Artificial Sequence: Synthetic oligonucleotide
  Antisense strand to SEQ ID NO: 2156570
auccuucaaggcuugacaa

SEQ ID NO: 2156572 - RNA, 19 nt, Artificial Sequence
  Description of Artificial Sequence: Synthetic oligonucleotide
  Sense strand starting at position 2434 of SEQ ID NO: 1882908
ucaagccuugaaggauauu

SEQ ID NO: 2156573 - RNA, 19 nt, Artificial Sequence
  Description of Artificial Sequence: Synthetic oligonucleotide
  Antisense strand to SEQ ID NO: 2156572
aauauccuucaaggcuuga

SEQ ID NO: 2156574 - RNA, 19 nt, Artificial Sequence
  Description of Artificial Sequence: Synthetic oligonucleotide
  Sense strand starting at position 2443 of SEQ ID NO: 1882908
gaaggauauuugcagagga

SEQ ID NO: 2156575 - RNA, 19 nt, Artificial Sequence
  Description of Artificial Sequence: Synthetic oligonucleotide
  Antisense strand to SEQ ID NO: 2156574
uccucugcaaauauccuuc

SEQ ID NO: 2156576 - RNA, 19 nt, Artificial Sequence
  Description of Artificial Sequence: Synthetic oligonucleotide
  Sense strand starting at position 2530 of SEQ ID NO: 1882908
gugugaucucacccguguu

SEQ ID NO: 2156577 - RNA, 19 nt, Artificial Sequence
  Description of Artificial Sequence: Synthetic oligonucleotide
  Antisense strand to SEQ ID NO: 2156576
aacacgggugagaucacac

SEQ ID NO: 2156578 - RNA, 19 nt, Artificial Sequence
  Description of Artificial Sequence: Synthetic oligonucleotide
  Sense strand starting at position 2650 of SEQ ID NO: 1882908
acaggaucacuauguguuu

SEQ ID NO: 2156579 - RNA, 19 nt, Artificial Sequence
  Description of Artificial Sequence: Synthetic oligonucleotide
  Antisense strand to SEQ ID NO: 2156578
aaacacauagugauccugu

SEQ ID NO: 2156580 - RNA, 19 nt, Artificial Sequence
  Description of Artificial Sequence: Synthetic oligonucleotide
  Sense strand starting at position 2852 of SEQ ID NO: 1882908
ggcacuuugcacgagauaa

SEQ ID NO: 2156581 - RNA, 19 nt, Artificial Sequence
  Description of Artificial Sequence: Synthetic oligonucleotide
  Antisense strand to SEQ ID NO: 2156580
uuaucucgugcaaagugcc

SEQ ID NO: 2156582 - RNA, 19 nt, Artificial Sequence
  Description of Artificial Sequence: Synthetic oligonucleotide
  Sense strand starting at position 3125 of SEQ ID NO: 1882908
cauuacgccuggguaauuu

SEQ ID NO: 2156583 - RNA, 19 nt, Artificial Sequence
  Description of Artificial Sequence: Synthetic oligonucleotide
  Antisense strand to SEQ ID NO: 2156582
aaauuacccaggcguaaug

SEQ ID NO: 2156584 - RNA, 19 nt, Artificial Sequence
  Description of Artificial Sequence: Synthetic oligonucleotide
  Sense strand starting at position 3420 of SEQ ID NO: 1882908
gcauccagaccugaucauu

SEQ ID NO: 2156585 - RNA, 19 nt, Artificial Sequence
  Description of Artificial Sequence: Synthetic oligonucleotide
  Antisense strand to SEQ ID NO: 2156584
aaugaucaggucuggaugc

SEQ ID NO: 2156586 - RNA, 19 nt, Artificial Sequence
  Description of Artificial Sequence: Synthetic oligonucleotide
  Sense strand starting at position 3474 of SEQ ID NO: 1882908
cacugugacucagugaaua

SEQ ID NO: 2156587 - RNA, 19 nt, Artificial Sequence
  Description of Artificial Sequence: Synthetic oligonucleotide
  Antisense strand to SEQ ID NO: 2156586
uauucacugagucacagug

SEQ ID NO: 2156588 - RNA, 19 nt, Artificial Sequence
  Description of Artificial Sequence: Synthetic oligonucleotide
  Sense strand starting at position 3667 of SEQ ID NO: 1882908
aauguuaucuccuugagga

SEQ ID NO: 2156589 - RNA, 19 nt, Artificial Sequence
  Description of Artificial Sequence: Synthetic oligonucleotide
  Antisense strand to SEQ ID NO: 2156588
uccucaaggagauaacauu

SEQ ID NO: 2156590 - RNA, 19 nt, Artificial Sequence
  Description of Artificial Sequence: Synthetic oligonucleotide
  Sense strand starting at position 3668 of SEQ ID NO: 1882908
auguuaucuccuugaggaa

SEQ ID NO: 2156591 - RNA, 19 nt, Artificial Sequence
  Description of Artificial Sequence: Synthetic oligonucleotide
  Antisense strand to SEQ ID NO: 2156590
uuccucaaggagauaacau

SEQ ID NO: 2156592 - RNA, 19 nt, Artificial Sequence
  Description of Artificial Sequence: Synthetic oligonucleotide
  Sense strand starting at position 3730 of SEQ ID NO: 1882908
cuucgucuggguucgcaua

SEQ ID NO: 2156593 - RNA, 19 nt, Artificial Sequence
  Description of Artificial Sequence: Synthetic oligonucleotide
  Antisense strand to SEQ ID NO: 2156592
uaugcgaacccagacgaag

SEQ ID NO: 2156594 - RNA, 19 nt, Artificial Sequence
  Description of Artificial Sequence: Synthetic oligonucleotide
  Sense strand starting at position 3766 of SEQ ID NO: 1882908
ugucgugucauuuacugca

SEQ ID NO: 2156595 - RNA, 19 nt, Artificial Sequence
  Description of Artificial Sequence: Synthetic oligonucleotide
  Antisense strand to SEQ ID NO: 2156594
ugcaguaaaugacacgaca

SEQ ID NO: 2156596 - RNA, 19 nt, Artificial Sequence
  Description of Artificial Sequence: Synthetic oligonucleotide
  Sense strand starting at position 3768 of SEQ ID NO: 1882908
ucgugucauuuacugcaaa

SEQ ID NO: 2156597 - RNA, 19 nt, Artificial Sequence
  Description of Artificial Sequence: Synthetic oligonucleotide
  Antisense strand to SEQ ID NO: 2156596
uuugcaguaaaugacacga

SEQ ID NO: 2156598 - RNA, 19 nt, Artificial Sequence
  Description of Artificial Sequence: Synthetic oligonucleotide
  Sense strand starting at position 21 of SEQ ID NO: 1882909
auaggaauauuccucuagu

SEQ ID NO: 2156599 - RNA, 19 nt, Artificial Sequence
  Description of Artificial Sequence: Synthetic oligonucleotide
  Antisense strand to SEQ ID NO: 2156598
acuagaggaauauuccuau

SEQ ID NO: 2156600 - RNA, 19 nt, Artificial Sequence
  Description of Artificial Sequence: Synthetic oligonucleotide
  Sense strand starting at position 34 of SEQ ID NO: 1882909
ucuaguauguaacuugaau

SEQ ID NO: 2156601 - RNA, 19 nt, Artificial Sequence
  Description of Artificial Sequence: Synthetic oligonucleotide
  Antisense strand to SEQ ID NO: 2156600
auucaaguuacauacuaga

SEQ ID NO: 2156602 - RNA, 19 nt, Artificial Sequence
  Description of Artificial Sequence: Synthetic oligonucleotide
  Sense strand starting at position 215 of SEQ ID NO: 1882909
uggcuuccucaaggagaua

SEQ ID NO: 2156603 - RNA, 19 nt, Artificial Sequence
  Description of Artificial Sequence: Synthetic oligonucleotide
  Antisense strand to SEQ ID NO: 2156602
uaucuccuugaggaagcca

SEQ ID NO: 2156604 - RNA, 19 nt, Artificial Sequence
  Description of Artificial Sequence: Synthetic oligonucleotide
  Sense strand starting at position 469 of SEQ ID NO: 1882909
ugaucaggucuggaugcaa

SEQ ID NO: 2156605 - RNA, 19 nt, Artificial Sequence
  Description of Artificial Sequence: Synthetic oligonucleotide
  Antisense strand to SEQ ID NO: 2156604
uugcauccagaccugauca

SEQ ID NO: 2156606 - RNA, 19 nt, Artificial Sequence
  Description of Artificial Sequence: Synthetic oligonucleotide
  Sense strand starting at position 555 of SEQ ID NO: 1882909
ggugacaucagcuguccaa

SEQ ID NO: 2156607 - RNA, 19 nt, Artificial Sequence
  Description of Artificial Sequence: Synthetic oligonucleotide
  Antisense strand to SEQ ID NO: 2156606
uuggacagcugaugucacc

SEQ ID NO: 2156608 - RNA, 19 nt, Artificial Sequence
  Description of Artificial Sequence: Synthetic oligonucleotide
  Sense strand starting at position 1019 of SEQ ID NO: 1882909
uugcauccauguuuauuua

SEQ ID NO: 2156609 - RNA, 19 nt, Artificial Sequence
  Description of Artificial Sequence: Synthetic oligonucleotide
  Antisense strand to SEQ ID NO: 2156608
uaaauaaacauggaugcaa

SEQ ID NO: 2156610 - RNA, 19 nt, Artificial Sequence
  Description of Artificial Sequence: Synthetic oligonucleotide
  Sense strand starting at position 1138 of SEQ ID NO: 1882909
ggaugcugaagauguaagu

SEQ ID NO: 2156611 - RNA, 19 nt, Artificial Sequence
  Description of Artificial Sequence: Synthetic oligonucleotide
  Antisense strand to SEQ ID NO: 2156610
acuuacaucuucagcaucc

SEQ ID NO: 2156612 - RNA, 19 nt, Artificial Sequence
  Description of Artificial Sequence: Synthetic oligonucleotide
  Sense strand starting at position 1179 of SEQ ID NO: 1882909
cagugaauuugguauagaa

SEQ ID NO: 2156613 - RNA, 19 nt, Artificial Sequence
  Description of Artificial Sequence: Synthetic oligonucleotide
  Antisense strand to SEQ ID NO: 2156612
uucuauaccaaauucacug

SEQ ID NO: 2156614 - RNA, 19 nt, Artificial Sequence
  Description of Artificial Sequence: Synthetic oligonucleotide
  Sense strand starting at position 1186 of SEQ ID NO: 1882909
uuugguauagaauguucga

SEQ ID NO: 2156615 - RNA, 19 nt, Artificial Sequence
  Description of Artificial Sequence: Synthetic oligonucleotide
  Antisense strand to SEQ ID NO: 2156614
ucgaacauucuauaccaaa

SEQ ID NO: 2156616 - RNA, 19 nt, Artificial Sequence
  Description of Artificial Sequence: Synthetic oligonucleotide
  Sense strand starting at position 1297 of SEQ ID NO: 1882909
aggcaaugccaaggaauga

SEQ ID NO: 2156617 - RNA, 19 nt, Artificial Sequence
  Description of Artificial Sequence: Synthetic oligonucleotide
  Antisense strand to SEQ ID NO: 2156616
ucauuccuuggcauugccu

SEQ ID NO: 2156618 - RNA, 19 nt, Artificial Sequence
  Description of Artificial Sequence: Synthetic oligonucleotide
  Sense strand starting at position 1464 of SEQ ID NO: 1882909
aggcuugacaaaugugagu

SEQ ID NO: 2156619 - RNA, 19 nt, Artificial Sequence
  Description of Artificial Sequence: Synthetic oligonucleotide
  Antisense strand to SEQ ID NO: 2156618
acucacauuugucaagccu

SEQ ID NO: 2156620 - RNA, 19 nt, Artificial Sequence
  Description of Artificial Sequence: Synthetic oligonucleotide
  Sense strand starting at position 1466 of SEQ ID NO: 1882909
gcuugacaaaugugaguca

SEQ ID NO: 2156621 - RNA, 19 nt, Artificial Sequence
  Description of Artificial Sequence: Synthetic oligonucleotide
  Antisense strand to SEQ ID NO: 2156620
ugacucacauuugucaagc

SEQ ID NO: 2156622 - RNA, 19 nt, Artificial Sequence
  Description of Artificial Sequence: Synthetic oligonucleotide
  Sense strand starting at position 1477 of SEQ ID NO: 1882909
gugagucaccacgacaaga

SEQ ID NO: 2156623 - RNA, 19 nt, Artificial Sequence
  Description of Artificial Sequence: Synthetic oligonucleotide
  Antisense strand to SEQ ID NO: 2156622
ucuugucguggugacucac

SEQ ID NO: 2156624 - RNA, 19 nt, Artificial Sequence
  Description of Artificial Sequence: Synthetic oligonucleotide
  Sense strand starting at position 1512 of SEQ ID NO: 1882909
auagcaggucuuuauauac

SEQ ID NO: 2156625 - RNA, 19 nt, Artificial Sequence
  Description of Artificial Sequence: Synthetic oligonucleotide
  Antisense strand to SEQ ID NO: 2156624
guauauaaagaccugcuau

SEQ ID NO: 2156626 - RNA, 19 nt, Artificial Sequence
  Description of Artificial Sequence: Synthetic oligonucleotide
  Sense strand starting at position 1552 of SEQ ID NO: 1882909
gcuacuuugucacuaagcu

SEQ ID NO: 2156627 - RNA, 19 nt, Artificial Sequence
  Description of Artificial Sequence: Synthetic oligonucleotide
  Antisense strand to SEQ ID NO: 2156626
agcuuagugacaaaguagc

SEQ ID NO: 2156628 - RNA, 19 nt, Artificial Sequence
  Description of Artificial Sequence: Synthetic oligonucleotide
  Sense strand starting at position 1626 of SEQ ID NO: 1882909
uucccagaauuggaugaaa

SEQ ID NO: 2156629 - RNA, 19 nt, Artificial Sequence
  Description of Artificial Sequence: Synthetic oligonucleotide
  Antisense strand to SEQ ID NO: 2156628
uuucauccaauucugggaa

SEQ ID NO: 2156630 - RNA, 19 nt, Artificial Sequence
  Description of Artificial Sequence: Synthetic oligonucleotide
  Sense strand starting at position 1734 of SEQ ID NO: 1882909
uguggccucuuucuaauaa

SEQ ID NO: 2156631 - RNA, 19 nt, Artificial Sequence
  Description of Artificial Sequence: Synthetic oligonucleotide
  Antisense strand to SEQ ID NO: 2156630
uuauuagaaagaggccaca

SEQ ID NO: 2156632 - RNA, 19 nt, Artificial Sequence
  Description of Artificial Sequence: Synthetic oligonucleotide
  Sense strand starting at position 1752 of SEQ ID NO: 1882909
accagaaacugugaucuaa

SEQ ID NO: 2156633 - RNA, 19 nt, Artificial Sequence
  Description of Artificial Sequence: Synthetic oligonucleotide
  Antisense strand to SEQ ID NO: 2156632
uuagaucacaguuucuggu

SEQ ID NO: 2156634 - RNA, 19 nt, Artificial Sequence
  Description of Artificial Sequence: Synthetic oligonucleotide
  Sense strand starting at position 2014 of SEQ ID NO: 1882909
agagacaggucuuaacgga

SEQ ID NO: 2156635 - RNA, 19 nt, Artificial Sequence
  Description of Artificial Sequence: Synthetic oligonucleotide
  Antisense strand to SEQ ID NO: 2156634
uccguuaagaccugucucu

SEQ ID NO: 2156636 - RNA, 19 nt, Artificial Sequence
  Description of Artificial Sequence: Synthetic oligonucleotide
  Sense strand starting at position 2086 of SEQ ID NO: 1882909
caggaagucuuccucgauu

SEQ ID NO: 2156637 - RNA, 19 nt, Artificial Sequence
  Description of Artificial Sequence: Synthetic oligonucleotide
  Antisense strand to SEQ ID NO: 2156636
aaucgaggaagacuuccug

SEQ ID NO: 2156638 - RNA, 19 nt, Artificial Sequence
  Description of Artificial Sequence: Synthetic oligonucleotide
  Sense strand starting at position 2089 of SEQ ID NO: 1882909
gaagucuuccucgauugca

SEQ ID NO: 2156639 - RNA, 19 nt, Artificial Sequence
  Description of Artificial Sequence: Synthetic oligonucleotide
  Antisense strand to SEQ ID NO: 2156638
ugcaaucgaggaagacuuc

SEQ ID NO: 2156640 - RNA, 19 nt, Artificial Sequence
  Description of Artificial Sequence: Synthetic oligonucleotide
  Sense strand starting at position 2148 of SEQ ID NO: 1882909
cuugauaagcuguauuaua

SEQ ID NO: 2156641 - RNA, 19 nt, Artificial Sequence
  Description of Artificial Sequence: Synthetic oligonucleotide
  Antisense strand to SEQ ID NO: 2156640
uauaauacagcuuaucaag

SEQ ID NO: 2156642 - RNA, 19 nt, Artificial Sequence
  Description of Artificial Sequence: Synthetic oligonucleotide
  Sense strand starting at position 2182 of SEQ ID NO: 1882909
gcccgucuccuccaacaga

SEQ ID NO: 2156643 - RNA, 19 nt, Artificial Sequence
  Description of Artificial Sequence: Synthetic oligonucleotide
  Antisense strand to SEQ ID NO: 2156642
ucuguuggaggagacgggc

SEQ ID NO: 2156644 - RNA, 19 nt, Artificial Sequence
  Description of Artificial Sequence: Synthetic oligonucleotide
  Sense strand starting at position 2190 of SEQ ID NO: 1882909
ccuccaacagauugugagu

SEQ ID NO: 2156645 - RNA, 19 nt, Artificial Sequence
  Description of Artificial Sequence: Synthetic oligonucleotide
  Antisense strand to SEQ ID NO: 2156644
acucacaaucuguuggagg

SEQ ID NO: 2156646 - RNA, 19 nt, Artificial Sequence
  Description of Artificial Sequence: Synthetic oligonucleotide
  Sense strand starting at position 2199 of SEQ ID NO: 1882909
gauugugaguuuccucucu

SEQ ID NO: 2156647 - RNA, 19 nt, Artificial Sequence
  Description of Artificial Sequence: Synthetic oligonucleotide
  Antisense strand to SEQ ID NO: 2156646
agagaggaaacucacaauc

SEQ ID NO: 2156648 - RNA, 19 nt, Artificial Sequence
  Description of Artificial Sequence: Synthetic oligonucleotide
  Sense strand starting at position 2201 of SEQ ID NO: 1882909
uugugaguuuccucucuca

SEQ ID NO: 2156649 - RNA, 19 nt, Artificial Sequence
  Description of Artificial Sequence: Synthetic oligonucleotide
  Antisense strand to SEQ ID NO: 2156648
ugagagaggaaacucacaa

SEQ ID NO: 2156650 - RNA, 19 nt, Artificial Sequence
  Description of Artificial Sequence: Synthetic oligonucleotide
  Sense strand starting at position 2221 of SEQ ID NO: 1882909
ggcagaaagugggucuuau

SEQ ID NO: 2156651 - RNA, 19 nt, Artificial Sequence
  Description of Artificial Sequence: Synthetic oligonucleotide
  Antisense strand to SEQ ID NO: 2156650
auaagacccacuuucugcc

SEQ ID NO: 2156652 - RNA, 19 nt, Artificial Sequence
  Description of Artificial Sequence: Synthetic oligonucleotide
  Sense strand starting at position 2231 of SEQ ID NO: 1882909
gggucuuauugccucugua

SEQ ID NO: 2156653 - RNA, 19 nt, Artificial Sequence
  Description of Artificial Sequence: Synthetic oligonucleotide
  Antisense strand to SEQ ID NO: 2156652
uacagaggcaauaagaccc

SEQ ID NO: 2156654 - RNA, 19 nt, Artificial Sequence
  Description of Artificial Sequence: Synthetic oligonucleotide
  Sense strand starting at position 2513 of SEQ ID NO: 1882909
uuuacuucugggcauaaac

SEQ ID NO: 2156655 - RNA, 19 nt, Artificial Sequence
  Description of Artificial Sequence: Synthetic oligonucleotide
  Antisense strand to SEQ ID NO: 2156654
guuuaugcccagaaguaaa

SEQ ID NO: 2156656 - RNA, 19 nt, Artificial Sequence
  Description of Artificial Sequence: Synthetic oligonucleotide
  Sense strand starting at position 2888 of SEQ ID NO: 1882909
gcacacucaugcucauagu

SEQ ID NO: 2156657 - RNA, 19 nt, Artificial Sequence
  Description of Artificial Sequence: Synthetic oligonucleotide
  Antisense strand to SEQ ID NO: 2156656
acuaugagcaugagugugc

SEQ ID NO: 2156658 - RNA, 19 nt, Artificial Sequence
  Description of Artificial Sequence: Synthetic oligonucleotide
  Sense strand starting at position 2915 of SEQ ID NO: 1882909
uugcaauagucaguaggua

SEQ ID NO: 2156659 - RNA, 19 nt, Artificial Sequence
  Description of Artificial Sequence: Synthetic oligonucleotide
  Antisense strand to SEQ ID NO: 2156658
uaccuacugacuauugcaa

SEQ ID NO: 2156660 - RNA, 19 nt, Artificial Sequence
  Description of Artificial Sequence: Synthetic oligonucleotide
  Sense strand starting at position 3137 of SEQ ID NO: 1882909
gaacuuugaggacgauauu

SEQ ID NO: 2156661 - RNA, 19 nt, Artificial Sequence
  Description of Artificial Sequence: Synthetic oligonucleotide
  Antisense strand to SEQ ID NO: 2156660
aauaucguccucaaaguuc

SEQ ID NO: 2156662 - RNA, 19 nt, Artificial Sequence
  Description of Artificial Sequence: Synthetic oligonucleotide
  Sense strand starting at position 3143 of SEQ ID NO: 1882909
ugaggacgauauucuaagu

SEQ ID NO: 2156663 - RNA, 19 nt, Artificial Sequence
  Description of Artificial Sequence: Synthetic oligonucleotide
  Antisense strand to SEQ ID NO: 2156662
acuuagaauaucguccuca

SEQ ID NO: 2156664 - RNA, 19 nt, Artificial Sequence
  Description of Artificial Sequence: Synthetic oligonucleotide
  Sense strand starting at position 3148 of SEQ ID NO: 1882909
acgauauucuaagugaaau

SEQ ID NO: 2156665 - RNA, 19 nt, Artificial Sequence
  Description of Artificial Sequence: Synthetic oligonucleotide
  Antisense strand to SEQ ID NO: 2156664
auuucacuuagaauaucgu

SEQ ID NO: 2156666 - RNA, 19 nt, Artificial Sequence
  Description of Artificial Sequence: Synthetic oligonucleotide
  Sense strand starting at position 3733 of SEQ ID NO: 1882909
ccggccuaauuagaaauuu

SEQ ID NO: 2156667 - RNA, 19 nt, Artificial Sequence
  Description of Artificial Sequence: Synthetic oligonucleotide
  Antisense strand to SEQ ID NO: 2156666
aaauuucuaauuaggccgg

SEQ ID NO: 2156668 - RNA, 19 nt, Artificial Sequence
  Description of Artificial Sequence: Synthetic oligonucleotide
  Sense strand starting at position 3845 of SEQ ID NO: 1882909
auuggaugaugucagagga

SEQ ID NO: 2156669 - RNA, 19 nt, Artificial Sequence
  Description of Artificial Sequence: Synthetic oligonucleotide
  Antisense strand to SEQ ID NO: 2156668
uccucugacaucauccaau

SEQ ID NO: 2156670 - RNA, 19 nt, Artificial Sequence
  Description of Artificial Sequence: Synthetic oligonucleotide
  Sense strand starting at position 3881 of SEQ ID NO: 1882909
guccguggaguuaguaauu

SEQ ID NO: 2156671 - RNA, 19 nt, Artificial Sequence
  Description of Artificial Sequence: Synthetic oligonucleotide
  Antisense strand to SEQ ID NO: 2156670
aauuacuaacuccacggac

SEQ ID NO: 2156672 - RNA, 19 nt, Artificial Sequence
  Description of Artificial Sequence: Synthetic oligonucleotide
  Sense strand starting at position 3890 of SEQ ID NO: 1882909
guuaguaauuaucucucuu

SEQ ID NO: 2156673 - RNA, 19 nt, Artificial Sequence
  Description of Artificial Sequence: Synthetic oligonucleotide
  Antisense strand to SEQ ID NO: 2156672
aagagagauaauuacuaac

SEQ ID NO: 2156674 - RNA, 19 nt, Artificial Sequence
  Description of Artificial Sequence: Synthetic oligonucleotide
  Sense strand starting at position 3894 of SEQ ID NO: 1882909
guaauuaucucucuucgaa

SEQ ID NO: 2156675 - RNA, 19 nt, Artificial Sequence
  Description of Artificial Sequence: Synthetic oligonucleotide
  Antisense strand to SEQ ID NO: 2156674
uucgaagagagauaauuac

SEQ ID NO: 2156676 - RNA, 19 nt, Artificial Sequence
  Description of Artificial Sequence: Synthetic oligonucleotide
  Sense strand starting at position 3973 of SEQ ID NO: 1882909
ccuaguaaguccuuuacug

SEQ ID NO: 2156677 - RNA, 19 nt, Artificial Sequence
  Description of Artificial Sequence: Synthetic oligonucleotide
  Antisense strand to SEQ ID NO: 2156676
caguaaaggacuuacuagg

SEQ ID NO: 2156678 - RNA, 19 nt, Artificial Sequence
  Description of Artificial Sequence: Synthetic oligonucleotide
  Sense strand starting at position 55 of SEQ ID NO: 1882910
ucuggaggcuucucugaag

SEQ ID NO: 2156679 - RNA, 19 nt, Artificial Sequence
  Description of Artificial Sequence: Synthetic oligonucleotide
  Antisense strand to SEQ ID NO: 2156678
cuucagagaagccuccaga

SEQ ID NO: 2156680 - RNA, 19 nt, Artificial Sequence
  Description of Artificial Sequence: Synthetic oligonucleotide
  Sense strand starting at position 132 of SEQ ID NO: 1882910
ugaagugagcuccaccaau

SEQ ID NO: 2156681 - RNA, 19 nt, Artificial Sequence
  Description of Artificial Sequence: Synthetic oligonucleotide
  Antisense strand to SEQ ID NO: 2156680
auugguggagcucacuuca

SEQ ID NO: 2156682 - RNA, 19 nt, Artificial Sequence
  Description of Artificial Sequence: Synthetic oligonucleotide
  Sense strand starting at position 169 of SEQ ID NO: 1882910
uccuaaaugugaccacaga

SEQ ID NO: 2156683 - RNA, 19 nt, Artificial Sequence
  Description of Artificial Sequence: Synthetic oligonucleotide
  Antisense strand to SEQ ID NO: 2156682
ucuguggucacauuuagga

SEQ ID NO: 2156684 - RNA, 19 nt, Artificial Sequence
  Description of Artificial Sequence: Synthetic oligonucleotide
  Sense strand starting at position 349 of SEQ ID NO: 1882910
agagcucauccaugaaaca

SEQ ID NO: 2156685 - RNA, 19 nt, Artificial Sequence
  Description of Artificial Sequence: Synthetic oligonucleotide
  Antisense strand to SEQ ID NO: 2156684
uguuucauggaugagcucu

SEQ ID NO: 2156686 - RNA, 19 nt, Artificial Sequence
  Description of Artificial Sequence: Synthetic oligonucleotide
  Sense strand starting at position 398 of SEQ ID NO: 1882910
gcaauauaaugcucugaaa

SEQ ID NO: 2156687 - RNA, 19 nt, Artificial Sequence
  Description of Artificial Sequence: Synthetic oligonucleotide
  Antisense strand to SEQ ID NO: 2156686
uuucagagcauuauauugc

SEQ ID NO: 2156688 - RNA, 19 nt, Artificial Sequence
  Description of Artificial Sequence: Synthetic oligonucleotide
  Sense strand starting at position 455 of SEQ ID NO: 1882910
uugaaacuuuaguucugga

SEQ ID NO: 2156689 - RNA, 19 nt, Artificial Sequence
  Description of Artificial Sequence: Synthetic oligonucleotide
  Antisense strand to SEQ ID NO: 2156688
uccagaacuaaaguuucaa

SEQ ID NO: 2156690 - RNA, 19 nt, Artificial Sequence
  Description of Artificial Sequence: Synthetic oligonucleotide
  Sense strand starting at position 460 of SEQ ID NO: 1882910
acuuuaguucuggauuguu

SEQ ID NO: 2156691 - RNA, 19 nt, Artificial Sequence
  Description of Artificial Sequence: Synthetic oligonucleotide
  Antisense strand to SEQ ID NO: 2156690
aacaauccagaacuaaagu

SEQ ID NO: 2156692 - RNA, 19 nt, Artificial Sequence
  Description of Artificial Sequence: Synthetic oligonucleotide
  Sense strand starting at position 628 of SEQ ID NO: 1882910
acuuguauuuguucuguau

SEQ ID NO: 2156693 - RNA, 19 nt, Artificial Sequence
  Description of Artificial Sequence: Synthetic oligonucleotide
  Antisense strand to SEQ ID NO: 2156692
auacagaacaaauacaagu

SEQ ID NO: 2156694 - RNA, 19 nt, Artificial Sequence
  Description of Artificial Sequence: Synthetic oligonucleotide
  Sense strand starting at position 631 of SEQ ID NO: 1882910
uguauuuguucuguauucu

SEQ ID NO: 2156695 - RNA, 19 nt, Artificial Sequence
  Description of Artificial Sequence: Synthetic oligonucleotide
  Antisense strand to SEQ ID NO: 2156694
agaauacagaacaaauaca

SEQ ID NO: 2156696 - RNA, 19 nt, Artificial Sequence
  Description of Artificial Sequence: Synthetic oligonucleotide
  Sense strand starting at position 632 of SEQ ID NO: 1882910
guauuuguucuguauucug

SEQ ID NO: 2156697 - RNA, 19 nt, Artificial Sequence
  Description of Artificial Sequence: Synthetic oligonucleotide
  Antisense strand to SEQ ID NO: 2156696
cagaauacagaacaaauac

SEQ ID NO: 2156698 - RNA, 19 nt, Artificial Sequence
  Description of Artificial Sequence: Synthetic oligonucleotide
  Sense strand starting at position 666 of SEQ ID NO: 1882910
ugguauagguccuugaaca

SEQ ID NO: 2156699 - RNA, 19 nt, Artificial Sequence
  Description of Artificial Sequence: Synthetic oligonucleotide
  Antisense strand to SEQ ID NO: 2156698
uguucaaggaccuauacca

SEQ ID NO: 2156700 - RNA, 19 nt, Artificial Sequence
  Description of Artificial Sequence: Synthetic oligonucleotide
  Sense strand starting at position 667 of SEQ ID NO: 1882910
gguauagguccuugaacau

SEQ ID NO: 2156701 - RNA, 19 nt, Artificial Sequence
  Description of Artificial Sequence: Synthetic oligonucleotide
  Antisense strand to SEQ ID NO: 2156700
auguucaaggaccuauacc

SEQ ID NO: 2156702 - RNA, 19 nt, Artificial Sequence
  Description of Artificial Sequence: Synthetic oligonucleotide
  Sense strand starting at position 773 of SEQ ID NO: 1882910
cuaguuugucuacacaaag

SEQ ID NO: 2156703 - RNA, 19 nt, Artificial Sequence
  Description of Artificial Sequence: Synthetic oligonucleotide
  Antisense strand to SEQ ID NO: 2156702
cuuuguguagacaaacuag

SEQ ID NO: 2156704 - RNA, 19 nt, Artificial Sequence
  Description of Artificial Sequence: Synthetic oligonucleotide
  Sense strand starting at position 823 of SEQ ID NO: 1882910
cuccuuugucaucaggcaa

SEQ ID NO: 2156705 - RNA, 19 nt, Artificial Sequence
  Description of Artificial Sequence: Synthetic oligonucleotide
  Antisense strand to SEQ ID NO: 2156704
uugccugaugacaaaggag

SEQ ID NO: 2156706 - RNA, 19 nt, Artificial Sequence
  Description of Artificial Sequence: Synthetic oligonucleotide
  Sense strand starting at position 852 of SEQ ID NO: 1882910
aaaugagcuguuugaugac

SEQ ID NO: 2156707 - RNA, 19 nt, Artificial Sequence
  Description of Artificial Sequence: Synthetic oligonucleotide
  Antisense strand to SEQ ID NO: 2156706
gucaucaaacagcucauuu

SEQ ID NO: 2156708 - RNA, 19 nt, Artificial Sequence
  Description of Artificial Sequence: Synthetic oligonucleotide
  Sense strand starting at position 990 of SEQ ID NO: 1882910
cuuguauggguuugggaga

SEQ ID NO: 2156709 - RNA, 19 nt, Artificial Sequence
  Description of Artificial Sequence: Synthetic oligonucleotide
  Antisense strand to SEQ ID NO: 2156708
ucucccaaacccauacaag

SEQ ID NO: 2156710 - RNA, 19 nt, Artificial Sequence
  Description of Artificial Sequence: Synthetic oligonucleotide
  Sense strand starting at position 1032 of SEQ ID NO: 1882910
cuuucuuuagccuagguaa

SEQ ID NO: 2156711 - RNA, 19 nt, Artificial Sequence
  Description of Artificial Sequence: Synthetic oligonucleotide
  Antisense strand to SEQ ID NO: 2156710
uuaccuaggcuaaagaaag

SEQ ID NO: 2156712 - RNA, 19 nt, Artificial Sequence
  Description of Artificial Sequence: Synthetic oligonucleotide
  Sense strand starting at position 1209 of SEQ ID NO: 1882910
ucaaguuaguuucuaaauc

SEQ ID NO: 2156713 - RNA, 19 nt, Artificial Sequence
  Description of Artificial Sequence: Synthetic oligonucleotide
  Antisense strand to SEQ ID NO: 2156712
gauuuagaaacuaacuuga

SEQ ID NO: 2156714 - RNA, 19 nt, Artificial Sequence
  Description of Artificial Sequence: Synthetic oligonucleotide
  Sense strand starting at position 1242 of SEQ ID NO: 1882910
uagcaauguuuauuuggua

SEQ ID NO: 2156715 - RNA, 19 nt, Artificial Sequence
  Description of Artificial Sequence: Synthetic oligonucleotide
  Antisense strand to SEQ ID NO: 2156714
uaccaaauaaacauugcua

SEQ ID NO: 2156716 - RNA, 19 nt, Artificial Sequence
  Description of Artificial Sequence: Synthetic oligonucleotide
  Sense strand starting at position 1243 of SEQ ID NO: 1882910
agcaauguuuauuugguau

SEQ ID NO: 2156717 - RNA, 19 nt, Artificial Sequence
  Description of Artificial Sequence: Synthetic oligonucleotide
  Antisense strand to SEQ ID NO: 2156716
auaccaaauaaacauugcu

SEQ ID NO: 2156718 - RNA, 19 nt, Artificial Sequence
  Description of Artificial Sequence: Synthetic oligonucleotide
  Sense strand starting at position 1256 of SEQ ID NO: 1882910
ugguauuuguugccaauau

SEQ ID NO: 2156719 - RNA, 19 nt, Artificial Sequence
  Description of Artificial Sequence: Synthetic oligonucleotide
  Antisense strand to SEQ ID NO: 2156718
auauuggcaacaaauacca

SEQ ID NO: 2156720 - RNA, 19 nt, Artificial Sequence
  Description of Artificial Sequence: Synthetic oligonucleotide
  Sense strand starting at position 1362 of SEQ ID NO: 1882910
ugagauugcuaauugagau

SEQ ID NO: 2156721 - RNA, 19 nt, Artificial Sequence
  Description of Artificial Sequence: Synthetic oligonucleotide
  Antisense strand to SEQ ID NO: 2156720
aucucaauuagcaaucuca

SEQ ID NO: 2156722 - RNA, 19 nt, Artificial Sequence
  Description of Artificial Sequence: Synthetic oligonucleotide
  Sense strand starting at position 1506 of SEQ ID NO: 1882910
ucuguccauguuuaucaaa

SEQ ID NO: 2156723 - RNA, 19 nt, Artificial Sequence
  Description of Artificial Sequence: Synthetic oligonucleotide
  Antisense strand to SEQ ID NO: 2156722
uuugauaaacauggacaga

SEQ ID NO: 2156724 - RNA, 19 nt, Artificial Sequence
  Description of Artificial Sequence: Synthetic oligonucleotide
  Sense strand starting at position 1547 of SEQ ID NO: 1882910
uuacaagguuuacuaagua

SEQ ID NO: 2156725 - RNA, 19 nt, Artificial Sequence
  Description of Artificial Sequence: Synthetic oligonucleotide
  Antisense strand to SEQ ID NO: 2156724
uacuuaguaaaccuuguaa

SEQ ID NO: 2156726 - RNA, 19 nt, Artificial Sequence
  Description of Artificial Sequence: Synthetic oligonucleotide
  Sense strand starting at position 2184 of SEQ ID NO: 1882910
gccauugugacgccaucuu

SEQ ID NO: 2156727 - RNA, 19 nt, Artificial Sequence
  Description of Artificial Sequence: Synthetic oligonucleotide
  Antisense strand to SEQ ID NO: 2156726
aagauggcgucacaauggc

SEQ ID NO: 2156728 - RNA, 19 nt, Artificial Sequence
  Description of Artificial Sequence: Synthetic oligonucleotide
  Sense strand starting at position 2591 of SEQ ID NO: 1882910
aggaauacacaguguuaua

SEQ ID NO: 2156729 - RNA, 19 nt, Artificial Sequence
  Description of Artificial Sequence: Synthetic oligonucleotide
  Antisense strand to SEQ ID NO: 2156728
uauaacacuguguauuccu

SEQ ID NO: 2156730 - RNA, 19 nt, Artificial Sequence
  Description of Artificial Sequence: Synthetic oligonucleotide
  Sense strand starting at position 2742 of SEQ ID NO: 1882910
uaggguuauugggcagaac

SEQ ID NO: 2156731 - RNA, 19 nt, Artificial Sequence
  Description of Artificial Sequence: Synthetic oligonucleotide
  Antisense strand to SEQ ID NO: 2156730
guucugcccaauaacccua

SEQ ID NO: 2156732 - RNA, 19 nt, Artificial Sequence
  Description of Artificial Sequence: Synthetic oligonucleotide
  Sense strand starting at position 3302 of SEQ ID NO: 1882910
aauuaaguauugguacagu

SEQ ID NO: 2156733 - RNA, 19 nt, Artificial Sequence
  Description of Artificial Sequence: Synthetic oligonucleotide
  Antisense strand to SEQ ID NO: 2156732
acuguaccaauacuuaauu

SEQ ID NO: 2156734 - RNA, 19 nt, Artificial Sequence
  Description of Artificial Sequence: Synthetic oligonucleotide
  Sense strand starting at position 3305 of SEQ ID NO: 1882910
uaaguauugguacaguacu

SEQ ID NO: 2156735 - RNA, 19 nt, Artificial Sequence
  Description of Artificial Sequence: Synthetic oligonucleotide
  Antisense strand to SEQ ID NO: 2156734
aguacuguaccaauacuua

SEQ ID NO: 2156736 - RNA, 19 nt, Artificial Sequence
  Description of Artificial Sequence: Synthetic oligonucleotide
  Sense strand starting at position 3430 of SEQ ID NO: 1882910
augagaauuccucagccuu

SEQ ID NO: 2156737 - RNA, 19 nt, Artificial Sequence
  Description of Artificial Sequence: Synthetic oligonucleotide
  Antisense strand to SEQ ID NO: 2156736
aaggcugaggaauucucau

SEQ ID NO: 2156738 - RNA, 19 nt, Artificial Sequence
  Description of Artificial Sequence: Synthetic oligonucleotide
  Sense strand starting at position 3557 of SEQ ID NO: 1882910
guguguucuggauaagaau

SEQ ID NO: 2156739 - RNA, 19 nt, Artificial Sequence
  Description of Artificial Sequence: Synthetic oligonucleotide
  Antisense strand to SEQ ID NO: 2156738
auucuuauccagaacacac

SEQ ID NO: 2156740 - RNA, 19 nt, Artificial Sequence
  Description of Artificial Sequence: Synthetic oligonucleotide
  Sense strand starting at position 3603 of SEQ ID NO: 1882910
gcaucauaucuggagguga

SEQ ID NO: 2156741 - RNA, 19 nt, Artificial Sequence
  Description of Artificial Sequence: Synthetic oligonucleotide
  Antisense strand to SEQ ID NO: 2156740
ucaccuccagauaugaugc

SEQ ID NO: 2156742 - RNA, 19 nt, Artificial Sequence
  Description of Artificial Sequence: Synthetic oligonucleotide
  Sense strand starting at position 3605 of SEQ ID NO: 1882910
aucauaucuggaggugaua

SEQ ID NO: 2156743 - RNA, 19 nt, Artificial Sequence
  Description of Artificial Sequence: Synthetic oligonucleotide
  Antisense strand to SEQ ID NO: 2156742
uaucaccuccagauaugau

SEQ ID NO: 2156744 - RNA, 19 nt, Artificial Sequence
  Description of Artificial Sequence: Synthetic oligonucleotide
  Sense strand starting at position 3614 of SEQ ID NO: 1882910
ggaggugauaucgauaugu

SEQ ID NO: 2156745 - RNA, 19 nt, Artificial Sequence
  Description of Artificial Sequence: Synthetic oligonucleotide
  Antisense strand to SEQ ID NO: 2156744
acauaucgauaucaccucc

SEQ ID NO: 2156746 - RNA, 19 nt, Artificial Sequence
  Description of Artificial Sequence: Synthetic oligonucleotide
  Sense strand starting at position 3616 of SEQ ID NO: 1882910
aggugauaucgauauguca

SEQ ID NO: 2156747 - RNA, 19 nt, Artificial Sequence
  Description of Artificial Sequence: Synthetic oligonucleotide
  Antisense strand to SEQ ID NO: 2156746
ugacauaucgauaucaccu

SEQ ID NO: 2156748 - RNA, 19 nt, Artificial Sequence
  Description of Artificial Sequence: Synthetic oligonucleotide
  Sense strand starting at position 3619 of SEQ ID NO: 1882910
ugauaucgauaugucaaca

SEQ ID NO: 2156749 - RNA, 19 nt, Artificial Sequence
  Description of Artificial Sequence: Synthetic oligonucleotide
  Antisense strand to SEQ ID NO: 2156748
uguugacauaucgauauca

SEQ ID NO: 2156750 - RNA, 19 nt, Artificial Sequence
  Description of Artificial Sequence: Synthetic oligonucleotide
  Sense strand starting at position 3624 of SEQ ID NO: 1882910
ucgauaugucaacaugaug

SEQ ID NO: 2156751 - RNA, 19 nt, Artificial Sequence
  Description of Artificial Sequence: Synthetic oligonucleotide
  Antisense strand to SEQ ID NO: 2156750
caucauguugacauaucga

SEQ ID NO: 2156752 - RNA, 19 nt, Artificial Sequence
  Description of Artificial Sequence: Synthetic oligonucleotide
  Sense strand starting at position 3661 of SEQ ID NO: 1882910
ggugauaauugacuuugau

SEQ ID NO: 2156753 - RNA, 19 nt, Artificial Sequence
  Description of Artificial Sequence: Synthetic oligonucleotide
  Antisense strand to SEQ ID NO: 2156752
aucaaagucaauuaucacc

SEQ ID NO: 2156754 - RNA, 19 nt, Artificial Sequence
  Description of Artificial Sequence: Synthetic oligonucleotide
  Sense strand starting at position 3722 of SEQ ID NO: 1882910
cuuuguaaucaauacguau

SEQ ID NO: 2156755 - RNA, 19 nt, Artificial Sequence
  Description of Artificial Sequence: Synthetic oligonucleotide
  Antisense strand to SEQ ID NO: 2156754
auacguauugauuacaaag

SEQ ID NO: 2156756 - RNA, 19 nt, Artificial Sequence
  Description of Artificial Sequence: Synthetic oligonucleotide
  Sense strand starting at position 3906 of SEQ ID NO: 1882910
aauucuucuguagggaaga

SEQ ID NO: 2156757 - RNA, 19 nt, Artificial Sequence
  Description of Artificial Sequence: Synthetic oligonucleotide
  Antisense strand to SEQ ID NO: 2156756
ucuucccuacagaagaauu

SEQ ID NO: 2156758 - RNA, 19 nt, Artificial Sequence
  Description of Artificial Sequence: Synthetic oligonucleotide
  Sense strand starting at position 38 of SEQ ID NO: 1882911
ugccacugacuuugaaaug

SEQ ID NO: 2156759 - RNA, 19 nt, Artificial Sequence
  Description of Artificial Sequence: Synthetic oligonucleotide
  Antisense strand to SEQ ID NO: 2156758
cauuucaaagucaguggca

SEQ ID NO: 2156760 - RNA, 19 nt, Artificial Sequence
  Description of Artificial Sequence: Synthetic oligonucleotide
  Sense strand starting at position 47 of SEQ ID NO: 1882911
cuuugaaaugcauggaaau

SEQ ID NO: 2156761 - RNA, 19 nt, Artificial Sequence
  Description of Artificial Sequence: Synthetic oligonucleotide
  Antisense strand to SEQ ID NO: 2156760
auuuccaugcauuucaaag

SEQ ID NO: 2156762 - RNA, 19 nt, Artificial Sequence
  Description of Artificial Sequence: Synthetic oligonucleotide
  Sense strand starting at position 48 of SEQ ID NO: 1882911
uuugaaaugcauggaaauu

SEQ ID NO: 2156763 - RNA, 19 nt, Artificial Sequence
  Description of Artificial Sequence: Synthetic oligonucleotide
  Antisense strand to SEQ ID NO: 2156762
aauuuccaugcauuucaaa

SEQ ID NO: 2156764 - RNA, 19 nt, Artificial Sequence
  Description of Artificial Sequence: Synthetic oligonucleotide
  Sense strand starting at position 66 of SEQ ID NO: 1882911
uuggaauuggcagguagau

SEQ ID NO: 2156765 - RNA, 19 nt, Artificial Sequence
  Description of Artificial Sequence: Synthetic oligonucleotide
  Antisense strand to SEQ ID NO: 2156764
aucuaccugccaauuccaa

SEQ ID NO: 2156766 - RNA, 19 nt, Artificial Sequence
  Description of Artificial Sequence: Synthetic oligonucleotide
  Sense strand starting at position 152 of SEQ ID NO: 1882911
gugaguguucacuguauaa

SEQ ID NO: 2156767 - RNA, 19 nt, Artificial Sequence
  Description of Artificial Sequence: Synthetic oligonucleotide
  Antisense strand to SEQ ID NO: 2156766
uuauacagugaacacucac

SEQ ID NO: 2156768 - RNA, 19 nt, Artificial Sequence
  Description of Artificial Sequence: Synthetic oligonucleotide
  Sense strand starting at position 442 of SEQ ID NO: 1882911
ccugaauagcugugauugu

SEQ ID NO: 2156769 - RNA, 19 nt, Artificial Sequence
  Description of Artificial Sequence: Synthetic oligonucleotide
  Antisense strand to SEQ ID NO: 2156768
acaaucacagcuauucagg

SEQ ID NO: 2156770 - RNA, 19 nt, Artificial Sequence
  Description of Artificial Sequence: Synthetic oligonucleotide
  Sense strand starting at position 641 of SEQ ID NO: 1882911
ggguucuugcuauguaauc

SEQ ID NO: 2156771 - RNA, 19 nt, Artificial Sequence
  Description of Artificial Sequence: Synthetic oligonucleotide
  Antisense strand to SEQ ID NO: 2156770
gauuacauagcaagaaccc

SEQ ID NO: 2156772 - RNA, 19 nt, Artificial Sequence
  Description of Artificial Sequence: Synthetic oligonucleotide
  Sense strand starting at position 642 of SEQ ID NO: 1882911
gguucuugcuauguaaucu

SEQ ID NO: 2156773 - RNA, 19 nt, Artificial Sequence
  Description of Artificial Sequence: Synthetic oligonucleotide
  Antisense strand to SEQ ID NO: 2156772
agauuacauagcaagaacc

SEQ ID NO: 2156774 - RNA, 19 nt, Artificial Sequence
  Description of Artificial Sequence: Synthetic oligonucleotide
  Sense strand starting at position 646 of SEQ ID NO: 1882911
cuugcuauguaaucuagac

SEQ ID NO: 2156775 - RNA, 19 nt, Artificial Sequence
  Description of Artificial Sequence: Synthetic oligonucleotide
  Antisense strand to SEQ ID NO: 2156774
gucuagauuacauagcaag

SEQ ID NO: 2156776 - RNA, 19 nt, Artificial Sequence
  Description of Artificial Sequence: Synthetic oligonucleotide
  Sense strand starting at position 650 of SEQ ID NO: 1882911
cuauguaaucuagacuagu

SEQ ID NO: 2156777 - RNA, 19 nt, Artificial Sequence
  Description of Artificial Sequence: Synthetic oligonucleotide
  Antisense strand to SEQ ID NO: 2156776
acuagucuagauuacauag

SEQ ID NO: 2156778 - RNA, 19 nt, Artificial Sequence
  Description of Artificial Sequence: Synthetic oligonucleotide
  Sense strand starting at position 653 of SEQ ID NO: 1882911
uguaaucuagacuagucuu

SEQ ID NO: 2156779 - RNA, 19 nt, Artificial Sequence
  Description of Artificial Sequence: Synthetic oligonucleotide
  Antisense strand to SEQ ID NO: 2156778
aagacuagucuagauuaca

SEQ ID NO: 2156780 - RNA, 19 nt, Artificial Sequence
  Description of Artificial Sequence: Synthetic oligonucleotide
  Sense strand starting at position 1144 of SEQ ID NO: 1882911
agaccagucuagcccauau

SEQ ID NO: 2156781 - RNA, 19 nt, Artificial Sequence
  Description of Artificial Sequence: Synthetic oligonucleotide
  Antisense strand to SEQ ID NO: 2156780
auaugggcuagacuggucu

SEQ ID NO: 2156782 - RNA, 19 nt, Artificial Sequence
  Description of Artificial Sequence: Synthetic oligonucleotide
  Sense strand starting at position 1292 of SEQ ID NO: 1882911
ccgagaucauaccucuuua

SEQ ID NO: 2156783 - RNA, 19 nt, Artificial Sequence
  Description of Artificial Sequence: Synthetic oligonucleotide
  Antisense strand to SEQ ID NO: 2156782
uaaagagguaugaucucgg

SEQ ID NO: 2156784 - RNA, 19 nt, Artificial Sequence
  Description of Artificial Sequence: Synthetic oligonucleotide
  Sense strand starting at position 1472 of SEQ ID NO: 1882911
cugcuucuggcagagauca

SEQ ID NO: 2156785 - RNA, 19 nt, Artificial Sequence
  Description of Artificial Sequence: Synthetic oligonucleotide
  Antisense strand to SEQ ID NO: 2156784
ugaucucugccagaagcag

SEQ ID NO: 2156786 - RNA, 19 nt, Artificial Sequence
  Description of Artificial Sequence: Synthetic oligonucleotide
  Sense strand starting at position 1474 of SEQ ID NO: 1882911
gcuucuggcagagaucaaa

SEQ ID NO: 2156787 - RNA, 19 nt, Artificial Sequence
  Description of Artificial Sequence: Synthetic oligonucleotide
  Antisense strand to SEQ ID NO: 2156786
uuugaucucugccagaagc

SEQ ID NO: 2156788 - RNA, 19 nt, Artificial Sequence
  Description of Artificial Sequence: Synthetic oligonucleotide
  Sense strand starting at position 1501 of SEQ ID NO: 1882911
guucccagcuuguuaacuu

SEQ ID NO: 2156789 - RNA, 19 nt, Artificial Sequence
  Description of Artificial Sequence: Synthetic oligonucleotide
  Antisense strand to SEQ ID NO: 2156788
aaguuaacaagcugggaac

SEQ ID NO: 2156790 - RNA, 19 nt, Artificial Sequence
  Description of Artificial Sequence: Synthetic oligonucleotide
  Sense strand starting at position 1525 of SEQ ID NO: 1882911
ccauuagaaucuuucccgu

SEQ ID NO: 2156791 - RNA, 19 nt, Artificial Sequence
  Description of Artificial Sequence: Synthetic oligonucleotide
  Antisense strand to SEQ ID NO: 2156790
acgggaaagauucuaaugg

SEQ ID NO: 2156792 - RNA, 19 nt, Artificial Sequence
  Description of Artificial Sequence: Synthetic oligonucleotide
  Sense strand starting at position 1527 of SEQ ID NO: 1882911
auuagaaucuuucccguca

SEQ ID NO: 2156793 - RNA, 19 nt, Artificial Sequence
  Description of Artificial Sequence: Synthetic oligonucleotide
  Antisense strand to SEQ ID NO: 2156792
ugacgggaaagauucuaau

SEQ ID NO: 2156794 - RNA, 19 nt, Artificial Sequence
  Description of Artificial Sequence: Synthetic oligonucleotide
  Sense strand starting at position 1528 of SEQ ID NO: 1882911
uuagaaucuuucccgucaa

SEQ ID NO: 2156795 - RNA, 19 nt, Artificial Sequence
  Description of Artificial Sequence: Synthetic oligonucleotide
  Antisense strand to SEQ ID NO: 2156794
uugacgggaaagauucuaa

SEQ ID NO: 2156796 - RNA, 19 nt, Artificial Sequence
  Description of Artificial Sequence: Synthetic oligonucleotide
  Sense strand starting at position 1809 of SEQ ID NO: 1882911
ugaggaauggugggucuga

SEQ ID NO: 2156797 - RNA, 19 nt, Artificial Sequence
  Description of Artificial Sequence: Synthetic oligonucleotide
  Antisense strand to SEQ ID NO: 2156796
ucagacccaccauuccuca

SEQ ID NO: 2156798 - RNA, 19 nt, Artificial Sequence
  Description of Artificial Sequence: Synthetic oligonucleotide
  Sense strand starting at position 1810 of SEQ ID NO: 1882911
gaggaauggugggucugau

SEQ ID NO: 2156799 - RNA, 19 nt, Artificial Sequence
  Description of Artificial Sequence: Synthetic oligonucleotide
  Antisense strand to SEQ ID NO: 2156798
aucagacccaccauuccuc

SEQ ID NO: 2156800 - RNA, 19 nt, Artificial Sequence
  Description of Artificial Sequence: Synthetic oligonucleotide
  Sense strand starting at position 1840 of SEQ ID NO: 1882911
agacaucaucauggugaca

SEQ ID NO: 2156801 - RNA, 19 nt, Artificial Sequence
  Description of Artificial Sequence: Synthetic oligonucleotide
  Antisense strand to SEQ ID NO: 2156800
ugucaccaugaugaugucu

SEQ ID NO: 2156802 - RNA, 19 nt, Artificial Sequence
  Description of Artificial Sequence: Synthetic oligonucleotide
  Sense strand starting at position 1842 of SEQ ID NO: 1882911
acaucaucauggugacaca

SEQ ID NO: 2156803 - RNA, 19 nt, Artificial Sequence
  Description of Artificial Sequence: Synthetic oligonucleotide
  Antisense strand to SEQ ID NO: 2156802
ugugucaccaugaugaugu

SEQ ID NO: 2156804 - RNA, 19 nt, Artificial Sequence
  Description of Artificial Sequence: Synthetic oligonucleotide
  Sense strand starting at position 1845 of SEQ ID NO: 1882911
ucaucauggugacacauua

SEQ ID NO: 2156805 - RNA, 19 nt, Artificial Sequence
  Description of Artificial Sequence: Synthetic oligonucleotide
  Antisense strand to SEQ ID NO: 2156804
uaaugugucaccaugauga

SEQ ID NO: 2156806 - RNA, 19 nt, Artificial Sequence
  Description of Artificial Sequence: Synthetic oligonucleotide
  Sense strand starting at position 1853 of SEQ ID NO: 1882911
gugacacauuacugcauuu

SEQ ID NO: 2156807 - RNA, 19 nt, Artificial Sequence
  Description of Artificial Sequence: Synthetic oligonucleotide
  Antisense strand to SEQ ID NO: 2156806
aaaugcaguaaugugucac

SEQ ID NO: 2156808 - RNA, 19 nt, Artificial Sequence
  Description of Artificial Sequence: Synthetic oligonucleotide
  Sense strand starting at position 2081 of SEQ ID NO: 1882911
uggagucaaacuugcaaga

SEQ ID NO: 2156809 - RNA, 19 nt, Artificial Sequence
  Description of Artificial Sequence: Synthetic oligonucleotide
  Antisense strand to SEQ ID NO: 2156808
ucuugcaaguuugacucca

SEQ ID NO: 2156810 - RNA, 19 nt, Artificial Sequence
  Description of Artificial Sequence: Synthetic oligonucleotide
  Sense strand starting at position 2083 of SEQ ID NO: 1882911
gagucaaacuugcaagaga

SEQ ID NO: 2156811 - RNA, 19 nt, Artificial Sequence
  Description of Artificial Sequence: Synthetic oligonucleotide
  Antisense strand to SEQ ID NO: 2156810
ucucuugcaaguuugacuc

SEQ ID NO: 2156812 - RNA, 19 nt, Artificial Sequence
  Description of Artificial Sequence: Synthetic oligonucleotide
  Sense strand starting at position 2475 of SEQ ID NO: 1882911
ccaugauccucucuggaga

SEQ ID NO: 2156813 - RNA, 19 nt, Artificial Sequence
  Description of Artificial Sequence: Synthetic oligonucleotide
  Antisense strand to SEQ ID NO: 2156812
ucuccagagaggaucaugg

SEQ ID NO: 2156814 - RNA, 19 nt, Artificial Sequence
  Description of Artificial Sequence: Synthetic oligonucleotide
  Sense strand starting at position 2931 of SEQ ID NO: 1882911
gguaaagucuuucugggac

SEQ ID NO: 2156815 - RNA, 19 nt, Artificial Sequence
  Description of Artificial Sequence: Synthetic oligonucleotide
  Antisense strand to SEQ ID NO: 2156814
gucccagaaagacuuuacc

SEQ ID NO: 2156816 - RNA, 19 nt, Artificial Sequence
  Description of Artificial Sequence: Synthetic oligonucleotide
  Sense strand starting at position 3238 of SEQ ID NO: 1882911
agguguaaggacuaguguu

SEQ ID NO: 2156817 - RNA, 19 nt, Artificial Sequence
  Description of Artificial Sequence: Synthetic oligonucleotide
  Antisense strand to SEQ ID NO: 2156816
aacacuaguccuuacaccu

SEQ ID NO: 2156818 - RNA, 19 nt, Artificial Sequence
  Description of Artificial Sequence: Synthetic oligonucleotide
  Sense strand starting at position 3471 of SEQ ID NO: 1882911
ggaccugauaaguguuguu

SEQ ID NO: 2156819 - RNA, 19 nt, Artificial Sequence
  Description of Artificial Sequence: Synthetic oligonucleotide
  Antisense strand to SEQ ID NO: 2156818
aacaacacuuaucaggucc

SEQ ID NO: 2156820 - RNA, 19 nt, Artificial Sequence
  Description of Artificial Sequence: Synthetic oligonucleotide
  Sense strand starting at position 3476 of SEQ ID NO: 1882911
ugauaaguguuguugaaag

SEQ ID NO: 2156821 - RNA, 19 nt, Artificial Sequence
  Description of Artificial Sequence: Synthetic oligonucleotide
  Antisense strand to SEQ ID NO: 2156820
cuuucaacaacacuuauca

SEQ ID NO: 2156822 - RNA, 19 nt, Artificial Sequence
  Description of Artificial Sequence: Synthetic oligonucleotide
  Sense strand starting at position 3488 of SEQ ID NO: 1882911
uugaaagaauucugucaaa

SEQ ID NO: 2156823 - RNA, 19 nt, Artificial Sequence
  Description of Artificial Sequence: Synthetic oligonucleotide
  Antisense strand to SEQ ID NO: 2156822
uuugacagaauucuuucaa

SEQ ID NO: 2156824 - RNA, 19 nt, Artificial Sequence
  Description of Artificial Sequence: Synthetic oligonucleotide
  Sense strand starting at position 3604 of SEQ ID NO: 1882911
auggcuagauucccacaga

SEQ ID NO: 2156825 - RNA, 19 nt, Artificial Sequence
  Description of Artificial Sequence: Synthetic oligonucleotide
  Antisense strand to SEQ ID NO: 2156824
ucugugggaaucuagccau

SEQ ID NO: 2156826 - RNA, 19 nt, Artificial Sequence
  Description of Artificial Sequence: Synthetic oligonucleotide
  Sense strand starting at position 3605 of SEQ ID NO: 1882911
uggcuagauucccacagau

SEQ ID NO: 2156827 - RNA, 19 nt, Artificial Sequence
  Description of Artificial Sequence: Synthetic oligonucleotide
  Antisense strand to SEQ ID NO: 2156826
aucugugggaaucuagcca

SEQ ID NO: 2156828 - RNA, 19 nt, Artificial Sequence
  Description of Artificial Sequence: Synthetic oligonucleotide
  Sense strand starting at position 3607 of SEQ ID NO: 1882911
gcuagauucccacagauuc

SEQ ID NO: 2156829 - RNA, 19 nt, Artificial Sequence
  Description of Artificial Sequence: Synthetic oligonucleotide
  Antisense strand to SEQ ID NO: 2156828
gaaucugugggaaucuagc

SEQ ID NO: 2156830 - RNA, 19 nt, Artificial Sequence
  Description of Artificial Sequence: Synthetic oligonucleotide
  Sense strand starting at position 3861 of SEQ ID NO: 1882911
uaguucuuaccugggacuu

SEQ ID NO: 2156831 - RNA, 19 nt, Artificial Sequence
  Description of Artificial Sequence: Synthetic oligonucleotide
  Antisense strand to SEQ ID NO: 2156830
aagucccagguaagaacua

SEQ ID NO: 2156832 - RNA, 19 nt, Artificial Sequence
  Description of Artificial Sequence: Synthetic oligonucleotide
  Sense strand starting at position 3862 of SEQ ID NO: 1882911
aguucuuaccugggacuuu

SEQ ID NO: 2156833 - RNA, 19 nt, Artificial Sequence
  Description of Artificial Sequence: Synthetic oligonucleotide
  Antisense strand to SEQ ID NO: 2156832
aaagucccagguaagaacu

SEQ ID NO: 2156834 - RNA, 19 nt, Artificial Sequence
  Description of Artificial Sequence: Synthetic oligonucleotide
  Sense strand starting at position 3943 of SEQ ID NO: 1882911
ggaggagccuuuguacucu

SEQ ID NO: 2156835 - RNA, 19 nt, Artificial Sequence
  Description of Artificial Sequence: Synthetic oligonucleotide
  Antisense strand to SEQ ID NO: 2156834
agaguacaaaggcuccucc

SEQ ID NO: 2156836 - RNA, 19 nt, Artificial Sequence
  Description of Artificial Sequence: Synthetic oligonucleotide
  Sense strand starting at position 3974 of SEQ ID NO: 1882911
ggaggcugugagcaaauua

SEQ ID NO: 2156837 - RNA, 19 nt, Artificial Sequence
  Description of Artificial Sequence: Synthetic oligonucleotide
  Antisense strand to SEQ ID NO: 2156836
uaauuugcucacagccucc

SEQ ID NO: 2156838 - RNA, 19 nt, Artificial Sequence
  Description of Artificial Sequence: Synthetic oligonucleotide
  Sense strand starting at position 47 of SEQ ID NO: 1882912
cuuugaaaugcauggaaau

SEQ ID NO: 2156839 - RNA, 19 nt, Artificial Sequence
  Description of Artificial Sequence: Synthetic oligonucleotide
  Antisense strand to SEQ ID NO: 2156838
auuuccaugcauuucaaag

SEQ ID NO: 2156840 - RNA, 19 nt, Artificial Sequence
  Description of Artificial Sequence: Synthetic oligonucleotide
  Sense strand starting at position 48 of SEQ ID NO: 1882912
uuugaaaugcauggaaauu

SEQ ID NO: 2156841 - RNA, 19 nt, Artificial Sequence
  Description of Artificial Sequence: Synthetic oligonucleotide
  Antisense strand to SEQ ID NO: 2156840
aauuuccaugcauuucaaa

SEQ ID NO: 2156842 - RNA, 19 nt, Artificial Sequence
  Description of Artificial Sequence: Synthetic oligonucleotide
  Sense strand starting at position 66 of SEQ ID NO: 1882912
uuggaauuggcagguagau

SEQ ID NO: 2156843 - RNA, 19 nt, Artificial Sequence
  Description of Artificial Sequence: Synthetic oligonucleotide
  Antisense strand to SEQ ID NO: 2156842
aucuaccugccaauuccaa

SEQ ID NO: 2156844 - RNA, 19 nt, Artificial Sequence
  Description of Artificial Sequence: Synthetic oligonucleotide
  Sense strand starting at position 90 of SEQ ID NO: 1882912
gcuagauagauguauaggu

SEQ ID NO: 2156845 - RNA, 19 nt, Artificial Sequence
  Description of Artificial Sequence: Synthetic oligonucleotide
  Antisense strand to SEQ ID NO: 2156844
accuauacaucuaucuagc

SEQ ID NO: 2156846 - RNA, 19 nt, Artificial Sequence
  Description of Artificial Sequence: Synthetic oligonucleotide
  Sense strand starting at position 98 of SEQ ID NO: 1882912
gauguauagguagggauca

SEQ ID NO: 2156847 - RNA, 19 nt, Artificial Sequence
  Description of Artificial Sequence: Synthetic oligonucleotide
  Antisense strand to SEQ ID NO: 2156846
ugaucccuaccuauacauc

SEQ ID NO: 2156848 - RNA, 19 nt, Artificial Sequence
  Description of Artificial Sequence: Synthetic oligonucleotide
  Sense strand starting at position 148 of SEQ ID NO: 1882912
gcacgugaguguucacugu

SEQ ID NO: 2156849 - RNA, 19 nt, Artificial Sequence
  Description of Artificial Sequence: Synthetic oligonucleotide
  Antisense strand to SEQ ID NO: 2156848
acagugaacacucacgugc

SEQ ID NO: 2156850 - RNA, 19 nt, Artificial Sequence
  Description of Artificial Sequence: Synthetic oligonucleotide
  Sense strand starting at position 152 of SEQ ID NO: 1882912
gugaguguucacuguauaa

SEQ ID NO: 2156851 - RNA, 19 nt, Artificial Sequence
  Description of Artificial Sequence: Synthetic oligonucleotide
  Antisense strand to SEQ ID NO: 2156850
uuauacagugaacacucac

SEQ ID NO: 2156852 - RNA, 19 nt, Artificial Sequence
  Description of Artificial Sequence: Synthetic oligonucleotide
  Sense strand starting at position 441 of SEQ ID NO: 1882912
ccugaauagcugugauugu

SEQ ID NO: 2156853 - RNA, 19 nt, Artificial Sequence
  Description of Artificial Sequence: Synthetic oligonucleotide
  Antisense strand to SEQ ID NO: 2156852
acaaucacagcuauucagg

SEQ ID NO: 2156854 - RNA, 19 nt, Artificial Sequence
  Description of Artificial Sequence: Synthetic oligonucleotide
  Sense strand starting at position 442 of SEQ ID NO: 1882912
cugaauagcugugauugua

SEQ ID NO: 2156855 - RNA, 19 nt, Artificial Sequence
  Description of Artificial Sequence: Synthetic oligonucleotide
  Antisense strand to SEQ ID NO: 2156854
uacaaucacagcuauucag

SEQ ID NO: 2156856 - RNA, 19 nt, Artificial Sequence
  Description of Artificial Sequence: Synthetic oligonucleotide
  Sense strand starting at position 640 of SEQ ID NO: 1882912
ggguucuugcuauguaauc

SEQ ID NO: 2156857 - RNA, 19 nt, Artificial Sequence
  Description of Artificial Sequence: Synthetic oligonucleotide
  Antisense strand to SEQ ID NO: 2156856
gauuacauagcaagaaccc

SEQ ID NO: 2156858 - RNA, 19 nt, Artificial Sequence
  Description of Artificial Sequence: Synthetic oligonucleotide
  Sense strand starting at position 641 of SEQ ID NO: 1882912
gguucuugcuauguaaucu

SEQ ID NO: 2156859 - RNA, 19 nt, Artificial Sequence
  Description of Artificial Sequence: Synthetic oligonucleotide
  Antisense strand to SEQ ID NO: 2156858
agauuacauagcaagaacc

SEQ ID NO: 2156860 - RNA, 19 nt, Artificial Sequence
  Description of Artificial Sequence: Synthetic oligonucleotide
  Sense strand starting at position 645 of SEQ ID NO: 1882912
cuugcuauguaaucuagac

SEQ ID NO: 2156861 - RNA, 19 nt, Artificial Sequence
  Description of Artificial Sequence: Synthetic oligonucleotide
  Antisense strand to SEQ ID NO: 2156860
gucuagauuacauagcaag

SEQ ID NO: 2156862 - RNA, 19 nt, Artificial Sequence
  Description of Artificial Sequence: Synthetic oligonucleotide
  Sense strand starting at position 649 of SEQ ID NO: 1882912
cuauguaaucuagacuagu

SEQ ID NO: 2156863 - RNA, 19 nt, Artificial Sequence
  Description of Artificial Sequence: Synthetic oligonucleotide
  Antisense strand to SEQ ID NO: 2156862
acuagucuagauuacauag

SEQ ID NO: 2156864 - RNA, 19 nt, Artificial Sequence
  Description of Artificial Sequence: Synthetic oligonucleotide
  Sense strand starting at position 652 of SEQ ID NO: 1882912
uguaaucuagacuagucuu

SEQ ID NO: 2156865 - RNA, 19 nt, Artificial Sequence
  Description of Artificial Sequence: Synthetic oligonucleotide
  Antisense strand to SEQ ID NO: 2156864
aagacuagucuagauuaca

SEQ ID NO: 2156866 - RNA, 19 nt, Artificial Sequence
  Description of Artificial Sequence: Synthetic oligonucleotide
  Sense strand starting at position 1143 of SEQ ID NO: 1882912
agaccagucuagcccauaa

SEQ ID NO: 2156867 - RNA, 19 nt, Artificial Sequence
  Description of Artificial Sequence: Synthetic oligonucleotide
  Antisense strand to SEQ ID NO: 2156866
uuaugggcuagacuggucu

SEQ ID NO: 2156868 - RNA, 19 nt, Artificial Sequence
  Description of Artificial Sequence: Synthetic oligonucleotide
  Sense strand starting at position 1153 of SEQ ID NO: 1882912
agcccauaauauggugaaa

SEQ ID NO: 2156869 - RNA, 19 nt, Artificial Sequence
  Description of Artificial Sequence: Synthetic oligonucleotide
  Antisense strand to SEQ ID NO: 2156868
uuucaccauauuaugggcu

SEQ ID NO: 2156870 - RNA, 19 nt, Artificial Sequence
  Description of Artificial Sequence: Synthetic oligonucleotide
  Sense strand starting at position 1502 of SEQ ID NO: 1882912
guucccagcuuguuaacuu

SEQ ID NO: 2156871 - RNA, 19 nt, Artificial Sequence
  Description of Artificial Sequence: Synthetic oligonucleotide
  Antisense strand to SEQ ID NO: 2156870
aaguuaacaagcugggaac

SEQ ID NO: 2156872 - RNA, 19 nt, Artificial Sequence
  Description of Artificial Sequence: Synthetic oligonucleotide
  Sense strand starting at position 1695 of SEQ ID NO: 1882912
gggaguggcuuucauagaa

SEQ ID NO: 2156873 - RNA, 19 nt, Artificial Sequence
  Description of Artificial Sequence: Synthetic oligonucleotide
  Antisense strand to SEQ ID NO: 2156872
uucuaugaaagccacuccc

SEQ ID NO: 2156874 - RNA, 19 nt, Artificial Sequence
  Description of Artificial Sequence: Synthetic oligonucleotide
  Sense strand starting at position 1841 of SEQ ID NO: 1882912
agacaucaucauggugaca

SEQ ID NO: 2156875 - RNA, 19 nt, Artificial Sequence
  Description of Artificial Sequence: Synthetic oligonucleotide
  Antisense strand to SEQ ID NO: 2156874
ugucaccaugaugaugucu

SEQ ID NO: 2156876 - RNA, 19 nt, Artificial Sequence
  Description of Artificial Sequence: Synthetic oligonucleotide
  Sense strand starting at position 1843 of SEQ ID NO: 1882912
acaucaucauggugacaca

SEQ ID NO: 2156877 - RNA, 19 nt, Artificial Sequence
  Description of Artificial Sequence: Synthetic oligonucleotide
  Antisense strand to SEQ ID NO: 2156876
ugugucaccaugaugaugu

SEQ ID NO: 2156878 - RNA, 19 nt, Artificial Sequence
  Description of Artificial Sequence: Synthetic oligonucleotide
  Sense strand starting at position 3228 of SEQ ID NO: 1882912
augcaucuguaagguguaa

SEQ ID NO: 2156879 - RNA, 19 nt, Artificial Sequence
  Description of Artificial Sequence: Synthetic oligonucleotide
  Antisense strand to SEQ ID NO: 2156878
uuacaccuuacagaugcau

SEQ ID NO: 2156880 - RNA, 19 nt, Artificial Sequence
  Description of Artificial Sequence: Synthetic oligonucleotide
  Sense strand starting at position 3239 of SEQ ID NO: 1882912
agguguaaggacuaguguu

SEQ ID NO: 2156881 - RNA, 19 nt, Artificial Sequence
  Description of Artificial Sequence: Synthetic oligonucleotide
  Antisense strand to SEQ ID NO: 2156880
aacacuaguccuuacaccu

SEQ ID NO: 2156882 - RNA, 19 nt, Artificial Sequence
  Description of Artificial Sequence: Synthetic oligonucleotide
  Sense strand starting at position 3472 of SEQ ID NO: 1882912
ggaccugauaaguguuguu

SEQ ID NO: 2156883 - RNA, 19 nt, Artificial Sequence
  Description of Artificial Sequence: Synthetic oligonucleotide
  Antisense strand to SEQ ID NO: 2156882
aacaacacuuaucaggucc

SEQ ID NO: 2156884 - RNA, 19 nt, Artificial Sequence
  Description of Artificial Sequence: Synthetic oligonucleotide
  Sense strand starting at position 3489 of SEQ ID NO: 1882912
uugaaagaauucugucaaa

SEQ ID NO: 2156885 - RNA, 19 nt, Artificial Sequence
  Description of Artificial Sequence: Synthetic oligonucleotide
  Antisense strand to SEQ ID NO: 2156884
uuugacagaauucuuucaa

SEQ ID NO: 2156886 - RNA, 19 nt, Artificial Sequence
  Description of Artificial Sequence: Synthetic oligonucleotide
  Sense strand starting at position 3863 of SEQ ID NO: 1882912
aguucuuaccugggacuuu

SEQ ID NO: 2156887 - RNA, 19 nt, Artificial Sequence
  Description of Artificial Sequence: Synthetic oligonucleotide
  Antisense strand to SEQ ID NO: 2156886
aaagucccagguaagaacu

SEQ ID NO: 2156888 - RNA, 19 nt, Artificial Sequence
  Description of Artificial Sequence: Synthetic oligonucleotide
  Sense strand starting at position 3944 of SEQ ID NO: 1882912
ggaggagccuuuguacucu

SEQ ID NO: 2156889 - RNA, 19 nt, Artificial Sequence
  Description of Artificial Sequence: Synthetic oligonucleotide
  Antisense strand to SEQ ID NO: 2156888
agaguacaaaggcuccucc

SEQ ID NO: 2156890 - RNA, 19 nt, Artificial Sequence
  Description of Artificial Sequence: Synthetic oligonucleotide
  Sense strand starting at position 38 of SEQ ID NO: 1882913
ugccacugacuuugaaaug

SEQ ID NO: 2156891 - RNA, 19 nt, Artificial Sequence
  Description of Artificial Sequence: Synthetic oligonucleotide
  Antisense strand to SEQ ID NO: 2156890
cauuucaaagucaguggca

SEQ ID NO: 2156892 - RNA, 19 nt, Artificial Sequence
  Description of Artificial Sequence: Synthetic oligonucleotide
  Sense strand starting at position 47 of SEQ ID NO: 1882913
cuuugaaaugcauggaaau

SEQ ID NO: 2156893 - RNA, 19 nt, Artificial Sequence
  Description of Artificial Sequence: Synthetic oligonucleotide
  Antisense strand to SEQ ID NO: 2156892
auuuccaugcauuucaaag

SEQ ID NO: 2156894 - RNA, 19 nt, Artificial Sequence
  Description of Artificial Sequence: Synthetic oligonucleotide
  Sense strand starting at position 48 of SEQ ID NO: 1882913
uuugaaaugcauggaaauu

SEQ ID NO: 2156895 - RNA, 19 nt, Artificial Sequence
  Description of Artificial Sequence: Synthetic oligonucleotide
  Antisense strand to SEQ ID NO: 2156894
aauuuccaugcauuucaaa

SEQ ID NO: 2156896 - RNA, 19 nt, Artificial Sequence
  Description of Artificial Sequence: Synthetic oligonucleotide
  Sense strand starting at position 66 of SEQ ID NO: 1882913
uuggaauuggcagguagau

SEQ ID NO: 2156897 - RNA, 19 nt, Artificial Sequence
  Description of Artificial Sequence: Synthetic oligonucleotide
  Antisense strand to SEQ ID NO: 2156896
aucuaccugccaauuccaa

SEQ ID NO: 2156898 - RNA, 19 nt, Artificial Sequence
  Description of Artificial Sequence: Synthetic oligonucleotide
  Sense strand starting at position 152 of SEQ ID NO: 1882913
gugaguguucacuguauaa

SEQ ID NO: 2156899 - RNA, 19 nt, Artificial Sequence
  Description of Artificial Sequence: Synthetic oligonucleotide
  Antisense strand to SEQ ID NO: 2156898
uuauacagugaacacucac

SEQ ID NO: 2156900 - RNA, 19 nt, Artificial Sequence
  Description of Artificial Sequence: Synthetic oligonucleotide
  Sense strand starting at position 442 of SEQ ID NO: 1882913
ccugaauagcugugauugu

SEQ ID NO: 2156901 - RNA, 19 nt, Artificial Sequence
  Description of Artificial Sequence: Synthetic oligonucleotide
  Antisense strand to SEQ ID NO: 2156900
acaaucacagcuauucagg

SEQ ID NO: 2156902 - RNA, 19 nt, Artificial Sequence
  Description of Artificial Sequence: Synthetic oligonucleotide
  Sense strand starting at position 641 of SEQ ID NO: 1882913
ggguucuugcuauguaauc

SEQ ID NO: 2156903 - RNA, 19 nt, Artificial Sequence
  Description of Artificial Sequence: Synthetic oligonucleotide
  Antisense strand to SEQ ID NO: 2156902
gauuacauagcaagaaccc

SEQ ID NO: 2156904 - RNA, 19 nt, Artificial Sequence
  Description of Artificial Sequence: Synthetic oligonucleotide
  Sense strand starting at position 642 of SEQ ID NO: 1882913
gguucuugcuauguaaucu

SEQ ID NO: 2156905 - RNA, 19 nt, Artificial Sequence
  Description of Artificial Sequence: Synthetic oligonucleotide
  Antisense strand to SEQ ID NO: 2156904
agauuacauagcaagaacc

SEQ ID NO: 2156906 - RNA, 19 nt, Artificial Sequence
  Description of Artificial Sequence: Synthetic oligonucleotide
  Sense strand starting at position 646 of SEQ ID NO: 1882913
cuugcuauguaaucuagac

SEQ ID NO: 2156907 - RNA, 19 nt, Artificial Sequence
  Description of Artificial Sequence: Synthetic oligonucleotide
  Antisense strand to SEQ ID NO: 2156906
gucuagauuacauagcaag

SEQ ID NO: 2156908 - RNA, 19 nt, Artificial Sequence
  Description of Artificial Sequence: Synthetic oligonucleotide
  Sense strand starting at position 650 of SEQ ID NO: 1882913
cuauguaaucuagacuagu

SEQ ID NO: 2156909 - RNA, 19 nt, Artificial Sequence
  Description of Artificial Sequence: Synthetic oligonucleotide
  Antisense strand to SEQ ID NO: 2156908
acuagucuagauuacauag

SEQ ID NO: 2156910 - RNA, 19 nt, Artificial Sequence
  Description of Artificial Sequence: Synthetic oligonucleotide
  Sense strand starting at position 653 of SEQ ID NO: 1882913
uguaaucuagacuagucuu

SEQ ID NO: 2156911 - RNA, 19 nt, Artificial Sequence
  Description of Artificial Sequence: Synthetic oligonucleotide
  Antisense strand to SEQ ID NO: 2156910
aagacuagucuagauuaca

SEQ ID NO: 2156912 - RNA, 19 nt, Artificial Sequence
  Description of Artificial Sequence: Synthetic oligonucleotide
  Sense strand starting at position 1144 of SEQ ID NO: 1882913
agaccagucuagcccauau

SEQ ID NO: 2156913 - RNA, 19 nt, Artificial Sequence
  Description of Artificial Sequence: Synthetic oligonucleotide
  Antisense strand to SEQ ID NO: 2156912
auaugggcuagacuggucu

SEQ ID NO: 2156914 - RNA, 19 nt, Artificial Sequence
  Description of Artificial Sequence: Synthetic oligonucleotide
  Sense strand starting at position 1292 of SEQ ID NO: 1882913
ccgagaucauaccucuuua

SEQ ID NO: 2156915 - RNA, 19 nt, Artificial Sequence
  Description of Artificial Sequence: Synthetic oligonucleotide
  Antisense strand to SEQ ID NO: 2156914
uaaagagguaugaucucgg

SEQ ID NO: 2156916 - RNA, 19 nt, Artificial Sequence
  Description of Artificial Sequence: Synthetic oligonucleotide
  Sense strand starting at position 1472 of SEQ ID NO: 1882913
cugcuucuggcagagauca

SEQ ID NO: 2156917 - RNA, 19 nt, Artificial Sequence
  Description of Artificial Sequence: Synthetic oligonucleotide
  Antisense strand to SEQ ID NO: 2156916
ugaucucugccagaagcag

SEQ ID NO: 2156918 - RNA, 19 nt, Artificial Sequence
  Description of Artificial Sequence: Synthetic oligonucleotide
  Sense strand starting at position 1474 of SEQ ID NO: 1882913
gcuucuggcagagaucaaa

SEQ ID NO: 2156919 - RNA, 19 nt, Artificial Sequence
  Description of Artificial Sequence: Synthetic oligonucleotide
  Antisense strand to SEQ ID NO: 2156918
uuugaucucugccagaagc

SEQ ID NO: 2156920 - RNA, 19 nt, Artificial Sequence
  Description of Artificial Sequence: Synthetic oligonucleotide
  Sense strand starting at position 1501 of SEQ ID NO: 1882913
guucccagcuuguuaacuu

SEQ ID NO: 2156921 - RNA, 19 nt, Artificial Sequence
  Description of Artificial Sequence: Synthetic oligonucleotide
  Antisense strand to SEQ ID NO: 2156920
aaguuaacaagcugggaac

SEQ ID NO: 2156922 - RNA, 19 nt, Artificial Sequence
  Description of Artificial Sequence: Synthetic oligonucleotide
  Sense strand starting at position 1525 of SEQ ID NO: 1882913
ccauuagaaucuuucccgu

SEQ ID NO: 2156923 - RNA, 19 nt, Artificial Sequence
  Description of Artificial Sequence: Synthetic oligonucleotide
  Antisense strand to SEQ ID NO: 2156922
acgggaaagauucuaaugg

SEQ ID NO: 2156924 - RNA, 19 nt, Artificial Sequence
  Description of Artificial Sequence: Synthetic oligonucleotide
  Sense strand starting at position 1527 of SEQ ID NO: 1882913
auuagaaucuuucccguca

SEQ ID NO: 2156925 - RNA, 19 nt, Artificial Sequence
  Description of Artificial Sequence: Synthetic oligonucleotide
  Antisense strand to SEQ ID NO: 2156924
ugacgggaaagauucuaau

SEQ ID NO: 2156926 - RNA, 19 nt, Artificial Sequence
  Description of Artificial Sequence: Synthetic oligonucleotide
  Sense strand starting at position 1528 of SEQ ID NO: 1882913
uuagaaucuuucccgucaa

SEQ ID NO: 2156927 - RNA, 19 nt, Artificial Sequence
  Description of Artificial Sequence: Synthetic oligonucleotide
  Antisense strand to SEQ ID NO: 2156926
uugacgggaaagauucuaa

SEQ ID NO: 2156928 - RNA, 19 nt, Artificial Sequence
  Description of Artificial Sequence: Synthetic oligonucleotide
  Sense strand starting at position 1809 of SEQ ID NO: 1882913
ugaggaauggugggucuga

SEQ ID NO: 2156929 - RNA, 19 nt, Artificial Sequence
  Description of Artificial Sequence: Synthetic oligonucleotide
  Antisense strand to SEQ ID NO: 2156928
ucagacccaccauuccuca

SEQ ID NO: 2156930 - RNA, 19 nt, Artificial Sequence
  Description of Artificial Sequence: Synthetic oligonucleotide
  Sense strand starting at position 1810 of SEQ ID NO: 1882913
gaggaauggugggucugau

SEQ ID NO: 2156931 - RNA, 19 nt, Artificial Sequence
  Description of Artificial Sequence: Synthetic oligonucleotide
  Antisense strand to SEQ ID NO: 2156930
aucagacccaccauuccuc

SEQ ID NO: 2156932 - RNA, 19 nt, Artificial Sequence
  Description of Artificial Sequence: Synthetic oligonucleotide
  Sense strand starting at position 1840 of SEQ ID NO: 1882913
agacaucaucauggugaca

SEQ ID NO: 2156933 - RNA, 19 nt, Artificial Sequence
  Description of Artificial Sequence: Synthetic oligonucleotide
  Antisense strand to SEQ ID NO: 2156932
ugucaccaugaugaugucu

SEQ ID NO: 2156934 - RNA, 19 nt, Artificial Sequence
  Description of Artificial Sequence: Synthetic oligonucleotide
  Sense strand starting at position 1842 of SEQ ID NO: 1882913
acaucaucauggugacaca

SEQ ID NO: 2156935 - RNA, 19 nt, Artificial Sequence
  Description of Artificial Sequence: Synthetic oligonucleotide
  Antisense strand to SEQ ID NO: 2156934
ugugucaccaugaugaugu

SEQ ID NO: 2156936 - RNA, 19 nt, Artificial Sequence
  Description of Artificial Sequence: Synthetic oligonucleotide
  Sense strand starting at position 1845 of SEQ ID NO: 1882913
ucaucauggugacacauua

SEQ ID NO: 2156937 - RNA, 19 nt, Artificial Sequence
  Description of Artificial Sequence: Synthetic oligonucleotide
  Antisense strand to SEQ ID NO: 2156936
uaaugugucaccaugauga

SEQ ID NO: 2156938 - RNA, 19 nt, Artificial Sequence
  Description of Artificial Sequence: Synthetic oligonucleotide
  Sense strand starting at position 1853 of SEQ ID NO: 1882913
gugacacauuacugcauuu

SEQ ID NO: 2156939 - RNA, 19 nt, Artificial Sequence
  Description of Artificial Sequence: Synthetic oligonucleotide
  Antisense strand to SEQ ID NO: 2156938
aaaugcaguaaugugucac

SEQ ID NO: 2156940 - RNA, 19 nt, Artificial Sequence
  Description of Artificial Sequence: Synthetic oligonucleotide
  Sense strand starting at position 2081 of SEQ ID NO: 1882913
uggagucaaacuugcaaga

SEQ ID NO: 2156941 - RNA, 19 nt, Artificial Sequence
  Description of Artificial Sequence: Synthetic oligonucleotide
  Antisense strand to SEQ ID NO: 2156940
ucuugcaaguuugacucca

SEQ ID NO: 2156942 - RNA, 19 nt, Artificial Sequence
  Description of Artificial Sequence: Synthetic oligonucleotide
  Sense strand starting at position 2083 of SEQ ID NO: 1882913
gagucaaacuugcaagaga

SEQ ID NO: 2156943 - RNA, 19 nt, Artificial Sequence
  Description of Artificial Sequence: Synthetic oligonucleotide
  Antisense strand to SEQ ID NO: 2156942
ucucuugcaaguuugacuc

SEQ ID NO: 2156944 - RNA, 19 nt, Artificial Sequence
  Description of Artificial Sequence: Synthetic oligonucleotide
  Sense strand starting at position 2475 of SEQ ID NO: 1882913
ccaugauccucucuggaga

SEQ ID NO: 2156945 - RNA, 19 nt, Artificial Sequence
  Description of Artificial Sequence: Synthetic oligonucleotide
  Antisense strand to SEQ ID NO: 2156944
ucuccagagaggaucaugg

SEQ ID NO: 2156946 - RNA, 19 nt, Artificial Sequence
  Description of Artificial Sequence: Synthetic oligonucleotide
  Sense strand starting at position 2931 of SEQ ID NO: 1882913
gguaaagucuuucugggac

SEQ ID NO: 2156947 - RNA, 19 nt, Artificial Sequence
  Description of Artificial Sequence: Synthetic oligonucleotide
  Antisense strand to SEQ ID NO: 2156946
gucccagaaagacuuuacc

SEQ ID NO: 2156948 - RNA, 19 nt, Artificial Sequence
  Description of Artificial Sequence: Synthetic oligonucleotide
  Sense strand starting at position 3238 of SEQ ID NO: 1882913
agguguaaggacuaguguu

SEQ ID NO: 2156949 - RNA, 19 nt, Artificial Sequence
  Description of Artificial Sequence: Synthetic oligonucleotide
  Antisense strand to SEQ ID NO: 2156948
aacacuaguccuuacaccu

SEQ ID NO: 2156950 - RNA, 19 nt, Artificial Sequence
  Description of Artificial Sequence: Synthetic oligonucleotide
  Sense strand starting at position 3471 of SEQ ID NO: 1882913
ggaccugauaaguguuguu

SEQ ID NO: 2156951 - RNA, 19 nt, Artificial Sequence
  Description of Artificial Sequence: Synthetic oligonucleotide
  Antisense strand to SEQ ID NO: 2156950
aacaacacuuaucaggucc

SEQ ID NO: 2156952 - RNA, 19 nt, Artificial Sequence
  Description of Artificial Sequence: Synthetic oligonucleotide
  Sense strand starting at position 3476 of SEQ ID NO: 1882913
ugauaaguguuguugaaag

SEQ ID NO: 2156953 - RNA, 19 nt, Artificial Sequence
  Description of Artificial Sequence: Synthetic oligonucleotide
  Antisense strand to SEQ ID NO: 2156952
cuuucaacaacacuuauca

SEQ ID NO: 2156954 - RNA, 19 nt, Artificial Sequence
  Description of Artificial Sequence: Synthetic oligonucleotide
  Sense strand starting at position 3488 of SEQ ID NO: 1882913
uugaaagaauucugucaaa

SEQ ID NO: 2156955 - RNA, 19 nt, Artificial Sequence
  Description of Artificial Sequence: Synthetic oligonucleotide
  Antisense strand to SEQ ID NO: 2156954
uuugacagaauucuuucaa

SEQ ID NO: 2156956 - RNA, 19 nt, Artificial Sequence
  Description of Artificial Sequence: Synthetic oligonucleotide
  Sense strand starting at position 3604 of SEQ ID NO: 1882913
auggcuagauucccacaga

SEQ ID NO: 2156957 - RNA, 19 nt, Artificial Sequence
  Description of Artificial Sequence: Synthetic oligonucleotide
  Antisense strand to SEQ ID NO: 2156956
ucugugggaaucuagccau

SEQ ID NO: 2156958 - RNA, 19 nt, Artificial Sequence
  Description of Artificial Sequence: Synthetic oligonucleotide
  Sense strand starting at position 3605 of SEQ ID NO: 1882913
uggcuagauucccacagau

SEQ ID NO: 2156959 - RNA, 19 nt, Artificial Sequence
  Description of Artificial Sequence: Synthetic oligonucleotide
  Antisense strand to SEQ ID NO: 2156958
aucugugggaaucuagcca

SEQ ID NO: 2156960 - RNA, 19 nt, Artificial Sequence
  Description of Artificial Sequence: Synthetic oligonucleotide
  Sense strand starting at position 3607 of SEQ ID NO: 1882913
gcuagauucccacagauuc

SEQ ID NO: 2156961 - RNA, 19 nt, Artificial Sequence
  Description of Artificial Sequence: Synthetic oligonucleotide
  Antisense strand to SEQ ID NO: 2156960
gaaucugugggaaucuagc

SEQ ID NO: 2156962 - RNA, 19 nt, Artificial Sequence
  Description of Artificial Sequence: Synthetic oligonucleotide
  Sense strand starting at position 3861 of SEQ ID NO: 1882913
uaguucuuaccugggacuu

SEQ ID NO: 2156963 - RNA, 19 nt, Artificial Sequence
  Description of Artificial Sequence: Synthetic oligonucleotide
  Antisense strand to SEQ ID NO: 2156962
aagucccagguaagaacua

SEQ ID NO: 2156964 - RNA, 19 nt, Artificial Sequence
  Description of Artificial Sequence: Synthetic oligonucleotide
  Sense strand starting at position 3862 of SEQ ID NO: 1882913
aguucuuaccugggacuuu

SEQ ID NO: 2156965 - RNA, 19 nt, Artificial Sequence
  Description of Artificial Sequence: Synthetic oligonucleotide
  Antisense strand to SEQ ID NO: 2156964
aaagucccagguaagaacu

SEQ ID NO: 2156966 - RNA, 19 nt, Artificial Sequence
  Description of Artificial Sequence: Synthetic oligonucleotide
  Sense strand starting at position 3943 of SEQ ID NO: 1882913
ggaggagccuuuguacucu

SEQ ID NO: 2156967 - RNA, 19 nt, Artificial Sequence
  Description of Artificial Sequence: Synthetic oligonucleotide
  Antisense strand to SEQ ID NO: 2156966
agaguacaaaggcuccucc

SEQ ID NO: 2156968 - RNA, 19 nt, Artificial Sequence
  Description of Artificial Sequence: Synthetic oligonucleotide
  Sense strand starting at position 3974 of SEQ ID NO: 1882913
ggaggcugugagcaaauua

SEQ ID NO: 2156969 - RNA, 19 nt, Artificial Sequence
  Description of Artificial Sequence: Synthetic oligonucleotide
  Antisense strand to SEQ ID NO: 2156968
uaauuugcucacagccucc

SEQ ID NO: 2156970 - RNA, 19 nt, Artificial Sequence
  Description of Artificial Sequence: Synthetic oligonucleotide
  Sense strand starting at position 47 of SEQ ID NO: 1882914
cuuugaaaugcauggaaau

SEQ ID NO: 2156971 - RNA, 19 nt, Artificial Sequence
  Description of Artificial Sequence: Synthetic oligonucleotide
  Antisense strand to SEQ ID NO: 2156970
auuuccaugcauuucaaag

SEQ ID NO: 2156972 - RNA, 19 nt, Artificial Sequence
  Description of Artificial Sequence: Synthetic oligonucleotide
  Sense strand starting at position 48 of SEQ ID NO: 1882914
uuugaaaugcauggaaauu

SEQ ID NO: 2156973 - RNA, 19 nt, Artificial Sequence
  Description of Artificial Sequence: Synthetic oligonucleotide
  Antisense strand to SEQ ID NO: 2156972
aauuuccaugcauuucaaa

SEQ ID NO: 2156974 - RNA, 19 nt, Artificial Sequence
  Description of Artificial Sequence: Synthetic oligonucleotide
  Sense strand starting at position 66 of SEQ ID NO: 1882914
uuggaauuggcagguagau

SEQ ID NO: 2156975 - RNA, 19 nt, Artificial Sequence
  Description of Artificial Sequence: Synthetic oligonucleotide
  Antisense strand to SEQ ID NO: 2156974
aucuaccugccaauuccaa

SEQ ID NO: 2156976 - RNA, 19 nt, Artificial Sequence
  Description of Artificial Sequence: Synthetic oligonucleotide
  Sense strand starting at position 90 of SEQ ID NO: 1882914
gcuagauagauguauaggu

SEQ ID NO: 2156977 - RNA, 19 nt, Artificial Sequence
  Description of Artificial Sequence: Synthetic oligonucleotide
  Antisense strand to SEQ ID NO: 2156976
accuauacaucuaucuagc

SEQ ID NO: 2156978 - RNA, 19 nt, Artificial Sequence
  Description of Artificial Sequence: Synthetic oligonucleotide
  Sense strand starting at position 98 of SEQ ID NO: 1882914
gauguauagguagggauca

SEQ ID NO: 2156979 - RNA, 19 nt, Artificial Sequence
  Description of Artificial Sequence: Synthetic oligonucleotide
  Antisense strand to SEQ ID NO: 2156978
ugaucccuaccuauacauc

SEQ ID NO: 2156980 - RNA, 19 nt, Artificial Sequence
  Description of Artificial Sequence: Synthetic oligonucleotide
  Sense strand starting at position 148 of SEQ ID NO: 1882914
gcacgugaguguucacugu

SEQ ID NO: 2156981 - RNA, 19 nt, Artificial Sequence
  Description of Artificial Sequence: Synthetic oligonucleotide
  Antisense strand to SEQ ID NO: 2156980
acagugaacacucacgugc

SEQ ID NO: 2156982 - RNA, 19 nt, Artificial Sequence
  Description of Artificial Sequence: Synthetic oligonucleotide
  Sense strand starting at position 152 of SEQ ID NO: 1882914
gugaguguucacuguauaa

SEQ ID NO: 2156983 - RNA, 19 nt, Artificial Sequence
  Description of Artificial Sequence: Synthetic oligonucleotide
  Antisense strand to SEQ ID NO: 2156982
uuauacagugaacacucac

SEQ ID NO: 2156984 - RNA, 19 nt, Artificial Sequence
  Description of Artificial Sequence: Synthetic oligonucleotide
  Sense strand starting at position 441 of SEQ ID NO: 1882914
ccugaauagcugugauugu

SEQ ID NO: 2156985 - RNA, 19 nt, Artificial Sequence
  Description of Artificial Sequence: Synthetic oligonucleotide
  Antisense strand to SEQ ID NO: 2156984
acaaucacagcuauucagg

SEQ ID NO: 2156986 - RNA, 19 nt, Artificial Sequence
  Description of Artificial Sequence: Synthetic oligonucleotide
  Sense strand starting at position 442 of SEQ ID NO: 1882914
cugaauagcugugauugua

SEQ ID NO: 2156987 - RNA, 19 nt, Artificial Sequence
  Description of Artificial Sequence: Synthetic oligonucleotide
  Antisense strand to SEQ ID NO: 2156986
uacaaucacagcuauucag

SEQ ID NO: 2156988 - RNA, 19 nt, Artificial Sequence
  Description of Artificial Sequence: Synthetic oligonucleotide
  Sense strand starting at position 640 of SEQ ID NO: 1882914
ggguucuugcuauguaauc

SEQ ID NO: 2156989 - RNA, 19 nt, Artificial Sequence
  Description of Artificial Sequence: Synthetic oligonucleotide
  Antisense strand to SEQ ID NO: 2156988
gauuacauagcaagaaccc

SEQ ID NO: 2156990 - RNA, 19 nt, Artificial Sequence
  Description of Artificial Sequence: Synthetic oligonucleotide
  Sense strand starting at position 641 of SEQ ID NO: 1882914
gguucuugcuauguaaucu

SEQ ID NO: 2156991 - RNA, 19 nt, Artificial Sequence
  Description of Artificial Sequence: Synthetic oligonucleotide
  Antisense strand to SEQ ID NO: 2156990
agauuacauagcaagaacc

SEQ ID NO: 2156992 - RNA, 19 nt, Artificial Sequence
  Description of Artificial Sequence: Synthetic oligonucleotide
  Sense strand starting at position 645 of SEQ ID NO: 1882914
cuugcuauguaaucuagac

SEQ ID NO: 2156993 - RNA, 19 nt, Artificial Sequence
  Description of Artificial Sequence: Synthetic oligonucleotide
  Antisense strand to SEQ ID NO: 2156992
gucuagauuacauagcaag

SEQ ID NO: 2156994 - RNA, 19 nt, Artificial Sequence
  Description of Artificial Sequence: Synthetic oligonucleotide
  Sense strand starting at position 649 of SEQ ID NO: 1882914
cuauguaaucuagacuagu

SEQ ID NO: 2156995 - RNA, 19 nt, Artificial Sequence
  Description of Artificial Sequence: Synthetic oligonucleotide
  Antisense strand to SEQ ID NO: 2156994
acuagucuagauuacauag

SEQ ID NO: 2156996 - RNA, 19 nt, Artificial Sequence
  Description of Artificial Sequence: Synthetic oligonucleotide
  Sense strand starting at position 652 of SEQ ID NO: 1882914
uguaaucuagacuagucuu

SEQ ID NO: 2156997 - RNA, 19 nt, Artificial Sequence
  Description of Artificial Sequence: Synthetic oligonucleotide
  Antisense strand to SEQ ID NO: 2156996
aagacuagucuagauuaca

SEQ ID NO: 2156998 - RNA, 19 nt, Artificial Sequence
  Description of Artificial Sequence: Synthetic oligonucleotide
  Sense strand starting at position 1143 of SEQ ID NO: 1882914
agaccagucuagcccauaa

SEQ ID NO: 2156999 - RNA, 19 nt, Artificial Sequence
  Description of Artificial Sequence: Synthetic oligonucleotide
  Antisense strand to SEQ ID NO: 2156998
uuaugggcuagacuggucu

SEQ ID NO: 2157000 - RNA, 19 nt, Artificial Sequence
  Description of Artificial Sequence: Synthetic oligonucleotide
  Sense strand starting at position 1153 of SEQ ID NO: 1882914
agcccauaauauggugaaa

SEQ ID NO: 2157001 - RNA, 19 nt, Artificial Sequence
  Description of Artificial Sequence: Synthetic oligonucleotide
  Antisense strand to SEQ ID NO: 2157000
uuucaccauauuaugggcu

SEQ ID NO: 2157002 - RNA, 19 nt, Artificial Sequence
  Description of Artificial Sequence: Synthetic oligonucleotide
  Sense strand starting at position 1502 of SEQ ID NO: 1882914
guucccagcuuguuaacuu

SEQ ID NO: 2157003 - RNA, 19 nt, Artificial Sequence
  Description of Artificial Sequence: Synthetic oligonucleotide
  Antisense strand to SEQ ID NO: 2157002
aaguuaacaagcugggaac

SEQ ID NO: 2157004 - RNA, 19 nt, Artificial Sequence
  Description of Artificial Sequence: Synthetic oligonucleotide
  Sense strand starting at position 1695 of SEQ ID NO: 1882914
gggaguggcuuucauagaa

SEQ ID NO: 2157005 - RNA, 19 nt, Artificial Sequence
  Description of Artificial Sequence: Synthetic oligonucleotide
  Antisense strand to SEQ ID NO: 2157004
uucuaugaaagccacuccc

SEQ ID NO: 2157006 - RNA, 19 nt, Artificial Sequence
  Description of Artificial Sequence: Synthetic oligonucleotide
  Sense strand starting at position 1841 of SEQ ID NO: 1882914
agacaucaucauggugaca

SEQ ID NO: 2157007 - RNA, 19 nt, Artificial Sequence
  Description of Artificial Sequence: Synthetic oligonucleotide
  Antisense strand to SEQ ID NO: 2157006
ugucaccaugaugaugucu

SEQ ID NO: 2157008 - RNA, 19 nt, Artificial Sequence
  Description of Artificial Sequence: Synthetic oligonucleotide
  Sense strand starting at position 1843 of SEQ ID NO: 1882914
acaucaucauggugacaca

SEQ ID NO: 2157009 - RNA, 19 nt, Artificial Sequence
  Description of Artificial Sequence: Synthetic oligonucleotide
  Antisense strand to SEQ ID NO: 2157008
ugugucaccaugaugaugu

SEQ ID NO: 2157010 - RNA, 19 nt, Artificial Sequence
  Description of Artificial Sequence: Synthetic oligonucleotide
  Sense strand starting at position 3228 of SEQ ID NO: 1882914
augcaucuguaagguguaa

SEQ ID NO: 2157011 - RNA, 19 nt, Artificial Sequence
  Description of Artificial Sequence: Synthetic oligonucleotide
  Antisense strand to SEQ ID NO: 2157010
uuacaccuuacagaugcau

SEQ ID NO: 2157012 - RNA, 19 nt, Artificial Sequence
  Description of Artificial Sequence: Synthetic oligonucleotide
  Sense strand starting at position 3239 of SEQ ID NO: 1882914
agguguaaggacuaguguu

SEQ ID NO: 2157013 - RNA, 19 nt, Artificial Sequence
  Description of Artificial Sequence: Synthetic oligonucleotide
  Antisense strand to SEQ ID NO: 2157012
aacacuaguccuuacaccu

SEQ ID NO: 2157014 - RNA, 19 nt, Artificial Sequence
  Description of Artificial Sequence: Synthetic oligonucleotide
  Sense strand starting at position 3472 of SEQ ID NO: 1882914
ggaccugauaaguguuguu

SEQ ID NO: 2157015 - RNA, 19 nt, Artificial Sequence
  Description of Artificial Sequence: Synthetic oligonucleotide
  Antisense strand to SEQ ID NO: 2157014
aacaacacuuaucaggucc

SEQ ID NO: 2157016 - RNA, 19 nt, Artificial Sequence
  Description of Artificial Sequence: Synthetic oligonucleotide
  Sense strand starting at position 3489 of SEQ ID NO: 1882914
uugaaagaauucugucaaa

SEQ ID NO: 2157017 - RNA, 19 nt, Artificial Sequence
  Description of Artificial Sequence: Synthetic oligonucleotide
  Antisense strand to SEQ ID NO: 2157016
uuugacagaauucuuucaa

SEQ ID NO: 2157018 - RNA, 19 nt, Artificial Sequence
  Description of Artificial Sequence: Synthetic oligonucleotide
  Sense strand starting at position 3863 of SEQ ID NO: 1882914
aguucuuaccugggacuuu

SEQ ID NO: 2157019 - RNA, 19 nt, Artificial Sequence
  Description of Artificial Sequence: Synthetic oligonucleotide
  Antisense strand to SEQ ID NO: 2157018
aaagucccagguaagaacu

SEQ ID NO: 2157020 - RNA, 19 nt, Artificial Sequence
  Description of Artificial Sequence: Synthetic oligonucleotide
  Sense strand starting at position 3944 of SEQ ID NO: 1882914
ggaggagccuuuguacucu

SEQ ID NO: 2157021 - RNA, 19 nt, Artificial Sequence
  Description of Artificial Sequence: Synthetic oligonucleotide
  Antisense strand to SEQ ID NO: 2157020
agaguacaaaggcuccucc

SEQ ID NO: 2157022 - RNA, 19 nt, Artificial Sequence
  Description of Artificial Sequence: Synthetic oligonucleotide
  Sense strand starting at position 37 of SEQ ID NO: 1882915
uuuauuccguguccaauga

SEQ ID NO: 2157023 - RNA, 19 nt, Artificial Sequence
  Description of Artificial Sequence: Synthetic oligonucleotide
  Antisense strand to SEQ ID NO: 2157022
ucauuggacacggaauaaa

SEQ ID NO: 2157024 - RNA, 19 nt, Artificial Sequence
  Description of Artificial Sequence: Synthetic oligonucleotide
  Sense strand starting at position 41 of SEQ ID NO: 1882915
uuccguguccaaugagaac

SEQ ID NO: 2157025 - RNA, 19 nt, Artificial Sequence
  Description of Artificial Sequence: Synthetic oligonucleotide
  Antisense strand to SEQ ID NO: 2157024
guucucauuggacacggaa

SEQ ID NO: 2157026 - RNA, 19 nt, Artificial Sequence
  Description of Artificial Sequence: Synthetic oligonucleotide
  Sense strand starting at position 58 of SEQ ID NO: 1882915
acugauuccuuaucugagu

SEQ ID NO: 2157027 - RNA, 19 nt, Artificial Sequence
  Description of Artificial Sequence: Synthetic oligonucleotide
  Antisense strand to SEQ ID NO: 2157026
acucagauaaggaaucagu

SEQ ID NO: 2157028 - RNA, 19 nt, Artificial Sequence
  Description of Artificial Sequence: Synthetic oligonucleotide
  Sense strand starting at position 63 of SEQ ID NO: 1882915
uuccuuaucugagugaauc

SEQ ID NO: 2157029 - RNA, 19 nt, Artificial Sequence
  Description of Artificial Sequence: Synthetic oligonucleotide
  Antisense strand to SEQ ID NO: 2157028
gauucacucagauaaggaa

SEQ ID NO: 2157030 - RNA, 19 nt, Artificial Sequence
  Description of Artificial Sequence: Synthetic oligonucleotide
  Sense strand starting at position 64 of SEQ ID NO: 1882915
uccuuaucugagugaaucu

SEQ ID NO: 2157031 - RNA, 19 nt, Artificial Sequence
  Description of Artificial Sequence: Synthetic oligonucleotide
  Antisense strand to SEQ ID NO: 2157030
agauucacucagauaagga

SEQ ID NO: 2157032 - RNA, 19 nt, Artificial Sequence
  Description of Artificial Sequence: Synthetic oligonucleotide
  Sense strand starting at position 315 of SEQ ID NO: 1882915
cugauuccuggcuguauua

SEQ ID NO: 2157033 - RNA, 19 nt, Artificial Sequence
  Description of Artificial Sequence: Synthetic oligonucleotide
  Antisense strand to SEQ ID NO: 2157032
uaauacagccaggaaucag

SEQ ID NO: 2157034 - RNA, 19 nt, Artificial Sequence
  Description of Artificial Sequence: Synthetic oligonucleotide
  Sense strand starting at position 317 of SEQ ID NO: 1882915
gauuccuggcuguauuacu

SEQ ID NO: 2157035 - RNA, 19 nt, Artificial Sequence
  Description of Artificial Sequence: Synthetic oligonucleotide
  Antisense strand to SEQ ID NO: 2157034
aguaauacagccaggaauc

SEQ ID NO: 2157036 - RNA, 19 nt, Artificial Sequence
  Description of Artificial Sequence: Synthetic oligonucleotide
  Sense strand starting at position 325 of SEQ ID NO: 1882915
gcuguauuacuagagguag

SEQ ID NO: 2157037 - RNA, 19 nt, Artificial Sequence
  Description of Artificial Sequence: Synthetic oligonucleotide
  Antisense strand to SEQ ID NO: 2157036
cuaccucuaguaauacagc

SEQ ID NO: 2157038 - RNA, 19 nt, Artificial Sequence
  Description of Artificial Sequence: Synthetic oligonucleotide
  Sense strand starting at position 327 of SEQ ID NO: 1882915
uguauuacuagagguagau

SEQ ID NO: 2157039 - RNA, 19 nt, Artificial Sequence
  Description of Artificial Sequence: Synthetic oligonucleotide
  Antisense strand to SEQ ID NO: 2157038
aucuaccucuaguaauaca

SEQ ID NO: 2157040 - RNA, 19 nt, Artificial Sequence
  Description of Artificial Sequence: Synthetic oligonucleotide
  Sense strand starting at position 336 of SEQ ID NO: 1882915
agagguagaucauauagaa

SEQ ID NO: 2157041 - RNA, 19 nt, Artificial Sequence
  Description of Artificial Sequence: Synthetic oligonucleotide
  Antisense strand to SEQ ID NO: 2157040
uucuauaugaucuaccucu

SEQ ID NO: 2157042 - RNA, 19 nt, Artificial Sequence
  Description of Artificial Sequence: Synthetic oligonucleotide
  Sense strand starting at position 368 of SEQ ID NO: 1882915
gggccagaucuuuggcauu

SEQ ID NO: 2157043 - RNA, 19 nt, Artificial Sequence
  Description of Artificial Sequence: Synthetic oligonucleotide
  Antisense strand to SEQ ID NO: 2157042
aaugccaaagaucuggccc

SEQ ID NO: 2157044 - RNA, 19 nt, Artificial Sequence
  Description of Artificial Sequence: Synthetic oligonucleotide
  Sense strand starting at position 422 of SEQ ID NO: 1882915
ugcuguaugacaggagaca

SEQ ID NO: 2157045 - RNA, 19 nt, Artificial Sequence
  Description of Artificial Sequence: Synthetic oligonucleotide
  Antisense strand to SEQ ID NO: 2157044
ugucuccugucauacagca

SEQ ID NO: 2157046 - RNA, 19 nt, Artificial Sequence
  Description of Artificial Sequence: Synthetic oligonucleotide
  Sense strand starting at position 597 of SEQ ID NO: 1882915
gguucuuuauggccuggaa

SEQ ID NO: 2157047 - RNA, 19 nt, Artificial Sequence
  Description of Artificial Sequence: Synthetic oligonucleotide
  Antisense strand to SEQ ID NO: 2157046
uuccaggccauaaagaacc

SEQ ID NO: 2157048 - RNA, 19 nt, Artificial Sequence
  Description of Artificial Sequence: Synthetic oligonucleotide
  Sense strand starting at position 600 of SEQ ID NO: 1882915
ucuuuauggccuggaacca

SEQ ID NO: 2157049 - RNA, 19 nt, Artificial Sequence
  Description of Artificial Sequence: Synthetic oligonucleotide
  Antisense strand to SEQ ID NO: 2157048
ugguuccaggccauaaaga

SEQ ID NO: 2157050 - RNA, 19 nt, Artificial Sequence
  Description of Artificial Sequence: Synthetic oligonucleotide
  Sense strand starting at position 687 of SEQ ID NO: 1882915
uagugagcucacugucaca

SEQ ID NO: 2157051 - RNA, 19 nt, Artificial Sequence
  Description of Artificial Sequence: Synthetic oligonucleotide
  Antisense strand to SEQ ID NO: 2157050
ugugacagugagcucacua

SEQ ID NO: 2157052 - RNA, 19 nt, Artificial Sequence
  Description of Artificial Sequence: Synthetic oligonucleotide
  Sense strand starting at position 756 of SEQ ID NO: 1882915
ucccuuagggccugagagu

SEQ ID NO: 2157053 - RNA, 19 nt, Artificial Sequence
  Description of Artificial Sequence: Synthetic oligonucleotide
  Antisense strand to SEQ ID NO: 2157052
acucucaggcccuaaggga

SEQ ID NO: 2157054 - RNA, 19 nt, Artificial Sequence
  Description of Artificial Sequence: Synthetic oligonucleotide
  Sense strand starting at position 757 of SEQ ID NO: 1882915
cccuuagggccugagaguu

SEQ ID NO: 2157055 - RNA, 19 nt, Artificial Sequence
  Description of Artificial Sequence: Synthetic oligonucleotide
  Antisense strand to SEQ ID NO: 2157054
aacucucaggcccuaaggg

SEQ ID NO: 2157056 - RNA, 19 nt, Artificial Sequence
  Description of Artificial Sequence: Synthetic oligonucleotide
  Sense strand starting at position 787 of SEQ ID NO: 1882915
cuccaauaggaaugugaau

SEQ ID NO: 2157057 - RNA, 19 nt, Artificial Sequence
  Description of Artificial Sequence: Synthetic oligonucleotide
  Antisense strand to SEQ ID NO: 2157056
auucacauuccuauuggag

SEQ ID NO: 2157058 - RNA, 19 nt, Artificial Sequence
  Description of Artificial Sequence: Synthetic oligonucleotide
  Sense strand starting at position 800 of SEQ ID NO: 1882915
gugaauggcguguggaaga

SEQ ID NO: 2157059 - RNA, 19 nt, Artificial Sequence
  Description of Artificial Sequence: Synthetic oligonucleotide
  Antisense strand to SEQ ID NO: 2157058
ucuuccacacgccauucac

SEQ ID NO: 2157060 - RNA, 19 nt, Artificial Sequence
  Description of Artificial Sequence: Synthetic oligonucleotide
  Sense strand starting at position 820 of SEQ ID NO: 1882915
caaggugcgagauacugau

SEQ ID NO: 2157061 - RNA, 19 nt, Artificial Sequence
  Description of Artificial Sequence: Synthetic oligonucleotide
  Antisense strand to SEQ ID NO: 2157060
aucaguaucucgcaccuug

SEQ ID NO: 2157062 - RNA, 19 nt, Artificial Sequence
  Description of Artificial Sequence: Synthetic oligonucleotide
  Sense strand starting at position 1136 of SEQ ID NO: 1882915
cugguuugaccaugccuca

SEQ ID NO: 2157063 - RNA, 19 nt, Artificial Sequence
  Description of Artificial Sequence: Synthetic oligonucleotide
  Antisense strand to SEQ ID NO: 2157062
ugaggcauggucaaaccag

SEQ ID NO: 2157064 - RNA, 19 nt, Artificial Sequence
  Description of Artificial Sequence: Synthetic oligonucleotide
  Sense strand starting at position 1390 of SEQ ID NO: 1882915
gccggaugccuggagaaga

SEQ ID NO: 2157065 - RNA, 19 nt, Artificial Sequence
  Description of Artificial Sequence: Synthetic oligonucleotide
  Antisense strand to SEQ ID NO: 2157064
ucuucuccaggcauccggc

SEQ ID NO: 2157066 - RNA, 19 nt, Artificial Sequence
  Description of Artificial Sequence: Synthetic oligonucleotide
  Sense strand starting at position 1685 of SEQ ID NO: 1882915
ggcagugcucugccucagu

SEQ ID NO: 2157067 - RNA, 19 nt, Artificial Sequence
  Description of Artificial Sequence: Synthetic oligonucleotide
  Antisense strand to SEQ ID NO: 2157066
acugaggcagagcacugcc

SEQ ID NO: 2157068 - RNA, 19 nt, Artificial Sequence
  Description of Artificial Sequence: Synthetic oligonucleotide
  Sense strand starting at position 1687 of SEQ ID NO: 1882915
cagugcucugccucaguuu

SEQ ID NO: 2157069 - RNA, 19 nt, Artificial Sequence
  Description of Artificial Sequence: Synthetic oligonucleotide
  Antisense strand to SEQ ID NO: 2157068
aaacugaggcagagcacug

SEQ ID NO: 2157070 - RNA, 19 nt, Artificial Sequence
  Description of Artificial Sequence: Synthetic oligonucleotide
  Sense strand starting at position 1696 of SEQ ID NO: 1882915
gccucaguuucccuaggga

SEQ ID NO: 2157071 - RNA, 19 nt, Artificial Sequence
  Description of Artificial Sequence: Synthetic oligonucleotide
  Antisense strand to SEQ ID NO: 2157070
ucccuagggaaacugaggc

SEQ ID NO: 2157072 - RNA, 19 nt, Artificial Sequence
  Description of Artificial Sequence: Synthetic oligonucleotide
  Sense strand starting at position 1884 of SEQ ID NO: 1882915
gugguacgauaucuuaaag

SEQ ID NO: 2157073 - RNA, 19 nt, Artificial Sequence
  Description of Artificial Sequence: Synthetic oligonucleotide
  Antisense strand to SEQ ID NO: 2157072
cuuuaagauaucguaccac

SEQ ID NO: 2157074 - RNA, 19 nt, Artificial Sequence
  Description of Artificial Sequence: Synthetic oligonucleotide
  Sense strand starting at position 1916 of SEQ ID NO: 1882915
cugagccgccucuaucaaa

SEQ ID NO: 2157075 - RNA, 19 nt, Artificial Sequence
  Description of Artificial Sequence: Synthetic oligonucleotide
  Antisense strand to SEQ ID NO: 2157074
uuugauagaggcggcucag

SEQ ID NO: 2157076 - RNA, 19 nt, Artificial Sequence
  Description of Artificial Sequence: Synthetic oligonucleotide
  Sense strand starting at position 2248 of SEQ ID NO: 1882915
gcuacagggaguuaugauu

SEQ ID NO: 2157077 - RNA, 19 nt, Artificial Sequence
  Description of Artificial Sequence: Synthetic oligonucleotide
  Antisense strand to SEQ ID NO: 2157076
aaucauaacucccuguagc

SEQ ID NO: 2157078 - RNA, 19 nt, Artificial Sequence
  Description of Artificial Sequence: Synthetic oligonucleotide
  Sense strand starting at position 2254 of SEQ ID NO: 1882915
gggaguuaugauugugcca

SEQ ID NO: 2157079 - RNA, 19 nt, Artificial Sequence
  Description of Artificial Sequence: Synthetic oligonucleotide
  Antisense strand to SEQ ID NO: 2157078
uggcacaaucauaacuccc

SEQ ID NO: 2157080 - RNA, 19 nt, Artificial Sequence
  Description of Artificial Sequence: Synthetic oligonucleotide
  Sense strand starting at position 2531 of SEQ ID NO: 1882915
gggucagugcugagcuagu

SEQ ID NO: 2157081 - RNA, 19 nt, Artificial Sequence
  Description of Artificial Sequence: Synthetic oligonucleotide
  Antisense strand to SEQ ID NO: 2157080
acuagcucagcacugaccc

SEQ ID NO: 2157082 - RNA, 19 nt, Artificial Sequence
  Description of Artificial Sequence: Synthetic oligonucleotide
  Sense strand starting at position 2562 of SEQ ID NO: 1882915
ccgugaggcacucagaaau

SEQ ID NO: 2157083 - RNA, 19 nt, Artificial Sequence
  Description of Artificial Sequence: Synthetic oligonucleotide
  Antisense strand to SEQ ID NO: 2157082
auuucugagugccucacgg

SEQ ID NO: 2157084 - RNA, 19 nt, Artificial Sequence
  Description of Artificial Sequence: Synthetic oligonucleotide
  Sense strand starting at position 3034 of SEQ ID NO: 1882915
gcgguaugaggcagacagu

SEQ ID NO: 2157085 - RNA, 19 nt, Artificial Sequence
  Description of Artificial Sequence: Synthetic oligonucleotide
  Antisense strand to SEQ ID NO: 2157084
acugucugccucauaccgc

SEQ ID NO: 2157086 - RNA, 19 nt, Artificial Sequence
  Description of Artificial Sequence: Synthetic oligonucleotide
  Sense strand starting at position 3035 of SEQ ID NO: 1882915
cgguaugaggcagacagua

SEQ ID NO: 2157087 - RNA, 19 nt, Artificial Sequence
  Description of Artificial Sequence: Synthetic oligonucleotide
  Antisense strand to SEQ ID NO: 2157086
uacugucugccucauaccg

SEQ ID NO: 2157088 - RNA, 19 nt, Artificial Sequence
  Description of Artificial Sequence: Synthetic oligonucleotide
  Sense strand starting at position 3037 of SEQ ID NO: 1882915
guaugaggcagacaguaau

SEQ ID NO: 2157089 - RNA, 19 nt, Artificial Sequence
  Description of Artificial Sequence: Synthetic oligonucleotide
  Antisense strand to SEQ ID NO: 2157088
auuacugucugccucauac

SEQ ID NO: 2157090 - RNA, 19 nt, Artificial Sequence
  Description of Artificial Sequence: Synthetic oligonucleotide
  Sense strand starting at position 3077 of SEQ ID NO: 1882915
aagucagaaguaugauuac

SEQ ID NO: 2157091 - RNA, 19 nt, Artificial Sequence
  Description of Artificial Sequence: Synthetic oligonucleotide
  Antisense strand to SEQ ID NO: 2157090
guaaucauacuucugacuu

SEQ ID NO: 2157092 - RNA, 19 nt, Artificial Sequence
  Description of Artificial Sequence: Synthetic oligonucleotide
  Sense strand starting at position 3450 of SEQ ID NO: 1882915
acaggagauuccuaagaga

SEQ ID NO: 2157093 - RNA, 19 nt, Artificial Sequence
  Description of Artificial Sequence: Synthetic oligonucleotide
  Antisense strand to SEQ ID NO: 2157092
ucucuuaggaaucuccugu

SEQ ID NO: 2157094 - RNA, 19 nt, Artificial Sequence
  Description of Artificial Sequence: Synthetic oligonucleotide
  Sense strand starting at position 3453 of SEQ ID NO: 1882915
ggagauuccuaagagaucu

SEQ ID NO: 2157095 - RNA, 19 nt, Artificial Sequence
  Description of Artificial Sequence: Synthetic oligonucleotide
  Antisense strand to SEQ ID NO: 2157094
agaucucuuaggaaucucc

SEQ ID NO: 2157096 - RNA, 19 nt, Artificial Sequence
  Description of Artificial Sequence: Synthetic oligonucleotide
  Sense strand starting at position 3577 of SEQ ID NO: 1882915
ugggcuccaccugaauuaa

SEQ ID NO: 2157097 - RNA, 19 nt, Artificial Sequence
  Description of Artificial Sequence: Synthetic oligonucleotide
  Antisense strand to SEQ ID NO: 2157096
uuaauucagguggagccca

SEQ ID NO: 2157098 - RNA, 19 nt, Artificial Sequence
  Description of Artificial Sequence: Synthetic oligonucleotide
  Sense strand starting at position 3966 of SEQ ID NO: 1882915
ccuugacaccaguguauca

SEQ ID NO: 2157099 - RNA, 19 nt, Artificial Sequence
  Description of Artificial Sequence: Synthetic oligonucleotide
  Antisense strand to SEQ ID NO: 2157098
ugauacacuggugucaagg

SEQ ID NO: 2157100 - RNA, 19 nt, Artificial Sequence
  Description of Artificial Sequence: Synthetic oligonucleotide
  Sense strand starting at position 3975 of SEQ ID NO: 1882915
caguguaucaggcaagguu

SEQ ID NO: 2157101 - RNA, 19 nt, Artificial Sequence
  Description of Artificial Sequence: Synthetic oligonucleotide
  Antisense strand to SEQ ID NO: 2157100
aaccuugccugauacacug

SEQ ID NO: 2157102 - RNA, 19 nt, Artificial Sequence
  Description of Artificial Sequence: Synthetic oligonucleotide
  Sense strand starting at position 273 of SEQ ID NO: 1882916
ugagcagcuagagguauaa

SEQ ID NO: 2157103 - RNA, 19 nt, Artificial Sequence
  Description of Artificial Sequence: Synthetic oligonucleotide
  Antisense strand to SEQ ID NO: 2157102
uuauaccucuagcugcuca

SEQ ID NO: 2157104 - RNA, 19 nt, Artificial Sequence
  Description of Artificial Sequence: Synthetic oligonucleotide
  Sense strand starting at position 275 of SEQ ID NO: 1882916
agcagcuagagguauaagu

SEQ ID NO: 2157105 - RNA, 19 nt, Artificial Sequence
  Description of Artificial Sequence: Synthetic oligonucleotide
  Antisense strand to SEQ ID NO: 2157104
acuuauaccucuagcugcu

SEQ ID NO: 2157106 - RNA, 19 nt, Artificial Sequence
  Description of Artificial Sequence: Synthetic oligonucleotide
  Sense strand starting at position 284 of SEQ ID NO: 1882916
agguauaagucuccaaaca

SEQ ID NO: 2157107 - RNA, 19 nt, Artificial Sequence
  Description of Artificial Sequence: Synthetic oligonucleotide
  Antisense strand to SEQ ID NO: 2157106
uguuuggagacuuauaccu

SEQ ID NO: 2157108 - RNA, 19 nt, Artificial Sequence
  Description of Artificial Sequence: Synthetic oligonucleotide
  Sense strand starting at position 516 of SEQ ID NO: 1882916
gugggugcucccugaguga

SEQ ID NO: 2157109 - RNA, 19 nt, Artificial Sequence
  Description of Artificial Sequence: Synthetic oligonucleotide
  Antisense strand to SEQ ID NO: 2157108
ucacucagggagcacccac

SEQ ID NO: 2157110 - RNA, 19 nt, Artificial Sequence
  Description of Artificial Sequence: Synthetic oligonucleotide
  Sense strand starting at position 518 of SEQ ID NO: 1882916
gggugcucccugagugagu

SEQ ID NO: 2157111 - RNA, 19 nt, Artificial Sequence
  Description of Artificial Sequence: Synthetic oligonucleotide
  Antisense strand to SEQ ID NO: 2157110
acucacucagggagcaccc

SEQ ID NO: 2157112 - RNA, 19 nt, Artificial Sequence
  Description of Artificial Sequence: Synthetic oligonucleotide
  Sense strand starting at position 609 of SEQ ID NO: 1882916
ggagguggugucugcaaug

SEQ ID NO: 2157113 - RNA, 19 nt, Artificial Sequence
  Description of Artificial Sequence: Synthetic oligonucleotide
  Antisense strand to SEQ ID NO: 2157112
cauugcagacaccaccucc

SEQ ID NO: 2157114 - RNA, 19 nt, Artificial Sequence
  Description of Artificial Sequence: Synthetic oligonucleotide
  Sense strand starting at position 612 of SEQ ID NO: 1882916
gguggugucugcaauguua

SEQ ID NO: 2157115 - RNA, 19 nt, Artificial Sequence
  Description of Artificial Sequence: Synthetic oligonucleotide
  Antisense strand to SEQ ID NO: 2157114
uaacauugcagacaccacc

SEQ ID NO: 2157116 - RNA, 19 nt, Artificial Sequence
  Description of Artificial Sequence: Synthetic oligonucleotide
  Sense strand starting at position 614 of SEQ ID NO: 1882916
uggugucugcaauguuaua

SEQ ID NO: 2157117 - RNA, 19 nt, Artificial Sequence
  Description of Artificial Sequence: Synthetic oligonucleotide
  Antisense strand to SEQ ID NO: 2157116
uauaacauugcagacacca

SEQ ID NO: 2157118 - RNA, 19 nt, Artificial Sequence
  Description of Artificial Sequence: Synthetic oligonucleotide
  Sense strand starting at position 712 of SEQ ID NO: 1882916
ggacuuugcucuuccgacu

SEQ ID NO: 2157119 - RNA, 19 nt, Artificial Sequence
  Description of Artificial Sequence: Synthetic oligonucleotide
  Antisense strand to SEQ ID NO: 2157118
agucggaagagcaaagucc

SEQ ID NO: 2157120 - RNA, 19 nt, Artificial Sequence
  Description of Artificial Sequence: Synthetic oligonucleotide
  Sense strand starting at position 715 of SEQ ID NO: 1882916
cuuugcucuuccgacuauu

SEQ ID NO: 2157121 - RNA, 19 nt, Artificial Sequence
  Description of Artificial Sequence: Synthetic oligonucleotide
  Antisense strand to SEQ ID NO: 2157120
aauagucggaagagcaaag

SEQ ID NO: 2157122 - RNA, 19 nt, Artificial Sequence
  Description of Artificial Sequence: Synthetic oligonucleotide
  Sense strand starting at position 1360 of SEQ ID NO: 1882916
aagugauggccuuggacau

SEQ ID NO: 2157123 - RNA, 19 nt, Artificial Sequence
  Description of Artificial Sequence: Synthetic oligonucleotide
  Antisense strand to SEQ ID NO: 2157122
auguccaaggccaucacuu

SEQ ID NO: 2157124 - RNA, 19 nt, Artificial Sequence
  Description of Artificial Sequence: Synthetic oligonucleotide
  Sense strand starting at position 1361 of SEQ ID NO: 1882916
agugauggccuuggacauu

SEQ ID NO: 2157125 - RNA, 19 nt, Artificial Sequence
  Description of Artificial Sequence: Synthetic oligonucleotide
  Antisense strand to SEQ ID NO: 2157124
aauguccaaggccaucacu

SEQ ID NO: 2157126 - RNA, 19 nt, Artificial Sequence
  Description of Artificial Sequence: Synthetic oligonucleotide
  Sense strand starting at position 1379 of SEQ ID NO: 1882916
ugaagacugggcugucauu

SEQ ID NO: 2157127 - RNA, 19 nt, Artificial Sequence
  Description of Artificial Sequence: Synthetic oligonucleotide
  Antisense strand to SEQ ID NO: 2157126
aaugacagcccagucuuca

SEQ ID NO: 2157128 - RNA, 19 nt, Artificial Sequence
  Description of Artificial Sequence: Synthetic oligonucleotide
  Sense strand starting at position 1390 of SEQ ID NO: 1882916
cugucauuccauugggacu

SEQ ID NO: 2157129 - RNA, 19 nt, Artificial Sequence
  Description of Artificial Sequence: Synthetic oligonucleotide
  Antisense strand to SEQ ID NO: 2157128
agucccaauggaaugacag

SEQ ID NO: 2157130 - RNA, 19 nt, Artificial Sequence
  Description of Artificial Sequence: Synthetic oligonucleotide
  Sense strand starting at position 1840 of SEQ ID NO: 1882916
gcggcuuuccggcgguaaa

SEQ ID NO: 2157131 - RNA, 19 nt, Artificial Sequence
  Description of Artificial Sequence: Synthetic oligonucleotide
  Antisense strand to SEQ ID NO: 2157130
uuuaccgccggaaagccgc

SEQ ID NO: 2157132 - RNA, 19 nt, Artificial Sequence
  Description of Artificial Sequence: Synthetic oligonucleotide
  Sense strand starting at position 2159 of SEQ ID NO: 1882916
aguggucccacaggucaaa

SEQ ID NO: 2157133 - RNA, 19 nt, Artificial Sequence
  Description of Artificial Sequence: Synthetic oligonucleotide
  Antisense strand to SEQ ID NO: 2157132
uuugaccugugggaccacu

SEQ ID NO: 2157134 - RNA, 19 nt, Artificial Sequence
  Description of Artificial Sequence: Synthetic oligonucleotide
  Sense strand starting at position 2265 of SEQ ID NO: 1882916
gcagcagucagagaaccaa

SEQ ID NO: 2157135 - RNA, 19 nt, Artificial Sequence
  Description of Artificial Sequence: Synthetic oligonucleotide
  Antisense strand to SEQ ID NO: 2157134
uugguucucugacugcugc

SEQ ID NO: 2157136 - RNA, 19 nt, Artificial Sequence
  Description of Artificial Sequence: Synthetic oligonucleotide
  Sense strand starting at position 2295 of SEQ ID NO: 1882916
gggagacggucagaacuaa

SEQ ID NO: 2157137 - RNA, 19 nt, Artificial Sequence
  Description of Artificial Sequence: Synthetic oligonucleotide
  Antisense strand to SEQ ID NO: 2157136
uuaguucugaccgucuccc

SEQ ID NO: 2157138 - RNA, 19 nt, Artificial Sequence
  Description of Artificial Sequence: Synthetic oligonucleotide
  Sense strand starting at position 2539 of SEQ ID NO: 1882916
acgccauggccagguaauu

SEQ ID NO: 2157139 - RNA, 19 nt, Artificial Sequence
  Description of Artificial Sequence: Synthetic oligonucleotide
  Antisense strand to SEQ ID NO: 2157138
aauuaccuggccauggcgu

SEQ ID NO: 2157140 - RNA, 19 nt, Artificial Sequence
  Description of Artificial Sequence: Synthetic oligonucleotide
  Sense strand starting at position 2690 of SEQ ID NO: 1882916
ggacuauaggugcguccua

SEQ ID NO: 2157141 - RNA, 19 nt, Artificial Sequence
  Description of Artificial Sequence: Synthetic oligonucleotide
  Antisense strand to SEQ ID NO: 2157140
uaggacgcaccuauagucc

SEQ ID NO: 2157142 - RNA, 19 nt, Artificial Sequence
  Description of Artificial Sequence: Synthetic oligonucleotide
  Sense strand starting at position 3200 of SEQ ID NO: 1882916
cacagaugcucuuugggca

SEQ ID NO: 2157143 - RNA, 19 nt, Artificial Sequence
  Description of Artificial Sequence: Synthetic oligonucleotide
  Antisense strand to SEQ ID NO: 2157142
ugcccaaagagcaucugug

SEQ ID NO: 2157144 - RNA, 19 nt, Artificial Sequence
  Description of Artificial Sequence: Synthetic oligonucleotide
  Sense strand starting at position 3420 of SEQ ID NO: 1882916
gccagauguggcuggaauu

SEQ ID NO: 2157145 - RNA, 19 nt, Artificial Sequence
  Description of Artificial Sequence: Synthetic oligonucleotide
  Antisense strand to SEQ ID NO: 2157144
aauuccagccacaucuggc

SEQ ID NO: 2157146 - RNA, 19 nt, Artificial Sequence
  Description of Artificial Sequence: Synthetic oligonucleotide
  Sense strand starting at position 3454 of SEQ ID NO: 1882916
cccagaauaucugagcuca

SEQ ID NO: 2157147 - RNA, 19 nt, Artificial Sequence
  Description of Artificial Sequence: Synthetic oligonucleotide
  Antisense strand to SEQ ID NO: 2157146
ugagcucagauauucuggg

SEQ ID NO: 2157148 - RNA, 19 nt, Artificial Sequence
  Description of Artificial Sequence: Synthetic oligonucleotide
  Sense strand starting at position 3506 of SEQ ID NO: 1882916
ggcuucuggucuuaacuua

SEQ ID NO: 2157149 - RNA, 19 nt, Artificial Sequence
  Description of Artificial Sequence: Synthetic oligonucleotide
  Antisense strand to SEQ ID NO: 2157148
uaaguuaagaccagaagcc

SEQ ID NO: 2157150 - RNA, 19 nt, Artificial Sequence
  Description of Artificial Sequence: Synthetic oligonucleotide
  Sense strand starting at position 3527 of SEQ ID NO: 1882916
ccuugaacuugcugugacu

SEQ ID NO: 2157151 - RNA, 19 nt, Artificial Sequence
  Description of Artificial Sequence: Synthetic oligonucleotide
  Antisense strand to SEQ ID NO: 2157150
agucacagcaaguucaagg

SEQ ID NO: 2157152 - RNA, 19 nt, Artificial Sequence
  Description of Artificial Sequence: Synthetic oligonucleotide
  Sense strand starting at position 3529 of SEQ ID NO: 1882916
uugaacuugcugugacuuu

SEQ ID NO: 2157153 - RNA, 19 nt, Artificial Sequence
  Description of Artificial Sequence: Synthetic oligonucleotide
  Antisense strand to SEQ ID NO: 2157152
aaagucacagcaaguucaa

SEQ ID NO: 2157154 - RNA, 19 nt, Artificial Sequence
  Description of Artificial Sequence: Synthetic oligonucleotide
  Sense strand starting at position 3615 of SEQ ID NO: 1882916
ggacuuguaugccucugua

SEQ ID NO: 2157155 - RNA, 19 nt, Artificial Sequence
  Description of Artificial Sequence: Synthetic oligonucleotide
  Antisense strand to SEQ ID NO: 2157154
uacagaggcauacaagucc

SEQ ID NO: 2157156 - RNA, 19 nt, Artificial Sequence
  Description of Artificial Sequence: Synthetic oligonucleotide
  Sense strand starting at position 3624 of SEQ ID NO: 1882916
ugccucuguaugggugauu

SEQ ID NO: 2157157 - RNA, 19 nt, Artificial Sequence
  Description of Artificial Sequence: Synthetic oligonucleotide
  Antisense strand to SEQ ID NO: 2157156
aaucacccauacagaggca

SEQ ID NO: 2157158 - RNA, 19 nt, Artificial Sequence
  Description of Artificial Sequence: Synthetic oligonucleotide
  Sense strand starting at position 3625 of SEQ ID NO: 1882916
gccucuguaugggugauua

SEQ ID NO: 2157159 - RNA, 19 nt, Artificial Sequence
  Description of Artificial Sequence: Synthetic oligonucleotide
  Antisense strand to SEQ ID NO: 2157158
uaaucacccauacagaggc

SEQ ID NO: 2157160 - RNA, 19 nt, Artificial Sequence
  Description of Artificial Sequence: Synthetic oligonucleotide
  Sense strand starting at position 3629 of SEQ ID NO: 1882916
cuguaugggugauuaggua

SEQ ID NO: 2157161 - RNA, 19 nt, Artificial Sequence
  Description of Artificial Sequence: Synthetic oligonucleotide
  Antisense strand to SEQ ID NO: 2157160
uaccuaaucacccauacag

SEQ ID NO: 2157162 - RNA, 19 nt, Artificial Sequence
  Description of Artificial Sequence: Synthetic oligonucleotide
  Sense strand starting at position 3656 of SEQ ID NO: 1882916
cuuggcuguucugagcauu

SEQ ID NO: 2157163 - RNA, 19 nt, Artificial Sequence
  Description of Artificial Sequence: Synthetic oligonucleotide
  Antisense strand to SEQ ID NO: 2157162
aaugcucagaacagccaag

SEQ ID NO: 2157164 - RNA, 19 nt, Artificial Sequence
  Description of Artificial Sequence: Synthetic oligonucleotide
  Sense strand starting at position 3659 of SEQ ID NO: 1882916
ggcuguucugagcauuagu

SEQ ID NO: 2157165 - RNA, 19 nt, Artificial Sequence
  Description of Artificial Sequence: Synthetic oligonucleotide
  Antisense strand to SEQ ID NO: 2157164
acuaaugcucagaacagcc

SEQ ID NO: 2157166 - RNA, 19 nt, Artificial Sequence
  Description of Artificial Sequence: Synthetic oligonucleotide
  Sense strand starting at position 3670 of SEQ ID NO: 1882916
gcauuaguuucccuagcug

SEQ ID NO: 2157167 - RNA, 19 nt, Artificial Sequence
  Description of Artificial Sequence: Synthetic oligonucleotide
  Antisense strand to SEQ ID NO: 2157166
cagcuagggaaacuaaugc

SEQ ID NO: 2157168 - RNA, 19 nt, Artificial Sequence
  Description of Artificial Sequence: Synthetic oligonucleotide
  Sense strand starting at position 3685 of SEQ ID NO: 1882916
gcugcucuuccgugcagau

SEQ ID NO: 2157169 - RNA, 19 nt, Artificial Sequence
  Description of Artificial Sequence: Synthetic oligonucleotide
  Antisense strand to SEQ ID NO: 2157168
aucugcacggaagagcagc

SEQ ID NO: 2157170 - RNA, 19 nt, Artificial Sequence
  Description of Artificial Sequence: Synthetic oligonucleotide
  Sense strand starting at position 3686 of SEQ ID NO: 1882916
cugcucuuccgugcagaua

SEQ ID NO: 2157171 - RNA, 19 nt, Artificial Sequence
  Description of Artificial Sequence: Synthetic oligonucleotide
  Antisense strand to SEQ ID NO: 2157170
uaucugcacggaagagcag

SEQ ID NO: 2157172 - RNA, 19 nt, Artificial Sequence
  Description of Artificial Sequence: Synthetic oligonucleotide
  Sense strand starting at position 3687 of SEQ ID NO: 1882916
ugcucuuccgugcagauaa

SEQ ID NO: 2157173 - RNA, 19 nt, Artificial Sequence
  Description of Artificial Sequence: Synthetic oligonucleotide
  Antisense strand to SEQ ID NO: 2157172
uuaucugcacggaagagca

SEQ ID NO: 2157174 - RNA, 19 nt, Artificial Sequence
  Description of Artificial Sequence: Synthetic oligonucleotide
  Sense strand starting at position 3929 of SEQ ID NO: 1882916
cacaguugccuuugacagu

SEQ ID NO: 2157175 - RNA, 19 nt, Artificial Sequence
  Description of Artificial Sequence: Synthetic oligonucleotide
  Antisense strand to SEQ ID NO: 2157174
acugucaaaggcaacugug

SEQ ID NO: 2157176 - RNA, 19 nt, Artificial Sequence
  Description of Artificial Sequence: Synthetic oligonucleotide
  Sense strand starting at position 3930 of SEQ ID NO: 1882916
acaguugccuuugacaguu

SEQ ID NO: 2157177 - RNA, 19 nt, Artificial Sequence
  Description of Artificial Sequence: Synthetic oligonucleotide
  Antisense strand to SEQ ID NO: 2157176
aacugucaaaggcaacugu

SEQ ID NO: 2157178 - RNA, 19 nt, Artificial Sequence
  Description of Artificial Sequence: Synthetic oligonucleotide
  Sense strand starting at position 52 of SEQ ID NO: 1882917
aauggauugucaggcuuga

SEQ ID NO: 2157179 - RNA, 19 nt, Artificial Sequence
  Description of Artificial Sequence: Synthetic oligonucleotide
  Antisense strand to SEQ ID NO: 2157178
ucaagccugacaauccauu

SEQ ID NO: 2157180 - RNA, 19 nt, Artificial Sequence
  Description of Artificial Sequence: Synthetic oligonucleotide
  Sense strand starting at position 56 of SEQ ID NO: 1882917
gauugucaggcuugaugca

SEQ ID NO: 2157181 - RNA, 19 nt, Artificial Sequence
  Description of Artificial Sequence: Synthetic oligonucleotide
  Antisense strand to SEQ ID NO: 2157180
ugcaucaagccugacaauc

SEQ ID NO: 2157182 - RNA, 19 nt, Artificial Sequence
  Description of Artificial Sequence: Synthetic oligonucleotide
  Sense strand starting at position 65 of SEQ ID NO: 1882917
gcuugaugcaggcagauga

SEQ ID NO: 2157183 - RNA, 19 nt, Artificial Sequence
  Description of Artificial Sequence: Synthetic oligonucleotide
  Antisense strand to SEQ ID NO: 2157182
ucaucugccugcaucaagc

SEQ ID NO: 2157184 - RNA, 19 nt, Artificial Sequence
  Description of Artificial Sequence: Synthetic oligonucleotide
  Sense strand starting at position 203 of SEQ ID NO: 1882917
ccaagagucucugcucuag

SEQ ID NO: 2157185 - RNA, 19 nt, Artificial Sequence
  Description of Artificial Sequence: Synthetic oligonucleotide
  Antisense strand to SEQ ID NO: 2157184
cuagagcagagacucuugg

SEQ ID NO: 2157186 - RNA, 19 nt, Artificial Sequence
  Description of Artificial Sequence: Synthetic oligonucleotide
  Sense strand starting at position 205 of SEQ ID NO: 1882917
aagagucucugcucuagaa

SEQ ID NO: 2157187 - RNA, 19 nt, Artificial Sequence
  Description of Artificial Sequence: Synthetic oligonucleotide
  Antisense strand to SEQ ID NO: 2157186
uucuagagcagagacucuu

SEQ ID NO: 2157188 - RNA, 19 nt, Artificial Sequence
  Description of Artificial Sequence: Synthetic oligonucleotide
  Sense strand starting at position 773 of SEQ ID NO: 1882917
ccuuaucugccgggacaga

SEQ ID NO: 2157189 - RNA, 19 nt, Artificial Sequence
  Description of Artificial Sequence: Synthetic oligonucleotide
  Antisense strand to SEQ ID NO: 2157188
ucugucccggcagauaagg

SEQ ID NO: 2157190 - RNA, 19 nt, Artificial Sequence
  Description of Artificial Sequence: Synthetic oligonucleotide
  Sense strand starting at position 1277 of SEQ ID NO: 1882917
uuggccauuccuugcagau

SEQ ID NO: 2157191 - RNA, 19 nt, Artificial Sequence
  Description of Artificial Sequence: Synthetic oligonucleotide
  Antisense strand to SEQ ID NO: 2157190
aucugcaaggaauggccaa

SEQ ID NO: 2157192 - RNA, 19 nt, Artificial Sequence
  Description of Artificial Sequence: Synthetic oligonucleotide
  Sense strand starting at position 1279 of SEQ ID NO: 1882917
ggccauuccuugcagauag

SEQ ID NO: 2157193 - RNA, 19 nt, Artificial Sequence
  Description of Artificial Sequence: Synthetic oligonucleotide
  Antisense strand to SEQ ID NO: 2157192
cuaucugcaaggaauggcc

SEQ ID NO: 2157194 - RNA, 19 nt, Artificial Sequence
  Description of Artificial Sequence: Synthetic oligonucleotide
  Sense strand starting at position 1352 of SEQ ID NO: 1882917
gugugaaggcugcacagaa

SEQ ID NO: 2157195 - RNA, 19 nt, Artificial Sequence
  Description of Artificial Sequence: Synthetic oligonucleotide
  Antisense strand to SEQ ID NO: 2157194
uucugugcagccuucacac

SEQ ID NO: 2157196 - RNA, 19 nt, Artificial Sequence
  Description of Artificial Sequence: Synthetic oligonucleotide
  Sense strand starting at position 1407 of SEQ ID NO: 1882917
gguucaguuugcccuggaa

SEQ ID NO: 2157197 - RNA, 19 nt, Artificial Sequence
  Description of Artificial Sequence: Synthetic oligonucleotide
  Antisense strand to SEQ ID NO: 2157196
uuccagggcaaacugaacc

SEQ ID NO: 2157198 - RNA, 19 nt, Artificial Sequence
  Description of Artificial Sequence: Synthetic oligonucleotide
  Sense strand starting at position 1517 of SEQ ID NO: 1882917
ggauaaggcucugaagcga

SEQ ID NO: 2157199 - RNA, 19 nt, Artificial Sequence
  Description of Artificial Sequence: Synthetic oligonucleotide
  Antisense strand to SEQ ID NO: 2157198
ucgcuucagagccuuaucc

SEQ ID NO: 2157200 - RNA, 19 nt, Artificial Sequence
  Description of Artificial Sequence: Synthetic oligonucleotide
  Sense strand starting at position 1692 of SEQ ID NO: 1882917
gggcaucugcucugacuca

SEQ ID NO: 2157201 - RNA, 19 nt, Artificial Sequence
  Description of Artificial Sequence: Synthetic oligonucleotide
  Antisense strand to SEQ ID NO: 2157200
ugagucagagcagaugccc

SEQ ID NO: 2157202 - RNA, 19 nt, Artificial Sequence
  Description of Artificial Sequence: Synthetic oligonucleotide
  Sense strand starting at position 1693 of SEQ ID NO: 1882917
ggcaucugcucugacucaa

SEQ ID NO: 2157203 - RNA, 19 nt, Artificial Sequence
  Description of Artificial Sequence: Synthetic oligonucleotide
  Antisense strand to SEQ ID NO: 2157202
uugagucagagcagaugcc

SEQ ID NO: 2157204 - RNA, 19 nt, Artificial Sequence
  Description of Artificial Sequence: Synthetic oligonucleotide
  Sense strand starting at position 1773 of SEQ ID NO: 1882917
gggagugucugcuuggaga

SEQ ID NO: 2157205 - RNA, 19 nt, Artificial Sequence
  Description of Artificial Sequence: Synthetic oligonucleotide
  Antisense strand to SEQ ID NO: 2157204
ucuccaagcagacacuccc

SEQ ID NO: 2157206 - RNA, 19 nt, Artificial Sequence
  Description of Artificial Sequence: Synthetic oligonucleotide
  Sense strand starting at position 1775 of SEQ ID NO: 1882917
gagugucugcuuggagaag

SEQ ID NO: 2157207 - RNA, 19 nt, Artificial Sequence
  Description of Artificial Sequence: Synthetic oligonucleotide
  Antisense strand to SEQ ID NO: 2157206
cuucuccaagcagacacuc

SEQ ID NO: 2157208 - RNA, 19 nt, Artificial Sequence
  Description of Artificial Sequence: Synthetic oligonucleotide
  Sense strand starting at position 1776 of SEQ ID NO: 1882917
agugucugcuuggagaagu

SEQ ID NO: 2157209 - RNA, 19 nt, Artificial Sequence
  Description of Artificial Sequence: Synthetic oligonucleotide
  Antisense strand to SEQ ID NO: 2157208
acuucuccaagcagacacu

SEQ ID NO: 2157210 - RNA, 19 nt, Artificial Sequence
  Description of Artificial Sequence: Synthetic oligonucleotide
  Sense strand starting at position 1777 of SEQ ID NO: 1882917
gugucugcuuggagaagug

SEQ ID NO: 2157211 - RNA, 19 nt, Artificial Sequence
  Description of Artificial Sequence: Synthetic oligonucleotide
  Antisense strand to SEQ ID NO: 2157210
cacuucuccaagcagacac

SEQ ID NO: 2157212 - RNA, 19 nt, Artificial Sequence
  Description of Artificial Sequence: Synthetic oligonucleotide
  Sense strand starting at position 2067 of SEQ ID NO: 1882917
ggcuguuuguuguagguaa

SEQ ID NO: 2157213 - RNA, 19 nt, Artificial Sequence
  Description of Artificial Sequence: Synthetic oligonucleotide
  Antisense strand to SEQ ID NO: 2157212
uuaccuacaacaaacagcc

SEQ ID NO: 2157214 - RNA, 19 nt, Artificial Sequence
  Description of Artificial Sequence: Synthetic oligonucleotide
  Sense strand starting at position 2068 of SEQ ID NO: 1882917
gcuguuuguuguagguaag

SEQ ID NO: 2157215 - RNA, 19 nt, Artificial Sequence
  Description of Artificial Sequence: Synthetic oligonucleotide
  Antisense strand to SEQ ID NO: 2157214
cuuaccuacaacaaacagc

SEQ ID NO: 2157216 - RNA, 19 nt, Artificial Sequence
  Description of Artificial Sequence: Synthetic oligonucleotide
  Sense strand starting at position 2071 of SEQ ID NO: 1882917
guuuguuguagguaagcua

SEQ ID NO: 2157217 - RNA, 19 nt, Artificial Sequence
  Description of Artificial Sequence: Synthetic oligonucleotide
  Antisense strand to SEQ ID NO: 2157216
uagcuuaccuacaacaaac

SEQ ID NO: 2157218 - RNA, 19 nt, Artificial Sequence
  Description of Artificial Sequence: Synthetic oligonucleotide
  Sense strand starting at position 3034 of SEQ ID NO: 1882917
ggcaucacacugugggauu

SEQ ID NO: 2157219 - RNA, 19 nt, Artificial Sequence
  Description of Artificial Sequence: Synthetic oligonucleotide
  Antisense strand to SEQ ID NO: 2157218
aaucccacagugugaugcc

SEQ ID NO: 2157220 - RNA, 19 nt, Artificial Sequence
  Description of Artificial Sequence: Synthetic oligonucleotide
  Sense strand starting at position 3035 of SEQ ID NO: 1882917
gcaucacacugugggauuu

SEQ ID NO: 2157221 - RNA, 19 nt, Artificial Sequence
  Description of Artificial Sequence: Synthetic oligonucleotide
  Antisense strand to SEQ ID NO: 2157220
aaaucccacagugugaugc

SEQ ID NO: 2157222 - RNA, 19 nt, Artificial Sequence
  Description of Artificial Sequence: Synthetic oligonucleotide
  Sense strand starting at position 3259 of SEQ ID NO: 1882917
aggacauuaugccagcaca

SEQ ID NO: 2157223 - RNA, 19 nt, Artificial Sequence
  Description of Artificial Sequence: Synthetic oligonucleotide
  Antisense strand to SEQ ID NO: 2157222
ugugcuggcauaauguccu

SEQ ID NO: 2157224 - RNA, 19 nt, Artificial Sequence
  Description of Artificial Sequence: Synthetic oligonucleotide
  Sense strand starting at position 3 of SEQ ID NO: 1882918
cuagucauugugcagaaca

SEQ ID NO: 2157225 - RNA, 19 nt, Artificial Sequence
  Description of Artificial Sequence: Synthetic oligonucleotide
  Antisense strand to SEQ ID NO: 2157224
uguucugcacaaugacuag

SEQ ID NO: 2157226 - RNA, 19 nt, Artificial Sequence
  Description of Artificial Sequence: Synthetic oligonucleotide
  Sense strand starting at position 5 of SEQ ID NO: 1882918
agucauugugcagaacaag

SEQ ID NO: 2157227 - RNA, 19 nt, Artificial Sequence
  Description of Artificial Sequence: Synthetic oligonucleotide
  Antisense strand to SEQ ID NO: 2157226
cuuguucugcacaaugacu

SEQ ID NO: 2157228 - RNA, 19 nt, Artificial Sequence
  Description of Artificial Sequence: Synthetic oligonucleotide
  Sense strand starting at position 38 of SEQ ID NO: 1882918
gaguuaaucuaucugagaa

SEQ ID NO: 2157229 - RNA, 19 nt, Artificial Sequence
  Description of Artificial Sequence: Synthetic oligonucleotide
  Antisense strand to SEQ ID NO: 2157228
uucucagauagauuaacuc

SEQ ID NO: 2157230 - RNA, 19 nt, Artificial Sequence
  Description of Artificial Sequence: Synthetic oligonucleotide
  Sense strand starting at position 58 of SEQ ID NO: 1882918
agaaguuguaaccaugugu

SEQ ID NO: 2157231 - RNA, 19 nt, Artificial Sequence
  Description of Artificial Sequence: Synthetic oligonucleotide
  Antisense strand to SEQ ID NO: 2157230
acacaugguuacaacuucu

SEQ ID NO: 2157232 - RNA, 19 nt, Artificial Sequence
  Description of Artificial Sequence: Synthetic oligonucleotide
  Sense strand starting at position 67 of SEQ ID NO: 1882918
aaccaugugugacucagau

SEQ ID NO: 2157233 - RNA, 19 nt, Artificial Sequence
  Description of Artificial Sequence: Synthetic oligonucleotide
  Antisense strand to SEQ ID NO: 2157232
aucugagucacacaugguu

SEQ ID NO: 2157234 - RNA, 19 nt, Artificial Sequence
  Description of Artificial Sequence: Synthetic oligonucleotide
  Sense strand starting at position 224 of SEQ ID NO: 1882918
uggugauugaggcaggauu

SEQ ID NO: 2157235 - RNA, 19 nt, Artificial Sequence
  Description of Artificial Sequence: Synthetic oligonucleotide
  Antisense strand to SEQ ID NO: 2157234
aauccugccucaaucacca

SEQ ID NO: 2157236 - RNA, 19 nt, Artificial Sequence
  Description of Artificial Sequence: Synthetic oligonucleotide
  Sense strand starting at position 239 of SEQ ID NO: 1882918
gauuguaguuccuuaugau

SEQ ID NO: 2157237 - RNA, 19 nt, Artificial Sequence
  Description of Artificial Sequence: Synthetic oligonucleotide
  Antisense strand to SEQ ID NO: 2157236
aucauaaggaacuacaauc

SEQ ID NO: 2157238 - RNA, 19 nt, Artificial Sequence
  Description of Artificial Sequence: Synthetic oligonucleotide
  Sense strand starting at position 240 of SEQ ID NO: 1882918
auuguaguuccuuaugauu

SEQ ID NO: 2157239 - RNA, 19 nt, Artificial Sequence
  Description of Artificial Sequence: Synthetic oligonucleotide
  Antisense strand to SEQ ID NO: 2157238
aaucauaaggaacuacaau

SEQ ID NO: 2157240 - RNA, 19 nt, Artificial Sequence
  Description of Artificial Sequence: Synthetic oligonucleotide
  Sense strand starting at position 361 of SEQ ID NO: 1882918
cagggaugaguuuaugucu

SEQ ID NO: 2157241 - RNA, 19 nt, Artificial Sequence
  Description of Artificial Sequence: Synthetic oligonucleotide
  Antisense strand to SEQ ID NO: 2157240
agacauaaacucaucccug

SEQ ID NO: 2157242 - RNA, 19 nt, Artificial Sequence
  Description of Artificial Sequence: Synthetic oligonucleotide
  Sense strand starting at position 364 of SEQ ID NO: 1882918
ggaugaguuuaugucucag

SEQ ID NO: 2157243 - RNA, 19 nt, Artificial Sequence
  Description of Artificial Sequence: Synthetic oligonucleotide
  Antisense strand to SEQ ID NO: 2157242
cugagacauaaacucaucc

SEQ ID NO: 2157244 - RNA, 19 nt, Artificial Sequence
  Description of Artificial Sequence: Synthetic oligonucleotide
  Sense strand starting at position 449 of SEQ ID NO: 1882918
gaguucuucccaggauuac

SEQ ID NO: 2157245 - RNA, 19 nt, Artificial Sequence
  Description of Artificial Sequence: Synthetic oligonucleotide
  Antisense strand to SEQ ID NO: 2157244
guaauccugggaagaacuc

SEQ ID NO: 2157246 - RNA, 19 nt, Artificial Sequence
  Description of Artificial Sequence: Synthetic oligonucleotide
  Sense strand starting at position 450 of SEQ ID NO: 1882918
aguucuucccaggauuacu

SEQ ID NO: 2157247 - RNA, 19 nt, Artificial Sequence
  Description of Artificial Sequence: Synthetic oligonucleotide
  Antisense strand to SEQ ID NO: 2157246
aguaauccugggaagaacu

SEQ ID NO: 2157248 - RNA, 19 nt, Artificial Sequence
  Description of Artificial Sequence: Synthetic oligonucleotide
  Sense strand starting at position 460 of SEQ ID NO: 1882918
aggauuacuuccuugacag

SEQ ID NO: 2157249 - RNA, 19 nt, Artificial Sequence
  Description of Artificial Sequence: Synthetic oligonucleotide
  Antisense strand to SEQ ID NO: 2157248
cugucaaggaaguaauccu

SEQ ID NO: 2157250 - RNA, 19 nt, Artificial Sequence
  Description of Artificial Sequence: Synthetic oligonucleotide
  Sense strand starting at position 461 of SEQ ID NO: 1882918
ggauuacuuccuugacaga

SEQ ID NO: 2157251 - RNA, 19 nt, Artificial Sequence
  Description of Artificial Sequence: Synthetic oligonucleotide
  Antisense strand to SEQ ID NO: 2157250
ucugucaaggaaguaaucc

SEQ ID NO: 2157252 - RNA, 19 nt, Artificial Sequence
  Description of Artificial Sequence: Synthetic oligonucleotide
  Sense strand starting at position 507 of SEQ ID NO: 1882918
cuggguuccuaaucugagu

SEQ ID NO: 2157253 - RNA, 19 nt, Artificial Sequence
  Description of Artificial Sequence: Synthetic oligonucleotide
  Antisense strand to SEQ ID NO: 2157252
acucagauuaggaacccag

SEQ ID NO: 2157254 - RNA, 19 nt, Artificial Sequence
  Description of Artificial Sequence: Synthetic oligonucleotide
  Sense strand starting at position 509 of SEQ ID NO: 1882918
ggguuccuaaucugaguga

SEQ ID NO: 2157255 - RNA, 19 nt, Artificial Sequence
  Description of Artificial Sequence: Synthetic oligonucleotide
  Antisense strand to SEQ ID NO: 2157254
ucacucagauuaggaaccc

SEQ ID NO: 2157256 - RNA, 19 nt, Artificial Sequence
  Description of Artificial Sequence: Synthetic oligonucleotide
  Sense strand starting at position 513 of SEQ ID NO: 1882918
uccuaaucugagugaagga

SEQ ID NO: 2157257 - RNA, 19 nt, Artificial Sequence
  Description of Artificial Sequence: Synthetic oligonucleotide
  Antisense strand to SEQ ID NO: 2157256
uccuucacucagauuagga

SEQ ID NO: 2157258 - RNA, 19 nt, Artificial Sequence
  Description of Artificial Sequence: Synthetic oligonucleotide
  Sense strand starting at position 530 of SEQ ID NO: 1882918
gagaguguugcugagagcu

SEQ ID NO: 2157259 - RNA, 19 nt, Artificial Sequence
  Description of Artificial Sequence: Synthetic oligonucleotide
  Antisense strand to SEQ ID NO: 2157258
agcucucagcaacacucuc

SEQ ID NO: 2157260 - RNA, 19 nt, Artificial Sequence
  Description of Artificial Sequence: Synthetic oligonucleotide
  Sense strand starting at position 681 of SEQ ID NO: 1882918
uuuccaguucugugacaaa

SEQ ID NO: 2157261 - RNA, 19 nt, Artificial Sequence
  Description of Artificial Sequence: Synthetic oligonucleotide
  Antisense strand to SEQ ID NO: 2157260
uuugucacagaacuggaaa

SEQ ID NO: 2157262 - RNA, 19 nt, Artificial Sequence
  Description of Artificial Sequence: Synthetic oligonucleotide
  Sense strand starting at position 716 of SEQ ID NO: 1882918
ugcuuaaacuagucugaau

SEQ ID NO: 2157263 - RNA, 19 nt, Artificial Sequence
  Description of Artificial Sequence: Synthetic oligonucleotide
  Antisense strand to SEQ ID NO: 2157262
auucagacuaguuuaagca

SEQ ID NO: 2157264 - RNA, 19 nt, Artificial Sequence
  Description of Artificial Sequence: Synthetic oligonucleotide
  Sense strand starting at position 718 of SEQ ID NO: 1882918
cuuaaacuagucugaauug

SEQ ID NO: 2157265 - RNA, 19 nt, Artificial Sequence
  Description of Artificial Sequence: Synthetic oligonucleotide
  Antisense strand to SEQ ID NO: 2157264
caauucagacuaguuuaag

SEQ ID NO: 2157266 - RNA, 19 nt, Artificial Sequence
  Description of Artificial Sequence: Synthetic oligonucleotide
  Sense strand starting at position 794 of SEQ ID NO: 1882918
gggcauaacaagugaauac

SEQ ID NO: 2157267 - RNA, 19 nt, Artificial Sequence
  Description of Artificial Sequence: Synthetic oligonucleotide
  Antisense strand to SEQ ID NO: 2157266
guauucacuuguuaugccc

SEQ ID NO: 2157268 - RNA, 19 nt, Artificial Sequence
  Description of Artificial Sequence: Synthetic oligonucleotide
  Sense strand starting at position 805 of SEQ ID NO: 1882918
gugaauacuccugaaaguu

SEQ ID NO: 2157269 - RNA, 19 nt, Artificial Sequence
  Description of Artificial Sequence: Synthetic oligonucleotide
  Antisense strand to SEQ ID NO: 2157268
aacuuucaggaguauucac

SEQ ID NO: 2157270 - RNA, 19 nt, Artificial Sequence
  Description of Artificial Sequence: Synthetic oligonucleotide
  Sense strand starting at position 821 of SEQ ID NO: 1882918
guuagaauugacugaguua

SEQ ID NO: 2157271 - RNA, 19 nt, Artificial Sequence
  Description of Artificial Sequence: Synthetic oligonucleotide
  Antisense strand to SEQ ID NO: 2157270
uaacucagucaauucuaac

SEQ ID NO: 2157272 - RNA, 19 nt, Artificial Sequence
  Description of Artificial Sequence: Synthetic oligonucleotide
  Sense strand starting at position 824 of SEQ ID NO: 1882918
agaauugacugaguuaauu

SEQ ID NO: 2157273 - RNA, 19 nt, Artificial Sequence
  Description of Artificial Sequence: Synthetic oligonucleotide
  Antisense strand to SEQ ID NO: 2157272
aauuaacucagucaauucu

SEQ ID NO: 2157274 - RNA, 19 nt, Artificial Sequence
  Description of Artificial Sequence: Synthetic oligonucleotide
  Sense strand starting at position 2016 of SEQ ID NO: 1882918
cagaaucaaugugugguua

SEQ ID NO: 2157275 - RNA, 19 nt, Artificial Sequence
  Description of Artificial Sequence: Synthetic oligonucleotide
  Antisense strand to SEQ ID NO: 2157274
uaaccacacauugauucug

SEQ ID NO: 2157276 - RNA, 19 nt, Artificial Sequence
  Description of Artificial Sequence: Synthetic oligonucleotide
  Sense strand starting at position 2114 of SEQ ID NO: 1882918
cugagaugggcuugagcaa

SEQ ID NO: 2157277 - RNA, 19 nt, Artificial Sequence
  Description of Artificial Sequence: Synthetic oligonucleotide
  Antisense strand to SEQ ID NO: 2157276
uugcucaagcccaucucag

SEQ ID NO: 2157278 - RNA, 19 nt, Artificial Sequence
  Description of Artificial Sequence: Synthetic oligonucleotide
  Sense strand starting at position 2239 of SEQ ID NO: 1882918
ggagcuccuccaugugaca

SEQ ID NO: 2157279 - RNA, 19 nt, Artificial Sequence
  Description of Artificial Sequence: Synthetic oligonucleotide
  Antisense strand to SEQ ID NO: 2157278
ugucacauggaggagcucc

SEQ ID NO: 2157280 - RNA, 19 nt, Artificial Sequence
  Description of Artificial Sequence: Synthetic oligonucleotide
  Sense strand starting at position 2411 of SEQ ID NO: 1882918
aggacauuacugggcaagu

SEQ ID NO: 2157281 - RNA, 19 nt, Artificial Sequence
  Description of Artificial Sequence: Synthetic oligonucleotide
  Antisense strand to SEQ ID NO: 2157280
acuugcccaguaauguccu

SEQ ID NO: 2157282 - RNA, 19 nt, Artificial Sequence
  Description of Artificial Sequence: Synthetic oligonucleotide
  Sense strand starting at position 2460 of SEQ ID NO: 1882918
acuguuagccaagaugcuu

SEQ ID NO: 2157283 - RNA, 19 nt, Artificial Sequence
  Description of Artificial Sequence: Synthetic oligonucleotide
  Antisense strand to SEQ ID NO: 2157282
aagcaucuuggcuaacagu

SEQ ID NO: 2157284 - RNA, 19 nt, Artificial Sequence
  Description of Artificial Sequence: Synthetic oligonucleotide
  Sense strand starting at position 2472 of SEQ ID NO: 1882918
gaugcuugugcucagaaua

SEQ ID NO: 2157285 - RNA, 19 nt, Artificial Sequence
  Description of Artificial Sequence: Synthetic oligonucleotide
  Antisense strand to SEQ ID NO: 2157284
uauucugagcacaagcauc

SEQ ID NO: 2157286 - RNA, 19 nt, Artificial Sequence
  Description of Artificial Sequence: Synthetic oligonucleotide
  Sense strand starting at position 2483 of SEQ ID NO: 1882918
ucagaauacucugucucag

SEQ ID NO: 2157287 - RNA, 19 nt, Artificial Sequence
  Description of Artificial Sequence: Synthetic oligonucleotide
  Antisense strand to SEQ ID NO: 2157286
cugagacagaguauucuga

SEQ ID NO: 2157288 - RNA, 19 nt, Artificial Sequence
  Description of Artificial Sequence: Synthetic oligonucleotide
  Sense strand starting at position 2485 of SEQ ID NO: 1882918
agaauacucugucucagau

SEQ ID NO: 2157289 - RNA, 19 nt, Artificial Sequence
  Description of Artificial Sequence: Synthetic oligonucleotide
  Antisense strand to SEQ ID NO: 2157288
aucugagacagaguauucu

SEQ ID NO: 2157290 - RNA, 19 nt, Artificial Sequence
  Description of Artificial Sequence: Synthetic oligonucleotide
  Sense strand starting at position 2646 of SEQ ID NO: 1882918
ggcagaaucuacccaucuu

SEQ ID NO: 2157291 - RNA, 19 nt, Artificial Sequence
  Description of Artificial Sequence: Synthetic oligonucleotide
  Antisense strand to SEQ ID NO: 2157290
aagauggguagauucugcc

SEQ ID NO: 2157292 - RNA, 19 nt, Artificial Sequence
  Description of Artificial Sequence: Synthetic oligonucleotide
  Sense strand starting at position 3051 of SEQ ID NO: 1882918
ccagcugcgccuucuuauu

SEQ ID NO: 2157293 - RNA, 19 nt, Artificial Sequence
  Description of Artificial Sequence: Synthetic oligonucleotide
  Antisense strand to SEQ ID NO: 2157292
aauaagaaggcgcagcugg

SEQ ID NO: 2157294 - RNA, 19 nt, Artificial Sequence
  Description of Artificial Sequence: Synthetic oligonucleotide
  Sense strand starting at position 3087 of SEQ ID NO: 1882918
gcuuccaucgugucgugau

SEQ ID NO: 2157295 - RNA, 19 nt, Artificial Sequence
  Description of Artificial Sequence: Synthetic oligonucleotide
  Antisense strand to SEQ ID NO: 2157294
aucacgacacgauggaagc

SEQ ID NO: 2157296 - RNA, 19 nt, Artificial Sequence
  Description of Artificial Sequence: Synthetic oligonucleotide
  Sense strand starting at position 3727 of SEQ ID NO: 1882918
ucacuuaaaguguaacuua

SEQ ID NO: 2157297 - RNA, 19 nt, Artificial Sequence
  Description of Artificial Sequence: Synthetic oligonucleotide
  Antisense strand to SEQ ID NO: 2157296
uaaguuacacuuuaaguga

SEQ ID NO: 2157298 - RNA, 19 nt, Artificial Sequence
  Description of Artificial Sequence: Synthetic oligonucleotide
  Sense strand starting at position 3798 of SEQ ID NO: 1882918
uuagaagauugugcuggau

SEQ ID NO: 2157299 - RNA, 19 nt, Artificial Sequence
  Description of Artificial Sequence: Synthetic oligonucleotide
  Antisense strand to SEQ ID NO: 2157298
auccagcacaaucuucuaa

SEQ ID NO: 2157300 - RNA, 19 nt, Artificial Sequence
  Description of Artificial Sequence: Synthetic oligonucleotide
  Sense strand starting at position 3897 of SEQ ID NO: 1882918
aagagaauguggccuuauu

SEQ ID NO: 2157301 - RNA, 19 nt, Artificial Sequence
  Description of Artificial Sequence: Synthetic oligonucleotide
  Antisense strand to SEQ ID NO: 2157300
aauaaggccacauucucuu

SEQ ID NO: 2157302 - RNA, 19 nt, Artificial Sequence
  Description of Artificial Sequence: Synthetic oligonucleotide
  Sense strand starting at position 3916 of SEQ ID NO: 1882918
aagaaagucugaucugcuu

SEQ ID NO: 2157303 - RNA, 19 nt, Artificial Sequence
  Description of Artificial Sequence: Synthetic oligonucleotide
  Antisense strand to SEQ ID NO: 2157302
aagcagaucagacuuucuu

SEQ ID NO: 2157304 - RNA, 19 nt, Artificial Sequence
  Description of Artificial Sequence: Synthetic oligonucleotide
  Sense strand starting at position 483 of SEQ ID NO: 1882919
acgccagguuucguuccaa

SEQ ID NO: 2157305 - RNA, 19 nt, Artificial Sequence
  Description of Artificial Sequence: Synthetic oligonucleotide
  Antisense strand to SEQ ID NO: 2157304
uuggaacgaaaccuggcgu

SEQ ID NO: 2157306 - RNA, 19 nt, Artificial Sequence
  Description of Artificial Sequence: Synthetic oligonucleotide
  Sense strand starting at position 502 of SEQ ID NO: 1882919
aauaguugucucuaagcgu

SEQ ID NO: 2157307 - RNA, 19 nt, Artificial Sequence
  Description of Artificial Sequence: Synthetic oligonucleotide
  Antisense strand to SEQ ID NO: 2157306
acgcuuagagacaacuauu

SEQ ID NO: 2157308 - RNA, 19 nt, Artificial Sequence
  Description of Artificial Sequence: Synthetic oligonucleotide
  Sense strand starting at position 640 of SEQ ID NO: 1882919
ccaggauugcugcaaagag

SEQ ID NO: 2157309 - RNA, 19 nt, Artificial Sequence
  Description of Artificial Sequence: Synthetic oligonucleotide
  Antisense strand to SEQ ID NO: 2157308
cucuuugcagcaauccugg

SEQ ID NO: 2157310 - RNA, 19 nt, Artificial Sequence
  Description of Artificial Sequence: Synthetic oligonucleotide
  Sense strand starting at position 2040 of SEQ ID NO: 1882919
ggacaccucuauguagagu

SEQ ID NO: 2157311 - RNA, 19 nt, Artificial Sequence
  Description of Artificial Sequence: Synthetic oligonucleotide
  Antisense strand to SEQ ID NO: 2157310
acucuacauagaggugucc

SEQ ID NO: 2157312 - RNA, 19 nt, Artificial Sequence
  Description of Artificial Sequence: Synthetic oligonucleotide
  Sense strand starting at position 2051 of SEQ ID NO: 1882919
uguagagucaugccgcuua

SEQ ID NO: 2157313 - RNA, 19 nt, Artificial Sequence
  Description of Artificial Sequence: Synthetic oligonucleotide
  Antisense strand to SEQ ID NO: 2157312
uaagcggcaugacucuaca

SEQ ID NO: 2157314 - RNA, 19 nt, Artificial Sequence
  Description of Artificial Sequence: Synthetic oligonucleotide
  Sense strand starting at position 2056 of SEQ ID NO: 1882919
agucaugccgcuuagagag

SEQ ID NO: 2157315 - RNA, 19 nt, Artificial Sequence
  Description of Artificial Sequence: Synthetic oligonucleotide
  Antisense strand to SEQ ID NO: 2157314
cucucuaagcggcaugacu

SEQ ID NO: 2157316 - RNA, 19 nt, Artificial Sequence
  Description of Artificial Sequence: Synthetic oligonucleotide
  Sense strand starting at position 2383 of SEQ ID NO: 1882919
ggaauaaggucccaaacug

SEQ ID NO: 2157317 - RNA, 19 nt, Artificial Sequence
  Description of Artificial Sequence: Synthetic oligonucleotide
  Antisense strand to SEQ ID NO: 2157316
caguuugggaccuuauucc

SEQ ID NO: 2157318 - RNA, 19 nt, Artificial Sequence
  Description of Artificial Sequence: Synthetic oligonucleotide
  Sense strand starting at position 2455 of SEQ ID NO: 1882919
gcgcaucacagugaagaga

SEQ ID NO: 2157319 - RNA, 19 nt, Artificial Sequence
  Description of Artificial Sequence: Synthetic oligonucleotide
  Antisense strand to SEQ ID NO: 2157318
ucucuucacugugaugcgc

SEQ ID NO: 2157320 - RNA, 19 nt, Artificial Sequence
  Description of Artificial Sequence: Synthetic oligonucleotide
  Sense strand starting at position 3023 of SEQ ID NO: 1882919
ggcucucuguggagggaau

SEQ ID NO: 2157321 - RNA, 19 nt, Artificial Sequence
  Description of Artificial Sequence: Synthetic oligonucleotide
  Antisense strand to SEQ ID NO: 2157320
auucccuccacagagagcc

SEQ ID NO: 2157322 - RNA, 19 nt, Artificial Sequence
  Description of Artificial Sequence: Synthetic oligonucleotide
  Sense strand starting at position 3167 of SEQ ID NO: 1882919
aguggaauauaggaaguaa

SEQ ID NO: 2157323 - RNA, 19 nt, Artificial Sequence
  Description of Artificial Sequence: Synthetic oligonucleotide
  Antisense strand to SEQ ID NO: 2157322
uuacuuccuauauuccacu

SEQ ID NO: 2157324 - RNA, 19 nt, Artificial Sequence
  Description of Artificial Sequence: Synthetic oligonucleotide
  Sense strand starting at position 3400 of SEQ ID NO: 1882919
gggagaagguguccugaga

SEQ ID NO: 2157325 - RNA, 19 nt, Artificial Sequence
  Description of Artificial Sequence: Synthetic oligonucleotide
  Antisense strand to SEQ ID NO: 2157324
ucucaggacaccuucuccc

SEQ ID NO: 2157326 - RNA, 19 nt, Artificial Sequence
  Description of Artificial Sequence: Synthetic oligonucleotide
  Sense strand starting at position 1161 of SEQ ID NO: 1882920
ggcagugagcucugcacau

SEQ ID NO: 2157327 - RNA, 19 nt, Artificial Sequence
  Description of Artificial Sequence: Synthetic oligonucleotide
  Antisense strand to SEQ ID NO: 2157326
augugcagagcucacugcc

SEQ ID NO: 2157328 - RNA, 19 nt, Artificial Sequence
  Description of Artificial Sequence: Synthetic oligonucleotide
  Sense strand starting at position 1163 of SEQ ID NO: 1882920
cagugagcucugcacauca

SEQ ID NO: 2157329 - RNA, 19 nt, Artificial Sequence
  Description of Artificial Sequence: Synthetic oligonucleotide
  Antisense strand to SEQ ID NO: 2157328
ugaugugcagagcucacug

SEQ ID NO: 2157330 - RNA, 19 nt, Artificial Sequence
  Description of Artificial Sequence: Synthetic oligonucleotide
  Sense strand starting at position 1363 of SEQ ID NO: 1882920
cguggaaucaaucaugcaa

SEQ ID NO: 2157331 - RNA, 19 nt, Artificial Sequence
  Description of Artificial Sequence: Synthetic oligonucleotide
  Antisense strand to SEQ ID NO: 2157330
uugcaugauugauuccacg

SEQ ID NO: 2157332 - RNA, 19 nt, Artificial Sequence
  Description of Artificial Sequence: Synthetic oligonucleotide
  Sense strand starting at position 1365 of SEQ ID NO: 1882920
uggaaucaaucaugcaauc

SEQ ID NO: 2157333 - RNA, 19 nt, Artificial Sequence
  Description of Artificial Sequence: Synthetic oligonucleotide
  Antisense strand to SEQ ID NO: 2157332
gauugcaugauugauucca

SEQ ID NO: 2157334 - RNA, 19 nt, Artificial Sequence
  Description of Artificial Sequence: Synthetic oligonucleotide
  Sense strand starting at position 2259 of SEQ ID NO: 1882920
ggguccuaugcccgucaca

SEQ ID NO: 2157335 - RNA, 19 nt, Artificial Sequence
  Description of Artificial Sequence: Synthetic oligonucleotide
  Antisense strand to SEQ ID NO: 2157334
ugugacgggcauaggaccc

SEQ ID NO: 2157336 - RNA, 19 nt, Artificial Sequence
  Description of Artificial Sequence: Synthetic oligonucleotide
  Sense strand starting at position 2290 of SEQ ID NO: 1882920
ggugaucugucccuaaacu

SEQ ID NO: 2157337 - RNA, 19 nt, Artificial Sequence
  Description of Artificial Sequence: Synthetic oligonucleotide
  Antisense strand to SEQ ID NO: 2157336
aguuuagggacagaucacc

SEQ ID NO: 2157338 - RNA, 19 nt, Artificial Sequence
  Description of Artificial Sequence: Synthetic oligonucleotide
  Sense strand starting at position 2291 of SEQ ID NO: 1882920
gugaucugucccuaaacuc

SEQ ID NO: 2157339 - RNA, 19 nt, Artificial Sequence
  Description of Artificial Sequence: Synthetic oligonucleotide
  Antisense strand to SEQ ID NO: 2157338
gaguuuagggacagaucac

SEQ ID NO: 2157340 - RNA, 19 nt, Artificial Sequence
  Description of Artificial Sequence: Synthetic oligonucleotide
  Sense strand starting at position 2365 of SEQ ID NO: 1882920
gggugagucccucacugau

SEQ ID NO: 2157341 - RNA, 19 nt, Artificial Sequence
  Description of Artificial Sequence: Synthetic oligonucleotide
  Antisense strand to SEQ ID NO: 2157340
aucagugagggacucaccc

SEQ ID NO: 2157342 - RNA, 19 nt, Artificial Sequence
  Description of Artificial Sequence: Synthetic oligonucleotide
  Sense strand starting at position 2367 of SEQ ID NO: 1882920
gugagucccucacugaucu

SEQ ID NO: 2157343 - RNA, 19 nt, Artificial Sequence
  Description of Artificial Sequence: Synthetic oligonucleotide
  Antisense strand to SEQ ID NO: 2157342
agaucagugagggacucac

SEQ ID NO: 2157344 - RNA, 19 nt, Artificial Sequence
  Description of Artificial Sequence: Synthetic oligonucleotide
  Sense strand starting at position 2368 of SEQ ID NO: 1882920
ugagucccucacugaucuu

SEQ ID NO: 2157345 - RNA, 19 nt, Artificial Sequence
  Description of Artificial Sequence: Synthetic oligonucleotide
  Antisense strand to SEQ ID NO: 2157344
aagaucagugagggacuca

SEQ ID NO: 2157346 - RNA, 19 nt, Artificial Sequence
  Description of Artificial Sequence: Synthetic oligonucleotide
  Sense strand starting at position 2393 of SEQ ID NO: 1882920
cuucuuuggcugggccaaa

SEQ ID NO: 2157347 - RNA, 19 nt, Artificial Sequence
  Description of Artificial Sequence: Synthetic oligonucleotide
  Antisense strand to SEQ ID NO: 2157346
uuuggcccagccaaagaag

SEQ ID NO: 2157348 - RNA, 19 nt, Artificial Sequence
  Description of Artificial Sequence: Synthetic oligonucleotide
  Sense strand starting at position 2851 of SEQ ID NO: 1882920
ccagaaugguggcucacua

SEQ ID NO: 2157349 - RNA, 19 nt, Artificial Sequence
  Description of Artificial Sequence: Synthetic oligonucleotide
  Antisense strand to SEQ ID NO: 2157348
uagugagccaccauucugg

SEQ ID NO: 2157350 - RNA, 19 nt, Artificial Sequence
  Description of Artificial Sequence: Synthetic oligonucleotide
  Sense strand starting at position 3118 of SEQ ID NO: 1882920
cgugaaaucacagguagag

SEQ ID NO: 2157351 - RNA, 19 nt, Artificial Sequence
  Description of Artificial Sequence: Synthetic oligonucleotide
  Antisense strand to SEQ ID NO: 2157350
cucuaccugugauuucacg

SEQ ID NO: 2157352 - RNA, 19 nt, Artificial Sequence
  Description of Artificial Sequence: Synthetic oligonucleotide
  Sense strand starting at position 3198 of SEQ ID NO: 1882920
agggauaccugugaaggua

SEQ ID NO: 2157353 - RNA, 19 nt, Artificial Sequence
  Description of Artificial Sequence: Synthetic oligonucleotide
  Antisense strand to SEQ ID NO: 2157352
uaccuucacagguaucccu

SEQ ID NO: 2157354 - RNA, 19 nt, Artificial Sequence
  Description of Artificial Sequence: Synthetic oligonucleotide
  Sense strand starting at position 3374 of SEQ ID NO: 1882920
ccuucugggucccaagaau

SEQ ID NO: 2157355 - RNA, 19 nt, Artificial Sequence
  Description of Artificial Sequence: Synthetic oligonucleotide
  Antisense strand to SEQ ID NO: 2157354
auucuugggacccagaagg

SEQ ID NO: 2157356 - RNA, 19 nt, Artificial Sequence
  Description of Artificial Sequence: Synthetic oligonucleotide
  Sense strand starting at position 3418 of SEQ ID NO: 1882920
cuggguccuguuugugaca

SEQ ID NO: 2157357 - RNA, 19 nt, Artificial Sequence
  Description of Artificial Sequence: Synthetic oligonucleotide
  Antisense strand to SEQ ID NO: 2157356
ugucacaaacaggacccag

SEQ ID NO: 2157358 - RNA, 19 nt, Artificial Sequence
  Description of Artificial Sequence: Synthetic oligonucleotide
  Sense strand starting at position 3420 of SEQ ID NO: 1882920
ggguccuguuugugacauu

SEQ ID NO: 2157359 - RNA, 19 nt, Artificial Sequence
  Description of Artificial Sequence: Synthetic oligonucleotide
  Antisense strand to SEQ ID NO: 2157358
aaugucacaaacaggaccc

SEQ ID NO: 2157360 - RNA, 19 nt, Artificial Sequence
  Description of Artificial Sequence: Synthetic oligonucleotide
  Sense strand starting at position 3734 of SEQ ID NO: 1882920
uuggguuucucuggaaggu

SEQ ID NO: 2157361 - RNA, 19 nt, Artificial Sequence
  Description of Artificial Sequence: Synthetic oligonucleotide
  Antisense strand to SEQ ID NO: 2157360
accuuccagagaaacccaa

SEQ ID NO: 2157362 - RNA, 19 nt, Artificial Sequence
  Description of Artificial Sequence: Synthetic oligonucleotide
  Sense strand starting at position 282 of SEQ ID NO: 1882921
ucuacuucgagguaaguau

SEQ ID NO: 2157363 - RNA, 19 nt, Artificial Sequence
  Description of Artificial Sequence: Synthetic oligonucleotide
  Antisense strand to SEQ ID NO: 2157362
auacuuaccucgaaguaga

SEQ ID NO: 2157364 - RNA, 19 nt, Artificial Sequence
  Description of Artificial Sequence: Synthetic oligonucleotide
  Sense strand starting at position 351 of SEQ ID NO: 1882921
uuuaaauugugguuaagag

SEQ ID NO: 2157365 - RNA, 19 nt, Artificial Sequence
  Description of Artificial Sequence: Synthetic oligonucleotide
  Antisense strand to SEQ ID NO: 2157364
cucuuaaccacaauuuaaa

SEQ ID NO: 2157366 - RNA, 19 nt, Artificial Sequence
  Description of Artificial Sequence: Synthetic oligonucleotide
  Sense strand starting at position 573 of SEQ ID NO: 1882921
uuccauuugccauguuaga

SEQ ID NO: 2157367 - RNA, 19 nt, Artificial Sequence
  Description of Artificial Sequence: Synthetic oligonucleotide
  Antisense strand to SEQ ID NO: 2157366
ucuaacauggcaaauggaa

SEQ ID NO: 2157368 - RNA, 19 nt, Artificial Sequence
  Description of Artificial Sequence: Synthetic oligonucleotide
  Sense strand starting at position 607 of SEQ ID NO: 1882921
uugugauuccuuuauccug

SEQ ID NO: 2157369 - RNA, 19 nt, Artificial Sequence
  Description of Artificial Sequence: Synthetic oligonucleotide
  Antisense strand to SEQ ID NO: 2157368
caggauaaaggaaucacaa

SEQ ID NO: 2157370 - RNA, 19 nt, Artificial Sequence
  Description of Artificial Sequence: Synthetic oligonucleotide
  Sense strand starting at position 661 of SEQ ID NO: 1882921
uuuggacauccguggaaau

SEQ ID NO: 2157371 - RNA, 19 nt, Artificial Sequence
  Description of Artificial Sequence: Synthetic oligonucleotide
  Antisense strand to SEQ ID NO: 2157370
auuuccacggauguccaaa

SEQ ID NO: 2157372 - RNA, 19 nt, Artificial Sequence
  Description of Artificial Sequence: Synthetic oligonucleotide
  Sense strand starting at position 716 of SEQ ID NO: 1882921
agagaucagcuuugacuuu

SEQ ID NO: 2157373 - RNA, 19 nt, Artificial Sequence
  Description of Artificial Sequence: Synthetic oligonucleotide
  Antisense strand to SEQ ID NO: 2157372
aaagucaaagcugaucucu

SEQ ID NO: 2157374 - RNA, 19 nt, Artificial Sequence
  Description of Artificial Sequence: Synthetic oligonucleotide
  Sense strand starting at position 853 of SEQ ID NO: 1882921
uucuguucccuccagaaug

SEQ ID NO: 2157375 - RNA, 19 nt, Artificial Sequence
  Description of Artificial Sequence: Synthetic oligonucleotide
  Antisense strand to SEQ ID NO: 2157374
cauucuggagggaacagaa

SEQ ID NO: 2157376 - RNA, 19 nt, Artificial Sequence
  Description of Artificial Sequence: Synthetic oligonucleotide
  Sense strand starting at position 855 of SEQ ID NO: 1882921
cuguucccuccagaaugua

SEQ ID NO: 2157377 - RNA, 19 nt, Artificial Sequence
  Description of Artificial Sequence: Synthetic oligonucleotide
  Antisense strand to SEQ ID NO: 2157376
uacauucuggagggaacag

SEQ ID NO: 2157378 - RNA, 19 nt, Artificial Sequence
  Description of Artificial Sequence: Synthetic oligonucleotide
  Sense strand starting at position 917 of SEQ ID NO: 1882921
guaaucccugaauaaaugu

SEQ ID NO: 2157379 - RNA, 19 nt, Artificial Sequence
  Description of Artificial Sequence: Synthetic oligonucleotide
  Antisense strand to SEQ ID NO: 2157378
acauuuauucagggauuac

SEQ ID NO: 2157380 - RNA, 19 nt, Artificial Sequence
  Description of Artificial Sequence: Synthetic oligonucleotide
  Sense strand starting at position 1014 of SEQ ID NO: 1882921
ggacuuugcagucagaauc

SEQ ID NO: 2157381 - RNA, 19 nt, Artificial Sequence
  Description of Artificial Sequence: Synthetic oligonucleotide
  Antisense strand to SEQ ID NO: 2157380
gauucugacugcaaagucc

SEQ ID NO: 2157382 - RNA, 19 nt, Artificial Sequence
  Description of Artificial Sequence: Synthetic oligonucleotide
  Sense strand starting at position 1041 of SEQ ID NO: 1882921
acagaucauccguauucuc

SEQ ID NO: 2157383 - RNA, 19 nt, Artificial Sequence
  Description of Artificial Sequence: Synthetic oligonucleotide
  Antisense strand to SEQ ID NO: 2157382
gagaauacggaugaucugu

SEQ ID NO: 2157384 - RNA, 19 nt, Artificial Sequence
  Description of Artificial Sequence: Synthetic oligonucleotide
  Sense strand starting at position 1759 of SEQ ID NO: 1882921
cugagcuauuuggcuugau

SEQ ID NO: 2157385 - RNA, 19 nt, Artificial Sequence
  Description of Artificial Sequence: Synthetic oligonucleotide
  Antisense strand to SEQ ID NO: 2157384
aucaagccaaauagcucag

SEQ ID NO: 2157386 - RNA, 19 nt, Artificial Sequence
  Description of Artificial Sequence: Synthetic oligonucleotide
  Sense strand starting at position 1760 of SEQ ID NO: 1882921
ugagcuauuuggcuugauc

SEQ ID NO: 2157387 - RNA, 19 nt, Artificial Sequence
  Description of Artificial Sequence: Synthetic oligonucleotide
  Antisense strand to SEQ ID NO: 2157386
gaucaagccaaauagcuca

SEQ ID NO: 2157388 - RNA, 19 nt, Artificial Sequence
  Description of Artificial Sequence: Synthetic oligonucleotide
  Sense strand starting at position 1762 of SEQ ID NO: 1882921
agcuauuuggcuugaucug

SEQ ID NO: 2157389 - RNA, 19 nt, Artificial Sequence
  Description of Artificial Sequence: Synthetic oligonucleotide
  Antisense strand to SEQ ID NO: 2157388
cagaucaagccaaauagcu

SEQ ID NO: 2157390 - RNA, 19 nt, Artificial Sequence
  Description of Artificial Sequence: Synthetic oligonucleotide
  Sense strand starting at position 1981 of SEQ ID NO: 1882921
gccugauaaucucuacaga

SEQ ID NO: 2157391 - RNA, 19 nt, Artificial Sequence
  Description of Artificial Sequence: Synthetic oligonucleotide
  Antisense strand to SEQ ID NO: 2157390
ucuguagagauuaucaggc

SEQ ID NO: 2157392 - RNA, 19 nt, Artificial Sequence
  Description of Artificial Sequence: Synthetic oligonucleotide
  Sense strand starting at position 2082 of SEQ ID NO: 1882921
gaugaaggguccuuacagu

SEQ ID NO: 2157393 - RNA, 19 nt, Artificial Sequence
  Description of Artificial Sequence: Synthetic oligonucleotide
  Antisense strand to SEQ ID NO: 2157392
acuguaaggacccuucauc

SEQ ID NO: 2157394 - RNA, 19 nt, Artificial Sequence
  Description of Artificial Sequence: Synthetic oligonucleotide
  Sense strand starting at position 2133 of SEQ ID NO: 1882921
gaggauugggcuuaagguu

SEQ ID NO: 2157395 - RNA, 19 nt, Artificial Sequence
  Description of Artificial Sequence: Synthetic oligonucleotide
  Antisense strand to SEQ ID NO: 2157394
aaccuuaagcccaauccuc

SEQ ID NO: 2157396 - RNA, 19 nt, Artificial Sequence
  Description of Artificial Sequence: Synthetic oligonucleotide
  Sense strand starting at position 2294 of SEQ ID NO: 1882921
uuguuaucucuguauagaa

SEQ ID NO: 2157397 - RNA, 19 nt, Artificial Sequence
  Description of Artificial Sequence: Synthetic oligonucleotide
  Antisense strand to SEQ ID NO: 2157396
uucuauacagagauaacaa

SEQ ID NO: 2157398 - RNA, 19 nt, Artificial Sequence
  Description of Artificial Sequence: Synthetic oligonucleotide
  Sense strand starting at position 2296 of SEQ ID NO: 1882921
guuaucucuguauagaaua

SEQ ID NO: 2157399 - RNA, 19 nt, Artificial Sequence
  Description of Artificial Sequence: Synthetic oligonucleotide
  Antisense strand to SEQ ID NO: 2157398
uauucuauacagagauaac

SEQ ID NO: 2157400 - RNA, 19 nt, Artificial Sequence
  Description of Artificial Sequence: Synthetic oligonucleotide
  Sense strand starting at position 2348 of SEQ ID NO: 1882921
uaucucuucugggugaaua

SEQ ID NO: 2157401 - RNA, 19 nt, Artificial Sequence
  Description of Artificial Sequence: Synthetic oligonucleotide
  Antisense strand to SEQ ID NO: 2157400
uauucacccagaagagaua

SEQ ID NO: 2157402 - RNA, 19 nt, Artificial Sequence
  Description of Artificial Sequence: Synthetic oligonucleotide
  Sense strand starting at position 2349 of SEQ ID NO: 1882921
aucucuucugggugaauag

SEQ ID NO: 2157403 - RNA, 19 nt, Artificial Sequence
  Description of Artificial Sequence: Synthetic oligonucleotide
  Antisense strand to SEQ ID NO: 2157402
cuauucacccagaagagau

SEQ ID NO: 2157404 - RNA, 19 nt, Artificial Sequence
  Description of Artificial Sequence: Synthetic oligonucleotide
  Sense strand starting at position 2370 of SEQ ID NO: 1882921
accagugugaggcagaaau

SEQ ID NO: 2157405 - RNA, 19 nt, Artificial Sequence
  Description of Artificial Sequence: Synthetic oligonucleotide
  Antisense strand to SEQ ID NO: 2157404
auuucugccucacacuggu

SEQ ID NO: 2157406 - RNA, 19 nt, Artificial Sequence
  Description of Artificial Sequence: Synthetic oligonucleotide
  Sense strand starting at position 2448 of SEQ ID NO: 1882921
agaaaugagcucuguaauu

SEQ ID NO: 2157407 - RNA, 19 nt, Artificial Sequence
  Description of Artificial Sequence: Synthetic oligonucleotide
  Antisense strand to SEQ ID NO: 2157406
aauuacagagcucauuucu

SEQ ID NO: 2157408 - RNA, 19 nt, Artificial Sequence
  Description of Artificial Sequence: Synthetic oligonucleotide
  Sense strand starting at position 2560 of SEQ ID NO: 1882921
ugacuagaauuccuuauug

SEQ ID NO: 2157409 - RNA, 19 nt, Artificial Sequence
  Description of Artificial Sequence: Synthetic oligonucleotide
  Antisense strand to SEQ ID NO: 2157408
caauaaggaauucuaguca

SEQ ID NO: 2157410 - RNA, 19 nt, Artificial Sequence
  Description of Artificial Sequence: Synthetic oligonucleotide
  Sense strand starting at position 2576 of SEQ ID NO: 1882921
uuggacuuccuugagugua

SEQ ID NO: 2157411 - RNA, 19 nt, Artificial Sequence
  Description of Artificial Sequence: Synthetic oligonucleotide
  Antisense strand to SEQ ID NO: 2157410
uacacucaaggaaguccaa

SEQ ID NO: 2157412 - RNA, 19 nt, Artificial Sequence
  Description of Artificial Sequence: Synthetic oligonucleotide
  Sense strand starting at position 2605 of SEQ ID NO: 1882921
caucuaguauuggcuagaa

SEQ ID NO: 2157413 - RNA, 19 nt, Artificial Sequence
  Description of Artificial Sequence: Synthetic oligonucleotide
  Antisense strand to SEQ ID NO: 2157412
uucuagccaauacuagaug

SEQ ID NO: 2157414 - RNA, 19 nt, Artificial Sequence
  Description of Artificial Sequence: Synthetic oligonucleotide
  Sense strand starting at position 2607 of SEQ ID NO: 1882921
ucuaguauuggcuagaauu

SEQ ID NO: 2157415 - RNA, 19 nt, Artificial Sequence
  Description of Artificial Sequence: Synthetic oligonucleotide
  Antisense strand to SEQ ID NO: 2157414
aauucuagccaauacuaga

SEQ ID NO: 2157416 - RNA, 19 nt, Artificial Sequence
  Description of Artificial Sequence: Synthetic oligonucleotide
  Sense strand starting at position 2617 of SEQ ID NO: 1882921
gcuagaauuccuuauuggu

SEQ ID NO: 2157417 - RNA, 19 nt, Artificial Sequence
  Description of Artificial Sequence: Synthetic oligonucleotide
  Antisense strand to SEQ ID NO: 2157416
accaauaaggaauucuagc

SEQ ID NO: 2157418 - RNA, 19 nt, Artificial Sequence
  Description of Artificial Sequence: Synthetic oligonucleotide
  Sense strand starting at position 2619 of SEQ ID NO: 1882921
uagaauuccuuauugguag

SEQ ID NO: 2157419 - RNA, 19 nt, Artificial Sequence
  Description of Artificial Sequence: Synthetic oligonucleotide
  Antisense strand to SEQ ID NO: 2157418
cuaccaauaaggaauucua

SEQ ID NO: 2157420 - RNA, 19 nt, Artificial Sequence
  Description of Artificial Sequence: Synthetic oligonucleotide
  Sense strand starting at position 2664 of SEQ ID NO: 1882921
guaaaugauagagguuugu

SEQ ID NO: 2157421 - RNA, 19 nt, Artificial Sequence
  Description of Artificial Sequence: Synthetic oligonucleotide
  Antisense strand to SEQ ID NO: 2157420
acaaaccucuaucauuuac

SEQ ID NO: 2157422 - RNA, 19 nt, Artificial Sequence
  Description of Artificial Sequence: Synthetic oligonucleotide
  Sense strand starting at position 2688 of SEQ ID NO: 1882921
gaguauggccuuuggaaug

SEQ ID NO: 2157423 - RNA, 19 nt, Artificial Sequence
  Description of Artificial Sequence: Synthetic oligonucleotide
  Antisense strand to SEQ ID NO: 2157422
cauuccaaaggccauacuc

SEQ ID NO: 2157424 - RNA, 19 nt, Artificial Sequence
  Description of Artificial Sequence: Synthetic oligonucleotide
  Sense strand starting at position 2717 of SEQ ID NO: 1882921
aaucuuaaguaguuaugga

SEQ ID NO: 2157425 - RNA, 19 nt, Artificial Sequence
  Description of Artificial Sequence: Synthetic oligonucleotide
  Antisense strand to SEQ ID NO: 2157424
uccauaacuacuuaagauu

SEQ ID NO: 2157426 - RNA, 19 nt, Artificial Sequence
  Description of Artificial Sequence: Synthetic oligonucleotide
  Sense strand starting at position 2791 of SEQ ID NO: 1882921
aguccuguuaguuaucaga

SEQ ID NO: 2157427 - RNA, 19 nt, Artificial Sequence
  Description of Artificial Sequence: Synthetic oligonucleotide
  Antisense strand to SEQ ID NO: 2157426
ucugauaacuaacaggacu

SEQ ID NO: 2157428 - RNA, 19 nt, Artificial Sequence
  Description of Artificial Sequence: Synthetic oligonucleotide
  Sense strand starting at position 2975 of SEQ ID NO: 1882921
guaauuaacgugcuuugcu

SEQ ID NO: 2157429 - RNA, 19 nt, Artificial Sequence
  Description of Artificial Sequence: Synthetic oligonucleotide
  Antisense strand to SEQ ID NO: 2157428
agcaaagcacguuaauuac

SEQ ID NO: 2157430 - RNA, 19 nt, Artificial Sequence
  Description of Artificial Sequence: Synthetic oligonucleotide
  Sense strand starting at position 3001 of SEQ ID NO: 1882921
ggcacauuaccugaacuuu

SEQ ID NO: 2157431 - RNA, 19 nt, Artificial Sequence
  Description of Artificial Sequence: Synthetic oligonucleotide
  Antisense strand to SEQ ID NO: 2157430
aaaguucagguaaugugcc

SEQ ID NO: 2157432 - RNA, 19 nt, Artificial Sequence
  Description of Artificial Sequence: Synthetic oligonucleotide
  Sense strand starting at position 3380 of SEQ ID NO: 1882921
uuauaaaguggugaauugu

SEQ ID NO: 2157433 - RNA, 19 nt, Artificial Sequence
  Description of Artificial Sequence: Synthetic oligonucleotide
  Antisense strand to SEQ ID NO: 2157432
acaauucaccacuuuauaa

SEQ ID NO: 2157434 - RNA, 19 nt, Artificial Sequence
  Description of Artificial Sequence: Synthetic oligonucleotide
  Sense strand starting at position 3479 of SEQ ID NO: 1882921
uguggaauaaauuguggaa

SEQ ID NO: 2157435 - RNA, 19 nt, Artificial Sequence
  Description of Artificial Sequence: Synthetic oligonucleotide
  Antisense strand to SEQ ID NO: 2157434
uuccacaauuuauuccaca

SEQ ID NO: 2157436 - RNA, 19 nt, Artificial Sequence
  Description of Artificial Sequence: Synthetic oligonucleotide
  Sense strand starting at position 3517 of SEQ ID NO: 1882921
uugggagaauuugaucaga

SEQ ID NO: 2157437 - RNA, 19 nt, Artificial Sequence
  Description of Artificial Sequence: Synthetic oligonucleotide
  Antisense strand to SEQ ID NO: 2157436
ucugaucaaauucucccaa

SEQ ID NO: 2157438 - RNA, 19 nt, Artificial Sequence
  Description of Artificial Sequence: Synthetic oligonucleotide
  Sense strand starting at position 3567 of SEQ ID NO: 1882921
uucuaaauuuacugaagag

SEQ ID NO: 2157439 - RNA, 19 nt, Artificial Sequence
  Description of Artificial Sequence: Synthetic oligonucleotide
  Antisense strand to SEQ ID NO: 2157438
cucuucaguaaauuuagaa

SEQ ID NO: 2157440 - RNA, 19 nt, Artificial Sequence
  Description of Artificial Sequence: Synthetic oligonucleotide
  Sense strand starting at position 3966 of SEQ ID NO: 1882921
auagucuagguuuaaugua

SEQ ID NO: 2157441 - RNA, 19 nt, Artificial Sequence
  Description of Artificial Sequence: Synthetic oligonucleotide
  Antisense strand to SEQ ID NO: 2157440
uacauuaaaccuagacuau

SEQ ID NO: 2157442 - RNA, 19 nt, Artificial Sequence
  Description of Artificial Sequence: Synthetic oligonucleotide
  Sense strand starting at position 285 of SEQ ID NO: 1882922
gucagauucuacuuugagg

SEQ ID NO: 2157443 - RNA, 19 nt, Artificial Sequence
  Description of Artificial Sequence: Synthetic oligonucleotide
  Antisense strand to SEQ ID NO: 2157442
ccucaaaguagaaucugac

SEQ ID NO: 2157444 - RNA, 19 nt, Artificial Sequence
  Description of Artificial Sequence: Synthetic oligonucleotide
  Sense strand starting at position 287 of SEQ ID NO: 1882922
cagauucuacuuugaggua

SEQ ID NO: 2157445 - RNA, 19 nt, Artificial Sequence
  Description of Artificial Sequence: Synthetic oligonucleotide
  Antisense strand to SEQ ID NO: 2157444
uaccucaaaguagaaucug

SEQ ID NO: 2157446 - RNA, 19 nt, Artificial Sequence
  Description of Artificial Sequence: Synthetic oligonucleotide
  Sense strand starting at position 330 of SEQ ID NO: 1882922
caaccuuucgguuauuaga

SEQ ID NO: 2157447 - RNA, 19 nt, Artificial Sequence
  Description of Artificial Sequence: Synthetic oligonucleotide
  Antisense strand to SEQ ID NO: 2157446
ucuaauaaccgaaagguug

SEQ ID NO: 2157448 - RNA, 19 nt, Artificial Sequence
  Description of Artificial Sequence: Synthetic oligonucleotide
  Sense strand starting at position 583 of SEQ ID NO: 1882922
uuccauuugccauguuaga

SEQ ID NO: 2157449 - RNA, 19 nt, Artificial Sequence
  Description of Artificial Sequence: Synthetic oligonucleotide
  Antisense strand to SEQ ID NO: 2157448
ucuaacauggcaaauggaa

SEQ ID NO: 2157450 - RNA, 19 nt, Artificial Sequence
  Description of Artificial Sequence: Synthetic oligonucleotide
  Sense strand starting at position 618 of SEQ ID NO: 1882922
uugugauuccuuuauccug

SEQ ID NO: 2157451 - RNA, 19 nt, Artificial Sequence
  Description of Artificial Sequence: Synthetic oligonucleotide
  Antisense strand to SEQ ID NO: 2157450
caggauaaaggaaucacaa

SEQ ID NO: 2157452 - RNA, 19 nt, Artificial Sequence
  Description of Artificial Sequence: Synthetic oligonucleotide
  Sense strand starting at position 672 of SEQ ID NO: 1882922
uuuggacaucccuggaaau

SEQ ID NO: 2157453 - RNA, 19 nt, Artificial Sequence
  Description of Artificial Sequence: Synthetic oligonucleotide
  Antisense strand to SEQ ID NO: 2157452
auuuccagggauguccaaa

SEQ ID NO: 2157454 - RNA, 19 nt, Artificial Sequence
  Description of Artificial Sequence: Synthetic oligonucleotide
  Sense strand starting at position 727 of SEQ ID NO: 1882922
agagaucagcuuugacuuu

SEQ ID NO: 2157455 - RNA, 19 nt, Artificial Sequence
  Description of Artificial Sequence: Synthetic oligonucleotide
  Antisense strand to SEQ ID NO: 2157454
aaagucaaagcugaucucu

SEQ ID NO: 2157456 - RNA, 19 nt, Artificial Sequence
  Description of Artificial Sequence: Synthetic oligonucleotide
  Sense strand starting at position 866 of SEQ ID NO: 1882922
cuguucccuccagaaugua

SEQ ID NO: 2157457 - RNA, 19 nt, Artificial Sequence
  Description of Artificial Sequence: Synthetic oligonucleotide
  Antisense strand to SEQ ID NO: 2157456
uacauucuggagggaacag

SEQ ID NO: 2157458 - RNA, 19 nt, Artificial Sequence
  Description of Artificial Sequence: Synthetic oligonucleotide
  Sense strand starting at position 928 of SEQ ID NO: 1882922
guaaucccugaauaaaugu

SEQ ID NO: 2157459 - RNA, 19 nt, Artificial Sequence
  Description of Artificial Sequence: Synthetic oligonucleotide
  Antisense strand to SEQ ID NO: 2157458
acauuuauucagggauuac

SEQ ID NO: 2157460 - RNA, 19 nt, Artificial Sequence
  Description of Artificial Sequence: Synthetic oligonucleotide
  Sense strand starting at position 1025 of SEQ ID NO: 1882922
ggacuuugcagucagaauc

SEQ ID NO: 2157461 - RNA, 19 nt, Artificial Sequence
  Description of Artificial Sequence: Synthetic oligonucleotide
  Antisense strand to SEQ ID NO: 2157460
gauucugacugcaaagucc

SEQ ID NO: 2157462 - RNA, 19 nt, Artificial Sequence
  Description of Artificial Sequence: Synthetic oligonucleotide
  Sense strand starting at position 1052 of SEQ ID NO: 1882922
acagaucauccguauucuc

SEQ ID NO: 2157463 - RNA, 19 nt, Artificial Sequence
  Description of Artificial Sequence: Synthetic oligonucleotide
  Antisense strand to SEQ ID NO: 2157462
gagaauacggaugaucugu

SEQ ID NO: 2157464 - RNA, 19 nt, Artificial Sequence
  Description of Artificial Sequence: Synthetic oligonucleotide
  Sense strand starting at position 1194 of SEQ ID NO: 1882922
ggacuugaaucuccuugau

SEQ ID NO: 2157465 - RNA, 19 nt, Artificial Sequence
  Description of Artificial Sequence: Synthetic oligonucleotide
  Antisense strand to SEQ ID NO: 2157464
aucaaggagauucaagucc

SEQ ID NO: 2157466 - RNA, 19 nt, Artificial Sequence
  Description of Artificial Sequence: Synthetic oligonucleotide
  Sense strand starting at position 1198 of SEQ ID NO: 1882922
uugaaucuccuugaugcuu

SEQ ID NO: 2157467 - RNA, 19 nt, Artificial Sequence
  Description of Artificial Sequence: Synthetic oligonucleotide
  Antisense strand to SEQ ID NO: 2157466
aagcaucaaggagauucaa

SEQ ID NO: 2157468 - RNA, 19 nt, Artificial Sequence
  Description of Artificial Sequence: Synthetic oligonucleotide
  Sense strand starting at position 1707 of SEQ ID NO: 1882922
gugagugguaaauaauucu

SEQ ID NO: 2157469 - RNA, 19 nt, Artificial Sequence
  Description of Artificial Sequence: Synthetic oligonucleotide
  Antisense strand to SEQ ID NO: 2157468
agaauuauuuaccacucac

SEQ ID NO: 2157470 - RNA, 19 nt, Artificial Sequence
  Description of Artificial Sequence: Synthetic oligonucleotide
  Sense strand starting at position 2083 of SEQ ID NO: 1882922
gaugaaggguccuuacagu

SEQ ID NO: 2157471 - RNA, 19 nt, Artificial Sequence
  Description of Artificial Sequence: Synthetic oligonucleotide
  Antisense strand to SEQ ID NO: 2157470
acuguaaggacccuucauc

SEQ ID NO: 2157472 - RNA, 19 nt, Artificial Sequence
  Description of Artificial Sequence: Synthetic oligonucleotide
  Sense strand starting at position 2134 of SEQ ID NO: 1882922
gaggauugggcuuaagguu

SEQ ID NO: 2157473 - RNA, 19 nt, Artificial Sequence
  Description of Artificial Sequence: Synthetic oligonucleotide
  Antisense strand to SEQ ID NO: 2157472
aaccuuaagcccaauccuc

SEQ ID NO: 2157474 - RNA, 19 nt, Artificial Sequence
  Description of Artificial Sequence: Synthetic oligonucleotide
  Sense strand starting at position 2293 of SEQ ID NO: 1882922
uuuguuauccuguauagaa

SEQ ID NO: 2157475 - RNA, 19 nt, Artificial Sequence
  Description of Artificial Sequence: Synthetic oligonucleotide
  Antisense strand to SEQ ID NO: 2157474
uucuauacaggauaacaaa

SEQ ID NO: 2157476 - RNA, 19 nt, Artificial Sequence
  Description of Artificial Sequence: Synthetic oligonucleotide
  Sense strand starting at position 2295 of SEQ ID NO: 1882922
uguuauccuguauagaaua

SEQ ID NO: 2157477 - RNA, 19 nt, Artificial Sequence
  Description of Artificial Sequence: Synthetic oligonucleotide
  Antisense strand to SEQ ID NO: 2157476
uauucuauacaggauaaca

SEQ ID NO: 2157478 - RNA, 19 nt, Artificial Sequence
  Description of Artificial Sequence: Synthetic oligonucleotide
  Sense strand starting at position 2317 of SEQ ID NO: 1882922
acagauaagugacucuacu

SEQ ID NO: 2157479 - RNA, 19 nt, Artificial Sequence
  Description of Artificial Sequence: Synthetic oligonucleotide
  Antisense strand to SEQ ID NO: 2157478
aguagagucacuuaucugu

SEQ ID NO: 2157480 - RNA, 19 nt, Artificial Sequence
  Description of Artificial Sequence: Synthetic oligonucleotide
  Sense strand starting at position 2347 of SEQ ID NO: 1882922
uaucucuucugggugaaua

SEQ ID NO: 2157481 - RNA, 19 nt, Artificial Sequence
  Description of Artificial Sequence: Synthetic oligonucleotide
  Antisense strand to SEQ ID NO: 2157480
uauucacccagaagagaua

SEQ ID NO: 2157482 - RNA, 19 nt, Artificial Sequence
  Description of Artificial Sequence: Synthetic oligonucleotide
  Sense strand starting at position 2348 of SEQ ID NO: 1882922
aucucuucugggugaauag

SEQ ID NO: 2157483 - RNA, 19 nt, Artificial Sequence
  Description of Artificial Sequence: Synthetic oligonucleotide
  Antisense strand to SEQ ID NO: 2157482
cuauucacccagaagagau

SEQ ID NO: 2157484 - RNA, 19 nt, Artificial Sequence
  Description of Artificial Sequence: Synthetic oligonucleotide
  Sense strand starting at position 2369 of SEQ ID NO: 1882922
accagugugaggcagaaau

SEQ ID NO: 2157485 - RNA, 19 nt, Artificial Sequence
  Description of Artificial Sequence: Synthetic oligonucleotide
  Antisense strand to SEQ ID NO: 2157484
auuucugccucacacuggu

SEQ ID NO: 2157486 - RNA, 19 nt, Artificial Sequence
  Description of Artificial Sequence: Synthetic oligonucleotide
  Sense strand starting at position 2447 of SEQ ID NO: 1882922
agaaaugagcucuguaauu

SEQ ID NO: 2157487 - RNA, 19 nt, Artificial Sequence
  Description of Artificial Sequence: Synthetic oligonucleotide
  Antisense strand to SEQ ID NO: 2157486
aauuacagagcucauuucu

SEQ ID NO: 2157488 - RNA, 19 nt, Artificial Sequence
  Description of Artificial Sequence: Synthetic oligonucleotide
  Sense strand starting at position 2501 of SEQ ID NO: 1882922
gcuccuugacgagagaucu

SEQ ID NO: 2157489 - RNA, 19 nt, Artificial Sequence
  Description of Artificial Sequence: Synthetic oligonucleotide
  Antisense strand to SEQ ID NO: 2157488
agaucucucgucaaggagc

SEQ ID NO: 2157490 - RNA, 19 nt, Artificial Sequence
  Description of Artificial Sequence: Synthetic oligonucleotide
  Sense strand starting at position 2507 of SEQ ID NO: 1882922
ugacgagagaucuguagac

SEQ ID NO: 2157491 - RNA, 19 nt, Artificial Sequence
  Description of Artificial Sequence: Synthetic oligonucleotide
  Antisense strand to SEQ ID NO: 2157490
gucuacagaucucucguca

SEQ ID NO: 2157492 - RNA, 19 nt, Artificial Sequence
  Description of Artificial Sequence: Synthetic oligonucleotide
  Sense strand starting at position 2559 of SEQ ID NO: 1882922
ugacuagaauuccuuauug

SEQ ID NO: 2157493 - RNA, 19 nt, Artificial Sequence
  Description of Artificial Sequence: Synthetic oligonucleotide
  Antisense strand to SEQ ID NO: 2157492
caauaaggaauucuaguca

SEQ ID NO: 2157494 - RNA, 19 nt, Artificial Sequence
  Description of Artificial Sequence: Synthetic oligonucleotide
  Sense strand starting at position 2601 of SEQ ID NO: 1882922
agacaucuaguauaggcua

SEQ ID NO: 2157495 - RNA, 19 nt, Artificial Sequence
  Description of Artificial Sequence: Synthetic oligonucleotide
  Antisense strand to SEQ ID NO: 2157494
uagccuauacuagaugucu

SEQ ID NO: 2157496 - RNA, 19 nt, Artificial Sequence
  Description of Artificial Sequence: Synthetic oligonucleotide
  Sense strand starting at position 2604 of SEQ ID NO: 1882922
caucuaguauaggcuagaa

SEQ ID NO: 2157497 - RNA, 19 nt, Artificial Sequence
  Description of Artificial Sequence: Synthetic oligonucleotide
  Antisense strand to SEQ ID NO: 2157496
uucuagccuauacuagaug

SEQ ID NO: 2157498 - RNA, 19 nt, Artificial Sequence
  Description of Artificial Sequence: Synthetic oligonucleotide
  Sense strand starting at position 2606 of SEQ ID NO: 1882922
ucuaguauaggcuagaauu

SEQ ID NO: 2157499 - RNA, 19 nt, Artificial Sequence
  Description of Artificial Sequence: Synthetic oligonucleotide
  Antisense strand to SEQ ID NO: 2157498
aauucuagccuauacuaga

SEQ ID NO: 2157500 - RNA, 19 nt, Artificial Sequence
  Description of Artificial Sequence: Synthetic oligonucleotide
  Sense strand starting at position 2618 of SEQ ID NO: 1882922
uagaauuccuuaguaguag

SEQ ID NO: 2157501 - RNA, 19 nt, Artificial Sequence
  Description of Artificial Sequence: Synthetic oligonucleotide
  Antisense strand to SEQ ID NO: 2157500
cuacuacuaaggaauucua

SEQ ID NO: 2157502 - RNA, 19 nt, Artificial Sequence
  Description of Artificial Sequence: Synthetic oligonucleotide
  Sense strand starting at position 2716 of SEQ ID NO: 1882922
aaucuuaaguaguuaugga

SEQ ID NO: 2157503 - RNA, 19 nt, Artificial Sequence
  Description of Artificial Sequence: Synthetic oligonucleotide
  Antisense strand to SEQ ID NO: 2157502
uccauaacuacuuaagauu

SEQ ID NO: 2157504 - RNA, 19 nt, Artificial Sequence
  Description of Artificial Sequence: Synthetic oligonucleotide
  Sense strand starting at position 2790 of SEQ ID NO: 1882922
aguccuguuaguuaucaga

SEQ ID NO: 2157505 - RNA, 19 nt, Artificial Sequence
  Description of Artificial Sequence: Synthetic oligonucleotide
  Antisense strand to SEQ ID NO: 2157504
ucugauaacuaacaggacu

SEQ ID NO: 2157506 - RNA, 19 nt, Artificial Sequence
  Description of Artificial Sequence: Synthetic oligonucleotide
  Sense strand starting at position 2985 of SEQ ID NO: 1882922
guaauuaacgugcuuugcu

SEQ ID NO: 2157507 - RNA, 19 nt, Artificial Sequence
  Description of Artificial Sequence: Synthetic oligonucleotide
  Antisense strand to SEQ ID NO: 2157506
agcaaagcacguuaauuac

SEQ ID NO: 2157508 - RNA, 19 nt, Artificial Sequence
  Description of Artificial Sequence: Synthetic oligonucleotide
  Sense strand starting at position 3009 of SEQ ID NO: 1882922
gugacacauuaccugaacu

SEQ ID NO: 2157509 - RNA, 19 nt, Artificial Sequence
  Description of Artificial Sequence: Synthetic oligonucleotide
  Antisense strand to SEQ ID NO: 2157508
aguucagguaaugugucac

SEQ ID NO: 2157510 - RNA, 19 nt, Artificial Sequence
  Description of Artificial Sequence: Synthetic oligonucleotide
  Sense strand starting at position 3398 of SEQ ID NO: 1882922
uggugaauuguauggaaug

SEQ ID NO: 2157511 - RNA, 19 nt, Artificial Sequence
  Description of Artificial Sequence: Synthetic oligonucleotide
  Antisense strand to SEQ ID NO: 2157510
cauuccauacaauucacca

SEQ ID NO: 2157512 - RNA, 19 nt, Artificial Sequence
  Description of Artificial Sequence: Synthetic oligonucleotide
  Sense strand starting at position 3405 of SEQ ID NO: 1882922
uuguauggaaugugaauga

SEQ ID NO: 2157513 - RNA, 19 nt, Artificial Sequence
  Description of Artificial Sequence: Synthetic oligonucleotide
  Antisense strand to SEQ ID NO: 2157512
ucauucacauuccauacaa

SEQ ID NO: 2157514 - RNA, 19 nt, Artificial Sequence
  Description of Artificial Sequence: Synthetic oligonucleotide
  Sense strand starting at position 3442 of SEQ ID NO: 1882922
augcauggacuuugaaaca

SEQ ID NO: 2157515 - RNA, 19 nt, Artificial Sequence
  Description of Artificial Sequence: Synthetic oligonucleotide
  Antisense strand to SEQ ID NO: 2157514
uguuucaaaguccaugcau

SEQ ID NO: 2157516 - RNA, 19 nt, Artificial Sequence
  Description of Artificial Sequence: Synthetic oligonucleotide
  Sense strand starting at position 3489 of SEQ ID NO: 1882922
uguggaauaaauuguggaa

SEQ ID NO: 2157517 - RNA, 19 nt, Artificial Sequence
  Description of Artificial Sequence: Synthetic oligonucleotide
  Antisense strand to SEQ ID NO: 2157516
uuccacaauuuauuccaca

SEQ ID NO: 2157518 - RNA, 19 nt, Artificial Sequence
  Description of Artificial Sequence: Synthetic oligonucleotide
  Sense strand starting at position 3527 of SEQ ID NO: 1882922
uugggagaauuugaucaga

SEQ ID NO: 2157519 - RNA, 19 nt, Artificial Sequence
  Description of Artificial Sequence: Synthetic oligonucleotide
  Antisense strand to SEQ ID NO: 2157518
ucugaucaaauucucccaa

SEQ ID NO: 2157520 - RNA, 19 nt, Artificial Sequence
  Description of Artificial Sequence: Synthetic oligonucleotide
  Sense strand starting at position 3968 of SEQ ID NO: 1882922
auagucuagguuuaaugua

SEQ ID NO: 2157521 - RNA, 19 nt, Artificial Sequence
  Description of Artificial Sequence: Synthetic oligonucleotide
  Antisense strand to SEQ ID NO: 2157520
uacauuaaaccuagacuau

SEQ ID NO: 2157522 - RNA, 19 nt, Artificial Sequence
  Description of Artificial Sequence: Synthetic oligonucleotide
  Sense strand starting at position 282 of SEQ ID NO: 1882923
ucuacuucgagguaaguau

SEQ ID NO: 2157523 - RNA, 19 nt, Artificial Sequence
  Description of Artificial Sequence: Synthetic oligonucleotide
  Antisense strand to SEQ ID NO: 2157522
auacuuaccucgaaguaga

SEQ ID NO: 2157524 - RNA, 19 nt, Artificial Sequence
  Description of Artificial Sequence: Synthetic oligonucleotide
  Sense strand starting at position 351 of SEQ ID NO: 1882923
uuuaaauugugguuaagag

SEQ ID NO: 2157525 - RNA, 19 nt, Artificial Sequence
  Description of Artificial Sequence: Synthetic oligonucleotide
  Antisense strand to SEQ ID NO: 2157524
cucuuaaccacaauuuaaa

SEQ ID NO: 2157526 - RNA, 19 nt, Artificial Sequence
  Description of Artificial Sequence: Synthetic oligonucleotide
  Sense strand starting at position 573 of SEQ ID NO: 1882923
uuccauuugccauguuaga

SEQ ID NO: 2157527 - RNA, 19 nt, Artificial Sequence
  Description of Artificial Sequence: Synthetic oligonucleotide
  Antisense strand to SEQ ID NO: 2157526
ucuaacauggcaaauggaa

SEQ ID NO: 2157528 - RNA, 19 nt, Artificial Sequence
  Description of Artificial Sequence: Synthetic oligonucleotide
  Sense strand starting at position 607 of SEQ ID NO: 1882923
uugugauuccuuuauccug

SEQ ID NO: 2157529 - RNA, 19 nt, Artificial Sequence
  Description of Artificial Sequence: Synthetic oligonucleotide
  Antisense strand to SEQ ID NO: 2157528
caggauaaaggaaucacaa

SEQ ID NO: 2157530 - RNA, 19 nt, Artificial Sequence
  Description of Artificial Sequence: Synthetic oligonucleotide
  Sense strand starting at position 661 of SEQ ID NO: 1882923
uuuggacauccguggaaau

SEQ ID NO: 2157531 - RNA, 19 nt, Artificial Sequence
  Description of Artificial Sequence: Synthetic oligonucleotide
  Antisense strand to SEQ ID NO: 2157530
auuuccacggauguccaaa

SEQ ID NO: 2157532 - RNA, 19 nt, Artificial Sequence
  Description of Artificial Sequence: Synthetic oligonucleotide
  Sense strand starting at position 716 of SEQ ID NO: 1882923
agagaucagcuuugacuuu

SEQ ID NO: 2157533 - RNA, 19 nt, Artificial Sequence
  Description of Artificial Sequence: Synthetic oligonucleotide
  Antisense strand to SEQ ID NO: 2157532
aaagucaaagcugaucucu

SEQ ID NO: 2157534 - RNA, 19 nt, Artificial Sequence
  Description of Artificial Sequence: Synthetic oligonucleotide
  Sense strand starting at position 853 of SEQ ID NO: 1882923
uucuguucccuccagaaug

SEQ ID NO: 2157535 - RNA, 19 nt, Artificial Sequence
  Description of Artificial Sequence: Synthetic oligonucleotide
  Antisense strand to SEQ ID NO: 2157534
cauucuggagggaacagaa

SEQ ID NO: 2157536 - RNA, 19 nt, Artificial Sequence
  Description of Artificial Sequence: Synthetic oligonucleotide
  Sense strand starting at position 855 of SEQ ID NO: 1882923
cuguucccuccagaaugua

SEQ ID NO: 2157537 - RNA, 19 nt, Artificial Sequence
  Description of Artificial Sequence: Synthetic oligonucleotide
  Antisense strand to SEQ ID NO: 2157536
uacauucuggagggaacag

SEQ ID NO: 2157538 - RNA, 19 nt, Artificial Sequence
  Description of Artificial Sequence: Synthetic oligonucleotide
  Sense strand starting at position 917 of SEQ ID NO: 1882923
guaaucccugaauaaaugu

SEQ ID NO: 2157539 - RNA, 19 nt, Artificial Sequence
  Description of Artificial Sequence: Synthetic oligonucleotide
  Antisense strand to SEQ ID NO: 2157538
acauuuauucagggauuac

SEQ ID NO: 2157540 - RNA, 19 nt, Artificial Sequence
  Description of Artificial Sequence: Synthetic oligonucleotide
  Sense strand starting at position 1014 of SEQ ID NO: 1882923
ggacuuugcagucagaauc

SEQ ID NO: 2157541 - RNA, 19 nt, Artificial Sequence
  Description of Artificial Sequence: Synthetic oligonucleotide
  Antisense strand to SEQ ID NO: 2157540
gauucugacugcaaagucc

SEQ ID NO: 2157542 - RNA, 19 nt, Artificial Sequence
  Description of Artificial Sequence: Synthetic oligonucleotide
  Sense strand starting at position 1041 of SEQ ID NO: 1882923
acagaucauccguauucuc

SEQ ID NO: 2157543 - RNA, 19 nt, Artificial Sequence
  Description of Artificial Sequence: Synthetic oligonucleotide
  Antisense strand to SEQ ID NO: 2157542
gagaauacggaugaucugu

SEQ ID NO: 2157544 - RNA, 19 nt, Artificial Sequence
  Description of Artificial Sequence: Synthetic oligonucleotide
  Sense strand starting at position 1759 of SEQ ID NO: 1882923
cugagcuauuuggcuugau

SEQ ID NO: 2157545 - RNA, 19 nt, Artificial Sequence
  Description of Artificial Sequence: Synthetic oligonucleotide
  Antisense strand to SEQ ID NO: 2157544
aucaagccaaauagcucag

SEQ ID NO: 2157546 - RNA, 19 nt, Artificial Sequence
  Description of Artificial Sequence: Synthetic oligonucleotide
  Sense strand starting at position 1760 of SEQ ID NO: 1882923
ugagcuauuuggcuugauc

SEQ ID NO: 2157547 - RNA, 19 nt, Artificial Sequence
  Description of Artificial Sequence: Synthetic oligonucleotide
  Antisense strand to SEQ ID NO: 2157546
gaucaagccaaauagcuca

SEQ ID NO: 2157548 - RNA, 19 nt, Artificial Sequence
  Description of Artificial Sequence: Synthetic oligonucleotide
  Sense strand starting at position 1762 of SEQ ID NO: 1882923
agcuauuuggcuugaucug

SEQ ID NO: 2157549 - RNA, 19 nt, Artificial Sequence
  Description of Artificial Sequence: Synthetic oligonucleotide
  Antisense strand to SEQ ID NO: 2157548
cagaucaagccaaauagcu

SEQ ID NO: 2157550 - RNA, 19 nt, Artificial Sequence
  Description of Artificial Sequence: Synthetic oligonucleotide
  Sense strand starting at position 1981 of SEQ ID NO: 1882923
gccugauaaucucuacaga

SEQ ID NO: 2157551 - RNA, 19 nt, Artificial Sequence
  Description of Artificial Sequence: Synthetic oligonucleotide
  Antisense strand to SEQ ID NO: 2157550
ucuguagagauuaucaggc

SEQ ID NO: 2157552 - RNA, 19 nt, Artificial Sequence
  Description of Artificial Sequence: Synthetic oligonucleotide
  Sense strand starting at position 2082 of SEQ ID NO: 1882923
gaugaaggguccuuacagu

SEQ ID NO: 2157553 - RNA, 19 nt, Artificial Sequence
  Description of Artificial Sequence: Synthetic oligonucleotide
  Antisense strand to SEQ ID NO: 2157552
acuguaaggacccuucauc

SEQ ID NO: 2157554 - RNA, 19 nt, Artificial Sequence
  Description of Artificial Sequence: Synthetic oligonucleotide
  Sense strand starting at position 2133 of SEQ ID NO: 1882923
gaggauugggcuuaagguu

SEQ ID NO: 2157555 - RNA, 19 nt, Artificial Sequence
  Description of Artificial Sequence: Synthetic oligonucleotide
  Antisense strand to SEQ ID NO: 2157554
aaccuuaagcccaauccuc

SEQ ID NO: 2157556 - RNA, 19 nt, Artificial Sequence
  Description of Artificial Sequence: Synthetic oligonucleotide
  Sense strand starting at position 2294 of SEQ ID NO: 1882923
uuguuaucucuguauagaa

SEQ ID NO: 2157557 - RNA, 19 nt, Artificial Sequence
  Description of Artificial Sequence: Synthetic oligonucleotide
  Antisense strand to SEQ ID NO: 2157556
uucuauacagagauaacaa

SEQ ID NO: 2157558 - RNA, 19 nt, Artificial Sequence
  Description of Artificial Sequence: Synthetic oligonucleotide
  Sense strand starting at position 2296 of SEQ ID NO: 1882923
guuaucucuguauagaaua

SEQ ID NO: 2157559 - RNA, 19 nt, Artificial Sequence
  Description of Artificial Sequence: Synthetic oligonucleotide
  Antisense strand to SEQ ID NO: 2157558
uauucuauacagagauaac

SEQ ID NO: 2157560 - RNA, 19 nt, Artificial Sequence
  Description of Artificial Sequence: Synthetic oligonucleotide
  Sense strand starting at position 2348 of SEQ ID NO: 1882923
uaucucuucugggugaaua

SEQ ID NO: 2157561 - RNA, 19 nt, Artificial Sequence
  Description of Artificial Sequence: Synthetic oligonucleotide
  Antisense strand to SEQ ID NO: 2157560
uauucacccagaagagaua

SEQ ID NO: 2157562 - RNA, 19 nt, Artificial Sequence
  Description of Artificial Sequence: Synthetic oligonucleotide
  Sense strand starting at position 2349 of SEQ ID NO: 1882923
aucucuucugggugaauag

SEQ ID NO: 2157563 - RNA, 19 nt, Artificial Sequence
  Description of Artificial Sequence: Synthetic oligonucleotide
  Antisense strand to SEQ ID NO: 2157562
cuauucacccagaagagau

SEQ ID NO: 2157564 - RNA, 19 nt, Artificial Sequence
  Description of Artificial Sequence: Synthetic oligonucleotide
  Sense strand starting at position 2370 of SEQ ID NO: 1882923
accagugugaggcagaaau

SEQ ID NO: 2157565 - RNA, 19 nt, Artificial Sequence
  Description of Artificial Sequence: Synthetic oligonucleotide
  Antisense strand to SEQ ID NO: 2157564
auuucugccucacacuggu

SEQ ID NO: 2157566 - RNA, 19 nt, Artificial Sequence
  Description of Artificial Sequence: Synthetic oligonucleotide
  Sense strand starting at position 2448 of SEQ ID NO: 1882923
agaaaugagcucuguaauu

SEQ ID NO: 2157567 - RNA, 19 nt, Artificial Sequence
  Description of Artificial Sequence: Synthetic oligonucleotide
  Antisense strand to SEQ ID NO: 2157566
aauuacagagcucauuucu

SEQ ID NO: 2157568 - RNA, 19 nt, Artificial Sequence
  Description of Artificial Sequence: Synthetic oligonucleotide
  Sense strand starting at position 2560 of SEQ ID NO: 1882923
ugacuagaauuccuuauug

SEQ ID NO: 2157569 - RNA, 19 nt, Artificial Sequence
  Description of Artificial Sequence: Synthetic oligonucleotide
  Antisense strand to SEQ ID NO: 2157568
caauaaggaauucuaguca

SEQ ID NO: 2157570 - RNA, 19 nt, Artificial Sequence
  Description of Artificial Sequence: Synthetic oligonucleotide
  Sense strand starting at position 2576 of SEQ ID NO: 1882923
uuggacuuccuugagugua

SEQ ID NO: 2157571 - RNA, 19 nt, Artificial Sequence
  Description of Artificial Sequence: Synthetic oligonucleotide
  Antisense strand to SEQ ID NO: 2157570
uacacucaaggaaguccaa

SEQ ID NO: 2157572 - RNA, 19 nt, Artificial Sequence
  Description of Artificial Sequence: Synthetic oligonucleotide
  Sense strand starting at position 2605 of SEQ ID NO: 1882923
caucuaguauuggcuagaa

SEQ ID NO: 2157573 - RNA, 19 nt, Artificial Sequence
  Description of Artificial Sequence: Synthetic oligonucleotide
  Antisense strand to SEQ ID NO: 2157572
uucuagccaauacuagaug

SEQ ID NO: 2157574 - RNA, 19 nt, Artificial Sequence
  Description of Artificial Sequence: Synthetic oligonucleotide
  Sense strand starting at position 2607 of SEQ ID NO: 1882923
ucuaguauuggcuagaauu

SEQ ID NO: 2157575 - RNA, 19 nt, Artificial Sequence
  Description of Artificial Sequence: Synthetic oligonucleotide
  Antisense strand to SEQ ID NO: 2157574
aauucuagccaauacuaga

SEQ ID NO: 2157576 - RNA, 19 nt, Artificial Sequence
  Description of Artificial Sequence: Synthetic oligonucleotide
  Sense strand starting at position 2617 of SEQ ID NO: 1882923
gcuagaauuccuuauuggu

SEQ ID NO: 2157577 - RNA, 19 nt, Artificial Sequence
  Description of Artificial Sequence: Synthetic oligonucleotide
  Antisense strand to SEQ ID NO: 2157576
accaauaaggaauucuagc

SEQ ID NO: 2157578 - RNA, 19 nt, Artificial Sequence
  Description of Artificial Sequence: Synthetic oligonucleotide
  Sense strand starting at position 2619 of SEQ ID NO: 1882923
uagaauuccuuauugguag

SEQ ID NO: 2157579 - RNA, 19 nt, Artificial Sequence
  Description of Artificial Sequence: Synthetic oligonucleotide
  Antisense strand to SEQ ID NO: 2157578
cuaccaauaaggaauucua

SEQ ID NO: 2157580 - RNA, 19 nt, Artificial Sequence
  Description of Artificial Sequence: Synthetic oligonucleotide
  Sense strand starting at position 2664 of SEQ ID NO: 1882923
guaaaugauagagguuugu

SEQ ID NO: 2157581 - RNA, 19 nt, Artificial Sequence
  Description of Artificial Sequence: Synthetic oligonucleotide
  Antisense strand to SEQ ID NO: 2157580
acaaaccucuaucauuuac

SEQ ID NO: 2157582 - RNA, 19 nt, Artificial Sequence
  Description of Artificial Sequence: Synthetic oligonucleotide
  Sense strand starting at position 2688 of SEQ ID NO: 1882923
gaguauggccuuuggaaug

SEQ ID NO: 2157583 - RNA, 19 nt, Artificial Sequence
  Description of Artificial Sequence: Synthetic oligonucleotide
  Antisense strand to SEQ ID NO: 2157582
cauuccaaaggccauacuc

SEQ ID NO: 2157584 - RNA, 19 nt, Artificial Sequence
  Description of Artificial Sequence: Synthetic oligonucleotide
  Sense strand starting at position 2717 of SEQ ID NO: 1882923
aaucuuaaguaguuaugga

SEQ ID NO: 2157585 - RNA, 19 nt, Artificial Sequence
  Description of Artificial Sequence: Synthetic oligonucleotide
  Antisense strand to SEQ ID NO: 2157584
uccauaacuacuuaagauu

SEQ ID NO: 2157586 - RNA, 19 nt, Artificial Sequence
  Description of Artificial Sequence: Synthetic oligonucleotide
  Sense strand starting at position 2791 of SEQ ID NO: 1882923
aguccuguuaguuaucaga

SEQ ID NO: 2157587 - RNA, 19 nt, Artificial Sequence
  Description of Artificial Sequence: Synthetic oligonucleotide
  Antisense strand to SEQ ID NO: 2157586
ucugauaacuaacaggacu

SEQ ID NO: 2157588 - RNA, 19 nt, Artificial Sequence
  Description of Artificial Sequence: Synthetic oligonucleotide
  Sense strand starting at position 2975 of SEQ ID NO: 1882923
guaauuaacgugcuuugcu

SEQ ID NO: 2157589 - RNA, 19 nt, Artificial Sequence
  Description of Artificial Sequence: Synthetic oligonucleotide
  Antisense strand to SEQ ID NO: 2157588
agcaaagcacguuaauuac

SEQ ID NO: 2157590 - RNA, 19 nt, Artificial Sequence
  Description of Artificial Sequence: Synthetic oligonucleotide
  Sense strand starting at position 3001 of SEQ ID NO: 1882923
ggcacauuaccugaacuuu

SEQ ID NO: 2157591 - RNA, 19 nt, Artificial Sequence
  Description of Artificial Sequence: Synthetic oligonucleotide
  Antisense strand to SEQ ID NO: 2157590
aaaguucagguaaugugcc

SEQ ID NO: 2157592 - RNA, 19 nt, Artificial Sequence
  Description of Artificial Sequence: Synthetic oligonucleotide
  Sense strand starting at position 3380 of SEQ ID NO: 1882923
uuauaaaguggugaauugu

SEQ ID NO: 2157593 - RNA, 19 nt, Artificial Sequence
  Description of Artificial Sequence: Synthetic oligonucleotide
  Antisense strand to SEQ ID NO: 2157592
acaauucaccacuuuauaa

SEQ ID NO: 2157594 - RNA, 19 nt, Artificial Sequence
  Description of Artificial Sequence: Synthetic oligonucleotide
  Sense strand starting at position 3479 of SEQ ID NO: 1882923
uguggaauaaauuguggaa

SEQ ID NO: 2157595 - RNA, 19 nt, Artificial Sequence
  Description of Artificial Sequence: Synthetic oligonucleotide
  Antisense strand to SEQ ID NO: 2157594
uuccacaauuuauuccaca

SEQ ID NO: 2157596 - RNA, 19 nt, Artificial Sequence
  Description of Artificial Sequence: Synthetic oligonucleotide
  Sense strand starting at position 3517 of SEQ ID NO: 1882923
uugggagaauuugaucaga

SEQ ID NO: 2157597 - RNA, 19 nt, Artificial Sequence
  Description of Artificial Sequence: Synthetic oligonucleotide
  Antisense strand to SEQ ID NO: 2157596
ucugaucaaauucucccaa

SEQ ID NO: 2157598 - RNA, 19 nt, Artificial Sequence
  Description of Artificial Sequence: Synthetic oligonucleotide
  Sense strand starting at position 3567 of SEQ ID NO: 1882923
uucuaaauuuacugaagag

SEQ ID NO: 2157599 - RNA, 19 nt, Artificial Sequence
  Description of Artificial Sequence: Synthetic oligonucleotide
  Antisense strand to SEQ ID NO: 2157598
cucuucaguaaauuuagaa

SEQ ID NO: 2157600 - RNA, 19 nt, Artificial Sequence
  Description of Artificial Sequence: Synthetic oligonucleotide
  Sense strand starting at position 3966 of SEQ ID NO: 1882923
auagucuagguuuaaugua

SEQ ID NO: 2157601 - RNA, 19 nt, Artificial Sequence
  Description of Artificial Sequence: Synthetic oligonucleotide
  Antisense strand to SEQ ID NO: 2157600
uacauuaaaccuagacuau

SEQ ID NO: 2157602 - RNA, 19 nt, Artificial Sequence
  Description of Artificial Sequence: Synthetic oligonucleotide
  Sense strand starting at position 285 of SEQ ID NO: 1882924
gucagauucuacuuugagg

SEQ ID NO: 2157603 - RNA, 19 nt, Artificial Sequence
  Description of Artificial Sequence: Synthetic oligonucleotide
  Antisense strand to SEQ ID NO: 2157602
ccucaaaguagaaucugac

SEQ ID NO: 2157604 - RNA, 19 nt, Artificial Sequence
  Description of Artificial Sequence: Synthetic oligonucleotide
  Sense strand starting at position 287 of SEQ ID NO: 1882924
cagauucuacuuugaggua

SEQ ID NO: 2157605 - RNA, 19 nt, Artificial Sequence
  Description of Artificial Sequence: Synthetic oligonucleotide
  Antisense strand to SEQ ID NO: 2157604
uaccucaaaguagaaucug

SEQ ID NO: 2157606 - RNA, 19 nt, Artificial Sequence
  Description of Artificial Sequence: Synthetic oligonucleotide
  Sense strand starting at position 330 of SEQ ID NO: 1882924
caaccuuucgguuauuaga

SEQ ID NO: 2157607 - RNA, 19 nt, Artificial Sequence
  Description of Artificial Sequence: Synthetic oligonucleotide
  Antisense strand to SEQ ID NO: 2157606
ucuaauaaccgaaagguug

SEQ ID NO: 2157608 - RNA, 19 nt, Artificial Sequence
  Description of Artificial Sequence: Synthetic oligonucleotide
  Sense strand starting at position 583 of SEQ ID NO: 1882924
uuccauuugccauguuaga

SEQ ID NO: 2157609 - RNA, 19 nt, Artificial Sequence
  Description of Artificial Sequence: Synthetic oligonucleotide
  Antisense strand to SEQ ID NO: 2157608
ucuaacauggcaaauggaa

SEQ ID NO: 2157610 - RNA, 19 nt, Artificial Sequence
  Description of Artificial Sequence: Synthetic oligonucleotide
  Sense strand starting at position 618 of SEQ ID NO: 1882924
uugugauuccuuuauccug

SEQ ID NO: 2157611 - RNA, 19 nt, Artificial Sequence
  Description of Artificial Sequence: Synthetic oligonucleotide
  Antisense strand to SEQ ID NO: 2157610
caggauaaaggaaucacaa

SEQ ID NO: 2157612 - RNA, 19 nt, Artificial Sequence
  Description of Artificial Sequence: Synthetic oligonucleotide
  Sense strand starting at position 672 of SEQ ID NO: 1882924
uuuggacaucccuggaaau

SEQ ID NO: 2157613 - RNA, 19 nt, Artificial Sequence
  Description of Artificial Sequence: Synthetic oligonucleotide
  Antisense strand to SEQ ID NO: 2157612
auuuccagggauguccaaa

SEQ ID NO: 2157614 - RNA, 19 nt, Artificial Sequence
  Description of Artificial Sequence: Synthetic oligonucleotide
  Sense strand starting at position 727 of SEQ ID NO: 1882924
agagaucagcuuugacuuu

SEQ ID NO: 2157615 - RNA, 19 nt, Artificial Sequence
  Description of Artificial Sequence: Synthetic oligonucleotide
  Antisense strand to SEQ ID NO: 2157614
aaagucaaagcugaucucu

SEQ ID NO: 2157616 - RNA, 19 nt, Artificial Sequence
  Description of Artificial Sequence: Synthetic oligonucleotide
  Sense strand starting at position 866 of SEQ ID NO: 1882924
cuguucccuccagaaugua

SEQ ID NO: 2157617 - RNA, 19 nt, Artificial Sequence
  Description of Artificial Sequence: Synthetic oligonucleotide
  Antisense strand to SEQ ID NO: 2157616
uacauucuggagggaacag

SEQ ID NO: 2157618 - RNA, 19 nt, Artificial Sequence
  Description of Artificial Sequence: Synthetic oligonucleotide
  Sense strand starting at position 928 of SEQ ID NO: 1882924
guaaucccugaauaaaugu

SEQ ID NO: 2157619 - RNA, 19 nt, Artificial Sequence
  Description of Artificial Sequence: Synthetic oligonucleotide
  Antisense strand to SEQ ID NO: 2157618
acauuuauucagggauuac

SEQ ID NO: 2157620 - RNA, 19 nt, Artificial Sequence
  Description of Artificial Sequence: Synthetic oligonucleotide
  Sense strand starting at position 1025 of SEQ ID NO: 1882924
ggacuuugcagucagaauc

SEQ ID NO: 2157621 - RNA, 19 nt, Artificial Sequence
  Description of Artificial Sequence: Synthetic oligonucleotide
  Antisense strand to SEQ ID NO: 2157620
gauucugacugcaaagucc

SEQ ID NO: 2157622 - RNA, 19 nt, Artificial Sequence
  Description of Artificial Sequence: Synthetic oligonucleotide
  Sense strand starting at position 1052 of SEQ ID NO: 1882924
acagaucauccguauucuc

SEQ ID NO: 2157623 - RNA, 19 nt, Artificial Sequence
  Description of Artificial Sequence: Synthetic oligonucleotide
  Antisense strand to SEQ ID NO: 2157622
gagaauacggaugaucugu

SEQ ID NO: 2157624 - RNA, 19 nt, Artificial Sequence
  Description of Artificial Sequence: Synthetic oligonucleotide
  Sense strand starting at position 1194 of SEQ ID NO: 1882924
ggacuugaaucuccuugau

SEQ ID NO: 2157625 - RNA, 19 nt, Artificial Sequence
  Description of Artificial Sequence: Synthetic oligonucleotide
  Antisense strand to SEQ ID NO: 2157624
aucaaggagauucaagucc

SEQ ID NO: 2157626 - RNA, 19 nt, Artificial Sequence
  Description of Artificial Sequence: Synthetic oligonucleotide
  Sense strand starting at position 1198 of SEQ ID NO: 1882924
uugaaucuccuugaugcuu

SEQ ID NO: 2157627 - RNA, 19 nt, Artificial Sequence
  Description of Artificial Sequence: Synthetic oligonucleotide
  Antisense strand to SEQ ID NO: 2157626
aagcaucaaggagauucaa

SEQ ID NO: 2157628 - RNA, 19 nt, Artificial Sequence
  Description of Artificial Sequence: Synthetic oligonucleotide
  Sense strand starting at position 1707 of SEQ ID NO: 1882924
gugagugguaaauaauucu

SEQ ID NO: 2157629 - RNA, 19 nt, Artificial Sequence
  Description of Artificial Sequence: Synthetic oligonucleotide
  Antisense strand to SEQ ID NO: 2157628
agaauuauuuaccacucac

SEQ ID NO: 2157630 - RNA, 19 nt, Artificial Sequence
  Description of Artificial Sequence: Synthetic oligonucleotide
  Sense strand starting at position 2083 of SEQ ID NO: 1882924
gaugaaggguccuuacagu

SEQ ID NO: 2157631 - RNA, 19 nt, Artificial Sequence
  Description of Artificial Sequence: Synthetic oligonucleotide
  Antisense strand to SEQ ID NO: 2157630
acuguaaggacccuucauc

SEQ ID NO: 2157632 - RNA, 19 nt, Artificial Sequence
  Description of Artificial Sequence: Synthetic oligonucleotide
  Sense strand starting at position 2134 of SEQ ID NO: 1882924
gaggauugggcuuaagguu

SEQ ID NO: 2157633 - RNA, 19 nt, Artificial Sequence
  Description of Artificial Sequence: Synthetic oligonucleotide
  Antisense strand to SEQ ID NO: 2157632
aaccuuaagcccaauccuc

SEQ ID NO: 2157634 - RNA, 19 nt, Artificial Sequence
  Description of Artificial Sequence: Synthetic oligonucleotide
  Sense strand starting at position 2293 of SEQ ID NO: 1882924
uuuguuauccuguauagaa

SEQ ID NO: 2157635 - RNA, 19 nt, Artificial Sequence
  Description of Artificial Sequence: Synthetic oligonucleotide
  Antisense strand to SEQ ID NO: 2157634
uucuauacaggauaacaaa

SEQ ID NO: 2157636 - RNA, 19 nt, Artificial Sequence
  Description of Artificial Sequence: Synthetic oligonucleotide
  Sense strand starting at position 2295 of SEQ ID NO: 1882924
uguuauccuguauagaaua

SEQ ID NO: 2157637 - RNA, 19 nt, Artificial Sequence
  Description of Artificial Sequence: Synthetic oligonucleotide
  Antisense strand to SEQ ID NO: 2157636
uauucuauacaggauaaca

SEQ ID NO: 2157638 - RNA, 19 nt, Artificial Sequence
  Description of Artificial Sequence: Synthetic oligonucleotide
  Sense strand starting at position 2317 of SEQ ID NO: 1882924
acagauaagugacucuacu

SEQ ID NO: 2157639 - RNA, 19 nt, Artificial Sequence
  Description of Artificial Sequence: Synthetic oligonucleotide
  Antisense strand to SEQ ID NO: 2157638
aguagagucacuuaucugu

SEQ ID NO: 2157640 - RNA, 19 nt, Artificial Sequence
  Description of Artificial Sequence: Synthetic oligonucleotide
  Sense strand starting at position 2347 of SEQ ID NO: 1882924
uaucucuucugggugaaua

SEQ ID NO: 2157641 - RNA, 19 nt, Artificial Sequence
  Description of Artificial Sequence: Synthetic oligonucleotide
  Antisense strand to SEQ ID NO: 2157640
uauucacccagaagagaua

SEQ ID NO: 2157642 - RNA, 19 nt, Artificial Sequence
  Description of Artificial Sequence: Synthetic oligonucleotide
  Sense strand starting at position 2348 of SEQ ID NO: 1882924
aucucuucugggugaauag

SEQ ID NO: 2157643 - RNA, 19 nt, Artificial Sequence
  Description of Artificial Sequence: Synthetic oligonucleotide
  Antisense strand to SEQ ID NO: 2157642
cuauucacccagaagagau

SEQ ID NO: 2157644 - RNA, 19 nt, Artificial Sequence
  Description of Artificial Sequence: Synthetic oligonucleotide
  Sense strand starting at position 2369 of SEQ ID NO: 1882924
accagugugaggcagaaau

SEQ ID NO: 2157645 - RNA, 19 nt, Artificial Sequence
  Description of Artificial Sequence: Synthetic oligonucleotide
  Antisense strand to SEQ ID NO: 2157644
auuucugccucacacuggu

SEQ ID NO: 2157646 - RNA, 19 nt, Artificial Sequence
  Description of Artificial Sequence: Synthetic oligonucleotide
  Sense strand starting at position 2447 of SEQ ID NO: 1882924
agaaaugagcucuguaauu

SEQ ID NO: 2157647 - RNA, 19 nt, Artificial Sequence
  Description of Artificial Sequence: Synthetic oligonucleotide
  Antisense strand to SEQ ID NO: 2157646
aauuacagagcucauuucu

SEQ ID NO: 2157648 - RNA, 19 nt, Artificial Sequence
  Description of Artificial Sequence: Synthetic oligonucleotide
  Sense strand starting at position 2501 of SEQ ID NO: 1882924
gcuccuugacgagagaucu

SEQ ID NO: 2157649 - RNA, 19 nt, Artificial Sequence
  Description of Artificial Sequence: Synthetic oligonucleotide
  Antisense strand to SEQ ID NO: 2157648
agaucucucgucaaggagc

SEQ ID NO: 2157650 - RNA, 19 nt, Artificial Sequence
  Description of Artificial Sequence: Synthetic oligonucleotide
  Sense strand starting at position 2507 of SEQ ID NO: 1882924
ugacgagagaucuguagac

SEQ ID NO: 2157651 - RNA, 19 nt, Artificial Sequence
  Description of Artificial Sequence: Synthetic oligonucleotide
  Antisense strand to SEQ ID NO: 2157650
gucuacagaucucucguca

SEQ ID NO: 2157652 - RNA, 19 nt, Artificial Sequence
  Description of Artificial Sequence: Synthetic oligonucleotide
  Sense strand starting at position 2559 of SEQ ID NO: 1882924
ugacuagaauuccuuauug

SEQ ID NO: 2157653 - RNA, 19 nt, Artificial Sequence
  Description of Artificial Sequence: Synthetic oligonucleotide
  Antisense strand to SEQ ID NO: 2157652
caauaaggaauucuaguca

SEQ ID NO: 2157654 - RNA, 19 nt, Artificial Sequence
  Description of Artificial Sequence: Synthetic oligonucleotide
  Sense strand starting at position 2601 of SEQ ID NO: 1882924
agacaucuaguauaggcua

SEQ ID NO: 2157655 - RNA, 19 nt, Artificial Sequence
  Description of Artificial Sequence: Synthetic oligonucleotide
  Antisense strand to SEQ ID NO: 2157654
uagccuauacuagaugucu

SEQ ID NO: 2157656 - RNA, 19 nt, Artificial Sequence
  Description of Artificial Sequence: Synthetic oligonucleotide
  Sense strand starting at position 2604 of SEQ ID NO: 1882924
caucuaguauaggcuagaa

SEQ ID NO: 2157657 - RNA, 19 nt, Artificial Sequence
  Description of Artificial Sequence: Synthetic oligonucleotide
  Antisense strand to SEQ ID NO: 2157656
uucuagccuauacuagaug

SEQ ID NO: 2157658 - RNA, 19 nt, Artificial Sequence
  Description of Artificial Sequence: Synthetic oligonucleotide
  Sense strand starting at position 2606 of SEQ ID NO: 1882924
ucuaguauaggcuagaauu

SEQ ID NO: 2157659 - RNA, 19 nt, Artificial Sequence
  Description of Artificial Sequence: Synthetic oligonucleotide
  Antisense strand to SEQ ID NO: 2157658
aauucuagccuauacuaga

SEQ ID NO: 2157660 - RNA, 19 nt, Artificial Sequence
  Description of Artificial Sequence: Synthetic oligonucleotide
  Sense strand starting at position 2618 of SEQ ID NO: 1882924
uagaauuccuuaguaguag

SEQ ID NO: 2157661 - RNA, 19 nt, Artificial Sequence
  Description of Artificial Sequence: Synthetic oligonucleotide
  Antisense strand to SEQ ID NO: 2157660
cuacuacuaaggaauucua

SEQ ID NO: 2157662 - RNA, 19 nt, Artificial Sequence
  Description of Artificial Sequence: Synthetic oligonucleotide
  Sense strand starting at position 2716 of SEQ ID NO: 1882924
aaucuuaaguaguuaugga

SEQ ID NO: 2157663 - RNA, 19 nt, Artificial Sequence
  Description of Artificial Sequence: Synthetic oligonucleotide
  Antisense strand to SEQ ID NO: 2157662
uccauaacuacuuaagauu

SEQ ID NO: 2157664 - RNA, 19 nt, Artificial Sequence
  Description of Artificial Sequence: Synthetic oligonucleotide
  Sense strand starting at position 2790 of SEQ ID NO: 1882924
aguccuguuaguuaucaga

SEQ ID NO: 2157665 - RNA, 19 nt, Artificial Sequence
  Description of Artificial Sequence: Synthetic oligonucleotide
  Antisense strand to SEQ ID NO: 2157664
ucugauaacuaacaggacu

SEQ ID NO: 2157666 - RNA, 19 nt, Artificial Sequence
  Description of Artificial Sequence: Synthetic oligonucleotide
  Sense strand starting at position 2985 of SEQ ID NO: 1882924
guaauuaacgugcuuugcu

SEQ ID NO: 2157667 - RNA, 19 nt, Artificial Sequence
  Description of Artificial Sequence: Synthetic oligonucleotide
  Antisense strand to SEQ ID NO: 2157666
agcaaagcacguuaauuac

SEQ ID NO: 2157668 - RNA, 19 nt, Artificial Sequence
  Description of Artificial Sequence: Synthetic oligonucleotide
  Sense strand starting at position 3009 of SEQ ID NO: 1882924
gugacacauuaccugaacu

SEQ ID NO: 2157669 - RNA, 19 nt, Artificial Sequence
  Description of Artificial Sequence: Synthetic oligonucleotide
  Antisense strand to SEQ ID NO: 2157668
aguucagguaaugugucac

SEQ ID NO: 2157670 - RNA, 19 nt, Artificial Sequence
  Description of Artificial Sequence: Synthetic oligonucleotide
  Sense strand starting at position 3398 of SEQ ID NO: 1882924
uggugaauuguauggaaug

SEQ ID NO: 2157671 - RNA, 19 nt, Artificial Sequence
  Description of Artificial Sequence: Synthetic oligonucleotide
  Antisense strand to SEQ ID NO: 2157670
cauuccauacaauucacca

SEQ ID NO: 2157672 - RNA, 19 nt, Artificial Sequence
  Description of Artificial Sequence: Synthetic oligonucleotide
  Sense strand starting at position 3405 of SEQ ID NO: 1882924
uuguauggaaugugaauga

SEQ ID NO: 2157673 - RNA, 19 nt, Artificial Sequence
  Description of Artificial Sequence: Synthetic oligonucleotide
  Antisense strand to SEQ ID NO: 2157672
ucauucacauuccauacaa

SEQ ID NO: 2157674 - RNA, 19 nt, Artificial Sequence
  Description of Artificial Sequence: Synthetic oligonucleotide
  Sense strand starting at position 3442 of SEQ ID NO: 1882924
augcauggacuuugaaaca

SEQ ID NO: 2157675 - RNA, 19 nt, Artificial Sequence
  Description of Artificial Sequence: Synthetic oligonucleotide
  Antisense strand to SEQ ID NO: 2157674
uguuucaaaguccaugcau

SEQ ID NO: 2157676 - RNA, 19 nt, Artificial Sequence
  Description of Artificial Sequence: Synthetic oligonucleotide
  Sense strand starting at position 3489 of SEQ ID NO: 1882924
uguggaauaaauuguggaa

SEQ ID NO: 2157677 - RNA, 19 nt, Artificial Sequence
  Description of Artificial Sequence: Synthetic oligonucleotide
  Antisense strand to SEQ ID NO: 2157676
uuccacaauuuauuccaca

SEQ ID NO: 2157678 - RNA, 19 nt, Artificial Sequence
  Description of Artificial Sequence: Synthetic oligonucleotide
  Sense strand starting at position 3527 of SEQ ID NO: 1882924
uugggagaauuugaucaga

SEQ ID NO: 2157679 - RNA, 19 nt, Artificial Sequence
  Description of Artificial Sequence: Synthetic oligonucleotide
  Antisense strand to SEQ ID NO: 2157678
ucugaucaaauucucccaa

SEQ ID NO: 2157680 - RNA, 19 nt, Artificial Sequence
  Description of Artificial Sequence: Synthetic oligonucleotide
  Sense strand starting at position 3968 of SEQ ID NO: 1882924
auagucuagguuuaaugua

SEQ ID NO: 2157681 - RNA, 19 nt, Artificial Sequence
  Description of Artificial Sequence: Synthetic oligonucleotide
  Antisense strand to SEQ ID NO: 2157680
uacauuaaaccuagacuau

SEQ ID NO: 2157682 - RNA, 19 nt, Artificial Sequence
  Description of Artificial Sequence: Synthetic oligonucleotide
  Sense strand starting at position 28 of SEQ ID NO: 1882925
gcuugaauccuggagguug

SEQ ID NO: 2157683 - RNA, 19 nt, Artificial Sequence
  Description of Artificial Sequence: Synthetic oligonucleotide
  Antisense strand to SEQ ID NO: 2157682
caaccuccaggauucaagc

SEQ ID NO: 2157684 - RNA, 19 nt, Artificial Sequence
  Description of Artificial Sequence: Synthetic oligonucleotide
  Sense strand starting at position 155 of SEQ ID NO: 1882925
ugaaauguuccauggacuu

SEQ ID NO: 2157685 - RNA, 19 nt, Artificial Sequence
  Description of Artificial Sequence: Synthetic oligonucleotide
  Antisense strand to SEQ ID NO: 2157684
aaguccauggaacauuuca

SEQ ID NO: 2157686 - RNA, 19 nt, Artificial Sequence
  Description of Artificial Sequence: Synthetic oligonucleotide
  Sense strand starting at position 168 of SEQ ID NO: 1882925
ggacuucacgaguaaaugu

SEQ ID NO: 2157687 - RNA, 19 nt, Artificial Sequence
  Description of Artificial Sequence: Synthetic oligonucleotide
  Antisense strand to SEQ ID NO: 2157686
acauuuacucgugaagucc

SEQ ID NO: 2157688 - RNA, 19 nt, Artificial Sequence
  Description of Artificial Sequence: Synthetic oligonucleotide
  Sense strand starting at position 175 of SEQ ID NO: 1882925
acgaguaaauguucuggau

SEQ ID NO: 2157689 - RNA, 19 nt, Artificial Sequence
  Description of Artificial Sequence: Synthetic oligonucleotide
  Antisense strand to SEQ ID NO: 2157688
auccagaacauuuacucgu

SEQ ID NO: 2157690 - RNA, 19 nt, Artificial Sequence
  Description of Artificial Sequence: Synthetic oligonucleotide
  Sense strand starting at position 281 of SEQ ID NO: 1882925
gguggaucaacccagaguu

SEQ ID NO: 2157691 - RNA, 19 nt, Artificial Sequence
  Description of Artificial Sequence: Synthetic oligonucleotide
  Antisense strand to SEQ ID NO: 2157690
aacucuggguugauccacc

SEQ ID NO: 2157692 - RNA, 19 nt, Artificial Sequence
  Description of Artificial Sequence: Synthetic oligonucleotide
  Sense strand starting at position 426 of SEQ ID NO: 1882925
ucaggaauaucccuggguu

SEQ ID NO: 2157693 - RNA, 19 nt, Artificial Sequence
  Description of Artificial Sequence: Synthetic oligonucleotide
  Antisense strand to SEQ ID NO: 2157692
aacccagggauauuccuga

SEQ ID NO: 2157694 - RNA, 19 nt, Artificial Sequence
  Description of Artificial Sequence: Synthetic oligonucleotide
  Sense strand starting at position 427 of SEQ ID NO: 1882925
caggaauaucccuggguug

SEQ ID NO: 2157695 - RNA, 19 nt, Artificial Sequence
  Description of Artificial Sequence: Synthetic oligonucleotide
  Antisense strand to SEQ ID NO: 2157694
caacccagggauauuccug

SEQ ID NO: 2157696 - RNA, 19 nt, Artificial Sequence
  Description of Artificial Sequence: Synthetic oligonucleotide
  Sense strand starting at position 428 of SEQ ID NO: 1882925
aggaauaucccuggguugu

SEQ ID NO: 2157697 - RNA, 19 nt, Artificial Sequence
  Description of Artificial Sequence: Synthetic oligonucleotide
  Antisense strand to SEQ ID NO: 2157696
acaacccagggauauuccu

SEQ ID NO: 2157698 - RNA, 19 nt, Artificial Sequence
  Description of Artificial Sequence: Synthetic oligonucleotide
  Sense strand starting at position 429 of SEQ ID NO: 1882925
ggaauaucccuggguuguu

SEQ ID NO: 2157699 - RNA, 19 nt, Artificial Sequence
  Description of Artificial Sequence: Synthetic oligonucleotide
  Antisense strand to SEQ ID NO: 2157698
aacaacccagggauauucc

SEQ ID NO: 2157700 - RNA, 19 nt, Artificial Sequence
  Description of Artificial Sequence: Synthetic oligonucleotide
  Sense strand starting at position 430 of SEQ ID NO: 1882925
gaauaucccuggguuguuu

SEQ ID NO: 2157701 - RNA, 19 nt, Artificial Sequence
  Description of Artificial Sequence: Synthetic oligonucleotide
  Antisense strand to SEQ ID NO: 2157700
aaacaacccagggauauuc

SEQ ID NO: 2157702 - RNA, 19 nt, Artificial Sequence
  Description of Artificial Sequence: Synthetic oligonucleotide
  Sense strand starting at position 599 of SEQ ID NO: 1882925
aagcuaucugcucagcgaa

SEQ ID NO: 2157703 - RNA, 19 nt, Artificial Sequence
  Description of Artificial Sequence: Synthetic oligonucleotide
  Antisense strand to SEQ ID NO: 2157702
uucgcugagcagauagcuu

SEQ ID NO: 2157704 - RNA, 19 nt, Artificial Sequence
  Description of Artificial Sequence: Synthetic oligonucleotide
  Sense strand starting at position 611 of SEQ ID NO: 1882925
cagcgaaaguuuccaacau

SEQ ID NO: 2157705 - RNA, 19 nt, Artificial Sequence
  Description of Artificial Sequence: Synthetic oligonucleotide
  Antisense strand to SEQ ID NO: 2157704
auguuggaaacuuucgcug

SEQ ID NO: 2157706 - RNA, 19 nt, Artificial Sequence
  Description of Artificial Sequence: Synthetic oligonucleotide
  Sense strand starting at position 634 of SEQ ID NO: 1882925
uggcaugaaggucauaagu

SEQ ID NO: 2157707 - RNA, 19 nt, Artificial Sequence
  Description of Artificial Sequence: Synthetic oligonucleotide
  Antisense strand to SEQ ID NO: 2157706
acuuaugaccuucaugcca

SEQ ID NO: 2157708 - RNA, 19 nt, Artificial Sequence
  Description of Artificial Sequence: Synthetic oligonucleotide
  Sense strand starting at position 734 of SEQ ID NO: 1882925
uggguucccugguuuacua

SEQ ID NO: 2157709 - RNA, 19 nt, Artificial Sequence
  Description of Artificial Sequence: Synthetic oligonucleotide
  Antisense strand to SEQ ID NO: 2157708
uaguaaaccagggaaccca

SEQ ID NO: 2157710 - RNA, 19 nt, Artificial Sequence
  Description of Artificial Sequence: Synthetic oligonucleotide
  Sense strand starting at position 816 of SEQ ID NO: 1882925
guagguagaacuugcaaau

SEQ ID NO: 2157711 - RNA, 19 nt, Artificial Sequence
  Description of Artificial Sequence: Synthetic oligonucleotide
  Antisense strand to SEQ ID NO: 2157710
auuugcaaguucuaccuac

SEQ ID NO: 2157712 - RNA, 19 nt, Artificial Sequence
  Description of Artificial Sequence: Synthetic oligonucleotide
  Sense strand starting at position 825 of SEQ ID NO: 1882925
acuugcaaaugguuaauga

SEQ ID NO: 2157713 - RNA, 19 nt, Artificial Sequence
  Description of Artificial Sequence: Synthetic oligonucleotide
  Antisense strand to SEQ ID NO: 2157712
ucauuaaccauuugcaagu

SEQ ID NO: 2157714 - RNA, 19 nt, Artificial Sequence
  Description of Artificial Sequence: Synthetic oligonucleotide
  Sense strand starting at position 826 of SEQ ID NO: 1882925
cuugcaaaugguuaaugaa

SEQ ID NO: 2157715 - RNA, 19 nt, Artificial Sequence
  Description of Artificial Sequence: Synthetic oligonucleotide
  Antisense strand to SEQ ID NO: 2157714
uucauuaaccauuugcaag

SEQ ID NO: 2157716 - RNA, 19 nt, Artificial Sequence
  Description of Artificial Sequence: Synthetic oligonucleotide
  Sense strand starting at position 937 of SEQ ID NO: 1882925
ugcuuacaaggaggauuaa

SEQ ID NO: 2157717 - RNA, 19 nt, Artificial Sequence
  Description of Artificial Sequence: Synthetic oligonucleotide
  Antisense strand to SEQ ID NO: 2157716
uuaauccuccuuguaagca

SEQ ID NO: 2157718 - RNA, 19 nt, Artificial Sequence
  Description of Artificial Sequence: Synthetic oligonucleotide
  Sense strand starting at position 949 of SEQ ID NO: 1882925
ggauuaaaguucucgaugc

SEQ ID NO: 2157719 - RNA, 19 nt, Artificial Sequence
  Description of Artificial Sequence: Synthetic oligonucleotide
  Antisense strand to SEQ ID NO: 2157718
gcaucgagaacuuuaaucc

SEQ ID NO: 2157720 - RNA, 19 nt, Artificial Sequence
  Description of Artificial Sequence: Synthetic oligonucleotide
  Sense strand starting at position 951 of SEQ ID NO: 1882925
auuaaaguucucgaugcca

SEQ ID NO: 2157721 - RNA, 19 nt, Artificial Sequence
  Description of Artificial Sequence: Synthetic oligonucleotide
  Antisense strand to SEQ ID NO: 2157720
uggcaucgagaacuuuaau

SEQ ID NO: 2157722 - RNA, 19 nt, Artificial Sequence
  Description of Artificial Sequence: Synthetic oligonucleotide
  Sense strand starting at position 982 of SEQ ID NO: 1882925
cugucuugauccucagaau

SEQ ID NO: 2157723 - RNA, 19 nt, Artificial Sequence
  Description of Artificial Sequence: Synthetic oligonucleotide
  Antisense strand to SEQ ID NO: 2157722
auucugaggaucaagacag

SEQ ID NO: 2157724 - RNA, 19 nt, Artificial Sequence
  Description of Artificial Sequence: Synthetic oligonucleotide
  Sense strand starting at position 983 of SEQ ID NO: 1882925
ugucuugauccucagaauc

SEQ ID NO: 2157725 - RNA, 19 nt, Artificial Sequence
  Description of Artificial Sequence: Synthetic oligonucleotide
  Antisense strand to SEQ ID NO: 2157724
gauucugaggaucaagaca

SEQ ID NO: 2157726 - RNA, 19 nt, Artificial Sequence
  Description of Artificial Sequence: Synthetic oligonucleotide
  Sense strand starting at position 1020 of SEQ ID NO: 1882925
caggguggcugucuuacua

SEQ ID NO: 2157727 - RNA, 19 nt, Artificial Sequence
  Description of Artificial Sequence: Synthetic oligonucleotide
  Antisense strand to SEQ ID NO: 2157726
uaguaagacagccacccug

SEQ ID NO: 2157728 - RNA, 19 nt, Artificial Sequence
  Description of Artificial Sequence: Synthetic oligonucleotide
  Sense strand starting at position 1075 of SEQ ID NO: 1882925
guaucuugcuugccaagaa

SEQ ID NO: 2157729 - RNA, 19 nt, Artificial Sequence
  Description of Artificial Sequence: Synthetic oligonucleotide
  Antisense strand to SEQ ID NO: 2157728
uucuuggcaagcaagauac

SEQ ID NO: 2157730 - RNA, 19 nt, Artificial Sequence
  Description of Artificial Sequence: Synthetic oligonucleotide
  Sense strand starting at position 1079 of SEQ ID NO: 1882925
cuugcuugccaagaaucaa

SEQ ID NO: 2157731 - RNA, 19 nt, Artificial Sequence
  Description of Artificial Sequence: Synthetic oligonucleotide
  Antisense strand to SEQ ID NO: 2157730
uugauucuuggcaagcaag

SEQ ID NO: 2157732 - RNA, 19 nt, Artificial Sequence
  Description of Artificial Sequence: Synthetic oligonucleotide
  Sense strand starting at position 1245 of SEQ ID NO: 1882925
cuuauuaguggucaccagu

SEQ ID NO: 2157733 - RNA, 19 nt, Artificial Sequence
  Description of Artificial Sequence: Synthetic oligonucleotide
  Antisense strand to SEQ ID NO: 2157732
acuggugaccacuaauaag

SEQ ID NO: 2157734 - RNA, 19 nt, Artificial Sequence
  Description of Artificial Sequence: Synthetic oligonucleotide
  Sense strand starting at position 1248 of SEQ ID NO: 1882925
auuaguggucaccaguuua

SEQ ID NO: 2157735 - RNA, 19 nt, Artificial Sequence
  Description of Artificial Sequence: Synthetic oligonucleotide
  Antisense strand to SEQ ID NO: 2157734
uaaacuggugaccacuaau

SEQ ID NO: 2157736 - RNA, 19 nt, Artificial Sequence
  Description of Artificial Sequence: Synthetic oligonucleotide
  Sense strand starting at position 1576 of SEQ ID NO: 1882925
gcgccucucacguuaggua

SEQ ID NO: 2157737 - RNA, 19 nt, Artificial Sequence
  Description of Artificial Sequence: Synthetic oligonucleotide
  Antisense strand to SEQ ID NO: 2157736
uaccuaacgugagaggcgc

SEQ ID NO: 2157738 - RNA, 19 nt, Artificial Sequence
  Description of Artificial Sequence: Synthetic oligonucleotide
  Sense strand starting at position 1992 of SEQ ID NO: 1882925
gccgucgccgcgaaagaua

SEQ ID NO: 2157739 - RNA, 19 nt, Artificial Sequence
  Description of Artificial Sequence: Synthetic oligonucleotide
  Antisense strand to SEQ ID NO: 2157738
uaucuuucgcggcgacggc

SEQ ID NO: 2157740 - RNA, 19 nt, Artificial Sequence
  Description of Artificial Sequence: Synthetic oligonucleotide
  Sense strand starting at position 2250 of SEQ ID NO: 1882925
ccggcagagaaaugaaagu

SEQ ID NO: 2157741 - RNA, 19 nt, Artificial Sequence
  Description of Artificial Sequence: Synthetic oligonucleotide
  Antisense strand to SEQ ID NO: 2157740
acuuucauuucucugccgg

SEQ ID NO: 2157742 - RNA, 19 nt, Artificial Sequence
  Description of Artificial Sequence: Synthetic oligonucleotide
  Sense strand starting at position 2428 of SEQ ID NO: 1882925
uugcuugugaucgccacau

SEQ ID NO: 2157743 - RNA, 19 nt, Artificial Sequence
  Description of Artificial Sequence: Synthetic oligonucleotide
  Antisense strand to SEQ ID NO: 2157742
auguggcgaucacaagcaa

SEQ ID NO: 2157744 - RNA, 19 nt, Artificial Sequence
  Description of Artificial Sequence: Synthetic oligonucleotide
  Sense strand starting at position 2474 of SEQ ID NO: 1882925
ccugaaauuggcgaggcuu

SEQ ID NO: 2157745 - RNA, 19 nt, Artificial Sequence
  Description of Artificial Sequence: Synthetic oligonucleotide
  Antisense strand to SEQ ID NO: 2157744
aagccucgccaauuucagg

SEQ ID NO: 2157746 - RNA, 19 nt, Artificial Sequence
  Description of Artificial Sequence: Synthetic oligonucleotide
  Sense strand starting at position 2476 of SEQ ID NO: 1882925
ugaaauuggcgaggcuuca

SEQ ID NO: 2157747 - RNA, 19 nt, Artificial Sequence
  Description of Artificial Sequence: Synthetic oligonucleotide
  Antisense strand to SEQ ID NO: 2157746
ugaagccucgccaauuuca

SEQ ID NO: 2157748 - RNA, 19 nt, Artificial Sequence
  Description of Artificial Sequence: Synthetic oligonucleotide
  Sense strand starting at position 2797 of SEQ ID NO: 1882925
ucucaaagcgcugcgauua

SEQ ID NO: 2157749 - RNA, 19 nt, Artificial Sequence
  Description of Artificial Sequence: Synthetic oligonucleotide
  Antisense strand to SEQ ID NO: 2157748
uaaucgcagcgcuuugaga

SEQ ID NO: 2157750 - RNA, 19 nt, Artificial Sequence
  Description of Artificial Sequence: Synthetic oligonucleotide
  Sense strand starting at position 3021 of SEQ ID NO: 1882925
caugaagauuaagugguau

SEQ ID NO: 2157751 - RNA, 19 nt, Artificial Sequence
  Description of Artificial Sequence: Synthetic oligonucleotide
  Antisense strand to SEQ ID NO: 2157750
auaccacuuaaucuucaug

SEQ ID NO: 2157752 - RNA, 19 nt, Artificial Sequence
  Description of Artificial Sequence: Synthetic oligonucleotide
  Sense strand starting at position 3023 of SEQ ID NO: 1882925
ugaagauuaagugguauaa

SEQ ID NO: 2157753 - RNA, 19 nt, Artificial Sequence
  Description of Artificial Sequence: Synthetic oligonucleotide
  Antisense strand to SEQ ID NO: 2157752
uuauaccacuuaaucuuca

SEQ ID NO: 2157754 - RNA, 19 nt, Artificial Sequence
  Description of Artificial Sequence: Synthetic oligonucleotide
  Sense strand starting at position 3027 of SEQ ID NO: 1882925
gauuaagugguauaaccuu

SEQ ID NO: 2157755 - RNA, 19 nt, Artificial Sequence
  Description of Artificial Sequence: Synthetic oligonucleotide
  Antisense strand to SEQ ID NO: 2157754
aagguuauaccacuuaauc

SEQ ID NO: 2157756 - RNA, 19 nt, Artificial Sequence
  Description of Artificial Sequence: Synthetic oligonucleotide
  Sense strand starting at position 3035 of SEQ ID NO: 1882925
gguauaaccuuuguuccua

SEQ ID NO: 2157757 - RNA, 19 nt, Artificial Sequence
  Description of Artificial Sequence: Synthetic oligonucleotide
  Antisense strand to SEQ ID NO: 2157756
uaggaacaaagguuauacc

SEQ ID NO: 2157758 - RNA, 19 nt, Artificial Sequence
  Description of Artificial Sequence: Synthetic oligonucleotide
  Sense strand starting at position 3036 of SEQ ID NO: 1882925
guauaaccuuuguuccuaa

SEQ ID NO: 2157759 - RNA, 19 nt, Artificial Sequence
  Description of Artificial Sequence: Synthetic oligonucleotide
  Antisense strand to SEQ ID NO: 2157758
uuaggaacaaagguuauac

SEQ ID NO: 2157760 - RNA, 19 nt, Artificial Sequence
  Description of Artificial Sequence: Synthetic oligonucleotide
  Sense strand starting at position 3072 of SEQ ID NO: 1882925
auuacuaaguguucucauc

SEQ ID NO: 2157761 - RNA, 19 nt, Artificial Sequence
  Description of Artificial Sequence: Synthetic oligonucleotide
  Antisense strand to SEQ ID NO: 2157760
gaugagaacacuuaguaau

SEQ ID NO: 2157762 - RNA, 19 nt, Artificial Sequence
  Description of Artificial Sequence: Synthetic oligonucleotide
  Sense strand starting at position 55 of SEQ ID NO: 1882926
auagcacuacuaugucaua

SEQ ID NO: 2157763 - RNA, 19 nt, Artificial Sequence
  Description of Artificial Sequence: Synthetic oligonucleotide
  Antisense strand to SEQ ID NO: 2157762
uaugacauaguagugcuau

SEQ ID NO: 2157764 - RNA, 19 nt, Artificial Sequence
  Description of Artificial Sequence: Synthetic oligonucleotide
  Sense strand starting at position 170 of SEQ ID NO: 1882926
gacaguaaaugcuugguaa

SEQ ID NO: 2157765 - RNA, 19 nt, Artificial Sequence
  Description of Artificial Sequence: Synthetic oligonucleotide
  Antisense strand to SEQ ID NO: 2157764
uuaccaagcauuuacuguc

SEQ ID NO: 2157766 - RNA, 19 nt, Artificial Sequence
  Description of Artificial Sequence: Synthetic oligonucleotide
  Sense strand starting at position 229 of SEQ ID NO: 1882926
gcguaauucuuauuuagca

SEQ ID NO: 2157767 - RNA, 19 nt, Artificial Sequence
  Description of Artificial Sequence: Synthetic oligonucleotide
  Antisense strand to SEQ ID NO: 2157766
ugcuaaauaagaauuacgc

SEQ ID NO: 2157768 - RNA, 19 nt, Artificial Sequence
  Description of Artificial Sequence: Synthetic oligonucleotide
  Sense strand starting at position 230 of SEQ ID NO: 1882926
cguaauucuuauuuagcau

SEQ ID NO: 2157769 - RNA, 19 nt, Artificial Sequence
  Description of Artificial Sequence: Synthetic oligonucleotide
  Antisense strand to SEQ ID NO: 2157768
augcuaaauaagaauuacg

SEQ ID NO: 2157770 - RNA, 19 nt, Artificial Sequence
  Description of Artificial Sequence: Synthetic oligonucleotide
  Sense strand starting at position 268 of SEQ ID NO: 1882926
uaggauuccucagugauau

SEQ ID NO: 2157771 - RNA, 19 nt, Artificial Sequence
  Description of Artificial Sequence: Synthetic oligonucleotide
  Antisense strand to SEQ ID NO: 2157770
auaucacugaggaauccua

SEQ ID NO: 2157772 - RNA, 19 nt, Artificial Sequence
  Description of Artificial Sequence: Synthetic oligonucleotide
  Sense strand starting at position 269 of SEQ ID NO: 1882926
aggauuccucagugauauu

SEQ ID NO: 2157773 - RNA, 19 nt, Artificial Sequence
  Description of Artificial Sequence: Synthetic oligonucleotide
  Antisense strand to SEQ ID NO: 2157772
aauaucacugaggaauccu

SEQ ID NO: 2157774 - RNA, 19 nt, Artificial Sequence
  Description of Artificial Sequence: Synthetic oligonucleotide
  Sense strand starting at position 303 of SEQ ID NO: 1882926
aagaaauuggcucaguuua

SEQ ID NO: 2157775 - RNA, 19 nt, Artificial Sequence
  Description of Artificial Sequence: Synthetic oligonucleotide
  Antisense strand to SEQ ID NO: 2157774
uaaacugagccaauuucuu

SEQ ID NO: 2157776 - RNA, 19 nt, Artificial Sequence
  Description of Artificial Sequence: Synthetic oligonucleotide
  Sense strand starting at position 803 of SEQ ID NO: 1882926
agguauguaacuuaguuau

SEQ ID NO: 2157777 - RNA, 19 nt, Artificial Sequence
  Description of Artificial Sequence: Synthetic oligonucleotide
  Antisense strand to SEQ ID NO: 2157776
auaacuaaguuacauaccu

SEQ ID NO: 2157778 - RNA, 19 nt, Artificial Sequence
  Description of Artificial Sequence: Synthetic oligonucleotide
  Sense strand starting at position 839 of SEQ ID NO: 1882926
ggcaaauaauuccucaguu

SEQ ID NO: 2157779 - RNA, 19 nt, Artificial Sequence
  Description of Artificial Sequence: Synthetic oligonucleotide
  Antisense strand to SEQ ID NO: 2157778
aacugaggaauuauuugcc

SEQ ID NO: 2157780 - RNA, 19 nt, Artificial Sequence
  Description of Artificial Sequence: Synthetic oligonucleotide
  Sense strand starting at position 896 of SEQ ID NO: 1882926
uuuacagaugagugacagu

SEQ ID NO: 2157781 - RNA, 19 nt, Artificial Sequence
  Description of Artificial Sequence: Synthetic oligonucleotide
  Antisense strand to SEQ ID NO: 2157780
acugucacucaucuguaaa

SEQ ID NO: 2157782 - RNA, 19 nt, Artificial Sequence
  Description of Artificial Sequence: Synthetic oligonucleotide
  Sense strand starting at position 1599 of SEQ ID NO: 1882926
ggagguguugucagcuguu

SEQ ID NO: 2157783 - RNA, 19 nt, Artificial Sequence
  Description of Artificial Sequence: Synthetic oligonucleotide
  Antisense strand to SEQ ID NO: 2157782
aacagcugacaacaccucc

SEQ ID NO: 2157784 - RNA, 19 nt, Artificial Sequence
  Description of Artificial Sequence: Synthetic oligonucleotide
  Sense strand starting at position 1604 of SEQ ID NO: 1882926
uguugucagcuguuuguua

SEQ ID NO: 2157785 - RNA, 19 nt, Artificial Sequence
  Description of Artificial Sequence: Synthetic oligonucleotide
  Antisense strand to SEQ ID NO: 2157784
uaacaaacagcugacaaca

SEQ ID NO: 2157786 - RNA, 19 nt, Artificial Sequence
  Description of Artificial Sequence: Synthetic oligonucleotide
  Sense strand starting at position 1639 of SEQ ID NO: 1882926
ucugaaacucagugaguug

SEQ ID NO: 2157787 - RNA, 19 nt, Artificial Sequence
  Description of Artificial Sequence: Synthetic oligonucleotide
  Antisense strand to SEQ ID NO: 2157786
caacucacugaguuucaga

SEQ ID NO: 2157788 - RNA, 19 nt, Artificial Sequence
  Description of Artificial Sequence: Synthetic oligonucleotide
  Sense strand starting at position 1910 of SEQ ID NO: 1882926
ugagguuuauacucuauua

SEQ ID NO: 2157789 - RNA, 19 nt, Artificial Sequence
  Description of Artificial Sequence: Synthetic oligonucleotide
  Antisense strand to SEQ ID NO: 2157788
uaauagaguauaaaccuca

SEQ ID NO: 2157790 - RNA, 19 nt, Artificial Sequence
  Description of Artificial Sequence: Synthetic oligonucleotide
  Sense strand starting at position 1994 of SEQ ID NO: 1882926
guccaauagagucaaacga

SEQ ID NO: 2157791 - RNA, 19 nt, Artificial Sequence
  Description of Artificial Sequence: Synthetic oligonucleotide
  Antisense strand to SEQ ID NO: 2157790
ucguuugacucuauuggac

SEQ ID NO: 2157792 - RNA, 19 nt, Artificial Sequence
  Description of Artificial Sequence: Synthetic oligonucleotide
  Sense strand starting at position 2092 of SEQ ID NO: 1882926
guaacuuaguuaucuaaag

SEQ ID NO: 2157793 - RNA, 19 nt, Artificial Sequence
  Description of Artificial Sequence: Synthetic oligonucleotide
  Antisense strand to SEQ ID NO: 2157792
cuuuagauaacuaaguuac

SEQ ID NO: 2157794 - RNA, 19 nt, Artificial Sequence
  Description of Artificial Sequence: Synthetic oligonucleotide
  Sense strand starting at position 2181 of SEQ ID NO: 1882926
ucaguuguccaggaguaca

SEQ ID NO: 2157795 - RNA, 19 nt, Artificial Sequence
  Description of Artificial Sequence: Synthetic oligonucleotide
  Antisense strand to SEQ ID NO: 2157794
uguacuccuggacaacuga

SEQ ID NO: 2157796 - RNA, 19 nt, Artificial Sequence
  Description of Artificial Sequence: Synthetic oligonucleotide
  Sense strand starting at position 2357 of SEQ ID NO: 1882926
uucugagcucaagggauau

SEQ ID NO: 2157797 - RNA, 19 nt, Artificial Sequence
  Description of Artificial Sequence: Synthetic oligonucleotide
  Antisense strand to SEQ ID NO: 2157796
auaucccuugagcucagaa

SEQ ID NO: 2157798 - RNA, 19 nt, Artificial Sequence
  Description of Artificial Sequence: Synthetic oligonucleotide
  Sense strand starting at position 2589 of SEQ ID NO: 1882926
uguggauuggauggaugua

SEQ ID NO: 2157799 - RNA, 19 nt, Artificial Sequence
  Description of Artificial Sequence: Synthetic oligonucleotide
  Antisense strand to SEQ ID NO: 2157798
uacauccauccaauccaca

SEQ ID NO: 2157800 - RNA, 19 nt, Artificial Sequence
  Description of Artificial Sequence: Synthetic oligonucleotide
  Sense strand starting at position 2604 of SEQ ID NO: 1882926
uguacaaaugaaugacagu

SEQ ID NO: 2157801 - RNA, 19 nt, Artificial Sequence
  Description of Artificial Sequence: Synthetic oligonucleotide
  Antisense strand to SEQ ID NO: 2157800
acugucauucauuuguaca

SEQ ID NO: 2157802 - RNA, 19 nt, Artificial Sequence
  Description of Artificial Sequence: Synthetic oligonucleotide
  Sense strand starting at position 2693 of SEQ ID NO: 1882926
acggauaaaucuuugagau

SEQ ID NO: 2157803 - RNA, 19 nt, Artificial Sequence
  Description of Artificial Sequence: Synthetic oligonucleotide
  Antisense strand to SEQ ID NO: 2157802
aucucaaagauuuauccgu

SEQ ID NO: 2157804 - RNA, 19 nt, Artificial Sequence
  Description of Artificial Sequence: Synthetic oligonucleotide
  Sense strand starting at position 2694 of SEQ ID NO: 1882926
cggauaaaucuuugagaug

SEQ ID NO: 2157805 - RNA, 19 nt, Artificial Sequence
  Description of Artificial Sequence: Synthetic oligonucleotide
  Antisense strand to SEQ ID NO: 2157804
caucucaaagauuuauccg

SEQ ID NO: 2157806 - RNA, 19 nt, Artificial Sequence
  Description of Artificial Sequence: Synthetic oligonucleotide
  Sense strand starting at position 2725 of SEQ ID NO: 1882926
ggcugaaagcgauaaggau

SEQ ID NO: 2157807 - RNA, 19 nt, Artificial Sequence
  Description of Artificial Sequence: Synthetic oligonucleotide
  Antisense strand to SEQ ID NO: 2157806
auccuuaucgcuuucagcc

SEQ ID NO: 2157808 - RNA, 19 nt, Artificial Sequence
  Description of Artificial Sequence: Synthetic oligonucleotide
  Sense strand starting at position 2881 of SEQ ID NO: 1882926
caacaaagcugaguguaau

SEQ ID NO: 2157809 - RNA, 19 nt, Artificial Sequence
  Description of Artificial Sequence: Synthetic oligonucleotide
  Antisense strand to SEQ ID NO: 2157808
auuacacucagcuuuguug

SEQ ID NO: 2157810 - RNA, 19 nt, Artificial Sequence
  Description of Artificial Sequence: Synthetic oligonucleotide
  Sense strand starting at position 2882 of SEQ ID NO: 1882926
aacaaagcugaguguaaug

SEQ ID NO: 2157811 - RNA, 19 nt, Artificial Sequence
  Description of Artificial Sequence: Synthetic oligonucleotide
  Antisense strand to SEQ ID NO: 2157810
cauuacacucagcuuuguu

SEQ ID NO: 2157812 - RNA, 19 nt, Artificial Sequence
  Description of Artificial Sequence: Synthetic oligonucleotide
  Sense strand starting at position 2884 of SEQ ID NO: 1882926
caaagcugaguguaaugau

SEQ ID NO: 2157813 - RNA, 19 nt, Artificial Sequence
  Description of Artificial Sequence: Synthetic oligonucleotide
  Antisense strand to SEQ ID NO: 2157812
aucauuacacucagcuuug

SEQ ID NO: 2157814 - RNA, 19 nt, Artificial Sequence
  Description of Artificial Sequence: Synthetic oligonucleotide
  Sense strand starting at position 2891 of SEQ ID NO: 1882926
gaguguaaugauuaauucu

SEQ ID NO: 2157815 - RNA, 19 nt, Artificial Sequence
  Description of Artificial Sequence: Synthetic oligonucleotide
  Antisense strand to SEQ ID NO: 2157814
agaauuaaucauuacacuc

SEQ ID NO: 2157816 - RNA, 19 nt, Artificial Sequence
  Description of Artificial Sequence: Synthetic oligonucleotide
  Sense strand starting at position 2908 of SEQ ID NO: 1882926
cuugaagaugucuaagcca

SEQ ID NO: 2157817 - RNA, 19 nt, Artificial Sequence
  Description of Artificial Sequence: Synthetic oligonucleotide
  Antisense strand to SEQ ID NO: 2157816
uggcuuagacaucuucaag

SEQ ID NO: 2157818 - RNA, 19 nt, Artificial Sequence
  Description of Artificial Sequence: Synthetic oligonucleotide
  Sense strand starting at position 2911 of SEQ ID NO: 1882926
gaagaugucuaagccagga

SEQ ID NO: 2157819 - RNA, 19 nt, Artificial Sequence
  Description of Artificial Sequence: Synthetic oligonucleotide
  Antisense strand to SEQ ID NO: 2157818
uccuggcuuagacaucuuc

SEQ ID NO: 2157820 - RNA, 19 nt, Artificial Sequence
  Description of Artificial Sequence: Synthetic oligonucleotide
  Sense strand starting at position 2982 of SEQ ID NO: 1882926
uugacaguucuugaacauu

SEQ ID NO: 2157821 - RNA, 19 nt, Artificial Sequence
  Description of Artificial Sequence: Synthetic oligonucleotide
  Antisense strand to SEQ ID NO: 2157820
aauguucaagaacugucaa

SEQ ID NO: 2157822 - RNA, 19 nt, Artificial Sequence
  Description of Artificial Sequence: Synthetic oligonucleotide
  Sense strand starting at position 3210 of SEQ ID NO: 1882926
ccaugauaucuguaguauu

SEQ ID NO: 2157823 - RNA, 19 nt, Artificial Sequence
  Description of Artificial Sequence: Synthetic oligonucleotide
  Antisense strand to SEQ ID NO: 2157822
aauacuacagauaucaugg

SEQ ID NO: 2157824 - RNA, 19 nt, Artificial Sequence
  Description of Artificial Sequence: Synthetic oligonucleotide
  Sense strand starting at position 3276 of SEQ ID NO: 1882926
cuaccucucuggguuuaaa

SEQ ID NO: 2157825 - RNA, 19 nt, Artificial Sequence
  Description of Artificial Sequence: Synthetic oligonucleotide
  Antisense strand to SEQ ID NO: 2157824
uuuaaacccagagagguag

SEQ ID NO: 2157826 - RNA, 19 nt, Artificial Sequence
  Description of Artificial Sequence: Synthetic oligonucleotide
  Sense strand starting at position 3361 of SEQ ID NO: 1882926
uugauucuaggauguaaga

SEQ ID NO: 2157827 - RNA, 19 nt, Artificial Sequence
  Description of Artificial Sequence: Synthetic oligonucleotide
  Antisense strand to SEQ ID NO: 2157826
ucuuacauccuagaaucaa

SEQ ID NO: 2157828 - RNA, 19 nt, Artificial Sequence
  Description of Artificial Sequence: Synthetic oligonucleotide
  Sense strand starting at position 3386 of SEQ ID NO: 1882926
cgcguaaauauggacaaga

SEQ ID NO: 2157829 - RNA, 19 nt, Artificial Sequence
  Description of Artificial Sequence: Synthetic oligonucleotide
  Antisense strand to SEQ ID NO: 2157828
ucuuguccauauuuacgcg

SEQ ID NO: 2157830 - RNA, 19 nt, Artificial Sequence
  Description of Artificial Sequence: Synthetic oligonucleotide
  Sense strand starting at position 3464 of SEQ ID NO: 1882926
ggacuuauccuaggucaag

SEQ ID NO: 2157831 - RNA, 19 nt, Artificial Sequence
  Description of Artificial Sequence: Synthetic oligonucleotide
  Antisense strand to SEQ ID NO: 2157830
cuugaccuaggauaagucc

SEQ ID NO: 2157832 - RNA, 19 nt, Artificial Sequence
  Description of Artificial Sequence: Synthetic oligonucleotide
  Sense strand starting at position 3521 of SEQ ID NO: 1882926
gcgaauucucuugauagau

SEQ ID NO: 2157833 - RNA, 19 nt, Artificial Sequence
  Description of Artificial Sequence: Synthetic oligonucleotide
  Antisense strand to SEQ ID NO: 2157832
aucuaucaagagaauucgc

SEQ ID NO: 2157834 - RNA, 19 nt, Artificial Sequence
  Description of Artificial Sequence: Synthetic oligonucleotide
  Sense strand starting at position 3615 of SEQ ID NO: 1882926
accuacaauuggguugaua

SEQ ID NO: 2157835 - RNA, 19 nt, Artificial Sequence
  Description of Artificial Sequence: Synthetic oligonucleotide
  Antisense strand to SEQ ID NO: 2157834
uaucaacccaauuguaggu

SEQ ID NO: 2157836 - RNA, 19 nt, Artificial Sequence
  Description of Artificial Sequence: Synthetic oligonucleotide
  Sense strand starting at position 3617 of SEQ ID NO: 1882926
cuacaauuggguugauacu

SEQ ID NO: 2157837 - RNA, 19 nt, Artificial Sequence
  Description of Artificial Sequence: Synthetic oligonucleotide
  Antisense strand to SEQ ID NO: 2157836
aguaucaacccaauuguag

SEQ ID NO: 2157838 - RNA, 19 nt, Artificial Sequence
  Description of Artificial Sequence: Synthetic oligonucleotide
  Sense strand starting at position 3626 of SEQ ID NO: 1882926
gguugauacuacuuugagu

SEQ ID NO: 2157839 - RNA, 19 nt, Artificial Sequence
  Description of Artificial Sequence: Synthetic oligonucleotide
  Antisense strand to SEQ ID NO: 2157838
acucaaaguaguaucaacc

SEQ ID NO: 2157840 - RNA, 19 nt, Artificial Sequence
  Description of Artificial Sequence: Synthetic oligonucleotide
  Sense strand starting at position 3628 of SEQ ID NO: 1882926
uugauacuacuuugaguaa

SEQ ID NO: 2157841 - RNA, 19 nt, Artificial Sequence
  Description of Artificial Sequence: Synthetic oligonucleotide
  Antisense strand to SEQ ID NO: 2157840
uuacucaaaguaguaucaa

SEQ ID NO: 2157842 - RNA, 19 nt, Artificial Sequence
  Description of Artificial Sequence: Synthetic oligonucleotide
  Sense strand starting at position 16 of SEQ ID NO: 1882927
agaguuaaaugugucccaa

SEQ ID NO: 2157843 - RNA, 19 nt, Artificial Sequence
  Description of Artificial Sequence: Synthetic oligonucleotide
  Antisense strand to SEQ ID NO: 2157842
uugggacacauuuaacucu

SEQ ID NO: 2157844 - RNA, 19 nt, Artificial Sequence
  Description of Artificial Sequence: Synthetic oligonucleotide
  Sense strand starting at position 18 of SEQ ID NO: 1882927
aguuaaaugugucccaaac

SEQ ID NO: 2157845 - RNA, 19 nt, Artificial Sequence
  Description of Artificial Sequence: Synthetic oligonucleotide
  Antisense strand to SEQ ID NO: 2157844
guuugggacacauuuaacu

SEQ ID NO: 2157846 - RNA, 19 nt, Artificial Sequence
  Description of Artificial Sequence: Synthetic oligonucleotide
  Sense strand starting at position 20 of SEQ ID NO: 1882927
uuaaaugugucccaaacac

SEQ ID NO: 2157847 - RNA, 19 nt, Artificial Sequence
  Description of Artificial Sequence: Synthetic oligonucleotide
  Antisense strand to SEQ ID NO: 2157846
guguuugggacacauuuaa

SEQ ID NO: 2157848 - RNA, 19 nt, Artificial Sequence
  Description of Artificial Sequence: Synthetic oligonucleotide
  Sense strand starting at position 63 of SEQ ID NO: 1882927
aaugauuuguuguguaucu

SEQ ID NO: 2157849 - RNA, 19 nt, Artificial Sequence
  Description of Artificial Sequence: Synthetic oligonucleotide
  Antisense strand to SEQ ID NO: 2157848
agauacacaacaaaucauu

SEQ ID NO: 2157850 - RNA, 19 nt, Artificial Sequence
  Description of Artificial Sequence: Synthetic oligonucleotide
  Sense strand starting at position 68 of SEQ ID NO: 1882927
uuuguuguguaucuggaau

SEQ ID NO: 2157851 - RNA, 19 nt, Artificial Sequence
  Description of Artificial Sequence: Synthetic oligonucleotide
  Antisense strand to SEQ ID NO: 2157850
auuccagauacacaacaaa

SEQ ID NO: 2157852 - RNA, 19 nt, Artificial Sequence
  Description of Artificial Sequence: Synthetic oligonucleotide
  Sense strand starting at position 70 of SEQ ID NO: 1882927
uguuguguaucuggaauuc

SEQ ID NO: 2157853 - RNA, 19 nt, Artificial Sequence
  Description of Artificial Sequence: Synthetic oligonucleotide
  Antisense strand to SEQ ID NO: 2157852
gaauuccagauacacaaca

SEQ ID NO: 2157854 - RNA, 19 nt, Artificial Sequence
  Description of Artificial Sequence: Synthetic oligonucleotide
  Sense strand starting at position 188 of SEQ ID NO: 1882927
gccagcaaaguccagaaau

SEQ ID NO: 2157855 - RNA, 19 nt, Artificial Sequence
  Description of Artificial Sequence: Synthetic oligonucleotide
  Antisense strand to SEQ ID NO: 2157854
auuucuggacuuugcuggc

SEQ ID NO: 2157856 - RNA, 19 nt, Artificial Sequence
  Description of Artificial Sequence: Synthetic oligonucleotide
  Sense strand starting at position 1403 of SEQ ID NO: 1882927
ggagaugcgucauuagggu

SEQ ID NO: 2157857 - RNA, 19 nt, Artificial Sequence
  Description of Artificial Sequence: Synthetic oligonucleotide
  Antisense strand to SEQ ID NO: 2157856
acccuaaugacgcaucucc

SEQ ID NO: 2157858 - RNA, 19 nt, Artificial Sequence
  Description of Artificial Sequence: Synthetic oligonucleotide
  Sense strand starting at position 1648 of SEQ ID NO: 1882927
ugcagauuccggugacuca

SEQ ID NO: 2157859 - RNA, 19 nt, Artificial Sequence
  Description of Artificial Sequence: Synthetic oligonucleotide
  Antisense strand to SEQ ID NO: 2157858
ugagucaccggaaucugca

SEQ ID NO: 2157860 - RNA, 19 nt, Artificial Sequence
  Description of Artificial Sequence: Synthetic oligonucleotide
  Sense strand starting at position 1649 of SEQ ID NO: 1882927
gcagauuccggugacucau

SEQ ID NO: 2157861 - RNA, 19 nt, Artificial Sequence
  Description of Artificial Sequence: Synthetic oligonucleotide
  Antisense strand to SEQ ID NO: 2157860
augagucaccggaaucugc

SEQ ID NO: 2157862 - RNA, 19 nt, Artificial Sequence
  Description of Artificial Sequence: Synthetic oligonucleotide
  Sense strand starting at position 1814 of SEQ ID NO: 1882927
cgcagaggcuuuggaguau

SEQ ID NO: 2157863 - RNA, 19 nt, Artificial Sequence
  Description of Artificial Sequence: Synthetic oligonucleotide
  Antisense strand to SEQ ID NO: 2157862
auacuccaaagccucugcg

SEQ ID NO: 2157864 - RNA, 19 nt, Artificial Sequence
  Description of Artificial Sequence: Synthetic oligonucleotide
  Sense strand starting at position 2107 of SEQ ID NO: 1882927
gggucagggcuugagagua

SEQ ID NO: 2157865 - RNA, 19 nt, Artificial Sequence
  Description of Artificial Sequence: Synthetic oligonucleotide
  Antisense strand to SEQ ID NO: 2157864
uacucucaagcccugaccc

SEQ ID NO: 2157866 - RNA, 19 nt, Artificial Sequence
  Description of Artificial Sequence: Synthetic oligonucleotide
  Sense strand starting at position 2270 of SEQ ID NO: 1882927
gcccguaccucuugcagua

SEQ ID NO: 2157867 - RNA, 19 nt, Artificial Sequence
  Description of Artificial Sequence: Synthetic oligonucleotide
  Antisense strand to SEQ ID NO: 2157866
uacugcaagagguacgggc

SEQ ID NO: 2157868 - RNA, 19 nt, Artificial Sequence
  Description of Artificial Sequence: Synthetic oligonucleotide
  Sense strand starting at position 2517 of SEQ ID NO: 1882927
aagccuuagucauugguca

SEQ ID NO: 2157869 - RNA, 19 nt, Artificial Sequence
  Description of Artificial Sequence: Synthetic oligonucleotide
  Antisense strand to SEQ ID NO: 2157868
ugaccaaugacuaaggcuu

SEQ ID NO: 2157870 - RNA, 19 nt, Artificial Sequence
  Description of Artificial Sequence: Synthetic oligonucleotide
  Sense strand starting at position 2521 of SEQ ID NO: 1882927
cuuagucauuggucagcuu

SEQ ID NO: 2157871 - RNA, 19 nt, Artificial Sequence
  Description of Artificial Sequence: Synthetic oligonucleotide
  Antisense strand to SEQ ID NO: 2157870
aagcugaccaaugacuaag

SEQ ID NO: 2157872 - RNA, 19 nt, Artificial Sequence
  Description of Artificial Sequence: Synthetic oligonucleotide
  Sense strand starting at position 2966 of SEQ ID NO: 1882927
ugacguucuucccaccaaa

SEQ ID NO: 2157873 - RNA, 19 nt, Artificial Sequence
  Description of Artificial Sequence: Synthetic oligonucleotide
  Antisense strand to SEQ ID NO: 2157872
uuuggugggaagaacguca

SEQ ID NO: 2157874 - RNA, 19 nt, Artificial Sequence
  Description of Artificial Sequence: Synthetic oligonucleotide
  Sense strand starting at position 3072 of SEQ ID NO: 1882927
gggcucugccacuaaccau

SEQ ID NO: 2157875 - RNA, 19 nt, Artificial Sequence
  Description of Artificial Sequence: Synthetic oligonucleotide
  Antisense strand to SEQ ID NO: 2157874
augguuaguggcagagccc

SEQ ID NO: 2157876 - RNA, 19 nt, Artificial Sequence
  Description of Artificial Sequence: Synthetic oligonucleotide
  Sense strand starting at position 3253 of SEQ ID NO: 1882927
ugagcugucccucagauaa

SEQ ID NO: 2157877 - RNA, 19 nt, Artificial Sequence
  Description of Artificial Sequence: Synthetic oligonucleotide
  Antisense strand to SEQ ID NO: 2157876
uuaucugagggacagcuca

SEQ ID NO: 2157878 - RNA, 19 nt, Artificial Sequence
  Description of Artificial Sequence: Synthetic oligonucleotide
  Sense strand starting at position 3255 of SEQ ID NO: 1882927
agcugucccucagauaagu

SEQ ID NO: 2157879 - RNA, 19 nt, Artificial Sequence
  Description of Artificial Sequence: Synthetic oligonucleotide
  Antisense strand to SEQ ID NO: 2157878
acuuaucugagggacagcu

SEQ ID NO: 2157880 - RNA, 19 nt, Artificial Sequence
  Description of Artificial Sequence: Synthetic oligonucleotide
  Sense strand starting at position 3353 of SEQ ID NO: 1882927
aucagcaaccagugauaaa

SEQ ID NO: 2157881 - RNA, 19 nt, Artificial Sequence
  Description of Artificial Sequence: Synthetic oligonucleotide
  Antisense strand to SEQ ID NO: 2157880
uuuaucacugguugcugau

SEQ ID NO: 2157882 - RNA, 19 nt, Artificial Sequence
  Description of Artificial Sequence: Synthetic oligonucleotide
  Sense strand starting at position 3648 of SEQ ID NO: 1882927
gcggcauuccuccagguga

SEQ ID NO: 2157883 - RNA, 19 nt, Artificial Sequence
  Description of Artificial Sequence: Synthetic oligonucleotide
  Antisense strand to SEQ ID NO: 2157882
ucaccuggaggaaugccgc

SEQ ID NO: 2157884 - RNA, 19 nt, Artificial Sequence
  Description of Artificial Sequence: Synthetic oligonucleotide
  Sense strand starting at position 3650 of SEQ ID NO: 1882927
ggcauuccuccaggugaua

SEQ ID NO: 2157885 - RNA, 19 nt, Artificial Sequence
  Description of Artificial Sequence: Synthetic oligonucleotide
  Antisense strand to SEQ ID NO: 2157884
uaucaccuggaggaaugcc

SEQ ID NO: 2157886 - RNA, 19 nt, Artificial Sequence
  Description of Artificial Sequence: Synthetic oligonucleotide
  Sense strand starting at position 3721 of SEQ ID NO: 1882927
gaacuuggucucuguguga

SEQ ID NO: 2157887 - RNA, 19 nt, Artificial Sequence
  Description of Artificial Sequence: Synthetic oligonucleotide
  Antisense strand to SEQ ID NO: 2157886
ucacacagagaccaaguuc

SEQ ID NO: 2157888 - RNA, 19 nt, Artificial Sequence
  Description of Artificial Sequence: Synthetic oligonucleotide
  Sense strand starting at position 3750 of SEQ ID NO: 1882927
cuaagcucuaaguggagau

SEQ ID NO: 2157889 - RNA, 19 nt, Artificial Sequence
  Description of Artificial Sequence: Synthetic oligonucleotide
  Antisense strand to SEQ ID NO: 2157888
aucuccacuuagagcuuag

SEQ ID NO: 2157890 - RNA, 19 nt, Artificial Sequence
  Description of Artificial Sequence: Synthetic oligonucleotide
  Sense strand starting at position 3765 of SEQ ID NO: 1882927
agauuaagugccugauccu

SEQ ID NO: 2157891 - RNA, 19 nt, Artificial Sequence
  Description of Artificial Sequence: Synthetic oligonucleotide
  Antisense strand to SEQ ID NO: 2157890
aggaucaggcacuuaaucu

SEQ ID NO: 2157892 - RNA, 19 nt, Artificial Sequence
  Description of Artificial Sequence: Synthetic oligonucleotide
  Sense strand starting at position 3807 of SEQ ID NO: 1882927
acgauuaugggacaugguu

SEQ ID NO: 2157893 - RNA, 19 nt, Artificial Sequence
  Description of Artificial Sequence: Synthetic oligonucleotide
  Antisense strand to SEQ ID NO: 2157892
aaccaugucccauaaucgu

SEQ ID NO: 2157894 - RNA, 19 nt, Artificial Sequence
  Description of Artificial Sequence: Synthetic oligonucleotide
  Sense strand starting at position 3819 of SEQ ID NO: 1882927
caugguuaauaggcuuaaa

SEQ ID NO: 2157895 - RNA, 19 nt, Artificial Sequence
  Description of Artificial Sequence: Synthetic oligonucleotide
  Antisense strand to SEQ ID NO: 2157894
uuuaagccuauuaaccaug

SEQ ID NO: 2157896 - RNA, 19 nt, Artificial Sequence
  Description of Artificial Sequence: Synthetic oligonucleotide
  Sense strand starting at position 3822 of SEQ ID NO: 1882927
gguuaauaggcuuaaagcu

SEQ ID NO: 2157897 - RNA, 19 nt, Artificial Sequence
  Description of Artificial Sequence: Synthetic oligonucleotide
  Antisense strand to SEQ ID NO: 2157896
agcuuuaagccuauuaacc

SEQ ID NO: 2157898 - RNA, 19 nt, Artificial Sequence
  Description of Artificial Sequence: Synthetic oligonucleotide
  Sense strand starting at position 3891 of SEQ ID NO: 1882927
cugaaacuuccagggcaga

SEQ ID NO: 2157899 - RNA, 19 nt, Artificial Sequence
  Description of Artificial Sequence: Synthetic oligonucleotide
  Antisense strand to SEQ ID NO: 2157898
ucugcccuggaaguuucag

SEQ ID NO: 2157900 - RNA, 19 nt, Artificial Sequence
  Description of Artificial Sequence: Synthetic oligonucleotide
  Sense strand starting at position 3920 of SEQ ID NO: 1882927
gccucaaaguuugguggau

SEQ ID NO: 2157901 - RNA, 19 nt, Artificial Sequence
  Description of Artificial Sequence: Synthetic oligonucleotide
  Antisense strand to SEQ ID NO: 2157900
auccaccaaacuuugaggc

SEQ ID NO: 2157902 - RNA, 19 nt, Artificial Sequence
  Description of Artificial Sequence: Synthetic oligonucleotide
  Sense strand starting at position 3921 of SEQ ID NO: 1882927
ccucaaaguuugguggauu

SEQ ID NO: 2157903 - RNA, 19 nt, Artificial Sequence
  Description of Artificial Sequence: Synthetic oligonucleotide
  Antisense strand to SEQ ID NO: 2157902
aauccaccaaacuuugagg

SEQ ID NO: 2157904 - RNA, 19 nt, Artificial Sequence
  Description of Artificial Sequence: Synthetic oligonucleotide
  Sense strand starting at position 3922 of SEQ ID NO: 1882927
cucaaaguuugguggauua

SEQ ID NO: 2157905 - RNA, 19 nt, Artificial Sequence
  Description of Artificial Sequence: Synthetic oligonucleotide
  Antisense strand to SEQ ID NO: 2157904
uaauccaccaaacuuugag

SEQ ID NO: 2157906 - RNA, 19 nt, Artificial Sequence
  Description of Artificial Sequence: Synthetic oligonucleotide
  Sense strand starting at position 3979 of SEQ ID NO: 1882927
ggagacuuacacugccaaa

SEQ ID NO: 2157907 - RNA, 19 nt, Artificial Sequence
  Description of Artificial Sequence: Synthetic oligonucleotide
  Antisense strand to SEQ ID NO: 2157906
uuuggcaguguaagucucc

SEQ ID NO: 2157908 - RNA, 19 nt, Artificial Sequence
  Description of Artificial Sequence: Synthetic oligonucleotide
  Sense strand starting at position 204 of SEQ ID NO: 1882928
cuggaaagguucucccagu

SEQ ID NO: 2157909 - RNA, 19 nt, Artificial Sequence
  Description of Artificial Sequence: Synthetic oligonucleotide
  Antisense strand to SEQ ID NO: 2157908
acugggagaaccuuuccag

SEQ ID NO: 2157910 - RNA, 19 nt, Artificial Sequence
  Description of Artificial Sequence: Synthetic oligonucleotide
  Sense strand starting at position 347 of SEQ ID NO: 1882928
gggacagacagcuaugcuu

SEQ ID NO: 2157911 - RNA, 19 nt, Artificial Sequence
  Description of Artificial Sequence: Synthetic oligonucleotide
  Antisense strand to SEQ ID NO: 2157910
aagcauagcugucuguccc

SEQ ID NO: 2157912 - RNA, 19 nt, Artificial Sequence
  Description of Artificial Sequence: Synthetic oligonucleotide
  Sense strand starting at position 771 of SEQ ID NO: 1882928
uagcacauuccuugagugu

SEQ ID NO: 2157913 - RNA, 19 nt, Artificial Sequence
  Description of Artificial Sequence: Synthetic oligonucleotide
  Antisense strand to SEQ ID NO: 2157912
acacucaaggaaugugcua

SEQ ID NO: 2157914 - RNA, 19 nt, Artificial Sequence
  Description of Artificial Sequence: Synthetic oligonucleotide
  Sense strand starting at position 828 of SEQ ID NO: 1882928
gagagcagcccuggucauu

SEQ ID NO: 2157915 - RNA, 19 nt, Artificial Sequence
  Description of Artificial Sequence: Synthetic oligonucleotide
  Antisense strand to SEQ ID NO: 2157914
aaugaccagggcugcucuc

SEQ ID NO: 2157916 - RNA, 19 nt, Artificial Sequence
  Description of Artificial Sequence: Synthetic oligonucleotide
  Sense strand starting at position 886 of SEQ ID NO: 1882928
ccgggauccuguguaauua

SEQ ID NO: 2157917 - RNA, 19 nt, Artificial Sequence
  Description of Artificial Sequence: Synthetic oligonucleotide
  Antisense strand to SEQ ID NO: 2157916
uaauuacacaggaucccgg

SEQ ID NO: 2157918 - RNA, 19 nt, Artificial Sequence
  Description of Artificial Sequence: Synthetic oligonucleotide
  Sense strand starting at position 887 of SEQ ID NO: 1882928
cgggauccuguguaauuag

SEQ ID NO: 2157919 - RNA, 19 nt, Artificial Sequence
  Description of Artificial Sequence: Synthetic oligonucleotide
  Antisense strand to SEQ ID NO: 2157918
cuaauuacacaggaucccg

SEQ ID NO: 2157920 - RNA, 19 nt, Artificial Sequence
  Description of Artificial Sequence: Synthetic oligonucleotide
  Sense strand starting at position 966 of SEQ ID NO: 1882928
gcagaaugaugcucuuucu

SEQ ID NO: 2157921 - RNA, 19 nt, Artificial Sequence
  Description of Artificial Sequence: Synthetic oligonucleotide
  Antisense strand to SEQ ID NO: 2157920
agaaagagcaucauucugc

SEQ ID NO: 2157922 - RNA, 19 nt, Artificial Sequence
  Description of Artificial Sequence: Synthetic oligonucleotide
  Sense strand starting at position 1013 of SEQ ID NO: 1882928
acagguucuucggcaguaa

SEQ ID NO: 2157923 - RNA, 19 nt, Artificial Sequence
  Description of Artificial Sequence: Synthetic oligonucleotide
  Antisense strand to SEQ ID NO: 2157922
uuacugccgaagaaccugu

SEQ ID NO: 2157924 - RNA, 19 nt, Artificial Sequence
  Description of Artificial Sequence: Synthetic oligonucleotide
  Sense strand starting at position 1014 of SEQ ID NO: 1882928
cagguucuucggcaguaaa

SEQ ID NO: 2157925 - RNA, 19 nt, Artificial Sequence
  Description of Artificial Sequence: Synthetic oligonucleotide
  Antisense strand to SEQ ID NO: 2157924
uuuacugccgaagaaccug

SEQ ID NO: 2157926 - RNA, 19 nt, Artificial Sequence
  Description of Artificial Sequence: Synthetic oligonucleotide
  Sense strand starting at position 1017 of SEQ ID NO: 1882928
guucuucggcaguaaauca

SEQ ID NO: 2157927 - RNA, 19 nt, Artificial Sequence
  Description of Artificial Sequence: Synthetic oligonucleotide
  Antisense strand to SEQ ID NO: 2157926
ugauuuacugccgaagaac

SEQ ID NO: 2157928 - RNA, 19 nt, Artificial Sequence
  Description of Artificial Sequence: Synthetic oligonucleotide
  Sense strand starting at position 1278 of SEQ ID NO: 1882928
aagugcaauugguuaguca

SEQ ID NO: 2157929 - RNA, 19 nt, Artificial Sequence
  Description of Artificial Sequence: Synthetic oligonucleotide
  Antisense strand to SEQ ID NO: 2157928
ugacuaaccaauugcacuu

SEQ ID NO: 2157930 - RNA, 19 nt, Artificial Sequence
  Description of Artificial Sequence: Synthetic oligonucleotide
  Sense strand starting at position 1285 of SEQ ID NO: 1882928
auugguuagucacgguuua

SEQ ID NO: 2157931 - RNA, 19 nt, Artificial Sequence
  Description of Artificial Sequence: Synthetic oligonucleotide
  Antisense strand to SEQ ID NO: 2157930
uaaaccgugacuaaccaau

SEQ ID NO: 2157932 - RNA, 19 nt, Artificial Sequence
  Description of Artificial Sequence: Synthetic oligonucleotide
  Sense strand starting at position 1289 of SEQ ID NO: 1882928
guuagucacgguuuagugu

SEQ ID NO: 2157933 - RNA, 19 nt, Artificial Sequence
  Description of Artificial Sequence: Synthetic oligonucleotide
  Antisense strand to SEQ ID NO: 2157932
acacuaaaccgugacuaac

SEQ ID NO: 2157934 - RNA, 19 nt, Artificial Sequence
  Description of Artificial Sequence: Synthetic oligonucleotide
  Sense strand starting at position 1296 of SEQ ID NO: 1882928
acgguuuaguguucuuuac

SEQ ID NO: 2157935 - RNA, 19 nt, Artificial Sequence
  Description of Artificial Sequence: Synthetic oligonucleotide
  Antisense strand to SEQ ID NO: 2157934
guaaagaacacuaaaccgu

SEQ ID NO: 2157936 - RNA, 19 nt, Artificial Sequence
  Description of Artificial Sequence: Synthetic oligonucleotide
  Sense strand starting at position 1298 of SEQ ID NO: 1882928
gguuuaguguucuuuacug

SEQ ID NO: 2157937 - RNA, 19 nt, Artificial Sequence
  Description of Artificial Sequence: Synthetic oligonucleotide
  Antisense strand to SEQ ID NO: 2157936
caguaaagaacacuaaacc

SEQ ID NO: 2157938 - RNA, 19 nt, Artificial Sequence
  Description of Artificial Sequence: Synthetic oligonucleotide
  Sense strand starting at position 1300 of SEQ ID NO: 1882928
uuuaguguucuuuacugca

SEQ ID NO: 2157939 - RNA, 19 nt, Artificial Sequence
  Description of Artificial Sequence: Synthetic oligonucleotide
  Antisense strand to SEQ ID NO: 2157938
ugcaguaaagaacacuaaa

SEQ ID NO: 2157940 - RNA, 19 nt, Artificial Sequence
  Description of Artificial Sequence: Synthetic oligonucleotide
  Sense strand starting at position 1303 of SEQ ID NO: 1882928
aguguucuuuacugcaaug

SEQ ID NO: 2157941 - RNA, 19 nt, Artificial Sequence
  Description of Artificial Sequence: Synthetic oligonucleotide
  Antisense strand to SEQ ID NO: 2157940
cauugcaguaaagaacacu

SEQ ID NO: 2157942 - RNA, 19 nt, Artificial Sequence
  Description of Artificial Sequence: Synthetic oligonucleotide
  Sense strand starting at position 1342 of SEQ ID NO: 1882928
aacgucucauugccaaagu

SEQ ID NO: 2157943 - RNA, 19 nt, Artificial Sequence
  Description of Artificial Sequence: Synthetic oligonucleotide
  Antisense strand to SEQ ID NO: 2157942
acuuuggcaaugagacguu

SEQ ID NO: 2157944 - RNA, 19 nt, Artificial Sequence
  Description of Artificial Sequence: Synthetic oligonucleotide
  Sense strand starting at position 1581 of SEQ ID NO: 1882928
gagcgugagcuccgaauga

SEQ ID NO: 2157945 - RNA, 19 nt, Artificial Sequence
  Description of Artificial Sequence: Synthetic oligonucleotide
  Antisense strand to SEQ ID NO: 2157944
ucauucggagcucacgcuc

SEQ ID NO: 2157946 - RNA, 19 nt, Artificial Sequence
  Description of Artificial Sequence: Synthetic oligonucleotide
  Sense strand starting at position 1583 of SEQ ID NO: 1882928
gcgugagcuccgaaugauu

SEQ ID NO: 2157947 - RNA, 19 nt, Artificial Sequence
  Description of Artificial Sequence: Synthetic oligonucleotide
  Antisense strand to SEQ ID NO: 2157946
aaucauucggagcucacgc

SEQ ID NO: 2157948 - RNA, 19 nt, Artificial Sequence
  Description of Artificial Sequence: Synthetic oligonucleotide
  Sense strand starting at position 1627 of SEQ ID NO: 1882928
gcugucagccucugaaucu

SEQ ID NO: 2157949 - RNA, 19 nt, Artificial Sequence
  Description of Artificial Sequence: Synthetic oligonucleotide
  Antisense strand to SEQ ID NO: 2157948
agauucagaggcugacagc

SEQ ID NO: 2157950 - RNA, 19 nt, Artificial Sequence
  Description of Artificial Sequence: Synthetic oligonucleotide
  Sense strand starting at position 1695 of SEQ ID NO: 1882928
cucagaaguuugguuucuu

SEQ ID NO: 2157951 - RNA, 19 nt, Artificial Sequence
  Description of Artificial Sequence: Synthetic oligonucleotide
  Antisense strand to SEQ ID NO: 2157950
aagaaaccaaacuucugag

SEQ ID NO: 2157952 - RNA, 19 nt, Artificial Sequence
  Description of Artificial Sequence: Synthetic oligonucleotide
  Sense strand starting at position 1696 of SEQ ID NO: 1882928
ucagaaguuugguuucuuc

SEQ ID NO: 2157953 - RNA, 19 nt, Artificial Sequence
  Description of Artificial Sequence: Synthetic oligonucleotide
  Antisense strand to SEQ ID NO: 2157952
gaagaaaccaaacuucuga

SEQ ID NO: 2157954 - RNA, 19 nt, Artificial Sequence
  Description of Artificial Sequence: Synthetic oligonucleotide
  Sense strand starting at position 1886 of SEQ ID NO: 1882928
ggcugaaccgcuuaacuca

SEQ ID NO: 2157955 - RNA, 19 nt, Artificial Sequence
  Description of Artificial Sequence: Synthetic oligonucleotide
  Antisense strand to SEQ ID NO: 2157954
ugaguuaagcgguucagcc

SEQ ID NO: 2157956 - RNA, 19 nt, Artificial Sequence
  Description of Artificial Sequence: Synthetic oligonucleotide
  Sense strand starting at position 2660 of SEQ ID NO: 1882928
guaugcugcuggucaguga

SEQ ID NO: 2157957 - RNA, 19 nt, Artificial Sequence
  Description of Artificial Sequence: Synthetic oligonucleotide
  Antisense strand to SEQ ID NO: 2157956
ucacugaccagcagcauac

SEQ ID NO: 2157958 - RNA, 19 nt, Artificial Sequence
  Description of Artificial Sequence: Synthetic oligonucleotide
  Sense strand starting at position 2946 of SEQ ID NO: 1882928
gacgcaugauuccuaucuu

SEQ ID NO: 2157959 - RNA, 19 nt, Artificial Sequence
  Description of Artificial Sequence: Synthetic oligonucleotide
  Antisense strand to SEQ ID NO: 2157958
aagauaggaaucaugcguc

SEQ ID NO: 2157960 - RNA, 19 nt, Artificial Sequence
  Description of Artificial Sequence: Synthetic oligonucleotide
  Sense strand starting at position 2947 of SEQ ID NO: 1882928
acgcaugauuccuaucuug

SEQ ID NO: 2157961 - RNA, 19 nt, Artificial Sequence
  Description of Artificial Sequence: Synthetic oligonucleotide
  Antisense strand to SEQ ID NO: 2157960
caagauaggaaucaugcgu

SEQ ID NO: 2157962 - RNA, 19 nt, Artificial Sequence
  Description of Artificial Sequence: Synthetic oligonucleotide
  Sense strand starting at position 2958 of SEQ ID NO: 1882928
cuaucuugucuguagcuuu

SEQ ID NO: 2157963 - RNA, 19 nt, Artificial Sequence
  Description of Artificial Sequence: Synthetic oligonucleotide
  Antisense strand to SEQ ID NO: 2157962
aaagcuacagacaagauag

SEQ ID NO: 2157964 - RNA, 19 nt, Artificial Sequence
  Description of Artificial Sequence: Synthetic oligonucleotide
  Sense strand starting at position 3037 of SEQ ID NO: 1882928
acagaaugucaauguggga

SEQ ID NO: 2157965 - RNA, 19 nt, Artificial Sequence
  Description of Artificial Sequence: Synthetic oligonucleotide
  Antisense strand to SEQ ID NO: 2157964
ucccacauugacauucugu

SEQ ID NO: 2157966 - RNA, 19 nt, Artificial Sequence
  Description of Artificial Sequence: Synthetic oligonucleotide
  Sense strand starting at position 3067 of SEQ ID NO: 1882928
cucugaccuugguguguua

SEQ ID NO: 2157967 - RNA, 19 nt, Artificial Sequence
  Description of Artificial Sequence: Synthetic oligonucleotide
  Antisense strand to SEQ ID NO: 2157966
uaacacaccaaggucagag

SEQ ID NO: 2157968 - RNA, 19 nt, Artificial Sequence
  Description of Artificial Sequence: Synthetic oligonucleotide
  Sense strand starting at position 3069 of SEQ ID NO: 1882928
cugaccuugguguguuaca

SEQ ID NO: 2157969 - RNA, 19 nt, Artificial Sequence
  Description of Artificial Sequence: Synthetic oligonucleotide
  Antisense strand to SEQ ID NO: 2157968
uguaacacaccaaggucag

SEQ ID NO: 2157970 - RNA, 19 nt, Artificial Sequence
  Description of Artificial Sequence: Synthetic oligonucleotide
  Sense strand starting at position 3502 of SEQ ID NO: 1882928
gggaggagcgcgcuguuua

SEQ ID NO: 2157971 - RNA, 19 nt, Artificial Sequence
  Description of Artificial Sequence: Synthetic oligonucleotide
  Antisense strand to SEQ ID NO: 2157970
uaaacagcgcgcuccuccc

SEQ ID NO: 2157972 - RNA, 19 nt, Artificial Sequence
  Description of Artificial Sequence: Synthetic oligonucleotide
  Sense strand starting at position 23 of SEQ ID NO: 1882929
gacacaagacggugaguuu

SEQ ID NO: 2157973 - RNA, 19 nt, Artificial Sequence
  Description of Artificial Sequence: Synthetic oligonucleotide
  Antisense strand to SEQ ID NO: 2157972
aaacucaccgucuuguguc

SEQ ID NO: 2157974 - RNA, 19 nt, Artificial Sequence
  Description of Artificial Sequence: Synthetic oligonucleotide
  Sense strand starting at position 30 of SEQ ID NO: 1882929
gacggugaguuuguucuca

SEQ ID NO: 2157975 - RNA, 19 nt, Artificial Sequence
  Description of Artificial Sequence: Synthetic oligonucleotide
  Antisense strand to SEQ ID NO: 2157974
ugagaacaaacucaccguc

SEQ ID NO: 2157976 - RNA, 19 nt, Artificial Sequence
  Description of Artificial Sequence: Synthetic oligonucleotide
  Sense strand starting at position 32 of SEQ ID NO: 1882929
cggugaguuuguucucaca

SEQ ID NO: 2157977 - RNA, 19 nt, Artificial Sequence
  Description of Artificial Sequence: Synthetic oligonucleotide
  Antisense strand to SEQ ID NO: 2157976
ugugagaacaaacucaccg

SEQ ID NO: 2157978 - RNA, 19 nt, Artificial Sequence
  Description of Artificial Sequence: Synthetic oligonucleotide
  Sense strand starting at position 34 of SEQ ID NO: 1882929
gugaguuuguucucacagc

SEQ ID NO: 2157979 - RNA, 19 nt, Artificial Sequence
  Description of Artificial Sequence: Synthetic oligonucleotide
  Antisense strand to SEQ ID NO: 2157978
gcugugagaacaaacucac

SEQ ID NO: 2157980 - RNA, 19 nt, Artificial Sequence
  Description of Artificial Sequence: Synthetic oligonucleotide
  Sense strand starting at position 35 of SEQ ID NO: 1882929
ugaguuuguucucacagca

SEQ ID NO: 2157981 - RNA, 19 nt, Artificial Sequence
  Description of Artificial Sequence: Synthetic oligonucleotide
  Antisense strand to SEQ ID NO: 2157980
ugcugugagaacaaacuca

SEQ ID NO: 2157982 - RNA, 19 nt, Artificial Sequence
  Description of Artificial Sequence: Synthetic oligonucleotide
  Sense strand starting at position 251 of SEQ ID NO: 1882929
ccaccugaguaguugagau

SEQ ID NO: 2157983 - RNA, 19 nt, Artificial Sequence
  Description of Artificial Sequence: Synthetic oligonucleotide
  Antisense strand to SEQ ID NO: 2157982
aucucaacuacucaggugg

SEQ ID NO: 2157984 - RNA, 19 nt, Artificial Sequence
  Description of Artificial Sequence: Synthetic oligonucleotide
  Sense strand starting at position 502 of SEQ ID NO: 1882929
ggaauccucuuucuggaga

SEQ ID NO: 2157985 - RNA, 19 nt, Artificial Sequence
  Description of Artificial Sequence: Synthetic oligonucleotide
  Antisense strand to SEQ ID NO: 2157984
ucuccagaaagaggauucc

SEQ ID NO: 2157986 - RNA, 19 nt, Artificial Sequence
  Description of Artificial Sequence: Synthetic oligonucleotide
  Sense strand starting at position 544 of SEQ ID NO: 1882929
uugaccuguugguacgaaa

SEQ ID NO: 2157987 - RNA, 19 nt, Artificial Sequence
  Description of Artificial Sequence: Synthetic oligonucleotide
  Antisense strand to SEQ ID NO: 2157986
uuucguaccaacaggucaa

SEQ ID NO: 2157988 - RNA, 19 nt, Artificial Sequence
  Description of Artificial Sequence: Synthetic oligonucleotide
  Sense strand starting at position 547 of SEQ ID NO: 1882929
accuguugguacgaaagua

SEQ ID NO: 2157989 - RNA, 19 nt, Artificial Sequence
  Description of Artificial Sequence: Synthetic oligonucleotide
  Antisense strand to SEQ ID NO: 2157988
uacuuucguaccaacaggu

SEQ ID NO: 2157990 - RNA, 19 nt, Artificial Sequence
  Description of Artificial Sequence: Synthetic oligonucleotide
  Sense strand starting at position 672 of SEQ ID NO: 1882929
ggagaccucuugucuacaa

SEQ ID NO: 2157991 - RNA, 19 nt, Artificial Sequence
  Description of Artificial Sequence: Synthetic oligonucleotide
  Antisense strand to SEQ ID NO: 2157990
uuguagacaagaggucucc

SEQ ID NO: 2157992 - RNA, 19 nt, Artificial Sequence
  Description of Artificial Sequence: Synthetic oligonucleotide
  Sense strand starting at position 1755 of SEQ ID NO: 1882929
ugcuuugugucccacacaa

SEQ ID NO: 2157993 - RNA, 19 nt, Artificial Sequence
  Description of Artificial Sequence: Synthetic oligonucleotide
  Antisense strand to SEQ ID NO: 2157992
uugugugggacacaaagca

SEQ ID NO: 2157994 - RNA, 19 nt, Artificial Sequence
  Description of Artificial Sequence: Synthetic oligonucleotide
  Sense strand starting at position 1785 of SEQ ID NO: 1882929
cgucaucaccauuauagag

SEQ ID NO: 2157995 - RNA, 19 nt, Artificial Sequence
  Description of Artificial Sequence: Synthetic oligonucleotide
  Antisense strand to SEQ ID NO: 2157994
cucuauaauggugaugacg

SEQ ID NO: 2157996 - RNA, 19 nt, Artificial Sequence
  Description of Artificial Sequence: Synthetic oligonucleotide
  Sense strand starting at position 2390 of SEQ ID NO: 1882929
ccucuugagcucugcagaa

SEQ ID NO: 2157997 - RNA, 19 nt, Artificial Sequence
  Description of Artificial Sequence: Synthetic oligonucleotide
  Antisense strand to SEQ ID NO: 2157996
uucugcagagcucaagagg

SEQ ID NO: 2157998 - RNA, 19 nt, Artificial Sequence
  Description of Artificial Sequence: Synthetic oligonucleotide
  Sense strand starting at position 3679 of SEQ ID NO: 1882929
agucuucuguguuccucua

SEQ ID NO: 2157999 - RNA, 19 nt, Artificial Sequence
  Description of Artificial Sequence: Synthetic oligonucleotide
  Antisense strand to SEQ ID NO: 2157998
uagaggaacacagaagacu

SEQ ID NO: 2158000 - RNA, 19 nt, Artificial Sequence
  Description of Artificial Sequence: Synthetic oligonucleotide
  Sense strand starting at position 3773 of SEQ ID NO: 1882929
ggucauaggucugcacaga

SEQ ID NO: 2158001 - RNA, 19 nt, Artificial Sequence
  Description of Artificial Sequence: Synthetic oligonucleotide
  Antisense strand to SEQ ID NO: 2158000
ucugugcagaccuaugacc

SEQ ID NO: 2158002 - RNA, 19 nt, Artificial Sequence
  Description of Artificial Sequence: Synthetic oligonucleotide
  Sense strand starting at position 66 of SEQ ID NO: 1882930
gagaaaugucaggguuaca

SEQ ID NO: 2158003 - RNA, 19 nt, Artificial Sequence
  Description of Artificial Sequence: Synthetic oligonucleotide
  Antisense strand to SEQ ID NO: 2158002
uguaacccugacauuucuc

SEQ ID NO: 2158004 - RNA, 19 nt, Artificial Sequence
  Description of Artificial Sequence: Synthetic oligonucleotide
  Sense strand starting at position 202 of SEQ ID NO: 1882930
gguguacgaaauuaaaguu

SEQ ID NO: 2158005 - RNA, 19 nt, Artificial Sequence
  Description of Artificial Sequence: Synthetic oligonucleotide
  Antisense strand to SEQ ID NO: 2158004
aacuuuaauuucguacacc

SEQ ID NO: 2158006 - RNA, 19 nt, Artificial Sequence
  Description of Artificial Sequence: Synthetic oligonucleotide
  Sense strand starting at position 398 of SEQ ID NO: 1882930
ggagaccgaucacuauaua

SEQ ID NO: 2158007 - RNA, 19 nt, Artificial Sequence
  Description of Artificial Sequence: Synthetic oligonucleotide
  Antisense strand to SEQ ID NO: 2158006
uauauagugaucggucucc

SEQ ID NO: 2158008 - RNA, 19 nt, Artificial Sequence
  Description of Artificial Sequence: Synthetic oligonucleotide
  Sense strand starting at position 417 of SEQ ID NO: 1882930
ccaagagugcugcagaaag

SEQ ID NO: 2158009 - RNA, 19 nt, Artificial Sequence
  Description of Artificial Sequence: Synthetic oligonucleotide
  Antisense strand to SEQ ID NO: 2158008
cuuucugcagcacucuugg

SEQ ID NO: 2158010 - RNA, 19 nt, Artificial Sequence
  Description of Artificial Sequence: Synthetic oligonucleotide
  Sense strand starting at position 544 of SEQ ID NO: 1882930
agaucaguugugcauugga

SEQ ID NO: 2158011 - RNA, 19 nt, Artificial Sequence
  Description of Artificial Sequence: Synthetic oligonucleotide
  Antisense strand to SEQ ID NO: 2158010
uccaaugcacaacugaucu

SEQ ID NO: 2158012 - RNA, 19 nt, Artificial Sequence
  Description of Artificial Sequence: Synthetic oligonucleotide
  Sense strand starting at position 551 of SEQ ID NO: 1882930
uugugcauuggauaaagua

SEQ ID NO: 2158013 - RNA, 19 nt, Artificial Sequence
  Description of Artificial Sequence: Synthetic oligonucleotide
  Antisense strand to SEQ ID NO: 2158012
uacuuuauccaaugcacaa

SEQ ID NO: 2158014 - RNA, 19 nt, Artificial Sequence
  Description of Artificial Sequence: Synthetic oligonucleotide
  Sense strand starting at position 684 of SEQ ID NO: 1882930
ucaccuuguguagauuaca

SEQ ID NO: 2158015 - RNA, 19 nt, Artificial Sequence
  Description of Artificial Sequence: Synthetic oligonucleotide
  Antisense strand to SEQ ID NO: 2158014
uguaaucuacacaagguga

SEQ ID NO: 2158016 - RNA, 19 nt, Artificial Sequence
  Description of Artificial Sequence: Synthetic oligonucleotide
  Sense strand starting at position 768 of SEQ ID NO: 1882930
ugaagugugcagccguuua

SEQ ID NO: 2158017 - RNA, 19 nt, Artificial Sequence
  Description of Artificial Sequence: Synthetic oligonucleotide
  Antisense strand to SEQ ID NO: 2158016
uaaacggcugcacacuuca

SEQ ID NO: 2158018 - RNA, 19 nt, Artificial Sequence
  Description of Artificial Sequence: Synthetic oligonucleotide
  Sense strand starting at position 772 of SEQ ID NO: 1882930
gugugcagccguuuacaga

SEQ ID NO: 2158019 - RNA, 19 nt, Artificial Sequence
  Description of Artificial Sequence: Synthetic oligonucleotide
  Antisense strand to SEQ ID NO: 2158018
ucuguaaacggcugcacac

SEQ ID NO: 2158020 - RNA, 19 nt, Artificial Sequence
  Description of Artificial Sequence: Synthetic oligonucleotide
  Sense strand starting at position 793 of SEQ ID NO: 1882930
acucaauaugagggcauua

SEQ ID NO: 2158021 - RNA, 19 nt, Artificial Sequence
  Description of Artificial Sequence: Synthetic oligonucleotide
  Antisense strand to SEQ ID NO: 2158020
uaaugcccucauauugagu

SEQ ID NO: 2158022 - RNA, 19 nt, Artificial Sequence
  Description of Artificial Sequence: Synthetic oligonucleotide
  Sense strand starting at position 1010 of SEQ ID NO: 1882930
uggaaagugaugugacaag

SEQ ID NO: 2158023 - RNA, 19 nt, Artificial Sequence
  Description of Artificial Sequence: Synthetic oligonucleotide
  Antisense strand to SEQ ID NO: 2158022
cuugucacaucacuuucca

SEQ ID NO: 2158024 - RNA, 19 nt, Artificial Sequence
  Description of Artificial Sequence: Synthetic oligonucleotide
  Sense strand starting at position 1017 of SEQ ID NO: 1882930
ugaugugacaaguagccau

SEQ ID NO: 2158025 - RNA, 19 nt, Artificial Sequence
  Description of Artificial Sequence: Synthetic oligonucleotide
  Antisense strand to SEQ ID NO: 2158024
auggcuacuugucacauca

SEQ ID NO: 2158026 - RNA, 19 nt, Artificial Sequence
  Description of Artificial Sequence: Synthetic oligonucleotide
  Sense strand starting at position 1192 of SEQ ID NO: 1882930
guuccacuugcugaaauga

SEQ ID NO: 2158027 - RNA, 19 nt, Artificial Sequence
  Description of Artificial Sequence: Synthetic oligonucleotide
  Antisense strand to SEQ ID NO: 2158026
ucauuucagcaaguggaac

SEQ ID NO: 2158028 - RNA, 19 nt, Artificial Sequence
  Description of Artificial Sequence: Synthetic oligonucleotide
  Sense strand starting at position 1319 of SEQ ID NO: 1882930
uaacuaugguaguuuggga

SEQ ID NO: 2158029 - RNA, 19 nt, Artificial Sequence
  Description of Artificial Sequence: Synthetic oligonucleotide
  Antisense strand to SEQ ID NO: 2158028
ucccaaacuaccauaguua

SEQ ID NO: 2158030 - RNA, 19 nt, Artificial Sequence
  Description of Artificial Sequence: Synthetic oligonucleotide
  Sense strand starting at position 1490 of SEQ ID NO: 1882930
uucccaugucuguacaaug

SEQ ID NO: 2158031 - RNA, 19 nt, Artificial Sequence
  Description of Artificial Sequence: Synthetic oligonucleotide
  Antisense strand to SEQ ID NO: 2158030
cauuguacagacaugggaa

SEQ ID NO: 2158032 - RNA, 19 nt, Artificial Sequence
  Description of Artificial Sequence: Synthetic oligonucleotide
  Sense strand starting at position 1501 of SEQ ID NO: 1882930
guacaaugccauuaucuga

SEQ ID NO: 2158033 - RNA, 19 nt, Artificial Sequence
  Description of Artificial Sequence: Synthetic oligonucleotide
  Antisense strand to SEQ ID NO: 2158032
ucagauaauggcauuguac

SEQ ID NO: 2158034 - RNA, 19 nt, Artificial Sequence
  Description of Artificial Sequence: Synthetic oligonucleotide
  Sense strand starting at position 1508 of SEQ ID NO: 1882930
gccauuaucugacuggaau

SEQ ID NO: 2158035 - RNA, 19 nt, Artificial Sequence
  Description of Artificial Sequence: Synthetic oligonucleotide
  Antisense strand to SEQ ID NO: 2158034
auuccagucagauaauggc

SEQ ID NO: 2158036 - RNA, 19 nt, Artificial Sequence
  Description of Artificial Sequence: Synthetic oligonucleotide
  Sense strand starting at position 1509 of SEQ ID NO: 1882930
ccauuaucugacuggaauu

SEQ ID NO: 2158037 - RNA, 19 nt, Artificial Sequence
  Description of Artificial Sequence: Synthetic oligonucleotide
  Antisense strand to SEQ ID NO: 2158036
aauuccagucagauaaugg

SEQ ID NO: 2158038 - RNA, 19 nt, Artificial Sequence
  Description of Artificial Sequence: Synthetic oligonucleotide
  Sense strand starting at position 1605 of SEQ ID NO: 1882930
uagugacuggagugaagau

SEQ ID NO: 2158039 - RNA, 19 nt, Artificial Sequence
  Description of Artificial Sequence: Synthetic oligonucleotide
  Antisense strand to SEQ ID NO: 2158038
aucuucacuccagucacua

SEQ ID NO: 2158040 - RNA, 19 nt, Artificial Sequence
  Description of Artificial Sequence: Synthetic oligonucleotide
  Sense strand starting at position 1712 of SEQ ID NO: 1882930
aaccuuagagauugguuaa

SEQ ID NO: 2158041 - RNA, 19 nt, Artificial Sequence
  Description of Artificial Sequence: Synthetic oligonucleotide
  Antisense strand to SEQ ID NO: 2158040
uuaaccaaucucuaagguu

SEQ ID NO: 2158042 - RNA, 19 nt, Artificial Sequence
  Description of Artificial Sequence: Synthetic oligonucleotide
  Sense strand starting at position 1713 of SEQ ID NO: 1882930
accuuagagauugguuaag

SEQ ID NO: 2158043 - RNA, 19 nt, Artificial Sequence
  Description of Artificial Sequence: Synthetic oligonucleotide
  Antisense strand to SEQ ID NO: 2158042
cuuaaccaaucucuaaggu

SEQ ID NO: 2158044 - RNA, 19 nt, Artificial Sequence
  Description of Artificial Sequence: Synthetic oligonucleotide
  Sense strand starting at position 1715 of SEQ ID NO: 1882930
cuuagagauugguuaagac

SEQ ID NO: 2158045 - RNA, 19 nt, Artificial Sequence
  Description of Artificial Sequence: Synthetic oligonucleotide
  Antisense strand to SEQ ID NO: 2158044
gucuuaaccaaucucuaag

SEQ ID NO: 2158046 - RNA, 19 nt, Artificial Sequence
  Description of Artificial Sequence: Synthetic oligonucleotide
  Sense strand starting at position 1768 of SEQ ID NO: 1882930
cuuacauaggcaggucaaa

SEQ ID NO: 2158047 - RNA, 19 nt, Artificial Sequence
  Description of Artificial Sequence: Synthetic oligonucleotide
  Antisense strand to SEQ ID NO: 2158046
uuugaccugccuauguaag

SEQ ID NO: 2158048 - RNA, 19 nt, Artificial Sequence
  Description of Artificial Sequence: Synthetic oligonucleotide
  Sense strand starting at position 2226 of SEQ ID NO: 1882930
uggucuauacaagaauugu

SEQ ID NO: 2158049 - RNA, 19 nt, Artificial Sequence
  Description of Artificial Sequence: Synthetic oligonucleotide
  Antisense strand to SEQ ID NO: 2158048
acaauucuuguauagacca

SEQ ID NO: 2158050 - RNA, 19 nt, Artificial Sequence
  Description of Artificial Sequence: Synthetic oligonucleotide
  Sense strand starting at position 2237 of SEQ ID NO: 1882930
agaauuguacaugguuuga

SEQ ID NO: 2158051 - RNA, 19 nt, Artificial Sequence
  Description of Artificial Sequence: Synthetic oligonucleotide
  Antisense strand to SEQ ID NO: 2158050
ucaaaccauguacaauucu

SEQ ID NO: 2158052 - RNA, 19 nt, Artificial Sequence
  Description of Artificial Sequence: Synthetic oligonucleotide
  Sense strand starting at position 2387 of SEQ ID NO: 1882930
auuuguucuccgcagcaaa

SEQ ID NO: 2158053 - RNA, 19 nt, Artificial Sequence
  Description of Artificial Sequence: Synthetic oligonucleotide
  Antisense strand to SEQ ID NO: 2158052
uuugcugcggagaacaaau

SEQ ID NO: 2158054 - RNA, 19 nt, Artificial Sequence
  Description of Artificial Sequence: Synthetic oligonucleotide
  Sense strand starting at position 2540 of SEQ ID NO: 1882930
aggaaacauucuuugcaac

SEQ ID NO: 2158055 - RNA, 19 nt, Artificial Sequence
  Description of Artificial Sequence: Synthetic oligonucleotide
  Antisense strand to SEQ ID NO: 2158054
guugcaaagaauguuuccu

SEQ ID NO: 2158056 - RNA, 19 nt, Artificial Sequence
  Description of Artificial Sequence: Synthetic oligonucleotide
  Sense strand starting at position 3026 of SEQ ID NO: 1882930
guuaccuaggucuaugaca

SEQ ID NO: 2158057 - RNA, 19 nt, Artificial Sequence
  Description of Artificial Sequence: Synthetic oligonucleotide
  Antisense strand to SEQ ID NO: 2158056
ugucauagaccuagguaac

SEQ ID NO: 2158058 - RNA, 19 nt, Artificial Sequence
  Description of Artificial Sequence: Synthetic oligonucleotide
  Sense strand starting at position 3037 of SEQ ID NO: 1882930
cuaugacauuucuaggaau

SEQ ID NO: 2158059 - RNA, 19 nt, Artificial Sequence
  Description of Artificial Sequence: Synthetic oligonucleotide
  Antisense strand to SEQ ID NO: 2158058
auuccuagaaaugucauag

SEQ ID NO: 2158060 - RNA, 19 nt, Artificial Sequence
  Description of Artificial Sequence: Synthetic oligonucleotide
  Sense strand starting at position 3040 of SEQ ID NO: 1882930
ugacauuucuaggaauacc

SEQ ID NO: 2158061 - RNA, 19 nt, Artificial Sequence
  Description of Artificial Sequence: Synthetic oligonucleotide
  Antisense strand to SEQ ID NO: 2158060
gguauuccuagaaauguca

SEQ ID NO: 2158062 - RNA, 19 nt, Artificial Sequence
  Description of Artificial Sequence: Synthetic oligonucleotide
  Sense strand starting at position 3069 of SEQ ID NO: 1882930
gugggauuaacuugauuag

SEQ ID NO: 2158063 - RNA, 19 nt, Artificial Sequence
  Description of Artificial Sequence: Synthetic oligonucleotide
  Antisense strand to SEQ ID NO: 2158062
cuaaucaaguuaaucccac

SEQ ID NO: 2158064 - RNA, 19 nt, Artificial Sequence
  Description of Artificial Sequence: Synthetic oligonucleotide
  Sense strand starting at position 3072 of SEQ ID NO: 1882930
ggauuaacuugauuaguaa

SEQ ID NO: 2158065 - RNA, 19 nt, Artificial Sequence
  Description of Artificial Sequence: Synthetic oligonucleotide
  Antisense strand to SEQ ID NO: 2158064
uuacuaaucaaguuaaucc

SEQ ID NO: 2158066 - RNA, 19 nt, Artificial Sequence
  Description of Artificial Sequence: Synthetic oligonucleotide
  Sense strand starting at position 3160 of SEQ ID NO: 1882930
uugaaagacagcuggauua

SEQ ID NO: 2158067 - RNA, 19 nt, Artificial Sequence
  Description of Artificial Sequence: Synthetic oligonucleotide
  Antisense strand to SEQ ID NO: 2158066
uaauccagcugucuuucaa

SEQ ID NO: 2158068 - RNA, 19 nt, Artificial Sequence
  Description of Artificial Sequence: Synthetic oligonucleotide
  Sense strand starting at position 3230 of SEQ ID NO: 1882930
aggauauagucagcauauu

SEQ ID NO: 2158069 - RNA, 19 nt, Artificial Sequence
  Description of Artificial Sequence: Synthetic oligonucleotide
  Antisense strand to SEQ ID NO: 2158068
aauaugcugacuauauccu

SEQ ID NO: 2158070 - RNA, 19 nt, Artificial Sequence
  Description of Artificial Sequence: Synthetic oligonucleotide
  Sense strand starting at position 3231 of SEQ ID NO: 1882930
ggauauagucagcauauuc

SEQ ID NO: 2158071 - RNA, 19 nt, Artificial Sequence
  Description of Artificial Sequence: Synthetic oligonucleotide
  Antisense strand to SEQ ID NO: 2158070
gaauaugcugacuauaucc

SEQ ID NO: 2158072 - RNA, 19 nt, Artificial Sequence
  Description of Artificial Sequence: Synthetic oligonucleotide
  Sense strand starting at position 3334 of SEQ ID NO: 1882930
cugauugugagguacugau

SEQ ID NO: 2158073 - RNA, 19 nt, Artificial Sequence
  Description of Artificial Sequence: Synthetic oligonucleotide
  Antisense strand to SEQ ID NO: 2158072
aucaguaccucacaaucag

SEQ ID NO: 2158074 - RNA, 19 nt, Artificial Sequence
  Description of Artificial Sequence: Synthetic oligonucleotide
  Sense strand starting at position 3395 of SEQ ID NO: 1882930
gcuggaauucuggaccuga

SEQ ID NO: 2158075 - RNA, 19 nt, Artificial Sequence
  Description of Artificial Sequence: Synthetic oligonucleotide
  Antisense strand to SEQ ID NO: 2158074
ucagguccagaauuccagc

SEQ ID NO: 2158076 - RNA, 19 nt, Artificial Sequence
  Description of Artificial Sequence: Synthetic oligonucleotide
  Sense strand starting at position 3408 of SEQ ID NO: 1882930
accugaggaucuuuaguau

SEQ ID NO: 2158077 - RNA, 19 nt, Artificial Sequence
  Description of Artificial Sequence: Synthetic oligonucleotide
  Antisense strand to SEQ ID NO: 2158076
auacuaaagauccucaggu

SEQ ID NO: 2158078 - RNA, 19 nt, Artificial Sequence
  Description of Artificial Sequence: Synthetic oligonucleotide
  Sense strand starting at position 3497 of SEQ ID NO: 1882930
gaggauguauauccauuaa

SEQ ID NO: 2158079 - RNA, 19 nt, Artificial Sequence
  Description of Artificial Sequence: Synthetic oligonucleotide
  Antisense strand to SEQ ID NO: 2158078
uuaauggauauacauccuc

SEQ ID NO: 2158080 - RNA, 19 nt, Artificial Sequence
  Description of Artificial Sequence: Synthetic oligonucleotide
  Sense strand starting at position 3853 of SEQ ID NO: 1882930
cggauucuacuccaagcau

SEQ ID NO: 2158081 - RNA, 19 nt, Artificial Sequence
  Description of Artificial Sequence: Synthetic oligonucleotide
  Antisense strand to SEQ ID NO: 2158080
augcuuggaguagaauccg

SEQ ID NO: 2158082 - RNA, 19 nt, Artificial Sequence
  Description of Artificial Sequence: Synthetic oligonucleotide
  Sense strand starting at position 142 of SEQ ID NO: 1882931
guggcuuagucccagccau

SEQ ID NO: 2158083 - RNA, 19 nt, Artificial Sequence
  Description of Artificial Sequence: Synthetic oligonucleotide
  Antisense strand to SEQ ID NO: 2158082
auggcugggacuaagccac

SEQ ID NO: 2158084 - RNA, 19 nt, Artificial Sequence
  Description of Artificial Sequence: Synthetic oligonucleotide
  Sense strand starting at position 302 of SEQ ID NO: 1882931
gggucucuggaguguaaga

SEQ ID NO: 2158085 - RNA, 19 nt, Artificial Sequence
  Description of Artificial Sequence: Synthetic oligonucleotide
  Antisense strand to SEQ ID NO: 2158084
ucuuacacuccagagaccc

SEQ ID NO: 2158086 - RNA, 19 nt, Artificial Sequence
  Description of Artificial Sequence: Synthetic oligonucleotide
  Sense strand starting at position 861 of SEQ ID NO: 1882931
gugacagacugaugucaaa

SEQ ID NO: 2158087 - RNA, 19 nt, Artificial Sequence
  Description of Artificial Sequence: Synthetic oligonucleotide
  Antisense strand to SEQ ID NO: 2158086
uuugacaucagucugucac

SEQ ID NO: 2158088 - RNA, 19 nt, Artificial Sequence
  Description of Artificial Sequence: Synthetic oligonucleotide
  Sense strand starting at position 1220 of SEQ ID NO: 1882931
agcacagucucaucugauu

SEQ ID NO: 2158089 - RNA, 19 nt, Artificial Sequence
  Description of Artificial Sequence: Synthetic oligonucleotide
  Antisense strand to SEQ ID NO: 2158088
aaucagaugagacugugcu

SEQ ID NO: 2158090 - RNA, 19 nt, Artificial Sequence
  Description of Artificial Sequence: Synthetic oligonucleotide
  Sense strand starting at position 1243 of SEQ ID NO: 1882931
aagccacucuguggaguaa

SEQ ID NO: 2158091 - RNA, 19 nt, Artificial Sequence
  Description of Artificial Sequence: Synthetic oligonucleotide
  Antisense strand to SEQ ID NO: 2158090
uuacuccacagaguggcuu

SEQ ID NO: 2158092 - RNA, 19 nt, Artificial Sequence
  Description of Artificial Sequence: Synthetic oligonucleotide
  Sense strand starting at position 1244 of SEQ ID NO: 1882931
agccacucuguggaguaaa

SEQ ID NO: 2158093 - RNA, 19 nt, Artificial Sequence
  Description of Artificial Sequence: Synthetic oligonucleotide
  Antisense strand to SEQ ID NO: 2158092
uuuacuccacagaguggcu

SEQ ID NO: 2158094 - RNA, 19 nt, Artificial Sequence
  Description of Artificial Sequence: Synthetic oligonucleotide
  Sense strand starting at position 1263 of SEQ ID NO: 1882931
cugagcaaacguuaucuuu

SEQ ID NO: 2158095 - RNA, 19 nt, Artificial Sequence
  Description of Artificial Sequence: Synthetic oligonucleotide
  Antisense strand to SEQ ID NO: 2158094
aaagauaacguuugcucag

SEQ ID NO: 2158096 - RNA, 19 nt, Artificial Sequence
  Description of Artificial Sequence: Synthetic oligonucleotide
  Sense strand starting at position 1281 of SEQ ID NO: 1882931
uugugcauguuguagauaa

SEQ ID NO: 2158097 - RNA, 19 nt, Artificial Sequence
  Description of Artificial Sequence: Synthetic oligonucleotide
  Antisense strand to SEQ ID NO: 2158096
uuaucuacaacaugcacaa

SEQ ID NO: 2158098 - RNA, 19 nt, Artificial Sequence
  Description of Artificial Sequence: Synthetic oligonucleotide
  Sense strand starting at position 1283 of SEQ ID NO: 1882931
gugcauguuguagauaaca

SEQ ID NO: 2158099 - RNA, 19 nt, Artificial Sequence
  Description of Artificial Sequence: Synthetic oligonucleotide
  Antisense strand to SEQ ID NO: 2158098
uguuaucuacaacaugcac

SEQ ID NO: 2158100 - RNA, 19 nt, Artificial Sequence
  Description of Artificial Sequence: Synthetic oligonucleotide
  Sense strand starting at position 1323 of SEQ ID NO: 1882931
caaggcacgucacguauau

SEQ ID NO: 2158101 - RNA, 19 nt, Artificial Sequence
  Description of Artificial Sequence: Synthetic oligonucleotide
  Antisense strand to SEQ ID NO: 2158100
auauacgugacgugccuug

SEQ ID NO: 2158102 - RNA, 19 nt, Artificial Sequence
  Description of Artificial Sequence: Synthetic oligonucleotide
  Sense strand starting at position 1325 of SEQ ID NO: 1882931
aggcacgucacguauauua

SEQ ID NO: 2158103 - RNA, 19 nt, Artificial Sequence
  Description of Artificial Sequence: Synthetic oligonucleotide
  Antisense strand to SEQ ID NO: 2158102
uaauauacgugacgugccu

SEQ ID NO: 2158104 - RNA, 19 nt, Artificial Sequence
  Description of Artificial Sequence: Synthetic oligonucleotide
  Sense strand starting at position 1327 of SEQ ID NO: 1882931
gcacgucacguauauuaac

SEQ ID NO: 2158105 - RNA, 19 nt, Artificial Sequence
  Description of Artificial Sequence: Synthetic oligonucleotide
  Antisense strand to SEQ ID NO: 2158104
guuaauauacgugacgugc

SEQ ID NO: 2158106 - RNA, 19 nt, Artificial Sequence
  Description of Artificial Sequence: Synthetic oligonucleotide
  Sense strand starting at position 1371 of SEQ ID NO: 1882931
agauaugaguugcucuauu

SEQ ID NO: 2158107 - RNA, 19 nt, Artificial Sequence
  Description of Artificial Sequence: Synthetic oligonucleotide
  Antisense strand to SEQ ID NO: 2158106
aauagagcaacucauaucu

SEQ ID NO: 2158108 - RNA, 19 nt, Artificial Sequence
  Description of Artificial Sequence: Synthetic oligonucleotide
  Sense strand starting at position 1492 of SEQ ID NO: 1882931
cagugucuaugcccugaaa

SEQ ID NO: 2158109 - RNA, 19 nt, Artificial Sequence
  Description of Artificial Sequence: Synthetic oligonucleotide
  Antisense strand to SEQ ID NO: 2158108
uuucagggcauagacacug

SEQ ID NO: 2158110 - RNA, 19 nt, Artificial Sequence
  Description of Artificial Sequence: Synthetic oligonucleotide
  Sense strand starting at position 1494 of SEQ ID NO: 1882931
gugucuaugcccugaaagu

SEQ ID NO: 2158111 - RNA, 19 nt, Artificial Sequence
  Description of Artificial Sequence: Synthetic oligonucleotide
  Antisense strand to SEQ ID NO: 2158110
acuuucagggcauagacac

SEQ ID NO: 2158112 - RNA, 19 nt, Artificial Sequence
  Description of Artificial Sequence: Synthetic oligonucleotide
  Sense strand starting at position 1495 of SEQ ID NO: 1882931
ugucuaugcccugaaaguc

SEQ ID NO: 2158113 - RNA, 19 nt, Artificial Sequence
  Description of Artificial Sequence: Synthetic oligonucleotide
  Antisense strand to SEQ ID NO: 2158112
gacuuucagggcauagaca

SEQ ID NO: 2158114 - RNA, 19 nt, Artificial Sequence
  Description of Artificial Sequence: Synthetic oligonucleotide
  Sense strand starting at position 1757 of SEQ ID NO: 1882931
aaggaagucuuggagauug

SEQ ID NO: 2158115 - RNA, 19 nt, Artificial Sequence
  Description of Artificial Sequence: Synthetic oligonucleotide
  Antisense strand to SEQ ID NO: 2158114
caaucuccaagacuuccuu

SEQ ID NO: 2158116 - RNA, 19 nt, Artificial Sequence
  Description of Artificial Sequence: Synthetic oligonucleotide
  Sense strand starting at position 1759 of SEQ ID NO: 1882931
ggaagucuuggagauuguu

SEQ ID NO: 2158117 - RNA, 19 nt, Artificial Sequence
  Description of Artificial Sequence: Synthetic oligonucleotide
  Antisense strand to SEQ ID NO: 2158116
aacaaucuccaagacuucc

SEQ ID NO: 2158118 - RNA, 19 nt, Artificial Sequence
  Description of Artificial Sequence: Synthetic oligonucleotide
  Sense strand starting at position 1762 of SEQ ID NO: 1882931
agucuuggagauuguuaag

SEQ ID NO: 2158119 - RNA, 19 nt, Artificial Sequence
  Description of Artificial Sequence: Synthetic oligonucleotide
  Antisense strand to SEQ ID NO: 2158118
cuuaacaaucuccaagacu

SEQ ID NO: 2158120 - RNA, 19 nt, Artificial Sequence
  Description of Artificial Sequence: Synthetic oligonucleotide
  Sense strand starting at position 1771 of SEQ ID NO: 1882931
gauuguuaagcagcgugua

SEQ ID NO: 2158121 - RNA, 19 nt, Artificial Sequence
  Description of Artificial Sequence: Synthetic oligonucleotide
  Antisense strand to SEQ ID NO: 2158120
uacacgcugcuuaacaauc

SEQ ID NO: 2158122 - RNA, 19 nt, Artificial Sequence
  Description of Artificial Sequence: Synthetic oligonucleotide
  Sense strand starting at position 1795 of SEQ ID NO: 1882931
cagugaaacgcucguaggu

SEQ ID NO: 2158123 - RNA, 19 nt, Artificial Sequence
  Description of Artificial Sequence: Synthetic oligonucleotide
  Antisense strand to SEQ ID NO: 2158122
accuacgagcguuucacug

SEQ ID NO: 2158124 - RNA, 19 nt, Artificial Sequence
  Description of Artificial Sequence: Synthetic oligonucleotide
  Sense strand starting at position 1829 of SEQ ID NO: 1882931
acaagaagcggucaucaca

SEQ ID NO: 2158125 - RNA, 19 nt, Artificial Sequence
  Description of Artificial Sequence: Synthetic oligonucleotide
  Antisense strand to SEQ ID NO: 2158124
ugugaugaccgcuucuugu

SEQ ID NO: 2158126 - RNA, 19 nt, Artificial Sequence
  Description of Artificial Sequence: Synthetic oligonucleotide
  Sense strand starting at position 1937 of SEQ ID NO: 1882931
ccacgauuccuccaggauc

SEQ ID NO: 2158127 - RNA, 19 nt, Artificial Sequence
  Description of Artificial Sequence: Synthetic oligonucleotide
  Antisense strand to SEQ ID NO: 2158126
gauccuggaggaaucgugg

SEQ ID NO: 2158128 - RNA, 19 nt, Artificial Sequence
  Description of Artificial Sequence: Synthetic oligonucleotide
  Sense strand starting at position 1939 of SEQ ID NO: 1882931
acgauuccuccaggaucca

SEQ ID NO: 2158129 - RNA, 19 nt, Artificial Sequence
  Description of Artificial Sequence: Synthetic oligonucleotide
  Antisense strand to SEQ ID NO: 2158128
uggauccuggaggaaucgu

SEQ ID NO: 2158130 - RNA, 19 nt, Artificial Sequence
  Description of Artificial Sequence: Synthetic oligonucleotide
  Sense strand starting at position 1972 of SEQ ID NO: 1882931
ggguguagaugcucugagu

SEQ ID NO: 2158131 - RNA, 19 nt, Artificial Sequence
  Description of Artificial Sequence: Synthetic oligonucleotide
  Antisense strand to SEQ ID NO: 2158130
acucagagcaucuacaccc

SEQ ID NO: 2158132 - RNA, 19 nt, Artificial Sequence
  Description of Artificial Sequence: Synthetic oligonucleotide
  Sense strand starting at position 1975 of SEQ ID NO: 1882931
uguagaugcucugagugaa

SEQ ID NO: 2158133 - RNA, 19 nt, Artificial Sequence
  Description of Artificial Sequence: Synthetic oligonucleotide
  Antisense strand to SEQ ID NO: 2158132
uucacucagagcaucuaca

SEQ ID NO: 2158134 - RNA, 19 nt, Artificial Sequence
  Description of Artificial Sequence: Synthetic oligonucleotide
  Sense strand starting at position 2229 of SEQ ID NO: 1882931
uguguuccuccagggcauu

SEQ ID NO: 2158135 - RNA, 19 nt, Artificial Sequence
  Description of Artificial Sequence: Synthetic oligonucleotide
  Antisense strand to SEQ ID NO: 2158134
aaugcccuggaggaacaca

SEQ ID NO: 2158136 - RNA, 19 nt, Artificial Sequence
  Description of Artificial Sequence: Synthetic oligonucleotide
  Sense strand starting at position 2316 of SEQ ID NO: 1882931
acuggugacuagcucagaa

SEQ ID NO: 2158137 - RNA, 19 nt, Artificial Sequence
  Description of Artificial Sequence: Synthetic oligonucleotide
  Antisense strand to SEQ ID NO: 2158136
uucugagcuagucaccagu

SEQ ID NO: 2158138 - RNA, 19 nt, Artificial Sequence
  Description of Artificial Sequence: Synthetic oligonucleotide
  Sense strand starting at position 2468 of SEQ ID NO: 1882931
guagauaacuggcguugaa

SEQ ID NO: 2158139 - RNA, 19 nt, Artificial Sequence
  Description of Artificial Sequence: Synthetic oligonucleotide
  Antisense strand to SEQ ID NO: 2158138
uucaacgccaguuaucuac

SEQ ID NO: 2158140 - RNA, 19 nt, Artificial Sequence
  Description of Artificial Sequence: Synthetic oligonucleotide
  Sense strand starting at position 2471 of SEQ ID NO: 1882931
gauaacuggcguugaaguu

SEQ ID NO: 2158141 - RNA, 19 nt, Artificial Sequence
  Description of Artificial Sequence: Synthetic oligonucleotide
  Antisense strand to SEQ ID NO: 2158140
aacuucaacgccaguuauc

SEQ ID NO: 2158142 - RNA, 19 nt, Artificial Sequence
  Description of Artificial Sequence: Synthetic oligonucleotide
  Sense strand starting at position 2515 of SEQ ID NO: 1882931
gagauuuccuccugagagg

SEQ ID NO: 2158143 - RNA, 19 nt, Artificial Sequence
  Description of Artificial Sequence: Synthetic oligonucleotide
  Antisense strand to SEQ ID NO: 2158142
ccucucaggaggaaaucuc

SEQ ID NO: 2158144 - RNA, 19 nt, Artificial Sequence
  Description of Artificial Sequence: Synthetic oligonucleotide
  Sense strand starting at position 2558 of SEQ ID NO: 1882931
accagcuuggcucagaaua

SEQ ID NO: 2158145 - RNA, 19 nt, Artificial Sequence
  Description of Artificial Sequence: Synthetic oligonucleotide
  Antisense strand to SEQ ID NO: 2158144
uauucugagccaagcuggu

SEQ ID NO: 2158146 - RNA, 19 nt, Artificial Sequence
  Description of Artificial Sequence: Synthetic oligonucleotide
  Sense strand starting at position 3144 of SEQ ID NO: 1882931
ggacaauagcuccacucuu

SEQ ID NO: 2158147 - RNA, 19 nt, Artificial Sequence
  Description of Artificial Sequence: Synthetic oligonucleotide
  Antisense strand to SEQ ID NO: 2158146
aagaguggagcuauugucc

SEQ ID NO: 2158148 - RNA, 19 nt, Artificial Sequence
  Description of Artificial Sequence: Synthetic oligonucleotide
  Sense strand starting at position 3198 of SEQ ID NO: 1882931
cagucuauccagugaaacg

SEQ ID NO: 2158149 - RNA, 19 nt, Artificial Sequence
  Description of Artificial Sequence: Synthetic oligonucleotide
  Antisense strand to SEQ ID NO: 2158148
cguuucacuggauagacug

SEQ ID NO: 2158150 - RNA, 19 nt, Artificial Sequence
  Description of Artificial Sequence: Synthetic oligonucleotide
  Sense strand starting at position 3231 of SEQ ID NO: 1882931
gaccucaucuguggacaca

SEQ ID NO: 2158151 - RNA, 19 nt, Artificial Sequence
  Description of Artificial Sequence: Synthetic oligonucleotide
  Antisense strand to SEQ ID NO: 2158150
uguguccacagaugagguc

SEQ ID NO: 2158152 - RNA, 19 nt, Artificial Sequence
  Description of Artificial Sequence: Synthetic oligonucleotide
  Sense strand starting at position 340 of SEQ ID NO: 1882932
gaaugaucauuugauguau

SEQ ID NO: 2158153 - RNA, 19 nt, Artificial Sequence
  Description of Artificial Sequence: Synthetic oligonucleotide
  Antisense strand to SEQ ID NO: 2158152
auacaucaaaugaucauuc

SEQ ID NO: 2158154 - RNA, 19 nt, Artificial Sequence
  Description of Artificial Sequence: Synthetic oligonucleotide
  Sense strand starting at position 445 of SEQ ID NO: 1882932
uguauuagauaugcuaaac

SEQ ID NO: 2158155 - RNA, 19 nt, Artificial Sequence
  Description of Artificial Sequence: Synthetic oligonucleotide
  Antisense strand to SEQ ID NO: 2158154
guuuagcauaucuaauaca

SEQ ID NO: 2158156 - RNA, 19 nt, Artificial Sequence
  Description of Artificial Sequence: Synthetic oligonucleotide
  Sense strand starting at position 456 of SEQ ID NO: 1882932
ugcuaaacacugggaagua

SEQ ID NO: 2158157 - RNA, 19 nt, Artificial Sequence
  Description of Artificial Sequence: Synthetic oligonucleotide
  Antisense strand to SEQ ID NO: 2158156
uacuucccaguguuuagca

SEQ ID NO: 2158158 - RNA, 19 nt, Artificial Sequence
  Description of Artificial Sequence: Synthetic oligonucleotide
  Sense strand starting at position 595 of SEQ ID NO: 1882932
uaguauguccgaggauaac

SEQ ID NO: 2158159 - RNA, 19 nt, Artificial Sequence
  Description of Artificial Sequence: Synthetic oligonucleotide
  Antisense strand to SEQ ID NO: 2158158
guuauccucggacauacua

SEQ ID NO: 2158160 - RNA, 19 nt, Artificial Sequence
  Description of Artificial Sequence: Synthetic oligonucleotide
  Sense strand starting at position 694 of SEQ ID NO: 1882932
uacgacaaucuguauacga

SEQ ID NO: 2158161 - RNA, 19 nt, Artificial Sequence
  Description of Artificial Sequence: Synthetic oligonucleotide
  Antisense strand to SEQ ID NO: 2158160
ucguauacagauugucgua

SEQ ID NO: 2158162 - RNA, 19 nt, Artificial Sequence
  Description of Artificial Sequence: Synthetic oligonucleotide
  Sense strand starting at position 696 of SEQ ID NO: 1882932
cgacaaucuguauacgagu

SEQ ID NO: 2158163 - RNA, 19 nt, Artificial Sequence
  Description of Artificial Sequence: Synthetic oligonucleotide
  Antisense strand to SEQ ID NO: 2158162
acucguauacagauugucg

SEQ ID NO: 2158164 - RNA, 19 nt, Artificial Sequence
  Description of Artificial Sequence: Synthetic oligonucleotide
  Sense strand starting at position 702 of SEQ ID NO: 1882932
ucuguauacgaguaguuau

SEQ ID NO: 2158165 - RNA, 19 nt, Artificial Sequence
  Description of Artificial Sequence: Synthetic oligonucleotide
  Antisense strand to SEQ ID NO: 2158164
auaacuacucguauacaga

SEQ ID NO: 2158166 - RNA, 19 nt, Artificial Sequence
  Description of Artificial Sequence: Synthetic oligonucleotide
  Sense strand starting at position 730 of SEQ ID NO: 1882932
ugaugaaaguagcuuccau

SEQ ID NO: 2158167 - RNA, 19 nt, Artificial Sequence
  Description of Artificial Sequence: Synthetic oligonucleotide
  Antisense strand to SEQ ID NO: 2158166
auggaagcuacuuucauca

SEQ ID NO: 2158168 - RNA, 19 nt, Artificial Sequence
  Description of Artificial Sequence: Synthetic oligonucleotide
  Sense strand starting at position 839 of SEQ ID NO: 1882932
auuagaaccucuguuguca

SEQ ID NO: 2158169 - RNA, 19 nt, Artificial Sequence
  Description of Artificial Sequence: Synthetic oligonucleotide
  Antisense strand to SEQ ID NO: 2158168
ugacaacagagguucuaau

SEQ ID NO: 2158170 - RNA, 19 nt, Artificial Sequence
  Description of Artificial Sequence: Synthetic oligonucleotide
  Sense strand starting at position 865 of SEQ ID NO: 1882932
aguaauaaucugcaucagu

SEQ ID NO: 2158171 - RNA, 19 nt, Artificial Sequence
  Description of Artificial Sequence: Synthetic oligonucleotide
  Antisense strand to SEQ ID NO: 2158170
acugaugcagauuauuacu

SEQ ID NO: 2158172 - RNA, 19 nt, Artificial Sequence
  Description of Artificial Sequence: Synthetic oligonucleotide
  Sense strand starting at position 980 of SEQ ID NO: 1882932
gggcauuacguuuauacau

SEQ ID NO: 2158173 - RNA, 19 nt, Artificial Sequence
  Description of Artificial Sequence: Synthetic oligonucleotide
  Antisense strand to SEQ ID NO: 2158172
auguauaaacguaaugccc

SEQ ID NO: 2158174 - RNA, 19 nt, Artificial Sequence
  Description of Artificial Sequence: Synthetic oligonucleotide
  Sense strand starting at position 1057 of SEQ ID NO: 1882932
aucugaggaugcuuaggua

SEQ ID NO: 2158175 - RNA, 19 nt, Artificial Sequence
  Description of Artificial Sequence: Synthetic oligonucleotide
  Antisense strand to SEQ ID NO: 2158174
uaccuaagcauccucagau

SEQ ID NO: 2158176 - RNA, 19 nt, Artificial Sequence
  Description of Artificial Sequence: Synthetic oligonucleotide
  Sense strand starting at position 1100 of SEQ ID NO: 1882932
ugcauauguggauaccaaa

SEQ ID NO: 2158177 - RNA, 19 nt, Artificial Sequence
  Description of Artificial Sequence: Synthetic oligonucleotide
  Antisense strand to SEQ ID NO: 2158176
uuugguauccacauaugca

SEQ ID NO: 2158178 - RNA, 19 nt, Artificial Sequence
  Description of Artificial Sequence: Synthetic oligonucleotide
  Sense strand starting at position 1346 of SEQ ID NO: 1882932
ucaaucuauggauguacaa

SEQ ID NO: 2158179 - RNA, 19 nt, Artificial Sequence
  Description of Artificial Sequence: Synthetic oligonucleotide
  Antisense strand to SEQ ID NO: 2158178
uuguacauccauagauuga

SEQ ID NO: 2158180 - RNA, 19 nt, Artificial Sequence
  Description of Artificial Sequence: Synthetic oligonucleotide
  Sense strand starting at position 1377 of SEQ ID NO: 1882932
gagggcugacuguauagau

SEQ ID NO: 2158181 - RNA, 19 nt, Artificial Sequence
  Description of Artificial Sequence: Synthetic oligonucleotide
  Antisense strand to SEQ ID NO: 2158180
aucuauacagucagcccuc

SEQ ID NO: 2158182 - RNA, 19 nt, Artificial Sequence
  Description of Artificial Sequence: Synthetic oligonucleotide
  Sense strand starting at position 1381 of SEQ ID NO: 1882932
gcugacuguauagauagau

SEQ ID NO: 2158183 - RNA, 19 nt, Artificial Sequence
  Description of Artificial Sequence: Synthetic oligonucleotide
  Antisense strand to SEQ ID NO: 2158182
aucuaucuauacagucagc

SEQ ID NO: 2158184 - RNA, 19 nt, Artificial Sequence
  Description of Artificial Sequence: Synthetic oligonucleotide
  Sense strand starting at position 1607 of SEQ ID NO: 1882932
uaagaauugcugggaaggu

SEQ ID NO: 2158185 - RNA, 19 nt, Artificial Sequence
  Description of Artificial Sequence: Synthetic oligonucleotide
  Antisense strand to SEQ ID NO: 2158184
accuucccagcaauucuua

SEQ ID NO: 2158186 - RNA, 19 nt, Artificial Sequence
  Description of Artificial Sequence: Synthetic oligonucleotide
  Sense strand starting at position 1660 of SEQ ID NO: 1882932
accaguagugauuggauga

SEQ ID NO: 2158187 - RNA, 19 nt, Artificial Sequence
  Description of Artificial Sequence: Synthetic oligonucleotide
  Antisense strand to SEQ ID NO: 2158186
ucauccaaucacuacuggu

SEQ ID NO: 2158188 - RNA, 19 nt, Artificial Sequence
  Description of Artificial Sequence: Synthetic oligonucleotide
  Sense strand starting at position 1661 of SEQ ID NO: 1882932
ccaguagugauuggaugaa

SEQ ID NO: 2158189 - RNA, 19 nt, Artificial Sequence
  Description of Artificial Sequence: Synthetic oligonucleotide
  Antisense strand to SEQ ID NO: 2158188
uucauccaaucacuacugg

SEQ ID NO: 2158190 - RNA, 19 nt, Artificial Sequence
  Description of Artificial Sequence: Synthetic oligonucleotide
  Sense strand starting at position 1673 of SEQ ID NO: 1882932
ggaugaaacuaccaaacaa

SEQ ID NO: 2158191 - RNA, 19 nt, Artificial Sequence
  Description of Artificial Sequence: Synthetic oligonucleotide
  Antisense strand to SEQ ID NO: 2158190
uuguuugguaguuucaucc

SEQ ID NO: 2158192 - RNA, 19 nt, Artificial Sequence
  Description of Artificial Sequence: Synthetic oligonucleotide
  Sense strand starting at position 1725 of SEQ ID NO: 1882932
guguuaugucuauacuacu

SEQ ID NO: 2158193 - RNA, 19 nt, Artificial Sequence
  Description of Artificial Sequence: Synthetic oligonucleotide
  Antisense strand to SEQ ID NO: 2158192
aguaguauagacauaacac

SEQ ID NO: 2158194 - RNA, 19 nt, Artificial Sequence
  Description of Artificial Sequence: Synthetic oligonucleotide
  Sense strand starting at position 1797 of SEQ ID NO: 1882932
ugagauauuaagggcauau

SEQ ID NO: 2158195 - RNA, 19 nt, Artificial Sequence
  Description of Artificial Sequence: Synthetic oligonucleotide
  Antisense strand to SEQ ID NO: 2158194
auaugcccuuaauaucuca

SEQ ID NO: 2158196 - RNA, 19 nt, Artificial Sequence
  Description of Artificial Sequence: Synthetic oligonucleotide
  Sense strand starting at position 1920 of SEQ ID NO: 1882932
gcaguuuagcugccguaua

SEQ ID NO: 2158197 - RNA, 19 nt, Artificial Sequence
  Description of Artificial Sequence: Synthetic oligonucleotide
  Antisense strand to SEQ ID NO: 2158196
uauacggcagcuaaacugc

SEQ ID NO: 2158198 - RNA, 19 nt, Artificial Sequence
  Description of Artificial Sequence: Synthetic oligonucleotide
  Sense strand starting at position 1963 of SEQ ID NO: 1882932
aguaaauggcgucacacau

SEQ ID NO: 2158199 - RNA, 19 nt, Artificial Sequence
  Description of Artificial Sequence: Synthetic oligonucleotide
  Antisense strand to SEQ ID NO: 2158198
augugugacgccauuuacu

SEQ ID NO: 2158200 - RNA, 19 nt, Artificial Sequence
  Description of Artificial Sequence: Synthetic oligonucleotide
  Sense strand starting at position 2044 of SEQ ID NO: 1882932
gucgacaaauacuuugagu

SEQ ID NO: 2158201 - RNA, 19 nt, Artificial Sequence
  Description of Artificial Sequence: Synthetic oligonucleotide
  Antisense strand to SEQ ID NO: 2158200
acucaaaguauuugucgac

SEQ ID NO: 2158202 - RNA, 19 nt, Artificial Sequence
  Description of Artificial Sequence: Synthetic oligonucleotide
  Sense strand starting at position 2207 of SEQ ID NO: 1882932
uggucauaugcuuaugcaa

SEQ ID NO: 2158203 - RNA, 19 nt, Artificial Sequence
  Description of Artificial Sequence: Synthetic oligonucleotide
  Antisense strand to SEQ ID NO: 2158202
uugcauaagcauaugacca

SEQ ID NO: 2158204 - RNA, 19 nt, Artificial Sequence
  Description of Artificial Sequence: Synthetic oligonucleotide
  Sense strand starting at position 2228 of SEQ ID NO: 1882932
ccuacugugauguaggaca

SEQ ID NO: 2158205 - RNA, 19 nt, Artificial Sequence
  Description of Artificial Sequence: Synthetic oligonucleotide
  Antisense strand to SEQ ID NO: 2158204
uguccuacaucacaguagg

SEQ ID NO: 2158206 - RNA, 19 nt, Artificial Sequence
  Description of Artificial Sequence: Synthetic oligonucleotide
  Sense strand starting at position 2327 of SEQ ID NO: 1882932
augguccaucucugcaaua

SEQ ID NO: 2158207 - RNA, 19 nt, Artificial Sequence
  Description of Artificial Sequence: Synthetic oligonucleotide
  Antisense strand to SEQ ID NO: 2158206
uauugcagagauggaccau

SEQ ID NO: 2158208 - RNA, 19 nt, Artificial Sequence
  Description of Artificial Sequence: Synthetic oligonucleotide
  Sense strand starting at position 2329 of SEQ ID NO: 1882932
gguccaucucugcaauagu

SEQ ID NO: 2158209 - RNA, 19 nt, Artificial Sequence
  Description of Artificial Sequence: Synthetic oligonucleotide
  Antisense strand to SEQ ID NO: 2158208
acuauugcagagauggacc

SEQ ID NO: 2158210 - RNA, 19 nt, Artificial Sequence
  Description of Artificial Sequence: Synthetic oligonucleotide
  Sense strand starting at position 2459 of SEQ ID NO: 1882932
ugaugcaaccaaugagauu

SEQ ID NO: 2158211 - RNA, 19 nt, Artificial Sequence
  Description of Artificial Sequence: Synthetic oligonucleotide
  Antisense strand to SEQ ID NO: 2158210
aaucucauugguugcauca

SEQ ID NO: 2158212 - RNA, 19 nt, Artificial Sequence
  Description of Artificial Sequence: Synthetic oligonucleotide
  Sense strand starting at position 2482 of SEQ ID NO: 1882932
ugucaccauccuuaauguu

SEQ ID NO: 2158213 - RNA, 19 nt, Artificial Sequence
  Description of Artificial Sequence: Synthetic oligonucleotide
  Antisense strand to SEQ ID NO: 2158212
aacauuaaggauggugaca

SEQ ID NO: 2158214 - RNA, 19 nt, Artificial Sequence
  Description of Artificial Sequence: Synthetic oligonucleotide
  Sense strand starting at position 2632 of SEQ ID NO: 1882932
guguaauucuacuuacauu

SEQ ID NO: 2158215 - RNA, 19 nt, Artificial Sequence
  Description of Artificial Sequence: Synthetic oligonucleotide
  Antisense strand to SEQ ID NO: 2158214
aauguaaguagaauuacac

SEQ ID NO: 2158216 - RNA, 19 nt, Artificial Sequence
  Description of Artificial Sequence: Synthetic oligonucleotide
  Sense strand starting at position 2812 of SEQ ID NO: 1882932
cugagagcucacuguauac

SEQ ID NO: 2158217 - RNA, 19 nt, Artificial Sequence
  Description of Artificial Sequence: Synthetic oligonucleotide
  Antisense strand to SEQ ID NO: 2158216
guauacagugagcucucag

SEQ ID NO: 2158218 - RNA, 19 nt, Artificial Sequence
  Description of Artificial Sequence: Synthetic oligonucleotide
  Sense strand starting at position 2814 of SEQ ID NO: 1882932
gagagcucacuguauacca

SEQ ID NO: 2158219 - RNA, 19 nt, Artificial Sequence
  Description of Artificial Sequence: Synthetic oligonucleotide
  Antisense strand to SEQ ID NO: 2158218
ugguauacagugagcucuc

SEQ ID NO: 2158220 - RNA, 19 nt, Artificial Sequence
  Description of Artificial Sequence: Synthetic oligonucleotide
  Sense strand starting at position 2874 of SEQ ID NO: 1882932
ggaauugagugggugguua

SEQ ID NO: 2158221 - RNA, 19 nt, Artificial Sequence
  Description of Artificial Sequence: Synthetic oligonucleotide
  Antisense strand to SEQ ID NO: 2158220
uaaccacccacucaauucc

SEQ ID NO: 2158222 - RNA, 19 nt, Artificial Sequence
  Description of Artificial Sequence: Synthetic oligonucleotide
  Sense strand starting at position 2885 of SEQ ID NO: 1882932
ggugguuaugguuaaugga

SEQ ID NO: 2158223 - RNA, 19 nt, Artificial Sequence
  Description of Artificial Sequence: Synthetic oligonucleotide
  Antisense strand to SEQ ID NO: 2158222
uccauuaaccauaaccacc

SEQ ID NO: 2158224 - RNA, 19 nt, Artificial Sequence
  Description of Artificial Sequence: Synthetic oligonucleotide
  Sense strand starting at position 2953 of SEQ ID NO: 1882932
uggaaaucgaguugauaga

SEQ ID NO: 2158225 - RNA, 19 nt, Artificial Sequence
  Description of Artificial Sequence: Synthetic oligonucleotide
  Antisense strand to SEQ ID NO: 2158224
ucuaucaacucgauuucca

SEQ ID NO: 2158226 - RNA, 19 nt, Artificial Sequence
  Description of Artificial Sequence: Synthetic oligonucleotide
  Sense strand starting at position 3033 of SEQ ID NO: 1882932
uuaggaacauugucauuaa

SEQ ID NO: 2158227 - RNA, 19 nt, Artificial Sequence
  Description of Artificial Sequence: Synthetic oligonucleotide
  Antisense strand to SEQ ID NO: 2158226
uuaaugacaauguuccuaa

SEQ ID NO: 2158228 - RNA, 19 nt, Artificial Sequence
  Description of Artificial Sequence: Synthetic oligonucleotide
  Sense strand starting at position 3065 of SEQ ID NO: 1882932
ugagaagugucagugugaa

SEQ ID NO: 2158229 - RNA, 19 nt, Artificial Sequence
  Description of Artificial Sequence: Synthetic oligonucleotide
  Antisense strand to SEQ ID NO: 2158228
uucacacugacacuucuca

SEQ ID NO: 2158230 - RNA, 19 nt, Artificial Sequence
  Description of Artificial Sequence: Synthetic oligonucleotide
  Sense strand starting at position 3620 of SEQ ID NO: 1882932
cacauaaggccuggguauu

SEQ ID NO: 2158231 - RNA, 19 nt, Artificial Sequence
  Description of Artificial Sequence: Synthetic oligonucleotide
  Antisense strand to SEQ ID NO: 2158230
aauacccaggccuuaugug

SEQ ID NO: 2158232 - RNA, 19 nt, Artificial Sequence
  Description of Artificial Sequence: Synthetic oligonucleotide
  Sense strand starting at position 155 of SEQ ID NO: 1882933
cuaucaucacaguacugua

SEQ ID NO: 2158233 - RNA, 19 nt, Artificial Sequence
  Description of Artificial Sequence: Synthetic oligonucleotide
  Antisense strand to SEQ ID NO: 2158232
uacaguacugugaugauag

SEQ ID NO: 2158234 - RNA, 19 nt, Artificial Sequence
  Description of Artificial Sequence: Synthetic oligonucleotide
  Sense strand starting at position 273 of SEQ ID NO: 1882933
ucacaacaugugugaaacu

SEQ ID NO: 2158235 - RNA, 19 nt, Artificial Sequence
  Description of Artificial Sequence: Synthetic oligonucleotide
  Antisense strand to SEQ ID NO: 2158234
aguuucacacauguuguga

SEQ ID NO: 2158236 - RNA, 19 nt, Artificial Sequence
  Description of Artificial Sequence: Synthetic oligonucleotide
  Sense strand starting at position 375 of SEQ ID NO: 1882933
gccugugcucccuuaaugu

SEQ ID NO: 2158237 - RNA, 19 nt, Artificial Sequence
  Description of Artificial Sequence: Synthetic oligonucleotide
  Antisense strand to SEQ ID NO: 2158236
acauuaagggagcacaggc

SEQ ID NO: 2158238 - RNA, 19 nt, Artificial Sequence
  Description of Artificial Sequence: Synthetic oligonucleotide
  Sense strand starting at position 765 of SEQ ID NO: 1882933
agauaaugguagccaucua

SEQ ID NO: 2158239 - RNA, 19 nt, Artificial Sequence
  Description of Artificial Sequence: Synthetic oligonucleotide
  Antisense strand to SEQ ID NO: 2158238
uagauggcuaccauuaucu

SEQ ID NO: 2158240 - RNA, 19 nt, Artificial Sequence
  Description of Artificial Sequence: Synthetic oligonucleotide
  Sense strand starting at position 822 of SEQ ID NO: 1882933
ugaauaggcaagugacuua

SEQ ID NO: 2158241 - RNA, 19 nt, Artificial Sequence
  Description of Artificial Sequence: Synthetic oligonucleotide
  Antisense strand to SEQ ID NO: 2158240
uaagucacuugccuauuca

SEQ ID NO: 2158242 - RNA, 19 nt, Artificial Sequence
  Description of Artificial Sequence: Synthetic oligonucleotide
  Sense strand starting at position 930 of SEQ ID NO: 1882933
uagagaauugaucaucguu

SEQ ID NO: 2158243 - RNA, 19 nt, Artificial Sequence
  Description of Artificial Sequence: Synthetic oligonucleotide
  Antisense strand to SEQ ID NO: 2158242
aacgaugaucaauucucua

SEQ ID NO: 2158244 - RNA, 19 nt, Artificial Sequence
  Description of Artificial Sequence: Synthetic oligonucleotide
  Sense strand starting at position 933 of SEQ ID NO: 1882933
agaauugaucaucguucua

SEQ ID NO: 2158245 - RNA, 19 nt, Artificial Sequence
  Description of Artificial Sequence: Synthetic oligonucleotide
  Antisense strand to SEQ ID NO: 2158244
uagaacgaugaucaauucu

SEQ ID NO: 2158246 - RNA, 19 nt, Artificial Sequence
  Description of Artificial Sequence: Synthetic oligonucleotide
  Sense strand starting at position 1290 of SEQ ID NO: 1882933
ugauaaaggucaucuccuu

SEQ ID NO: 2158247 - RNA, 19 nt, Artificial Sequence
  Description of Artificial Sequence: Synthetic oligonucleotide
  Antisense strand to SEQ ID NO: 2158246
aaggagaugaccuuuauca

SEQ ID NO: 2158248 - RNA, 19 nt, Artificial Sequence
  Description of Artificial Sequence: Synthetic oligonucleotide
  Sense strand starting at position 1566 of SEQ ID NO: 1882933
augcuagauuugccuguua

SEQ ID NO: 2158249 - RNA, 19 nt, Artificial Sequence
  Description of Artificial Sequence: Synthetic oligonucleotide
  Antisense strand to SEQ ID NO: 2158248
uaacaggcaaaucuagcau

SEQ ID NO: 2158250 - RNA, 19 nt, Artificial Sequence
  Description of Artificial Sequence: Synthetic oligonucleotide
  Sense strand starting at position 1568 of SEQ ID NO: 1882933
gcuagauuugccuguuacu

SEQ ID NO: 2158251 - RNA, 19 nt, Artificial Sequence
  Description of Artificial Sequence: Synthetic oligonucleotide
  Antisense strand to SEQ ID NO: 2158250
aguaacaggcaaaucuagc

SEQ ID NO: 2158252 - RNA, 19 nt, Artificial Sequence
  Description of Artificial Sequence: Synthetic oligonucleotide
  Sense strand starting at position 2160 of SEQ ID NO: 1882933
guauacuuuccagacucca

SEQ ID NO: 2158253 - RNA, 19 nt, Artificial Sequence
  Description of Artificial Sequence: Synthetic oligonucleotide
  Antisense strand to SEQ ID NO: 2158252
uggagucuggaaaguauac

SEQ ID NO: 2158254 - RNA, 19 nt, Artificial Sequence
  Description of Artificial Sequence: Synthetic oligonucleotide
  Sense strand starting at position 2250 of SEQ ID NO: 1882933
gcaaauaauguguaccuua

SEQ ID NO: 2158255 - RNA, 19 nt, Artificial Sequence
  Description of Artificial Sequence: Synthetic oligonucleotide
  Antisense strand to SEQ ID NO: 2158254
uaagguacacauuauuugc

SEQ ID NO: 2158256 - RNA, 19 nt, Artificial Sequence
  Description of Artificial Sequence: Synthetic oligonucleotide
  Sense strand starting at position 2257 of SEQ ID NO: 1882933
auguguaccuuaucauaaa

SEQ ID NO: 2158257 - RNA, 19 nt, Artificial Sequence
  Description of Artificial Sequence: Synthetic oligonucleotide
  Antisense strand to SEQ ID NO: 2158256
uuuaugauaagguacacau

SEQ ID NO: 2158258 - RNA, 19 nt, Artificial Sequence
  Description of Artificial Sequence: Synthetic oligonucleotide
  Sense strand starting at position 2331 of SEQ ID NO: 1882933
aauuguacuugauugagca

SEQ ID NO: 2158259 - RNA, 19 nt, Artificial Sequence
  Description of Artificial Sequence: Synthetic oligonucleotide
  Antisense strand to SEQ ID NO: 2158258
ugcucaaucaaguacaauu

SEQ ID NO: 2158260 - RNA, 19 nt, Artificial Sequence
  Description of Artificial Sequence: Synthetic oligonucleotide
  Sense strand starting at position 2335 of SEQ ID NO: 1882933
guacuugauugagcaaaua

SEQ ID NO: 2158261 - RNA, 19 nt, Artificial Sequence
  Description of Artificial Sequence: Synthetic oligonucleotide
  Antisense strand to SEQ ID NO: 2158260
uauuugcucaaucaaguac

SEQ ID NO: 2158262 - RNA, 19 nt, Artificial Sequence
  Description of Artificial Sequence: Synthetic oligonucleotide
  Sense strand starting at position 2434 of SEQ ID NO: 1882933
aaggauaucuagcugauag

SEQ ID NO: 2158263 - RNA, 19 nt, Artificial Sequence
  Description of Artificial Sequence: Synthetic oligonucleotide
  Antisense strand to SEQ ID NO: 2158262
cuaucagcuagauauccuu

SEQ ID NO: 2158264 - RNA, 19 nt, Artificial Sequence
  Description of Artificial Sequence: Synthetic oligonucleotide
  Sense strand starting at position 2435 of SEQ ID NO: 1882933
aggauaucuagcugauagu

SEQ ID NO: 2158265 - RNA, 19 nt, Artificial Sequence
  Description of Artificial Sequence: Synthetic oligonucleotide
  Antisense strand to SEQ ID NO: 2158264
acuaucagcuagauauccu

SEQ ID NO: 2158266 - RNA, 19 nt, Artificial Sequence
  Description of Artificial Sequence: Synthetic oligonucleotide
  Sense strand starting at position 2436 of SEQ ID NO: 1882933
ggauaucuagcugauaguc

SEQ ID NO: 2158267 - RNA, 19 nt, Artificial Sequence
  Description of Artificial Sequence: Synthetic oligonucleotide
  Antisense strand to SEQ ID NO: 2158266
gacuaucagcuagauaucc

SEQ ID NO: 2158268 - RNA, 19 nt, Artificial Sequence
  Description of Artificial Sequence: Synthetic oligonucleotide
  Sense strand starting at position 2509 of SEQ ID NO: 1882933
uguuuaugauuugcccauu

SEQ ID NO: 2158269 - RNA, 19 nt, Artificial Sequence
  Description of Artificial Sequence: Synthetic oligonucleotide
  Antisense strand to SEQ ID NO: 2158268
aaugggcaaaucauaaaca

SEQ ID NO: 2158270 - RNA, 19 nt, Artificial Sequence
  Description of Artificial Sequence: Synthetic oligonucleotide
  Sense strand starting at position 2579 of SEQ ID NO: 1882933
uauaguuugcucgagaaag

SEQ ID NO: 2158271 - RNA, 19 nt, Artificial Sequence
  Description of Artificial Sequence: Synthetic oligonucleotide
  Antisense strand to SEQ ID NO: 2158270
cuuucucgagcaaacuaua

SEQ ID NO: 2158272 - RNA, 19 nt, Artificial Sequence
  Description of Artificial Sequence: Synthetic oligonucleotide
  Sense strand starting at position 2581 of SEQ ID NO: 1882933
uaguuugcucgagaaagaa

SEQ ID NO: 2158273 - RNA, 19 nt, Artificial Sequence
  Description of Artificial Sequence: Synthetic oligonucleotide
  Antisense strand to SEQ ID NO: 2158272
uucuuucucgagcaaacua

SEQ ID NO: 2158274 - RNA, 19 nt, Artificial Sequence
  Description of Artificial Sequence: Synthetic oligonucleotide
  Sense strand starting at position 2622 of SEQ ID NO: 1882933
ucauaagagucaucuagga

SEQ ID NO: 2158275 - RNA, 19 nt, Artificial Sequence
  Description of Artificial Sequence: Synthetic oligonucleotide
  Antisense strand to SEQ ID NO: 2158274
uccuagaugacucuuauga

SEQ ID NO: 2158276 - RNA, 19 nt, Artificial Sequence
  Description of Artificial Sequence: Synthetic oligonucleotide
  Sense strand starting at position 2626 of SEQ ID NO: 1882933
aagagucaucuaggauugu

SEQ ID NO: 2158277 - RNA, 19 nt, Artificial Sequence
  Description of Artificial Sequence: Synthetic oligonucleotide
  Antisense strand to SEQ ID NO: 2158276
acaauccuagaugacucuu

SEQ ID NO: 2158278 - RNA, 19 nt, Artificial Sequence
  Description of Artificial Sequence: Synthetic oligonucleotide
  Sense strand starting at position 2694 of SEQ ID NO: 1882933
gggcuauauuuguuaguuu

SEQ ID NO: 2158279 - RNA, 19 nt, Artificial Sequence
  Description of Artificial Sequence: Synthetic oligonucleotide
  Antisense strand to SEQ ID NO: 2158278
aaacuaacaaauauagccc

SEQ ID NO: 2158280 - RNA, 19 nt, Artificial Sequence
  Description of Artificial Sequence: Synthetic oligonucleotide
  Sense strand starting at position 2751 of SEQ ID NO: 1882933
auuaucagaggaugcuaua

SEQ ID NO: 2158281 - RNA, 19 nt, Artificial Sequence
  Description of Artificial Sequence: Synthetic oligonucleotide
  Antisense strand to SEQ ID NO: 2158280
uauagcauccucugauaau

SEQ ID NO: 2158282 - RNA, 19 nt, Artificial Sequence
  Description of Artificial Sequence: Synthetic oligonucleotide
  Sense strand starting at position 2893 of SEQ ID NO: 1882933
gaaggauagcuagguggau

SEQ ID NO: 2158283 - RNA, 19 nt, Artificial Sequence
  Description of Artificial Sequence: Synthetic oligonucleotide
  Antisense strand to SEQ ID NO: 2158282
auccaccuagcuauccuuc

SEQ ID NO: 2158284 - RNA, 19 nt, Artificial Sequence
  Description of Artificial Sequence: Synthetic oligonucleotide
  Sense strand starting at position 2894 of SEQ ID NO: 1882933
aaggauagcuagguggaua

SEQ ID NO: 2158285 - RNA, 19 nt, Artificial Sequence
  Description of Artificial Sequence: Synthetic oligonucleotide
  Antisense strand to SEQ ID NO: 2158284
uauccaccuagcuauccuu

SEQ ID NO: 2158286 - RNA, 19 nt, Artificial Sequence
  Description of Artificial Sequence: Synthetic oligonucleotide
  Sense strand starting at position 3001 of SEQ ID NO: 1882933
gaaucaauguuaguaguua

SEQ ID NO: 2158287 - RNA, 19 nt, Artificial Sequence
  Description of Artificial Sequence: Synthetic oligonucleotide
  Antisense strand to SEQ ID NO: 2158286
uaacuacuaacauugauuc

SEQ ID NO: 2158288 - RNA, 19 nt, Artificial Sequence
  Description of Artificial Sequence: Synthetic oligonucleotide
  Sense strand starting at position 3044 of SEQ ID NO: 1882933
gagaguaggcuuugaugga

SEQ ID NO: 2158289 - RNA, 19 nt, Artificial Sequence
  Description of Artificial Sequence: Synthetic oligonucleotide
  Antisense strand to SEQ ID NO: 2158288
uccaucaaagccuacucuc

SEQ ID NO: 2158290 - RNA, 19 nt, Artificial Sequence
  Description of Artificial Sequence: Synthetic oligonucleotide
  Sense strand starting at position 3212 of SEQ ID NO: 1882933
uguguaauggauuagcaua

SEQ ID NO: 2158291 - RNA, 19 nt, Artificial Sequence
  Description of Artificial Sequence: Synthetic oligonucleotide
  Antisense strand to SEQ ID NO: 2158290
uaugcuaauccauuacaca

SEQ ID NO: 2158292 - RNA, 19 nt, Artificial Sequence
  Description of Artificial Sequence: Synthetic oligonucleotide
  Sense strand starting at position 3214 of SEQ ID NO: 1882933
uguaauggauuagcauaga

SEQ ID NO: 2158293 - RNA, 19 nt, Artificial Sequence
  Description of Artificial Sequence: Synthetic oligonucleotide
  Antisense strand to SEQ ID NO: 2158292
ucuaugcuaauccauuaca

SEQ ID NO: 2158294 - RNA, 19 nt, Artificial Sequence
  Description of Artificial Sequence: Synthetic oligonucleotide
  Sense strand starting at position 3342 of SEQ ID NO: 1882933
cccuguauuauugggaaag

SEQ ID NO: 2158295 - RNA, 19 nt, Artificial Sequence
  Description of Artificial Sequence: Synthetic oligonucleotide
  Antisense strand to SEQ ID NO: 2158294
cuuucccaauaauacaggg

SEQ ID NO: 2158296 - RNA, 19 nt, Artificial Sequence
  Description of Artificial Sequence: Synthetic oligonucleotide
  Sense strand starting at position 3373 of SEQ ID NO: 1882933
uugugaguuaugcaugaga

SEQ ID NO: 2158297 - RNA, 19 nt, Artificial Sequence
  Description of Artificial Sequence: Synthetic oligonucleotide
  Antisense strand to SEQ ID NO: 2158296
ucucaugcauaacucacaa

SEQ ID NO: 2158298 - RNA, 19 nt, Artificial Sequence
  Description of Artificial Sequence: Synthetic oligonucleotide
  Sense strand starting at position 3376 of SEQ ID NO: 1882933
ugaguuaugcaugagaugu

SEQ ID NO: 2158299 - RNA, 19 nt, Artificial Sequence
  Description of Artificial Sequence: Synthetic oligonucleotide
  Antisense strand to SEQ ID NO: 2158298
acaucucaugcauaacuca

SEQ ID NO: 2158300 - RNA, 19 nt, Artificial Sequence
  Description of Artificial Sequence: Synthetic oligonucleotide
  Sense strand starting at position 3465 of SEQ ID NO: 1882933
gcaacugaucaagaggcua

SEQ ID NO: 2158301 - RNA, 19 nt, Artificial Sequence
  Description of Artificial Sequence: Synthetic oligonucleotide
  Antisense strand to SEQ ID NO: 2158300
uagccucuugaucaguugc

SEQ ID NO: 2158302 - RNA, 19 nt, Artificial Sequence
  Description of Artificial Sequence: Synthetic oligonucleotide
  Sense strand starting at position 3509 of SEQ ID NO: 1882933
agcgucuguauguucucaa

SEQ ID NO: 2158303 - RNA, 19 nt, Artificial Sequence
  Description of Artificial Sequence: Synthetic oligonucleotide
  Antisense strand to SEQ ID NO: 2158302
uugagaacauacagacgcu

SEQ ID NO: 2158304 - RNA, 19 nt, Artificial Sequence
  Description of Artificial Sequence: Synthetic oligonucleotide
  Sense strand starting at position 3583 of SEQ ID NO: 1882933
uugcuuaggguccaaagau

SEQ ID NO: 2158305 - RNA, 19 nt, Artificial Sequence
  Description of Artificial Sequence: Synthetic oligonucleotide
  Antisense strand to SEQ ID NO: 2158304
aucuuuggacccuaagcaa

SEQ ID NO: 2158306 - RNA, 19 nt, Artificial Sequence
  Description of Artificial Sequence: Synthetic oligonucleotide
  Sense strand starting at position 3674 of SEQ ID NO: 1882933
ggcacagcacauuauagau

SEQ ID NO: 2158307 - RNA, 19 nt, Artificial Sequence
  Description of Artificial Sequence: Synthetic oligonucleotide
  Antisense strand to SEQ ID NO: 2158306
aucuauaaugugcugugcc

SEQ ID NO: 2158308 - RNA, 19 nt, Artificial Sequence
  Description of Artificial Sequence: Synthetic oligonucleotide
  Sense strand starting at position 3768 of SEQ ID NO: 1882933
caaauuugccuacguggua

SEQ ID NO: 2158309 - RNA, 19 nt, Artificial Sequence
  Description of Artificial Sequence: Synthetic oligonucleotide
  Antisense strand to SEQ ID NO: 2158308
uaccacguaggcaaauuug

SEQ ID NO: 2158310 - RNA, 19 nt, Artificial Sequence
  Description of Artificial Sequence: Synthetic oligonucleotide
  Sense strand starting at position 3769 of SEQ ID NO: 1882933
aaauuugccuacgugguaa

SEQ ID NO: 2158311 - RNA, 19 nt, Artificial Sequence
  Description of Artificial Sequence: Synthetic oligonucleotide
  Antisense strand to SEQ ID NO: 2158310
uuaccacguaggcaaauuu

SEQ ID NO: 2158312 - RNA, 19 nt, Artificial Sequence
  Description of Artificial Sequence: Synthetic oligonucleotide
  Sense strand starting at position 98 of SEQ ID NO: 1882934
gggagcuuaugcuuccaga

SEQ ID NO: 2158313 - RNA, 19 nt, Artificial Sequence
  Description of Artificial Sequence: Synthetic oligonucleotide
  Antisense strand to SEQ ID NO: 2158312
ucuggaagcauaagcuccc

SEQ ID NO: 2158314 - RNA, 19 nt, Artificial Sequence
  Description of Artificial Sequence: Synthetic oligonucleotide
  Sense strand starting at position 101 of SEQ ID NO: 1882934
agcuuaugcuuccagaguu

SEQ ID NO: 2158315 - RNA, 19 nt, Artificial Sequence
  Description of Artificial Sequence: Synthetic oligonucleotide
  Antisense strand to SEQ ID NO: 2158314
aacucuggaagcauaagcu

SEQ ID NO: 2158316 - RNA, 19 nt, Artificial Sequence
  Description of Artificial Sequence: Synthetic oligonucleotide
  Sense strand starting at position 462 of SEQ ID NO: 1882934
ccuccaucucagggaaucu

SEQ ID NO: 2158317 - RNA, 19 nt, Artificial Sequence
  Description of Artificial Sequence: Synthetic oligonucleotide
  Antisense strand to SEQ ID NO: 2158316
agauucccugagauggagg

SEQ ID NO: 2158318 - RNA, 19 nt, Artificial Sequence
  Description of Artificial Sequence: Synthetic oligonucleotide
  Sense strand starting at position 496 of SEQ ID NO: 1882934
cuggaagccuccuggaauc

SEQ ID NO: 2158319 - RNA, 19 nt, Artificial Sequence
  Description of Artificial Sequence: Synthetic oligonucleotide
  Antisense strand to SEQ ID NO: 2158318
gauuccaggaggcuuccag

SEQ ID NO: 2158320 - RNA, 19 nt, Artificial Sequence
  Description of Artificial Sequence: Synthetic oligonucleotide
  Sense strand starting at position 1180 of SEQ ID NO: 1882934
aggugcuuguaauccuagu

SEQ ID NO: 2158321 - RNA, 19 nt, Artificial Sequence
  Description of Artificial Sequence: Synthetic oligonucleotide
  Antisense strand to SEQ ID NO: 2158320
acuaggauuacaagcaccu

SEQ ID NO: 2158322 - RNA, 19 nt, Artificial Sequence
  Description of Artificial Sequence: Synthetic oligonucleotide
  Sense strand starting at position 2013 of SEQ ID NO: 1882934
ccugacauuucucguacaa

SEQ ID NO: 2158323 - RNA, 19 nt, Artificial Sequence
  Description of Artificial Sequence: Synthetic oligonucleotide
  Antisense strand to SEQ ID NO: 2158322
uuguacgagaaaugucagg

SEQ ID NO: 2158324 - RNA, 19 nt, Artificial Sequence
  Description of Artificial Sequence: Synthetic oligonucleotide
  Sense strand starting at position 2015 of SEQ ID NO: 1882934
ugacauuucucguacaagu

SEQ ID NO: 2158325 - RNA, 19 nt, Artificial Sequence
  Description of Artificial Sequence: Synthetic oligonucleotide
  Antisense strand to SEQ ID NO: 2158324
acuuguacgagaaauguca

SEQ ID NO: 2158326 - RNA, 19 nt, Artificial Sequence
  Description of Artificial Sequence: Synthetic oligonucleotide
  Sense strand starting at position 2091 of SEQ ID NO: 1882934
ucgccuaggcgcgaucaua

SEQ ID NO: 2158327 - RNA, 19 nt, Artificial Sequence
  Description of Artificial Sequence: Synthetic oligonucleotide
  Antisense strand to SEQ ID NO: 2158326
uaugaucgcgccuaggcga

SEQ ID NO: 2158328 - RNA, 19 nt, Artificial Sequence
  Description of Artificial Sequence: Synthetic oligonucleotide
  Sense strand starting at position 2294 of SEQ ID NO: 1882934
cuaggaugcucuuccugau

SEQ ID NO: 2158329 - RNA, 19 nt, Artificial Sequence
  Description of Artificial Sequence: Synthetic oligonucleotide
  Antisense strand to SEQ ID NO: 2158328
aucaggaagagcauccuag

SEQ ID NO: 2158330 - RNA, 19 nt, Artificial Sequence
  Description of Artificial Sequence: Synthetic oligonucleotide
  Sense strand starting at position 2931 of SEQ ID NO: 1882934
cccgaaguccuucgggaau

SEQ ID NO: 2158331 - RNA, 19 nt, Artificial Sequence
  Description of Artificial Sequence: Synthetic oligonucleotide
  Antisense strand to SEQ ID NO: 2158330
auucccgaaggacuucggg

SEQ ID NO: 2158332 - RNA, 19 nt, Artificial Sequence
  Description of Artificial Sequence: Synthetic oligonucleotide
  Sense strand starting at position 2968 of SEQ ID NO: 1882934
ggaccugucugaucugcga

SEQ ID NO: 2158333 - RNA, 19 nt, Artificial Sequence
  Description of Artificial Sequence: Synthetic oligonucleotide
  Antisense strand to SEQ ID NO: 2158332
ucgcagaucagacaggucc

SEQ ID NO: 2158334 - RNA, 19 nt, Artificial Sequence
  Description of Artificial Sequence: Synthetic oligonucleotide
  Sense strand starting at position 3116 of SEQ ID NO: 1882934
gaucgaagccugugaggga

SEQ ID NO: 2158335 - RNA, 19 nt, Artificial Sequence
  Description of Artificial Sequence: Synthetic oligonucleotide
  Antisense strand to SEQ ID NO: 2158334
ucccucacaggcuucgauc

SEQ ID NO: 2158336 - RNA, 19 nt, Artificial Sequence
  Description of Artificial Sequence: Synthetic oligonucleotide
  Sense strand starting at position 3214 of SEQ ID NO: 1882934
guggguggguucgauuaca

SEQ ID NO: 2158337 - RNA, 19 nt, Artificial Sequence
  Description of Artificial Sequence: Synthetic oligonucleotide
  Antisense strand to SEQ ID NO: 2158336
uguaaucgaacccacccac

SEQ ID NO: 2158338 - RNA, 19 nt, Artificial Sequence
  Description of Artificial Sequence: Synthetic oligonucleotide
  Sense strand starting at position 3217 of SEQ ID NO: 1882934
gguggguucgauuacaggu

SEQ ID NO: 2158339 - RNA, 19 nt, Artificial Sequence
  Description of Artificial Sequence: Synthetic oligonucleotide
  Antisense strand to SEQ ID NO: 2158338
accuguaaucgaacccacc

SEQ ID NO: 2158340 - RNA, 19 nt, Artificial Sequence
  Description of Artificial Sequence: Synthetic oligonucleotide
  Sense strand starting at position 3254 of SEQ ID NO: 1882934
gggaucugccuguaaaccu

SEQ ID NO: 2158341 - RNA, 19 nt, Artificial Sequence
  Description of Artificial Sequence: Synthetic oligonucleotide
  Antisense strand to SEQ ID NO: 2158340
agguuuacaggcagauccc

SEQ ID NO: 2158342 - RNA, 19 nt, Artificial Sequence
  Description of Artificial Sequence: Synthetic oligonucleotide
  Sense strand starting at position 3261 of SEQ ID NO: 1882934
gccuguaaaccucgacgua

SEQ ID NO: 2158343 - RNA, 19 nt, Artificial Sequence
  Description of Artificial Sequence: Synthetic oligonucleotide
  Antisense strand to SEQ ID NO: 2158342
uacgucgagguuuacaggc

SEQ ID NO: 2158344 - RNA, 19 nt, Artificial Sequence
  Description of Artificial Sequence: Synthetic oligonucleotide
  Sense strand starting at position 3404 of SEQ ID NO: 1882934
gacagugaauuccaguuaa

SEQ ID NO: 2158345 - RNA, 19 nt, Artificial Sequence
  Description of Artificial Sequence: Synthetic oligonucleotide
  Antisense strand to SEQ ID NO: 2158344
uuaacuggaauucacuguc

SEQ ID NO: 2158346 - RNA, 19 nt, Artificial Sequence
  Description of Artificial Sequence: Synthetic oligonucleotide
  Sense strand starting at position 3647 of SEQ ID NO: 1882934
guggauuggugaugccuca

SEQ ID NO: 2158347 - RNA, 19 nt, Artificial Sequence
  Description of Artificial Sequence: Synthetic oligonucleotide
  Antisense strand to SEQ ID NO: 2158346
ugaggcaucaccaauccac

SEQ ID NO: 2158348 - RNA, 19 nt, Artificial Sequence
  Description of Artificial Sequence: Synthetic oligonucleotide
  Sense strand starting at position 3654 of SEQ ID NO: 1882934
ggugaugccucaggugaga

SEQ ID NO: 2158349 - RNA, 19 nt, Artificial Sequence
  Description of Artificial Sequence: Synthetic oligonucleotide
  Antisense strand to SEQ ID NO: 2158348
ucucaccugaggcaucacc

SEQ ID NO: 2158350 - RNA, 19 nt, Artificial Sequence
  Description of Artificial Sequence: Synthetic oligonucleotide
  Sense strand starting at position 3656 of SEQ ID NO: 1882934
ugaugccucaggugagaga

SEQ ID NO: 2158351 - RNA, 19 nt, Artificial Sequence
  Description of Artificial Sequence: Synthetic oligonucleotide
  Antisense strand to SEQ ID NO: 2158350
ucucucaccugaggcauca

SEQ ID NO: 2158352 - RNA, 19 nt, Artificial Sequence
  Description of Artificial Sequence: Synthetic oligonucleotide
  Sense strand starting at position 3768 of SEQ ID NO: 1882934
uggagagcucuugaagggu

SEQ ID NO: 2158353 - RNA, 19 nt, Artificial Sequence
  Description of Artificial Sequence: Synthetic oligonucleotide
  Antisense strand to SEQ ID NO: 2158352
acccuucaagagcucucca

SEQ ID NO: 2158354 - RNA, 19 nt, Artificial Sequence
  Description of Artificial Sequence: Synthetic oligonucleotide
  Sense strand starting at position 3794 of SEQ ID NO: 1882934
gagugaugaagucaaaugu

SEQ ID NO: 2158355 - RNA, 19 nt, Artificial Sequence
  Description of Artificial Sequence: Synthetic oligonucleotide
  Antisense strand to SEQ ID NO: 2158354
acauuugacuucaucacuc

SEQ ID NO: 2158356 - RNA, 19 nt, Artificial Sequence
  Description of Artificial Sequence: Synthetic oligonucleotide
  Sense strand starting at position 3818 of SEQ ID NO: 1882934
uuagaaagauccugggaag

SEQ ID NO: 2158357 - RNA, 19 nt, Artificial Sequence
  Description of Artificial Sequence: Synthetic oligonucleotide
  Antisense strand to SEQ ID NO: 2158356
cuucccaggaucuuucuaa

SEQ ID NO: 2158358 - RNA, 19 nt, Artificial Sequence
  Description of Artificial Sequence: Synthetic oligonucleotide
  Sense strand starting at position 3821 of SEQ ID NO: 1882934
gaaagauccugggaaggga

SEQ ID NO: 2158359 - RNA, 19 nt, Artificial Sequence
  Description of Artificial Sequence: Synthetic oligonucleotide
  Antisense strand to SEQ ID NO: 2158358
ucccuucccaggaucuuuc

SEQ ID NO: 2158360 - RNA, 19 nt, Artificial Sequence
  Description of Artificial Sequence: Synthetic oligonucleotide
  Sense strand starting at position 3865 of SEQ ID NO: 1882934
cugguaagccagugaagac

SEQ ID NO: 2158361 - RNA, 19 nt, Artificial Sequence
  Description of Artificial Sequence: Synthetic oligonucleotide
  Antisense strand to SEQ ID NO: 2158360
gucuucacuggcuuaccag

SEQ ID NO: 2158362 - RNA, 19 nt, Artificial Sequence
  Description of Artificial Sequence: Synthetic oligonucleotide
  Sense strand starting at position 3866 of SEQ ID NO: 1882934
ugguaagccagugaagacu

SEQ ID NO: 2158363 - RNA, 19 nt, Artificial Sequence
  Description of Artificial Sequence: Synthetic oligonucleotide
  Antisense strand to SEQ ID NO: 2158362
agucuucacuggcuuacca

SEQ ID NO: 2158364 - RNA, 19 nt, Artificial Sequence
  Description of Artificial Sequence: Synthetic oligonucleotide
  Sense strand starting at position 3907 of SEQ ID NO: 1882934
ugcccaagguccuauggaa

SEQ ID NO: 2158365 - RNA, 19 nt, Artificial Sequence
  Description of Artificial Sequence: Synthetic oligonucleotide
  Antisense strand to SEQ ID NO: 2158364
uuccauaggaccuugggca

SEQ ID NO: 2158366 - RNA, 19 nt, Artificial Sequence
  Description of Artificial Sequence: Synthetic oligonucleotide
  Sense strand starting at position 69 of SEQ ID NO: 1882935
auuuaucacguuuguauga

SEQ ID NO: 2158367 - RNA, 19 nt, Artificial Sequence
  Description of Artificial Sequence: Synthetic oligonucleotide
  Antisense strand to SEQ ID NO: 2158366
ucauacaaacgugauaaau

SEQ ID NO: 2158368 - RNA, 19 nt, Artificial Sequence
  Description of Artificial Sequence: Synthetic oligonucleotide
  Sense strand starting at position 84 of SEQ ID NO: 1882935
augauaacucgguagugag

SEQ ID NO: 2158369 - RNA, 19 nt, Artificial Sequence
  Description of Artificial Sequence: Synthetic oligonucleotide
  Antisense strand to SEQ ID NO: 2158368
cucacuaccgaguuaucau

SEQ ID NO: 2158370 - RNA, 19 nt, Artificial Sequence
  Description of Artificial Sequence: Synthetic oligonucleotide
  Sense strand starting at position 131 of SEQ ID NO: 1882935
gaguuuauggcagauaguc

SEQ ID NO: 2158371 - RNA, 19 nt, Artificial Sequence
  Description of Artificial Sequence: Synthetic oligonucleotide
  Antisense strand to SEQ ID NO: 2158370
gacuaucugccauaaacuc

SEQ ID NO: 2158372 - RNA, 19 nt, Artificial Sequence
  Description of Artificial Sequence: Synthetic oligonucleotide
  Sense strand starting at position 139 of SEQ ID NO: 1882935
ggcagauagucgaaggaga

SEQ ID NO: 2158373 - RNA, 19 nt, Artificial Sequence
  Description of Artificial Sequence: Synthetic oligonucleotide
  Antisense strand to SEQ ID NO: 2158372
ucuccuucgacuaucugcc

SEQ ID NO: 2158374 - RNA, 19 nt, Artificial Sequence
  Description of Artificial Sequence: Synthetic oligonucleotide
  Sense strand starting at position 282 of SEQ ID NO: 1882935
gguuucaucgaggaaguag

SEQ ID NO: 2158375 - RNA, 19 nt, Artificial Sequence
  Description of Artificial Sequence: Synthetic oligonucleotide
  Antisense strand to SEQ ID NO: 2158374
cuacuuccucgaugaaacc

SEQ ID NO: 2158376 - RNA, 19 nt, Artificial Sequence
  Description of Artificial Sequence: Synthetic oligonucleotide
  Sense strand starting at position 293 of SEQ ID NO: 1882935
ggaaguaggguucauaugu

SEQ ID NO: 2158377 - RNA, 19 nt, Artificial Sequence
  Description of Artificial Sequence: Synthetic oligonucleotide
  Antisense strand to SEQ ID NO: 2158376
acauaugaacccuacuucc

SEQ ID NO: 2158378 - RNA, 19 nt, Artificial Sequence
  Description of Artificial Sequence: Synthetic oligonucleotide
  Sense strand starting at position 340 of SEQ ID NO: 1882935
uguuaucagguacagacau

SEQ ID NO: 2158379 - RNA, 19 nt, Artificial Sequence
  Description of Artificial Sequence: Synthetic oligonucleotide
  Antisense strand to SEQ ID NO: 2158378
augucuguaccugauaaca

SEQ ID NO: 2158380 - RNA, 19 nt, Artificial Sequence
  Description of Artificial Sequence: Synthetic oligonucleotide
  Sense strand starting at position 710 of SEQ ID NO: 1882935
guaacacuacuguauauua

SEQ ID NO: 2158381 - RNA, 19 nt, Artificial Sequence
  Description of Artificial Sequence: Synthetic oligonucleotide
  Antisense strand to SEQ ID NO: 2158380
uaauauacaguaguguuac

SEQ ID NO: 2158382 - RNA, 19 nt, Artificial Sequence
  Description of Artificial Sequence: Synthetic oligonucleotide
  Sense strand starting at position 755 of SEQ ID NO: 1882935
uagcacuaagauugguaua

SEQ ID NO: 2158383 - RNA, 19 nt, Artificial Sequence
  Description of Artificial Sequence: Synthetic oligonucleotide
  Antisense strand to SEQ ID NO: 2158382
uauaccaaucuuagugcua

SEQ ID NO: 2158384 - RNA, 19 nt, Artificial Sequence
  Description of Artificial Sequence: Synthetic oligonucleotide
  Sense strand starting at position 765 of SEQ ID NO: 1882935
auugguauaugauuguaac

SEQ ID NO: 2158385 - RNA, 19 nt, Artificial Sequence
  Description of Artificial Sequence: Synthetic oligonucleotide
  Antisense strand to SEQ ID NO: 2158384
guuacaaucauauaccaau

SEQ ID NO: 2158386 - RNA, 19 nt, Artificial Sequence
  Description of Artificial Sequence: Synthetic oligonucleotide
  Sense strand starting at position 812 of SEQ ID NO: 1882935
uuguauuugccuuaguuac

SEQ ID NO: 2158387 - RNA, 19 nt, Artificial Sequence
  Description of Artificial Sequence: Synthetic oligonucleotide
  Antisense strand to SEQ ID NO: 2158386
guaacuaaggcaaauacaa

SEQ ID NO: 2158388 - RNA, 19 nt, Artificial Sequence
  Description of Artificial Sequence: Synthetic oligonucleotide
  Sense strand starting at position 858 of SEQ ID NO: 1882935
uucuuaguuccuguguguu

SEQ ID NO: 2158389 - RNA, 19 nt, Artificial Sequence
  Description of Artificial Sequence: Synthetic oligonucleotide
  Antisense strand to SEQ ID NO: 2158388
aacacacaggaacuaagaa

SEQ ID NO: 2158390 - RNA, 19 nt, Artificial Sequence
  Description of Artificial Sequence: Synthetic oligonucleotide
  Sense strand starting at position 1062 of SEQ ID NO: 1882935
cuacaauugcuuugaaaug

SEQ ID NO: 2158391 - RNA, 19 nt, Artificial Sequence
  Description of Artificial Sequence: Synthetic oligonucleotide
  Antisense strand to SEQ ID NO: 2158390
cauuucaaagcaauuguag

SEQ ID NO: 2158392 - RNA, 19 nt, Artificial Sequence
  Description of Artificial Sequence: Synthetic oligonucleotide
  Sense strand starting at position 1073 of SEQ ID NO: 1882935
uugaaauguauguauguca

SEQ ID NO: 2158393 - RNA, 19 nt, Artificial Sequence
  Description of Artificial Sequence: Synthetic oligonucleotide
  Antisense strand to SEQ ID NO: 2158392
ugacauacauacauuucaa

SEQ ID NO: 2158394 - RNA, 19 nt, Artificial Sequence
  Description of Artificial Sequence: Synthetic oligonucleotide
  Sense strand starting at position 1154 of SEQ ID NO: 1882935
gcuuaagaucuugaucuuu

SEQ ID NO: 2158395 - RNA, 19 nt, Artificial Sequence
  Description of Artificial Sequence: Synthetic oligonucleotide
  Antisense strand to SEQ ID NO: 2158394
aaagaucaagaucuuaagc

SEQ ID NO: 2158396 - RNA, 19 nt, Artificial Sequence
  Description of Artificial Sequence: Synthetic oligonucleotide
  Sense strand starting at position 1348 of SEQ ID NO: 1882935
uugcauauuucuucuguua

SEQ ID NO: 2158397 - RNA, 19 nt, Artificial Sequence
  Description of Artificial Sequence: Synthetic oligonucleotide
  Antisense strand to SEQ ID NO: 2158396
uaacagaagaaauaugcaa

SEQ ID NO: 2158398 - RNA, 19 nt, Artificial Sequence
  Description of Artificial Sequence: Synthetic oligonucleotide
  Sense strand starting at position 1418 of SEQ ID NO: 1882935
acacauccuuuaguuuaga

SEQ ID NO: 2158399 - RNA, 19 nt, Artificial Sequence
  Description of Artificial Sequence: Synthetic oligonucleotide
  Antisense strand to SEQ ID NO: 2158398
ucuaaacuaaaggaugugu

SEQ ID NO: 2158400 - RNA, 19 nt, Artificial Sequence
  Description of Artificial Sequence: Synthetic oligonucleotide
  Sense strand starting at position 1550 of SEQ ID NO: 1882935
guuuauuuagcuugguaua

SEQ ID NO: 2158401 - RNA, 19 nt, Artificial Sequence
  Description of Artificial Sequence: Synthetic oligonucleotide
  Antisense strand to SEQ ID NO: 2158400
uauaccaagcuaaauaaac

SEQ ID NO: 2158402 - RNA, 19 nt, Artificial Sequence
  Description of Artificial Sequence: Synthetic oligonucleotide
  Sense strand starting at position 1551 of SEQ ID NO: 1882935
uuuauuuagcuugguauac

SEQ ID NO: 2158403 - RNA, 19 nt, Artificial Sequence
  Description of Artificial Sequence: Synthetic oligonucleotide
  Antisense strand to SEQ ID NO: 2158402
guauaccaagcuaaauaaa

SEQ ID NO: 2158404 - RNA, 19 nt, Artificial Sequence
  Description of Artificial Sequence: Synthetic oligonucleotide
  Sense strand starting at position 1566 of SEQ ID NO: 1882935
auacaagucuauguugaaa

SEQ ID NO: 2158405 - RNA, 19 nt, Artificial Sequence
  Description of Artificial Sequence: Synthetic oligonucleotide
  Antisense strand to SEQ ID NO: 2158404
uuucaacauagacuuguau

SEQ ID NO: 2158406 - RNA, 19 nt, Artificial Sequence
  Description of Artificial Sequence: Synthetic oligonucleotide
  Sense strand starting at position 1569 of SEQ ID NO: 1882935
caagucuauguugaaaguu

SEQ ID NO: 2158407 - RNA, 19 nt, Artificial Sequence
  Description of Artificial Sequence: Synthetic oligonucleotide
  Antisense strand to SEQ ID NO: 2158406
aacuuucaacauagacuug

SEQ ID NO: 2158408 - RNA, 19 nt, Artificial Sequence
  Description of Artificial Sequence: Synthetic oligonucleotide
  Sense strand starting at position 1606 of SEQ ID NO: 1882935
ugaguauauuauccuacua

SEQ ID NO: 2158409 - RNA, 19 nt, Artificial Sequence
  Description of Artificial Sequence: Synthetic oligonucleotide
  Antisense strand to SEQ ID NO: 2158408
uaguaggauaauauacuca

SEQ ID NO: 2158410 - RNA, 19 nt, Artificial Sequence
  Description of Artificial Sequence: Synthetic oligonucleotide
  Sense strand starting at position 1727 of SEQ ID NO: 1882935
cgugguaaugugcuguuau

SEQ ID NO: 2158411 - RNA, 19 nt, Artificial Sequence
  Description of Artificial Sequence: Synthetic oligonucleotide
  Antisense strand to SEQ ID NO: 2158410
auaacagcacauuaccacg

SEQ ID NO: 2158412 - RNA, 19 nt, Artificial Sequence
  Description of Artificial Sequence: Synthetic oligonucleotide
  Sense strand starting at position 1979 of SEQ ID NO: 1882935
ccaaccuaauacguuagaa

SEQ ID NO: 2158413 - RNA, 19 nt, Artificial Sequence
  Description of Artificial Sequence: Synthetic oligonucleotide
  Antisense strand to SEQ ID NO: 2158412
uucuaacguauuagguugg

SEQ ID NO: 2158414 - RNA, 19 nt, Artificial Sequence
  Description of Artificial Sequence: Synthetic oligonucleotide
  Sense strand starting at position 2181 of SEQ ID NO: 1882935
gguauauaauaggucuaua

SEQ ID NO: 2158415 - RNA, 19 nt, Artificial Sequence
  Description of Artificial Sequence: Synthetic oligonucleotide
  Antisense strand to SEQ ID NO: 2158414
uauagaccuauuauauacc

SEQ ID NO: 2158416 - RNA, 19 nt, Artificial Sequence
  Description of Artificial Sequence: Synthetic oligonucleotide
  Sense strand starting at position 2209 of SEQ ID NO: 1882935
gcuacauaagaaugucuaa

SEQ ID NO: 2158417 - RNA, 19 nt, Artificial Sequence
  Description of Artificial Sequence: Synthetic oligonucleotide
  Antisense strand to SEQ ID NO: 2158416
uuagacauucuuauguagc

SEQ ID NO: 2158418 - RNA, 19 nt, Artificial Sequence
  Description of Artificial Sequence: Synthetic oligonucleotide
  Sense strand starting at position 2451 of SEQ ID NO: 1882935
gagauaguugaaugauggu

SEQ ID NO: 2158419 - RNA, 19 nt, Artificial Sequence
  Description of Artificial Sequence: Synthetic oligonucleotide
  Antisense strand to SEQ ID NO: 2158418
accaucauucaacuaucuc

SEQ ID NO: 2158420 - RNA, 19 nt, Artificial Sequence
  Description of Artificial Sequence: Synthetic oligonucleotide
  Sense strand starting at position 2500 of SEQ ID NO: 1882935
gugggaaauggugacaguu

SEQ ID NO: 2158421 - RNA, 19 nt, Artificial Sequence
  Description of Artificial Sequence: Synthetic oligonucleotide
  Antisense strand to SEQ ID NO: 2158420
aacugucaccauuucccac

SEQ ID NO: 2158422 - RNA, 19 nt, Artificial Sequence
  Description of Artificial Sequence: Synthetic oligonucleotide
  Sense strand starting at position 2538 of SEQ ID NO: 1882935
uuggauagaauguguaaga

SEQ ID NO: 2158423 - RNA, 19 nt, Artificial Sequence
  Description of Artificial Sequence: Synthetic oligonucleotide
  Antisense strand to SEQ ID NO: 2158422
ucuuacacauucuauccaa

SEQ ID NO: 2158424 - RNA, 19 nt, Artificial Sequence
  Description of Artificial Sequence: Synthetic oligonucleotide
  Sense strand starting at position 2539 of SEQ ID NO: 1882935
uggauagaauguguaagau

SEQ ID NO: 2158425 - RNA, 19 nt, Artificial Sequence
  Description of Artificial Sequence: Synthetic oligonucleotide
  Antisense strand to SEQ ID NO: 2158424
aucuuacacauucuaucca

SEQ ID NO: 2158426 - RNA, 19 nt, Artificial Sequence
  Description of Artificial Sequence: Synthetic oligonucleotide
  Sense strand starting at position 2898 of SEQ ID NO: 1882935
gacaucugaugguuauaag

SEQ ID NO: 2158427 - RNA, 19 nt, Artificial Sequence
  Description of Artificial Sequence: Synthetic oligonucleotide
  Antisense strand to SEQ ID NO: 2158426
cuuauaaccaucagauguc

SEQ ID NO: 2158428 - RNA, 19 nt, Artificial Sequence
  Description of Artificial Sequence: Synthetic oligonucleotide
  Sense strand starting at position 2916 of SEQ ID NO: 1882935
gggacuuucccucaccuuu

SEQ ID NO: 2158429 - RNA, 19 nt, Artificial Sequence
  Description of Artificial Sequence: Synthetic oligonucleotide
  Antisense strand to SEQ ID NO: 2158428
aaaggugagggaaaguccc

SEQ ID NO: 2158430 - RNA, 19 nt, Artificial Sequence
  Description of Artificial Sequence: Synthetic oligonucleotide
  Sense strand starting at position 3081 of SEQ ID NO: 1882935
cuguauuagcaguaugaga

SEQ ID NO: 2158431 - RNA, 19 nt, Artificial Sequence
  Description of Artificial Sequence: Synthetic oligonucleotide
  Antisense strand to SEQ ID NO: 2158430
ucucauacugcuaauacag

SEQ ID NO: 2158432 - RNA, 19 nt, Artificial Sequence
  Description of Artificial Sequence: Synthetic oligonucleotide
  Sense strand starting at position 3102 of SEQ ID NO: 1882935
agccuauuacaguauaucu

SEQ ID NO: 2158433 - RNA, 19 nt, Artificial Sequence
  Description of Artificial Sequence: Synthetic oligonucleotide
  Antisense strand to SEQ ID NO: 2158432
agauauacuguaauaggcu

SEQ ID NO: 2158434 - RNA, 19 nt, Artificial Sequence
  Description of Artificial Sequence: Synthetic oligonucleotide
  Sense strand starting at position 3429 of SEQ ID NO: 1882935
gguuauauccaauagucag

SEQ ID NO: 2158435 - RNA, 19 nt, Artificial Sequence
  Description of Artificial Sequence: Synthetic oligonucleotide
  Antisense strand to SEQ ID NO: 2158434
cugacuauuggauauaacc

SEQ ID NO: 2158436 - RNA, 19 nt, Artificial Sequence
  Description of Artificial Sequence: Synthetic oligonucleotide
  Sense strand starting at position 3562 of SEQ ID NO: 1882935
uuugcugacuaguuaauuu

SEQ ID NO: 2158437 - RNA, 19 nt, Artificial Sequence
  Description of Artificial Sequence: Synthetic oligonucleotide
  Antisense strand to SEQ ID NO: 2158436
aaauuaacuagucagcaaa

SEQ ID NO: 2158438 - RNA, 19 nt, Artificial Sequence
  Description of Artificial Sequence: Synthetic oligonucleotide
  Sense strand starting at position 3668 of SEQ ID NO: 1882935
acaggucuauuacuugauu

SEQ ID NO: 2158439 - RNA, 19 nt, Artificial Sequence
  Description of Artificial Sequence: Synthetic oligonucleotide
  Antisense strand to SEQ ID NO: 2158438
aaucaaguaauagaccugu

SEQ ID NO: 2158440 - RNA, 19 nt, Artificial Sequence
  Description of Artificial Sequence: Synthetic oligonucleotide
  Sense strand starting at position 3829 of SEQ ID NO: 1882935
uuuacuggaugcucagaua

SEQ ID NO: 2158441 - RNA, 19 nt, Artificial Sequence
  Description of Artificial Sequence: Synthetic oligonucleotide
  Antisense strand to SEQ ID NO: 2158440
uaucugagcauccaguaaa

SEQ ID NO: 2158442 - RNA, 19 nt, Artificial Sequence
  Description of Artificial Sequence: Synthetic oligonucleotide
  Sense strand starting at position 3937 of SEQ ID NO: 1882935
uaggaaauguaauccuuag

SEQ ID NO: 2158443 - RNA, 19 nt, Artificial Sequence
  Description of Artificial Sequence: Synthetic oligonucleotide
  Antisense strand to SEQ ID NO: 2158442
cuaaggauuacauuuccua

SEQ ID NO: 2158444 - RNA, 19 nt, Artificial Sequence
  Description of Artificial Sequence: Synthetic oligonucleotide
  Sense strand starting at position 3948 of SEQ ID NO: 1882935
auccuuagagauuauuguu

SEQ ID NO: 2158445 - RNA, 19 nt, Artificial Sequence
  Description of Artificial Sequence: Synthetic oligonucleotide
  Antisense strand to SEQ ID NO: 2158444
aacaauaaucucuaaggau

SEQ ID NO: 2158446 - RNA, 19 nt, Artificial Sequence
  Description of Artificial Sequence: Synthetic oligonucleotide
  Sense strand starting at position 2 of SEQ ID NO: 1882936
acaggcuauacuggugaaa

SEQ ID NO: 2158447 - RNA, 19 nt, Artificial Sequence
  Description of Artificial Sequence: Synthetic oligonucleotide
  Antisense strand to SEQ ID NO: 2158446
uuucaccaguauagccugu

SEQ ID NO: 2158448 - RNA, 19 nt, Artificial Sequence
  Description of Artificial Sequence: Synthetic oligonucleotide
  Sense strand starting at position 32 of SEQ ID NO: 1882936
cuccucuuugaaugggauu

SEQ ID NO: 2158449 - RNA, 19 nt, Artificial Sequence
  Description of Artificial Sequence: Synthetic oligonucleotide
  Antisense strand to SEQ ID NO: 2158448
aaucccauucaaagaggag

SEQ ID NO: 2158450 - RNA, 19 nt, Artificial Sequence
  Description of Artificial Sequence: Synthetic oligonucleotide
  Sense strand starting at position 170 of SEQ ID NO: 1882936
ccuguuaaccugugggaaa

SEQ ID NO: 2158451 - RNA, 19 nt, Artificial Sequence
  Description of Artificial Sequence: Synthetic oligonucleotide
  Antisense strand to SEQ ID NO: 2158450
uuucccacagguuaacagg

SEQ ID NO: 2158452 - RNA, 19 nt, Artificial Sequence
  Description of Artificial Sequence: Synthetic oligonucleotide
  Sense strand starting at position 172 of SEQ ID NO: 1882936
uguuaaccugugggaaagu

SEQ ID NO: 2158453 - RNA, 19 nt, Artificial Sequence
  Description of Artificial Sequence: Synthetic oligonucleotide
  Antisense strand to SEQ ID NO: 2158452
acuuucccacagguuaaca

SEQ ID NO: 2158454 - RNA, 19 nt, Artificial Sequence
  Description of Artificial Sequence: Synthetic oligonucleotide
  Sense strand starting at position 183 of SEQ ID NO: 1882936
gggaaagugcuauaguaug

SEQ ID NO: 2158455 - RNA, 19 nt, Artificial Sequence
  Description of Artificial Sequence: Synthetic oligonucleotide
  Antisense strand to SEQ ID NO: 2158454
cauacuauagcacuuuccc

SEQ ID NO: 2158456 - RNA, 19 nt, Artificial Sequence
  Description of Artificial Sequence: Synthetic oligonucleotide
  Sense strand starting at position 686 of SEQ ID NO: 1882936
gaagucagauggcugauaa

SEQ ID NO: 2158457 - RNA, 19 nt, Artificial Sequence
  Description of Artificial Sequence: Synthetic oligonucleotide
  Antisense strand to SEQ ID NO: 2158456
uuaucagccaucugacuuc

SEQ ID NO: 2158458 - RNA, 19 nt, Artificial Sequence
  Description of Artificial Sequence: Synthetic oligonucleotide
  Sense strand starting at position 687 of SEQ ID NO: 1882936
aagucagauggcugauaaa

SEQ ID NO: 2158459 - RNA, 19 nt, Artificial Sequence
  Description of Artificial Sequence: Synthetic oligonucleotide
  Antisense strand to SEQ ID NO: 2158458
uuuaucagccaucugacuu

SEQ ID NO: 2158460 - RNA, 19 nt, Artificial Sequence
  Description of Artificial Sequence: Synthetic oligonucleotide
  Sense strand starting at position 849 of SEQ ID NO: 1882936
cuaggaaagcuuuacagua

SEQ ID NO: 2158461 - RNA, 19 nt, Artificial Sequence
  Description of Artificial Sequence: Synthetic oligonucleotide
  Antisense strand to SEQ ID NO: 2158460
uacuguaaagcuuuccuag

SEQ ID NO: 2158462 - RNA, 19 nt, Artificial Sequence
  Description of Artificial Sequence: Synthetic oligonucleotide
  Sense strand starting at position 903 of SEQ ID NO: 1882936
auuugauacucagaugaca

SEQ ID NO: 2158463 - RNA, 19 nt, Artificial Sequence
  Description of Artificial Sequence: Synthetic oligonucleotide
  Antisense strand to SEQ ID NO: 2158462
ugucaucugaguaucaaau

SEQ ID NO: 2158464 - RNA, 19 nt, Artificial Sequence
  Description of Artificial Sequence: Synthetic oligonucleotide
  Sense strand starting at position 954 of SEQ ID NO: 1882936
gucacauuccaugaguuua

SEQ ID NO: 2158465 - RNA, 19 nt, Artificial Sequence
  Description of Artificial Sequence: Synthetic oligonucleotide
  Antisense strand to SEQ ID NO: 2158464
uaaacucauggaaugugac

SEQ ID NO: 2158466 - RNA, 19 nt, Artificial Sequence
  Description of Artificial Sequence: Synthetic oligonucleotide
  Sense strand starting at position 1210 of SEQ ID NO: 1882936
gagugagaucaguggaagu

SEQ ID NO: 2158467 - RNA, 19 nt, Artificial Sequence
  Description of Artificial Sequence: Synthetic oligonucleotide
  Antisense strand to SEQ ID NO: 2158466
acuuccacugaucucacuc

SEQ ID NO: 2158468 - RNA, 19 nt, Artificial Sequence
  Description of Artificial Sequence: Synthetic oligonucleotide
  Sense strand starting at position 1227 of SEQ ID NO: 1882936
guaacuaggguuuaagagu

SEQ ID NO: 2158469 - RNA, 19 nt, Artificial Sequence
  Description of Artificial Sequence: Synthetic oligonucleotide
  Antisense strand to SEQ ID NO: 2158468
acucuuaaacccuaguuac

SEQ ID NO: 2158470 - RNA, 19 nt, Artificial Sequence
  Description of Artificial Sequence: Synthetic oligonucleotide
  Sense strand starting at position 1384 of SEQ ID NO: 1882936
acaauauuccacuggguuu

SEQ ID NO: 2158471 - RNA, 19 nt, Artificial Sequence
  Description of Artificial Sequence: Synthetic oligonucleotide
  Antisense strand to SEQ ID NO: 2158470
aaacccaguggaauauugu

SEQ ID NO: 2158472 - RNA, 19 nt, Artificial Sequence
  Description of Artificial Sequence: Synthetic oligonucleotide
  Sense strand starting at position 1517 of SEQ ID NO: 1882936
ugguaauuguuaguauaag

SEQ ID NO: 2158473 - RNA, 19 nt, Artificial Sequence
  Description of Artificial Sequence: Synthetic oligonucleotide
  Antisense strand to SEQ ID NO: 2158472
cuuauacuaacaauuacca

SEQ ID NO: 2158474 - RNA, 19 nt, Artificial Sequence
  Description of Artificial Sequence: Synthetic oligonucleotide
  Sense strand starting at position 1574 of SEQ ID NO: 1882936
gaauaaggccucugcuaga

SEQ ID NO: 2158475 - RNA, 19 nt, Artificial Sequence
  Description of Artificial Sequence: Synthetic oligonucleotide
  Antisense strand to SEQ ID NO: 2158474
ucuagcagaggccuuauuc

SEQ ID NO: 2158476 - RNA, 19 nt, Artificial Sequence
  Description of Artificial Sequence: Synthetic oligonucleotide
  Sense strand starting at position 1911 of SEQ ID NO: 1882936
gggugacacuuucuauuag

SEQ ID NO: 2158477 - RNA, 19 nt, Artificial Sequence
  Description of Artificial Sequence: Synthetic oligonucleotide
  Antisense strand to SEQ ID NO: 2158476
cuaauagaaagugucaccc

SEQ ID NO: 2158478 - RNA, 19 nt, Artificial Sequence
  Description of Artificial Sequence: Synthetic oligonucleotide
  Sense strand starting at position 2202 of SEQ ID NO: 1882936
uugaucuuucuccacaugu

SEQ ID NO: 2158479 - RNA, 19 nt, Artificial Sequence
  Description of Artificial Sequence: Synthetic oligonucleotide
  Antisense strand to SEQ ID NO: 2158478
acauguggagaaagaucaa

SEQ ID NO: 2158480 - RNA, 19 nt, Artificial Sequence
  Description of Artificial Sequence: Synthetic oligonucleotide
  Sense strand starting at position 2408 of SEQ ID NO: 1882936
agcauaaaucugugaauac

SEQ ID NO: 2158481 - RNA, 19 nt, Artificial Sequence
  Description of Artificial Sequence: Synthetic oligonucleotide
  Antisense strand to SEQ ID NO: 2158480
guauucacagauuuaugcu

SEQ ID NO: 2158482 - RNA, 19 nt, Artificial Sequence
  Description of Artificial Sequence: Synthetic oligonucleotide
  Sense strand starting at position 2606 of SEQ ID NO: 1882936
agauuucuuugugauauga

SEQ ID NO: 2158483 - RNA, 19 nt, Artificial Sequence
  Description of Artificial Sequence: Synthetic oligonucleotide
  Antisense strand to SEQ ID NO: 2158482
ucauaucacaaagaaaucu

SEQ ID NO: 2158484 - RNA, 19 nt, Artificial Sequence
  Description of Artificial Sequence: Synthetic oligonucleotide
  Sense strand starting at position 2614 of SEQ ID NO: 1882936
uugugauaugaaugucaaa

SEQ ID NO: 2158485 - RNA, 19 nt, Artificial Sequence
  Description of Artificial Sequence: Synthetic oligonucleotide
  Antisense strand to SEQ ID NO: 2158484
uuugacauucauaucacaa

SEQ ID NO: 2158486 - RNA, 19 nt, Artificial Sequence
  Description of Artificial Sequence: Synthetic oligonucleotide
  Sense strand starting at position 2697 of SEQ ID NO: 1882936
augaacucagucuguacua

SEQ ID NO: 2158487 - RNA, 19 nt, Artificial Sequence
  Description of Artificial Sequence: Synthetic oligonucleotide
  Antisense strand to SEQ ID NO: 2158486
uaguacagacugaguucau

SEQ ID NO: 2158488 - RNA, 19 nt, Artificial Sequence
  Description of Artificial Sequence: Synthetic oligonucleotide
  Sense strand starting at position 2698 of SEQ ID NO: 1882936
ugaacucagucuguacuaa

SEQ ID NO: 2158489 - RNA, 19 nt, Artificial Sequence
  Description of Artificial Sequence: Synthetic oligonucleotide
  Antisense strand to SEQ ID NO: 2158488
uuaguacagacugaguuca

SEQ ID NO: 2158490 - RNA, 19 nt, Artificial Sequence
  Description of Artificial Sequence: Synthetic oligonucleotide
  Sense strand starting at position 2710 of SEQ ID NO: 1882936
guacuaaaucgguauuagu

SEQ ID NO: 2158491 - RNA, 19 nt, Artificial Sequence
  Description of Artificial Sequence: Synthetic oligonucleotide
  Antisense strand to SEQ ID NO: 2158490
acuaauaccgauuuaguac

SEQ ID NO: 2158492 - RNA, 19 nt, Artificial Sequence
  Description of Artificial Sequence: Synthetic oligonucleotide
  Sense strand starting at position 2721 of SEQ ID NO: 1882936
guauuaguuguacaccaac

SEQ ID NO: 2158493 - RNA, 19 nt, Artificial Sequence
  Description of Artificial Sequence: Synthetic oligonucleotide
  Antisense strand to SEQ ID NO: 2158492
guugguguacaacuaauac

SEQ ID NO: 2158494 - RNA, 19 nt, Artificial Sequence
  Description of Artificial Sequence: Synthetic oligonucleotide
  Sense strand starting at position 2926 of SEQ ID NO: 1882936
guuaccugucuugagcaga

SEQ ID NO: 2158495 - RNA, 19 nt, Artificial Sequence
  Description of Artificial Sequence: Synthetic oligonucleotide
  Antisense strand to SEQ ID NO: 2158494
ucugcucaagacagguaac

SEQ ID NO: 2158496 - RNA, 19 nt, Artificial Sequence
  Description of Artificial Sequence: Synthetic oligonucleotide
  Sense strand starting at position 2929 of SEQ ID NO: 1882936
accugucuugagcagauca

SEQ ID NO: 2158497 - RNA, 19 nt, Artificial Sequence
  Description of Artificial Sequence: Synthetic oligonucleotide
  Antisense strand to SEQ ID NO: 2158496
ugaucugcucaagacaggu

SEQ ID NO: 2158498 - RNA, 19 nt, Artificial Sequence
  Description of Artificial Sequence: Synthetic oligonucleotide
  Sense strand starting at position 2931 of SEQ ID NO: 1882936
cugucuugagcagaucagu

SEQ ID NO: 2158499 - RNA, 19 nt, Artificial Sequence
  Description of Artificial Sequence: Synthetic oligonucleotide
  Antisense strand to SEQ ID NO: 2158498
acugaucugcucaagacag

SEQ ID NO: 2158500 - RNA, 19 nt, Artificial Sequence
  Description of Artificial Sequence: Synthetic oligonucleotide
  Sense strand starting at position 2934 of SEQ ID NO: 1882936
ucuugagcagaucagugau

SEQ ID NO: 2158501 - RNA, 19 nt, Artificial Sequence
  Description of Artificial Sequence: Synthetic oligonucleotide
  Antisense strand to SEQ ID NO: 2158500
aucacugaucugcucaaga

SEQ ID NO: 2158502 - RNA, 19 nt, Artificial Sequence
  Description of Artificial Sequence: Synthetic oligonucleotide
  Sense strand starting at position 3040 of SEQ ID NO: 1882936
ugguaaaccagcugaaaga

SEQ ID NO: 2158503 - RNA, 19 nt, Artificial Sequence
  Description of Artificial Sequence: Synthetic oligonucleotide
  Antisense strand to SEQ ID NO: 2158502
ucuuucagcugguuuacca

SEQ ID NO: 2158504 - RNA, 19 nt, Artificial Sequence
  Description of Artificial Sequence: Synthetic oligonucleotide
  Sense strand starting at position 3086 of SEQ ID NO: 1882936
guuugugaaguuuaagaau

SEQ ID NO: 2158505 - RNA, 19 nt, Artificial Sequence
  Description of Artificial Sequence: Synthetic oligonucleotide
  Antisense strand to SEQ ID NO: 2158504
auucuuaaacuucacaaac

SEQ ID NO: 2158506 - RNA, 19 nt, Artificial Sequence
  Description of Artificial Sequence: Synthetic oligonucleotide
  Sense strand starting at position 3158 of SEQ ID NO: 1882936
cuacuaagguuucugaaac

SEQ ID NO: 2158507 - RNA, 19 nt, Artificial Sequence
  Description of Artificial Sequence: Synthetic oligonucleotide
  Antisense strand to SEQ ID NO: 2158506
guuucagaaaccuuaguag

SEQ ID NO: 2158508 - RNA, 19 nt, Artificial Sequence
  Description of Artificial Sequence: Synthetic oligonucleotide
  Sense strand starting at position 3236 of SEQ ID NO: 1882936
uuauaaagucauuaaggca

SEQ ID NO: 2158509 - RNA, 19 nt, Artificial Sequence
  Description of Artificial Sequence: Synthetic oligonucleotide
  Antisense strand to SEQ ID NO: 2158508
ugccuuaaugacuuuauaa

SEQ ID NO: 2158510 - RNA, 19 nt, Artificial Sequence
  Description of Artificial Sequence: Synthetic oligonucleotide
  Sense strand starting at position 3274 of SEQ ID NO: 1882936
gagucaaaccugugguuaa

SEQ ID NO: 2158511 - RNA, 19 nt, Artificial Sequence
  Description of Artificial Sequence: Synthetic oligonucleotide
  Antisense strand to SEQ ID NO: 2158510
uuaaccacagguuugacuc

SEQ ID NO: 2158512 - RNA, 19 nt, Artificial Sequence
  Description of Artificial Sequence: Synthetic oligonucleotide
  Sense strand starting at position 3277 of SEQ ID NO: 1882936
ucaaaccugugguuaauaa

SEQ ID NO: 2158513 - RNA, 19 nt, Artificial Sequence
  Description of Artificial Sequence: Synthetic oligonucleotide
  Antisense strand to SEQ ID NO: 2158512
uuauuaaccacagguuuga

SEQ ID NO: 2158514 - RNA, 19 nt, Artificial Sequence
  Description of Artificial Sequence: Synthetic oligonucleotide
  Sense strand starting at position 3550 of SEQ ID NO: 1882936
cugccauuaguguaaagau

SEQ ID NO: 2158515 - RNA, 19 nt, Artificial Sequence
  Description of Artificial Sequence: Synthetic oligonucleotide
  Antisense strand to SEQ ID NO: 2158514
aucuuuacacuaauggcag

SEQ ID NO: 2158516 - RNA, 19 nt, Artificial Sequence
  Description of Artificial Sequence: Synthetic oligonucleotide
  Sense strand starting at position 3581 of SEQ ID NO: 1882936
acauaugaguuuccuaguu

SEQ ID NO: 2158517 - RNA, 19 nt, Artificial Sequence
  Description of Artificial Sequence: Synthetic oligonucleotide
  Antisense strand to SEQ ID NO: 2158516
aacuaggaaacucauaugu

SEQ ID NO: 2158518 - RNA, 19 nt, Artificial Sequence
  Description of Artificial Sequence: Synthetic oligonucleotide
  Sense strand starting at position 3610 of SEQ ID NO: 1882936
aaugaauagucagugaauc

SEQ ID NO: 2158519 - RNA, 19 nt, Artificial Sequence
  Description of Artificial Sequence: Synthetic oligonucleotide
  Antisense strand to SEQ ID NO: 2158518
gauucacugacuauucauu

SEQ ID NO: 2158520 - RNA, 19 nt, Artificial Sequence
  Description of Artificial Sequence: Synthetic oligonucleotide
  Sense strand starting at position 3611 of SEQ ID NO: 1882936
augaauagucagugaaucu

SEQ ID NO: 2158521 - RNA, 19 nt, Artificial Sequence
  Description of Artificial Sequence: Synthetic oligonucleotide
  Antisense strand to SEQ ID NO: 2158520
agauucacugacuauucau

SEQ ID NO: 2158522 - RNA, 19 nt, Artificial Sequence
  Description of Artificial Sequence: Synthetic oligonucleotide
  Sense strand starting at position 3621 of SEQ ID NO: 1882936
agugaaucugcauauagca

SEQ ID NO: 2158523 - RNA, 19 nt, Artificial Sequence
  Description of Artificial Sequence: Synthetic oligonucleotide
  Antisense strand to SEQ ID NO: 2158522
ugcuauaugcagauucacu

SEQ ID NO: 2158524 - RNA, 19 nt, Artificial Sequence
  Description of Artificial Sequence: Synthetic oligonucleotide
  Sense strand starting at position 3669 of SEQ ID NO: 1882936
ucaagaugauugcugacaa

SEQ ID NO: 2158525 - RNA, 19 nt, Artificial Sequence
  Description of Artificial Sequence: Synthetic oligonucleotide
  Antisense strand to SEQ ID NO: 2158524
uugucagcaaucaucuuga

SEQ ID NO: 2158526 - RNA, 19 nt, Artificial Sequence
  Description of Artificial Sequence: Synthetic oligonucleotide
  Sense strand starting at position 1 of SEQ ID NO: 1882937
uguguuacgcugcuuuaga

SEQ ID NO: 2158527 - RNA, 19 nt, Artificial Sequence
  Description of Artificial Sequence: Synthetic oligonucleotide
  Antisense strand to SEQ ID NO: 2158526
ucuaaagcagcguaacaca

SEQ ID NO: 2158528 - RNA, 19 nt, Artificial Sequence
  Description of Artificial Sequence: Synthetic oligonucleotide
  Sense strand starting at position 338 of SEQ ID NO: 1882937
guaacuaugguugggcuua

SEQ ID NO: 2158529 - RNA, 19 nt, Artificial Sequence
  Description of Artificial Sequence: Synthetic oligonucleotide
  Antisense strand to SEQ ID NO: 2158528
uaagcccaaccauaguuac

SEQ ID NO: 2158530 - RNA, 19 nt, Artificial Sequence
  Description of Artificial Sequence: Synthetic oligonucleotide
  Sense strand starting at position 400 of SEQ ID NO: 1882937
ugaugagcucugggcagua

SEQ ID NO: 2158531 - RNA, 19 nt, Artificial Sequence
  Description of Artificial Sequence: Synthetic oligonucleotide
  Antisense strand to SEQ ID NO: 2158530
uacugcccagagcucauca

SEQ ID NO: 2158532 - RNA, 19 nt, Artificial Sequence
  Description of Artificial Sequence: Synthetic oligonucleotide
  Sense strand starting at position 479 of SEQ ID NO: 1882937
ccuguauugucuccuauau

SEQ ID NO: 2158533 - RNA, 19 nt, Artificial Sequence
  Description of Artificial Sequence: Synthetic oligonucleotide
  Antisense strand to SEQ ID NO: 2158532
auauaggagacaauacagg

SEQ ID NO: 2158534 - RNA, 19 nt, Artificial Sequence
  Description of Artificial Sequence: Synthetic oligonucleotide
  Sense strand starting at position 493 of SEQ ID NO: 1882937
uauauugugcuaugcauga

SEQ ID NO: 2158535 - RNA, 19 nt, Artificial Sequence
  Description of Artificial Sequence: Synthetic oligonucleotide
  Antisense strand to SEQ ID NO: 2158534
ucaugcauagcacaauaua

SEQ ID NO: 2158536 - RNA, 19 nt, Artificial Sequence
  Description of Artificial Sequence: Synthetic oligonucleotide
  Sense strand starting at position 534 of SEQ ID NO: 1882937
gaguuacuucgccaucgga

SEQ ID NO: 2158537 - RNA, 19 nt, Artificial Sequence
  Description of Artificial Sequence: Synthetic oligonucleotide
  Antisense strand to SEQ ID NO: 2158536
uccgauggcgaaguaacuc

SEQ ID NO: 2158538 - RNA, 19 nt, Artificial Sequence
  Description of Artificial Sequence: Synthetic oligonucleotide
  Sense strand starting at position 547 of SEQ ID NO: 1882937
aucggagaccuauguauug

SEQ ID NO: 2158539 - RNA, 19 nt, Artificial Sequence
  Description of Artificial Sequence: Synthetic oligonucleotide
  Antisense strand to SEQ ID NO: 2158538
caauacauaggucuccgau

SEQ ID NO: 2158540 - RNA, 19 nt, Artificial Sequence
  Description of Artificial Sequence: Synthetic oligonucleotide
  Sense strand starting at position 549 of SEQ ID NO: 1882937
cggagaccuauguauugau

SEQ ID NO: 2158541 - RNA, 19 nt, Artificial Sequence
  Description of Artificial Sequence: Synthetic oligonucleotide
  Antisense strand to SEQ ID NO: 2158540
aucaauacauaggucuccg

SEQ ID NO: 2158542 - RNA, 19 nt, Artificial Sequence
  Description of Artificial Sequence: Synthetic oligonucleotide
  Sense strand starting at position 648 of SEQ ID NO: 1882937
gugugacuucuagaacucu

SEQ ID NO: 2158543 - RNA, 19 nt, Artificial Sequence
  Description of Artificial Sequence: Synthetic oligonucleotide
  Antisense strand to SEQ ID NO: 2158542
agaguucuagaagucacac

SEQ ID NO: 2158544 - RNA, 19 nt, Artificial Sequence
  Description of Artificial Sequence: Synthetic oligonucleotide
  Sense strand starting at position 666 of SEQ ID NO: 1882937
uccuacuuugccugagcaa

SEQ ID NO: 2158545 - RNA, 19 nt, Artificial Sequence
  Description of Artificial Sequence: Synthetic oligonucleotide
  Antisense strand to SEQ ID NO: 2158544
uugcucaggcaaaguagga

SEQ ID NO: 2158546 - RNA, 19 nt, Artificial Sequence
  Description of Artificial Sequence: Synthetic oligonucleotide
  Sense strand starting at position 667 of SEQ ID NO: 1882937
ccuacuuugccugagcaaa

SEQ ID NO: 2158547 - RNA, 19 nt, Artificial Sequence
  Description of Artificial Sequence: Synthetic oligonucleotide
  Antisense strand to SEQ ID NO: 2158546
uuugcucaggcaaaguagg

SEQ ID NO: 2158548 - RNA, 19 nt, Artificial Sequence
  Description of Artificial Sequence: Synthetic oligonucleotide
  Sense strand starting at position 706 of SEQ ID NO: 1882937
accagagcgugucuaaaug

SEQ ID NO: 2158549 - RNA, 19 nt, Artificial Sequence
  Description of Artificial Sequence: Synthetic oligonucleotide
  Antisense strand to SEQ ID NO: 2158548
cauuuagacacgcucuggu

SEQ ID NO: 2158550 - RNA, 19 nt, Artificial Sequence
  Description of Artificial Sequence: Synthetic oligonucleotide
  Sense strand starting at position 716 of SEQ ID NO: 1882937
gucuaaaugauguggguuu

SEQ ID NO: 2158551 - RNA, 19 nt, Artificial Sequence
  Description of Artificial Sequence: Synthetic oligonucleotide
  Antisense strand to SEQ ID NO: 2158550
aaacccacaucauuuagac

SEQ ID NO: 2158552 - RNA, 19 nt, Artificial Sequence
  Description of Artificial Sequence: Synthetic oligonucleotide
  Sense strand starting at position 930 of SEQ ID NO: 1882937
gggucaugaauguagagca

SEQ ID NO: 2158553 - RNA, 19 nt, Artificial Sequence
  Description of Artificial Sequence: Synthetic oligonucleotide
  Antisense strand to SEQ ID NO: 2158552
ugcucuacauucaugaccc

SEQ ID NO: 2158554 - RNA, 19 nt, Artificial Sequence
  Description of Artificial Sequence: Synthetic oligonucleotide
  Sense strand starting at position 970 of SEQ ID NO: 1882937
gagagcaaguuccuuauga

SEQ ID NO: 2158555 - RNA, 19 nt, Artificial Sequence
  Description of Artificial Sequence: Synthetic oligonucleotide
  Antisense strand to SEQ ID NO: 2158554
ucauaaggaacuugcucuc

SEQ ID NO: 2158556 - RNA, 19 nt, Artificial Sequence
  Description of Artificial Sequence: Synthetic oligonucleotide
  Sense strand starting at position 971 of SEQ ID NO: 1882937
agagcaaguuccuuaugac

SEQ ID NO: 2158557 - RNA, 19 nt, Artificial Sequence
  Description of Artificial Sequence: Synthetic oligonucleotide
  Antisense strand to SEQ ID NO: 2158556
gucauaaggaacuugcucu

SEQ ID NO: 2158558 - RNA, 19 nt, Artificial Sequence
  Description of Artificial Sequence: Synthetic oligonucleotide
  Sense strand starting at position 972 of SEQ ID NO: 1882937
gagcaaguuccuuaugacc

SEQ ID NO: 2158559 - RNA, 19 nt, Artificial Sequence
  Description of Artificial Sequence: Synthetic oligonucleotide
  Antisense strand to SEQ ID NO: 2158558
ggucauaaggaacuugcuc

SEQ ID NO: 2158560 - RNA, 19 nt, Artificial Sequence
  Description of Artificial Sequence: Synthetic oligonucleotide
  Sense strand starting at position 990 of SEQ ID NO: 1882937
ccuccaacugguuacagau

SEQ ID NO: 2158561 - RNA, 19 nt, Artificial Sequence
  Description of Artificial Sequence: Synthetic oligonucleotide
  Antisense strand to SEQ ID NO: 2158560
aucuguaaccaguuggagg

SEQ ID NO: 2158562 - RNA, 19 nt, Artificial Sequence
  Description of Artificial Sequence: Synthetic oligonucleotide
  Sense strand starting at position 1426 of SEQ ID NO: 1882937
uaaauuacgguuuaugacu

SEQ ID NO: 2158563 - RNA, 19 nt, Artificial Sequence
  Description of Artificial Sequence: Synthetic oligonucleotide
  Antisense strand to SEQ ID NO: 2158562
agucauaaaccguaauuua

SEQ ID NO: 2158564 - RNA, 19 nt, Artificial Sequence
  Description of Artificial Sequence: Synthetic oligonucleotide
  Sense strand starting at position 1435 of SEQ ID NO: 1882937
guuuaugacucccucaagu

SEQ ID NO: 2158565 - RNA, 19 nt, Artificial Sequence
  Description of Artificial Sequence: Synthetic oligonucleotide
  Antisense strand to SEQ ID NO: 2158564
acuugagggagucauaaac

SEQ ID NO: 2158566 - RNA, 19 nt, Artificial Sequence
  Description of Artificial Sequence: Synthetic oligonucleotide
  Sense strand starting at position 1437 of SEQ ID NO: 1882937
uuaugacucccucaaguga

SEQ ID NO: 2158567 - RNA, 19 nt, Artificial Sequence
  Description of Artificial Sequence: Synthetic oligonucleotide
  Antisense strand to SEQ ID NO: 2158566
ucacuugagggagucauaa

SEQ ID NO: 2158568 - RNA, 19 nt, Artificial Sequence
  Description of Artificial Sequence: Synthetic oligonucleotide
  Sense strand starting at position 1450 of SEQ ID NO: 1882937
aagugacuacaugguauau

SEQ ID NO: 2158569 - RNA, 19 nt, Artificial Sequence
  Description of Artificial Sequence: Synthetic oligonucleotide
  Antisense strand to SEQ ID NO: 2158568
auauaccauguagucacuu

SEQ ID NO: 2158570 - RNA, 19 nt, Artificial Sequence
  Description of Artificial Sequence: Synthetic oligonucleotide
  Sense strand starting at position 1463 of SEQ ID NO: 1882937
guauauaggcuguauguuu

SEQ ID NO: 2158571 - RNA, 19 nt, Artificial Sequence
  Description of Artificial Sequence: Synthetic oligonucleotide
  Antisense strand to SEQ ID NO: 2158570
aaacauacagccuauauac

SEQ ID NO: 2158572 - RNA, 19 nt, Artificial Sequence
  Description of Artificial Sequence: Synthetic oligonucleotide
  Sense strand starting at position 1500 of SEQ ID NO: 1882937
uuacauaaguggucucuca

SEQ ID NO: 2158573 - RNA, 19 nt, Artificial Sequence
  Description of Artificial Sequence: Synthetic oligonucleotide
  Antisense strand to SEQ ID NO: 2158572
ugagagaccacuuauguaa

SEQ ID NO: 2158574 - RNA, 19 nt, Artificial Sequence
  Description of Artificial Sequence: Synthetic oligonucleotide
  Sense strand starting at position 1536 of SEQ ID NO: 1882937
ugaggaggauucuaacaac

SEQ ID NO: 2158575 - RNA, 19 nt, Artificial Sequence
  Description of Artificial Sequence: Synthetic oligonucleotide
  Antisense strand to SEQ ID NO: 2158574
guuguuagaauccuccuca

SEQ ID NO: 2158576 - RNA, 19 nt, Artificial Sequence
  Description of Artificial Sequence: Synthetic oligonucleotide
  Sense strand starting at position 1687 of SEQ ID NO: 1882937
uuaugaucgcaccacuaca

SEQ ID NO: 2158577 - RNA, 19 nt, Artificial Sequence
  Description of Artificial Sequence: Synthetic oligonucleotide
  Antisense strand to SEQ ID NO: 2158576
uguaguggugcgaucauaa

SEQ ID NO: 2158578 - RNA, 19 nt, Artificial Sequence
  Description of Artificial Sequence: Synthetic oligonucleotide
  Sense strand starting at position 1941 of SEQ ID NO: 1882937
aggcucaaaccauguuuau

SEQ ID NO: 2158579 - RNA, 19 nt, Artificial Sequence
  Description of Artificial Sequence: Synthetic oligonucleotide
  Antisense strand to SEQ ID NO: 2158578
auaaacaugguuugagccu

SEQ ID NO: 2158580 - RNA, 19 nt, Artificial Sequence
  Description of Artificial Sequence: Synthetic oligonucleotide
  Sense strand starting at position 2031 of SEQ ID NO: 1882937
aaauccaugcuccgggauu

SEQ ID NO: 2158581 - RNA, 19 nt, Artificial Sequence
  Description of Artificial Sequence: Synthetic oligonucleotide
  Antisense strand to SEQ ID NO: 2158580
aaucccggagcauggauuu

SEQ ID NO: 2158582 - RNA, 19 nt, Artificial Sequence
  Description of Artificial Sequence: Synthetic oligonucleotide
  Sense strand starting at position 2115 of SEQ ID NO: 1882937
uugucaaagugcuugaaga

SEQ ID NO: 2158583 - RNA, 19 nt, Artificial Sequence
  Description of Artificial Sequence: Synthetic oligonucleotide
  Antisense strand to SEQ ID NO: 2158582
ucuucaagcacuuugacaa

SEQ ID NO: 2158584 - RNA, 19 nt, Artificial Sequence
  Description of Artificial Sequence: Synthetic oligonucleotide
  Sense strand starting at position 2116 of SEQ ID NO: 1882937
ugucaaagugcuugaagaa

SEQ ID NO: 2158585 - RNA, 19 nt, Artificial Sequence
  Description of Artificial Sequence: Synthetic oligonucleotide
  Antisense strand to SEQ ID NO: 2158584
uucuucaagcacuuugaca

SEQ ID NO: 2158586 - RNA, 19 nt, Artificial Sequence
  Description of Artificial Sequence: Synthetic oligonucleotide
  Sense strand starting at position 2117 of SEQ ID NO: 1882937
gucaaagugcuugaagaag

SEQ ID NO: 2158587 - RNA, 19 nt, Artificial Sequence
  Description of Artificial Sequence: Synthetic oligonucleotide
  Antisense strand to SEQ ID NO: 2158586
cuucuucaagcacuuugac

SEQ ID NO: 2158588 - RNA, 19 nt, Artificial Sequence
  Description of Artificial Sequence: Synthetic oligonucleotide
  Sense strand starting at position 2141 of SEQ ID NO: 1882937
gucgguuggcaagaaguca

SEQ ID NO: 2158589 - RNA, 19 nt, Artificial Sequence
  Description of Artificial Sequence: Synthetic oligonucleotide
  Antisense strand to SEQ ID NO: 2158588
ugacuucuugccaaccgac

SEQ ID NO: 2158590 - RNA, 19 nt, Artificial Sequence
  Description of Artificial Sequence: Synthetic oligonucleotide
  Sense strand starting at position 2320 of SEQ ID NO: 1882937
cgauuugcugcacauacuu

SEQ ID NO: 2158591 - RNA, 19 nt, Artificial Sequence
  Description of Artificial Sequence: Synthetic oligonucleotide
  Antisense strand to SEQ ID NO: 2158590
aaguaugugcagcaaaucg

SEQ ID NO: 2158592 - RNA, 19 nt, Artificial Sequence
  Description of Artificial Sequence: Synthetic oligonucleotide
  Sense strand starting at position 2431 of SEQ ID NO: 1882937
cgaguuuggcuuugggaag

SEQ ID NO: 2158593 - RNA, 19 nt, Artificial Sequence
  Description of Artificial Sequence: Synthetic oligonucleotide
  Antisense strand to SEQ ID NO: 2158592
cuucccaaagccaaacucg

SEQ ID NO: 2158594 - RNA, 19 nt, Artificial Sequence
  Description of Artificial Sequence: Synthetic oligonucleotide
  Sense strand starting at position 2550 of SEQ ID NO: 1882937
uucauuguuguugcguaga

SEQ ID NO: 2158595 - RNA, 19 nt, Artificial Sequence
  Description of Artificial Sequence: Synthetic oligonucleotide
  Antisense strand to SEQ ID NO: 2158594
ucuacgcaacaacaaugaa

SEQ ID NO: 2158596 - RNA, 19 nt, Artificial Sequence
  Description of Artificial Sequence: Synthetic oligonucleotide
  Sense strand starting at position 2763 of SEQ ID NO: 1882937
gucauuguccaaugacuga

SEQ ID NO: 2158597 - RNA, 19 nt, Artificial Sequence
  Description of Artificial Sequence: Synthetic oligonucleotide
  Antisense strand to SEQ ID NO: 2158596
ucagucauuggacaaugac

SEQ ID NO: 2158598 - RNA, 19 nt, Artificial Sequence
  Description of Artificial Sequence: Synthetic oligonucleotide
  Sense strand starting at position 3397 of SEQ ID NO: 1882937
agcaaauuccagcaaugca

SEQ ID NO: 2158599 - RNA, 19 nt, Artificial Sequence
  Description of Artificial Sequence: Synthetic oligonucleotide
  Antisense strand to SEQ ID NO: 2158598
ugcauugcuggaauuugcu

SEQ ID NO: 2158600 - RNA, 19 nt, Artificial Sequence
  Description of Artificial Sequence: Synthetic oligonucleotide
  Sense strand starting at position 3532 of SEQ ID NO: 1882937
accauaauguaguuaagga

SEQ ID NO: 2158601 - RNA, 19 nt, Artificial Sequence
  Description of Artificial Sequence: Synthetic oligonucleotide
  Antisense strand to SEQ ID NO: 2158600
uccuuaacuacauuauggu

SEQ ID NO: 2158602 - RNA, 19 nt, Artificial Sequence
  Description of Artificial Sequence: Synthetic oligonucleotide
  Sense strand starting at position 3898 of SEQ ID NO: 1882937
gugacauuauugguuauug

SEQ ID NO: 2158603 - RNA, 19 nt, Artificial Sequence
  Description of Artificial Sequence: Synthetic oligonucleotide
  Antisense strand to SEQ ID NO: 2158602
caauaaccaauaaugucac

SEQ ID NO: 2158604 - RNA, 19 nt, Artificial Sequence
  Description of Artificial Sequence: Synthetic oligonucleotide
  Sense strand starting at position 3899 of SEQ ID NO: 1882937
ugacauuauugguuauuga

SEQ ID NO: 2158605 - RNA, 19 nt, Artificial Sequence
  Description of Artificial Sequence: Synthetic oligonucleotide
  Antisense strand to SEQ ID NO: 2158604
ucaauaaccaauaauguca

SEQ ID NO: 2158606 - RNA, 19 nt, Artificial Sequence
  Description of Artificial Sequence: Synthetic oligonucleotide
  Sense strand starting at position 86 of SEQ ID NO: 1882938
guauacuucuauccagaug

SEQ ID NO: 2158607 - RNA, 19 nt, Artificial Sequence
  Description of Artificial Sequence: Synthetic oligonucleotide
  Antisense strand to SEQ ID NO: 2158606
caucuggauagaaguauac

SEQ ID NO: 2158608 - RNA, 19 nt, Artificial Sequence
  Description of Artificial Sequence: Synthetic oligonucleotide
  Sense strand starting at position 212 of SEQ ID NO: 1882938
ccaggucaauucuaucagu

SEQ ID NO: 2158609 - RNA, 19 nt, Artificial Sequence
  Description of Artificial Sequence: Synthetic oligonucleotide
  Antisense strand to SEQ ID NO: 2158608
acugauagaauugaccugg

SEQ ID NO: 2158610 - RNA, 19 nt, Artificial Sequence
  Description of Artificial Sequence: Synthetic oligonucleotide
  Sense strand starting at position 215 of SEQ ID NO: 1882938
ggucaauucuaucaguucu

SEQ ID NO: 2158611 - RNA, 19 nt, Artificial Sequence
  Description of Artificial Sequence: Synthetic oligonucleotide
  Antisense strand to SEQ ID NO: 2158610
agaacugauagaauugacc

SEQ ID NO: 2158612 - RNA, 19 nt, Artificial Sequence
  Description of Artificial Sequence: Synthetic oligonucleotide
  Sense strand starting at position 226 of SEQ ID NO: 1882938
ucaguucuagcuuagaaau

SEQ ID NO: 2158613 - RNA, 19 nt, Artificial Sequence
  Description of Artificial Sequence: Synthetic oligonucleotide
  Antisense strand to SEQ ID NO: 2158612
auuucuaagcuagaacuga

SEQ ID NO: 2158614 - RNA, 19 nt, Artificial Sequence
  Description of Artificial Sequence: Synthetic oligonucleotide
  Sense strand starting at position 228 of SEQ ID NO: 1882938
aguucuagcuuagaaaucu

SEQ ID NO: 2158615 - RNA, 19 nt, Artificial Sequence
  Description of Artificial Sequence: Synthetic oligonucleotide
  Antisense strand to SEQ ID NO: 2158614
agauuucuaagcuagaacu

SEQ ID NO: 2158616 - RNA, 19 nt, Artificial Sequence
  Description of Artificial Sequence: Synthetic oligonucleotide
  Sense strand starting at position 295 of SEQ ID NO: 1882938
auaggcaucuucuaucagu

SEQ ID NO: 2158617 - RNA, 19 nt, Artificial Sequence
  Description of Artificial Sequence: Synthetic oligonucleotide
  Antisense strand to SEQ ID NO: 2158616
acugauagaagaugccuau

SEQ ID NO: 2158618 - RNA, 19 nt, Artificial Sequence
  Description of Artificial Sequence: Synthetic oligonucleotide
  Sense strand starting at position 438 of SEQ ID NO: 1882938
guaaacuacgaguguuaau

SEQ ID NO: 2158619 - RNA, 19 nt, Artificial Sequence
  Description of Artificial Sequence: Synthetic oligonucleotide
  Antisense strand to SEQ ID NO: 2158618
auuaacacucguaguuuac

SEQ ID NO: 2158620 - RNA, 19 nt, Artificial Sequence
  Description of Artificial Sequence: Synthetic oligonucleotide
  Sense strand starting at position 448 of SEQ ID NO: 1882938
aguguuaauugugcccaau

SEQ ID NO: 2158621 - RNA, 19 nt, Artificial Sequence
  Description of Artificial Sequence: Synthetic oligonucleotide
  Antisense strand to SEQ ID NO: 2158620
auugggcacaauuaacacu

SEQ ID NO: 2158622 - RNA, 19 nt, Artificial Sequence
  Description of Artificial Sequence: Synthetic oligonucleotide
  Sense strand starting at position 785 of SEQ ID NO: 1882938
uguuaacaguucuauuaca

SEQ ID NO: 2158623 - RNA, 19 nt, Artificial Sequence
  Description of Artificial Sequence: Synthetic oligonucleotide
  Antisense strand to SEQ ID NO: 2158622
uguaauagaacuguuaaca

SEQ ID NO: 2158624 - RNA, 19 nt, Artificial Sequence
  Description of Artificial Sequence: Synthetic oligonucleotide
  Sense strand starting at position 800 of SEQ ID NO: 1882938
uacagaauuuguugcauug

SEQ ID NO: 2158625 - RNA, 19 nt, Artificial Sequence
  Description of Artificial Sequence: Synthetic oligonucleotide
  Antisense strand to SEQ ID NO: 2158624
caaugcaacaaauucugua

SEQ ID NO: 2158626 - RNA, 19 nt, Artificial Sequence
  Description of Artificial Sequence: Synthetic oligonucleotide
  Sense strand starting at position 802 of SEQ ID NO: 1882938
cagaauuuguugcauugua

SEQ ID NO: 2158627 - RNA, 19 nt, Artificial Sequence
  Description of Artificial Sequence: Synthetic oligonucleotide
  Antisense strand to SEQ ID NO: 2158626
uacaaugcaacaaauucug

SEQ ID NO: 2158628 - RNA, 19 nt, Artificial Sequence
  Description of Artificial Sequence: Synthetic oligonucleotide
  Sense strand starting at position 809 of SEQ ID NO: 1882938
uguugcauuguauaaugau

SEQ ID NO: 2158629 - RNA, 19 nt, Artificial Sequence
  Description of Artificial Sequence: Synthetic oligonucleotide
  Antisense strand to SEQ ID NO: 2158628
aucauuauacaaugcaaca

SEQ ID NO: 2158630 - RNA, 19 nt, Artificial Sequence
  Description of Artificial Sequence: Synthetic oligonucleotide
  Sense strand starting at position 888 of SEQ ID NO: 1882938
uuuguacccucaguaucua

SEQ ID NO: 2158631 - RNA, 19 nt, Artificial Sequence
  Description of Artificial Sequence: Synthetic oligonucleotide
  Antisense strand to SEQ ID NO: 2158630
uagauacugaggguacaaa

SEQ ID NO: 2158632 - RNA, 19 nt, Artificial Sequence
  Description of Artificial Sequence: Synthetic oligonucleotide
  Sense strand starting at position 1039 of SEQ ID NO: 1882938
aucuauaauccauguggca

SEQ ID NO: 2158633 - RNA, 19 nt, Artificial Sequence
  Description of Artificial Sequence: Synthetic oligonucleotide
  Antisense strand to SEQ ID NO: 2158632
ugccacauggauuauagau

SEQ ID NO: 2158634 - RNA, 19 nt, Artificial Sequence
  Description of Artificial Sequence: Synthetic oligonucleotide
  Sense strand starting at position 1060 of SEQ ID NO: 1882938
aagaacugaugugacuauu

SEQ ID NO: 2158635 - RNA, 19 nt, Artificial Sequence
  Description of Artificial Sequence: Synthetic oligonucleotide
  Antisense strand to SEQ ID NO: 2158634
aauagucacaucaguucuu

SEQ ID NO: 2158636 - RNA, 19 nt, Artificial Sequence
  Description of Artificial Sequence: Synthetic oligonucleotide
  Sense strand starting at position 1246 of SEQ ID NO: 1882938
cuuugcuuacuuugaagaa

SEQ ID NO: 2158637 - RNA, 19 nt, Artificial Sequence
  Description of Artificial Sequence: Synthetic oligonucleotide
  Antisense strand to SEQ ID NO: 2158636
uucuucaaaguaagcaaag

SEQ ID NO: 2158638 - RNA, 19 nt, Artificial Sequence
  Description of Artificial Sequence: Synthetic oligonucleotide
  Sense strand starting at position 1247 of SEQ ID NO: 1882938
uuugcuuacuuugaagaag

SEQ ID NO: 2158639 - RNA, 19 nt, Artificial Sequence
  Description of Artificial Sequence: Synthetic oligonucleotide
  Antisense strand to SEQ ID NO: 2158638
cuucuucaaaguaagcaaa

SEQ ID NO: 2158640 - RNA, 19 nt, Artificial Sequence
  Description of Artificial Sequence: Synthetic oligonucleotide
  Sense strand starting at position 1250 of SEQ ID NO: 1882938
gcuuacuuugaagaagcaa

SEQ ID NO: 2158641 - RNA, 19 nt, Artificial Sequence
  Description of Artificial Sequence: Synthetic oligonucleotide
  Antisense strand to SEQ ID NO: 2158640
uugcuucuucaaaguaagc

SEQ ID NO: 2158642 - RNA, 19 nt, Artificial Sequence
  Description of Artificial Sequence: Synthetic oligonucleotide
  Sense strand starting at position 1344 of SEQ ID NO: 1882938
ccaguugagucacuagaua

SEQ ID NO: 2158643 - RNA, 19 nt, Artificial Sequence
  Description of Artificial Sequence: Synthetic oligonucleotide
  Antisense strand to SEQ ID NO: 2158642
uaucuagugacucaacugg

SEQ ID NO: 2158644 - RNA, 19 nt, Artificial Sequence
  Description of Artificial Sequence: Synthetic oligonucleotide
  Sense strand starting at position 1456 of SEQ ID NO: 1882938
auaaacguguugcuuagaa

SEQ ID NO: 2158645 - RNA, 19 nt, Artificial Sequence
  Description of Artificial Sequence: Synthetic oligonucleotide
  Antisense strand to SEQ ID NO: 2158644
uucuaagcaacacguuuau

SEQ ID NO: 2158646 - RNA, 19 nt, Artificial Sequence
  Description of Artificial Sequence: Synthetic oligonucleotide
  Sense strand starting at position 1485 of SEQ ID NO: 1882938
ugcagucauuugugaauaa

SEQ ID NO: 2158647 - RNA, 19 nt, Artificial Sequence
  Description of Artificial Sequence: Synthetic oligonucleotide
  Antisense strand to SEQ ID NO: 2158646
uuauucacaaaugacugca

SEQ ID NO: 2158648 - RNA, 19 nt, Artificial Sequence
  Description of Artificial Sequence: Synthetic oligonucleotide
  Sense strand starting at position 1486 of SEQ ID NO: 1882938
gcagucauuugugaauaag

SEQ ID NO: 2158649 - RNA, 19 nt, Artificial Sequence
  Description of Artificial Sequence: Synthetic oligonucleotide
  Antisense strand to SEQ ID NO: 2158648
cuuauucacaaaugacugc

SEQ ID NO: 2158650 - RNA, 19 nt, Artificial Sequence
  Description of Artificial Sequence: Synthetic oligonucleotide
  Sense strand starting at position 1821 of SEQ ID NO: 1882938
guugauaucucauuaauga

SEQ ID NO: 2158651 - RNA, 19 nt, Artificial Sequence
  Description of Artificial Sequence: Synthetic oligonucleotide
  Antisense strand to SEQ ID NO: 2158650
ucauuaaugagauaucaac

SEQ ID NO: 2158652 - RNA, 19 nt, Artificial Sequence
  Description of Artificial Sequence: Synthetic oligonucleotide
  Sense strand starting at position 1835 of SEQ ID NO: 1882938
aaugauauuugguaaucag

SEQ ID NO: 2158653 - RNA, 19 nt, Artificial Sequence
  Description of Artificial Sequence: Synthetic oligonucleotide
  Antisense strand to SEQ ID NO: 2158652
cugauuaccaaauaucauu

SEQ ID NO: 2158654 - RNA, 19 nt, Artificial Sequence
  Description of Artificial Sequence: Synthetic oligonucleotide
  Sense strand starting at position 1900 of SEQ ID NO: 1882938
gagcaagagacuuguugga

SEQ ID NO: 2158655 - RNA, 19 nt, Artificial Sequence
  Description of Artificial Sequence: Synthetic oligonucleotide
  Antisense strand to SEQ ID NO: 2158654
uccaacaagucucuugcuc

SEQ ID NO: 2158656 - RNA, 19 nt, Artificial Sequence
  Description of Artificial Sequence: Synthetic oligonucleotide
  Sense strand starting at position 1902 of SEQ ID NO: 1882938
gcaagagacuuguuggaga

SEQ ID NO: 2158657 - RNA, 19 nt, Artificial Sequence
  Description of Artificial Sequence: Synthetic oligonucleotide
  Antisense strand to SEQ ID NO: 2158656
ucuccaacaagucucuugc

SEQ ID NO: 2158658 - RNA, 19 nt, Artificial Sequence
  Description of Artificial Sequence: Synthetic oligonucleotide
  Sense strand starting at position 2073 of SEQ ID NO: 1882938
ccuugcagucaagaauaau

SEQ ID NO: 2158659 - RNA, 19 nt, Artificial Sequence
  Description of Artificial Sequence: Synthetic oligonucleotide
  Antisense strand to SEQ ID NO: 2158658
auuauucuugacugcaagg

SEQ ID NO: 2158660 - RNA, 19 nt, Artificial Sequence
  Description of Artificial Sequence: Synthetic oligonucleotide
  Sense strand starting at position 2376 of SEQ ID NO: 1882938
ugauauugguaagaaguga

SEQ ID NO: 2158661 - RNA, 19 nt, Artificial Sequence
  Description of Artificial Sequence: Synthetic oligonucleotide
  Antisense strand to SEQ ID NO: 2158660
ucacuucuuaccaauauca

SEQ ID NO: 2158662 - RNA, 19 nt, Artificial Sequence
  Description of Artificial Sequence: Synthetic oligonucleotide
  Sense strand starting at position 2380 of SEQ ID NO: 1882938
auugguaagaagugauaac

SEQ ID NO: 2158663 - RNA, 19 nt, Artificial Sequence
  Description of Artificial Sequence: Synthetic oligonucleotide
  Antisense strand to SEQ ID NO: 2158662
guuaucacuucuuaccaau

SEQ ID NO: 2158664 - RNA, 19 nt, Artificial Sequence
  Description of Artificial Sequence: Synthetic oligonucleotide
  Sense strand starting at position 2390 of SEQ ID NO: 1882938
agugauaacugagaccgau

SEQ ID NO: 2158665 - RNA, 19 nt, Artificial Sequence
  Description of Artificial Sequence: Synthetic oligonucleotide
  Antisense strand to SEQ ID NO: 2158664
aucggucucaguuaucacu

SEQ ID NO: 2158666 - RNA, 19 nt, Artificial Sequence
  Description of Artificial Sequence: Synthetic oligonucleotide
  Sense strand starting at position 2415 of SEQ ID NO: 1882938
augguuaauugaugaagau

SEQ ID NO: 2158667 - RNA, 19 nt, Artificial Sequence
  Description of Artificial Sequence: Synthetic oligonucleotide
  Antisense strand to SEQ ID NO: 2158666
aucuucaucaauuaaccau

SEQ ID NO: 2158668 - RNA, 19 nt, Artificial Sequence
  Description of Artificial Sequence: Synthetic oligonucleotide
  Sense strand starting at position 2667 of SEQ ID NO: 1882938
caccacugguugucuuaga

SEQ ID NO: 2158669 - RNA, 19 nt, Artificial Sequence
  Description of Artificial Sequence: Synthetic oligonucleotide
  Antisense strand to SEQ ID NO: 2158668
ucuaagacaaccaguggug

SEQ ID NO: 2158670 - RNA, 19 nt, Artificial Sequence
  Description of Artificial Sequence: Synthetic oligonucleotide
  Sense strand starting at position 2668 of SEQ ID NO: 1882938
accacugguugucuuagau

SEQ ID NO: 2158671 - RNA, 19 nt, Artificial Sequence
  Description of Artificial Sequence: Synthetic oligonucleotide
  Antisense strand to SEQ ID NO: 2158670
aucuaagacaaccaguggu

SEQ ID NO: 2158672 - RNA, 19 nt, Artificial Sequence
  Description of Artificial Sequence: Synthetic oligonucleotide
  Sense strand starting at position 2672 of SEQ ID NO: 1882938
cugguugucuuagauuaag

SEQ ID NO: 2158673 - RNA, 19 nt, Artificial Sequence
  Description of Artificial Sequence: Synthetic oligonucleotide
  Antisense strand to SEQ ID NO: 2158672
cuuaaucuaagacaaccag

SEQ ID NO: 2158674 - RNA, 19 nt, Artificial Sequence
  Description of Artificial Sequence: Synthetic oligonucleotide
  Sense strand starting at position 2718 of SEQ ID NO: 1882938
aaggauacauuauagaagu

SEQ ID NO: 2158675 - RNA, 19 nt, Artificial Sequence
  Description of Artificial Sequence: Synthetic oligonucleotide
  Antisense strand to SEQ ID NO: 2158674
acuucuauaauguauccuu

SEQ ID NO: 2158676 - RNA, 19 nt, Artificial Sequence
  Description of Artificial Sequence: Synthetic oligonucleotide
  Sense strand starting at position 2728 of SEQ ID NO: 1882938
uauagaaguccacacgauu

SEQ ID NO: 2158677 - RNA, 19 nt, Artificial Sequence
  Description of Artificial Sequence: Synthetic oligonucleotide
  Antisense strand to SEQ ID NO: 2158676
aaucguguggacuucuaua

SEQ ID NO: 2158678 - RNA, 19 nt, Artificial Sequence
  Description of Artificial Sequence: Synthetic oligonucleotide
  Sense strand starting at position 3098 of SEQ ID NO: 1882938
acauucugaugucuggcaa

SEQ ID NO: 2158679 - RNA, 19 nt, Artificial Sequence
  Description of Artificial Sequence: Synthetic oligonucleotide
  Antisense strand to SEQ ID NO: 2158678
uugccagacaucagaaugu

SEQ ID NO: 2158680 - RNA, 19 nt, Artificial Sequence
  Description of Artificial Sequence: Synthetic oligonucleotide
  Sense strand starting at position 3768 of SEQ ID NO: 1882938
acguaaauguauuccaucu

SEQ ID NO: 2158681 - RNA, 19 nt, Artificial Sequence
  Description of Artificial Sequence: Synthetic oligonucleotide
  Antisense strand to SEQ ID NO: 2158680
agauggaauacauuuacgu

SEQ ID NO: 2158682 - RNA, 19 nt, Artificial Sequence
  Description of Artificial Sequence: Synthetic oligonucleotide
  Sense strand starting at position 3851 of SEQ ID NO: 1882938
gguaauuucucugaugucu

SEQ ID NO: 2158683 - RNA, 19 nt, Artificial Sequence
  Description of Artificial Sequence: Synthetic oligonucleotide
  Antisense strand to SEQ ID NO: 2158682
agacaucagagaaauuacc

SEQ ID NO: 2158684 - RNA, 19 nt, Artificial Sequence
  Description of Artificial Sequence: Synthetic oligonucleotide
  Sense strand starting at position 3860 of SEQ ID NO: 1882938
ucugaugucuuuccagcaa

SEQ ID NO: 2158685 - RNA, 19 nt, Artificial Sequence
  Description of Artificial Sequence: Synthetic oligonucleotide
  Antisense strand to SEQ ID NO: 2158684
uugcuggaaagacaucaga

SEQ ID NO: 2158686 - RNA, 19 nt, Artificial Sequence
  Description of Artificial Sequence: Synthetic oligonucleotide
  Sense strand starting at position 28 of SEQ ID NO: 1882939
ggauacuucuauccagaug

SEQ ID NO: 2158687 - RNA, 19 nt, Artificial Sequence
  Description of Artificial Sequence: Synthetic oligonucleotide
  Antisense strand to SEQ ID NO: 2158686
caucuggauagaaguaucc

SEQ ID NO: 2158688 - RNA, 19 nt, Artificial Sequence
  Description of Artificial Sequence: Synthetic oligonucleotide
  Sense strand starting at position 379 of SEQ ID NO: 1882939
ccauguaaacuacgaaugu

SEQ ID NO: 2158689 - RNA, 19 nt, Artificial Sequence
  Description of Artificial Sequence: Synthetic oligonucleotide
  Antisense strand to SEQ ID NO: 2158688
acauucguaguuuacaugg

SEQ ID NO: 2158690 - RNA, 19 nt, Artificial Sequence
  Description of Artificial Sequence: Synthetic oligonucleotide
  Sense strand starting at position 383 of SEQ ID NO: 1882939
guaaacuacgaauguuaau

SEQ ID NO: 2158691 - RNA, 19 nt, Artificial Sequence
  Description of Artificial Sequence: Synthetic oligonucleotide
  Antisense strand to SEQ ID NO: 2158690
auuaacauucguaguuuac

SEQ ID NO: 2158692 - RNA, 19 nt, Artificial Sequence
  Description of Artificial Sequence: Synthetic oligonucleotide
  Sense strand starting at position 747 of SEQ ID NO: 1882939
cugaauuuguugcacugua

SEQ ID NO: 2158693 - RNA, 19 nt, Artificial Sequence
  Description of Artificial Sequence: Synthetic oligonucleotide
  Antisense strand to SEQ ID NO: 2158692
uacagugcaacaaauucag

SEQ ID NO: 2158694 - RNA, 19 nt, Artificial Sequence
  Description of Artificial Sequence: Synthetic oligonucleotide
  Sense strand starting at position 754 of SEQ ID NO: 1882939
uguugcacuguauaaugau

SEQ ID NO: 2158695 - RNA, 19 nt, Artificial Sequence
  Description of Artificial Sequence: Synthetic oligonucleotide
  Antisense strand to SEQ ID NO: 2158694
aucauuauacagugcaaca

SEQ ID NO: 2158696 - RNA, 19 nt, Artificial Sequence
  Description of Artificial Sequence: Synthetic oligonucleotide
  Sense strand starting at position 974 of SEQ ID NO: 1882939
cugucaaucuaagucuaua

SEQ ID NO: 2158697 - RNA, 19 nt, Artificial Sequence
  Description of Artificial Sequence: Synthetic oligonucleotide
  Antisense strand to SEQ ID NO: 2158696
uauagacuuagauugacag

SEQ ID NO: 2158698 - RNA, 19 nt, Artificial Sequence
  Description of Artificial Sequence: Synthetic oligonucleotide
  Sense strand starting at position 986 of SEQ ID NO: 1882939
gucuauaauccauguggca

SEQ ID NO: 2158699 - RNA, 19 nt, Artificial Sequence
  Description of Artificial Sequence: Synthetic oligonucleotide
  Antisense strand to SEQ ID NO: 2158698
ugccacauggauuauagac

SEQ ID NO: 2158700 - RNA, 19 nt, Artificial Sequence
  Description of Artificial Sequence: Synthetic oligonucleotide
  Sense strand starting at position 995 of SEQ ID NO: 1882939
ccauguggcagacagaauu

SEQ ID NO: 2158701 - RNA, 19 nt, Artificial Sequence
  Description of Artificial Sequence: Synthetic oligonucleotide
  Antisense strand to SEQ ID NO: 2158700
aauucugucugccacaugg

SEQ ID NO: 2158702 - RNA, 19 nt, Artificial Sequence
  Description of Artificial Sequence: Synthetic oligonucleotide
  Sense strand starting at position 1007 of SEQ ID NO: 1882939
cagaauugaugugacuauu

SEQ ID NO: 2158703 - RNA, 19 nt, Artificial Sequence
  Description of Artificial Sequence: Synthetic oligonucleotide
  Antisense strand to SEQ ID NO: 2158702
aauagucacaucaauucug

SEQ ID NO: 2158704 - RNA, 19 nt, Artificial Sequence
  Description of Artificial Sequence: Synthetic oligonucleotide
  Sense strand starting at position 1203 of SEQ ID NO: 1882939
uuccuuugcugacuuugaa

SEQ ID NO: 2158705 - RNA, 19 nt, Artificial Sequence
  Description of Artificial Sequence: Synthetic oligonucleotide
  Antisense strand to SEQ ID NO: 2158704
uucaaagucagcaaaggaa

SEQ ID NO: 2158706 - RNA, 19 nt, Artificial Sequence
  Description of Artificial Sequence: Synthetic oligonucleotide
  Sense strand starting at position 1206 of SEQ ID NO: 1882939
cuuugcugacuuugaagaa

SEQ ID NO: 2158707 - RNA, 19 nt, Artificial Sequence
  Description of Artificial Sequence: Synthetic oligonucleotide
  Antisense strand to SEQ ID NO: 2158706
uucuucaaagucagcaaag

SEQ ID NO: 2158708 - RNA, 19 nt, Artificial Sequence
  Description of Artificial Sequence: Synthetic oligonucleotide
  Sense strand starting at position 1304 of SEQ ID NO: 1882939
ccaguugagucucuacaua

SEQ ID NO: 2158709 - RNA, 19 nt, Artificial Sequence
  Description of Artificial Sequence: Synthetic oligonucleotide
  Antisense strand to SEQ ID NO: 2158708
uauguagagacucaacugg

SEQ ID NO: 2158710 - RNA, 19 nt, Artificial Sequence
  Description of Artificial Sequence: Synthetic oligonucleotide
  Sense strand starting at position 1398 of SEQ ID NO: 1882939
cauagaaauugcgagguaa

SEQ ID NO: 2158711 - RNA, 19 nt, Artificial Sequence
  Description of Artificial Sequence: Synthetic oligonucleotide
  Antisense strand to SEQ ID NO: 2158710
uuaccucgcaauuucuaug

SEQ ID NO: 2158712 - RNA, 19 nt, Artificial Sequence
  Description of Artificial Sequence: Synthetic oligonucleotide
  Sense strand starting at position 1400 of SEQ ID NO: 1882939
uagaaauugcgagguaaua

SEQ ID NO: 2158713 - RNA, 19 nt, Artificial Sequence
  Description of Artificial Sequence: Synthetic oligonucleotide
  Antisense strand to SEQ ID NO: 2158712
uauuaccucgcaauuucua

SEQ ID NO: 2158714 - RNA, 19 nt, Artificial Sequence
  Description of Artificial Sequence: Synthetic oligonucleotide
  Sense strand starting at position 1412 of SEQ ID NO: 1882939
gguaauaaauguguugcuu

SEQ ID NO: 2158715 - RNA, 19 nt, Artificial Sequence
  Description of Artificial Sequence: Synthetic oligonucleotide
  Antisense strand to SEQ ID NO: 2158714
aagcaacacauuuauuacc

SEQ ID NO: 2158716 - RNA, 19 nt, Artificial Sequence
  Description of Artificial Sequence: Synthetic oligonucleotide
  Sense strand starting at position 1416 of SEQ ID NO: 1882939
auaaauguguugcuuagaa

SEQ ID NO: 2158717 - RNA, 19 nt, Artificial Sequence
  Description of Artificial Sequence: Synthetic oligonucleotide
  Antisense strand to SEQ ID NO: 2158716
uucuaagcaacacauuuau

SEQ ID NO: 2158718 - RNA, 19 nt, Artificial Sequence
  Description of Artificial Sequence: Synthetic oligonucleotide
  Sense strand starting at position 1418 of SEQ ID NO: 1882939
aaauguguugcuuagaaca

SEQ ID NO: 2158719 - RNA, 19 nt, Artificial Sequence
  Description of Artificial Sequence: Synthetic oligonucleotide
  Antisense strand to SEQ ID NO: 2158718
uguucuaagcaacacauuu

SEQ ID NO: 2158720 - RNA, 19 nt, Artificial Sequence
  Description of Artificial Sequence: Synthetic oligonucleotide
  Sense strand starting at position 1443 of SEQ ID NO: 1882939
uuuguaguuauuugugaac

SEQ ID NO: 2158721 - RNA, 19 nt, Artificial Sequence
  Description of Artificial Sequence: Synthetic oligonucleotide
  Antisense strand to SEQ ID NO: 2158720
guucacaaauaacuacaaa

SEQ ID NO: 2158722 - RNA, 19 nt, Artificial Sequence
  Description of Artificial Sequence: Synthetic oligonucleotide
  Sense strand starting at position 1445 of SEQ ID NO: 1882939
uguaguuauuugugaacaa

SEQ ID NO: 2158723 - RNA, 19 nt, Artificial Sequence
  Description of Artificial Sequence: Synthetic oligonucleotide
  Antisense strand to SEQ ID NO: 2158722
uuguucacaaauaacuaca

SEQ ID NO: 2158724 - RNA, 19 nt, Artificial Sequence
  Description of Artificial Sequence: Synthetic oligonucleotide
  Sense strand starting at position 1446 of SEQ ID NO: 1882939
guaguuauuugugaacaag

SEQ ID NO: 2158725 - RNA, 19 nt, Artificial Sequence
  Description of Artificial Sequence: Synthetic oligonucleotide
  Antisense strand to SEQ ID NO: 2158724
cuuguucacaaauaacuac

SEQ ID NO: 2158726 - RNA, 19 nt, Artificial Sequence
  Description of Artificial Sequence: Synthetic oligonucleotide
  Sense strand starting at position 1463 of SEQ ID NO: 1882939
agcagcuuagaacaugaau

SEQ ID NO: 2158727 - RNA, 19 nt, Artificial Sequence
  Description of Artificial Sequence: Synthetic oligonucleotide
  Antisense strand to SEQ ID NO: 2158726
auucauguucuaagcugcu

SEQ ID NO: 2158728 - RNA, 19 nt, Artificial Sequence
  Description of Artificial Sequence: Synthetic oligonucleotide
  Sense strand starting at position 1674 of SEQ ID NO: 1882939
aguaaucugcuacauaaag

SEQ ID NO: 2158729 - RNA, 19 nt, Artificial Sequence
  Description of Artificial Sequence: Synthetic oligonucleotide
  Antisense strand to SEQ ID NO: 2158728
cuuuauguagcagauuacu

SEQ ID NO: 2158730 - RNA, 19 nt, Artificial Sequence
  Description of Artificial Sequence: Synthetic oligonucleotide
  Sense strand starting at position 1776 of SEQ ID NO: 1882939
gggcaauucuccuuacaaa

SEQ ID NO: 2158731 - RNA, 19 nt, Artificial Sequence
  Description of Artificial Sequence: Synthetic oligonucleotide
  Antisense strand to SEQ ID NO: 2158730
uuuguaaggagaauugccc

SEQ ID NO: 2158732 - RNA, 19 nt, Artificial Sequence
  Description of Artificial Sequence: Synthetic oligonucleotide
  Sense strand starting at position 2073 of SEQ ID NO: 1882939
ccuugcagucaagaauagu

SEQ ID NO: 2158733 - RNA, 19 nt, Artificial Sequence
  Description of Artificial Sequence: Synthetic oligonucleotide
  Antisense strand to SEQ ID NO: 2158732
acuauucuugacugcaagg

SEQ ID NO: 2158734 - RNA, 19 nt, Artificial Sequence
  Description of Artificial Sequence: Synthetic oligonucleotide
  Sense strand starting at position 2079 of SEQ ID NO: 1882939
agucaagaauaguuccaaa

SEQ ID NO: 2158735 - RNA, 19 nt, Artificial Sequence
  Description of Artificial Sequence: Synthetic oligonucleotide
  Antisense strand to SEQ ID NO: 2158734
uuuggaacuauucuugacu

SEQ ID NO: 2158736 - RNA, 19 nt, Artificial Sequence
  Description of Artificial Sequence: Synthetic oligonucleotide
  Sense strand starting at position 2108 of SEQ ID NO: 1882939
agcagaaacguccaugaca

SEQ ID NO: 2158737 - RNA, 19 nt, Artificial Sequence
  Description of Artificial Sequence: Synthetic oligonucleotide
  Antisense strand to SEQ ID NO: 2158736
ugucauggacguuucugcu

SEQ ID NO: 2158738 - RNA, 19 nt, Artificial Sequence
  Description of Artificial Sequence: Synthetic oligonucleotide
  Sense strand starting at position 2110 of SEQ ID NO: 1882939
cagaaacguccaugacaca

SEQ ID NO: 2158739 - RNA, 19 nt, Artificial Sequence
  Description of Artificial Sequence: Synthetic oligonucleotide
  Antisense strand to SEQ ID NO: 2158738
ugugucauggacguuucug

SEQ ID NO: 2158740 - RNA, 19 nt, Artificial Sequence
  Description of Artificial Sequence: Synthetic oligonucleotide
  Sense strand starting at position 2331 of SEQ ID NO: 1882939
gaaguagauuaauuagagu

SEQ ID NO: 2158741 - RNA, 19 nt, Artificial Sequence
  Description of Artificial Sequence: Synthetic oligonucleotide
  Antisense strand to SEQ ID NO: 2158740
acucuaauuaaucuacuuc

SEQ ID NO: 2158742 - RNA, 19 nt, Artificial Sequence
  Description of Artificial Sequence: Synthetic oligonucleotide
  Sense strand starting at position 2334 of SEQ ID NO: 1882939
guagauuaauuagaguauc

SEQ ID NO: 2158743 - RNA, 19 nt, Artificial Sequence
  Description of Artificial Sequence: Synthetic oligonucleotide
  Antisense strand to SEQ ID NO: 2158742
gauacucuaauuaaucuac

SEQ ID NO: 2158744 - RNA, 19 nt, Artificial Sequence
  Description of Artificial Sequence: Synthetic oligonucleotide
  Sense strand starting at position 2376 of SEQ ID NO: 1882939
ugauauugguaagaagaga

SEQ ID NO: 2158745 - RNA, 19 nt, Artificial Sequence
  Description of Artificial Sequence: Synthetic oligonucleotide
  Antisense strand to SEQ ID NO: 2158744
ucucuucuuaccaauauca

SEQ ID NO: 2158746 - RNA, 19 nt, Artificial Sequence
  Description of Artificial Sequence: Synthetic oligonucleotide
  Sense strand starting at position 2390 of SEQ ID NO: 1882939
agagauaacugagaccaau

SEQ ID NO: 2158747 - RNA, 19 nt, Artificial Sequence
  Description of Artificial Sequence: Synthetic oligonucleotide
  Antisense strand to SEQ ID NO: 2158746
auuggucucaguuaucucu

SEQ ID NO: 2158748 - RNA, 19 nt, Artificial Sequence
  Description of Artificial Sequence: Synthetic oligonucleotide
  Sense strand starting at position 2415 of SEQ ID NO: 1882939
augguuaauugaugaagac

SEQ ID NO: 2158749 - RNA, 19 nt, Artificial Sequence
  Description of Artificial Sequence: Synthetic oligonucleotide
  Antisense strand to SEQ ID NO: 2158748
gucuucaucaauuaaccau

SEQ ID NO: 2158750 - RNA, 19 nt, Artificial Sequence
  Description of Artificial Sequence: Synthetic oligonucleotide
  Sense strand starting at position 2474 of SEQ ID NO: 1882939
gagaaaucguccuagaaau

SEQ ID NO: 2158751 - RNA, 19 nt, Artificial Sequence
  Description of Artificial Sequence: Synthetic oligonucleotide
  Antisense strand to SEQ ID NO: 2158750
auuucuaggacgauuucuc

SEQ ID NO: 2158752 - RNA, 19 nt, Artificial Sequence
  Description of Artificial Sequence: Synthetic oligonucleotide
  Sense strand starting at position 2667 of SEQ ID NO: 1882939
accacuaguugucuuagau

SEQ ID NO: 2158753 - RNA, 19 nt, Artificial Sequence
  Description of Artificial Sequence: Synthetic oligonucleotide
  Antisense strand to SEQ ID NO: 2158752
aucuaagacaacuaguggu

SEQ ID NO: 2158754 - RNA, 19 nt, Artificial Sequence
  Description of Artificial Sequence: Synthetic oligonucleotide
  Sense strand starting at position 2671 of SEQ ID NO: 1882939
cuaguugucuuagauuaag

SEQ ID NO: 2158755 - RNA, 19 nt, Artificial Sequence
  Description of Artificial Sequence: Synthetic oligonucleotide
  Antisense strand to SEQ ID NO: 2158754
cuuaaucuaagacaacuag

SEQ ID NO: 2158756 - RNA, 19 nt, Artificial Sequence
  Description of Artificial Sequence: Synthetic oligonucleotide
  Sense strand starting at position 2738 of SEQ ID NO: 1882939
acacgaugucucuggaaau

SEQ ID NO: 2158757 - RNA, 19 nt, Artificial Sequence
  Description of Artificial Sequence: Synthetic oligonucleotide
  Antisense strand to SEQ ID NO: 2158756
auuuccagagacaucgugu

SEQ ID NO: 2158758 - RNA, 19 nt, Artificial Sequence
  Description of Artificial Sequence: Synthetic oligonucleotide
  Sense strand starting at position 3768 of SEQ ID NO: 1882939
uuuacauaaguguauucca

SEQ ID NO: 2158759 - RNA, 19 nt, Artificial Sequence
  Description of Artificial Sequence: Synthetic oligonucleotide
  Antisense strand to SEQ ID NO: 2158758
uggaauacacuuauguaaa

SEQ ID NO: 2158760 - RNA, 19 nt, Artificial Sequence
  Description of Artificial Sequence: Synthetic oligonucleotide
  Sense strand starting at position 3771 of SEQ ID NO: 1882939
acauaaguguauuccaucu

SEQ ID NO: 2158761 - RNA, 19 nt, Artificial Sequence
  Description of Artificial Sequence: Synthetic oligonucleotide
  Antisense strand to SEQ ID NO: 2158760
agauggaauacacuuaugu

SEQ ID NO: 2158762 - RNA, 19 nt, Artificial Sequence
  Description of Artificial Sequence: Synthetic oligonucleotide
  Sense strand starting at position 3829 of SEQ ID NO: 1882939
ccgauccugucauauaaua

SEQ ID NO: 2158763 - RNA, 19 nt, Artificial Sequence
  Description of Artificial Sequence: Synthetic oligonucleotide
  Antisense strand to SEQ ID NO: 2158762
uauuauaugacaggaucgg

SEQ ID NO: 2158764 - RNA, 19 nt, Artificial Sequence
  Description of Artificial Sequence: Synthetic oligonucleotide
  Sense strand starting at position 3854 of SEQ ID NO: 1882939
gguaauuucucugaucccu

SEQ ID NO: 2158765 - RNA, 19 nt, Artificial Sequence
  Description of Artificial Sequence: Synthetic oligonucleotide
  Antisense strand to SEQ ID NO: 2158764
agggaucagagaaauuacc

SEQ ID NO: 2158766 - RNA, 19 nt, Artificial Sequence
  Description of Artificial Sequence: Synthetic oligonucleotide
  Sense strand starting at position 26 of SEQ ID NO: 1882940
aggauacuucuaugcagau

SEQ ID NO: 2158767 - RNA, 19 nt, Artificial Sequence
  Description of Artificial Sequence: Synthetic oligonucleotide
  Antisense strand to SEQ ID NO: 2158766
aucugcauagaaguauccu

SEQ ID NO: 2158768 - RNA, 19 nt, Artificial Sequence
  Description of Artificial Sequence: Synthetic oligonucleotide
  Sense strand starting at position 27 of SEQ ID NO: 1882940
ggauacuucuaugcagaug

SEQ ID NO: 2158769 - RNA, 19 nt, Artificial Sequence
  Description of Artificial Sequence: Synthetic oligonucleotide
  Antisense strand to SEQ ID NO: 2158768
caucugcauagaaguaucc

SEQ ID NO: 2158770 - RNA, 19 nt, Artificial Sequence
  Description of Artificial Sequence: Synthetic oligonucleotide
  Sense strand starting at position 313 of SEQ ID NO: 1882940
acugaauccugaucagggu

SEQ ID NO: 2158771 - RNA, 19 nt, Artificial Sequence
  Description of Artificial Sequence: Synthetic oligonucleotide
  Antisense strand to SEQ ID NO: 2158770
acccugaucaggauucagu

SEQ ID NO: 2158772 - RNA, 19 nt, Artificial Sequence
  Description of Artificial Sequence: Synthetic oligonucleotide
  Sense strand starting at position 346 of SEQ ID NO: 1882940
ugaagucugcaccacuaga

SEQ ID NO: 2158773 - RNA, 19 nt, Artificial Sequence
  Description of Artificial Sequence: Synthetic oligonucleotide
  Antisense strand to SEQ ID NO: 2158772
ucuaguggugcagacuuca

SEQ ID NO: 2158774 - RNA, 19 nt, Artificial Sequence
  Description of Artificial Sequence: Synthetic oligonucleotide
  Sense strand starting at position 381 of SEQ ID NO: 1882940
guaaacuacgaauguuaau

SEQ ID NO: 2158775 - RNA, 19 nt, Artificial Sequence
  Description of Artificial Sequence: Synthetic oligonucleotide
  Antisense strand to SEQ ID NO: 2158774
auuaacauucguaguuuac

SEQ ID NO: 2158776 - RNA, 19 nt, Artificial Sequence
  Description of Artificial Sequence: Synthetic oligonucleotide
  Sense strand starting at position 402 of SEQ ID NO: 1882940
ugcccaauggccuaaucau

SEQ ID NO: 2158777 - RNA, 19 nt, Artificial Sequence
  Description of Artificial Sequence: Synthetic oligonucleotide
  Antisense strand to SEQ ID NO: 2158776
augauuaggccauugggca

SEQ ID NO: 2158778 - RNA, 19 nt, Artificial Sequence
  Description of Artificial Sequence: Synthetic oligonucleotide
  Sense strand starting at position 804 of SEQ ID NO: 1882940
uugagcagugcauaaagaa

SEQ ID NO: 2158779 - RNA, 19 nt, Artificial Sequence
  Description of Artificial Sequence: Synthetic oligonucleotide
  Antisense strand to SEQ ID NO: 2158778
uucuuuaugcacugcucaa

SEQ ID NO: 2158780 - RNA, 19 nt, Artificial Sequence
  Description of Artificial Sequence: Synthetic oligonucleotide
  Sense strand starting at position 1013 of SEQ ID NO: 1882940
augggacuauucuugauuc

SEQ ID NO: 2158781 - RNA, 19 nt, Artificial Sequence
  Description of Artificial Sequence: Synthetic oligonucleotide
  Antisense strand to SEQ ID NO: 2158780
gaaucaagaauagucccau

SEQ ID NO: 2158782 - RNA, 19 nt, Artificial Sequence
  Description of Artificial Sequence: Synthetic oligonucleotide
  Sense strand starting at position 1140 of SEQ ID NO: 1882940
ugugauuacauguacacga

SEQ ID NO: 2158783 - RNA, 19 nt, Artificial Sequence
  Description of Artificial Sequence: Synthetic oligonucleotide
  Antisense strand to SEQ ID NO: 2158782
ucguguacauguaaucaca

SEQ ID NO: 2158784 - RNA, 19 nt, Artificial Sequence
  Description of Artificial Sequence: Synthetic oligonucleotide
  Sense strand starting at position 1142 of SEQ ID NO: 1882940
ugauuacauguacacgauu

SEQ ID NO: 2158785 - RNA, 19 nt, Artificial Sequence
  Description of Artificial Sequence: Synthetic oligonucleotide
  Antisense strand to SEQ ID NO: 2158784
aaucguguacauguaauca

SEQ ID NO: 2158786 - RNA, 19 nt, Artificial Sequence
  Description of Artificial Sequence: Synthetic oligonucleotide
  Sense strand starting at position 1148 of SEQ ID NO: 1882940
cauguacacgauuauguaa

SEQ ID NO: 2158787 - RNA, 19 nt, Artificial Sequence
  Description of Artificial Sequence: Synthetic oligonucleotide
  Antisense strand to SEQ ID NO: 2158786
uuacauaaucguguacaug

SEQ ID NO: 2158788 - RNA, 19 nt, Artificial Sequence
  Description of Artificial Sequence: Synthetic oligonucleotide
  Sense strand starting at position 1151 of SEQ ID NO: 1882940
guacacgauuauguaagaa

SEQ ID NO: 2158789 - RNA, 19 nt, Artificial Sequence
  Description of Artificial Sequence: Synthetic oligonucleotide
  Antisense strand to SEQ ID NO: 2158788
uucuuacauaaucguguac

SEQ ID NO: 2158790 - RNA, 19 nt, Artificial Sequence
  Description of Artificial Sequence: Synthetic oligonucleotide
  Sense strand starting at position 1204 of SEQ ID NO: 1882940
cuuugcugacuuugaagaa

SEQ ID NO: 2158791 - RNA, 19 nt, Artificial Sequence
  Description of Artificial Sequence: Synthetic oligonucleotide
  Antisense strand to SEQ ID NO: 2158790
uucuucaaagucagcaaag

SEQ ID NO: 2158792 - RNA, 19 nt, Artificial Sequence
  Description of Artificial Sequence: Synthetic oligonucleotide
  Sense strand starting at position 1302 of SEQ ID NO: 1882940
ccaguugagucucuagaua

SEQ ID NO: 2158793 - RNA, 19 nt, Artificial Sequence
  Description of Artificial Sequence: Synthetic oligonucleotide
  Antisense strand to SEQ ID NO: 2158792
uaucuagagacucaacugg

SEQ ID NO: 2158794 - RNA, 19 nt, Artificial Sequence
  Description of Artificial Sequence: Synthetic oligonucleotide
  Sense strand starting at position 1386 of SEQ ID NO: 1882940
ccucuugauccauagaagu

SEQ ID NO: 2158795 - RNA, 19 nt, Artificial Sequence
  Description of Artificial Sequence: Synthetic oligonucleotide
  Antisense strand to SEQ ID NO: 2158794
acuucuauggaucaagagg

SEQ ID NO: 2158796 - RNA, 19 nt, Artificial Sequence
  Description of Artificial Sequence: Synthetic oligonucleotide
  Sense strand starting at position 1416 of SEQ ID NO: 1882940
aaacguguugcuuagaaca

SEQ ID NO: 2158797 - RNA, 19 nt, Artificial Sequence
  Description of Artificial Sequence: Synthetic oligonucleotide
  Antisense strand to SEQ ID NO: 2158796
uguucuaagcaacacguuu

SEQ ID NO: 2158798 - RNA, 19 nt, Artificial Sequence
  Description of Artificial Sequence: Synthetic oligonucleotide
  Sense strand starting at position 1441 of SEQ ID NO: 1882940
uuuguaguuauuugugaac

SEQ ID NO: 2158799 - RNA, 19 nt, Artificial Sequence
  Description of Artificial Sequence: Synthetic oligonucleotide
  Antisense strand to SEQ ID NO: 2158798
guucacaaauaacuacaaa

SEQ ID NO: 2158800 - RNA, 19 nt, Artificial Sequence
  Description of Artificial Sequence: Synthetic oligonucleotide
  Sense strand starting at position 1461 of SEQ ID NO: 1882940
agcagcuuagaacaugaau

SEQ ID NO: 2158801 - RNA, 19 nt, Artificial Sequence
  Description of Artificial Sequence: Synthetic oligonucleotide
  Antisense strand to SEQ ID NO: 2158800
auucauguucuaagcugcu

SEQ ID NO: 2158802 - RNA, 19 nt, Artificial Sequence
  Description of Artificial Sequence: Synthetic oligonucleotide
  Sense strand starting at position 1675 of SEQ ID NO: 1882940
aguaaucugcuacauaaag

SEQ ID NO: 2158803 - RNA, 19 nt, Artificial Sequence
  Description of Artificial Sequence: Synthetic oligonucleotide
  Antisense strand to SEQ ID NO: 2158802
cuuuauguagcagauuacu

SEQ ID NO: 2158804 - RNA, 19 nt, Artificial Sequence
  Description of Artificial Sequence: Synthetic oligonucleotide
  Sense strand starting at position 1768 of SEQ ID NO: 1882940
uuaauauuagggcaauucu

SEQ ID NO: 2158805 - RNA, 19 nt, Artificial Sequence
  Description of Artificial Sequence: Synthetic oligonucleotide
  Antisense strand to SEQ ID NO: 2158804
agaauugcccuaauauuaa

SEQ ID NO: 2158806 - RNA, 19 nt, Artificial Sequence
  Description of Artificial Sequence: Synthetic oligonucleotide
  Sense strand starting at position 1777 of SEQ ID NO: 1882940
gggcaauucuccuuacaaa

SEQ ID NO: 2158807 - RNA, 19 nt, Artificial Sequence
  Description of Artificial Sequence: Synthetic oligonucleotide
  Antisense strand to SEQ ID NO: 2158806
uuuguaaggagaauugccc

SEQ ID NO: 2158808 - RNA, 19 nt, Artificial Sequence
  Description of Artificial Sequence: Synthetic oligonucleotide
  Sense strand starting at position 1900 of SEQ ID NO: 1882940
gagcaagagacuuguugga

SEQ ID NO: 2158809 - RNA, 19 nt, Artificial Sequence
  Description of Artificial Sequence: Synthetic oligonucleotide
  Antisense strand to SEQ ID NO: 2158808
uccaacaagucucuugcuc

SEQ ID NO: 2158810 - RNA, 19 nt, Artificial Sequence
  Description of Artificial Sequence: Synthetic oligonucleotide
  Sense strand starting at position 1902 of SEQ ID NO: 1882940
gcaagagacuuguuggaga

SEQ ID NO: 2158811 - RNA, 19 nt, Artificial Sequence
  Description of Artificial Sequence: Synthetic oligonucleotide
  Antisense strand to SEQ ID NO: 2158810
ucuccaacaagucucuugc

SEQ ID NO: 2158812 - RNA, 19 nt, Artificial Sequence
  Description of Artificial Sequence: Synthetic oligonucleotide
  Sense strand starting at position 2072 of SEQ ID NO: 1882940
ccuugcagucaagaauagu

SEQ ID NO: 2158813 - RNA, 19 nt, Artificial Sequence
  Description of Artificial Sequence: Synthetic oligonucleotide
  Antisense strand to SEQ ID NO: 2158812
acuauucuugacugcaagg

SEQ ID NO: 2158814 - RNA, 19 nt, Artificial Sequence
  Description of Artificial Sequence: Synthetic oligonucleotide
  Sense strand starting at position 2078 of SEQ ID NO: 1882940
agucaagaauaguuccaaa

SEQ ID NO: 2158815 - RNA, 19 nt, Artificial Sequence
  Description of Artificial Sequence: Synthetic oligonucleotide
  Antisense strand to SEQ ID NO: 2158814
uuuggaacuauucuugacu

SEQ ID NO: 2158816 - RNA, 19 nt, Artificial Sequence
  Description of Artificial Sequence: Synthetic oligonucleotide
  Sense strand starting at position 2330 of SEQ ID NO: 1882940
gaaguagauuaauuacagu

SEQ ID NO: 2158817 - RNA, 19 nt, Artificial Sequence
  Description of Artificial Sequence: Synthetic oligonucleotide
  Antisense strand to SEQ ID NO: 2158816
acuguaauuaaucuacuuc

SEQ ID NO: 2158818 - RNA, 19 nt, Artificial Sequence
  Description of Artificial Sequence: Synthetic oligonucleotide
  Sense strand starting at position 2379 of SEQ ID NO: 1882940
auugguaaggagugauaac

SEQ ID NO: 2158819 - RNA, 19 nt, Artificial Sequence
  Description of Artificial Sequence: Synthetic oligonucleotide
  Antisense strand to SEQ ID NO: 2158818
guuaucacuccuuaccaau

SEQ ID NO: 2158820 - RNA, 19 nt, Artificial Sequence
  Description of Artificial Sequence: Synthetic oligonucleotide
  Sense strand starting at position 2410 of SEQ ID NO: 1882940
cauaaugguuaauugauga

SEQ ID NO: 2158821 - RNA, 19 nt, Artificial Sequence
  Description of Artificial Sequence: Synthetic oligonucleotide
  Antisense strand to SEQ ID NO: 2158820
ucaucaauuaaccauuaug

SEQ ID NO: 2158822 - RNA, 19 nt, Artificial Sequence
  Description of Artificial Sequence: Synthetic oligonucleotide
  Sense strand starting at position 2673 of SEQ ID NO: 1882940
guugucuuagauuaaguca

SEQ ID NO: 2158823 - RNA, 19 nt, Artificial Sequence
  Description of Artificial Sequence: Synthetic oligonucleotide
  Antisense strand to SEQ ID NO: 2158822
ugacuuaaucuaagacaac

SEQ ID NO: 2158824 - RNA, 19 nt, Artificial Sequence
  Description of Artificial Sequence: Synthetic oligonucleotide
  Sense strand starting at position 2726 of SEQ ID NO: 1882940
uauagaaguccacacgauu

SEQ ID NO: 2158825 - RNA, 19 nt, Artificial Sequence
  Description of Artificial Sequence: Synthetic oligonucleotide
  Antisense strand to SEQ ID NO: 2158824
aaucguguggacuucuaua

SEQ ID NO: 2158826 - RNA, 19 nt, Artificial Sequence
  Description of Artificial Sequence: Synthetic oligonucleotide
  Sense strand starting at position 2749 of SEQ ID NO: 1882940
uggaaauaaucuccaugua

SEQ ID NO: 2158827 - RNA, 19 nt, Artificial Sequence
  Description of Artificial Sequence: Synthetic oligonucleotide
  Antisense strand to SEQ ID NO: 2158826
uacauggagauuauuucca

SEQ ID NO: 2158828 - RNA, 19 nt, Artificial Sequence
  Description of Artificial Sequence: Synthetic oligonucleotide
  Sense strand starting at position 3007 of SEQ ID NO: 1882940
gcgucuguucgcuuuaaca

SEQ ID NO: 2158829 - RNA, 19 nt, Artificial Sequence
  Description of Artificial Sequence: Synthetic oligonucleotide
  Antisense strand to SEQ ID NO: 2158828
uguuaaagcgaacagacgc

SEQ ID NO: 2158830 - RNA, 19 nt, Artificial Sequence
  Description of Artificial Sequence: Synthetic oligonucleotide
  Sense strand starting at position 3161 of SEQ ID NO: 1882940
cuuccaguucucuagagag

SEQ ID NO: 2158831 - RNA, 19 nt, Artificial Sequence
  Description of Artificial Sequence: Synthetic oligonucleotide
  Antisense strand to SEQ ID NO: 2158830
cucucuagagaacuggaag

SEQ ID NO: 2158832 - RNA, 19 nt, Artificial Sequence
  Description of Artificial Sequence: Synthetic oligonucleotide
  Sense strand starting at position 3301 of SEQ ID NO: 1882940
cuagacucuuaaguguuaa

SEQ ID NO: 2158833 - RNA, 19 nt, Artificial Sequence
  Description of Artificial Sequence: Synthetic oligonucleotide
  Antisense strand to SEQ ID NO: 2158832
uuaacacuuaagagucuag

SEQ ID NO: 2158834 - RNA, 19 nt, Artificial Sequence
  Description of Artificial Sequence: Synthetic oligonucleotide
  Sense strand starting at position 3408 of SEQ ID NO: 1882940
uucuuauuaggagacguua

SEQ ID NO: 2158835 - RNA, 19 nt, Artificial Sequence
  Description of Artificial Sequence: Synthetic oligonucleotide
  Antisense strand to SEQ ID NO: 2158834
uaacgucuccuaauaagaa

SEQ ID NO: 2158836 - RNA, 19 nt, Artificial Sequence
  Description of Artificial Sequence: Synthetic oligonucleotide
  Sense strand starting at position 3410 of SEQ ID NO: 1882940
cuuauuaggagacguuaau

SEQ ID NO: 2158837 - RNA, 19 nt, Artificial Sequence
  Description of Artificial Sequence: Synthetic oligonucleotide
  Antisense strand to SEQ ID NO: 2158836
auuaacgucuccuaauaag

SEQ ID NO: 2158838 - RNA, 19 nt, Artificial Sequence
  Description of Artificial Sequence: Synthetic oligonucleotide
  Sense strand starting at position 3666 of SEQ ID NO: 1882940
ugagaaacaugcuucuauu

SEQ ID NO: 2158839 - RNA, 19 nt, Artificial Sequence
  Description of Artificial Sequence: Synthetic oligonucleotide
  Antisense strand to SEQ ID NO: 2158838
aauagaagcauguuucuca

SEQ ID NO: 2158840 - RNA, 19 nt, Artificial Sequence
  Description of Artificial Sequence: Synthetic oligonucleotide
  Sense strand starting at position 3732 of SEQ ID NO: 1882940
aggcaaugccacuaagaug

SEQ ID NO: 2158841 - RNA, 19 nt, Artificial Sequence
  Description of Artificial Sequence: Synthetic oligonucleotide
  Antisense strand to SEQ ID NO: 2158840
caucuuaguggcauugccu

SEQ ID NO: 2158842 - RNA, 19 nt, Artificial Sequence
  Description of Artificial Sequence: Synthetic oligonucleotide
  Sense strand starting at position 3877 of SEQ ID NO: 1882940
ugagguuccucaucugaau

SEQ ID NO: 2158843 - RNA, 19 nt, Artificial Sequence
  Description of Artificial Sequence: Synthetic oligonucleotide
  Antisense strand to SEQ ID NO: 2158842
auucagaugaggaaccuca

SEQ ID NO: 2158844 - RNA, 19 nt, Artificial Sequence
  Description of Artificial Sequence: Synthetic oligonucleotide
  Sense strand starting at position 3934 of SEQ ID NO: 1882940
uuguuccaagaaugauaca

SEQ ID NO: 2158845 - RNA, 19 nt, Artificial Sequence
  Description of Artificial Sequence: Synthetic oligonucleotide
  Antisense strand to SEQ ID NO: 2158844
uguaucauucuuggaacaa

SEQ ID NO: 2158846 - RNA, 19 nt, Artificial Sequence
  Description of Artificial Sequence: Synthetic oligonucleotide
  Sense strand starting at position 778 of SEQ ID NO: 1882941
cuagaauugaguugccaga

SEQ ID NO: 2158847 - RNA, 19 nt, Artificial Sequence
  Description of Artificial Sequence: Synthetic oligonucleotide
  Antisense strand to SEQ ID NO: 2158846
ucuggcaacucaauucuag

SEQ ID NO: 2158848 - RNA, 19 nt, Artificial Sequence
  Description of Artificial Sequence: Synthetic oligonucleotide
  Sense strand starting at position 780 of SEQ ID NO: 1882941
agaauugaguugccagaca

SEQ ID NO: 2158849 - RNA, 19 nt, Artificial Sequence
  Description of Artificial Sequence: Synthetic oligonucleotide
  Antisense strand to SEQ ID NO: 2158848
ugucuggcaacucaauucu

SEQ ID NO: 2158850 - RNA, 19 nt, Artificial Sequence
  Description of Artificial Sequence: Synthetic oligonucleotide
  Sense strand starting at position 785 of SEQ ID NO: 1882941
ugaguugccagacaucaga

SEQ ID NO: 2158851 - RNA, 19 nt, Artificial Sequence
  Description of Artificial Sequence: Synthetic oligonucleotide
  Antisense strand to SEQ ID NO: 2158850
ucugaugucuggcaacuca

SEQ ID NO: 2158852 - RNA, 19 nt, Artificial Sequence
  Description of Artificial Sequence: Synthetic oligonucleotide
  Sense strand starting at position 793 of SEQ ID NO: 1882941
cagacaucagaaugugauu

SEQ ID NO: 2158853 - RNA, 19 nt, Artificial Sequence
  Description of Artificial Sequence: Synthetic oligonucleotide
  Antisense strand to SEQ ID NO: 2158852
aaucacauucugaugucug

SEQ ID NO: 2158854 - RNA, 19 nt, Artificial Sequence
  Description of Artificial Sequence: Synthetic oligonucleotide
  Sense strand starting at position 1056 of SEQ ID NO: 1882941
agcauaauaugagugguca

SEQ ID NO: 2158855 - RNA, 19 nt, Artificial Sequence
  Description of Artificial Sequence: Synthetic oligonucleotide
  Antisense strand to SEQ ID NO: 2158854
ugaccacucauauuaugcu

SEQ ID NO: 2158856 - RNA, 19 nt, Artificial Sequence
  Description of Artificial Sequence: Synthetic oligonucleotide
  Sense strand starting at position 1060 of SEQ ID NO: 1882941
uaauaugaguggucaaaua

SEQ ID NO: 2158857 - RNA, 19 nt, Artificial Sequence
  Description of Artificial Sequence: Synthetic oligonucleotide
  Antisense strand to SEQ ID NO: 2158856
uauuugaccacucauauua

SEQ ID NO: 2158858 - RNA, 19 nt, Artificial Sequence
  Description of Artificial Sequence: Synthetic oligonucleotide
  Sense strand starting at position 1154 of SEQ ID NO: 1882941
agagaaaucguguggacuu

SEQ ID NO: 2158859 - RNA, 19 nt, Artificial Sequence
  Description of Artificial Sequence: Synthetic oligonucleotide
  Antisense strand to SEQ ID NO: 2158858
aaguccacacgauuucucu

SEQ ID NO: 2158860 - RNA, 19 nt, Artificial Sequence
  Description of Artificial Sequence: Synthetic oligonucleotide
  Sense strand starting at position 1178 of SEQ ID NO: 1882941
auguauccuugaguccaga

SEQ ID NO: 2158861 - RNA, 19 nt, Artificial Sequence
  Description of Artificial Sequence: Synthetic oligonucleotide
  Antisense strand to SEQ ID NO: 2158860
ucuggacucaaggauacau

SEQ ID NO: 2158862 - RNA, 19 nt, Artificial Sequence
  Description of Artificial Sequence: Synthetic oligonucleotide
  Sense strand starting at position 1181 of SEQ ID NO: 1882941
uauccuugaguccagaagu

SEQ ID NO: 2158863 - RNA, 19 nt, Artificial Sequence
  Description of Artificial Sequence: Synthetic oligonucleotide
  Antisense strand to SEQ ID NO: 2158862
acuucuggacucaaggaua

SEQ ID NO: 2158864 - RNA, 19 nt, Artificial Sequence
  Description of Artificial Sequence: Synthetic oligonucleotide
  Sense strand starting at position 1551 of SEQ ID NO: 1882941
gggauauuguaauuaaucu

SEQ ID NO: 2158865 - RNA, 19 nt, Artificial Sequence
  Description of Artificial Sequence: Synthetic oligonucleotide
  Antisense strand to SEQ ID NO: 2158864
agauuaauuacaauauccc

SEQ ID NO: 2158866 - RNA, 19 nt, Artificial Sequence
  Description of Artificial Sequence: Synthetic oligonucleotide
  Sense strand starting at position 1809 of SEQ ID NO: 1882941
uuggaauuauucuugacug

SEQ ID NO: 2158867 - RNA, 19 nt, Artificial Sequence
  Description of Artificial Sequence: Synthetic oligonucleotide
  Antisense strand to SEQ ID NO: 2158866
cagucaagaauaauuccaa

SEQ ID NO: 2158868 - RNA, 19 nt, Artificial Sequence
  Description of Artificial Sequence: Synthetic oligonucleotide
  Sense strand starting at position 1811 of SEQ ID NO: 1882941
ggaauuauucuugacugca

SEQ ID NO: 2158869 - RNA, 19 nt, Artificial Sequence
  Description of Artificial Sequence: Synthetic oligonucleotide
  Antisense strand to SEQ ID NO: 2158868
ugcagucaagaauaauucc

SEQ ID NO: 2158870 - RNA, 19 nt, Artificial Sequence
  Description of Artificial Sequence: Synthetic oligonucleotide
  Sense strand starting at position 2007 of SEQ ID NO: 1882941
ccuccaauuugaucgcuuu

SEQ ID NO: 2158871 - RNA, 19 nt, Artificial Sequence
  Description of Artificial Sequence: Synthetic oligonucleotide
  Antisense strand to SEQ ID NO: 2158870
aaagcgaucaaauuggagg

SEQ ID NO: 2158872 - RNA, 19 nt, Artificial Sequence
  Description of Artificial Sequence: Synthetic oligonucleotide
  Sense strand starting at position 2027 of SEQ ID NO: 1882941
ccuggugaccaguaacuaa

SEQ ID NO: 2158873 - RNA, 19 nt, Artificial Sequence
  Description of Artificial Sequence: Synthetic oligonucleotide
  Antisense strand to SEQ ID NO: 2158872
uuaguuacuggucaccagg

SEQ ID NO: 2158874 - RNA, 19 nt, Artificial Sequence
  Description of Artificial Sequence: Synthetic oligonucleotide
  Sense strand starting at position 2158 of SEQ ID NO: 1882941
uguauaauuggguauauug

SEQ ID NO: 2158875 - RNA, 19 nt, Artificial Sequence
  Description of Artificial Sequence: Synthetic oligonucleotide
  Antisense strand to SEQ ID NO: 2158874
caauauacccaauuauaca

SEQ ID NO: 2158876 - RNA, 19 nt, Artificial Sequence
  Description of Artificial Sequence: Synthetic oligonucleotide
  Sense strand starting at position 2454 of SEQ ID NO: 1882941
uugcaauuucuguggguca

SEQ ID NO: 2158877 - RNA, 19 nt, Artificial Sequence
  Description of Artificial Sequence: Synthetic oligonucleotide
  Antisense strand to SEQ ID NO: 2158876
ugacccacagaaauugcaa

SEQ ID NO: 2158878 - RNA, 19 nt, Artificial Sequence
  Description of Artificial Sequence: Synthetic oligonucleotide
  Sense strand starting at position 2456 of SEQ ID NO: 1882941
gcaauuucugugggucaag

SEQ ID NO: 2158879 - RNA, 19 nt, Artificial Sequence
  Description of Artificial Sequence: Synthetic oligonucleotide
  Antisense strand to SEQ ID NO: 2158878
cuugacccacagaaauugc

SEQ ID NO: 2158880 - RNA, 19 nt, Artificial Sequence
  Description of Artificial Sequence: Synthetic oligonucleotide
  Sense strand starting at position 2501 of SEQ ID NO: 1882941
ucuuuaagacugcagucaa

SEQ ID NO: 2158881 - RNA, 19 nt, Artificial Sequence
  Description of Artificial Sequence: Synthetic oligonucleotide
  Antisense strand to SEQ ID NO: 2158880
uugacugcagucuuaaaga

SEQ ID NO: 2158882 - RNA, 19 nt, Artificial Sequence
  Description of Artificial Sequence: Synthetic oligonucleotide
  Sense strand starting at position 2535 of SEQ ID NO: 1882941
aggguuguuaucuagugac

SEQ ID NO: 2158883 - RNA, 19 nt, Artificial Sequence
  Description of Artificial Sequence: Synthetic oligonucleotide
  Antisense strand to SEQ ID NO: 2158882
gucacuagauaacaacccu

SEQ ID NO: 2158884 - RNA, 19 nt, Artificial Sequence
  Description of Artificial Sequence: Synthetic oligonucleotide
  Sense strand starting at position 2575 of SEQ ID NO: 1882941
cacagacuuccuuggguua

SEQ ID NO: 2158885 - RNA, 19 nt, Artificial Sequence
  Description of Artificial Sequence: Synthetic oligonucleotide
  Antisense strand to SEQ ID NO: 2158884
uaacccaaggaagucugug

SEQ ID NO: 2158886 - RNA, 19 nt, Artificial Sequence
  Description of Artificial Sequence: Synthetic oligonucleotide
  Sense strand starting at position 2576 of SEQ ID NO: 1882941
acagacuuccuuggguuau

SEQ ID NO: 2158887 - RNA, 19 nt, Artificial Sequence
  Description of Artificial Sequence: Synthetic oligonucleotide
  Antisense strand to SEQ ID NO: 2158886
auaacccaaggaagucugu

SEQ ID NO: 2158888 - RNA, 19 nt, Artificial Sequence
  Description of Artificial Sequence: Synthetic oligonucleotide
  Sense strand starting at position 2841 of SEQ ID NO: 1882941
uucuuucugccacauggau

SEQ ID NO: 2158889 - RNA, 19 nt, Artificial Sequence
  Description of Artificial Sequence: Synthetic oligonucleotide
  Antisense strand to SEQ ID NO: 2158888
auccauguggcagaaagaa

SEQ ID NO: 2158890 - RNA, 19 nt, Artificial Sequence
  Description of Artificial Sequence: Synthetic oligonucleotide
  Sense strand starting at position 2934 of SEQ ID NO: 1882941
aaugcauaugguuaaguau

SEQ ID NO: 2158891 - RNA, 19 nt, Artificial Sequence
  Description of Artificial Sequence: Synthetic oligonucleotide
  Antisense strand to SEQ ID NO: 2158890
auacuuaaccauaugcauu

SEQ ID NO: 2158892 - RNA, 19 nt, Artificial Sequence
  Description of Artificial Sequence: Synthetic oligonucleotide
  Sense strand starting at position 2940 of SEQ ID NO: 1882941
uaugguuaaguauagcauu

SEQ ID NO: 2158893 - RNA, 19 nt, Artificial Sequence
  Description of Artificial Sequence: Synthetic oligonucleotide
  Antisense strand to SEQ ID NO: 2158892
aaugcuauacuuaaccaua

SEQ ID NO: 2158894 - RNA, 19 nt, Artificial Sequence
  Description of Artificial Sequence: Synthetic oligonucleotide
  Sense strand starting at position 3091 of SEQ ID NO: 1882941
gcaacaaauucuguaauag

SEQ ID NO: 2158895 - RNA, 19 nt, Artificial Sequence
  Description of Artificial Sequence: Synthetic oligonucleotide
  Antisense strand to SEQ ID NO: 2158894
cuauuacagaauuuguugc

SEQ ID NO: 2158896 - RNA, 19 nt, Artificial Sequence
  Description of Artificial Sequence: Synthetic oligonucleotide
  Sense strand starting at position 3285 of SEQ ID NO: 1882941
aguuaaauaugucuggauu

SEQ ID NO: 2158897 - RNA, 19 nt, Artificial Sequence
  Description of Artificial Sequence: Synthetic oligonucleotide
  Antisense strand to SEQ ID NO: 2158896
aauccagacauauuuaacu

SEQ ID NO: 2158898 - RNA, 19 nt, Artificial Sequence
  Description of Artificial Sequence: Synthetic oligonucleotide
  Sense strand starting at position 3286 of SEQ ID NO: 1882941
guuaaauaugucuggauug

SEQ ID NO: 2158899 - RNA, 19 nt, Artificial Sequence
  Description of Artificial Sequence: Synthetic oligonucleotide
  Antisense strand to SEQ ID NO: 2158898
caauccagacauauuuaac

SEQ ID NO: 2158900 - RNA, 19 nt, Artificial Sequence
  Description of Artificial Sequence: Synthetic oligonucleotide
  Sense strand starting at position 3288 of SEQ ID NO: 1882941
uaaauaugucuggauugua

SEQ ID NO: 2158901 - RNA, 19 nt, Artificial Sequence
  Description of Artificial Sequence: Synthetic oligonucleotide
  Antisense strand to SEQ ID NO: 2158900
uacaauccagacauauuua

SEQ ID NO: 2158902 - RNA, 19 nt, Artificial Sequence
  Description of Artificial Sequence: Synthetic oligonucleotide
  Sense strand starting at position 3550 of SEQ ID NO: 1882941
gugugauagcaggagaaua

SEQ ID NO: 2158903 - RNA, 19 nt, Artificial Sequence
  Description of Artificial Sequence: Synthetic oligonucleotide
  Antisense strand to SEQ ID NO: 2158902
uauucuccugcuaucacac

SEQ ID NO: 2158904 - RNA, 19 nt, Artificial Sequence
  Description of Artificial Sequence: Synthetic oligonucleotide
  Sense strand starting at position 3595 of SEQ ID NO: 1882941
gauagaagaugccuauguu

SEQ ID NO: 2158905 - RNA, 19 nt, Artificial Sequence
  Description of Artificial Sequence: Synthetic oligonucleotide
  Antisense strand to SEQ ID NO: 2158904
aacauaggcaucuucuauc

SEQ ID NO: 2158906 - RNA, 19 nt, Artificial Sequence
  Description of Artificial Sequence: Synthetic oligonucleotide
  Sense strand starting at position 3598 of SEQ ID NO: 1882941
agaagaugccuauguugaa

SEQ ID NO: 2158907 - RNA, 19 nt, Artificial Sequence
  Description of Artificial Sequence: Synthetic oligonucleotide
  Antisense strand to SEQ ID NO: 2158906
uucaacauaggcaucuucu

SEQ ID NO: 2158908 - RNA, 19 nt, Artificial Sequence
  Description of Artificial Sequence: Synthetic oligonucleotide
  Sense strand starting at position 3599 of SEQ ID NO: 1882941
gaagaugccuauguugaaa

SEQ ID NO: 2158909 - RNA, 19 nt, Artificial Sequence
  Description of Artificial Sequence: Synthetic oligonucleotide
  Antisense strand to SEQ ID NO: 2158908
uuucaacauaggcaucuuc

SEQ ID NO: 2158910 - RNA, 19 nt, Artificial Sequence
  Description of Artificial Sequence: Synthetic oligonucleotide
  Sense strand starting at position 3679 of SEQ ID NO: 1882941
auagaauugaccuggguac

SEQ ID NO: 2158911 - RNA, 19 nt, Artificial Sequence
  Description of Artificial Sequence: Synthetic oligonucleotide
  Antisense strand to SEQ ID NO: 2158910
guacccaggucaauucuau

SEQ ID NO: 2158912 - RNA, 19 nt, Artificial Sequence
  Description of Artificial Sequence: Synthetic oligonucleotide
  Sense strand starting at position 3680 of SEQ ID NO: 1882941
uagaauugaccuggguaca

SEQ ID NO: 2158913 - RNA, 19 nt, Artificial Sequence
  Description of Artificial Sequence: Synthetic oligonucleotide
  Antisense strand to SEQ ID NO: 2158912
uguacccaggucaauucua

SEQ ID NO: 2158914 - RNA, 19 nt, Artificial Sequence
  Description of Artificial Sequence: Synthetic oligonucleotide
  Sense strand starting at position 3681 of SEQ ID NO: 1882941
agaauugaccuggguacau

SEQ ID NO: 2158915 - RNA, 19 nt, Artificial Sequence
  Description of Artificial Sequence: Synthetic oligonucleotide
  Antisense strand to SEQ ID NO: 2158914
auguacccaggucaauucu

SEQ ID NO: 2158916 - RNA, 19 nt, Artificial Sequence
  Description of Artificial Sequence: Synthetic oligonucleotide
  Sense strand starting at position 3699 of SEQ ID NO: 1882941
uagugaugucuuuaaccag

SEQ ID NO: 2158917 - RNA, 19 nt, Artificial Sequence
  Description of Artificial Sequence: Synthetic oligonucleotide
  Antisense strand to SEQ ID NO: 2158916
cugguuaaagacaucacua

SEQ ID NO: 2158918 - RNA, 19 nt, Artificial Sequence
  Description of Artificial Sequence: Synthetic oligonucleotide
  Sense strand starting at position 3817 of SEQ ID NO: 1882941
uacuuuaagugguuggaaa

SEQ ID NO: 2158919 - RNA, 19 nt, Artificial Sequence
  Description of Artificial Sequence: Synthetic oligonucleotide
  Antisense strand to SEQ ID NO: 2158918
uuuccaaccacuuaaagua

SEQ ID NO: 2158920 - RNA, 19 nt, Artificial Sequence
  Description of Artificial Sequence: Synthetic oligonucleotide
  Sense strand starting at position 3818 of SEQ ID NO: 1882941
acuuuaagugguuggaaac

SEQ ID NO: 2158921 - RNA, 19 nt, Artificial Sequence
  Description of Artificial Sequence: Synthetic oligonucleotide
  Antisense strand to SEQ ID NO: 2158920
guuuccaaccacuuaaagu

SEQ ID NO: 2158922 - RNA, 19 nt, Artificial Sequence
  Description of Artificial Sequence: Synthetic oligonucleotide
  Sense strand starting at position 3819 of SEQ ID NO: 1882941
cuuuaagugguuggaaaca

SEQ ID NO: 2158923 - RNA, 19 nt, Artificial Sequence
  Description of Artificial Sequence: Synthetic oligonucleotide
  Antisense strand to SEQ ID NO: 2158922
uguuuccaaccacuuaaag

SEQ ID NO: 2158924 - RNA, 19 nt, Artificial Sequence
  Description of Artificial Sequence: Synthetic oligonucleotide
  Sense strand starting at position 3829 of SEQ ID NO: 1882941
uuggaaacaugagucucua

SEQ ID NO: 2158925 - RNA, 19 nt, Artificial Sequence
  Description of Artificial Sequence: Synthetic oligonucleotide
  Antisense strand to SEQ ID NO: 2158924
uagagacucauguuuccaa

SEQ ID NO: 2158926 - RNA, 19 nt, Artificial Sequence
  Description of Artificial Sequence: Synthetic oligonucleotide
  Sense strand starting at position 182 of SEQ ID NO: 1882942
uuuaguggauggguuauua

SEQ ID NO: 2158927 - RNA, 19 nt, Artificial Sequence
  Description of Artificial Sequence: Synthetic oligonucleotide
  Antisense strand to SEQ ID NO: 2158926
uaauaacccauccacuaaa

SEQ ID NO: 2158928 - RNA, 19 nt, Artificial Sequence
  Description of Artificial Sequence: Synthetic oligonucleotide
  Sense strand starting at position 186 of SEQ ID NO: 1882942
guggauggguuauuaggaa

SEQ ID NO: 2158929 - RNA, 19 nt, Artificial Sequence
  Description of Artificial Sequence: Synthetic oligonucleotide
  Antisense strand to SEQ ID NO: 2158928
uuccuaauaacccauccac

SEQ ID NO: 2158930 - RNA, 19 nt, Artificial Sequence
  Description of Artificial Sequence: Synthetic oligonucleotide
  Sense strand starting at position 785 of SEQ ID NO: 1882942
agaauugaguugccggaca

SEQ ID NO: 2158931 - RNA, 19 nt, Artificial Sequence
  Description of Artificial Sequence: Synthetic oligonucleotide
  Antisense strand to SEQ ID NO: 2158930
uguccggcaacucaauucu

SEQ ID NO: 2158932 - RNA, 19 nt, Artificial Sequence
  Description of Artificial Sequence: Synthetic oligonucleotide
  Sense strand starting at position 790 of SEQ ID NO: 1882942
ugaguugccggacaucaga

SEQ ID NO: 2158933 - RNA, 19 nt, Artificial Sequence
  Description of Artificial Sequence: Synthetic oligonucleotide
  Antisense strand to SEQ ID NO: 2158932
ucugauguccggcaacuca

SEQ ID NO: 2158934 - RNA, 19 nt, Artificial Sequence
  Description of Artificial Sequence: Synthetic oligonucleotide
  Sense strand starting at position 798 of SEQ ID NO: 1882942
cggacaucagaaugugauu

SEQ ID NO: 2158935 - RNA, 19 nt, Artificial Sequence
  Description of Artificial Sequence: Synthetic oligonucleotide
  Antisense strand to SEQ ID NO: 2158934
aaucacauucugauguccg

SEQ ID NO: 2158936 - RNA, 19 nt, Artificial Sequence
  Description of Artificial Sequence: Synthetic oligonucleotide
  Sense strand starting at position 813 of SEQ ID NO: 1882942
gauuauauuuaggaguucu

SEQ ID NO: 2158937 - RNA, 19 nt, Artificial Sequence
  Description of Artificial Sequence: Synthetic oligonucleotide
  Antisense strand to SEQ ID NO: 2158936
agaacuccuaaauauaauc

SEQ ID NO: 2158938 - RNA, 19 nt, Artificial Sequence
  Description of Artificial Sequence: Synthetic oligonucleotide
  Sense strand starting at position 823 of SEQ ID NO: 1882942
aggaguucuuaggugaagu

SEQ ID NO: 2158939 - RNA, 19 nt, Artificial Sequence
  Description of Artificial Sequence: Synthetic oligonucleotide
  Antisense strand to SEQ ID NO: 2158938
acuucaccuaagaacuccu

SEQ ID NO: 2158940 - RNA, 19 nt, Artificial Sequence
  Description of Artificial Sequence: Synthetic oligonucleotide
  Sense strand starting at position 824 of SEQ ID NO: 1882942
ggaguucuuaggugaagua

SEQ ID NO: 2158941 - RNA, 19 nt, Artificial Sequence
  Description of Artificial Sequence: Synthetic oligonucleotide
  Antisense strand to SEQ ID NO: 2158940
uacuucaccuaagaacucc

SEQ ID NO: 2158942 - RNA, 19 nt, Artificial Sequence
  Description of Artificial Sequence: Synthetic oligonucleotide
  Sense strand starting at position 825 of SEQ ID NO: 1882942
gaguucuuaggugaaguaa

SEQ ID NO: 2158943 - RNA, 19 nt, Artificial Sequence
  Description of Artificial Sequence: Synthetic oligonucleotide
  Antisense strand to SEQ ID NO: 2158942
uuacuucaccuaagaacuc

SEQ ID NO: 2158944 - RNA, 19 nt, Artificial Sequence
  Description of Artificial Sequence: Synthetic oligonucleotide
  Sense strand starting at position 1058 of SEQ ID NO: 1882942
gcauaacaugaguggucaa

SEQ ID NO: 2158945 - RNA, 19 nt, Artificial Sequence
  Description of Artificial Sequence: Synthetic oligonucleotide
  Antisense strand to SEQ ID NO: 2158944
uugaccacucauguuaugc

SEQ ID NO: 2158946 - RNA, 19 nt, Artificial Sequence
  Description of Artificial Sequence: Synthetic oligonucleotide
  Sense strand starting at position 1061 of SEQ ID NO: 1882942
uaacaugaguggucaaaua

SEQ ID NO: 2158947 - RNA, 19 nt, Artificial Sequence
  Description of Artificial Sequence: Synthetic oligonucleotide
  Antisense strand to SEQ ID NO: 2158946
uauuugaccacucauguua

SEQ ID NO: 2158948 - RNA, 19 nt, Artificial Sequence
  Description of Artificial Sequence: Synthetic oligonucleotide
  Sense strand starting at position 1142 of SEQ ID NO: 1882942
ggagauuauuuccagagac

SEQ ID NO: 2158949 - RNA, 19 nt, Artificial Sequence
  Description of Artificial Sequence: Synthetic oligonucleotide
  Antisense strand to SEQ ID NO: 2158948
gucucuggaaauaaucucc

SEQ ID NO: 2158950 - RNA, 19 nt, Artificial Sequence
  Description of Artificial Sequence: Synthetic oligonucleotide
  Sense strand starting at position 1811 of SEQ ID NO: 1882942
ggaacuauucuugacugca

SEQ ID NO: 2158951 - RNA, 19 nt, Artificial Sequence
  Description of Artificial Sequence: Synthetic oligonucleotide
  Antisense strand to SEQ ID NO: 2158950
ugcagucaagaauaguucc

SEQ ID NO: 2158952 - RNA, 19 nt, Artificial Sequence
  Description of Artificial Sequence: Synthetic oligonucleotide
  Sense strand starting at position 2027 of SEQ ID NO: 1882942
ccuggugaccaguaaguaa

SEQ ID NO: 2158953 - RNA, 19 nt, Artificial Sequence
  Description of Artificial Sequence: Synthetic oligonucleotide
  Antisense strand to SEQ ID NO: 2158952
uuacuuacuggucaccagg

SEQ ID NO: 2158954 - RNA, 19 nt, Artificial Sequence
  Description of Artificial Sequence: Synthetic oligonucleotide
  Sense strand starting at position 2213 of SEQ ID NO: 1882942
cuuuauguagcagauuacu

SEQ ID NO: 2158955 - RNA, 19 nt, Artificial Sequence
  Description of Artificial Sequence: Synthetic oligonucleotide
  Antisense strand to SEQ ID NO: 2158954
aguaaucugcuacauaaag

SEQ ID NO: 2158956 - RNA, 19 nt, Artificial Sequence
  Description of Artificial Sequence: Synthetic oligonucleotide
  Sense strand starting at position 2219 of SEQ ID NO: 1882942
guagcagauuacuuccuaa

SEQ ID NO: 2158957 - RNA, 19 nt, Artificial Sequence
  Description of Artificial Sequence: Synthetic oligonucleotide
  Antisense strand to SEQ ID NO: 2158956
uuaggaaguaaucugcuac

SEQ ID NO: 2158958 - RNA, 19 nt, Artificial Sequence
  Description of Artificial Sequence: Synthetic oligonucleotide
  Sense strand starting at position 2494 of SEQ ID NO: 1882942
ucgcaauuucuauggguca

SEQ ID NO: 2158959 - RNA, 19 nt, Artificial Sequence
  Description of Artificial Sequence: Synthetic oligonucleotide
  Antisense strand to SEQ ID NO: 2158958
ugacccauagaaauugcga

SEQ ID NO: 2158960 - RNA, 19 nt, Artificial Sequence
  Description of Artificial Sequence: Synthetic oligonucleotide
  Sense strand starting at position 2541 of SEQ ID NO: 1882942
ucuguaagacugcagucaa

SEQ ID NO: 2158961 - RNA, 19 nt, Artificial Sequence
  Description of Artificial Sequence: Synthetic oligonucleotide
  Antisense strand to SEQ ID NO: 2158960
uugacugcagucuuacaga

SEQ ID NO: 2158962 - RNA, 19 nt, Artificial Sequence
  Description of Artificial Sequence: Synthetic oligonucleotide
  Sense strand starting at position 2575 of SEQ ID NO: 1882942
uggguuguuauguagagac

SEQ ID NO: 2158963 - RNA, 19 nt, Artificial Sequence
  Description of Artificial Sequence: Synthetic oligonucleotide
  Antisense strand to SEQ ID NO: 2158962
gucucuacauaacaaccca

SEQ ID NO: 2158964 - RNA, 19 nt, Artificial Sequence
  Description of Artificial Sequence: Synthetic oligonucleotide
  Sense strand starting at position 2615 of SEQ ID NO: 1882942
cccagacuuccuuggguua

SEQ ID NO: 2158965 - RNA, 19 nt, Artificial Sequence
  Description of Artificial Sequence: Synthetic oligonucleotide
  Antisense strand to SEQ ID NO: 2158964
uaacccaaggaagucuggg

SEQ ID NO: 2158966 - RNA, 19 nt, Artificial Sequence
  Description of Artificial Sequence: Synthetic oligonucleotide
  Sense strand starting at position 2616 of SEQ ID NO: 1882942
ccagacuuccuuggguuau

SEQ ID NO: 2158967 - RNA, 19 nt, Artificial Sequence
  Description of Artificial Sequence: Synthetic oligonucleotide
  Antisense strand to SEQ ID NO: 2158966
auaacccaaggaagucugg

SEQ ID NO: 2158968 - RNA, 19 nt, Artificial Sequence
  Description of Artificial Sequence: Synthetic oligonucleotide
  Sense strand starting at position 2984 of SEQ ID NO: 1882942
uguacuaaugcauauggua

SEQ ID NO: 2158969 - RNA, 19 nt, Artificial Sequence
  Description of Artificial Sequence: Synthetic oligonucleotide
  Antisense strand to SEQ ID NO: 2158968
uaccauaugcauuaguaca

SEQ ID NO: 2158970 - RNA, 19 nt, Artificial Sequence
  Description of Artificial Sequence: Synthetic oligonucleotide
  Sense strand starting at position 2993 of SEQ ID NO: 1882942
gcauaugguaaguauagua

SEQ ID NO: 2158971 - RNA, 19 nt, Artificial Sequence
  Description of Artificial Sequence: Synthetic oligonucleotide
  Antisense strand to SEQ ID NO: 2158970
uacuauacuuaccauaugc

SEQ ID NO: 2158972 - RNA, 19 nt, Artificial Sequence
  Description of Artificial Sequence: Synthetic oligonucleotide
  Sense strand starting at position 3115 of SEQ ID NO: 1882942
gagagauggauauguguga

SEQ ID NO: 2158973 - RNA, 19 nt, Artificial Sequence
  Description of Artificial Sequence: Synthetic oligonucleotide
  Antisense strand to SEQ ID NO: 2158972
ucacacauauccaucucuc

SEQ ID NO: 2158974 - RNA, 19 nt, Artificial Sequence
  Description of Artificial Sequence: Synthetic oligonucleotide
  Sense strand starting at position 3119 of SEQ ID NO: 1882942
gauggauaugugugaucau

SEQ ID NO: 2158975 - RNA, 19 nt, Artificial Sequence
  Description of Artificial Sequence: Synthetic oligonucleotide
  Antisense strand to SEQ ID NO: 2158974
augaucacacauauccauc

SEQ ID NO: 2158976 - RNA, 19 nt, Artificial Sequence
  Description of Artificial Sequence: Synthetic oligonucleotide
  Sense strand starting at position 3122 of SEQ ID NO: 1882942
ggauaugugugaucauuau

SEQ ID NO: 2158977 - RNA, 19 nt, Artificial Sequence
  Description of Artificial Sequence: Synthetic oligonucleotide
  Antisense strand to SEQ ID NO: 2158976
auaaugaucacacauaucc

SEQ ID NO: 2158978 - RNA, 19 nt, Artificial Sequence
  Description of Artificial Sequence: Synthetic oligonucleotide
  Sense strand starting at position 3126 of SEQ ID NO: 1882942
augugugaucauuauacag

SEQ ID NO: 2158979 - RNA, 19 nt, Artificial Sequence
  Description of Artificial Sequence: Synthetic oligonucleotide
  Antisense strand to SEQ ID NO: 2158978
cuguauaaugaucacacau

SEQ ID NO: 2158980 - RNA, 19 nt, Artificial Sequence
  Description of Artificial Sequence: Synthetic oligonucleotide
  Sense strand starting at position 3340 of SEQ ID NO: 1882942
aguuaaauaugucuggacu

SEQ ID NO: 2158981 - RNA, 19 nt, Artificial Sequence
  Description of Artificial Sequence: Synthetic oligonucleotide
  Antisense strand to SEQ ID NO: 2158980
aguccagacauauuuaacu

SEQ ID NO: 2158982 - RNA, 19 nt, Artificial Sequence
  Description of Artificial Sequence: Synthetic oligonucleotide
  Sense strand starting at position 3341 of SEQ ID NO: 1882942
guuaaauaugucuggacug

SEQ ID NO: 2158983 - RNA, 19 nt, Artificial Sequence
  Description of Artificial Sequence: Synthetic oligonucleotide
  Antisense strand to SEQ ID NO: 2158982
caguccagacauauuuaac

SEQ ID NO: 2158984 - RNA, 19 nt, Artificial Sequence
  Description of Artificial Sequence: Synthetic oligonucleotide
  Sense strand starting at position 3343 of SEQ ID NO: 1882942
uaaauaugucuggacugua

SEQ ID NO: 2158985 - RNA, 19 nt, Artificial Sequence
  Description of Artificial Sequence: Synthetic oligonucleotide
  Antisense strand to SEQ ID NO: 2158984
uacaguccagacauauuua

SEQ ID NO: 2158986 - RNA, 19 nt, Artificial Sequence
  Description of Artificial Sequence: Synthetic oligonucleotide
  Sense strand starting at position 3605 of SEQ ID NO: 1882942
gugugauagcaggaggaua

SEQ ID NO: 2158987 - RNA, 19 nt, Artificial Sequence
  Description of Artificial Sequence: Synthetic oligonucleotide
  Antisense strand to SEQ ID NO: 2158986
uauccuccugcuaucacac

SEQ ID NO: 2158988 - RNA, 19 nt, Artificial Sequence
  Description of Artificial Sequence: Synthetic oligonucleotide
  Sense strand starting at position 3653 of SEQ ID NO: 1882942
agaagaugccuacguugaa

SEQ ID NO: 2158989 - RNA, 19 nt, Artificial Sequence
  Description of Artificial Sequence: Synthetic oligonucleotide
  Antisense strand to SEQ ID NO: 2158988
uucaacguaggcaucuucu

SEQ ID NO: 2158990 - RNA, 19 nt, Artificial Sequence
  Description of Artificial Sequence: Synthetic oligonucleotide
  Sense strand starting at position 3654 of SEQ ID NO: 1882942
gaagaugccuacguugaaa

SEQ ID NO: 2158991 - RNA, 19 nt, Artificial Sequence
  Description of Artificial Sequence: Synthetic oligonucleotide
  Antisense strand to SEQ ID NO: 2158990
uuucaacguaggcaucuuc

SEQ ID NO: 2158992 - RNA, 19 nt, Artificial Sequence
  Description of Artificial Sequence: Synthetic oligonucleotide
  Sense strand starting at position 3709 of SEQ ID NO: 1882942
gauugagauuucuaaggua

SEQ ID NO: 2158993 - RNA, 19 nt, Artificial Sequence
  Description of Artificial Sequence: Synthetic oligonucleotide
  Antisense strand to SEQ ID NO: 2158992
uaccuuagaaaucucaauc

SEQ ID NO: 2158994 - RNA, 19 nt, Artificial Sequence
  Description of Artificial Sequence: Synthetic oligonucleotide
  Sense strand starting at position 3712 of SEQ ID NO: 1882942
ugagauuucuaagguagaa

SEQ ID NO: 2158995 - RNA, 19 nt, Artificial Sequence
  Description of Artificial Sequence: Synthetic oligonucleotide
  Antisense strand to SEQ ID NO: 2158994
uucuaccuuagaaaucuca

SEQ ID NO: 2158996 - RNA, 19 nt, Artificial Sequence
  Description of Artificial Sequence: Synthetic oligonucleotide
  Sense strand starting at position 3757 of SEQ ID NO: 1882942
cagugaugucuuuaaccag

SEQ ID NO: 2158997 - RNA, 19 nt, Artificial Sequence
  Description of Artificial Sequence: Synthetic oligonucleotide
  Antisense strand to SEQ ID NO: 2158996
cugguuaaagacaucacug

SEQ ID NO: 2158998 - RNA, 19 nt, Artificial Sequence
  Description of Artificial Sequence: Synthetic oligonucleotide
  Sense strand starting at position 3852 of SEQ ID NO: 1882942
ggauuuccaucuggauaga

SEQ ID NO: 2158999 - RNA, 19 nt, Artificial Sequence
  Description of Artificial Sequence: Synthetic oligonucleotide
  Antisense strand to SEQ ID NO: 2158998
ucuauccagauggaaaucc

SEQ ID NO: 2159000 - RNA, 19 nt, Artificial Sequence
  Description of Artificial Sequence: Synthetic oligonucleotide
  Sense strand starting at position 3866 of SEQ ID NO: 1882942
auagaaguauccuuuaagu

SEQ ID NO: 2159001 - RNA, 19 nt, Artificial Sequence
  Description of Artificial Sequence: Synthetic oligonucleotide
  Antisense strand to SEQ ID NO: 2159000
acuuaaaggauacuucuau

SEQ ID NO: 2159002 - RNA, 19 nt, Artificial Sequence
  Description of Artificial Sequence: Synthetic oligonucleotide
  Sense strand starting at position 3875 of SEQ ID NO: 1882942
uccuuuaaguggcuggaaa

SEQ ID NO: 2159003 - RNA, 19 nt, Artificial Sequence
  Description of Artificial Sequence: Synthetic oligonucleotide
  Antisense strand to SEQ ID NO: 2159002
uuuccagccacuuaaagga

SEQ ID NO: 2159004 - RNA, 19 nt, Artificial Sequence
  Description of Artificial Sequence: Synthetic oligonucleotide
  Sense strand starting at position 3887 of SEQ ID NO: 1882942
cuggaaacaugagucucua

SEQ ID NO: 2159005 - RNA, 19 nt, Artificial Sequence
  Description of Artificial Sequence: Synthetic oligonucleotide
  Antisense strand to SEQ ID NO: 2159004
uagagacucauguuuccag

SEQ ID NO: 2159006 - RNA, 19 nt, Artificial Sequence
  Description of Artificial Sequence: Synthetic oligonucleotide
  Sense strand starting at position 30 of SEQ ID NO: 1882943
guccuuccaggguauuaca

SEQ ID NO: 2159007 - RNA, 19 nt, Artificial Sequence
  Description of Artificial Sequence: Synthetic oligonucleotide
  Antisense strand to SEQ ID NO: 2159006
uguaauacccuggaaggac

SEQ ID NO: 2159008 - RNA, 19 nt, Artificial Sequence
  Description of Artificial Sequence: Synthetic oligonucleotide
  Sense strand starting at position 174 of SEQ ID NO: 1882943
ugccaucaggaguaacauu

SEQ ID NO: 2159009 - RNA, 19 nt, Artificial Sequence
  Description of Artificial Sequence: Synthetic oligonucleotide
  Antisense strand to SEQ ID NO: 2159008
aauguuacuccugauggca

SEQ ID NO: 2159010 - RNA, 19 nt, Artificial Sequence
  Description of Artificial Sequence: Synthetic oligonucleotide
  Sense strand starting at position 296 of SEQ ID NO: 1882943
acagguguugaauaugcau

SEQ ID NO: 2159011 - RNA, 19 nt, Artificial Sequence
  Description of Artificial Sequence: Synthetic oligonucleotide
  Antisense strand to SEQ ID NO: 2159010
augcauauucaacaccugu

SEQ ID NO: 2159012 - RNA, 19 nt, Artificial Sequence
  Description of Artificial Sequence: Synthetic oligonucleotide
  Sense strand starting at position 341 of SEQ ID NO: 1882943
guaacaagcccuuaggaua

SEQ ID NO: 2159013 - RNA, 19 nt, Artificial Sequence
  Description of Artificial Sequence: Synthetic oligonucleotide
  Antisense strand to SEQ ID NO: 2159012
uauccuaagggcuuguuac

SEQ ID NO: 2159014 - RNA, 19 nt, Artificial Sequence
  Description of Artificial Sequence: Synthetic oligonucleotide
  Sense strand starting at position 462 of SEQ ID NO: 1882943
uaguaacgucucuaggaua

SEQ ID NO: 2159015 - RNA, 19 nt, Artificial Sequence
  Description of Artificial Sequence: Synthetic oligonucleotide
  Antisense strand to SEQ ID NO: 2159014
uauccuagagacguuacua

SEQ ID NO: 2159016 - RNA, 19 nt, Artificial Sequence
  Description of Artificial Sequence: Synthetic oligonucleotide
  Sense strand starting at position 467 of SEQ ID NO: 1882943
acgucucuaggauauuaua

SEQ ID NO: 2159017 - RNA, 19 nt, Artificial Sequence
  Description of Artificial Sequence: Synthetic oligonucleotide
  Antisense strand to SEQ ID NO: 2159016
uauaauauccuagagacgu

SEQ ID NO: 2159018 - RNA, 19 nt, Artificial Sequence
  Description of Artificial Sequence: Synthetic oligonucleotide
  Sense strand starting at position 539 of SEQ ID NO: 1882943
ggauaugacgaguaauguc

SEQ ID NO: 2159019 - RNA, 19 nt, Artificial Sequence
  Description of Artificial Sequence: Synthetic oligonucleotide
  Antisense strand to SEQ ID NO: 2159018
gacauuacucgucauaucc

SEQ ID NO: 2159020 - RNA, 19 nt, Artificial Sequence
  Description of Artificial Sequence: Synthetic oligonucleotide
  Sense strand starting at position 693 of SEQ ID NO: 1882943
guguacacccuguaugaca

SEQ ID NO: 2159021 - RNA, 19 nt, Artificial Sequence
  Description of Artificial Sequence: Synthetic oligonucleotide
  Antisense strand to SEQ ID NO: 2159020
ugucauacaggguguacac

SEQ ID NO: 2159022 - RNA, 19 nt, Artificial Sequence
  Description of Artificial Sequence: Synthetic oligonucleotide
  Sense strand starting at position 701 of SEQ ID NO: 1882943
ccuguaugacauuaggagu

SEQ ID NO: 2159023 - RNA, 19 nt, Artificial Sequence
  Description of Artificial Sequence: Synthetic oligonucleotide
  Antisense strand to SEQ ID NO: 2159022
acuccuaaugucauacagg

SEQ ID NO: 2159024 - RNA, 19 nt, Artificial Sequence
  Description of Artificial Sequence: Synthetic oligonucleotide
  Sense strand starting at position 756 of SEQ ID NO: 1882943
gugaacacccucugugaca

SEQ ID NO: 2159025 - RNA, 19 nt, Artificial Sequence
  Description of Artificial Sequence: Synthetic oligonucleotide
  Antisense strand to SEQ ID NO: 2159024
ugucacagaggguguucac

SEQ ID NO: 2159026 - RNA, 19 nt, Artificial Sequence
  Description of Artificial Sequence: Synthetic oligonucleotide
  Sense strand starting at position 757 of SEQ ID NO: 1882943
ugaacacccucugugacau

SEQ ID NO: 2159027 - RNA, 19 nt, Artificial Sequence
  Description of Artificial Sequence: Synthetic oligonucleotide
  Antisense strand to SEQ ID NO: 2159026
augucacagaggguguuca

SEQ ID NO: 2159028 - RNA, 19 nt, Artificial Sequence
  Description of Artificial Sequence: Synthetic oligonucleotide
  Sense strand starting at position 763 of SEQ ID NO: 1882943
cccucugugacaugaggaa

SEQ ID NO: 2159029 - RNA, 19 nt, Artificial Sequence
  Description of Artificial Sequence: Synthetic oligonucleotide
  Antisense strand to SEQ ID NO: 2159028
uuccucaugucacagaggg

SEQ ID NO: 2159030 - RNA, 19 nt, Artificial Sequence
  Description of Artificial Sequence: Synthetic oligonucleotide
  Sense strand starting at position 821 of SEQ ID NO: 1882943
guacacacccuguaauguu

SEQ ID NO: 2159031 - RNA, 19 nt, Artificial Sequence
  Description of Artificial Sequence: Synthetic oligonucleotide
  Antisense strand to SEQ ID NO: 2159030
aacauuacaggguguguac

SEQ ID NO: 2159032 - RNA, 19 nt, Artificial Sequence
  Description of Artificial Sequence: Synthetic oligonucleotide
  Sense strand starting at position 844 of SEQ ID NO: 1882943
gaaauagccgucuaggaua

SEQ ID NO: 2159033 - RNA, 19 nt, Artificial Sequence
  Description of Artificial Sequence: Synthetic oligonucleotide
  Antisense strand to SEQ ID NO: 2159032
uauccuagacggcuauuuc

SEQ ID NO: 2159034 - RNA, 19 nt, Artificial Sequence
  Description of Artificial Sequence: Synthetic oligonucleotide
  Sense strand starting at position 910 of SEQ ID NO: 1882943
uacgaaugauaugccaaga

SEQ ID NO: 2159035 - RNA, 19 nt, Artificial Sequence
  Description of Artificial Sequence: Synthetic oligonucleotide
  Antisense strand to SEQ ID NO: 2159034
ucuuggcauaucauucgua

SEQ ID NO: 2159036 - RNA, 19 nt, Artificial Sequence
  Description of Artificial Sequence: Synthetic oligonucleotide
  Sense strand starting at position 915 of SEQ ID NO: 1882943
augauaugccaagauguac

SEQ ID NO: 2159037 - RNA, 19 nt, Artificial Sequence
  Description of Artificial Sequence: Synthetic oligonucleotide
  Antisense strand to SEQ ID NO: 2159036
guacaucuuggcauaucau

SEQ ID NO: 2159038 - RNA, 19 nt, Artificial Sequence
  Description of Artificial Sequence: Synthetic oligonucleotide
  Sense strand starting at position 1300 of SEQ ID NO: 1882943
ggguauuccgaauaacauc

SEQ ID NO: 2159039 - RNA, 19 nt, Artificial Sequence
  Description of Artificial Sequence: Synthetic oligonucleotide
  Antisense strand to SEQ ID NO: 2159038
gauguuauucggaauaccc

SEQ ID NO: 2159040 - RNA, 19 nt, Artificial Sequence
  Description of Artificial Sequence: Synthetic oligonucleotide
  Sense strand starting at position 1351 of SEQ ID NO: 1882943
gucauaucucccuaagaug

SEQ ID NO: 2159041 - RNA, 19 nt, Artificial Sequence
  Description of Artificial Sequence: Synthetic oligonucleotide
  Antisense strand to SEQ ID NO: 2159040
caucuuagggagauaugac

SEQ ID NO: 2159042 - RNA, 19 nt, Artificial Sequence
  Description of Artificial Sequence: Synthetic oligonucleotide
  Sense strand starting at position 1457 of SEQ ID NO: 1882943
gccugugacguuaggagua

SEQ ID NO: 2159043 - RNA, 19 nt, Artificial Sequence
  Description of Artificial Sequence: Synthetic oligonucleotide
  Antisense strand to SEQ ID NO: 2159042
uacuccuaacgucacaggc

SEQ ID NO: 2159044 - RNA, 19 nt, Artificial Sequence
  Description of Artificial Sequence: Synthetic oligonucleotide
  Sense strand starting at position 1535 of SEQ ID NO: 1882943
agcaacaucuucuuaggau

SEQ ID NO: 2159045 - RNA, 19 nt, Artificial Sequence
  Description of Artificial Sequence: Synthetic oligonucleotide
  Antisense strand to SEQ ID NO: 2159044
auccuaagaagauguugcu

SEQ ID NO: 2159046 - RNA, 19 nt, Artificial Sequence
  Description of Artificial Sequence: Synthetic oligonucleotide
  Sense strand starting at position 1701 of SEQ ID NO: 1882943
guacgcccucugucuuauu

SEQ ID NO: 2159047 - RNA, 19 nt, Artificial Sequence
  Description of Artificial Sequence: Synthetic oligonucleotide
  Antisense strand to SEQ ID NO: 2159046
aauaagacagagggcguac

SEQ ID NO: 2159048 - RNA, 19 nt, Artificial Sequence
  Description of Artificial Sequence: Synthetic oligonucleotide
  Sense strand starting at position 1803 of SEQ ID NO: 1882943
agguguaucacagaaugua

SEQ ID NO: 2159049 - RNA, 19 nt, Artificial Sequence
  Description of Artificial Sequence: Synthetic oligonucleotide
  Antisense strand to SEQ ID NO: 2159048
uacauucugugauacaccu

SEQ ID NO: 2159050 - RNA, 19 nt, Artificial Sequence
  Description of Artificial Sequence: Synthetic oligonucleotide
  Sense strand starting at position 1854 of SEQ ID NO: 1882943
agcaauaucucccuaugag

SEQ ID NO: 2159051 - RNA, 19 nt, Artificial Sequence
  Description of Artificial Sequence: Synthetic oligonucleotide
  Antisense strand to SEQ ID NO: 2159050
cucauagggagauauugcu

SEQ ID NO: 2159052 - RNA, 19 nt, Artificial Sequence
  Description of Artificial Sequence: Synthetic oligonucleotide
  Sense strand starting at position 1855 of SEQ ID NO: 1882943
gcaauaucucccuaugaga

SEQ ID NO: 2159053 - RNA, 19 nt, Artificial Sequence
  Description of Artificial Sequence: Synthetic oligonucleotide
  Antisense strand to SEQ ID NO: 2159052
ucucauagggagauauugc

SEQ ID NO: 2159054 - RNA, 19 nt, Artificial Sequence
  Description of Artificial Sequence: Synthetic oligonucleotide
  Sense strand starting at position 1892 of SEQ ID NO: 1882943
ggagaacacucucugugau

SEQ ID NO: 2159055 - RNA, 19 nt, Artificial Sequence
  Description of Artificial Sequence: Synthetic oligonucleotide
  Antisense strand to SEQ ID NO: 2159054
aucacagagaguguucucc

SEQ ID NO: 2159056 - RNA, 19 nt, Artificial Sequence
  Description of Artificial Sequence: Synthetic oligonucleotide
  Sense strand starting at position 1893 of SEQ ID NO: 1882943
gagaacacucucugugaua

SEQ ID NO: 2159057 - RNA, 19 nt, Artificial Sequence
  Description of Artificial Sequence: Synthetic oligonucleotide
  Antisense strand to SEQ ID NO: 2159056
uaucacagagaguguucuc

SEQ ID NO: 2159058 - RNA, 19 nt, Artificial Sequence
  Description of Artificial Sequence: Synthetic oligonucleotide
  Sense strand starting at position 1894 of SEQ ID NO: 1882943
agaacacucucugugauau

SEQ ID NO: 2159059 - RNA, 19 nt, Artificial Sequence
  Description of Artificial Sequence: Synthetic oligonucleotide
  Antisense strand to SEQ ID NO: 2159058
auaucacagagaguguucu

SEQ ID NO: 2159060 - RNA, 19 nt, Artificial Sequence
  Description of Artificial Sequence: Synthetic oligonucleotide
  Sense strand starting at position 1916 of SEQ ID NO: 1882943
auguaauguuuaccaugga

SEQ ID NO: 2159061 - RNA, 19 nt, Artificial Sequence
  Description of Artificial Sequence: Synthetic oligonucleotide
  Antisense strand to SEQ ID NO: 2159060
uccaugguaaacauuacau

SEQ ID NO: 2159062 - RNA, 19 nt, Artificial Sequence
  Description of Artificial Sequence: Synthetic oligonucleotide
  Sense strand starting at position 2138 of SEQ ID NO: 1882943
cuacaaauauuaucgaagu

SEQ ID NO: 2159063 - RNA, 19 nt, Artificial Sequence
  Description of Artificial Sequence: Synthetic oligonucleotide
  Antisense strand to SEQ ID NO: 2159062
acuucgauaauauuuguag

SEQ ID NO: 2159064 - RNA, 19 nt, Artificial Sequence
  Description of Artificial Sequence: Synthetic oligonucleotide
  Sense strand starting at position 2805 of SEQ ID NO: 1882943
guacauuucccuggcacau

SEQ ID NO: 2159065 - RNA, 19 nt, Artificial Sequence
  Description of Artificial Sequence: Synthetic oligonucleotide
  Antisense strand to SEQ ID NO: 2159064
augugccagggaaauguac

SEQ ID NO: 2159066 - RNA, 19 nt, Artificial Sequence
  Description of Artificial Sequence: Synthetic oligonucleotide
  Sense strand starting at position 2937 of SEQ ID NO: 1882943
cuucuaggacauugugaau

SEQ ID NO: 2159067 - RNA, 19 nt, Artificial Sequence
  Description of Artificial Sequence: Synthetic oligonucleotide
  Antisense strand to SEQ ID NO: 2159066
auucacaauguccuagaag

SEQ ID NO: 2159068 - RNA, 19 nt, Artificial Sequence
  Description of Artificial Sequence: Synthetic oligonucleotide
  Sense strand starting at position 3333 of SEQ ID NO: 1882943
cgaauaauaucacuguuug

SEQ ID NO: 2159069 - RNA, 19 nt, Artificial Sequence
  Description of Artificial Sequence: Synthetic oligonucleotide
  Antisense strand to SEQ ID NO: 2159068
caaacagugauauuauucg

SEQ ID NO: 2159070 - RNA, 19 nt, Artificial Sequence
  Description of Artificial Sequence: Synthetic oligonucleotide
  Sense strand starting at position 3500 of SEQ ID NO: 1882943
gcaacauugcccgaggaua

SEQ ID NO: 2159071 - RNA, 19 nt, Artificial Sequence
  Description of Artificial Sequence: Synthetic oligonucleotide
  Antisense strand to SEQ ID NO: 2159070
uauccucgggcaauguugc

SEQ ID NO: 2159072 - RNA, 19 nt, Artificial Sequence
  Description of Artificial Sequence: Synthetic oligonucleotide
  Sense strand starting at position 3502 of SEQ ID NO: 1882943
aacauugcccgaggauaua

SEQ ID NO: 2159073 - RNA, 19 nt, Artificial Sequence
  Description of Artificial Sequence: Synthetic oligonucleotide
  Antisense strand to SEQ ID NO: 2159072
uauauccucgggcaauguu

SEQ ID NO: 2159074 - RNA, 19 nt, Artificial Sequence
  Description of Artificial Sequence: Synthetic oligonucleotide
  Sense strand starting at position 3563 of SEQ ID NO: 1882943
guaacaucccuuuagggua

SEQ ID NO: 2159075 - RNA, 19 nt, Artificial Sequence
  Description of Artificial Sequence: Synthetic oligonucleotide
  Antisense strand to SEQ ID NO: 2159074
uacccuaaagggauguuac

SEQ ID NO: 2159076 - RNA, 19 nt, Artificial Sequence
  Description of Artificial Sequence: Synthetic oligonucleotide
  Sense strand starting at position 3577 of SEQ ID NO: 1882943
ggguaugacgaguauuauc

SEQ ID NO: 2159077 - RNA, 19 nt, Artificial Sequence
  Description of Artificial Sequence: Synthetic oligonucleotide
  Antisense strand to SEQ ID NO: 2159076
gauaauacucgucauaccc

SEQ ID NO: 2159078 - RNA, 19 nt, Artificial Sequence
  Description of Artificial Sequence: Synthetic oligonucleotide
  Sense strand starting at position 3582 of SEQ ID NO: 1882943
ugacgaguauuaucagaau

SEQ ID NO: 2159079 - RNA, 19 nt, Artificial Sequence
  Description of Artificial Sequence: Synthetic oligonucleotide
  Antisense strand to SEQ ID NO: 2159078
auucugauaauacucguca

SEQ ID NO: 2159080 - RNA, 19 nt, Artificial Sequence
  Description of Artificial Sequence: Synthetic oligonucleotide
  Sense strand starting at position 3588 of SEQ ID NO: 1882943
guauuaucagaaugugaau

SEQ ID NO: 2159081 - RNA, 19 nt, Artificial Sequence
  Description of Artificial Sequence: Synthetic oligonucleotide
  Antisense strand to SEQ ID NO: 2159080
auucacauucugauaauac

SEQ ID NO: 2159082 - RNA, 19 nt, Artificial Sequence
  Description of Artificial Sequence: Synthetic oligonucleotide
  Sense strand starting at position 3928 of SEQ ID NO: 1882943
ccgugauaugaaggguaac

SEQ ID NO: 2159083 - RNA, 19 nt, Artificial Sequence
  Description of Artificial Sequence: Synthetic oligonucleotide
  Antisense strand to SEQ ID NO: 2159082
guuacccuucauaucacgg

SEQ ID NO: 2159084 - RNA, 19 nt, Artificial Sequence
  Description of Artificial Sequence: Synthetic oligonucleotide
  Sense strand starting at position 3929 of SEQ ID NO: 1882943
cgugauaugaaggguaaca

SEQ ID NO: 2159085 - RNA, 19 nt, Artificial Sequence
  Description of Artificial Sequence: Synthetic oligonucleotide
  Antisense strand to SEQ ID NO: 2159084
uguuacccuucauaucacg

SEQ ID NO: 2159086 - RNA, 19 nt, Artificial Sequence
  Description of Artificial Sequence: Synthetic oligonucleotide
  Sense strand starting at position 35 of SEQ ID NO: 1882944
guccuuccaggguauuaca

SEQ ID NO: 2159087 - RNA, 19 nt, Artificial Sequence
  Description of Artificial Sequence: Synthetic oligonucleotide
  Antisense strand to SEQ ID NO: 2159086
uguaauacccuggaaggac

SEQ ID NO: 2159088 - RNA, 19 nt, Artificial Sequence
  Description of Artificial Sequence: Synthetic oligonucleotide
  Sense strand starting at position 179 of SEQ ID NO: 1882944
ugccaucaggaguaacauu

SEQ ID NO: 2159089 - RNA, 19 nt, Artificial Sequence
  Description of Artificial Sequence: Synthetic oligonucleotide
  Antisense strand to SEQ ID NO: 2159088
aauguuacuccugauggca

SEQ ID NO: 2159090 - RNA, 19 nt, Artificial Sequence
  Description of Artificial Sequence: Synthetic oligonucleotide
  Sense strand starting at position 301 of SEQ ID NO: 1882944
acagguguugaauaugcau

SEQ ID NO: 2159091 - RNA, 19 nt, Artificial Sequence
  Description of Artificial Sequence: Synthetic oligonucleotide
  Antisense strand to SEQ ID NO: 2159090
augcauauucaacaccugu

SEQ ID NO: 2159092 - RNA, 19 nt, Artificial Sequence
  Description of Artificial Sequence: Synthetic oligonucleotide
  Sense strand starting at position 346 of SEQ ID NO: 1882944
guaacaagcccuuaggaua

SEQ ID NO: 2159093 - RNA, 19 nt, Artificial Sequence
  Description of Artificial Sequence: Synthetic oligonucleotide
  Antisense strand to SEQ ID NO: 2159092
uauccuaagggcuuguuac

SEQ ID NO: 2159094 - RNA, 19 nt, Artificial Sequence
  Description of Artificial Sequence: Synthetic oligonucleotide
  Sense strand starting at position 467 of SEQ ID NO: 1882944
uaguaacgucucuaggaua

SEQ ID NO: 2159095 - RNA, 19 nt, Artificial Sequence
  Description of Artificial Sequence: Synthetic oligonucleotide
  Antisense strand to SEQ ID NO: 2159094
uauccuagagacguuacua

SEQ ID NO: 2159096 - RNA, 19 nt, Artificial Sequence
  Description of Artificial Sequence: Synthetic oligonucleotide
  Sense strand starting at position 472 of SEQ ID NO: 1882944
acgucucuaggauauuaua

SEQ ID NO: 2159097 - RNA, 19 nt, Artificial Sequence
  Description of Artificial Sequence: Synthetic oligonucleotide
  Antisense strand to SEQ ID NO: 2159096
uauaauauccuagagacgu

SEQ ID NO: 2159098 - RNA, 19 nt, Artificial Sequence
  Description of Artificial Sequence: Synthetic oligonucleotide
  Sense strand starting at position 544 of SEQ ID NO: 1882944
ggauaugacgaguaauguc

SEQ ID NO: 2159099 - RNA, 19 nt, Artificial Sequence
  Description of Artificial Sequence: Synthetic oligonucleotide
  Antisense strand to SEQ ID NO: 2159098
gacauuacucgucauaucc

SEQ ID NO: 2159100 - RNA, 19 nt, Artificial Sequence
  Description of Artificial Sequence: Synthetic oligonucleotide
  Sense strand starting at position 698 of SEQ ID NO: 1882944
guguacacccuguaugaca

SEQ ID NO: 2159101 - RNA, 19 nt, Artificial Sequence
  Description of Artificial Sequence: Synthetic oligonucleotide
  Antisense strand to SEQ ID NO: 2159100
ugucauacaggguguacac

SEQ ID NO: 2159102 - RNA, 19 nt, Artificial Sequence
  Description of Artificial Sequence: Synthetic oligonucleotide
  Sense strand starting at position 706 of SEQ ID NO: 1882944
ccuguaugacauuaggagu

SEQ ID NO: 2159103 - RNA, 19 nt, Artificial Sequence
  Description of Artificial Sequence: Synthetic oligonucleotide
  Antisense strand to SEQ ID NO: 2159102
acuccuaaugucauacagg

SEQ ID NO: 2159104 - RNA, 19 nt, Artificial Sequence
  Description of Artificial Sequence: Synthetic oligonucleotide
  Sense strand starting at position 761 of SEQ ID NO: 1882944
gugaacacccucugugaca

SEQ ID NO: 2159105 - RNA, 19 nt, Artificial Sequence
  Description of Artificial Sequence: Synthetic oligonucleotide
  Antisense strand to SEQ ID NO: 2159104
ugucacagaggguguucac

SEQ ID NO: 2159106 - RNA, 19 nt, Artificial Sequence
  Description of Artificial Sequence: Synthetic oligonucleotide
  Sense strand starting at position 762 of SEQ ID NO: 1882944
ugaacacccucugugacau

SEQ ID NO: 2159107 - RNA, 19 nt, Artificial Sequence
  Description of Artificial Sequence: Synthetic oligonucleotide
  Antisense strand to SEQ ID NO: 2159106
augucacagaggguguuca

SEQ ID NO: 2159108 - RNA, 19 nt, Artificial Sequence
  Description of Artificial Sequence: Synthetic oligonucleotide
  Sense strand starting at position 768 of SEQ ID NO: 1882944
cccucugugacaugaggaa

SEQ ID NO: 2159109 - RNA, 19 nt, Artificial Sequence
  Description of Artificial Sequence: Synthetic oligonucleotide
  Antisense strand to SEQ ID NO: 2159108
uuccucaugucacagaggg

SEQ ID NO: 2159110 - RNA, 19 nt, Artificial Sequence
  Description of Artificial Sequence: Synthetic oligonucleotide
  Sense strand starting at position 826 of SEQ ID NO: 1882944
guacacacccuguaauguu

SEQ ID NO: 2159111 - RNA, 19 nt, Artificial Sequence
  Description of Artificial Sequence: Synthetic oligonucleotide
  Antisense strand to SEQ ID NO: 2159110
aacauuacaggguguguac

SEQ ID NO: 2159112 - RNA, 19 nt, Artificial Sequence
  Description of Artificial Sequence: Synthetic oligonucleotide
  Sense strand starting at position 849 of SEQ ID NO: 1882944
gaaauagccgucuaggaua

SEQ ID NO: 2159113 - RNA, 19 nt, Artificial Sequence
  Description of Artificial Sequence: Synthetic oligonucleotide
  Antisense strand to SEQ ID NO: 2159112
uauccuagacggcuauuuc

SEQ ID NO: 2159114 - RNA, 19 nt, Artificial Sequence
  Description of Artificial Sequence: Synthetic oligonucleotide
  Sense strand starting at position 915 of SEQ ID NO: 1882944
uacgaaugauaugccaaga

SEQ ID NO: 2159115 - RNA, 19 nt, Artificial Sequence
  Description of Artificial Sequence: Synthetic oligonucleotide
  Antisense strand to SEQ ID NO: 2159114
ucuuggcauaucauucgua

SEQ ID NO: 2159116 - RNA, 19 nt, Artificial Sequence
  Description of Artificial Sequence: Synthetic oligonucleotide
  Sense strand starting at position 920 of SEQ ID NO: 1882944
augauaugccaagauguac

SEQ ID NO: 2159117 - RNA, 19 nt, Artificial Sequence
  Description of Artificial Sequence: Synthetic oligonucleotide
  Antisense strand to SEQ ID NO: 2159116
guacaucuuggcauaucau

SEQ ID NO: 2159118 - RNA, 19 nt, Artificial Sequence
  Description of Artificial Sequence: Synthetic oligonucleotide
  Sense strand starting at position 1305 of SEQ ID NO: 1882944
ggguauuccgaauaacauc

SEQ ID NO: 2159119 - RNA, 19 nt, Artificial Sequence
  Description of Artificial Sequence: Synthetic oligonucleotide
  Antisense strand to SEQ ID NO: 2159118
gauguuauucggaauaccc

SEQ ID NO: 2159120 - RNA, 19 nt, Artificial Sequence
  Description of Artificial Sequence: Synthetic oligonucleotide
  Sense strand starting at position 1356 of SEQ ID NO: 1882944
gucauaucucccuaagaug

SEQ ID NO: 2159121 - RNA, 19 nt, Artificial Sequence
  Description of Artificial Sequence: Synthetic oligonucleotide
  Antisense strand to SEQ ID NO: 2159120
caucuuagggagauaugac

SEQ ID NO: 2159122 - RNA, 19 nt, Artificial Sequence
  Description of Artificial Sequence: Synthetic oligonucleotide
  Sense strand starting at position 1462 of SEQ ID NO: 1882944
gccugugacguuaggagua

SEQ ID NO: 2159123 - RNA, 19 nt, Artificial Sequence
  Description of Artificial Sequence: Synthetic oligonucleotide
  Antisense strand to SEQ ID NO: 2159122
uacuccuaacgucacaggc

SEQ ID NO: 2159124 - RNA, 19 nt, Artificial Sequence
  Description of Artificial Sequence: Synthetic oligonucleotide
  Sense strand starting at position 1540 of SEQ ID NO: 1882944
agcaacaucuucuuaggau

SEQ ID NO: 2159125 - RNA, 19 nt, Artificial Sequence
  Description of Artificial Sequence: Synthetic oligonucleotide
  Antisense strand to SEQ ID NO: 2159124
auccuaagaagauguugcu

SEQ ID NO: 2159126 - RNA, 19 nt, Artificial Sequence
  Description of Artificial Sequence: Synthetic oligonucleotide
  Sense strand starting at position 1706 of SEQ ID NO: 1882944
guacgcccucugucuuauu

SEQ ID NO: 2159127 - RNA, 19 nt, Artificial Sequence
  Description of Artificial Sequence: Synthetic oligonucleotide
  Antisense strand to SEQ ID NO: 2159126
aauaagacagagggcguac

SEQ ID NO: 2159128 - RNA, 19 nt, Artificial Sequence
  Description of Artificial Sequence: Synthetic oligonucleotide
  Sense strand starting at position 1808 of SEQ ID NO: 1882944
agguguaucacagaaugua

SEQ ID NO: 2159129 - RNA, 19 nt, Artificial Sequence
  Description of Artificial Sequence: Synthetic oligonucleotide
  Antisense strand to SEQ ID NO: 2159128
uacauucugugauacaccu

SEQ ID NO: 2159130 - RNA, 19 nt, Artificial Sequence
  Description of Artificial Sequence: Synthetic oligonucleotide
  Sense strand starting at position 1859 of SEQ ID NO: 1882944
agcaauaucucccuaugag

SEQ ID NO: 2159131 - RNA, 19 nt, Artificial Sequence
  Description of Artificial Sequence: Synthetic oligonucleotide
  Antisense strand to SEQ ID NO: 2159130
cucauagggagauauugcu

SEQ ID NO: 2159132 - RNA, 19 nt, Artificial Sequence
  Description of Artificial Sequence: Synthetic oligonucleotide
  Sense strand starting at position 1860 of SEQ ID NO: 1882944
gcaauaucucccuaugaga

SEQ ID NO: 2159133 - RNA, 19 nt, Artificial Sequence
  Description of Artificial Sequence: Synthetic oligonucleotide
  Antisense strand to SEQ ID NO: 2159132
ucucauagggagauauugc

SEQ ID NO: 2159134 - RNA, 19 nt, Artificial Sequence
  Description of Artificial Sequence: Synthetic oligonucleotide
  Sense strand starting at position 1897 of SEQ ID NO: 1882944
ggagaacacucucugugau

SEQ ID NO: 2159135 - RNA, 19 nt, Artificial Sequence
  Description of Artificial Sequence: Synthetic oligonucleotide
  Antisense strand to SEQ ID NO: 2159134
aucacagagaguguucucc

SEQ ID NO: 2159136 - RNA, 19 nt, Artificial Sequence
  Description of Artificial Sequence: Synthetic oligonucleotide
  Sense strand starting at position 1898 of SEQ ID NO: 1882944
gagaacacucucugugaua

SEQ ID NO: 2159137 - RNA, 19 nt, Artificial Sequence
  Description of Artificial Sequence: Synthetic oligonucleotide
  Antisense strand to SEQ ID NO: 2159136
uaucacagagaguguucuc

SEQ ID NO: 2159138 - RNA, 19 nt, Artificial Sequence
  Description of Artificial Sequence: Synthetic oligonucleotide
  Sense strand starting at position 1899 of SEQ ID NO: 1882944
agaacacucucugugauau

SEQ ID NO: 2159139 - RNA, 19 nt, Artificial Sequence
  Description of Artificial Sequence: Synthetic oligonucleotide
  Antisense strand to SEQ ID NO: 2159138
auaucacagagaguguucu

SEQ ID NO: 2159140 - RNA, 19 nt, Artificial Sequence
  Description of Artificial Sequence: Synthetic oligonucleotide
  Sense strand starting at position 1921 of SEQ ID NO: 1882944
auguaauguuuaccaugga

SEQ ID NO: 2159141 - RNA, 19 nt, Artificial Sequence
  Description of Artificial Sequence: Synthetic oligonucleotide
  Antisense strand to SEQ ID NO: 2159140
uccaugguaaacauuacau

SEQ ID NO: 2159142 - RNA, 19 nt, Artificial Sequence
  Description of Artificial Sequence: Synthetic oligonucleotide
  Sense strand starting at position 2143 of SEQ ID NO: 1882944
cuacaaauauuaucgaagu

SEQ ID NO: 2159143 - RNA, 19 nt, Artificial Sequence
  Description of Artificial Sequence: Synthetic oligonucleotide
  Antisense strand to SEQ ID NO: 2159142
acuucgauaauauuuguag

SEQ ID NO: 2159144 - RNA, 19 nt, Artificial Sequence
  Description of Artificial Sequence: Synthetic oligonucleotide
  Sense strand starting at position 2810 of SEQ ID NO: 1882944
guacauuucccuggcacau

SEQ ID NO: 2159145 - RNA, 19 nt, Artificial Sequence
  Description of Artificial Sequence: Synthetic oligonucleotide
  Antisense strand to SEQ ID NO: 2159144
augugccagggaaauguac

SEQ ID NO: 2159146 - RNA, 19 nt, Artificial Sequence
  Description of Artificial Sequence: Synthetic oligonucleotide
  Sense strand starting at position 2942 of SEQ ID NO: 1882944
cuucuaggacauugugaau

SEQ ID NO: 2159147 - RNA, 19 nt, Artificial Sequence
  Description of Artificial Sequence: Synthetic oligonucleotide
  Antisense strand to SEQ ID NO: 2159146
auucacaauguccuagaag

SEQ ID NO: 2159148 - RNA, 19 nt, Artificial Sequence
  Description of Artificial Sequence: Synthetic oligonucleotide
  Sense strand starting at position 3338 of SEQ ID NO: 1882944
cgaauaauaucacuguuug

SEQ ID NO: 2159149 - RNA, 19 nt, Artificial Sequence
  Description of Artificial Sequence: Synthetic oligonucleotide
  Antisense strand to SEQ ID NO: 2159148
caaacagugauauuauucg

SEQ ID NO: 2159150 - RNA, 19 nt, Artificial Sequence
  Description of Artificial Sequence: Synthetic oligonucleotide
  Sense strand starting at position 3505 of SEQ ID NO: 1882944
gcaacauugcccgaggaua

SEQ ID NO: 2159151 - RNA, 19 nt, Artificial Sequence
  Description of Artificial Sequence: Synthetic oligonucleotide
  Antisense strand to SEQ ID NO: 2159150
uauccucgggcaauguugc

SEQ ID NO: 2159152 - RNA, 19 nt, Artificial Sequence
  Description of Artificial Sequence: Synthetic oligonucleotide
  Sense strand starting at position 3507 of SEQ ID NO: 1882944
aacauugcccgaggauaua

SEQ ID NO: 2159153 - RNA, 19 nt, Artificial Sequence
  Description of Artificial Sequence: Synthetic oligonucleotide
  Antisense strand to SEQ ID NO: 2159152
uauauccucgggcaauguu

SEQ ID NO: 2159154 - RNA, 19 nt, Artificial Sequence
  Description of Artificial Sequence: Synthetic oligonucleotide
  Sense strand starting at position 3568 of SEQ ID NO: 1882944
guaacaucccuuuagggua

SEQ ID NO: 2159155 - RNA, 19 nt, Artificial Sequence
  Description of Artificial Sequence: Synthetic oligonucleotide
  Antisense strand to SEQ ID NO: 2159154
uacccuaaagggauguuac

SEQ ID NO: 2159156 - RNA, 19 nt, Artificial Sequence
  Description of Artificial Sequence: Synthetic oligonucleotide
  Sense strand starting at position 3582 of SEQ ID NO: 1882944
ggguaugacgaguauuauc

SEQ ID NO: 2159157 - RNA, 19 nt, Artificial Sequence
  Description of Artificial Sequence: Synthetic oligonucleotide
  Antisense strand to SEQ ID NO: 2159156
gauaauacucgucauaccc

SEQ ID NO: 2159158 - RNA, 19 nt, Artificial Sequence
  Description of Artificial Sequence: Synthetic oligonucleotide
  Sense strand starting at position 3587 of SEQ ID NO: 1882944
ugacgaguauuaucagaau

SEQ ID NO: 2159159 - RNA, 19 nt, Artificial Sequence
  Description of Artificial Sequence: Synthetic oligonucleotide
  Antisense strand to SEQ ID NO: 2159158
auucugauaauacucguca

SEQ ID NO: 2159160 - RNA, 19 nt, Artificial Sequence
  Description of Artificial Sequence: Synthetic oligonucleotide
  Sense strand starting at position 3593 of SEQ ID NO: 1882944
guauuaucagaaugugaau

SEQ ID NO: 2159161 - RNA, 19 nt, Artificial Sequence
  Description of Artificial Sequence: Synthetic oligonucleotide
  Antisense strand to SEQ ID NO: 2159160
auucacauucugauaauac

SEQ ID NO: 2159162 - RNA, 19 nt, Artificial Sequence
  Description of Artificial Sequence: Synthetic oligonucleotide
  Sense strand starting at position 3933 of SEQ ID NO: 1882944
ccgugauaugaaggguaac

SEQ ID NO: 2159163 - RNA, 19 nt, Artificial Sequence
  Description of Artificial Sequence: Synthetic oligonucleotide
  Antisense strand to SEQ ID NO: 2159162
guuacccuucauaucacgg

SEQ ID NO: 2159164 - RNA, 19 nt, Artificial Sequence
  Description of Artificial Sequence: Synthetic oligonucleotide
  Sense strand starting at position 3934 of SEQ ID NO: 1882944
cgugauaugaaggguaaca

SEQ ID NO: 2159165 - RNA, 19 nt, Artificial Sequence
  Description of Artificial Sequence: Synthetic oligonucleotide
  Antisense strand to SEQ ID NO: 2159164
uguuacccuucauaucacg

SEQ ID NO: 2159166 - RNA, 19 nt, Artificial Sequence
  Description of Artificial Sequence: Synthetic oligonucleotide
  Sense strand starting at position 39 of SEQ ID NO: 1882945
auccuaaauggauguuaau

SEQ ID NO: 2159167 - RNA, 19 nt, Artificial Sequence
  Description of Artificial Sequence: Synthetic oligonucleotide
  Antisense strand to SEQ ID NO: 2159166
auuaacauccauuuaggau

SEQ ID NO: 2159168 - RNA, 19 nt, Artificial Sequence
  Description of Artificial Sequence: Synthetic oligonucleotide
  Sense strand starting at position 159 of SEQ ID NO: 1882945
cagaauauccuagguggau

SEQ ID NO: 2159169 - RNA, 19 nt, Artificial Sequence
  Description of Artificial Sequence: Synthetic oligonucleotide
  Antisense strand to SEQ ID NO: 2159168
auccaccuaggauauucug

SEQ ID NO: 2159170 - RNA, 19 nt, Artificial Sequence
  Description of Artificial Sequence: Synthetic oligonucleotide
  Sense strand starting at position 338 of SEQ ID NO: 1882945
cugugauauuacuugcaau

SEQ ID NO: 2159171 - RNA, 19 nt, Artificial Sequence
  Description of Artificial Sequence: Synthetic oligonucleotide
  Antisense strand to SEQ ID NO: 2159170
auugcaaguaauaucacag

SEQ ID NO: 2159172 - RNA, 19 nt, Artificial Sequence
  Description of Artificial Sequence: Synthetic oligonucleotide
  Sense strand starting at position 351 of SEQ ID NO: 1882945
ugcaaugugccagggaaau

SEQ ID NO: 2159173 - RNA, 19 nt, Artificial Sequence
  Description of Artificial Sequence: Synthetic oligonucleotide
  Antisense strand to SEQ ID NO: 2159172
auuucccuggcacauugca

SEQ ID NO: 2159174 - RNA, 19 nt, Artificial Sequence
  Description of Artificial Sequence: Synthetic oligonucleotide
  Sense strand starting at position 431 of SEQ ID NO: 1882945
aauauucuugagggauguu

SEQ ID NO: 2159175 - RNA, 19 nt, Artificial Sequence
  Description of Artificial Sequence: Synthetic oligonucleotide
  Antisense strand to SEQ ID NO: 2159174
aacaucccucaagaauauu

SEQ ID NO: 2159176 - RNA, 19 nt, Artificial Sequence
  Description of Artificial Sequence: Synthetic oligonucleotide
  Sense strand starting at position 434 of SEQ ID NO: 1882945
auucuugagggauguuaau

SEQ ID NO: 2159177 - RNA, 19 nt, Artificial Sequence
  Description of Artificial Sequence: Synthetic oligonucleotide
  Antisense strand to SEQ ID NO: 2159176
auuaacaucccucaagaau

SEQ ID NO: 2159178 - RNA, 19 nt, Artificial Sequence
  Description of Artificial Sequence: Synthetic oligonucleotide
  Sense strand starting at position 470 of SEQ ID NO: 1882945
uguuaaccaugugugaaca

SEQ ID NO: 2159179 - RNA, 19 nt, Artificial Sequence
  Description of Artificial Sequence: Synthetic oligonucleotide
  Antisense strand to SEQ ID NO: 2159178
uguucacacaugguuaaca

SEQ ID NO: 2159180 - RNA, 19 nt, Artificial Sequence
  Description of Artificial Sequence: Synthetic oligonucleotide
  Sense strand starting at position 557 of SEQ ID NO: 1882945
gugcguacaccuucuguga

SEQ ID NO: 2159181 - RNA, 19 nt, Artificial Sequence
  Description of Artificial Sequence: Synthetic oligonucleotide
  Antisense strand to SEQ ID NO: 2159180
ucacagaagguguacgcac

SEQ ID NO: 2159182 - RNA, 19 nt, Artificial Sequence
  Description of Artificial Sequence: Synthetic oligonucleotide
  Sense strand starting at position 700 of SEQ ID NO: 1882945
gagaguacaccauguguau

SEQ ID NO: 2159183 - RNA, 19 nt, Artificial Sequence
  Description of Artificial Sequence: Synthetic oligonucleotide
  Antisense strand to SEQ ID NO: 2159182
auacacaugguguacucuc

SEQ ID NO: 2159184 - RNA, 19 nt, Artificial Sequence
  Description of Artificial Sequence: Synthetic oligonucleotide
  Sense strand starting at position 828 of SEQ ID NO: 1882945
aaagauuacgccuaaugua

SEQ ID NO: 2159185 - RNA, 19 nt, Artificial Sequence
  Description of Artificial Sequence: Synthetic oligonucleotide
  Antisense strand to SEQ ID NO: 2159184
uacauuaggcguaaucuuu

SEQ ID NO: 2159186 - RNA, 19 nt, Artificial Sequence
  Description of Artificial Sequence: Synthetic oligonucleotide
  Sense strand starting at position 909 of SEQ ID NO: 1882945
ugugacuuugaaugucaca

SEQ ID NO: 2159187 - RNA, 19 nt, Artificial Sequence
  Description of Artificial Sequence: Synthetic oligonucleotide
  Antisense strand to SEQ ID NO: 2159186
ugugacauucaaagucaca

SEQ ID NO: 2159188 - RNA, 19 nt, Artificial Sequence
  Description of Artificial Sequence: Synthetic oligonucleotide
  Sense strand starting at position 977 of SEQ ID NO: 1882945
ugauauccagaaggauguu

SEQ ID NO: 2159189 - RNA, 19 nt, Artificial Sequence
  Description of Artificial Sequence: Synthetic oligonucleotide
  Antisense strand to SEQ ID NO: 2159188
aacauccuucuggauauca

SEQ ID NO: 2159190 - RNA, 19 nt, Artificial Sequence
  Description of Artificial Sequence: Synthetic oligonucleotide
  Sense strand starting at position 986 of SEQ ID NO: 1882945
gaaggauguuacuccuaag

SEQ ID NO: 2159191 - RNA, 19 nt, Artificial Sequence
  Description of Artificial Sequence: Synthetic oligonucleotide
  Antisense strand to SEQ ID NO: 2159190
cuuaggaguaacauccuuc

SEQ ID NO: 2159192 - RNA, 19 nt, Artificial Sequence
  Description of Artificial Sequence: Synthetic oligonucleotide
  Sense strand starting at position 1093 of SEQ ID NO: 1882945
cuauguguagacugugaua

SEQ ID NO: 2159193 - RNA, 19 nt, Artificial Sequence
  Description of Artificial Sequence: Synthetic oligonucleotide
  Antisense strand to SEQ ID NO: 2159192
uaucacagucuacacauag

SEQ ID NO: 2159194 - RNA, 19 nt, Artificial Sequence
  Description of Artificial Sequence: Synthetic oligonucleotide
  Sense strand starting at position 1095 of SEQ ID NO: 1882945
auguguagacugugauauu

SEQ ID NO: 2159195 - RNA, 19 nt, Artificial Sequence
  Description of Artificial Sequence: Synthetic oligonucleotide
  Antisense strand to SEQ ID NO: 2159194
aauaucacagucuacacau

SEQ ID NO: 2159196 - RNA, 19 nt, Artificial Sequence
  Description of Artificial Sequence: Synthetic oligonucleotide
  Sense strand starting at position 1138 of SEQ ID NO: 1882945
gaguuauagcucuccgugu

SEQ ID NO: 2159197 - RNA, 19 nt, Artificial Sequence
  Description of Artificial Sequence: Synthetic oligonucleotide
  Antisense strand to SEQ ID NO: 2159196
acacggagagcuauaacuc

SEQ ID NO: 2159198 - RNA, 19 nt, Artificial Sequence
  Description of Artificial Sequence: Synthetic oligonucleotide
  Sense strand starting at position 1272 of SEQ ID NO: 1882945
cagagaguguucucccuuu

SEQ ID NO: 2159199 - RNA, 19 nt, Artificial Sequence
  Description of Artificial Sequence: Synthetic oligonucleotide
  Antisense strand to SEQ ID NO: 2159198
aaagggagaacacucucug

SEQ ID NO: 2159200 - RNA, 19 nt, Artificial Sequence
  Description of Artificial Sequence: Synthetic oligonucleotide
  Sense strand starting at position 1604 of SEQ ID NO: 1882945
cccugugagguuguucgua

SEQ ID NO: 2159201 - RNA, 19 nt, Artificial Sequence
  Description of Artificial Sequence: Synthetic oligonucleotide
  Antisense strand to SEQ ID NO: 2159200
uacgaacaaccucacaggg

SEQ ID NO: 2159202 - RNA, 19 nt, Artificial Sequence
  Description of Artificial Sequence: Synthetic oligonucleotide
  Sense strand starting at position 1631 of SEQ ID NO: 1882945
agaagauguugcucuuaau

SEQ ID NO: 2159203 - RNA, 19 nt, Artificial Sequence
  Description of Artificial Sequence: Synthetic oligonucleotide
  Antisense strand to SEQ ID NO: 2159202
auuaagagcaacaucuucu

SEQ ID NO: 2159204 - RNA, 19 nt, Artificial Sequence
  Description of Artificial Sequence: Synthetic oligonucleotide
  Sense strand starting at position 1857 of SEQ ID NO: 1882945
ugugauguuauucggaaua

SEQ ID NO: 2159205 - RNA, 19 nt, Artificial Sequence
  Description of Artificial Sequence: Synthetic oligonucleotide
  Antisense strand to SEQ ID NO: 2159204
uauuccgaauaacaucaca

SEQ ID NO: 2159206 - RNA, 19 nt, Artificial Sequence
  Description of Artificial Sequence: Synthetic oligonucleotide
  Sense strand starting at position 1911 of SEQ ID NO: 1882945
cguacauacuauuugugua

SEQ ID NO: 2159207 - RNA, 19 nt, Artificial Sequence
  Description of Artificial Sequence: Synthetic oligonucleotide
  Antisense strand to SEQ ID NO: 2159206
uacacaaauaguauguacg

SEQ ID NO: 2159208 - RNA, 19 nt, Artificial Sequence
  Description of Artificial Sequence: Synthetic oligonucleotide
  Sense strand starting at position 2053 of SEQ ID NO: 1882945
ugguuaauacccugggaca

SEQ ID NO: 2159209 - RNA, 19 nt, Artificial Sequence
  Description of Artificial Sequence: Synthetic oligonucleotide
  Antisense strand to SEQ ID NO: 2159208
ugucccaggguauuaacca

SEQ ID NO: 2159210 - RNA, 19 nt, Artificial Sequence
  Description of Artificial Sequence: Synthetic oligonucleotide
  Sense strand starting at position 2066 of SEQ ID NO: 1882945
gggacaguauuccucauau

SEQ ID NO: 2159211 - RNA, 19 nt, Artificial Sequence
  Description of Artificial Sequence: Synthetic oligonucleotide
  Antisense strand to SEQ ID NO: 2159210
auaugaggaauacuguccc

SEQ ID NO: 2159212 - RNA, 19 nt, Artificial Sequence
  Description of Artificial Sequence: Synthetic oligonucleotide
  Sense strand starting at position 2129 of SEQ ID NO: 1882945
gugauauuauuccuccuau

SEQ ID NO: 2159213 - RNA, 19 nt, Artificial Sequence
  Description of Artificial Sequence: Synthetic oligonucleotide
  Antisense strand to SEQ ID NO: 2159212
auaggaggaauaauaucac

SEQ ID NO: 2159214 - RNA, 19 nt, Artificial Sequence
  Description of Artificial Sequence: Synthetic oligonucleotide
  Sense strand starting at position 2216 of SEQ ID NO: 1882945
gggauauuaguacgaaugu

SEQ ID NO: 2159215 - RNA, 19 nt, Artificial Sequence
  Description of Artificial Sequence: Synthetic oligonucleotide
  Antisense strand to SEQ ID NO: 2159214
acauucguacuaauauccc

SEQ ID NO: 2159216 - RNA, 19 nt, Artificial Sequence
  Description of Artificial Sequence: Synthetic oligonucleotide
  Sense strand starting at position 2426 of SEQ ID NO: 1882945
gugauauuauucguaauug

SEQ ID NO: 2159217 - RNA, 19 nt, Artificial Sequence
  Description of Artificial Sequence: Synthetic oligonucleotide
  Antisense strand to SEQ ID NO: 2159216
caauuacgaauaauaucac

SEQ ID NO: 2159218 - RNA, 19 nt, Artificial Sequence
  Description of Artificial Sequence: Synthetic oligonucleotide
  Sense strand starting at position 2620 of SEQ ID NO: 1882945
ugacauuacucgucauauc

SEQ ID NO: 2159219 - RNA, 19 nt, Artificial Sequence
  Description of Artificial Sequence: Synthetic oligonucleotide
  Antisense strand to SEQ ID NO: 2159218
gauaugacgaguaauguca

SEQ ID NO: 2159220 - RNA, 19 nt, Artificial Sequence
  Description of Artificial Sequence: Synthetic oligonucleotide
  Sense strand starting at position 2693 of SEQ ID NO: 1882945
uauaauauccuagagacgu

SEQ ID NO: 2159221 - RNA, 19 nt, Artificial Sequence
  Description of Artificial Sequence: Synthetic oligonucleotide
  Antisense strand to SEQ ID NO: 2159220
acgucucuaggauauuaua

SEQ ID NO: 2159222 - RNA, 19 nt, Artificial Sequence
  Description of Artificial Sequence: Synthetic oligonucleotide
  Sense strand starting at position 2986 of SEQ ID NO: 1882945
aauguuacuccugauggca

SEQ ID NO: 2159223 - RNA, 19 nt, Artificial Sequence
  Description of Artificial Sequence: Synthetic oligonucleotide
  Antisense strand to SEQ ID NO: 2159222
ugccaucaggaguaacauu

SEQ ID NO: 2159224 - RNA, 19 nt, Artificial Sequence
  Description of Artificial Sequence: Synthetic oligonucleotide
  Sense strand starting at position 3129 of SEQ ID NO: 1882945
cuguaauacccuggaagga

SEQ ID NO: 2159225 - RNA, 19 nt, Artificial Sequence
  Description of Artificial Sequence: Synthetic oligonucleotide
  Antisense strand to SEQ ID NO: 2159224
uccuuccaggguauuacag

SEQ ID NO: 2159226 - RNA, 19 nt, Artificial Sequence
  Description of Artificial Sequence: Synthetic oligonucleotide
  Sense strand starting at position 3217 of SEQ ID NO: 1882945
cuugaaauaucaguggaug

SEQ ID NO: 2159227 - RNA, 19 nt, Artificial Sequence
  Description of Artificial Sequence: Synthetic oligonucleotide
  Antisense strand to SEQ ID NO: 2159226
cauccacugauauuucaag

SEQ ID NO: 2159228 - RNA, 19 nt, Artificial Sequence
  Description of Artificial Sequence: Synthetic oligonucleotide
  Sense strand starting at position 3218 of SEQ ID NO: 1882945
uugaaauaucaguggaugu

SEQ ID NO: 2159229 - RNA, 19 nt, Artificial Sequence
  Description of Artificial Sequence: Synthetic oligonucleotide
  Antisense strand to SEQ ID NO: 2159228
acauccacugauauuucaa

SEQ ID NO: 2159230 - RNA, 19 nt, Artificial Sequence
  Description of Artificial Sequence: Synthetic oligonucleotide
  Sense strand starting at position 3219 of SEQ ID NO: 1882945
ugaaauaucaguggaugua

SEQ ID NO: 2159231 - RNA, 19 nt, Artificial Sequence
  Description of Artificial Sequence: Synthetic oligonucleotide
  Antisense strand to SEQ ID NO: 2159230
uacauccacugauauuuca

SEQ ID NO: 2159232 - RNA, 19 nt, Artificial Sequence
  Description of Artificial Sequence: Synthetic oligonucleotide
  Sense strand starting at position 3354 of SEQ ID NO: 1882945
ggguaaagauuacuccuaa

SEQ ID NO: 2159233 - RNA, 19 nt, Artificial Sequence
  Description of Artificial Sequence: Synthetic oligonucleotide
  Antisense strand to SEQ ID NO: 2159232
uuaggaguaaucuuuaccc

SEQ ID NO: 2159234 - RNA, 19 nt, Artificial Sequence
  Description of Artificial Sequence: Synthetic oligonucleotide
  Sense strand starting at position 3355 of SEQ ID NO: 1882945
gguaaagauuacuccuaag

SEQ ID NO: 2159235 - RNA, 19 nt, Artificial Sequence
  Description of Artificial Sequence: Synthetic oligonucleotide
  Antisense strand to SEQ ID NO: 2159234
cuuaggaguaaucuuuacc

SEQ ID NO: 2159236 - RNA, 19 nt, Artificial Sequence
  Description of Artificial Sequence: Synthetic oligonucleotide
  Sense strand starting at position 3384 of SEQ ID NO: 1882945
gggcauacccugugauaau

SEQ ID NO: 2159237 - RNA, 19 nt, Artificial Sequence
  Description of Artificial Sequence: Synthetic oligonucleotide
  Antisense strand to SEQ ID NO: 2159236
auuaucacaggguaugccc

SEQ ID NO: 2159238 - RNA, 19 nt, Artificial Sequence
  Description of Artificial Sequence: Synthetic oligonucleotide
  Sense strand starting at position 3432 of SEQ ID NO: 1882945
cuaauaucacagugguuau

SEQ ID NO: 2159239 - RNA, 19 nt, Artificial Sequence
  Description of Artificial Sequence: Synthetic oligonucleotide
  Antisense strand to SEQ ID NO: 2159238
auaaccacugugauauuag

SEQ ID NO: 2159240 - RNA, 19 nt, Artificial Sequence
  Description of Artificial Sequence: Synthetic oligonucleotide
  Sense strand starting at position 3471 of SEQ ID NO: 1882945
gugacaguauucuuuauau

SEQ ID NO: 2159241 - RNA, 19 nt, Artificial Sequence
  Description of Artificial Sequence: Synthetic oligonucleotide
  Antisense strand to SEQ ID NO: 2159240
auauaaagaauacugucac

SEQ ID NO: 2159242 - RNA, 19 nt, Artificial Sequence
  Description of Artificial Sequence: Synthetic oligonucleotide
  Sense strand starting at position 3482 of SEQ ID NO: 1882945
cuuuauauccuagggaggu

SEQ ID NO: 2159243 - RNA, 19 nt, Artificial Sequence
  Description of Artificial Sequence: Synthetic oligonucleotide
  Antisense strand to SEQ ID NO: 2159242
accucccuaggauauaaag

SEQ ID NO: 2159244 - RNA, 19 nt, Artificial Sequence
  Description of Artificial Sequence: Synthetic oligonucleotide
  Sense strand starting at position 3820 of SEQ ID NO: 1882945
uggagagggcuuuauacuu

SEQ ID NO: 2159245 - RNA, 19 nt, Artificial Sequence
  Description of Artificial Sequence: Synthetic oligonucleotide
  Antisense strand to SEQ ID NO: 2159244
aaguauaaagcccucucca

SEQ ID NO: 2159246 - RNA, 19 nt, Artificial Sequence
  Description of Artificial Sequence: Synthetic oligonucleotide
  Sense strand starting at position 68 of SEQ ID NO: 1882946
ugggaucagugcuugagau

SEQ ID NO: 2159247 - RNA, 19 nt, Artificial Sequence
  Description of Artificial Sequence: Synthetic oligonucleotide
  Antisense strand to SEQ ID NO: 2159246
aucucaagcacugauccca

SEQ ID NO: 2159248 - RNA, 19 nt, Artificial Sequence
  Description of Artificial Sequence: Synthetic oligonucleotide
  Sense strand starting at position 69 of SEQ ID NO: 1882946
gggaucagugcuugagaua

SEQ ID NO: 2159249 - RNA, 19 nt, Artificial Sequence
  Description of Artificial Sequence: Synthetic oligonucleotide
  Antisense strand to SEQ ID NO: 2159248
uaucucaagcacugauccc

SEQ ID NO: 2159250 - RNA, 19 nt, Artificial Sequence
  Description of Artificial Sequence: Synthetic oligonucleotide
  Sense strand starting at position 379 of SEQ ID NO: 1882946
uaugcugucuugguaauuu

SEQ ID NO: 2159251 - RNA, 19 nt, Artificial Sequence
  Description of Artificial Sequence: Synthetic oligonucleotide
  Antisense strand to SEQ ID NO: 2159250
aaauuaccaagacagcaua

SEQ ID NO: 2159252 - RNA, 19 nt, Artificial Sequence
  Description of Artificial Sequence: Synthetic oligonucleotide
  Sense strand starting at position 391 of SEQ ID NO: 1882946
guaauuuggcagugggcaa

SEQ ID NO: 2159253 - RNA, 19 nt, Artificial Sequence
  Description of Artificial Sequence: Synthetic oligonucleotide
  Antisense strand to SEQ ID NO: 2159252
uugcccacugccaaauuac

SEQ ID NO: 2159254 - RNA, 19 nt, Artificial Sequence
  Description of Artificial Sequence: Synthetic oligonucleotide
  Sense strand starting at position 476 of SEQ ID NO: 1882946
ccuggagucagugacacuu

SEQ ID NO: 2159255 - RNA, 19 nt, Artificial Sequence
  Description of Artificial Sequence: Synthetic oligonucleotide
  Antisense strand to SEQ ID NO: 2159254
aagugucacugacuccagg

SEQ ID NO: 2159256 - RNA, 19 nt, Artificial Sequence
  Description of Artificial Sequence: Synthetic oligonucleotide
  Sense strand starting at position 528 of SEQ ID NO: 1882946
ggacguuucccgcagggaa

SEQ ID NO: 2159257 - RNA, 19 nt, Artificial Sequence
  Description of Artificial Sequence: Synthetic oligonucleotide
  Antisense strand to SEQ ID NO: 2159256
uucccugcgggaaacgucc

SEQ ID NO: 2159258 - RNA, 19 nt, Artificial Sequence
  Description of Artificial Sequence: Synthetic oligonucleotide
  Sense strand starting at position 678 of SEQ ID NO: 1882946
guagauugggcucagucaa

SEQ ID NO: 2159259 - RNA, 19 nt, Artificial Sequence
  Description of Artificial Sequence: Synthetic oligonucleotide
  Antisense strand to SEQ ID NO: 2159258
uugacugagcccaaucuac

SEQ ID NO: 2159260 - RNA, 19 nt, Artificial Sequence
  Description of Artificial Sequence: Synthetic oligonucleotide
  Sense strand starting at position 685 of SEQ ID NO: 1882946
gggcucagucaacaucaua

SEQ ID NO: 2159261 - RNA, 19 nt, Artificial Sequence
  Description of Artificial Sequence: Synthetic oligonucleotide
  Antisense strand to SEQ ID NO: 2159260
uaugauguugacugagccc

SEQ ID NO: 2159262 - RNA, 19 nt, Artificial Sequence
  Description of Artificial Sequence: Synthetic oligonucleotide
  Sense strand starting at position 886 of SEQ ID NO: 1882946
ucaucaugguuggccagaa

SEQ ID NO: 2159263 - RNA, 19 nt, Artificial Sequence
  Description of Artificial Sequence: Synthetic oligonucleotide
  Antisense strand to SEQ ID NO: 2159262
uucuggccaaccaugauga

SEQ ID NO: 2159264 - RNA, 19 nt, Artificial Sequence
  Description of Artificial Sequence: Synthetic oligonucleotide
  Sense strand starting at position 1263 of SEQ ID NO: 1882946
ucucaagauuguuucuuag

SEQ ID NO: 2159265 - RNA, 19 nt, Artificial Sequence
  Description of Artificial Sequence: Synthetic oligonucleotide
  Antisense strand to SEQ ID NO: 2159264
cuaagaaacaaucuugaga

SEQ ID NO: 2159266 - RNA, 19 nt, Artificial Sequence
  Description of Artificial Sequence: Synthetic oligonucleotide
  Sense strand starting at position 1265 of SEQ ID NO: 1882946
ucaagauuguuucuuagaa

SEQ ID NO: 2159267 - RNA, 19 nt, Artificial Sequence
  Description of Artificial Sequence: Synthetic oligonucleotide
  Antisense strand to SEQ ID NO: 2159266
uucuaagaaacaaucuuga

SEQ ID NO: 2159268 - RNA, 19 nt, Artificial Sequence
  Description of Artificial Sequence: Synthetic oligonucleotide
  Sense strand starting at position 1345 of SEQ ID NO: 1882946
ugauguaacccagagcacu

SEQ ID NO: 2159269 - RNA, 19 nt, Artificial Sequence
  Description of Artificial Sequence: Synthetic oligonucleotide
  Antisense strand to SEQ ID NO: 2159268
agugcucuggguuacauca

SEQ ID NO: 2159270 - RNA, 19 nt, Artificial Sequence
  Description of Artificial Sequence: Synthetic oligonucleotide
  Sense strand starting at position 1618 of SEQ ID NO: 1882946
auaggaugcccuugaagga

SEQ ID NO: 2159271 - RNA, 19 nt, Artificial Sequence
  Description of Artificial Sequence: Synthetic oligonucleotide
  Antisense strand to SEQ ID NO: 2159270
uccuucaagggcauccuau

SEQ ID NO: 2159272 - RNA, 19 nt, Artificial Sequence
  Description of Artificial Sequence: Synthetic oligonucleotide
  Sense strand starting at position 1648 of SEQ ID NO: 1882946
ucaggaacuguuugacaca

SEQ ID NO: 2159273 - RNA, 19 nt, Artificial Sequence
  Description of Artificial Sequence: Synthetic oligonucleotide
  Antisense strand to SEQ ID NO: 2159272
ugugucaaacaguuccuga

SEQ ID NO: 2159274 - RNA, 19 nt, Artificial Sequence
  Description of Artificial Sequence: Synthetic oligonucleotide
  Sense strand starting at position 1697 of SEQ ID NO: 1882946
uggaauuaauccuuguaau

SEQ ID NO: 2159275 - RNA, 19 nt, Artificial Sequence
  Description of Artificial Sequence: Synthetic oligonucleotide
  Antisense strand to SEQ ID NO: 2159274
auuacaaggauuaauucca

SEQ ID NO: 2159276 - RNA, 19 nt, Artificial Sequence
  Description of Artificial Sequence: Synthetic oligonucleotide
  Sense strand starting at position 1698 of SEQ ID NO: 1882946
ggaauuaauccuuguaauc

SEQ ID NO: 2159277 - RNA, 19 nt, Artificial Sequence
  Description of Artificial Sequence: Synthetic oligonucleotide
  Antisense strand to SEQ ID NO: 2159276
gauuacaaggauuaauucc

SEQ ID NO: 2159278 - RNA, 19 nt, Artificial Sequence
  Description of Artificial Sequence: Synthetic oligonucleotide
  Sense strand starting at position 1739 of SEQ ID NO: 1882946
augugagggauauguuauc

SEQ ID NO: 2159279 - RNA, 19 nt, Artificial Sequence
  Description of Artificial Sequence: Synthetic oligonucleotide
  Antisense strand to SEQ ID NO: 2159278
gauaacauaucccucacau

SEQ ID NO: 2159280 - RNA, 19 nt, Artificial Sequence
  Description of Artificial Sequence: Synthetic oligonucleotide
  Sense strand starting at position 1750 of SEQ ID NO: 1882946
auguuaucacugcauugaa

SEQ ID NO: 2159281 - RNA, 19 nt, Artificial Sequence
  Description of Artificial Sequence: Synthetic oligonucleotide
  Antisense strand to SEQ ID NO: 2159280
uucaaugcagugauaacau

SEQ ID NO: 2159282 - RNA, 19 nt, Artificial Sequence
  Description of Artificial Sequence: Synthetic oligonucleotide
  Sense strand starting at position 1834 of SEQ ID NO: 1882946
ugugacaaugauggguuaa

SEQ ID NO: 2159283 - RNA, 19 nt, Artificial Sequence
  Description of Artificial Sequence: Synthetic oligonucleotide
  Antisense strand to SEQ ID NO: 2159282
uuaacccaucauugucaca

SEQ ID NO: 2159284 - RNA, 19 nt, Artificial Sequence
  Description of Artificial Sequence: Synthetic oligonucleotide
  Sense strand starting at position 1835 of SEQ ID NO: 1882946
gugacaaugauggguuaau

SEQ ID NO: 2159285 - RNA, 19 nt, Artificial Sequence
  Description of Artificial Sequence: Synthetic oligonucleotide
  Antisense strand to SEQ ID NO: 2159284
auuaacccaucauugucac

SEQ ID NO: 2159286 - RNA, 19 nt, Artificial Sequence
  Description of Artificial Sequence: Synthetic oligonucleotide
  Sense strand starting at position 1836 of SEQ ID NO: 1882946
ugacaaugauggguuaauu

SEQ ID NO: 2159287 - RNA, 19 nt, Artificial Sequence
  Description of Artificial Sequence: Synthetic oligonucleotide
  Antisense strand to SEQ ID NO: 2159286
aauuaacccaucauuguca

SEQ ID NO: 2159288 - RNA, 19 nt, Artificial Sequence
  Description of Artificial Sequence: Synthetic oligonucleotide
  Sense strand starting at position 1875 of SEQ ID NO: 1882946
agcauaaauguauguagga

SEQ ID NO: 2159289 - RNA, 19 nt, Artificial Sequence
  Description of Artificial Sequence: Synthetic oligonucleotide
  Antisense strand to SEQ ID NO: 2159288
uccuacauacauuuaugcu

SEQ ID NO: 2159290 - RNA, 19 nt, Artificial Sequence
  Description of Artificial Sequence: Synthetic oligonucleotide
  Sense strand starting at position 1903 of SEQ ID NO: 1882946
ccuaaagggcugggagaau

SEQ ID NO: 2159291 - RNA, 19 nt, Artificial Sequence
  Description of Artificial Sequence: Synthetic oligonucleotide
  Antisense strand to SEQ ID NO: 2159290
auucucccagcccuuuagg

SEQ ID NO: 2159292 - RNA, 19 nt, Artificial Sequence
  Description of Artificial Sequence: Synthetic oligonucleotide
  Sense strand starting at position 1919 of SEQ ID NO: 1882946
aauauaagagcauguuuga

SEQ ID NO: 2159293 - RNA, 19 nt, Artificial Sequence
  Description of Artificial Sequence: Synthetic oligonucleotide
  Antisense strand to SEQ ID NO: 2159292
ucaaacaugcucuuauauu

SEQ ID NO: 2159294 - RNA, 19 nt, Artificial Sequence
  Description of Artificial Sequence: Synthetic oligonucleotide
  Sense strand starting at position 2033 of SEQ ID NO: 1882946
ugggucaagcaguaagaau

SEQ ID NO: 2159295 - RNA, 19 nt, Artificial Sequence
  Description of Artificial Sequence: Synthetic oligonucleotide
  Antisense strand to SEQ ID NO: 2159294
auucuuacugcuugaccca

SEQ ID NO: 2159296 - RNA, 19 nt, Artificial Sequence
  Description of Artificial Sequence: Synthetic oligonucleotide
  Sense strand starting at position 2041 of SEQ ID NO: 1882946
gcaguaagaaucuaauggu

SEQ ID NO: 2159297 - RNA, 19 nt, Artificial Sequence
  Description of Artificial Sequence: Synthetic oligonucleotide
  Antisense strand to SEQ ID NO: 2159296
accauuagauucuuacugc

SEQ ID NO: 2159298 - RNA, 19 nt, Artificial Sequence
  Description of Artificial Sequence: Synthetic oligonucleotide
  Sense strand starting at position 2093 of SEQ ID NO: 1882946
ggauuagaagucugggcua

SEQ ID NO: 2159299 - RNA, 19 nt, Artificial Sequence
  Description of Artificial Sequence: Synthetic oligonucleotide
  Antisense strand to SEQ ID NO: 2159298
uagcccagacuucuaaucc

SEQ ID NO: 2159300 - RNA, 19 nt, Artificial Sequence
  Description of Artificial Sequence: Synthetic oligonucleotide
  Sense strand starting at position 2095 of SEQ ID NO: 1882946
auuagaagucugggcuaua

SEQ ID NO: 2159301 - RNA, 19 nt, Artificial Sequence
  Description of Artificial Sequence: Synthetic oligonucleotide
  Antisense strand to SEQ ID NO: 2159300
uauagcccagacuucuaau

SEQ ID NO: 2159302 - RNA, 19 nt, Artificial Sequence
  Description of Artificial Sequence: Synthetic oligonucleotide
  Sense strand starting at position 2096 of SEQ ID NO: 1882946
uuagaagucugggcuauau

SEQ ID NO: 2159303 - RNA, 19 nt, Artificial Sequence
  Description of Artificial Sequence: Synthetic oligonucleotide
  Antisense strand to SEQ ID NO: 2159302
auauagcccagacuucuaa

SEQ ID NO: 2159304 - RNA, 19 nt, Artificial Sequence
  Description of Artificial Sequence: Synthetic oligonucleotide
  Sense strand starting at position 2098 of SEQ ID NO: 1882946
agaagucugggcuauauca

SEQ ID NO: 2159305 - RNA, 19 nt, Artificial Sequence
  Description of Artificial Sequence: Synthetic oligonucleotide
  Antisense strand to SEQ ID NO: 2159304
ugauauagcccagacuucu

SEQ ID NO: 2159306 - RNA, 19 nt, Artificial Sequence
  Description of Artificial Sequence: Synthetic oligonucleotide
  Sense strand starting at position 2182 of SEQ ID NO: 1882946
auuuccuuuccuugaguuu

SEQ ID NO: 2159307 - RNA, 19 nt, Artificial Sequence
  Description of Artificial Sequence: Synthetic oligonucleotide
  Antisense strand to SEQ ID NO: 2159306
aaacucaaggaaaggaaau

SEQ ID NO: 2159308 - RNA, 19 nt, Artificial Sequence
  Description of Artificial Sequence: Synthetic oligonucleotide
  Sense strand starting at position 2682 of SEQ ID NO: 1882946
cuuguuuguguuuaaccaa

SEQ ID NO: 2159309 - RNA, 19 nt, Artificial Sequence
  Description of Artificial Sequence: Synthetic oligonucleotide
  Antisense strand to SEQ ID NO: 2159308
uugguuaaacacaaacaag

SEQ ID NO: 2159310 - RNA, 19 nt, Artificial Sequence
  Description of Artificial Sequence: Synthetic oligonucleotide
  Sense strand starting at position 2809 of SEQ ID NO: 1882946
cacaguccuccaggaugua

SEQ ID NO: 2159311 - RNA, 19 nt, Artificial Sequence
  Description of Artificial Sequence: Synthetic oligonucleotide
  Antisense strand to SEQ ID NO: 2159310
uacauccuggaggacugug

SEQ ID NO: 2159312 - RNA, 19 nt, Artificial Sequence
  Description of Artificial Sequence: Synthetic oligonucleotide
  Sense strand starting at position 3073 of SEQ ID NO: 1882946
aagagaaucccguguccua

SEQ ID NO: 2159313 - RNA, 19 nt, Artificial Sequence
  Description of Artificial Sequence: Synthetic oligonucleotide
  Antisense strand to SEQ ID NO: 2159312
uaggacacgggauucucuu

SEQ ID NO: 2159314 - RNA, 19 nt, Artificial Sequence
  Description of Artificial Sequence: Synthetic oligonucleotide
  Sense strand starting at position 3090 of SEQ ID NO: 1882946
uacccuugugcguccgaau

SEQ ID NO: 2159315 - RNA, 19 nt, Artificial Sequence
  Description of Artificial Sequence: Synthetic oligonucleotide
  Antisense strand to SEQ ID NO: 2159314
auucggacgcacaagggua

SEQ ID NO: 2159316 - RNA, 19 nt, Artificial Sequence
  Description of Artificial Sequence: Synthetic oligonucleotide
  Sense strand starting at position 3441 of SEQ ID NO: 1882946
ggagcuucugaucauggca

SEQ ID NO: 2159317 - RNA, 19 nt, Artificial Sequence
  Description of Artificial Sequence: Synthetic oligonucleotide
  Antisense strand to SEQ ID NO: 2159316
ugccaugaucagaagcucc

SEQ ID NO: 2159318 - RNA, 19 nt, Artificial Sequence
  Description of Artificial Sequence: Synthetic oligonucleotide
  Sense strand starting at position 3945 of SEQ ID NO: 1882946
gaguuagggagagguauca

SEQ ID NO: 2159319 - RNA, 19 nt, Artificial Sequence
  Description of Artificial Sequence: Synthetic oligonucleotide
  Antisense strand to SEQ ID NO: 2159318
ugauaccucucccuaacuc

SEQ ID NO: 2159320 - RNA, 19 nt, Artificial Sequence
  Description of Artificial Sequence: Synthetic oligonucleotide
  Sense strand starting at position 3955 of SEQ ID NO: 1882946
gagguaucacauggcuuua

SEQ ID NO: 2159321 - RNA, 19 nt, Artificial Sequence
  Description of Artificial Sequence: Synthetic oligonucleotide
  Antisense strand to SEQ ID NO: 2159320
uaaagccaugugauaccuc

SEQ ID NO: 2159322 - RNA, 19 nt, Artificial Sequence
  Description of Artificial Sequence: Synthetic oligonucleotide
  Sense strand starting at position 3957 of SEQ ID NO: 1882946
gguaucacauggcuuuaaa

SEQ ID NO: 2159323 - RNA, 19 nt, Artificial Sequence
  Description of Artificial Sequence: Synthetic oligonucleotide
  Antisense strand to SEQ ID NO: 2159322
uuuaaagccaugugauacc

SEQ ID NO: 2159324 - RNA, 19 nt, Artificial Sequence
  Description of Artificial Sequence: Synthetic oligonucleotide
  Sense strand starting at position 3967 of SEQ ID NO: 1882946
ggcuuuaaaugaucagaac

SEQ ID NO: 2159325 - RNA, 19 nt, Artificial Sequence
  Description of Artificial Sequence: Synthetic oligonucleotide
  Antisense strand to SEQ ID NO: 2159324
guucugaucauuuaaagcc

SEQ ID NO: 2159326 - RNA, 19 nt, Artificial Sequence
  Description of Artificial Sequence: Synthetic oligonucleotide
  Sense strand starting at position 1051 of SEQ ID NO: 1882947
gggagugacuggucaggca

SEQ ID NO: 2159327 - RNA, 19 nt, Artificial Sequence
  Description of Artificial Sequence: Synthetic oligonucleotide
  Antisense strand to SEQ ID NO: 2159326
ugccugaccagucacuccc

SEQ ID NO: 2159328 - RNA, 19 nt, Artificial Sequence
  Description of Artificial Sequence: Synthetic oligonucleotide
  Sense strand starting at position 1218 of SEQ ID NO: 1882947
gggccucaccuuugaguga

SEQ ID NO: 2159329 - RNA, 19 nt, Artificial Sequence
  Description of Artificial Sequence: Synthetic oligonucleotide
  Antisense strand to SEQ ID NO: 2159328
ucacucaaaggugaggccc

SEQ ID NO: 2159330 - RNA, 19 nt, Artificial Sequence
  Description of Artificial Sequence: Synthetic oligonucleotide
  Sense strand starting at position 1222 of SEQ ID NO: 1882947
cucaccuuugagugaggau

SEQ ID NO: 2159331 - RNA, 19 nt, Artificial Sequence
  Description of Artificial Sequence: Synthetic oligonucleotide
  Antisense strand to SEQ ID NO: 2159330
auccucacucaaaggugag

SEQ ID NO: 2159332 - RNA, 19 nt, Artificial Sequence
  Description of Artificial Sequence: Synthetic oligonucleotide
  Sense strand starting at position 1287 of SEQ ID NO: 1882947
ugacucugugggcaugaaa

SEQ ID NO: 2159333 - RNA, 19 nt, Artificial Sequence
  Description of Artificial Sequence: Synthetic oligonucleotide
  Antisense strand to SEQ ID NO: 2159332
uuucaugcccacagaguca

SEQ ID NO: 2159334 - RNA, 19 nt, Artificial Sequence
  Description of Artificial Sequence: Synthetic oligonucleotide
  Sense strand starting at position 1532 of SEQ ID NO: 1882947
agggaaagaaggugucuuu

SEQ ID NO: 2159335 - RNA, 19 nt, Artificial Sequence
  Description of Artificial Sequence: Synthetic oligonucleotide
  Antisense strand to SEQ ID NO: 2159334
aaagacaccuucuuucccu

SEQ ID NO: 2159336 - RNA, 19 nt, Artificial Sequence
  Description of Artificial Sequence: Synthetic oligonucleotide
  Sense strand starting at position 1574 of SEQ ID NO: 1882947
acuacugagguguguccaa

SEQ ID NO: 2159337 - RNA, 19 nt, Artificial Sequence
  Description of Artificial Sequence: Synthetic oligonucleotide
  Antisense strand to SEQ ID NO: 2159336
uuggacacaccucaguagu

SEQ ID NO: 2159338 - RNA, 19 nt, Artificial Sequence
  Description of Artificial Sequence: Synthetic oligonucleotide
  Sense strand starting at position 1926 of SEQ ID NO: 1882947
cggcauuuguucugaacag

SEQ ID NO: 2159339 - RNA, 19 nt, Artificial Sequence
  Description of Artificial Sequence: Synthetic oligonucleotide
  Antisense strand to SEQ ID NO: 2159338
cuguucagaacaaaugccg

SEQ ID NO: 2159340 - RNA, 19 nt, Artificial Sequence
  Description of Artificial Sequence: Synthetic oligonucleotide
  Sense strand starting at position 1998 of SEQ ID NO: 1882947
ggaguuuguccacagagau

SEQ ID NO: 2159341 - RNA, 19 nt, Artificial Sequence
  Description of Artificial Sequence: Synthetic oligonucleotide
  Antisense strand to SEQ ID NO: 2159340
aucucuguggacaaacucc

SEQ ID NO: 2159342 - RNA, 19 nt, Artificial Sequence
  Description of Artificial Sequence: Synthetic oligonucleotide
  Sense strand starting at position 2211 of SEQ ID NO: 1882947
agccaugugaccuaggcaa

SEQ ID NO: 2159343 - RNA, 19 nt, Artificial Sequence
  Description of Artificial Sequence: Synthetic oligonucleotide
  Antisense strand to SEQ ID NO: 2159342
uugccuaggucacauggcu

SEQ ID NO: 2159344 - RNA, 19 nt, Artificial Sequence
  Description of Artificial Sequence: Synthetic oligonucleotide
  Sense strand starting at position 2213 of SEQ ID NO: 1882947
ccaugugaccuaggcaagu

SEQ ID NO: 2159345 - RNA, 19 nt, Artificial Sequence
  Description of Artificial Sequence: Synthetic oligonucleotide
  Antisense strand to SEQ ID NO: 2159344
acuugccuaggucacaugg

SEQ ID NO: 2159346 - RNA, 19 nt, Artificial Sequence
  Description of Artificial Sequence: Synthetic oligonucleotide
  Sense strand starting at position 2263 of SEQ ID NO: 1882947
ccauuaaguggguacaacu

SEQ ID NO: 2159347 - RNA, 19 nt, Artificial Sequence
  Description of Artificial Sequence: Synthetic oligonucleotide
  Antisense strand to SEQ ID NO: 2159346
aguuguacccacuuaaugg

SEQ ID NO: 2159348 - RNA, 19 nt, Artificial Sequence
  Description of Artificial Sequence: Synthetic oligonucleotide
  Sense strand starting at position 2274 of SEQ ID NO: 1882947
guacaacugugucgacacu

SEQ ID NO: 2159349 - RNA, 19 nt, Artificial Sequence
  Description of Artificial Sequence: Synthetic oligonucleotide
  Antisense strand to SEQ ID NO: 2159348
agugucgacacaguuguac

SEQ ID NO: 2159350 - RNA, 19 nt, Artificial Sequence
  Description of Artificial Sequence: Synthetic oligonucleotide
  Sense strand starting at position 2291 of SEQ ID NO: 1882947
cucagagguuguugagaau

SEQ ID NO: 2159351 - RNA, 19 nt, Artificial Sequence
  Description of Artificial Sequence: Synthetic oligonucleotide
  Antisense strand to SEQ ID NO: 2159350
auucucaacaaccucugag

SEQ ID NO: 2159352 - RNA, 19 nt, Artificial Sequence
  Description of Artificial Sequence: Synthetic oligonucleotide
  Sense strand starting at position 2294 of SEQ ID NO: 1882947
agagguuguugagaauauc

SEQ ID NO: 2159353 - RNA, 19 nt, Artificial Sequence
  Description of Artificial Sequence: Synthetic oligonucleotide
  Antisense strand to SEQ ID NO: 2159352
gauauucucaacaaccucu

SEQ ID NO: 2159354 - RNA, 19 nt, Artificial Sequence
  Description of Artificial Sequence: Synthetic oligonucleotide
  Sense strand starting at position 2408 of SEQ ID NO: 1882947
gccucuugcuuccggaaca

SEQ ID NO: 2159355 - RNA, 19 nt, Artificial Sequence
  Description of Artificial Sequence: Synthetic oligonucleotide
  Antisense strand to SEQ ID NO: 2159354
uguuccggaagcaagaggc

SEQ ID NO: 2159356 - RNA, 19 nt, Artificial Sequence
  Description of Artificial Sequence: Synthetic oligonucleotide
  Sense strand starting at position 3325 of SEQ ID NO: 1882947
gcgucaaauuucuaaagca

SEQ ID NO: 2159357 - RNA, 19 nt, Artificial Sequence
  Description of Artificial Sequence: Synthetic oligonucleotide
  Antisense strand to SEQ ID NO: 2159356
ugcuuuagaaauuugacgc

SEQ ID NO: 2159358 - RNA, 19 nt, Artificial Sequence
  Description of Artificial Sequence: Synthetic oligonucleotide
  Sense strand starting at position 3364 of SEQ ID NO: 1882947
ccgucugguucucaaagca

SEQ ID NO: 2159359 - RNA, 19 nt, Artificial Sequence
  Description of Artificial Sequence: Synthetic oligonucleotide
  Antisense strand to SEQ ID NO: 2159358
ugcuuugagaaccagacgg

SEQ ID NO: 2159360 - RNA, 19 nt, Artificial Sequence
  Description of Artificial Sequence: Synthetic oligonucleotide
  Sense strand starting at position 3401 of SEQ ID NO: 1882947
ccaggaugccugggucaga

SEQ ID NO: 2159361 - RNA, 19 nt, Artificial Sequence
  Description of Artificial Sequence: Synthetic oligonucleotide
  Antisense strand to SEQ ID NO: 2159360
ucugacccaggcauccugg

SEQ ID NO: 2159362 - RNA, 19 nt, Artificial Sequence
  Description of Artificial Sequence: Synthetic oligonucleotide
  Sense strand starting at position 3411 of SEQ ID NO: 1882947
ugggucagagcaugaauaa

SEQ ID NO: 2159363 - RNA, 19 nt, Artificial Sequence
  Description of Artificial Sequence: Synthetic oligonucleotide
  Antisense strand to SEQ ID NO: 2159362
uuauucaugcucugaccca

SEQ ID NO: 2159364 - RNA, 19 nt, Artificial Sequence
  Description of Artificial Sequence: Synthetic oligonucleotide
  Sense strand starting at position 3460 of SEQ ID NO: 1882947
aguggcucgagcugagaau

SEQ ID NO: 2159365 - RNA, 19 nt, Artificial Sequence
  Description of Artificial Sequence: Synthetic oligonucleotide
  Antisense strand to SEQ ID NO: 2159364
auucucagcucgagccacu

SEQ ID NO: 2159366 - RNA, 19 nt, Artificial Sequence
  Description of Artificial Sequence: Synthetic oligonucleotide
  Sense strand starting at position 3536 of SEQ ID NO: 1882947
agcaaucugcucugccauu

SEQ ID NO: 2159367 - RNA, 19 nt, Artificial Sequence
  Description of Artificial Sequence: Synthetic oligonucleotide
  Antisense strand to SEQ ID NO: 2159366
aauggcagagcagauugcu

SEQ ID NO: 2159368 - RNA, 19 nt, Artificial Sequence
  Description of Artificial Sequence: Synthetic oligonucleotide
  Sense strand starting at position 3537 of SEQ ID NO: 1882947
gcaaucugcucugccauuu

SEQ ID NO: 2159369 - RNA, 19 nt, Artificial Sequence
  Description of Artificial Sequence: Synthetic oligonucleotide
  Antisense strand to SEQ ID NO: 2159368
aaauggcagagcagauugc

SEQ ID NO: 2159370 - RNA, 19 nt, Artificial Sequence
  Description of Artificial Sequence: Synthetic oligonucleotide
  Sense strand starting at position 3552 of SEQ ID NO: 1882947
auuugaaaguccuggguuu

SEQ ID NO: 2159371 - RNA, 19 nt, Artificial Sequence
  Description of Artificial Sequence: Synthetic oligonucleotide
  Antisense strand to SEQ ID NO: 2159370
aaacccaggacuuucaaau

SEQ ID NO: 2159372 - RNA, 19 nt, Artificial Sequence
  Description of Artificial Sequence: Synthetic oligonucleotide
  Sense strand starting at position 3554 of SEQ ID NO: 1882947
uugaaaguccuggguuuga

SEQ ID NO: 2159373 - RNA, 19 nt, Artificial Sequence
  Description of Artificial Sequence: Synthetic oligonucleotide
  Antisense strand to SEQ ID NO: 2159372
ucaaacccaggacuuucaa

SEQ ID NO: 2159374 - RNA, 19 nt, Artificial Sequence
  Description of Artificial Sequence: Synthetic oligonucleotide
  Sense strand starting at position 3564 of SEQ ID NO: 1882947
uggguuugauccugcgcuu

SEQ ID NO: 2159375 - RNA, 19 nt, Artificial Sequence
  Description of Artificial Sequence: Synthetic oligonucleotide
  Antisense strand to SEQ ID NO: 2159374
aagcgcaggaucaaaccca

SEQ ID NO: 2159376 - RNA, 19 nt, Artificial Sequence
  Description of Artificial Sequence: Synthetic oligonucleotide
  Sense strand starting at position 3802 of SEQ ID NO: 1882947
cgguguuugcgagagacuc

SEQ ID NO: 2159377 - RNA, 19 nt, Artificial Sequence
  Description of Artificial Sequence: Synthetic oligonucleotide
  Antisense strand to SEQ ID NO: 2159376
gagucucucgcaaacaccg

SEQ ID NO: 2159378 - RNA, 19 nt, Artificial Sequence
  Description of Artificial Sequence: Synthetic oligonucleotide
  Sense strand starting at position 3839 of SEQ ID NO: 1882947
acagccucaucugggaaau

SEQ ID NO: 2159379 - RNA, 19 nt, Artificial Sequence
  Description of Artificial Sequence: Synthetic oligonucleotide
  Antisense strand to SEQ ID NO: 2159378
auuucccagaugaggcugu

SEQ ID NO: 2159380 - RNA, 19 nt, Artificial Sequence
  Description of Artificial Sequence: Synthetic oligonucleotide
  Sense strand starting at position 3871 of SEQ ID NO: 1882947
gcugcaaucgcagcagauu

SEQ ID NO: 2159381 - RNA, 19 nt, Artificial Sequence
  Description of Artificial Sequence: Synthetic oligonucleotide
  Antisense strand to SEQ ID NO: 2159380
aaucugcugcgauugcagc

SEQ ID NO: 2159382 - RNA, 19 nt, Artificial Sequence
  Description of Artificial Sequence: Synthetic oligonucleotide
  Sense strand starting at position 3872 of SEQ ID NO: 1882947
cugcaaucgcagcagauua

SEQ ID NO: 2159383 - RNA, 19 nt, Artificial Sequence
  Description of Artificial Sequence: Synthetic oligonucleotide
  Antisense strand to SEQ ID NO: 2159382
uaaucugcugcgauugcag

SEQ ID NO: 2159384 - RNA, 19 nt, Artificial Sequence
  Description of Artificial Sequence: Synthetic oligonucleotide
  Sense strand starting at position 3911 of SEQ ID NO: 1882947
gugcauggcucucagcaaa

SEQ ID NO: 2159385 - RNA, 19 nt, Artificial Sequence
  Description of Artificial Sequence: Synthetic oligonucleotide
  Antisense strand to SEQ ID NO: 2159384
uuugcugagagccaugcac

SEQ ID NO: 2159386 - RNA, 19 nt, Artificial Sequence
  Description of Artificial Sequence: Synthetic oligonucleotide
  Sense strand starting at position 3937 of SEQ ID NO: 1882947
ggugaaugcuaacuauucu

SEQ ID NO: 2159387 - RNA, 19 nt, Artificial Sequence
  Description of Artificial Sequence: Synthetic oligonucleotide
  Antisense strand to SEQ ID NO: 2159386
agaauaguuagcauucacc

SEQ ID NO: 2159388 - RNA, 19 nt, Artificial Sequence
  Description of Artificial Sequence: Synthetic oligonucleotide
  Sense strand starting at position 25 of SEQ ID NO: 1882948
ugcugucugcuguucuuaa

SEQ ID NO: 2159389 - RNA, 19 nt, Artificial Sequence
  Description of Artificial Sequence: Synthetic oligonucleotide
  Antisense strand to SEQ ID NO: 2159388
uuaagaacagcagacagca

SEQ ID NO: 2159390 - RNA, 19 nt, Artificial Sequence
  Description of Artificial Sequence: Synthetic oligonucleotide
  Sense strand starting at position 539 of SEQ ID NO: 1882948
aagcaauguuagguaugau

SEQ ID NO: 2159391 - RNA, 19 nt, Artificial Sequence
  Description of Artificial Sequence: Synthetic oligonucleotide
  Antisense strand to SEQ ID NO: 2159390
aucauaccuaacauugcuu

SEQ ID NO: 2159392 - RNA, 19 nt, Artificial Sequence
  Description of Artificial Sequence: Synthetic oligonucleotide
  Sense strand starting at position 540 of SEQ ID NO: 1882948
agcaauguuagguaugauc

SEQ ID NO: 2159393 - RNA, 19 nt, Artificial Sequence
  Description of Artificial Sequence: Synthetic oligonucleotide
  Antisense strand to SEQ ID NO: 2159392
gaucauaccuaacauugcu

SEQ ID NO: 2159394 - RNA, 19 nt, Artificial Sequence
  Description of Artificial Sequence: Synthetic oligonucleotide
  Sense strand starting at position 542 of SEQ ID NO: 1882948
caauguuagguaugaucag

SEQ ID NO: 2159395 - RNA, 19 nt, Artificial Sequence
  Description of Artificial Sequence: Synthetic oligonucleotide
  Antisense strand to SEQ ID NO: 2159394
cugaucauaccuaacauug

SEQ ID NO: 2159396 - RNA, 19 nt, Artificial Sequence
  Description of Artificial Sequence: Synthetic oligonucleotide
  Sense strand starting at position 551 of SEQ ID NO: 1882948
guaugaucagcugacgaaa

SEQ ID NO: 2159397 - RNA, 19 nt, Artificial Sequence
  Description of Artificial Sequence: Synthetic oligonucleotide
  Antisense strand to SEQ ID NO: 2159396
uuucgucagcugaucauac

SEQ ID NO: 2159398 - RNA, 19 nt, Artificial Sequence
  Description of Artificial Sequence: Synthetic oligonucleotide
  Sense strand starting at position 683 of SEQ ID NO: 1882948
gccgauuucuauucuuuaa

SEQ ID NO: 2159399 - RNA, 19 nt, Artificial Sequence
  Description of Artificial Sequence: Synthetic oligonucleotide
  Antisense strand to SEQ ID NO: 2159398
uuaaagaauagaaaucggc

SEQ ID NO: 2159400 - RNA, 19 nt, Artificial Sequence
  Description of Artificial Sequence: Synthetic oligonucleotide
  Sense strand starting at position 798 of SEQ ID NO: 1882948
ugaacagauuuagaccaau

SEQ ID NO: 2159401 - RNA, 19 nt, Artificial Sequence
  Description of Artificial Sequence: Synthetic oligonucleotide
  Antisense strand to SEQ ID NO: 2159400
auuggucuaaaucuguuca

SEQ ID NO: 2159402 - RNA, 19 nt, Artificial Sequence
  Description of Artificial Sequence: Synthetic oligonucleotide
  Sense strand starting at position 848 of SEQ ID NO: 1882948
aggcauacagucgaguaua

SEQ ID NO: 2159403 - RNA, 19 nt, Artificial Sequence
  Description of Artificial Sequence: Synthetic oligonucleotide
  Antisense strand to SEQ ID NO: 2159402
uauacucgacuguaugccu

SEQ ID NO: 2159404 - RNA, 19 nt, Artificial Sequence
  Description of Artificial Sequence: Synthetic oligonucleotide
  Sense strand starting at position 861 of SEQ ID NO: 1882948
aguauaagguccuuuacaa

SEQ ID NO: 2159405 - RNA, 19 nt, Artificial Sequence
  Description of Artificial Sequence: Synthetic oligonucleotide
  Antisense strand to SEQ ID NO: 2159404
uuguaaaggaccuuauacu

SEQ ID NO: 2159406 - RNA, 19 nt, Artificial Sequence
  Description of Artificial Sequence: Synthetic oligonucleotide
  Sense strand starting at position 909 of SEQ ID NO: 1882948
gaacaagccuaguuaguau

SEQ ID NO: 2159407 - RNA, 19 nt, Artificial Sequence
  Description of Artificial Sequence: Synthetic oligonucleotide
  Antisense strand to SEQ ID NO: 2159406
auacuaacuaggcuuguuc

SEQ ID NO: 2159408 - RNA, 19 nt, Artificial Sequence
  Description of Artificial Sequence: Synthetic oligonucleotide
  Sense strand starting at position 1040 of SEQ ID NO: 1882948
aaugucuagcgugaaacaa

SEQ ID NO: 2159409 - RNA, 19 nt, Artificial Sequence
  Description of Artificial Sequence: Synthetic oligonucleotide
  Antisense strand to SEQ ID NO: 2159408
uuguuucacgcuagacauu

SEQ ID NO: 2159410 - RNA, 19 nt, Artificial Sequence
  Description of Artificial Sequence: Synthetic oligonucleotide
  Sense strand starting at position 1048 of SEQ ID NO: 1882948
gcgugaaacaaauagcuca

SEQ ID NO: 2159411 - RNA, 19 nt, Artificial Sequence
  Description of Artificial Sequence: Synthetic oligonucleotide
  Antisense strand to SEQ ID NO: 2159410
ugagcuauuuguuucacgc

SEQ ID NO: 2159412 - RNA, 19 nt, Artificial Sequence
  Description of Artificial Sequence: Synthetic oligonucleotide
  Sense strand starting at position 1629 of SEQ ID NO: 1882948
ucgcaaauaacguauaaag

SEQ ID NO: 2159413 - RNA, 19 nt, Artificial Sequence
  Description of Artificial Sequence: Synthetic oligonucleotide
  Antisense strand to SEQ ID NO: 2159412
cuuuauacguuauuugcga

SEQ ID NO: 2159414 - RNA, 19 nt, Artificial Sequence
  Description of Artificial Sequence: Synthetic oligonucleotide
  Sense strand starting at position 1631 of SEQ ID NO: 1882948
gcaaauaacguauaaagua

SEQ ID NO: 2159415 - RNA, 19 nt, Artificial Sequence
  Description of Artificial Sequence: Synthetic oligonucleotide
  Antisense strand to SEQ ID NO: 2159414
uacuuuauacguuauuugc

SEQ ID NO: 2159416 - RNA, 19 nt, Artificial Sequence
  Description of Artificial Sequence: Synthetic oligonucleotide
  Sense strand starting at position 1659 of SEQ ID NO: 1882948
ccauuacuccaucgaguga

SEQ ID NO: 2159417 - RNA, 19 nt, Artificial Sequence
  Description of Artificial Sequence: Synthetic oligonucleotide
  Antisense strand to SEQ ID NO: 2159416
ucacucgauggaguaaugg

SEQ ID NO: 2159418 - RNA, 19 nt, Artificial Sequence
  Description of Artificial Sequence: Synthetic oligonucleotide
  Sense strand starting at position 1680 of SEQ ID NO: 1882948
ccacauaggguuugagaug

SEQ ID NO: 2159419 - RNA, 19 nt, Artificial Sequence
  Description of Artificial Sequence: Synthetic oligonucleotide
  Antisense strand to SEQ ID NO: 2159418
caucucaaacccuaugugg

SEQ ID NO: 2159420 - RNA, 19 nt, Artificial Sequence
  Description of Artificial Sequence: Synthetic oligonucleotide
  Sense strand starting at position 1800 of SEQ ID NO: 1882948
guagaaagacguuaguaug

SEQ ID NO: 2159421 - RNA, 19 nt, Artificial Sequence
  Description of Artificial Sequence: Synthetic oligonucleotide
  Antisense strand to SEQ ID NO: 2159420
cauacuaacgucuuucuac

SEQ ID NO: 2159422 - RNA, 19 nt, Artificial Sequence
  Description of Artificial Sequence: Synthetic oligonucleotide
  Sense strand starting at position 1881 of SEQ ID NO: 1882948
gcugguuggcucuaagaag

SEQ ID NO: 2159423 - RNA, 19 nt, Artificial Sequence
  Description of Artificial Sequence: Synthetic oligonucleotide
  Antisense strand to SEQ ID NO: 2159422
cuucuuagagccaaccagc

SEQ ID NO: 2159424 - RNA, 19 nt, Artificial Sequence
  Description of Artificial Sequence: Synthetic oligonucleotide
  Sense strand starting at position 2195 of SEQ ID NO: 1882948
ccaaguuugcgggaaagaa

SEQ ID NO: 2159425 - RNA, 19 nt, Artificial Sequence
  Description of Artificial Sequence: Synthetic oligonucleotide
  Antisense strand to SEQ ID NO: 2159424
uucuuucccgcaaacuugg

SEQ ID NO: 2159426 - RNA, 19 nt, Artificial Sequence
  Description of Artificial Sequence: Synthetic oligonucleotide
  Sense strand starting at position 2234 of SEQ ID NO: 1882948
ccuaccuuucuggguuaca

SEQ ID NO: 2159427 - RNA, 19 nt, Artificial Sequence
  Description of Artificial Sequence: Synthetic oligonucleotide
  Antisense strand to SEQ ID NO: 2159426
uguaacccagaaagguagg

SEQ ID NO: 2159428 - RNA, 19 nt, Artificial Sequence
  Description of Artificial Sequence: Synthetic oligonucleotide
  Sense strand starting at position 2235 of SEQ ID NO: 1882948
cuaccuuucuggguuacaa

SEQ ID NO: 2159429 - RNA, 19 nt, Artificial Sequence
  Description of Artificial Sequence: Synthetic oligonucleotide
  Antisense strand to SEQ ID NO: 2159428
uuguaacccagaaagguag

SEQ ID NO: 2159430 - RNA, 19 nt, Artificial Sequence
  Description of Artificial Sequence: Synthetic oligonucleotide
  Sense strand starting at position 2243 of SEQ ID NO: 1882948
cuggguuacaacugaaguu

SEQ ID NO: 2159431 - RNA, 19 nt, Artificial Sequence
  Description of Artificial Sequence: Synthetic oligonucleotide
  Antisense strand to SEQ ID NO: 2159430
aacuucaguuguaacccag

SEQ ID NO: 2159432 - RNA, 19 nt, Artificial Sequence
  Description of Artificial Sequence: Synthetic oligonucleotide
  Sense strand starting at position 2244 of SEQ ID NO: 1882948
uggguuacaacugaaguuu

SEQ ID NO: 2159433 - RNA, 19 nt, Artificial Sequence
  Description of Artificial Sequence: Synthetic oligonucleotide
  Antisense strand to SEQ ID NO: 2159432
aaacuucaguuguaaccca

SEQ ID NO: 2159434 - RNA, 19 nt, Artificial Sequence
  Description of Artificial Sequence: Synthetic oligonucleotide
  Sense strand starting at position 2591 of SEQ ID NO: 1882948
agaggaguuucccugggcu

SEQ ID NO: 2159435 - RNA, 19 nt, Artificial Sequence
  Description of Artificial Sequence: Synthetic oligonucleotide
  Antisense strand to SEQ ID NO: 2159434
agcccagggaaacuccucu

SEQ ID NO: 2159436 - RNA, 19 nt, Artificial Sequence
  Description of Artificial Sequence: Synthetic oligonucleotide
  Sense strand starting at position 2594 of SEQ ID NO: 1882948
ggaguuucccugggcuaga

SEQ ID NO: 2159437 - RNA, 19 nt, Artificial Sequence
  Description of Artificial Sequence: Synthetic oligonucleotide
  Antisense strand to SEQ ID NO: 2159436
ucuagcccagggaaacucc

SEQ ID NO: 2159438 - RNA, 19 nt, Artificial Sequence
  Description of Artificial Sequence: Synthetic oligonucleotide
  Sense strand starting at position 2604 of SEQ ID NO: 1882948
ugggcuagagucugagaaa

SEQ ID NO: 2159439 - RNA, 19 nt, Artificial Sequence
  Description of Artificial Sequence: Synthetic oligonucleotide
  Antisense strand to SEQ ID NO: 2159438
uuucucagacucuagccca

SEQ ID NO: 2159440 - RNA, 19 nt, Artificial Sequence
  Description of Artificial Sequence: Synthetic oligonucleotide
  Sense strand starting at position 3183 of SEQ ID NO: 1882948
cuaugagauaaucgaguuc

SEQ ID NO: 2159441 - RNA, 19 nt, Artificial Sequence
  Description of Artificial Sequence: Synthetic oligonucleotide
  Antisense strand to SEQ ID NO: 2159440
gaacucgauuaucucauag

SEQ ID NO: 2159442 - RNA, 19 nt, Artificial Sequence
  Description of Artificial Sequence: Synthetic oligonucleotide
  Sense strand starting at position 3222 of SEQ ID NO: 1882948
uggaauugguaggcauacu

SEQ ID NO: 2159443 - RNA, 19 nt, Artificial Sequence
  Description of Artificial Sequence: Synthetic oligonucleotide
  Antisense strand to SEQ ID NO: 2159442
aguaugccuaccaauucca

SEQ ID NO: 2159444 - RNA, 19 nt, Artificial Sequence
  Description of Artificial Sequence: Synthetic oligonucleotide
  Sense strand starting at position 3238 of SEQ ID NO: 1882948
acugcaaaucuuuaugaug

SEQ ID NO: 2159445 - RNA, 19 nt, Artificial Sequence
  Description of Artificial Sequence: Synthetic oligonucleotide
  Antisense strand to SEQ ID NO: 2159444
caucauaaagauuugcagu

SEQ ID NO: 2159446 - RNA, 19 nt, Artificial Sequence
  Description of Artificial Sequence: Synthetic oligonucleotide
  Sense strand starting at position 3423 of SEQ ID NO: 1882948
ucucaacugcuaugacaga

SEQ ID NO: 2159447 - RNA, 19 nt, Artificial Sequence
  Description of Artificial Sequence: Synthetic oligonucleotide
  Antisense strand to SEQ ID NO: 2159446
ucugucauagcaguugaga

SEQ ID NO: 2159448 - RNA, 19 nt, Artificial Sequence
  Description of Artificial Sequence: Synthetic oligonucleotide
  Sense strand starting at position 3557 of SEQ ID NO: 1882948
caaguaauucuggguuaaa

SEQ ID NO: 2159449 - RNA, 19 nt, Artificial Sequence
  Description of Artificial Sequence: Synthetic oligonucleotide
  Antisense strand to SEQ ID NO: 2159448
uuuaacccagaauuacuug

SEQ ID NO: 2159450 - RNA, 19 nt, Artificial Sequence
  Description of Artificial Sequence: Synthetic oligonucleotide
  Sense strand starting at position 3558 of SEQ ID NO: 1882948
aaguaauucuggguuaaag

SEQ ID NO: 2159451 - RNA, 19 nt, Artificial Sequence
  Description of Artificial Sequence: Synthetic oligonucleotide
  Antisense strand to SEQ ID NO: 2159450
cuuuaacccagaauuacuu

SEQ ID NO: 2159452 - RNA, 19 nt, Artificial Sequence
  Description of Artificial Sequence: Synthetic oligonucleotide
  Sense strand starting at position 3566 of SEQ ID NO: 1882948
cuggguuaaagauguggga

SEQ ID NO: 2159453 - RNA, 19 nt, Artificial Sequence
  Description of Artificial Sequence: Synthetic oligonucleotide
  Antisense strand to SEQ ID NO: 2159452
ucccacaucuuuaacccag

SEQ ID NO: 2159454 - RNA, 19 nt, Artificial Sequence
  Description of Artificial Sequence: Synthetic oligonucleotide
  Sense strand starting at position 3570 of SEQ ID NO: 1882948
guuaaagaugugggaagau

SEQ ID NO: 2159455 - RNA, 19 nt, Artificial Sequence
  Description of Artificial Sequence: Synthetic oligonucleotide
  Antisense strand to SEQ ID NO: 2159454
aucuucccacaucuuuaac

SEQ ID NO: 2159456 - RNA, 19 nt, Artificial Sequence
  Description of Artificial Sequence: Synthetic oligonucleotide
  Sense strand starting at position 3622 of SEQ ID NO: 1882948
cauucuguugucuagauga

SEQ ID NO: 2159457 - RNA, 19 nt, Artificial Sequence
  Description of Artificial Sequence: Synthetic oligonucleotide
  Antisense strand to SEQ ID NO: 2159456
ucaucuagacaacagaaug

SEQ ID NO: 2159458 - RNA, 19 nt, Artificial Sequence
  Description of Artificial Sequence: Synthetic oligonucleotide
  Sense strand starting at position 3624 of SEQ ID NO: 1882948
uucuguugucuagaugaug

SEQ ID NO: 2159459 - RNA, 19 nt, Artificial Sequence
  Description of Artificial Sequence: Synthetic oligonucleotide
  Antisense strand to SEQ ID NO: 2159458
caucaucuagacaacagaa

SEQ ID NO: 2159460 - RNA, 19 nt, Artificial Sequence
  Description of Artificial Sequence: Synthetic oligonucleotide
  Sense strand starting at position 3728 of SEQ ID NO: 1882948
cugaacaugcacugaaaua

SEQ ID NO: 2159461 - RNA, 19 nt, Artificial Sequence
  Description of Artificial Sequence: Synthetic oligonucleotide
  Antisense strand to SEQ ID NO: 2159460
uauuucagugcauguucag

SEQ ID NO: 2159462 - RNA, 19 nt, Artificial Sequence
  Description of Artificial Sequence: Synthetic oligonucleotide
  Sense strand starting at position 3746 of SEQ ID NO: 1882948
agcagcugcguuucuagaa

SEQ ID NO: 2159463 - RNA, 19 nt, Artificial Sequence
  Description of Artificial Sequence: Synthetic oligonucleotide
  Antisense strand to SEQ ID NO: 2159462
uucuagaaacgcagcugcu

SEQ ID NO: 2159464 - RNA, 19 nt, Artificial Sequence
  Description of Artificial Sequence: Synthetic oligonucleotide
  Sense strand starting at position 3759 of SEQ ID NO: 1882948
cuagaaagcuuucuucuug

SEQ ID NO: 2159465 - RNA, 19 nt, Artificial Sequence
  Description of Artificial Sequence: Synthetic oligonucleotide
  Antisense strand to SEQ ID NO: 2159464
caagaagaaagcuuucuag

SEQ ID NO: 2159466 - RNA, 19 nt, Artificial Sequence
  Description of Artificial Sequence: Synthetic oligonucleotide
  Sense strand starting at position 3830 of SEQ ID NO: 1882948
cugacuucugaaugacuau

SEQ ID NO: 2159467 - RNA, 19 nt, Artificial Sequence
  Description of Artificial Sequence: Synthetic oligonucleotide
  Antisense strand to SEQ ID NO: 2159466
auagucauucagaagucag

SEQ ID NO: 2159468 - RNA, 19 nt, Artificial Sequence
  Description of Artificial Sequence: Synthetic oligonucleotide
  Sense strand starting at position 197 of SEQ ID NO: 1882949
augaguaacccugggcaaa

SEQ ID NO: 2159469 - RNA, 19 nt, Artificial Sequence
  Description of Artificial Sequence: Synthetic oligonucleotide
  Antisense strand to SEQ ID NO: 2159468
uuugcccaggguuacucau

SEQ ID NO: 2159470 - RNA, 19 nt, Artificial Sequence
  Description of Artificial Sequence: Synthetic oligonucleotide
  Sense strand starting at position 278 of SEQ ID NO: 1882949
ucuggaguuaagcaugacu

SEQ ID NO: 2159471 - RNA, 19 nt, Artificial Sequence
  Description of Artificial Sequence: Synthetic oligonucleotide
  Antisense strand to SEQ ID NO: 2159470
agucaugcuuaacuccaga

SEQ ID NO: 2159472 - RNA, 19 nt, Artificial Sequence
  Description of Artificial Sequence: Synthetic oligonucleotide
  Sense strand starting at position 280 of SEQ ID NO: 1882949
uggaguuaagcaugacuag

SEQ ID NO: 2159473 - RNA, 19 nt, Artificial Sequence
  Description of Artificial Sequence: Synthetic oligonucleotide
  Antisense strand to SEQ ID NO: 2159472
cuagucaugcuuaacucca

SEQ ID NO: 2159474 - RNA, 19 nt, Artificial Sequence
  Description of Artificial Sequence: Synthetic oligonucleotide
  Sense strand starting at position 281 of SEQ ID NO: 1882949
ggaguuaagcaugacuagu

SEQ ID NO: 2159475 - RNA, 19 nt, Artificial Sequence
  Description of Artificial Sequence: Synthetic oligonucleotide
  Antisense strand to SEQ ID NO: 2159474
acuagucaugcuuaacucc

SEQ ID NO: 2159476 - RNA, 19 nt, Artificial Sequence
  Description of Artificial Sequence: Synthetic oligonucleotide
  Sense strand starting at position 289 of SEQ ID NO: 1882949
gcaugacuaguacaauguu

SEQ ID NO: 2159477 - RNA, 19 nt, Artificial Sequence
  Description of Artificial Sequence: Synthetic oligonucleotide
  Antisense strand to SEQ ID NO: 2159476
aacauuguacuagucaugc

SEQ ID NO: 2159478 - RNA, 19 nt, Artificial Sequence
  Description of Artificial Sequence: Synthetic oligonucleotide
  Sense strand starting at position 292 of SEQ ID NO: 1882949
ugacuaguacaauguucua

SEQ ID NO: 2159479 - RNA, 19 nt, Artificial Sequence
  Description of Artificial Sequence: Synthetic oligonucleotide
  Antisense strand to SEQ ID NO: 2159478
uagaacauuguacuaguca

SEQ ID NO: 2159480 - RNA, 19 nt, Artificial Sequence
  Description of Artificial Sequence: Synthetic oligonucleotide
  Sense strand starting at position 295 of SEQ ID NO: 1882949
cuaguacaauguucuaaac

SEQ ID NO: 2159481 - RNA, 19 nt, Artificial Sequence
  Description of Artificial Sequence: Synthetic oligonucleotide
  Antisense strand to SEQ ID NO: 2159480
guuuagaacauuguacuag

SEQ ID NO: 2159482 - RNA, 19 nt, Artificial Sequence
  Description of Artificial Sequence: Synthetic oligonucleotide
  Sense strand starting at position 374 of SEQ ID NO: 1882949
auuauuaucugggcaccaa

SEQ ID NO: 2159483 - RNA, 19 nt, Artificial Sequence
  Description of Artificial Sequence: Synthetic oligonucleotide
  Antisense strand to SEQ ID NO: 2159482
uuggugcccagauaauaau

SEQ ID NO: 2159484 - RNA, 19 nt, Artificial Sequence
  Description of Artificial Sequence: Synthetic oligonucleotide
  Sense strand starting at position 375 of SEQ ID NO: 1882949
uuauuaucugggcaccaaa

SEQ ID NO: 2159485 - RNA, 19 nt, Artificial Sequence
  Description of Artificial Sequence: Synthetic oligonucleotide
  Antisense strand to SEQ ID NO: 2159484
uuuggugcccagauaauaa

SEQ ID NO: 2159486 - RNA, 19 nt, Artificial Sequence
  Description of Artificial Sequence: Synthetic oligonucleotide
  Sense strand starting at position 378 of SEQ ID NO: 1882949
uuaucugggcaccaaauau

SEQ ID NO: 2159487 - RNA, 19 nt, Artificial Sequence
  Description of Artificial Sequence: Synthetic oligonucleotide
  Antisense strand to SEQ ID NO: 2159486
auauuuggugcccagauaa

SEQ ID NO: 2159488 - RNA, 19 nt, Artificial Sequence
  Description of Artificial Sequence: Synthetic oligonucleotide
  Sense strand starting at position 669 of SEQ ID NO: 1882949
ccauuaagugguuagacug

SEQ ID NO: 2159489 - RNA, 19 nt, Artificial Sequence
  Description of Artificial Sequence: Synthetic oligonucleotide
  Antisense strand to SEQ ID NO: 2159488
cagucuaaccacuuaaugg

SEQ ID NO: 2159490 - RNA, 19 nt, Artificial Sequence
  Description of Artificial Sequence: Synthetic oligonucleotide
  Sense strand starting at position 1154 of SEQ ID NO: 1882949
ugcugauaugguuaacaac

SEQ ID NO: 2159491 - RNA, 19 nt, Artificial Sequence
  Description of Artificial Sequence: Synthetic oligonucleotide
  Antisense strand to SEQ ID NO: 2159490
guuguuaaccauaucagca

SEQ ID NO: 2159492 - RNA, 19 nt, Artificial Sequence
  Description of Artificial Sequence: Synthetic oligonucleotide
  Sense strand starting at position 1389 of SEQ ID NO: 1882949
agagucgcucaagaaacuu

SEQ ID NO: 2159493 - RNA, 19 nt, Artificial Sequence
  Description of Artificial Sequence: Synthetic oligonucleotide
  Antisense strand to SEQ ID NO: 2159492
aaguuucuugagcgacucu

SEQ ID NO: 2159494 - RNA, 19 nt, Artificial Sequence
  Description of Artificial Sequence: Synthetic oligonucleotide
  Sense strand starting at position 1530 of SEQ ID NO: 1882949
aguggugauagguaucuuu

SEQ ID NO: 2159495 - RNA, 19 nt, Artificial Sequence
  Description of Artificial Sequence: Synthetic oligonucleotide
  Antisense strand to SEQ ID NO: 2159494
aaagauaccuaucaccacu

SEQ ID NO: 2159496 - RNA, 19 nt, Artificial Sequence
  Description of Artificial Sequence: Synthetic oligonucleotide
  Sense strand starting at position 1592 of SEQ ID NO: 1882949
acuaaagucauauguggua

SEQ ID NO: 2159497 - RNA, 19 nt, Artificial Sequence
  Description of Artificial Sequence: Synthetic oligonucleotide
  Antisense strand to SEQ ID NO: 2159496
uaccacauaugacuuuagu

SEQ ID NO: 2159498 - RNA, 19 nt, Artificial Sequence
  Description of Artificial Sequence: Synthetic oligonucleotide
  Sense strand starting at position 1656 of SEQ ID NO: 1882949
uguacuuagggauggaacu

SEQ ID NO: 2159499 - RNA, 19 nt, Artificial Sequence
  Description of Artificial Sequence: Synthetic oligonucleotide
  Antisense strand to SEQ ID NO: 2159498
aguuccaucccuaaguaca

SEQ ID NO: 2159500 - RNA, 19 nt, Artificial Sequence
  Description of Artificial Sequence: Synthetic oligonucleotide
  Sense strand starting at position 1667 of SEQ ID NO: 1882949
auggaacuagccugaguua

SEQ ID NO: 2159501 - RNA, 19 nt, Artificial Sequence
  Description of Artificial Sequence: Synthetic oligonucleotide
  Antisense strand to SEQ ID NO: 2159500
uaacucaggcuaguuccau

SEQ ID NO: 2159502 - RNA, 19 nt, Artificial Sequence
  Description of Artificial Sequence: Synthetic oligonucleotide
  Sense strand starting at position 1668 of SEQ ID NO: 1882949
uggaacuagccugaguuaa

SEQ ID NO: 2159503 - RNA, 19 nt, Artificial Sequence
  Description of Artificial Sequence: Synthetic oligonucleotide
  Antisense strand to SEQ ID NO: 2159502
uuaacucaggcuaguucca

SEQ ID NO: 2159504 - RNA, 19 nt, Artificial Sequence
  Description of Artificial Sequence: Synthetic oligonucleotide
  Sense strand starting at position 1718 of SEQ ID NO: 1882949
cuucuagugccagaaguca

SEQ ID NO: 2159505 - RNA, 19 nt, Artificial Sequence
  Description of Artificial Sequence: Synthetic oligonucleotide
  Antisense strand to SEQ ID NO: 2159504
ugacuucuggcacuagaag

SEQ ID NO: 2159506 - RNA, 19 nt, Artificial Sequence
  Description of Artificial Sequence: Synthetic oligonucleotide
  Sense strand starting at position 1729 of SEQ ID NO: 1882949
agaagucaaaguugugauu

SEQ ID NO: 2159507 - RNA, 19 nt, Artificial Sequence
  Description of Artificial Sequence: Synthetic oligonucleotide
  Antisense strand to SEQ ID NO: 2159506
aaucacaacuuugacuucu

SEQ ID NO: 2159508 - RNA, 19 nt, Artificial Sequence
  Description of Artificial Sequence: Synthetic oligonucleotide
  Sense strand starting at position 1980 of SEQ ID NO: 1882949
uggucuaccucauugauaa

SEQ ID NO: 2159509 - RNA, 19 nt, Artificial Sequence
  Description of Artificial Sequence: Synthetic oligonucleotide
  Antisense strand to SEQ ID NO: 2159508
uuaucaaugagguagacca

SEQ ID NO: 2159510 - RNA, 19 nt, Artificial Sequence
  Description of Artificial Sequence: Synthetic oligonucleotide
  Sense strand starting at position 1981 of SEQ ID NO: 1882949
ggucuaccucauugauaag

SEQ ID NO: 2159511 - RNA, 19 nt, Artificial Sequence
  Description of Artificial Sequence: Synthetic oligonucleotide
  Antisense strand to SEQ ID NO: 2159510
cuuaucaaugagguagacc

SEQ ID NO: 2159512 - RNA, 19 nt, Artificial Sequence
  Description of Artificial Sequence: Synthetic oligonucleotide
  Sense strand starting at position 2111 of SEQ ID NO: 1882949
ggcagauauuuagcguaag

SEQ ID NO: 2159513 - RNA, 19 nt, Artificial Sequence
  Description of Artificial Sequence: Synthetic oligonucleotide
  Antisense strand to SEQ ID NO: 2159512
cuuacgcuaaauaucugcc

SEQ ID NO: 2159514 - RNA, 19 nt, Artificial Sequence
  Description of Artificial Sequence: Synthetic oligonucleotide
  Sense strand starting at position 2125 of SEQ ID NO: 1882949
guaagauauuaaccaucug

SEQ ID NO: 2159515 - RNA, 19 nt, Artificial Sequence
  Description of Artificial Sequence: Synthetic oligonucleotide
  Antisense strand to SEQ ID NO: 2159514
cagaugguuaauaucuuac

SEQ ID NO: 2159516 - RNA, 19 nt, Artificial Sequence
  Description of Artificial Sequence: Synthetic oligonucleotide
  Sense strand starting at position 2277 of SEQ ID NO: 1882949
gguguuuagaggcauauag

SEQ ID NO: 2159517 - RNA, 19 nt, Artificial Sequence
  Description of Artificial Sequence: Synthetic oligonucleotide
  Antisense strand to SEQ ID NO: 2159516
cuauaugccucuaaacacc

SEQ ID NO: 2159518 - RNA, 19 nt, Artificial Sequence
  Description of Artificial Sequence: Synthetic oligonucleotide
  Sense strand starting at position 2279 of SEQ ID NO: 1882949
uguuuagaggcauauagca

SEQ ID NO: 2159519 - RNA, 19 nt, Artificial Sequence
  Description of Artificial Sequence: Synthetic oligonucleotide
  Antisense strand to SEQ ID NO: 2159518
ugcuauaugccucuaaaca

SEQ ID NO: 2159520 - RNA, 19 nt, Artificial Sequence
  Description of Artificial Sequence: Synthetic oligonucleotide
  Sense strand starting at position 2488 of SEQ ID NO: 1882949
aguuuccuuagacggauau

SEQ ID NO: 2159521 - RNA, 19 nt, Artificial Sequence
  Description of Artificial Sequence: Synthetic oligonucleotide
  Antisense strand to SEQ ID NO: 2159520
auauccgucuaaggaaacu

SEQ ID NO: 2159522 - RNA, 19 nt, Artificial Sequence
  Description of Artificial Sequence: Synthetic oligonucleotide
  Sense strand starting at position 2492 of SEQ ID NO: 1882949
uccuuagacggauauuauc

SEQ ID NO: 2159523 - RNA, 19 nt, Artificial Sequence
  Description of Artificial Sequence: Synthetic oligonucleotide
  Antisense strand to SEQ ID NO: 2159522
gauaauauccgucuaagga

SEQ ID NO: 2159524 - RNA, 19 nt, Artificial Sequence
  Description of Artificial Sequence: Synthetic oligonucleotide
  Sense strand starting at position 2568 of SEQ ID NO: 1882949
gcagauguacuacaaaugu

SEQ ID NO: 2159525 - RNA, 19 nt, Artificial Sequence
  Description of Artificial Sequence: Synthetic oligonucleotide
  Antisense strand to SEQ ID NO: 2159524
acauuuguaguacaucugc

SEQ ID NO: 2159526 - RNA, 19 nt, Artificial Sequence
  Description of Artificial Sequence: Synthetic oligonucleotide
  Sense strand starting at position 2746 of SEQ ID NO: 1882949
cuugcaacuguuggaagaa

SEQ ID NO: 2159527 - RNA, 19 nt, Artificial Sequence
  Description of Artificial Sequence: Synthetic oligonucleotide
  Antisense strand to SEQ ID NO: 2159526
uucuuccaacaguugcaag

SEQ ID NO: 2159528 - RNA, 19 nt, Artificial Sequence
  Description of Artificial Sequence: Synthetic oligonucleotide
  Sense strand starting at position 2761 of SEQ ID NO: 1882949
agaaaucagucauuagcag

SEQ ID NO: 2159529 - RNA, 19 nt, Artificial Sequence
  Description of Artificial Sequence: Synthetic oligonucleotide
  Antisense strand to SEQ ID NO: 2159528
cugcuaaugacugauuucu

SEQ ID NO: 2159530 - RNA, 19 nt, Artificial Sequence
  Description of Artificial Sequence: Synthetic oligonucleotide
  Sense strand starting at position 2768 of SEQ ID NO: 1882949
agucauuagcagcaagauu

SEQ ID NO: 2159531 - RNA, 19 nt, Artificial Sequence
  Description of Artificial Sequence: Synthetic oligonucleotide
  Antisense strand to SEQ ID NO: 2159530
aaucuugcugcuaaugacu

SEQ ID NO: 2159532 - RNA, 19 nt, Artificial Sequence
  Description of Artificial Sequence: Synthetic oligonucleotide
  Sense strand starting at position 2906 of SEQ ID NO: 1882949
uuccuaggacucuaaguuu

SEQ ID NO: 2159533 - RNA, 19 nt, Artificial Sequence
  Description of Artificial Sequence: Synthetic oligonucleotide
  Antisense strand to SEQ ID NO: 2159532
aaacuuagaguccuaggaa

SEQ ID NO: 2159534 - RNA, 19 nt, Artificial Sequence
  Description of Artificial Sequence: Synthetic oligonucleotide
  Sense strand starting at position 3109 of SEQ ID NO: 1882949
gcuucuaaggaacaguuaa

SEQ ID NO: 2159535 - RNA, 19 nt, Artificial Sequence
  Description of Artificial Sequence: Synthetic oligonucleotide
  Antisense strand to SEQ ID NO: 2159534
uuaacuguuccuuagaagc

SEQ ID NO: 2159536 - RNA, 19 nt, Artificial Sequence
  Description of Artificial Sequence: Synthetic oligonucleotide
  Sense strand starting at position 3134 of SEQ ID NO: 1882949
ggcaguaguuaacuaagga

SEQ ID NO: 2159537 - RNA, 19 nt, Artificial Sequence
  Description of Artificial Sequence: Synthetic oligonucleotide
  Antisense strand to SEQ ID NO: 2159536
uccuuaguuaacuacugcc

SEQ ID NO: 2159538 - RNA, 19 nt, Artificial Sequence
  Description of Artificial Sequence: Synthetic oligonucleotide
  Sense strand starting at position 3135 of SEQ ID NO: 1882949
gcaguaguuaacuaaggag

SEQ ID NO: 2159539 - RNA, 19 nt, Artificial Sequence
  Description of Artificial Sequence: Synthetic oligonucleotide
  Antisense strand to SEQ ID NO: 2159538
cuccuuaguuaacuacugc

SEQ ID NO: 2159540 - RNA, 19 nt, Artificial Sequence
  Description of Artificial Sequence: Synthetic oligonucleotide
  Sense strand starting at position 3379 of SEQ ID NO: 1882949
cgugcaaauccguauuuag

SEQ ID NO: 2159541 - RNA, 19 nt, Artificial Sequence
  Description of Artificial Sequence: Synthetic oligonucleotide
  Antisense strand to SEQ ID NO: 2159540
cuaaauacggauuugcacg

SEQ ID NO: 2159542 - RNA, 19 nt, Artificial Sequence
  Description of Artificial Sequence: Synthetic oligonucleotide
  Sense strand starting at position 3382 of SEQ ID NO: 1882949
gcaaauccguauuuagcuu

SEQ ID NO: 2159543 - RNA, 19 nt, Artificial Sequence
  Description of Artificial Sequence: Synthetic oligonucleotide
  Antisense strand to SEQ ID NO: 2159542
aagcuaaauacggauuugc

SEQ ID NO: 2159544 - RNA, 19 nt, Artificial Sequence
  Description of Artificial Sequence: Synthetic oligonucleotide
  Sense strand starting at position 3443 of SEQ ID NO: 1882949
ucuggacagucucuaggau

SEQ ID NO: 2159545 - RNA, 19 nt, Artificial Sequence
  Description of Artificial Sequence: Synthetic oligonucleotide
  Antisense strand to SEQ ID NO: 2159544
auccuagagacuguccaga

SEQ ID NO: 2159546 - RNA, 19 nt, Artificial Sequence
  Description of Artificial Sequence: Synthetic oligonucleotide
  Sense strand starting at position 3568 of SEQ ID NO: 1882949
uugggauguaagcauguau

SEQ ID NO: 2159547 - RNA, 19 nt, Artificial Sequence
  Description of Artificial Sequence: Synthetic oligonucleotide
  Antisense strand to SEQ ID NO: 2159546
auacaugcuuacaucccaa

SEQ ID NO: 2159548 - RNA, 19 nt, Artificial Sequence
  Description of Artificial Sequence: Synthetic oligonucleotide
  Sense strand starting at position 493 of SEQ ID NO: 1882950
guugguuaacguuauaaag

SEQ ID NO: 2159549 - RNA, 19 nt, Artificial Sequence
  Description of Artificial Sequence: Synthetic oligonucleotide
  Antisense strand to SEQ ID NO: 2159548
cuuuauaacguuaaccaac

SEQ ID NO: 2159550 - RNA, 19 nt, Artificial Sequence
  Description of Artificial Sequence: Synthetic oligonucleotide
  Sense strand starting at position 523 of SEQ ID NO: 1882950
uuguuuaauguguaaacca

SEQ ID NO: 2159551 - RNA, 19 nt, Artificial Sequence
  Description of Artificial Sequence: Synthetic oligonucleotide
  Antisense strand to SEQ ID NO: 2159550
ugguuuacacauuaaacaa

SEQ ID NO: 2159552 - RNA, 19 nt, Artificial Sequence
  Description of Artificial Sequence: Synthetic oligonucleotide
  Sense strand starting at position 531 of SEQ ID NO: 1882950
uguguaaaccaaugauaau

SEQ ID NO: 2159553 - RNA, 19 nt, Artificial Sequence
  Description of Artificial Sequence: Synthetic oligonucleotide
  Antisense strand to SEQ ID NO: 2159552
auuaucauugguuuacaca

SEQ ID NO: 2159554 - RNA, 19 nt, Artificial Sequence
  Description of Artificial Sequence: Synthetic oligonucleotide
  Sense strand starting at position 810 of SEQ ID NO: 1882950
uuuccaguauucucuggau

SEQ ID NO: 2159555 - RNA, 19 nt, Artificial Sequence
  Description of Artificial Sequence: Synthetic oligonucleotide
  Antisense strand to SEQ ID NO: 2159554
auccagagaauacuggaaa

SEQ ID NO: 2159556 - RNA, 19 nt, Artificial Sequence
  Description of Artificial Sequence: Synthetic oligonucleotide
  Sense strand starting at position 812 of SEQ ID NO: 1882950
uccaguauucucuggauug

SEQ ID NO: 2159557 - RNA, 19 nt, Artificial Sequence
  Description of Artificial Sequence: Synthetic oligonucleotide
  Antisense strand to SEQ ID NO: 2159556
caauccagagaauacugga

SEQ ID NO: 2159558 - RNA, 19 nt, Artificial Sequence
  Description of Artificial Sequence: Synthetic oligonucleotide
  Sense strand starting at position 814 of SEQ ID NO: 1882950
caguauucucuggauugug

SEQ ID NO: 2159559 - RNA, 19 nt, Artificial Sequence
  Description of Artificial Sequence: Synthetic oligonucleotide
  Antisense strand to SEQ ID NO: 2159558
cacaauccagagaauacug

SEQ ID NO: 2159560 - RNA, 19 nt, Artificial Sequence
  Description of Artificial Sequence: Synthetic oligonucleotide
  Sense strand starting at position 892 of SEQ ID NO: 1882950
cacccuaauguggauugua

SEQ ID NO: 2159561 - RNA, 19 nt, Artificial Sequence
  Description of Artificial Sequence: Synthetic oligonucleotide
  Antisense strand to SEQ ID NO: 2159560
uacaauccacauuagggug

SEQ ID NO: 2159562 - RNA, 19 nt, Artificial Sequence
  Description of Artificial Sequence: Synthetic oligonucleotide
  Sense strand starting at position 895 of SEQ ID NO: 1882950
ccuaauguggauuguaaag

SEQ ID NO: 2159563 - RNA, 19 nt, Artificial Sequence
  Description of Artificial Sequence: Synthetic oligonucleotide
  Antisense strand to SEQ ID NO: 2159562
cuuuacaauccacauuagg

SEQ ID NO: 2159564 - RNA, 19 nt, Artificial Sequence
  Description of Artificial Sequence: Synthetic oligonucleotide
  Sense strand starting at position 1171 of SEQ ID NO: 1882950
uguagcucuggagaaggua

SEQ ID NO: 2159565 - RNA, 19 nt, Artificial Sequence
  Description of Artificial Sequence: Synthetic oligonucleotide
  Antisense strand to SEQ ID NO: 2159564
uaccuucuccagagcuaca

SEQ ID NO: 2159566 - RNA, 19 nt, Artificial Sequence
  Description of Artificial Sequence: Synthetic oligonucleotide
  Sense strand starting at position 1183 of SEQ ID NO: 1882950
gaagguauuuaauaguaac

SEQ ID NO: 2159567 - RNA, 19 nt, Artificial Sequence
  Description of Artificial Sequence: Synthetic oligonucleotide
  Antisense strand to SEQ ID NO: 2159566
guuacuauuaaauaccuuc

SEQ ID NO: 2159568 - RNA, 19 nt, Artificial Sequence
  Description of Artificial Sequence: Synthetic oligonucleotide
  Sense strand starting at position 1246 of SEQ ID NO: 1882950
aucauauaguuuguccaua

SEQ ID NO: 2159569 - RNA, 19 nt, Artificial Sequence
  Description of Artificial Sequence: Synthetic oligonucleotide
  Antisense strand to SEQ ID NO: 2159568
uauggacaaacuauaugau

SEQ ID NO: 2159570 - RNA, 19 nt, Artificial Sequence
  Description of Artificial Sequence: Synthetic oligonucleotide
  Sense strand starting at position 1251 of SEQ ID NO: 1882950
auaguuuguccauacaaua

SEQ ID NO: 2159571 - RNA, 19 nt, Artificial Sequence
  Description of Artificial Sequence: Synthetic oligonucleotide
  Antisense strand to SEQ ID NO: 2159570
uauuguauggacaaacuau

SEQ ID NO: 2159572 - RNA, 19 nt, Artificial Sequence
  Description of Artificial Sequence: Synthetic oligonucleotide
  Sense strand starting at position 1428 of SEQ ID NO: 1882950
aucugagugcaagauuauu

SEQ ID NO: 2159573 - RNA, 19 nt, Artificial Sequence
  Description of Artificial Sequence: Synthetic oligonucleotide
  Antisense strand to SEQ ID NO: 2159572
aauaaucuugcacucagau

SEQ ID NO: 2159574 - RNA, 19 nt, Artificial Sequence
  Description of Artificial Sequence: Synthetic oligonucleotide
  Sense strand starting at position 1848 of SEQ ID NO: 1882950
auuguagauuuguugcuca

SEQ ID NO: 2159575 - RNA, 19 nt, Artificial Sequence
  Description of Artificial Sequence: Synthetic oligonucleotide
  Antisense strand to SEQ ID NO: 2159574
ugagcaacaaaucuacaau

SEQ ID NO: 2159576 - RNA, 19 nt, Artificial Sequence
  Description of Artificial Sequence: Synthetic oligonucleotide
  Sense strand starting at position 1851 of SEQ ID NO: 1882950
guagauuuguugcucaguu

SEQ ID NO: 2159577 - RNA, 19 nt, Artificial Sequence
  Description of Artificial Sequence: Synthetic oligonucleotide
  Antisense strand to SEQ ID NO: 2159576
aacugagcaacaaaucuac

SEQ ID NO: 2159578 - RNA, 19 nt, Artificial Sequence
  Description of Artificial Sequence: Synthetic oligonucleotide
  Sense strand starting at position 1852 of SEQ ID NO: 1882950
uagauuuguugcucaguuu

SEQ ID NO: 2159579 - RNA, 19 nt, Artificial Sequence
  Description of Artificial Sequence: Synthetic oligonucleotide
  Antisense strand to SEQ ID NO: 2159578
aaacugagcaacaaaucua

SEQ ID NO: 2159580 - RNA, 19 nt, Artificial Sequence
  Description of Artificial Sequence: Synthetic oligonucleotide
  Sense strand starting at position 1883 of SEQ ID NO: 1882950
ggaaucacgucuuuaacug

SEQ ID NO: 2159581 - RNA, 19 nt, Artificial Sequence
  Description of Artificial Sequence: Synthetic oligonucleotide
  Antisense strand to SEQ ID NO: 2159580
caguuaaagacgugauucc

SEQ ID NO: 2159582 - RNA, 19 nt, Artificial Sequence
  Description of Artificial Sequence: Synthetic oligonucleotide
  Sense strand starting at position 1980 of SEQ ID NO: 1882950
acacaaugucauggcauaa

SEQ ID NO: 2159583 - RNA, 19 nt, Artificial Sequence
  Description of Artificial Sequence: Synthetic oligonucleotide
  Antisense strand to SEQ ID NO: 2159582
uuaugccaugacauugugu

SEQ ID NO: 2159584 - RNA, 19 nt, Artificial Sequence
  Description of Artificial Sequence: Synthetic oligonucleotide
  Sense strand starting at position 2050 of SEQ ID NO: 1882950
gcaagagagcuuuaaaguu

SEQ ID NO: 2159585 - RNA, 19 nt, Artificial Sequence
  Description of Artificial Sequence: Synthetic oligonucleotide
  Antisense strand to SEQ ID NO: 2159584
aacuuuaaagcucucuugc

SEQ ID NO: 2159586 - RNA, 19 nt, Artificial Sequence
  Description of Artificial Sequence: Synthetic oligonucleotide
  Sense strand starting at position 2164 of SEQ ID NO: 1882950
uuaggagaauuugaaaguu

SEQ ID NO: 2159587 - RNA, 19 nt, Artificial Sequence
  Description of Artificial Sequence: Synthetic oligonucleotide
  Antisense strand to SEQ ID NO: 2159586
aacuuucaaauucuccuaa

SEQ ID NO: 2159588 - RNA, 19 nt, Artificial Sequence
  Description of Artificial Sequence: Synthetic oligonucleotide
  Sense strand starting at position 2177 of SEQ ID NO: 1882950
aaaguuacagcuuagaguu

SEQ ID NO: 2159589 - RNA, 19 nt, Artificial Sequence
  Description of Artificial Sequence: Synthetic oligonucleotide
  Antisense strand to SEQ ID NO: 2159588
aacucuaagcuguaacuuu

SEQ ID NO: 2159590 - RNA, 19 nt, Artificial Sequence
  Description of Artificial Sequence: Synthetic oligonucleotide
  Sense strand starting at position 2184 of SEQ ID NO: 1882950
cagcuuagaguuggaggaa

SEQ ID NO: 2159591 - RNA, 19 nt, Artificial Sequence
  Description of Artificial Sequence: Synthetic oligonucleotide
  Antisense strand to SEQ ID NO: 2159590
uuccuccaacucuaagcug

SEQ ID NO: 2159592 - RNA, 19 nt, Artificial Sequence
  Description of Artificial Sequence: Synthetic oligonucleotide
  Sense strand starting at position 2477 of SEQ ID NO: 1882950
ggcagauccagucaauagu

SEQ ID NO: 2159593 - RNA, 19 nt, Artificial Sequence
  Description of Artificial Sequence: Synthetic oligonucleotide
  Antisense strand to SEQ ID NO: 2159592
acuauugacuggaucugcc

SEQ ID NO: 2159594 - RNA, 19 nt, Artificial Sequence
  Description of Artificial Sequence: Synthetic oligonucleotide
  Sense strand starting at position 2531 of SEQ ID NO: 1882950
uguugaaagcugugagaga

SEQ ID NO: 2159595 - RNA, 19 nt, Artificial Sequence
  Description of Artificial Sequence: Synthetic oligonucleotide
  Antisense strand to SEQ ID NO: 2159594
ucucucacagcuuucaaca

SEQ ID NO: 2159596 - RNA, 19 nt, Artificial Sequence
  Description of Artificial Sequence: Synthetic oligonucleotide
  Sense strand starting at position 2636 of SEQ ID NO: 1882950
aucugaauguuaucugaau

SEQ ID NO: 2159597 - RNA, 19 nt, Artificial Sequence
  Description of Artificial Sequence: Synthetic oligonucleotide
  Antisense strand to SEQ ID NO: 2159596
auucagauaacauucagau

SEQ ID NO: 2159598 - RNA, 19 nt, Artificial Sequence
  Description of Artificial Sequence: Synthetic oligonucleotide
  Sense strand starting at position 2637 of SEQ ID NO: 1882950
ucugaauguuaucugaauu

SEQ ID NO: 2159599 - RNA, 19 nt, Artificial Sequence
  Description of Artificial Sequence: Synthetic oligonucleotide
  Antisense strand to SEQ ID NO: 2159598
aauucagauaacauucaga

SEQ ID NO: 2159600 - RNA, 19 nt, Artificial Sequence
  Description of Artificial Sequence: Synthetic oligonucleotide
  Sense strand starting at position 2753 of SEQ ID NO: 1882950
ucauuugcugugugccaga

SEQ ID NO: 2159601 - RNA, 19 nt, Artificial Sequence
  Description of Artificial Sequence: Synthetic oligonucleotide
  Antisense strand to SEQ ID NO: 2159600
ucuggcacacagcaaauga

SEQ ID NO: 2159602 - RNA, 19 nt, Artificial Sequence
  Description of Artificial Sequence: Synthetic oligonucleotide
  Sense strand starting at position 2770 of SEQ ID NO: 1882950
gacacuguucuagguacaa

SEQ ID NO: 2159603 - RNA, 19 nt, Artificial Sequence
  Description of Artificial Sequence: Synthetic oligonucleotide
  Antisense strand to SEQ ID NO: 2159602
uuguaccuagaacaguguc

SEQ ID NO: 2159604 - RNA, 19 nt, Artificial Sequence
  Description of Artificial Sequence: Synthetic oligonucleotide
  Sense strand starting at position 2879 of SEQ ID NO: 1882950
ugcuaagggcucuaaugau

SEQ ID NO: 2159605 - RNA, 19 nt, Artificial Sequence
  Description of Artificial Sequence: Synthetic oligonucleotide
  Antisense strand to SEQ ID NO: 2159604
aucauuagagcccuuagca

SEQ ID NO: 2159606 - RNA, 19 nt, Artificial Sequence
  Description of Artificial Sequence: Synthetic oligonucleotide
  Sense strand starting at position 2939 of SEQ ID NO: 1882950
aaucuaggguugccaagaa

SEQ ID NO: 2159607 - RNA, 19 nt, Artificial Sequence
  Description of Artificial Sequence: Synthetic oligonucleotide
  Antisense strand to SEQ ID NO: 2159606
uucuuggcaacccuagauu

SEQ ID NO: 2159608 - RNA, 19 nt, Artificial Sequence
  Description of Artificial Sequence: Synthetic oligonucleotide
  Sense strand starting at position 3523 of SEQ ID NO: 1882950
gccucuagauaacucauga

SEQ ID NO: 2159609 - RNA, 19 nt, Artificial Sequence
  Description of Artificial Sequence: Synthetic oligonucleotide
  Antisense strand to SEQ ID NO: 2159608
ucaugaguuaucuagaggc

SEQ ID NO: 2159610 - RNA, 19 nt, Artificial Sequence
  Description of Artificial Sequence: Synthetic oligonucleotide
  Sense strand starting at position 3538 of SEQ ID NO: 1882950
augaauacgcugcaucaau

SEQ ID NO: 2159611 - RNA, 19 nt, Artificial Sequence
  Description of Artificial Sequence: Synthetic oligonucleotide
  Antisense strand to SEQ ID NO: 2159610
auugaugcagcguauucau

SEQ ID NO: 2159612 - RNA, 19 nt, Artificial Sequence
  Description of Artificial Sequence: Synthetic oligonucleotide
  Sense strand starting at position 3651 of SEQ ID NO: 1882950
acuuguacuuucuugaaag

SEQ ID NO: 2159613 - RNA, 19 nt, Artificial Sequence
  Description of Artificial Sequence: Synthetic oligonucleotide
  Antisense strand to SEQ ID NO: 2159612
cuuucaagaaaguacaagu

SEQ ID NO: 2159614 - RNA, 19 nt, Artificial Sequence
  Description of Artificial Sequence: Synthetic oligonucleotide
  Sense strand starting at position 3653 of SEQ ID NO: 1882950
uuguacuuucuugaaagca

SEQ ID NO: 2159615 - RNA, 19 nt, Artificial Sequence
  Description of Artificial Sequence: Synthetic oligonucleotide
  Antisense strand to SEQ ID NO: 2159614
ugcuuucaagaaaguacaa

SEQ ID NO: 2159616 - RNA, 19 nt, Artificial Sequence
  Description of Artificial Sequence: Synthetic oligonucleotide
  Sense strand starting at position 3669 of SEQ ID NO: 1882950
gcaucugacuagccauaaa

SEQ ID NO: 2159617 - RNA, 19 nt, Artificial Sequence
  Description of Artificial Sequence: Synthetic oligonucleotide
  Antisense strand to SEQ ID NO: 2159616
uuuauggcuagucagaugc

SEQ ID NO: 2159618 - RNA, 19 nt, Artificial Sequence
  Description of Artificial Sequence: Synthetic oligonucleotide
  Sense strand starting at position 3703 of SEQ ID NO: 1882950
ucuucugguguguacauaa

SEQ ID NO: 2159619 - RNA, 19 nt, Artificial Sequence
  Description of Artificial Sequence: Synthetic oligonucleotide
  Antisense strand to SEQ ID NO: 2159618
uuauguacacaccagaaga

SEQ ID NO: 2159620 - RNA, 19 nt, Artificial Sequence
  Description of Artificial Sequence: Synthetic oligonucleotide
  Sense strand starting at position 3791 of SEQ ID NO: 1882950
agccaaugauaagugguua

SEQ ID NO: 2159621 - RNA, 19 nt, Artificial Sequence
  Description of Artificial Sequence: Synthetic oligonucleotide
  Antisense strand to SEQ ID NO: 2159620
uaaccacuuaucauuggcu

SEQ ID NO: 2159622 - RNA, 19 nt, Artificial Sequence
  Description of Artificial Sequence: Synthetic oligonucleotide
  Sense strand starting at position 3803 of SEQ ID NO: 1882950
gugguuauauauucugaca

SEQ ID NO: 2159623 - RNA, 19 nt, Artificial Sequence
  Description of Artificial Sequence: Synthetic oligonucleotide
  Antisense strand to SEQ ID NO: 2159622
ugucagaauauauaaccac

SEQ ID NO: 2159624 - RNA, 19 nt, Artificial Sequence
  Description of Artificial Sequence: Synthetic oligonucleotide
  Sense strand starting at position 3832 of SEQ ID NO: 1882950
caugaaagucacugguaga

SEQ ID NO: 2159625 - RNA, 19 nt, Artificial Sequence
  Description of Artificial Sequence: Synthetic oligonucleotide
  Antisense strand to SEQ ID NO: 2159624
ucuaccagugacuuucaug

SEQ ID NO: 2159626 - RNA, 19 nt, Artificial Sequence
  Description of Artificial Sequence: Synthetic oligonucleotide
  Sense strand starting at position 3833 of SEQ ID NO: 1882950
augaaagucacugguagac

SEQ ID NO: 2159627 - RNA, 19 nt, Artificial Sequence
  Description of Artificial Sequence: Synthetic oligonucleotide
  Antisense strand to SEQ ID NO: 2159626
gucuaccagugacuuucau

SEQ ID NO: 2159628 - RNA, 19 nt, Artificial Sequence
  Description of Artificial Sequence: Synthetic oligonucleotide
  Sense strand starting at position 93 of SEQ ID NO: 1882951
guggaucuguggucuaagu

SEQ ID NO: 2159629 - RNA, 19 nt, Artificial Sequence
  Description of Artificial Sequence: Synthetic oligonucleotide
  Antisense strand to SEQ ID NO: 2159628
acuuagaccacagauccac

SEQ ID NO: 2159630 - RNA, 19 nt, Artificial Sequence
  Description of Artificial Sequence: Synthetic oligonucleotide
  Sense strand starting at position 95 of SEQ ID NO: 1882951
ggaucuguggucuaagugu

SEQ ID NO: 2159631 - RNA, 19 nt, Artificial Sequence
  Description of Artificial Sequence: Synthetic oligonucleotide
  Antisense strand to SEQ ID NO: 2159630
acacuuagaccacagaucc

SEQ ID NO: 2159632 - RNA, 19 nt, Artificial Sequence
  Description of Artificial Sequence: Synthetic oligonucleotide
  Sense strand starting at position 163 of SEQ ID NO: 1882951
gcaacauaugucuguuguu

SEQ ID NO: 2159633 - RNA, 19 nt, Artificial Sequence
  Description of Artificial Sequence: Synthetic oligonucleotide
  Antisense strand to SEQ ID NO: 2159632
aacaacagacauauguugc

SEQ ID NO: 2159634 - RNA, 19 nt, Artificial Sequence
  Description of Artificial Sequence: Synthetic oligonucleotide
  Sense strand starting at position 166 of SEQ ID NO: 1882951
acauaugucuguuguuaca

SEQ ID NO: 2159635 - RNA, 19 nt, Artificial Sequence
  Description of Artificial Sequence: Synthetic oligonucleotide
  Antisense strand to SEQ ID NO: 2159634
uguaacaacagacauaugu

SEQ ID NO: 2159636 - RNA, 19 nt, Artificial Sequence
  Description of Artificial Sequence: Synthetic oligonucleotide
  Sense strand starting at position 168 of SEQ ID NO: 1882951
auaugucuguuguuacacu

SEQ ID NO: 2159637 - RNA, 19 nt, Artificial Sequence
  Description of Artificial Sequence: Synthetic oligonucleotide
  Antisense strand to SEQ ID NO: 2159636
aguguaacaacagacauau

SEQ ID NO: 2159638 - RNA, 19 nt, Artificial Sequence
  Description of Artificial Sequence: Synthetic oligonucleotide
  Sense strand starting at position 252 of SEQ ID NO: 1882951
gcucacuucuuucuguuua

SEQ ID NO: 2159639 - RNA, 19 nt, Artificial Sequence
  Description of Artificial Sequence: Synthetic oligonucleotide
  Antisense strand to SEQ ID NO: 2159638
uaaacagaaagaagugagc

SEQ ID NO: 2159640 - RNA, 19 nt, Artificial Sequence
  Description of Artificial Sequence: Synthetic oligonucleotide
  Sense strand starting at position 263 of SEQ ID NO: 1882951
ucuguuuacuugcacaaag

SEQ ID NO: 2159641 - RNA, 19 nt, Artificial Sequence
  Description of Artificial Sequence: Synthetic oligonucleotide
  Antisense strand to SEQ ID NO: 2159640
cuuugugcaaguaaacaga

SEQ ID NO: 2159642 - RNA, 19 nt, Artificial Sequence
  Description of Artificial Sequence: Synthetic oligonucleotide
  Sense strand starting at position 273 of SEQ ID NO: 1882951
ugcacaaagccugguagaa

SEQ ID NO: 2159643 - RNA, 19 nt, Artificial Sequence
  Description of Artificial Sequence: Synthetic oligonucleotide
  Antisense strand to SEQ ID NO: 2159642
uucuaccaggcuuugugca

SEQ ID NO: 2159644 - RNA, 19 nt, Artificial Sequence
  Description of Artificial Sequence: Synthetic oligonucleotide
  Sense strand starting at position 275 of SEQ ID NO: 1882951
cacaaagccugguagaauc

SEQ ID NO: 2159645 - RNA, 19 nt, Artificial Sequence
  Description of Artificial Sequence: Synthetic oligonucleotide
  Antisense strand to SEQ ID NO: 2159644
gauucuaccaggcuuugug

SEQ ID NO: 2159646 - RNA, 19 nt, Artificial Sequence
  Description of Artificial Sequence: Synthetic oligonucleotide
  Sense strand starting at position 301 of SEQ ID NO: 1882951
caugcagggugcuuaauaa

SEQ ID NO: 2159647 - RNA, 19 nt, Artificial Sequence
  Description of Artificial Sequence: Synthetic oligonucleotide
  Antisense strand to SEQ ID NO: 2159646
uuauuaagcacccugcaug

SEQ ID NO: 2159648 - RNA, 19 nt, Artificial Sequence
  Description of Artificial Sequence: Synthetic oligonucleotide
  Sense strand starting at position 453 of SEQ ID NO: 1882951
uggucagcccucuauaauu

SEQ ID NO: 2159649 - RNA, 19 nt, Artificial Sequence
  Description of Artificial Sequence: Synthetic oligonucleotide
  Antisense strand to SEQ ID NO: 2159648
aauuauagagggcugacca

SEQ ID NO: 2159650 - RNA, 19 nt, Artificial Sequence
  Description of Artificial Sequence: Synthetic oligonucleotide
  Sense strand starting at position 479 of SEQ ID NO: 1882951
gacagugcuccuugccaua

SEQ ID NO: 2159651 - RNA, 19 nt, Artificial Sequence
  Description of Artificial Sequence: Synthetic oligonucleotide
  Antisense strand to SEQ ID NO: 2159650
uauggcaaggagcacuguc

SEQ ID NO: 2159652 - RNA, 19 nt, Artificial Sequence
  Description of Artificial Sequence: Synthetic oligonucleotide
  Sense strand starting at position 481 of SEQ ID NO: 1882951
cagugcuccuugccauaga

SEQ ID NO: 2159653 - RNA, 19 nt, Artificial Sequence
  Description of Artificial Sequence: Synthetic oligonucleotide
  Antisense strand to SEQ ID NO: 2159652
ucuauggcaaggagcacug

SEQ ID NO: 2159654 - RNA, 19 nt, Artificial Sequence
  Description of Artificial Sequence: Synthetic oligonucleotide
  Sense strand starting at position 648 of SEQ ID NO: 1882951
acuggucauuugcagcuaa

SEQ ID NO: 2159655 - RNA, 19 nt, Artificial Sequence
  Description of Artificial Sequence: Synthetic oligonucleotide
  Antisense strand to SEQ ID NO: 2159654
uuagcugcaaaugaccagu

SEQ ID NO: 2159656 - RNA, 19 nt, Artificial Sequence
  Description of Artificial Sequence: Synthetic oligonucleotide
  Sense strand starting at position 681 of SEQ ID NO: 1882951
ucagaucccucuugaagac

SEQ ID NO: 2159657 - RNA, 19 nt, Artificial Sequence
  Description of Artificial Sequence: Synthetic oligonucleotide
  Antisense strand to SEQ ID NO: 2159656
gucuucaagagggaucuga

SEQ ID NO: 2159658 - RNA, 19 nt, Artificial Sequence
  Description of Artificial Sequence: Synthetic oligonucleotide
  Sense strand starting at position 776 of SEQ ID NO: 1882951
ggcuguggauccugagguu

SEQ ID NO: 2159659 - RNA, 19 nt, Artificial Sequence
  Description of Artificial Sequence: Synthetic oligonucleotide
  Antisense strand to SEQ ID NO: 2159658
aaccucaggauccacagcc

SEQ ID NO: 2159660 - RNA, 19 nt, Artificial Sequence
  Description of Artificial Sequence: Synthetic oligonucleotide
  Sense strand starting at position 779 of SEQ ID NO: 1882951
uguggauccugagguucau

SEQ ID NO: 2159661 - RNA, 19 nt, Artificial Sequence
  Description of Artificial Sequence: Synthetic oligonucleotide
  Antisense strand to SEQ ID NO: 2159660
augaaccucaggauccaca

SEQ ID NO: 2159662 - RNA, 19 nt, Artificial Sequence
  Description of Artificial Sequence: Synthetic oligonucleotide
  Sense strand starting at position 902 of SEQ ID NO: 1882951
ccagcauucuaaggacaca

SEQ ID NO: 2159663 - RNA, 19 nt, Artificial Sequence
  Description of Artificial Sequence: Synthetic oligonucleotide
  Antisense strand to SEQ ID NO: 2159662
uguguccuuagaaugcugg

SEQ ID NO: 2159664 - RNA, 19 nt, Artificial Sequence
  Description of Artificial Sequence: Synthetic oligonucleotide
  Sense strand starting at position 1163 of SEQ ID NO: 1882951
agacuccuucccugucaca

SEQ ID NO: 2159665 - RNA, 19 nt, Artificial Sequence
  Description of Artificial Sequence: Synthetic oligonucleotide
  Antisense strand to SEQ ID NO: 2159664
ugugacagggaaggagucu

SEQ ID NO: 2159666 - RNA, 19 nt, Artificial Sequence
  Description of Artificial Sequence: Synthetic oligonucleotide
  Sense strand starting at position 1253 of SEQ ID NO: 1882951
uguggcugaccucaagaga

SEQ ID NO: 2159667 - RNA, 19 nt, Artificial Sequence
  Description of Artificial Sequence: Synthetic oligonucleotide
  Antisense strand to SEQ ID NO: 2159666
ucucuugaggucagccaca

SEQ ID NO: 2159668 - RNA, 19 nt, Artificial Sequence
  Description of Artificial Sequence: Synthetic oligonucleotide
  Sense strand starting at position 1377 of SEQ ID NO: 1882951
gugaaaugacacugccaca

SEQ ID NO: 2159669 - RNA, 19 nt, Artificial Sequence
  Description of Artificial Sequence: Synthetic oligonucleotide
  Antisense strand to SEQ ID NO: 2159668
uguggcagugucauuucac

SEQ ID NO: 2159670 - RNA, 19 nt, Artificial Sequence
  Description of Artificial Sequence: Synthetic oligonucleotide
  Sense strand starting at position 1546 of SEQ ID NO: 1882951
accugugccuaccaugauu

SEQ ID NO: 2159671 - RNA, 19 nt, Artificial Sequence
  Description of Artificial Sequence: Synthetic oligonucleotide
  Antisense strand to SEQ ID NO: 2159670
aaucaugguaggcacaggu

SEQ ID NO: 2159672 - RNA, 19 nt, Artificial Sequence
  Description of Artificial Sequence: Synthetic oligonucleotide
  Sense strand starting at position 1560 of SEQ ID NO: 1882951
ugauuuguuuccugggauc

SEQ ID NO: 2159673 - RNA, 19 nt, Artificial Sequence
  Description of Artificial Sequence: Synthetic oligonucleotide
  Antisense strand to SEQ ID NO: 2159672
gaucccaggaaacaaauca

SEQ ID NO: 2159674 - RNA, 19 nt, Artificial Sequence
  Description of Artificial Sequence: Synthetic oligonucleotide
  Sense strand starting at position 1846 of SEQ ID NO: 1882951
gcugccuguuuccauggaa

SEQ ID NO: 2159675 - RNA, 19 nt, Artificial Sequence
  Description of Artificial Sequence: Synthetic oligonucleotide
  Antisense strand to SEQ ID NO: 2159674
uuccauggaaacaggcagc

SEQ ID NO: 2159676 - RNA, 19 nt, Artificial Sequence
  Description of Artificial Sequence: Synthetic oligonucleotide
  Sense strand starting at position 1868 of SEQ ID NO: 1882951
ggcuaucacucagggcuau

SEQ ID NO: 2159677 - RNA, 19 nt, Artificial Sequence
  Description of Artificial Sequence: Synthetic oligonucleotide
  Antisense strand to SEQ ID NO: 2159676
auagcccugagugauagcc

SEQ ID NO: 2159678 - RNA, 19 nt, Artificial Sequence
  Description of Artificial Sequence: Synthetic oligonucleotide
  Sense strand starting at position 1872 of SEQ ID NO: 1882951
aucacucagggcuauguua

SEQ ID NO: 2159679 - RNA, 19 nt, Artificial Sequence
  Description of Artificial Sequence: Synthetic oligonucleotide
  Antisense strand to SEQ ID NO: 2159678
uaacauagcccugagugau

SEQ ID NO: 2159680 - RNA, 19 nt, Artificial Sequence
  Description of Artificial Sequence: Synthetic oligonucleotide
  Sense strand starting at position 2076 of SEQ ID NO: 1882951
ccagauaaaccugguuauc

SEQ ID NO: 2159681 - RNA, 19 nt, Artificial Sequence
  Description of Artificial Sequence: Synthetic oligonucleotide
  Antisense strand to SEQ ID NO: 2159680
gauaaccagguuuaucugg

SEQ ID NO: 2159682 - RNA, 19 nt, Artificial Sequence
  Description of Artificial Sequence: Synthetic oligonucleotide
  Sense strand starting at position 2078 of SEQ ID NO: 1882951
agauaaaccugguuaucuc

SEQ ID NO: 2159683 - RNA, 19 nt, Artificial Sequence
  Description of Artificial Sequence: Synthetic oligonucleotide
  Antisense strand to SEQ ID NO: 2159682
gagauaaccagguuuaucu

SEQ ID NO: 2159684 - RNA, 19 nt, Artificial Sequence
  Description of Artificial Sequence: Synthetic oligonucleotide
  Sense strand starting at position 2157 of SEQ ID NO: 1882951
ugugaaggcuccugaagua

SEQ ID NO: 2159685 - RNA, 19 nt, Artificial Sequence
  Description of Artificial Sequence: Synthetic oligonucleotide
  Antisense strand to SEQ ID NO: 2159684
uacuucaggagccuucaca

SEQ ID NO: 2159686 - RNA, 19 nt, Artificial Sequence
  Description of Artificial Sequence: Synthetic oligonucleotide
  Sense strand starting at position 2976 of SEQ ID NO: 1882951
aaaggugaguucucuaaag

SEQ ID NO: 2159687 - RNA, 19 nt, Artificial Sequence
  Description of Artificial Sequence: Synthetic oligonucleotide
  Antisense strand to SEQ ID NO: 2159686
cuuuagagaacucaccuuu

SEQ ID NO: 2159688 - RNA, 19 nt, Artificial Sequence
  Description of Artificial Sequence: Synthetic oligonucleotide
  Sense strand starting at position 2978 of SEQ ID NO: 1882951
aggugaguucucuaaaguc

SEQ ID NO: 2159689 - RNA, 19 nt, Artificial Sequence
  Description of Artificial Sequence: Synthetic oligonucleotide
  Antisense strand to SEQ ID NO: 2159688
gacuuuagagaacucaccu

SEQ ID NO: 2159690 - RNA, 19 nt, Artificial Sequence
  Description of Artificial Sequence: Synthetic oligonucleotide
  Sense strand starting at position 2987 of SEQ ID NO: 1882951
cucuaaaguccugaucuag

SEQ ID NO: 2159691 - RNA, 19 nt, Artificial Sequence
  Description of Artificial Sequence: Synthetic oligonucleotide
  Antisense strand to SEQ ID NO: 2159690
cuagaucaggacuuuagag

SEQ ID NO: 2159692 - RNA, 19 nt, Artificial Sequence
  Description of Artificial Sequence: Synthetic oligonucleotide
  Sense strand starting at position 3011 of SEQ ID NO: 1882951
cucaaauucuggcaggcau

SEQ ID NO: 2159693 - RNA, 19 nt, Artificial Sequence
  Description of Artificial Sequence: Synthetic oligonucleotide
  Antisense strand to SEQ ID NO: 2159692
augccugccagaauuugag

SEQ ID NO: 2159694 - RNA, 19 nt, Artificial Sequence
  Description of Artificial Sequence: Synthetic oligonucleotide
  Sense strand starting at position 3104 of SEQ ID NO: 1882951
cugagcaucccagagagua

SEQ ID NO: 2159695 - RNA, 19 nt, Artificial Sequence
  Description of Artificial Sequence: Synthetic oligonucleotide
  Antisense strand to SEQ ID NO: 2159694
uacucucugggaugcucag

SEQ ID NO: 2159696 - RNA, 19 nt, Artificial Sequence
  Description of Artificial Sequence: Synthetic oligonucleotide
  Sense strand starting at position 3167 of SEQ ID NO: 1882951
gugugagagcccugcuuuc

SEQ ID NO: 2159697 - RNA, 19 nt, Artificial Sequence
  Description of Artificial Sequence: Synthetic oligonucleotide
  Antisense strand to SEQ ID NO: 2159696
gaaagcagggcucucacac

SEQ ID NO: 2159698 - RNA, 19 nt, Artificial Sequence
  Description of Artificial Sequence: Synthetic oligonucleotide
  Sense strand starting at position 3580 of SEQ ID NO: 1882951
aauggugaggucugucaga

SEQ ID NO: 2159699 - RNA, 19 nt, Artificial Sequence
  Description of Artificial Sequence: Synthetic oligonucleotide
  Antisense strand to SEQ ID NO: 2159698
ucugacagaccucaccauu

SEQ ID NO: 2159700 - RNA, 19 nt, Artificial Sequence
  Description of Artificial Sequence: Synthetic oligonucleotide
  Sense strand starting at position 3644 of SEQ ID NO: 1882951
gugggagagugcagagaau

SEQ ID NO: 2159701 - RNA, 19 nt, Artificial Sequence
  Description of Artificial Sequence: Synthetic oligonucleotide
  Antisense strand to SEQ ID NO: 2159700
auucucugcacucucccac

SEQ ID NO: 2159702 - RNA, 19 nt, Artificial Sequence
  Description of Artificial Sequence: Synthetic oligonucleotide
  Sense strand starting at position 3807 of SEQ ID NO: 1882951
ugaguaggucuugguauua

SEQ ID NO: 2159703 - RNA, 19 nt, Artificial Sequence
  Description of Artificial Sequence: Synthetic oligonucleotide
  Antisense strand to SEQ ID NO: 2159702
uaauaccaagaccuacuca

SEQ ID NO: 2159704 - RNA, 19 nt, Artificial Sequence
  Description of Artificial Sequence: Synthetic oligonucleotide
  Sense strand starting at position 3869 of SEQ ID NO: 1882951
gcuagaaguagugaaauca

SEQ ID NO: 2159705 - RNA, 19 nt, Artificial Sequence
  Description of Artificial Sequence: Synthetic oligonucleotide
  Antisense strand to SEQ ID NO: 2159704
ugauuucacuacuucuagc

SEQ ID NO: 2159706 - RNA, 19 nt, Artificial Sequence
  Description of Artificial Sequence: Synthetic oligonucleotide
  Sense strand starting at position 3934 of SEQ ID NO: 1882951
uuuggcauugacuagguau

SEQ ID NO: 2159707 - RNA, 19 nt, Artificial Sequence
  Description of Artificial Sequence: Synthetic oligonucleotide
  Antisense strand to SEQ ID NO: 2159706
auaccuagucaaugccaaa

SEQ ID NO: 2159708 - RNA, 19 nt, Artificial Sequence
  Description of Artificial Sequence: Synthetic oligonucleotide
  Sense strand starting at position 100 of SEQ ID NO: 1882952
gugaucaagugcccucaaa

SEQ ID NO: 2159709 - RNA, 19 nt, Artificial Sequence
  Description of Artificial Sequence: Synthetic oligonucleotide
  Antisense strand to SEQ ID NO: 2159708
uuugagggcacuugaucac

SEQ ID NO: 2159710 - RNA, 19 nt, Artificial Sequence
  Description of Artificial Sequence: Synthetic oligonucleotide
  Sense strand starting at position 176 of SEQ ID NO: 1882952
uggccacauguauguauau

SEQ ID NO: 2159711 - RNA, 19 nt, Artificial Sequence
  Description of Artificial Sequence: Synthetic oligonucleotide
  Antisense strand to SEQ ID NO: 2159710
auauacauacauguggcca

SEQ ID NO: 2159712 - RNA, 19 nt, Artificial Sequence
  Description of Artificial Sequence: Synthetic oligonucleotide
  Sense strand starting at position 327 of SEQ ID NO: 1882952
uuuaauguccuagguuaca

SEQ ID NO: 2159713 - RNA, 19 nt, Artificial Sequence
  Description of Artificial Sequence: Synthetic oligonucleotide
  Antisense strand to SEQ ID NO: 2159712
uguaaccuaggacauuaaa

SEQ ID NO: 2159714 - RNA, 19 nt, Artificial Sequence
  Description of Artificial Sequence: Synthetic oligonucleotide
  Sense strand starting at position 640 of SEQ ID NO: 1882952
gcagguguucccugagaga

SEQ ID NO: 2159715 - RNA, 19 nt, Artificial Sequence
  Description of Artificial Sequence: Synthetic oligonucleotide
  Antisense strand to SEQ ID NO: 2159714
ucucucagggaacaccugc

SEQ ID NO: 2159716 - RNA, 19 nt, Artificial Sequence
  Description of Artificial Sequence: Synthetic oligonucleotide
  Sense strand starting at position 751 of SEQ ID NO: 1882952
guuugcugugguggacaga

SEQ ID NO: 2159717 - RNA, 19 nt, Artificial Sequence
  Description of Artificial Sequence: Synthetic oligonucleotide
  Antisense strand to SEQ ID NO: 2159716
ucuguccaccacagcaaac

SEQ ID NO: 2159718 - RNA, 19 nt, Artificial Sequence
  Description of Artificial Sequence: Synthetic oligonucleotide
  Sense strand starting at position 752 of SEQ ID NO: 1882952
uuugcugugguggacagau

SEQ ID NO: 2159719 - RNA, 19 nt, Artificial Sequence
  Description of Artificial Sequence: Synthetic oligonucleotide
  Antisense strand to SEQ ID NO: 2159718
aucuguccaccacagcaaa

SEQ ID NO: 2159720 - RNA, 19 nt, Artificial Sequence
  Description of Artificial Sequence: Synthetic oligonucleotide
  Sense strand starting at position 965 of SEQ ID NO: 1882952
cugcccucugcucauagaa

SEQ ID NO: 2159721 - RNA, 19 nt, Artificial Sequence
  Description of Artificial Sequence: Synthetic oligonucleotide
  Antisense strand to SEQ ID NO: 2159720
uucuaugagcagagggcag

SEQ ID NO: 2159722 - RNA, 19 nt, Artificial Sequence
  Description of Artificial Sequence: Synthetic oligonucleotide
  Sense strand starting at position 1114 of SEQ ID NO: 1882952
ccgagaagcccaggcauuu

SEQ ID NO: 2159723 - RNA, 19 nt, Artificial Sequence
  Description of Artificial Sequence: Synthetic oligonucleotide
  Antisense strand to SEQ ID NO: 2159722
aaaugccugggcuucucgg

SEQ ID NO: 2159724 - RNA, 19 nt, Artificial Sequence
  Description of Artificial Sequence: Synthetic oligonucleotide
  Sense strand starting at position 1193 of SEQ ID NO: 1882952
ucugaagggucagauaaac

SEQ ID NO: 2159725 - RNA, 19 nt, Artificial Sequence
  Description of Artificial Sequence: Synthetic oligonucleotide
  Antisense strand to SEQ ID NO: 2159724
guuuaucugacccuucaga

SEQ ID NO: 2159726 - RNA, 19 nt, Artificial Sequence
  Description of Artificial Sequence: Synthetic oligonucleotide
  Sense strand starting at position 1201 of SEQ ID NO: 1882952
gucagauaaaccggcuuau

SEQ ID NO: 2159727 - RNA, 19 nt, Artificial Sequence
  Description of Artificial Sequence: Synthetic oligonucleotide
  Antisense strand to SEQ ID NO: 2159726
auaagccgguuuaucugac

SEQ ID NO: 2159728 - RNA, 19 nt, Artificial Sequence
  Description of Artificial Sequence: Synthetic oligonucleotide
  Sense strand starting at position 1622 of SEQ ID NO: 1882952
cagagucaucacggagaca

SEQ ID NO: 2159729 - RNA, 19 nt, Artificial Sequence
  Description of Artificial Sequence: Synthetic oligonucleotide
  Antisense strand to SEQ ID NO: 2159728
ugucuccgugaugacucug

SEQ ID NO: 2159730 - RNA, 19 nt, Artificial Sequence
  Description of Artificial Sequence: Synthetic oligonucleotide
  Sense strand starting at position 1642 of SEQ ID NO: 1882952
cagagacagccaugagauu

SEQ ID NO: 2159731 - RNA, 19 nt, Artificial Sequence
  Description of Artificial Sequence: Synthetic oligonucleotide
  Antisense strand to SEQ ID NO: 2159730
aaucucauggcugucucug

SEQ ID NO: 2159732 - RNA, 19 nt, Artificial Sequence
  Description of Artificial Sequence: Synthetic oligonucleotide
  Sense strand starting at position 1655 of SEQ ID NO: 1882952
gagauuugcucagacuuuc

SEQ ID NO: 2159733 - RNA, 19 nt, Artificial Sequence
  Description of Artificial Sequence: Synthetic oligonucleotide
  Antisense strand to SEQ ID NO: 2159732
gaaagucugagcaaaucuc

SEQ ID NO: 2159734 - RNA, 19 nt, Artificial Sequence
  Description of Artificial Sequence: Synthetic oligonucleotide
  Sense strand starting at position 1717 of SEQ ID NO: 1882952
guggaccgugcguuauaau

SEQ ID NO: 2159735 - RNA, 19 nt, Artificial Sequence
  Description of Artificial Sequence: Synthetic oligonucleotide
  Antisense strand to SEQ ID NO: 2159734
auuauaacgcacgguccac

SEQ ID NO: 2159736 - RNA, 19 nt, Artificial Sequence
  Description of Artificial Sequence: Synthetic oligonucleotide
  Sense strand starting at position 1718 of SEQ ID NO: 1882952
uggaccgugcguuauaaua

SEQ ID NO: 2159737 - RNA, 19 nt, Artificial Sequence
  Description of Artificial Sequence: Synthetic oligonucleotide
  Antisense strand to SEQ ID NO: 2159736
uauuauaacgcacggucca

SEQ ID NO: 2159738 - RNA, 19 nt, Artificial Sequence
  Description of Artificial Sequence: Synthetic oligonucleotide
  Sense strand starting at position 1744 of SEQ ID NO: 1882952
uauuguaugugacuuugau

SEQ ID NO: 2159739 - RNA, 19 nt, Artificial Sequence
  Description of Artificial Sequence: Synthetic oligonucleotide
  Antisense strand to SEQ ID NO: 2159738
aucaaagucacauacaaua

SEQ ID NO: 2159740 - RNA, 19 nt, Artificial Sequence
  Description of Artificial Sequence: Synthetic oligonucleotide
  Sense strand starting at position 1750 of SEQ ID NO: 1882952
augugacuuugauccuaca

SEQ ID NO: 2159741 - RNA, 19 nt, Artificial Sequence
  Description of Artificial Sequence: Synthetic oligonucleotide
  Antisense strand to SEQ ID NO: 2159740
uguaggaucaaagucacau

SEQ ID NO: 2159742 - RNA, 19 nt, Artificial Sequence
  Description of Artificial Sequence: Synthetic oligonucleotide
  Sense strand starting at position 1833 of SEQ ID NO: 1882952
gggacaugaugugauuaga

SEQ ID NO: 2159743 - RNA, 19 nt, Artificial Sequence
  Description of Artificial Sequence: Synthetic oligonucleotide
  Antisense strand to SEQ ID NO: 2159742
ucuaaucacaucauguccc

SEQ ID NO: 2159744 - RNA, 19 nt, Artificial Sequence
  Description of Artificial Sequence: Synthetic oligonucleotide
  Sense strand starting at position 1966 of SEQ ID NO: 1882952
gagcgugcugguguuaaau

SEQ ID NO: 2159745 - RNA, 19 nt, Artificial Sequence
  Description of Artificial Sequence: Synthetic oligonucleotide
  Antisense strand to SEQ ID NO: 2159744
auuuaacaccagcacgcuc

SEQ ID NO: 2159746 - RNA, 19 nt, Artificial Sequence
  Description of Artificial Sequence: Synthetic oligonucleotide
  Sense strand starting at position 2204 of SEQ ID NO: 1882952
acagaaaugacuuggguuc

SEQ ID NO: 2159747 - RNA, 19 nt, Artificial Sequence
  Description of Artificial Sequence: Synthetic oligonucleotide
  Antisense strand to SEQ ID NO: 2159746
gaacccaagucauuucugu

SEQ ID NO: 2159748 - RNA, 19 nt, Artificial Sequence
  Description of Artificial Sequence: Synthetic oligonucleotide
  Sense strand starting at position 2335 of SEQ ID NO: 1882952
uuguuacuugcagaaugaa

SEQ ID NO: 2159749 - RNA, 19 nt, Artificial Sequence
  Description of Artificial Sequence: Synthetic oligonucleotide
  Antisense strand to SEQ ID NO: 2159748
uucauucugcaaguaacaa

SEQ ID NO: 2159750 - RNA, 19 nt, Artificial Sequence
  Description of Artificial Sequence: Synthetic oligonucleotide
  Sense strand starting at position 2358 of SEQ ID NO: 1882952
uucucaaaucccuggagau

SEQ ID NO: 2159751 - RNA, 19 nt, Artificial Sequence
  Description of Artificial Sequence: Synthetic oligonucleotide
  Antisense strand to SEQ ID NO: 2159750
aucuccagggauuugagaa

SEQ ID NO: 2159752 - RNA, 19 nt, Artificial Sequence
  Description of Artificial Sequence: Synthetic oligonucleotide
  Sense strand starting at position 2359 of SEQ ID NO: 1882952
ucucaaaucccuggagaua

SEQ ID NO: 2159753 - RNA, 19 nt, Artificial Sequence
  Description of Artificial Sequence: Synthetic oligonucleotide
  Antisense strand to SEQ ID NO: 2159752
uaucuccagggauuugaga

SEQ ID NO: 2159754 - RNA, 19 nt, Artificial Sequence
  Description of Artificial Sequence: Synthetic oligonucleotide
  Sense strand starting at position 2370 of SEQ ID NO: 1882952
uggagauacugggcugagu

SEQ ID NO: 2159755 - RNA, 19 nt, Artificial Sequence
  Description of Artificial Sequence: Synthetic oligonucleotide
  Antisense strand to SEQ ID NO: 2159754
acucagcccaguaucucca

SEQ ID NO: 2159756 - RNA, 19 nt, Artificial Sequence
  Description of Artificial Sequence: Synthetic oligonucleotide
  Sense strand starting at position 2383 of SEQ ID NO: 1882952
cugagugcauuuguccuaa

SEQ ID NO: 2159757 - RNA, 19 nt, Artificial Sequence
  Description of Artificial Sequence: Synthetic oligonucleotide
  Antisense strand to SEQ ID NO: 2159756
uuaggacaaaugcacucag

SEQ ID NO: 2159758 - RNA, 19 nt, Artificial Sequence
  Description of Artificial Sequence: Synthetic oligonucleotide
  Sense strand starting at position 2385 of SEQ ID NO: 1882952
gagugcauuuguccuaauu

SEQ ID NO: 2159759 - RNA, 19 nt, Artificial Sequence
  Description of Artificial Sequence: Synthetic oligonucleotide
  Antisense strand to SEQ ID NO: 2159758
aauuaggacaaaugcacuc

SEQ ID NO: 2159760 - RNA, 19 nt, Artificial Sequence
  Description of Artificial Sequence: Synthetic oligonucleotide
  Sense strand starting at position 2483 of SEQ ID NO: 1882952
acagauggaaucugugcaa

SEQ ID NO: 2159761 - RNA, 19 nt, Artificial Sequence
  Description of Artificial Sequence: Synthetic oligonucleotide
  Antisense strand to SEQ ID NO: 2159760
uugcacagauuccaucugu

SEQ ID NO: 2159762 - RNA, 19 nt, Artificial Sequence
  Description of Artificial Sequence: Synthetic oligonucleotide
  Sense strand starting at position 2486 of SEQ ID NO: 1882952
gauggaaucugugcaaacu

SEQ ID NO: 2159763 - RNA, 19 nt, Artificial Sequence
  Description of Artificial Sequence: Synthetic oligonucleotide
  Antisense strand to SEQ ID NO: 2159762
aguuugcacagauuccauc

SEQ ID NO: 2159764 - RNA, 19 nt, Artificial Sequence
  Description of Artificial Sequence: Synthetic oligonucleotide
  Sense strand starting at position 2487 of SEQ ID NO: 1882952
auggaaucugugcaaacuu

SEQ ID NO: 2159765 - RNA, 19 nt, Artificial Sequence
  Description of Artificial Sequence: Synthetic oligonucleotide
  Antisense strand to SEQ ID NO: 2159764
aaguuugcacagauuccau

SEQ ID NO: 2159766 - RNA, 19 nt, Artificial Sequence
  Description of Artificial Sequence: Synthetic oligonucleotide
  Sense strand starting at position 2531 of SEQ ID NO: 1882952
cucacuuguugagcaagaa

SEQ ID NO: 2159767 - RNA, 19 nt, Artificial Sequence
  Description of Artificial Sequence: Synthetic oligonucleotide
  Antisense strand to SEQ ID NO: 2159766
uucuugcucaacaagugag

SEQ ID NO: 2159768 - RNA, 19 nt, Artificial Sequence
  Description of Artificial Sequence: Synthetic oligonucleotide
  Sense strand starting at position 2532 of SEQ ID NO: 1882952
ucacuuguugagcaagaag

SEQ ID NO: 2159769 - RNA, 19 nt, Artificial Sequence
  Description of Artificial Sequence: Synthetic oligonucleotide
  Antisense strand to SEQ ID NO: 2159768
cuucuugcucaacaaguga

SEQ ID NO: 2159770 - RNA, 19 nt, Artificial Sequence
  Description of Artificial Sequence: Synthetic oligonucleotide
  Sense strand starting at position 2983 of SEQ ID NO: 1882952
gggauuuccucugaagaug

SEQ ID NO: 2159771 - RNA, 19 nt, Artificial Sequence
  Description of Artificial Sequence: Synthetic oligonucleotide
  Antisense strand to SEQ ID NO: 2159770
caucuucagaggaaauccc

SEQ ID NO: 2159772 - RNA, 19 nt, Artificial Sequence
  Description of Artificial Sequence: Synthetic oligonucleotide
  Sense strand starting at position 3125 of SEQ ID NO: 1882952
ggaugccuugccugaagau

SEQ ID NO: 2159773 - RNA, 19 nt, Artificial Sequence
  Description of Artificial Sequence: Synthetic oligonucleotide
  Antisense strand to SEQ ID NO: 2159772
aucuucaggcaaggcaucc

SEQ ID NO: 2159774 - RNA, 19 nt, Artificial Sequence
  Description of Artificial Sequence: Synthetic oligonucleotide
  Sense strand starting at position 3126 of SEQ ID NO: 1882952
gaugccuugccugaagaug

SEQ ID NO: 2159775 - RNA, 19 nt, Artificial Sequence
  Description of Artificial Sequence: Synthetic oligonucleotide
  Antisense strand to SEQ ID NO: 2159774
caucuucaggcaaggcauc

SEQ ID NO: 2159776 - RNA, 19 nt, Artificial Sequence
  Description of Artificial Sequence: Synthetic oligonucleotide
  Sense strand starting at position 3833 of SEQ ID NO: 1882952
gaagacacaucucugcgaa

SEQ ID NO: 2159777 - RNA, 19 nt, Artificial Sequence
  Description of Artificial Sequence: Synthetic oligonucleotide
  Antisense strand to SEQ ID NO: 2159776
uucgcagagaugugucuuc

SEQ ID NO: 2159778 - RNA, 19 nt, Artificial Sequence
  Description of Artificial Sequence: Synthetic oligonucleotide
  Sense strand starting at position 3836 of SEQ ID NO: 1882952
gacacaucucugcgaagcu

SEQ ID NO: 2159779 - RNA, 19 nt, Artificial Sequence
  Description of Artificial Sequence: Synthetic oligonucleotide
  Antisense strand to SEQ ID NO: 2159778
agcuucgcagagauguguc

SEQ ID NO: 2159780 - RNA, 19 nt, Artificial Sequence
  Description of Artificial Sequence: Synthetic oligonucleotide
  Sense strand starting at position 3948 of SEQ ID NO: 1882952
acgagacauucuccauaug

SEQ ID NO: 2159781 - RNA, 19 nt, Artificial Sequence
  Description of Artificial Sequence: Synthetic oligonucleotide
  Antisense strand to SEQ ID NO: 2159780
cauauggagaaugucucgu

SEQ ID NO: 2159782 - RNA, 19 nt, Artificial Sequence
  Description of Artificial Sequence: Synthetic oligonucleotide
  Sense strand starting at position 3949 of SEQ ID NO: 1882952
cgagacauucuccauaugu

SEQ ID NO: 2159783 - RNA, 19 nt, Artificial Sequence
  Description of Artificial Sequence: Synthetic oligonucleotide
  Antisense strand to SEQ ID NO: 2159782
acauauggagaaugucucg

SEQ ID NO: 2159784 - RNA, 19 nt, Artificial Sequence
  Description of Artificial Sequence: Synthetic oligonucleotide
  Sense strand starting at position 3951 of SEQ ID NO: 1882952
agacauucuccauauguuu

SEQ ID NO: 2159785 - RNA, 19 nt, Artificial Sequence
  Description of Artificial Sequence: Synthetic oligonucleotide
  Antisense strand to SEQ ID NO: 2159784
aaacauauggagaaugucu

SEQ ID NO: 2159786 - RNA, 19 nt, Artificial Sequence
  Description of Artificial Sequence: Synthetic oligonucleotide
  Sense strand starting at position 3981 of SEQ ID NO: 1882952
gcagcucaucgacagauaa

SEQ ID NO: 2159787 - RNA, 19 nt, Artificial Sequence
  Description of Artificial Sequence: Synthetic oligonucleotide
  Antisense strand to SEQ ID NO: 2159786
uuaucugucgaugagcugc

SEQ ID NO: 2159788 - RNA, 19 nt, Artificial Sequence
  Description of Artificial Sequence: Synthetic oligonucleotide
  Sense strand starting at position 108 of SEQ ID NO: 1882953
cuugguaacacugagcaga

SEQ ID NO: 2159789 - RNA, 19 nt, Artificial Sequence
  Description of Artificial Sequence: Synthetic oligonucleotide
  Antisense strand to SEQ ID NO: 2159788
ucugcucaguguuaccaag

SEQ ID NO: 2159790 - RNA, 19 nt, Artificial Sequence
  Description of Artificial Sequence: Synthetic oligonucleotide
  Sense strand starting at position 118 of SEQ ID NO: 1882953
cugagcagacaauguuaga

SEQ ID NO: 2159791 - RNA, 19 nt, Artificial Sequence
  Description of Artificial Sequence: Synthetic oligonucleotide
  Antisense strand to SEQ ID NO: 2159790
ucuaacauugucugcucag

SEQ ID NO: 2159792 - RNA, 19 nt, Artificial Sequence
  Description of Artificial Sequence: Synthetic oligonucleotide
  Sense strand starting at position 133 of SEQ ID NO: 1882953
uagagucccuaguccaaga

SEQ ID NO: 2159793 - RNA, 19 nt, Artificial Sequence
  Description of Artificial Sequence: Synthetic oligonucleotide
  Antisense strand to SEQ ID NO: 2159792
ucuuggacuagggacucua

SEQ ID NO: 2159794 - RNA, 19 nt, Artificial Sequence
  Description of Artificial Sequence: Synthetic oligonucleotide
  Sense strand starting at position 285 of SEQ ID NO: 1882953
gaaacuggauggucuuuga

SEQ ID NO: 2159795 - RNA, 19 nt, Artificial Sequence
  Description of Artificial Sequence: Synthetic oligonucleotide
  Antisense strand to SEQ ID NO: 2159794
ucaaagaccauccaguuuc

SEQ ID NO: 2159796 - RNA, 19 nt, Artificial Sequence
  Description of Artificial Sequence: Synthetic oligonucleotide
  Sense strand starting at position 289 of SEQ ID NO: 1882953
cuggauggucuuugacacu

SEQ ID NO: 2159797 - RNA, 19 nt, Artificial Sequence
  Description of Artificial Sequence: Synthetic oligonucleotide
  Antisense strand to SEQ ID NO: 2159796
agugucaaagaccauccag

SEQ ID NO: 2159798 - RNA, 19 nt, Artificial Sequence
  Description of Artificial Sequence: Synthetic oligonucleotide
  Sense strand starting at position 346 of SEQ ID NO: 1882953
auguaccauuaagugaauu

SEQ ID NO: 2159799 - RNA, 19 nt, Artificial Sequence
  Description of Artificial Sequence: Synthetic oligonucleotide
  Antisense strand to SEQ ID NO: 2159798
aauucacuuaaugguacau

SEQ ID NO: 2159800 - RNA, 19 nt, Artificial Sequence
  Description of Artificial Sequence: Synthetic oligonucleotide
  Sense strand starting at position 373 of SEQ ID NO: 1882953
augccuaaauuauuaggaa

SEQ ID NO: 2159801 - RNA, 19 nt, Artificial Sequence
  Description of Artificial Sequence: Synthetic oligonucleotide
  Antisense strand to SEQ ID NO: 2159800
uuccuaauaauuuaggcau

SEQ ID NO: 2159802 - RNA, 19 nt, Artificial Sequence
  Description of Artificial Sequence: Synthetic oligonucleotide
  Sense strand starting at position 464 of SEQ ID NO: 1882953
gguagucugagaugagaag

SEQ ID NO: 2159803 - RNA, 19 nt, Artificial Sequence
  Description of Artificial Sequence: Synthetic oligonucleotide
  Antisense strand to SEQ ID NO: 2159802
cuucucaucucagacuacc

SEQ ID NO: 2159804 - RNA, 19 nt, Artificial Sequence
  Description of Artificial Sequence: Synthetic oligonucleotide
  Sense strand starting at position 549 of SEQ ID NO: 1882953
auuauuagcucucucgaaa

SEQ ID NO: 2159805 - RNA, 19 nt, Artificial Sequence
  Description of Artificial Sequence: Synthetic oligonucleotide
  Antisense strand to SEQ ID NO: 2159804
uuucgagagagcuaauaau

SEQ ID NO: 2159806 - RNA, 19 nt, Artificial Sequence
  Description of Artificial Sequence: Synthetic oligonucleotide
  Sense strand starting at position 640 of SEQ ID NO: 1882953
aaauuacaaguucguaaga

SEQ ID NO: 2159807 - RNA, 19 nt, Artificial Sequence
  Description of Artificial Sequence: Synthetic oligonucleotide
  Antisense strand to SEQ ID NO: 2159806
ucuuacgaacuuguaauuu

SEQ ID NO: 2159808 - RNA, 19 nt, Artificial Sequence
  Description of Artificial Sequence: Synthetic oligonucleotide
  Sense strand starting at position 641 of SEQ ID NO: 1882953
aauuacaaguucguaagaa

SEQ ID NO: 2159809 - RNA, 19 nt, Artificial Sequence
  Description of Artificial Sequence: Synthetic oligonucleotide
  Antisense strand to SEQ ID NO: 2159808
uucuuacgaacuuguaauu

SEQ ID NO: 2159810 - RNA, 19 nt, Artificial Sequence
  Description of Artificial Sequence: Synthetic oligonucleotide
  Sense strand starting at position 742 of SEQ ID NO: 1882953
gguugaaagucucuuuaga

SEQ ID NO: 2159811 - RNA, 19 nt, Artificial Sequence
  Description of Artificial Sequence: Synthetic oligonucleotide
  Antisense strand to SEQ ID NO: 2159810
ucuaaagagacuuucaacc

SEQ ID NO: 2159812 - RNA, 19 nt, Artificial Sequence
  Description of Artificial Sequence: Synthetic oligonucleotide
  Sense strand starting at position 913 of SEQ ID NO: 1882953
auuguagcugucuacaacu

SEQ ID NO: 2159813 - RNA, 19 nt, Artificial Sequence
  Description of Artificial Sequence: Synthetic oligonucleotide
  Antisense strand to SEQ ID NO: 2159812
aguuguagacagcuacaau

SEQ ID NO: 2159814 - RNA, 19 nt, Artificial Sequence
  Description of Artificial Sequence: Synthetic oligonucleotide
  Sense strand starting at position 957 of SEQ ID NO: 1882953
gggccuucucugcaccaaa

SEQ ID NO: 2159815 - RNA, 19 nt, Artificial Sequence
  Description of Artificial Sequence: Synthetic oligonucleotide
  Antisense strand to SEQ ID NO: 2159814
uuuggugcagagaaggccc

SEQ ID NO: 2159816 - RNA, 19 nt, Artificial Sequence
  Description of Artificial Sequence: Synthetic oligonucleotide
  Sense strand starting at position 1091 of SEQ ID NO: 1882953
agcgauuucuuacucauuc

SEQ ID NO: 2159817 - RNA, 19 nt, Artificial Sequence
  Description of Artificial Sequence: Synthetic oligonucleotide
  Antisense strand to SEQ ID NO: 2159816
gaaugaguaagaaaucgcu

SEQ ID NO: 2159818 - RNA, 19 nt, Artificial Sequence
  Description of Artificial Sequence: Synthetic oligonucleotide
  Sense strand starting at position 1092 of SEQ ID NO: 1882953
gcgauuucuuacucauucu

SEQ ID NO: 2159819 - RNA, 19 nt, Artificial Sequence
  Description of Artificial Sequence: Synthetic oligonucleotide
  Antisense strand to SEQ ID NO: 2159818
agaaugaguaagaaaucgc

SEQ ID NO: 2159820 - RNA, 19 nt, Artificial Sequence
  Description of Artificial Sequence: Synthetic oligonucleotide
  Sense strand starting at position 1117 of SEQ ID NO: 1882953
accuauaaugucuauguuu

SEQ ID NO: 2159821 - RNA, 19 nt, Artificial Sequence
  Description of Artificial Sequence: Synthetic oligonucleotide
  Antisense strand to SEQ ID NO: 2159820
aaacauagacauuauaggu

SEQ ID NO: 2159822 - RNA, 19 nt, Artificial Sequence
  Description of Artificial Sequence: Synthetic oligonucleotide
  Sense strand starting at position 1233 of SEQ ID NO: 1882953
agauccucccaguaucuau

SEQ ID NO: 2159823 - RNA, 19 nt, Artificial Sequence
  Description of Artificial Sequence: Synthetic oligonucleotide
  Antisense strand to SEQ ID NO: 2159822
auagauacugggaggaucu

SEQ ID NO: 2159824 - RNA, 19 nt, Artificial Sequence
  Description of Artificial Sequence: Synthetic oligonucleotide
  Sense strand starting at position 1399 of SEQ ID NO: 1882953
uggccuuaaggaugaauaa

SEQ ID NO: 2159825 - RNA, 19 nt, Artificial Sequence
  Description of Artificial Sequence: Synthetic oligonucleotide
  Antisense strand to SEQ ID NO: 2159824
uuauucauccuuaaggcca

SEQ ID NO: 2159826 - RNA, 19 nt, Artificial Sequence
  Description of Artificial Sequence: Synthetic oligonucleotide
  Sense strand starting at position 1428 of SEQ ID NO: 1882953
gggaguuccuucccugaga

SEQ ID NO: 2159827 - RNA, 19 nt, Artificial Sequence
  Description of Artificial Sequence: Synthetic oligonucleotide
  Antisense strand to SEQ ID NO: 2159826
ucucagggaaggaacuccc

SEQ ID NO: 2159828 - RNA, 19 nt, Artificial Sequence
  Description of Artificial Sequence: Synthetic oligonucleotide
  Sense strand starting at position 1429 of SEQ ID NO: 1882953
ggaguuccuucccugagac

SEQ ID NO: 2159829 - RNA, 19 nt, Artificial Sequence
  Description of Artificial Sequence: Synthetic oligonucleotide
  Antisense strand to SEQ ID NO: 2159828
gucucagggaaggaacucc

SEQ ID NO: 2159830 - RNA, 19 nt, Artificial Sequence
  Description of Artificial Sequence: Synthetic oligonucleotide
  Sense strand starting at position 1473 of SEQ ID NO: 1882953
auacaaagguuguuaauga

SEQ ID NO: 2159831 - RNA, 19 nt, Artificial Sequence
  Description of Artificial Sequence: Synthetic oligonucleotide
  Antisense strand to SEQ ID NO: 2159830
ucauuaacaaccuuuguau

SEQ ID NO: 2159832 - RNA, 19 nt, Artificial Sequence
  Description of Artificial Sequence: Synthetic oligonucleotide
  Sense strand starting at position 1545 of SEQ ID NO: 1882953
auuucuaaauagcagagaa

SEQ ID NO: 2159833 - RNA, 19 nt, Artificial Sequence
  Description of Artificial Sequence: Synthetic oligonucleotide
  Antisense strand to SEQ ID NO: 2159832
uucucugcuauuuagaaau

SEQ ID NO: 2159834 - RNA, 19 nt, Artificial Sequence
  Description of Artificial Sequence: Synthetic oligonucleotide
  Sense strand starting at position 1697 of SEQ ID NO: 1882953
aagagaugagccggcuaca

SEQ ID NO: 2159835 - RNA, 19 nt, Artificial Sequence
  Description of Artificial Sequence: Synthetic oligonucleotide
  Antisense strand to SEQ ID NO: 2159834
uguagccggcucaucucuu

SEQ ID NO: 2159836 - RNA, 19 nt, Artificial Sequence
  Description of Artificial Sequence: Synthetic oligonucleotide
  Sense strand starting at position 2105 of SEQ ID NO: 1882953
gggaauuccuuugucacaa

SEQ ID NO: 2159837 - RNA, 19 nt, Artificial Sequence
  Description of Artificial Sequence: Synthetic oligonucleotide
  Antisense strand to SEQ ID NO: 2159836
uugugacaaaggaauuccc

SEQ ID NO: 2159838 - RNA, 19 nt, Artificial Sequence
  Description of Artificial Sequence: Synthetic oligonucleotide
  Sense strand starting at position 2106 of SEQ ID NO: 1882953
ggaauuccuuugucacaaa

SEQ ID NO: 2159839 - RNA, 19 nt, Artificial Sequence
  Description of Artificial Sequence: Synthetic oligonucleotide
  Antisense strand to SEQ ID NO: 2159838
uuugugacaaaggaauucc

SEQ ID NO: 2159840 - RNA, 19 nt, Artificial Sequence
  Description of Artificial Sequence: Synthetic oligonucleotide
  Sense strand starting at position 2247 of SEQ ID NO: 1882953
agacaucaugcauaucagu

SEQ ID NO: 2159841 - RNA, 19 nt, Artificial Sequence
  Description of Artificial Sequence: Synthetic oligonucleotide
  Antisense strand to SEQ ID NO: 2159840
acugauaugcaugaugucu

SEQ ID NO: 2159842 - RNA, 19 nt, Artificial Sequence
  Description of Artificial Sequence: Synthetic oligonucleotide
  Sense strand starting at position 2334 of SEQ ID NO: 1882953
auuaucugucuuuagaagu

SEQ ID NO: 2159843 - RNA, 19 nt, Artificial Sequence
  Description of Artificial Sequence: Synthetic oligonucleotide
  Antisense strand to SEQ ID NO: 2159842
acuucuaaagacagauaau

SEQ ID NO: 2159844 - RNA, 19 nt, Artificial Sequence
  Description of Artificial Sequence: Synthetic oligonucleotide
  Sense strand starting at position 2377 of SEQ ID NO: 1882953
cuucucaaagcuuauggua

SEQ ID NO: 2159845 - RNA, 19 nt, Artificial Sequence
  Description of Artificial Sequence: Synthetic oligonucleotide
  Antisense strand to SEQ ID NO: 2159844
uaccauaagcuuugagaag

SEQ ID NO: 2159846 - RNA, 19 nt, Artificial Sequence
  Description of Artificial Sequence: Synthetic oligonucleotide
  Sense strand starting at position 2398 of SEQ ID NO: 1882953
uugacagaucaaggauugu

SEQ ID NO: 2159847 - RNA, 19 nt, Artificial Sequence
  Description of Artificial Sequence: Synthetic oligonucleotide
  Antisense strand to SEQ ID NO: 2159846
acaauccuugaucugucaa

SEQ ID NO: 2159848 - RNA, 19 nt, Artificial Sequence
  Description of Artificial Sequence: Synthetic oligonucleotide
  Sense strand starting at position 2536 of SEQ ID NO: 1882953
cacagugaguacucaaaug

SEQ ID NO: 2159849 - RNA, 19 nt, Artificial Sequence
  Description of Artificial Sequence: Synthetic oligonucleotide
  Antisense strand to SEQ ID NO: 2159848
cauuugaguacucacugug

SEQ ID NO: 2159850 - RNA, 19 nt, Artificial Sequence
  Description of Artificial Sequence: Synthetic oligonucleotide
  Sense strand starting at position 2726 of SEQ ID NO: 1882953
uguauaccucuguaugagu

SEQ ID NO: 2159851 - RNA, 19 nt, Artificial Sequence
  Description of Artificial Sequence: Synthetic oligonucleotide
  Antisense strand to SEQ ID NO: 2159850
acucauacagagguauaca

SEQ ID NO: 2159852 - RNA, 19 nt, Artificial Sequence
  Description of Artificial Sequence: Synthetic oligonucleotide
  Sense strand starting at position 3205 of SEQ ID NO: 1882953
uggucaguauauguaggau

SEQ ID NO: 2159853 - RNA, 19 nt, Artificial Sequence
  Description of Artificial Sequence: Synthetic oligonucleotide
  Antisense strand to SEQ ID NO: 2159852
auccuacauauacugacca

SEQ ID NO: 2159854 - RNA, 19 nt, Artificial Sequence
  Description of Artificial Sequence: Synthetic oligonucleotide
  Sense strand starting at position 3208 of SEQ ID NO: 1882953
ucaguauauguaggaucua

SEQ ID NO: 2159855 - RNA, 19 nt, Artificial Sequence
  Description of Artificial Sequence: Synthetic oligonucleotide
  Antisense strand to SEQ ID NO: 2159854
uagauccuacauauacuga

SEQ ID NO: 2159856 - RNA, 19 nt, Artificial Sequence
  Description of Artificial Sequence: Synthetic oligonucleotide
  Sense strand starting at position 3252 of SEQ ID NO: 1882953
gauuccacuguaugaaugu

SEQ ID NO: 2159857 - RNA, 19 nt, Artificial Sequence
  Description of Artificial Sequence: Synthetic oligonucleotide
  Antisense strand to SEQ ID NO: 2159856
acauucauacaguggaauc

SEQ ID NO: 2159858 - RNA, 19 nt, Artificial Sequence
  Description of Artificial Sequence: Synthetic oligonucleotide
  Sense strand starting at position 3285 of SEQ ID NO: 1882953
aggguaacuugaucuuuag

SEQ ID NO: 2159859 - RNA, 19 nt, Artificial Sequence
  Description of Artificial Sequence: Synthetic oligonucleotide
  Antisense strand to SEQ ID NO: 2159858
cuaaagaucaaguuacccu

SEQ ID NO: 2159860 - RNA, 19 nt, Artificial Sequence
  Description of Artificial Sequence: Synthetic oligonucleotide
  Sense strand starting at position 3511 of SEQ ID NO: 1882953
uuugacagaugguuaaaua

SEQ ID NO: 2159861 - RNA, 19 nt, Artificial Sequence
  Description of Artificial Sequence: Synthetic oligonucleotide
  Antisense strand to SEQ ID NO: 2159860
uauuuaaccaucugucaaa

SEQ ID NO: 2159862 - RNA, 19 nt, Artificial Sequence
  Description of Artificial Sequence: Synthetic oligonucleotide
  Sense strand starting at position 3525 of SEQ ID NO: 1882953
aaauacuuugucgagguca

SEQ ID NO: 2159863 - RNA, 19 nt, Artificial Sequence
  Description of Artificial Sequence: Synthetic oligonucleotide
  Antisense strand to SEQ ID NO: 2159862
ugaccucgacaaaguauuu

SEQ ID NO: 2159864 - RNA, 19 nt, Artificial Sequence
  Description of Artificial Sequence: Synthetic oligonucleotide
  Sense strand starting at position 3545 of SEQ ID NO: 1882953
acagguggugaaugauaua

SEQ ID NO: 2159865 - RNA, 19 nt, Artificial Sequence
  Description of Artificial Sequence: Synthetic oligonucleotide
  Antisense strand to SEQ ID NO: 2159864
uauaucauucaccaccugu

SEQ ID NO: 2159866 - RNA, 19 nt, Artificial Sequence
  Description of Artificial Sequence: Synthetic oligonucleotide
  Sense strand starting at position 3851 of SEQ ID NO: 1882953
uugaaauguaacuguagga

SEQ ID NO: 2159867 - RNA, 19 nt, Artificial Sequence
  Description of Artificial Sequence: Synthetic oligonucleotide
  Antisense strand to SEQ ID NO: 2159866
uccuacaguuacauuucaa

SEQ ID NO: 2159868 - RNA, 19 nt, Artificial Sequence
  Description of Artificial Sequence: Synthetic oligonucleotide
  Sense strand starting at position 38 of SEQ ID NO: 1882954
ccauuuagcuaaugauuug

SEQ ID NO: 2159869 - RNA, 19 nt, Artificial Sequence
  Description of Artificial Sequence: Synthetic oligonucleotide
  Antisense strand to SEQ ID NO: 2159868
caaaucauuagcuaaaugg

SEQ ID NO: 2159870 - RNA, 19 nt, Artificial Sequence
  Description of Artificial Sequence: Synthetic oligonucleotide
  Sense strand starting at position 55 of SEQ ID NO: 1882954
ugugaacucugacuguaug

SEQ ID NO: 2159871 - RNA, 19 nt, Artificial Sequence
  Description of Artificial Sequence: Synthetic oligonucleotide
  Antisense strand to SEQ ID NO: 2159870
cauacagucagaguucaca

SEQ ID NO: 2159872 - RNA, 19 nt, Artificial Sequence
  Description of Artificial Sequence: Synthetic oligonucleotide
  Sense strand starting at position 205 of SEQ ID NO: 1882954
gcaccuagcuaucugaaua

SEQ ID NO: 2159873 - RNA, 19 nt, Artificial Sequence
  Description of Artificial Sequence: Synthetic oligonucleotide
  Antisense strand to SEQ ID NO: 2159872
uauucagauagcuaggugc

SEQ ID NO: 2159874 - RNA, 19 nt, Artificial Sequence
  Description of Artificial Sequence: Synthetic oligonucleotide
  Sense strand starting at position 216 of SEQ ID NO: 1882954
ucugaauaucugggacauu

SEQ ID NO: 2159875 - RNA, 19 nt, Artificial Sequence
  Description of Artificial Sequence: Synthetic oligonucleotide
  Antisense strand to SEQ ID NO: 2159874
aaugucccagauauucaga

SEQ ID NO: 2159876 - RNA, 19 nt, Artificial Sequence
  Description of Artificial Sequence: Synthetic oligonucleotide
  Sense strand starting at position 641 of SEQ ID NO: 1882954
cucugagcuagcugggauu

SEQ ID NO: 2159877 - RNA, 19 nt, Artificial Sequence
  Description of Artificial Sequence: Synthetic oligonucleotide
  Antisense strand to SEQ ID NO: 2159876
aaucccagcuagcucagag

SEQ ID NO: 2159878 - RNA, 19 nt, Artificial Sequence
  Description of Artificial Sequence: Synthetic oligonucleotide
  Sense strand starting at position 961 of SEQ ID NO: 1882954
cagauccaugcauauguga

SEQ ID NO: 2159879 - RNA, 19 nt, Artificial Sequence
  Description of Artificial Sequence: Synthetic oligonucleotide
  Antisense strand to SEQ ID NO: 2159878
ucacauaugcauggaucug

SEQ ID NO: 2159880 - RNA, 19 nt, Artificial Sequence
  Description of Artificial Sequence: Synthetic oligonucleotide
  Sense strand starting at position 964 of SEQ ID NO: 1882954
auccaugcauaugugauaa

SEQ ID NO: 2159881 - RNA, 19 nt, Artificial Sequence
  Description of Artificial Sequence: Synthetic oligonucleotide
  Antisense strand to SEQ ID NO: 2159880
uuaucacauaugcauggau

SEQ ID NO: 2159882 - RNA, 19 nt, Artificial Sequence
  Description of Artificial Sequence: Synthetic oligonucleotide
  Sense strand starting at position 1105 of SEQ ID NO: 1882954
auggacuuucgacggguua

SEQ ID NO: 2159883 - RNA, 19 nt, Artificial Sequence
  Description of Artificial Sequence: Synthetic oligonucleotide
  Antisense strand to SEQ ID NO: 2159882
uaacccgucgaaaguccau

SEQ ID NO: 2159884 - RNA, 19 nt, Artificial Sequence
  Description of Artificial Sequence: Synthetic oligonucleotide
  Sense strand starting at position 1106 of SEQ ID NO: 1882954
uggacuuucgacggguuaa

SEQ ID NO: 2159885 - RNA, 19 nt, Artificial Sequence
  Description of Artificial Sequence: Synthetic oligonucleotide
  Antisense strand to SEQ ID NO: 2159884
uuaacccgucgaaagucca

SEQ ID NO: 2159886 - RNA, 19 nt, Artificial Sequence
  Description of Artificial Sequence: Synthetic oligonucleotide
  Sense strand starting at position 1107 of SEQ ID NO: 1882954
ggacuuucgacggguuaaa

SEQ ID NO: 2159887 - RNA, 19 nt, Artificial Sequence
  Description of Artificial Sequence: Synthetic oligonucleotide
  Antisense strand to SEQ ID NO: 2159886
uuuaacccgucgaaagucc

SEQ ID NO: 2159888 - RNA, 19 nt, Artificial Sequence
  Description of Artificial Sequence: Synthetic oligonucleotide
  Sense strand starting at position 1137 of SEQ ID NO: 1882954
aggagauucucuuagaaca

SEQ ID NO: 2159889 - RNA, 19 nt, Artificial Sequence
  Description of Artificial Sequence: Synthetic oligonucleotide
  Antisense strand to SEQ ID NO: 2159888
uguucuaagagaaucuccu

SEQ ID NO: 2159890 - RNA, 19 nt, Artificial Sequence
  Description of Artificial Sequence: Synthetic oligonucleotide
  Sense strand starting at position 1799 of SEQ ID NO: 1882954
ggcucaaucuagcuccuaa

SEQ ID NO: 2159891 - RNA, 19 nt, Artificial Sequence
  Description of Artificial Sequence: Synthetic oligonucleotide
  Antisense strand to SEQ ID NO: 2159890
uuaggagcuagauugagcc

SEQ ID NO: 2159892 - RNA, 19 nt, Artificial Sequence
  Description of Artificial Sequence: Synthetic oligonucleotide
  Sense strand starting at position 2009 of SEQ ID NO: 1882954
ugccuauuccuuuggcaga

SEQ ID NO: 2159893 - RNA, 19 nt, Artificial Sequence
  Description of Artificial Sequence: Synthetic oligonucleotide
  Antisense strand to SEQ ID NO: 2159892
ucugccaaaggaauaggca

SEQ ID NO: 2159894 - RNA, 19 nt, Artificial Sequence
  Description of Artificial Sequence: Synthetic oligonucleotide
  Sense strand starting at position 2056 of SEQ ID NO: 1882954
uacuuaagcuagcuagagu

SEQ ID NO: 2159895 - RNA, 19 nt, Artificial Sequence
  Description of Artificial Sequence: Synthetic oligonucleotide
  Antisense strand to SEQ ID NO: 2159894
acucuagcuagcuuaagua

SEQ ID NO: 2159896 - RNA, 19 nt, Artificial Sequence
  Description of Artificial Sequence: Synthetic oligonucleotide
  Sense strand starting at position 2063 of SEQ ID NO: 1882954
gcuagcuagaguugaauuu

SEQ ID NO: 2159897 - RNA, 19 nt, Artificial Sequence
  Description of Artificial Sequence: Synthetic oligonucleotide
  Antisense strand to SEQ ID NO: 2159896
aaauucaacucuagcuagc

SEQ ID NO: 2159898 - RNA, 19 nt, Artificial Sequence
  Description of Artificial Sequence: Synthetic oligonucleotide
  Sense strand starting at position 2108 of SEQ ID NO: 1882954
gaaguuauuuaaugagucu

SEQ ID NO: 2159899 - RNA, 19 nt, Artificial Sequence
  Description of Artificial Sequence: Synthetic oligonucleotide
  Antisense strand to SEQ ID NO: 2159898
agacucauuaaauaacuuc

SEQ ID NO: 2159900 - RNA, 19 nt, Artificial Sequence
  Description of Artificial Sequence: Synthetic oligonucleotide
  Sense strand starting at position 2167 of SEQ ID NO: 1882954
uugauuagcccuuaaguaa

SEQ ID NO: 2159901 - RNA, 19 nt, Artificial Sequence
  Description of Artificial Sequence: Synthetic oligonucleotide
  Antisense strand to SEQ ID NO: 2159900
uuacuuaagggcuaaucaa

SEQ ID NO: 2159902 - RNA, 19 nt, Artificial Sequence
  Description of Artificial Sequence: Synthetic oligonucleotide
  Sense strand starting at position 2371 of SEQ ID NO: 1882954
aucuauucugauugcugaa

SEQ ID NO: 2159903 - RNA, 19 nt, Artificial Sequence
  Description of Artificial Sequence: Synthetic oligonucleotide
  Antisense strand to SEQ ID NO: 2159902
uucagcaaucagaauagau

SEQ ID NO: 2159904 - RNA, 19 nt, Artificial Sequence
  Description of Artificial Sequence: Synthetic oligonucleotide
  Sense strand starting at position 2392 of SEQ ID NO: 1882954
uugagaauauaggacaagu

SEQ ID NO: 2159905 - RNA, 19 nt, Artificial Sequence
  Description of Artificial Sequence: Synthetic oligonucleotide
  Antisense strand to SEQ ID NO: 2159904
acuuguccuauauucucaa

SEQ ID NO: 2159906 - RNA, 19 nt, Artificial Sequence
  Description of Artificial Sequence: Synthetic oligonucleotide
  Sense strand starting at position 2537 of SEQ ID NO: 1882954
ugucauucccaagagucaa

SEQ ID NO: 2159907 - RNA, 19 nt, Artificial Sequence
  Description of Artificial Sequence: Synthetic oligonucleotide
  Antisense strand to SEQ ID NO: 2159906
uugacucuugggaaugaca

SEQ ID NO: 2159908 - RNA, 19 nt, Artificial Sequence
  Description of Artificial Sequence: Synthetic oligonucleotide
  Sense strand starting at position 2746 of SEQ ID NO: 1882954
auagaauaucauggcacuu

SEQ ID NO: 2159909 - RNA, 19 nt, Artificial Sequence
  Description of Artificial Sequence: Synthetic oligonucleotide
  Antisense strand to SEQ ID NO: 2159908
aagugccaugauauucuau

SEQ ID NO: 2159910 - RNA, 19 nt, Artificial Sequence
  Description of Artificial Sequence: Synthetic oligonucleotide
  Sense strand starting at position 2761 of SEQ ID NO: 1882954
acuucucacuccuugguua

SEQ ID NO: 2159911 - RNA, 19 nt, Artificial Sequence
  Description of Artificial Sequence: Synthetic oligonucleotide
  Antisense strand to SEQ ID NO: 2159910
uaaccaaggagugagaagu

SEQ ID NO: 2159912 - RNA, 19 nt, Artificial Sequence
  Description of Artificial Sequence: Synthetic oligonucleotide
  Sense strand starting at position 2798 of SEQ ID NO: 1882954
gcuucuuaugaaggacuuu

SEQ ID NO: 2159913 - RNA, 19 nt, Artificial Sequence
  Description of Artificial Sequence: Synthetic oligonucleotide
  Antisense strand to SEQ ID NO: 2159912
aaaguccuucauaagaagc

SEQ ID NO: 2159914 - RNA, 19 nt, Artificial Sequence
  Description of Artificial Sequence: Synthetic oligonucleotide
  Sense strand starting at position 2859 of SEQ ID NO: 1882954
uagagcauuuaaucugugu

SEQ ID NO: 2159915 - RNA, 19 nt, Artificial Sequence
  Description of Artificial Sequence: Synthetic oligonucleotide
  Antisense strand to SEQ ID NO: 2159914
acacagauuaaaugcucua

SEQ ID NO: 2159916 - RNA, 19 nt, Artificial Sequence
  Description of Artificial Sequence: Synthetic oligonucleotide
  Sense strand starting at position 2917 of SEQ ID NO: 1882954
ccaaucuaauuuggugaaa

SEQ ID NO: 2159917 - RNA, 19 nt, Artificial Sequence
  Description of Artificial Sequence: Synthetic oligonucleotide
  Antisense strand to SEQ ID NO: 2159916
uuucaccaaauuagauugg

SEQ ID NO: 2159918 - RNA, 19 nt, Artificial Sequence
  Description of Artificial Sequence: Synthetic oligonucleotide
  Sense strand starting at position 3036 of SEQ ID NO: 1882954
aacucugaaugagauggaa

SEQ ID NO: 2159919 - RNA, 19 nt, Artificial Sequence
  Description of Artificial Sequence: Synthetic oligonucleotide
  Antisense strand to SEQ ID NO: 2159918
uuccaucucauucagaguu

SEQ ID NO: 2159920 - RNA, 19 nt, Artificial Sequence
  Description of Artificial Sequence: Synthetic oligonucleotide
  Sense strand starting at position 3201 of SEQ ID NO: 1882954
ugcauccuucugggaacuu

SEQ ID NO: 2159921 - RNA, 19 nt, Artificial Sequence
  Description of Artificial Sequence: Synthetic oligonucleotide
  Antisense strand to SEQ ID NO: 2159920
aaguucccagaaggaugca

SEQ ID NO: 2159922 - RNA, 19 nt, Artificial Sequence
  Description of Artificial Sequence: Synthetic oligonucleotide
  Sense strand starting at position 3279 of SEQ ID NO: 1882954
uggaguacucuuggucaau

SEQ ID NO: 2159923 - RNA, 19 nt, Artificial Sequence
  Description of Artificial Sequence: Synthetic oligonucleotide
  Antisense strand to SEQ ID NO: 2159922
auugaccaagaguacucca

SEQ ID NO: 2159924 - RNA, 19 nt, Artificial Sequence
  Description of Artificial Sequence: Synthetic oligonucleotide
  Sense strand starting at position 3280 of SEQ ID NO: 1882954
ggaguacucuuggucaaua

SEQ ID NO: 2159925 - RNA, 19 nt, Artificial Sequence
  Description of Artificial Sequence: Synthetic oligonucleotide
  Antisense strand to SEQ ID NO: 2159924
uauugaccaagaguacucc

SEQ ID NO: 2159926 - RNA, 19 nt, Artificial Sequence
  Description of Artificial Sequence: Synthetic oligonucleotide
  Sense strand starting at position 3281 of SEQ ID NO: 1882954
gaguacucuuggucaauaa

SEQ ID NO: 2159927 - RNA, 19 nt, Artificial Sequence
  Description of Artificial Sequence: Synthetic oligonucleotide
  Antisense strand to SEQ ID NO: 2159926
uuauugaccaagaguacuc

SEQ ID NO: 2159928 - RNA, 19 nt, Artificial Sequence
  Description of Artificial Sequence: Synthetic oligonucleotide
  Sense strand starting at position 3282 of SEQ ID NO: 1882954
aguacucuuggucaauaaa

SEQ ID NO: 2159929 - RNA, 19 nt, Artificial Sequence
  Description of Artificial Sequence: Synthetic oligonucleotide
  Antisense strand to SEQ ID NO: 2159928
uuuauugaccaagaguacu

SEQ ID NO: 2159930 - RNA, 19 nt, Artificial Sequence
  Description of Artificial Sequence: Synthetic oligonucleotide
  Sense strand starting at position 3285 of SEQ ID NO: 1882954
acucuuggucaauaaaguu

SEQ ID NO: 2159931 - RNA, 19 nt, Artificial Sequence
  Description of Artificial Sequence: Synthetic oligonucleotide
  Antisense strand to SEQ ID NO: 2159930
aacuuuauugaccaagagu

SEQ ID NO: 2159932 - RNA, 19 nt, Artificial Sequence
  Description of Artificial Sequence: Synthetic oligonucleotide
  Sense strand starting at position 3300 of SEQ ID NO: 1882954
aguugcuuccaguauuagu

SEQ ID NO: 2159933 - RNA, 19 nt, Artificial Sequence
  Description of Artificial Sequence: Synthetic oligonucleotide
  Antisense strand to SEQ ID NO: 2159932
acuaauacuggaagcaacu

SEQ ID NO: 2159934 - RNA, 19 nt, Artificial Sequence
  Description of Artificial Sequence: Synthetic oligonucleotide
  Sense strand starting at position 3394 of SEQ ID NO: 1882954
guggaacacuagucuauaa

SEQ ID NO: 2159935 - RNA, 19 nt, Artificial Sequence
  Description of Artificial Sequence: Synthetic oligonucleotide
  Antisense strand to SEQ ID NO: 2159934
uuauagacuaguguuccac

SEQ ID NO: 2159936 - RNA, 19 nt, Artificial Sequence
  Description of Artificial Sequence: Synthetic oligonucleotide
  Sense strand starting at position 3522 of SEQ ID NO: 1882954
aguacugguuucuuacuau

SEQ ID NO: 2159937 - RNA, 19 nt, Artificial Sequence
  Description of Artificial Sequence: Synthetic oligonucleotide
  Antisense strand to SEQ ID NO: 2159936
auaguaagaaaccaguacu

SEQ ID NO: 2159938 - RNA, 19 nt, Artificial Sequence
  Description of Artificial Sequence: Synthetic oligonucleotide
  Sense strand starting at position 3525 of SEQ ID NO: 1882954
acugguuucuuacuauuau

SEQ ID NO: 2159939 - RNA, 19 nt, Artificial Sequence
  Description of Artificial Sequence: Synthetic oligonucleotide
  Antisense strand to SEQ ID NO: 2159938
auaauaguaagaaaccagu

SEQ ID NO: 2159940 - RNA, 19 nt, Artificial Sequence
  Description of Artificial Sequence: Synthetic oligonucleotide
  Sense strand starting at position 3540 of SEQ ID NO: 1882954
uuauauuucuugccauugu

SEQ ID NO: 2159941 - RNA, 19 nt, Artificial Sequence
  Description of Artificial Sequence: Synthetic oligonucleotide
  Antisense strand to SEQ ID NO: 2159940
acaauggcaagaaauauaa

SEQ ID NO: 2159942 - RNA, 19 nt, Artificial Sequence
  Description of Artificial Sequence: Synthetic oligonucleotide
  Sense strand starting at position 3544 of SEQ ID NO: 1882954
auuucuugccauuguuaca

SEQ ID NO: 2159943 - RNA, 19 nt, Artificial Sequence
  Description of Artificial Sequence: Synthetic oligonucleotide
  Antisense strand to SEQ ID NO: 2159942
uguaacaauggcaagaaau

SEQ ID NO: 2159944 - RNA, 19 nt, Artificial Sequence
  Description of Artificial Sequence: Synthetic oligonucleotide
  Sense strand starting at position 3669 of SEQ ID NO: 1882954
uguaaugugcuacaugcau

SEQ ID NO: 2159945 - RNA, 19 nt, Artificial Sequence
  Description of Artificial Sequence: Synthetic oligonucleotide
  Antisense strand to SEQ ID NO: 2159944
augcauguagcacauuaca

SEQ ID NO: 2159946 - RNA, 19 nt, Artificial Sequence
  Description of Artificial Sequence: Synthetic oligonucleotide
  Sense strand starting at position 3979 of SEQ ID NO: 1882954
ggucuugggucaguccaaa

SEQ ID NO: 2159947 - RNA, 19 nt, Artificial Sequence
  Description of Artificial Sequence: Synthetic oligonucleotide
  Antisense strand to SEQ ID NO: 2159946
uuuggacugacccaagacc

SEQ ID NO: 2159948 - RNA, 19 nt, Artificial Sequence
  Description of Artificial Sequence: Synthetic oligonucleotide
  Sense strand starting at position 67 of SEQ ID NO: 1882955
uuaacuggcuguuucugaa

SEQ ID NO: 2159949 - RNA, 19 nt, Artificial Sequence
  Description of Artificial Sequence: Synthetic oligonucleotide
  Antisense strand to SEQ ID NO: 2159948
uucagaaacagccaguuaa

SEQ ID NO: 2159950 - RNA, 19 nt, Artificial Sequence
  Description of Artificial Sequence: Synthetic oligonucleotide
  Sense strand starting at position 74 of SEQ ID NO: 1882955
gcuguuucugaaggucaaa

SEQ ID NO: 2159951 - RNA, 19 nt, Artificial Sequence
  Description of Artificial Sequence: Synthetic oligonucleotide
  Antisense strand to SEQ ID NO: 2159950
uuugaccuucagaaacagc

SEQ ID NO: 2159952 - RNA, 19 nt, Artificial Sequence
  Description of Artificial Sequence: Synthetic oligonucleotide
  Sense strand starting at position 116 of SEQ ID NO: 1882955
ucuuuaaaccgucagagag

SEQ ID NO: 2159953 - RNA, 19 nt, Artificial Sequence
  Description of Artificial Sequence: Synthetic oligonucleotide
  Antisense strand to SEQ ID NO: 2159952
cucucugacgguuuaaaga

SEQ ID NO: 2159954 - RNA, 19 nt, Artificial Sequence
  Description of Artificial Sequence: Synthetic oligonucleotide
  Sense strand starting at position 141 of SEQ ID NO: 1882955
gcuucuacugaggaaugca

SEQ ID NO: 2159955 - RNA, 19 nt, Artificial Sequence
  Description of Artificial Sequence: Synthetic oligonucleotide
  Antisense strand to SEQ ID NO: 2159954
ugcauuccucaguagaagc

SEQ ID NO: 2159956 - RNA, 19 nt, Artificial Sequence
  Description of Artificial Sequence: Synthetic oligonucleotide
  Sense strand starting at position 161 of SEQ ID NO: 1882955
ccaaccugugguuaccaau

SEQ ID NO: 2159957 - RNA, 19 nt, Artificial Sequence
  Description of Artificial Sequence: Synthetic oligonucleotide
  Antisense strand to SEQ ID NO: 2159956
auugguaaccacagguugg

SEQ ID NO: 2159958 - RNA, 19 nt, Artificial Sequence
  Description of Artificial Sequence: Synthetic oligonucleotide
  Sense strand starting at position 190 of SEQ ID NO: 1882955
augagaugcuccuuccaau

SEQ ID NO: 2159959 - RNA, 19 nt, Artificial Sequence
  Description of Artificial Sequence: Synthetic oligonucleotide
  Antisense strand to SEQ ID NO: 2159958
auuggaaggagcaucucau

SEQ ID NO: 2159960 - RNA, 19 nt, Artificial Sequence
  Description of Artificial Sequence: Synthetic oligonucleotide
  Sense strand starting at position 266 of SEQ ID NO: 1882955
cacauaucuggauguagag

SEQ ID NO: 2159961 - RNA, 19 nt, Artificial Sequence
  Description of Artificial Sequence: Synthetic oligonucleotide
  Antisense strand to SEQ ID NO: 2159960
cucuacauccagauaugug

SEQ ID NO: 2159962 - RNA, 19 nt, Artificial Sequence
  Description of Artificial Sequence: Synthetic oligonucleotide
  Sense strand starting at position 378 of SEQ ID NO: 1882955
cucauaaagcucugaagca

SEQ ID NO: 2159963 - RNA, 19 nt, Artificial Sequence
  Description of Artificial Sequence: Synthetic oligonucleotide
  Antisense strand to SEQ ID NO: 2159962
ugcuucagagcuuuaugag

SEQ ID NO: 2159964 - RNA, 19 nt, Artificial Sequence
  Description of Artificial Sequence: Synthetic oligonucleotide
  Sense strand starting at position 991 of SEQ ID NO: 1882955
gugggacugaguuagccaa

SEQ ID NO: 2159965 - RNA, 19 nt, Artificial Sequence
  Description of Artificial Sequence: Synthetic oligonucleotide
  Antisense strand to SEQ ID NO: 2159964
uuggcuaacucagucccac

SEQ ID NO: 2159966 - RNA, 19 nt, Artificial Sequence
  Description of Artificial Sequence: Synthetic oligonucleotide
  Sense strand starting at position 998 of SEQ ID NO: 1882955
ugaguuagccaaugaucuc

SEQ ID NO: 2159967 - RNA, 19 nt, Artificial Sequence
  Description of Artificial Sequence: Synthetic oligonucleotide
  Antisense strand to SEQ ID NO: 2159966
gagaucauuggcuaacuca

SEQ ID NO: 2159968 - RNA, 19 nt, Artificial Sequence
  Description of Artificial Sequence: Synthetic oligonucleotide
  Sense strand starting at position 1142 of SEQ ID NO: 1882955
gacugcugucacuggacaa

SEQ ID NO: 2159969 - RNA, 19 nt, Artificial Sequence
  Description of Artificial Sequence: Synthetic oligonucleotide
  Antisense strand to SEQ ID NO: 2159968
uuguccagugacagcaguc

SEQ ID NO: 2159970 - RNA, 19 nt, Artificial Sequence
  Description of Artificial Sequence: Synthetic oligonucleotide
  Sense strand starting at position 1146 of SEQ ID NO: 1882955
gcugucacuggacaacaau

SEQ ID NO: 2159971 - RNA, 19 nt, Artificial Sequence
  Description of Artificial Sequence: Synthetic oligonucleotide
  Antisense strand to SEQ ID NO: 2159970
auuguuguccagugacagc

SEQ ID NO: 2159972 - RNA, 19 nt, Artificial Sequence
  Description of Artificial Sequence: Synthetic oligonucleotide
  Sense strand starting at position 1222 of SEQ ID NO: 1882955
ugacuugcuuccuccuaga

SEQ ID NO: 2159973 - RNA, 19 nt, Artificial Sequence
  Description of Artificial Sequence: Synthetic oligonucleotide
  Antisense strand to SEQ ID NO: 2159972
ucuaggaggaagcaaguca

SEQ ID NO: 2159974 - RNA, 19 nt, Artificial Sequence
  Description of Artificial Sequence: Synthetic oligonucleotide
  Sense strand starting at position 1504 of SEQ ID NO: 1882955
gagaaauguuccucaggca

SEQ ID NO: 2159975 - RNA, 19 nt, Artificial Sequence
  Description of Artificial Sequence: Synthetic oligonucleotide
  Antisense strand to SEQ ID NO: 2159974
ugccugaggaacauuucuc

SEQ ID NO: 2159976 - RNA, 19 nt, Artificial Sequence
  Description of Artificial Sequence: Synthetic oligonucleotide
  Sense strand starting at position 1505 of SEQ ID NO: 1882955
agaaauguuccucaggcaa

SEQ ID NO: 2159977 - RNA, 19 nt, Artificial Sequence
  Description of Artificial Sequence: Synthetic oligonucleotide
  Antisense strand to SEQ ID NO: 2159976
uugccugaggaacauuucu

SEQ ID NO: 2159978 - RNA, 19 nt, Artificial Sequence
  Description of Artificial Sequence: Synthetic oligonucleotide
  Sense strand starting at position 1574 of SEQ ID NO: 1882955
agaagcauauagcugagua

SEQ ID NO: 2159979 - RNA, 19 nt, Artificial Sequence
  Description of Artificial Sequence: Synthetic oligonucleotide
  Antisense strand to SEQ ID NO: 2159978
uacucagcuauaugcuucu

SEQ ID NO: 2159980 - RNA, 19 nt, Artificial Sequence
  Description of Artificial Sequence: Synthetic oligonucleotide
  Sense strand starting at position 1578 of SEQ ID NO: 1882955
gcauauagcugaguaggaa

SEQ ID NO: 2159981 - RNA, 19 nt, Artificial Sequence
  Description of Artificial Sequence: Synthetic oligonucleotide
  Antisense strand to SEQ ID NO: 2159980
uuccuacucagcuauaugc

SEQ ID NO: 2159982 - RNA, 19 nt, Artificial Sequence
  Description of Artificial Sequence: Synthetic oligonucleotide
  Sense strand starting at position 1709 of SEQ ID NO: 1882955
auagcuauacguggaaaga

SEQ ID NO: 2159983 - RNA, 19 nt, Artificial Sequence
  Description of Artificial Sequence: Synthetic oligonucleotide
  Antisense strand to SEQ ID NO: 2159982
ucuuuccacguauagcuau

SEQ ID NO: 2159984 - RNA, 19 nt, Artificial Sequence
  Description of Artificial Sequence: Synthetic oligonucleotide
  Sense strand starting at position 1868 of SEQ ID NO: 1882955
agagacuguuacucuccaa

SEQ ID NO: 2159985 - RNA, 19 nt, Artificial Sequence
  Description of Artificial Sequence: Synthetic oligonucleotide
  Antisense strand to SEQ ID NO: 2159984
uuggagaguaacagucucu

SEQ ID NO: 2159986 - RNA, 19 nt, Artificial Sequence
  Description of Artificial Sequence: Synthetic oligonucleotide
  Sense strand starting at position 1944 of SEQ ID NO: 1882955
guggaaaccugauuaauau

SEQ ID NO: 2159987 - RNA, 19 nt, Artificial Sequence
  Description of Artificial Sequence: Synthetic oligonucleotide
  Antisense strand to SEQ ID NO: 2159986
auauuaaucagguuuccac

SEQ ID NO: 2159988 - RNA, 19 nt, Artificial Sequence
  Description of Artificial Sequence: Synthetic oligonucleotide
  Sense strand starting at position 2074 of SEQ ID NO: 1882955
ccugguuaguccucugaca

SEQ ID NO: 2159989 - RNA, 19 nt, Artificial Sequence
  Description of Artificial Sequence: Synthetic oligonucleotide
  Antisense strand to SEQ ID NO: 2159988
ugucagaggacuaaccagg

SEQ ID NO: 2159990 - RNA, 19 nt, Artificial Sequence
  Description of Artificial Sequence: Synthetic oligonucleotide
  Sense strand starting at position 2076 of SEQ ID NO: 1882955
ugguuaguccucugacacu

SEQ ID NO: 2159991 - RNA, 19 nt, Artificial Sequence
  Description of Artificial Sequence: Synthetic oligonucleotide
  Antisense strand to SEQ ID NO: 2159990
agugucagaggacuaacca

SEQ ID NO: 2159992 - RNA, 19 nt, Artificial Sequence
  Description of Artificial Sequence: Synthetic oligonucleotide
  Sense strand starting at position 2089 of SEQ ID NO: 1882955
gacacuccgcaucaaaguu

SEQ ID NO: 2159993 - RNA, 19 nt, Artificial Sequence
  Description of Artificial Sequence: Synthetic oligonucleotide
  Antisense strand to SEQ ID NO: 2159992
aacuuugaugcggaguguc

SEQ ID NO: 2159994 - RNA, 19 nt, Artificial Sequence
  Description of Artificial Sequence: Synthetic oligonucleotide
  Sense strand starting at position 2152 of SEQ ID NO: 1882955
cccugaaauguuuaaacgu

SEQ ID NO: 2159995 - RNA, 19 nt, Artificial Sequence
  Description of Artificial Sequence: Synthetic oligonucleotide
  Antisense strand to SEQ ID NO: 2159994
acguuuaaacauuucaggg

SEQ ID NO: 2159996 - RNA, 19 nt, Artificial Sequence
  Description of Artificial Sequence: Synthetic oligonucleotide
  Sense strand starting at position 2284 of SEQ ID NO: 1882955
acagucuugucucuaagac

SEQ ID NO: 2159997 - RNA, 19 nt, Artificial Sequence
  Description of Artificial Sequence: Synthetic oligonucleotide
  Antisense strand to SEQ ID NO: 2159996
gucuuagagacaagacugu

SEQ ID NO: 2159998 - RNA, 19 nt, Artificial Sequence
  Description of Artificial Sequence: Synthetic oligonucleotide
  Sense strand starting at position 2296 of SEQ ID NO: 1882955
cuaagacuuucucuagguc

SEQ ID NO: 2159999 - RNA, 19 nt, Artificial Sequence
  Description of Artificial Sequence: Synthetic oligonucleotide
  Antisense strand to SEQ ID NO: 2159998
gaccuagagaaagucuuag

SEQ ID NO: 2160000 - RNA, 19 nt, Artificial Sequence
  Description of Artificial Sequence: Synthetic oligonucleotide
  Sense strand starting at position 2458 of SEQ ID NO: 1882955
cugagcuuuagugagguca

SEQ ID NO: 2160001 - RNA, 19 nt, Artificial Sequence
  Description of Artificial Sequence: Synthetic oligonucleotide
  Antisense strand to SEQ ID NO: 2160000
ugaccucacuaaagcucag

SEQ ID NO: 2160002 - RNA, 19 nt, Artificial Sequence
  Description of Artificial Sequence: Synthetic oligonucleotide
  Sense strand starting at position 2466 of SEQ ID NO: 1882955
uagugaggucacuacauuc

SEQ ID NO: 2160003 - RNA, 19 nt, Artificial Sequence
  Description of Artificial Sequence: Synthetic oligonucleotide
  Antisense strand to SEQ ID NO: 2160002
gaauguagugaccucacua

SEQ ID NO: 2160004 - RNA, 19 nt, Artificial Sequence
  Description of Artificial Sequence: Synthetic oligonucleotide
  Sense strand starting at position 2608 of SEQ ID NO: 1882955
agagaaagcuuucugcaga

SEQ ID NO: 2160005 - RNA, 19 nt, Artificial Sequence
  Description of Artificial Sequence: Synthetic oligonucleotide
  Antisense strand to SEQ ID NO: 2160004
ucugcagaaagcuuucucu

SEQ ID NO: 2160006 - RNA, 19 nt, Artificial Sequence
  Description of Artificial Sequence: Synthetic oligonucleotide
  Sense strand starting at position 2611 of SEQ ID NO: 1882955
gaaagcuuucugcagauug

SEQ ID NO: 2160007 - RNA, 19 nt, Artificial Sequence
  Description of Artificial Sequence: Synthetic oligonucleotide
  Antisense strand to SEQ ID NO: 2160006
caaucugcagaaagcuuuc

SEQ ID NO: 2160008 - RNA, 19 nt, Artificial Sequence
  Description of Artificial Sequence: Synthetic oligonucleotide
  Sense strand starting at position 2653 of SEQ ID NO: 1882955
cagucuauagcuugggaua

SEQ ID NO: 2160009 - RNA, 19 nt, Artificial Sequence
  Description of Artificial Sequence: Synthetic oligonucleotide
  Antisense strand to SEQ ID NO: 2160008
uaucccaagcuauagacug

SEQ ID NO: 2160010 - RNA, 19 nt, Artificial Sequence
  Description of Artificial Sequence: Synthetic oligonucleotide
  Sense strand starting at position 2654 of SEQ ID NO: 1882955
agucuauagcuugggauac

SEQ ID NO: 2160011 - RNA, 19 nt, Artificial Sequence
  Description of Artificial Sequence: Synthetic oligonucleotide
  Antisense strand to SEQ ID NO: 2160010
guaucccaagcuauagacu

SEQ ID NO: 2160012 - RNA, 19 nt, Artificial Sequence
  Description of Artificial Sequence: Synthetic oligonucleotide
  Sense strand starting at position 2757 of SEQ ID NO: 1882955
cccauauguguguaagcua

SEQ ID NO: 2160013 - RNA, 19 nt, Artificial Sequence
  Description of Artificial Sequence: Synthetic oligonucleotide
  Antisense strand to SEQ ID NO: 2160012
uagcuuacacacauauggg

SEQ ID NO: 2160014 - RNA, 19 nt, Artificial Sequence
  Description of Artificial Sequence: Synthetic oligonucleotide
  Sense strand starting at position 2792 of SEQ ID NO: 1882955
aaagaucuugagugacagu

SEQ ID NO: 2160015 - RNA, 19 nt, Artificial Sequence
  Description of Artificial Sequence: Synthetic oligonucleotide
  Antisense strand to SEQ ID NO: 2160014
acugucacucaagaucuuu

SEQ ID NO: 2160016 - RNA, 19 nt, Artificial Sequence
  Description of Artificial Sequence: Synthetic oligonucleotide
  Sense strand starting at position 3144 of SEQ ID NO: 1882955
cuugguaggcuguaaauua

SEQ ID NO: 2160017 - RNA, 19 nt, Artificial Sequence
  Description of Artificial Sequence: Synthetic oligonucleotide
  Antisense strand to SEQ ID NO: 2160016
uaauuuacagccuaccaag

SEQ ID NO: 2160018 - RNA, 19 nt, Artificial Sequence
  Description of Artificial Sequence: Synthetic oligonucleotide
  Sense strand starting at position 3530 of SEQ ID NO: 1882955
uuaugauucccuggcuuac

SEQ ID NO: 2160019 - RNA, 19 nt, Artificial Sequence
  Description of Artificial Sequence: Synthetic oligonucleotide
  Antisense strand to SEQ ID NO: 2160018
guaagccagggaaucauaa

SEQ ID NO: 2160020 - RNA, 19 nt, Artificial Sequence
  Description of Artificial Sequence: Synthetic oligonucleotide
  Sense strand starting at position 3706 of SEQ ID NO: 1882955
aggauaugcaugcacugaa

SEQ ID NO: 2160021 - RNA, 19 nt, Artificial Sequence
  Description of Artificial Sequence: Synthetic oligonucleotide
  Antisense strand to SEQ ID NO: 2160020
uucagugcaugcauauccu

SEQ ID NO: 2160022 - RNA, 19 nt, Artificial Sequence
  Description of Artificial Sequence: Synthetic oligonucleotide
  Sense strand starting at position 3709 of SEQ ID NO: 1882955
auaugcaugcacugaaaca

SEQ ID NO: 2160023 - RNA, 19 nt, Artificial Sequence
  Description of Artificial Sequence: Synthetic oligonucleotide
  Antisense strand to SEQ ID NO: 2160022
uguuucagugcaugcauau

SEQ ID NO: 2160024 - RNA, 19 nt, Artificial Sequence
  Description of Artificial Sequence: Synthetic oligonucleotide
  Sense strand starting at position 3738 of SEQ ID NO: 1882955
gaaguugugcagggacaca

SEQ ID NO: 2160025 - RNA, 19 nt, Artificial Sequence
  Description of Artificial Sequence: Synthetic oligonucleotide
  Antisense strand to SEQ ID NO: 2160024
ugugucccugcacaacuuc

SEQ ID NO: 2160026 - RNA, 19 nt, Artificial Sequence
  Description of Artificial Sequence: Synthetic oligonucleotide
  Sense strand starting at position 3895 of SEQ ID NO: 1882955
uccugagccuugucauuuc

SEQ ID NO: 2160027 - RNA, 19 nt, Artificial Sequence
  Description of Artificial Sequence: Synthetic oligonucleotide
  Antisense strand to SEQ ID NO: 2160026
gaaaugacaaggcucagga

SEQ ID NO: 2160028 - RNA, 19 nt, Artificial Sequence
  Description of Artificial Sequence: Synthetic oligonucleotide
  Sense strand starting at position 8 of SEQ ID NO: 1882956
aagucuggagguuggaaau

SEQ ID NO: 2160029 - RNA, 19 nt, Artificial Sequence
  Description of Artificial Sequence: Synthetic oligonucleotide
  Antisense strand to SEQ ID NO: 2160028
auuuccaaccuccagacuu

SEQ ID NO: 2160030 - RNA, 19 nt, Artificial Sequence
  Description of Artificial Sequence: Synthetic oligonucleotide
  Sense strand starting at position 19 of SEQ ID NO: 1882956
uuggaaaugacaugcauga

SEQ ID NO: 2160031 - RNA, 19 nt, Artificial Sequence
  Description of Artificial Sequence: Synthetic oligonucleotide
  Antisense strand to SEQ ID NO: 2160030
ucaugcaugucauuuccaa

SEQ ID NO: 2160032 - RNA, 19 nt, Artificial Sequence
  Description of Artificial Sequence: Synthetic oligonucleotide
  Sense strand starting at position 107 of SEQ ID NO: 1882956
ucaagacugcauuaucuga

SEQ ID NO: 2160033 - RNA, 19 nt, Artificial Sequence
  Description of Artificial Sequence: Synthetic oligonucleotide
  Antisense strand to SEQ ID NO: 2160032
ucagauaaugcagucuuga

SEQ ID NO: 2160034 - RNA, 19 nt, Artificial Sequence
  Description of Artificial Sequence: Synthetic oligonucleotide
  Sense strand starting at position 260 of SEQ ID NO: 1882956
ucauguugugaggaugaac

SEQ ID NO: 2160035 - RNA, 19 nt, Artificial Sequence
  Description of Artificial Sequence: Synthetic oligonucleotide
  Antisense strand to SEQ ID NO: 2160034
guucauccucacaacauga

SEQ ID NO: 2160036 - RNA, 19 nt, Artificial Sequence
  Description of Artificial Sequence: Synthetic oligonucleotide
  Sense strand starting at position 394 of SEQ ID NO: 1882956
aucagugaagguugugaaa

SEQ ID NO: 2160037 - RNA, 19 nt, Artificial Sequence
  Description of Artificial Sequence: Synthetic oligonucleotide
  Antisense strand to SEQ ID NO: 2160036
uuucacaaccuucacugau

SEQ ID NO: 2160038 - RNA, 19 nt, Artificial Sequence
  Description of Artificial Sequence: Synthetic oligonucleotide
  Sense strand starting at position 445 of SEQ ID NO: 1882956
aucagauguccacagguua

SEQ ID NO: 2160039 - RNA, 19 nt, Artificial Sequence
  Description of Artificial Sequence: Synthetic oligonucleotide
  Antisense strand to SEQ ID NO: 2160038
uaaccuguggacaucugau

SEQ ID NO: 2160040 - RNA, 19 nt, Artificial Sequence
  Description of Artificial Sequence: Synthetic oligonucleotide
  Sense strand starting at position 515 of SEQ ID NO: 1882956
uagaucaguccauguugga

SEQ ID NO: 2160041 - RNA, 19 nt, Artificial Sequence
  Description of Artificial Sequence: Synthetic oligonucleotide
  Antisense strand to SEQ ID NO: 2160040
uccaacauggacugaucua

SEQ ID NO: 2160042 - RNA, 19 nt, Artificial Sequence
  Description of Artificial Sequence: Synthetic oligonucleotide
  Sense strand starting at position 626 of SEQ ID NO: 1882956
cccagauaauuagccuaga

SEQ ID NO: 2160043 - RNA, 19 nt, Artificial Sequence
  Description of Artificial Sequence: Synthetic oligonucleotide
  Antisense strand to SEQ ID NO: 2160042
ucuaggcuaauuaucuggg

SEQ ID NO: 2160044 - RNA, 19 nt, Artificial Sequence
  Description of Artificial Sequence: Synthetic oligonucleotide
  Sense strand starting at position 627 of SEQ ID NO: 1882956
ccagauaauuagccuagau

SEQ ID NO: 2160045 - RNA, 19 nt, Artificial Sequence
  Description of Artificial Sequence: Synthetic oligonucleotide
  Antisense strand to SEQ ID NO: 2160044
aucuaggcuaauuaucugg

SEQ ID NO: 2160046 - RNA, 19 nt, Artificial Sequence
  Description of Artificial Sequence: Synthetic oligonucleotide
  Sense strand starting at position 769 of SEQ ID NO: 1882956
gccauccuaguggaaauau

SEQ ID NO: 2160047 - RNA, 19 nt, Artificial Sequence
  Description of Artificial Sequence: Synthetic oligonucleotide
  Antisense strand to SEQ ID NO: 2160046
auauuuccacuaggauggc

SEQ ID NO: 2160048 - RNA, 19 nt, Artificial Sequence
  Description of Artificial Sequence: Synthetic oligonucleotide
  Sense strand starting at position 860 of SEQ ID NO: 1882956
ugugaauaagguugacacu

SEQ ID NO: 2160049 - RNA, 19 nt, Artificial Sequence
  Description of Artificial Sequence: Synthetic oligonucleotide
  Antisense strand to SEQ ID NO: 2160048
agugucaaccuuauucaca

SEQ ID NO: 2160050 - RNA, 19 nt, Artificial Sequence
  Description of Artificial Sequence: Synthetic oligonucleotide
  Sense strand starting at position 869 of SEQ ID NO: 1882956
gguugacacuacucuuuaa

SEQ ID NO: 2160051 - RNA, 19 nt, Artificial Sequence
  Description of Artificial Sequence: Synthetic oligonucleotide
  Antisense strand to SEQ ID NO: 2160050
uuaaagaguagugucaacc

SEQ ID NO: 2160052 - RNA, 19 nt, Artificial Sequence
  Description of Artificial Sequence: Synthetic oligonucleotide
  Sense strand starting at position 919 of SEQ ID NO: 1882956
uugaauuuaugucagaaga

SEQ ID NO: 2160053 - RNA, 19 nt, Artificial Sequence
  Description of Artificial Sequence: Synthetic oligonucleotide
  Antisense strand to SEQ ID NO: 2160052
ucuucugacauaaauucaa

SEQ ID NO: 2160054 - RNA, 19 nt, Artificial Sequence
  Description of Artificial Sequence: Synthetic oligonucleotide
  Sense strand starting at position 921 of SEQ ID NO: 1882956
gaauuuaugucagaagaga

SEQ ID NO: 2160055 - RNA, 19 nt, Artificial Sequence
  Description of Artificial Sequence: Synthetic oligonucleotide
  Antisense strand to SEQ ID NO: 2160054
ucucuucugacauaaauuc

SEQ ID NO: 2160056 - RNA, 19 nt, Artificial Sequence
  Description of Artificial Sequence: Synthetic oligonucleotide
  Sense strand starting at position 987 of SEQ ID NO: 1882956
aguguagcugaacacaauu

SEQ ID NO: 2160057 - RNA, 19 nt, Artificial Sequence
  Description of Artificial Sequence: Synthetic oligonucleotide
  Antisense strand to SEQ ID NO: 2160056
aauuguguucagcuacacu

SEQ ID NO: 2160058 - RNA, 19 nt, Artificial Sequence
  Description of Artificial Sequence: Synthetic oligonucleotide
  Sense strand starting at position 1038 of SEQ ID NO: 1882956
ucagaucagucagcaaaua

SEQ ID NO: 2160059 - RNA, 19 nt, Artificial Sequence
  Description of Artificial Sequence: Synthetic oligonucleotide
  Antisense strand to SEQ ID NO: 2160058
uauuugcugacugaucuga

SEQ ID NO: 2160060 - RNA, 19 nt, Artificial Sequence
  Description of Artificial Sequence: Synthetic oligonucleotide
  Sense strand starting at position 1065 of SEQ ID NO: 1882956
acuugaugagcccaacauu

SEQ ID NO: 2160061 - RNA, 19 nt, Artificial Sequence
  Description of Artificial Sequence: Synthetic oligonucleotide
  Antisense strand to SEQ ID NO: 2160060
aauguugggcucaucaagu

SEQ ID NO: 2160062 - RNA, 19 nt, Artificial Sequence
  Description of Artificial Sequence: Synthetic oligonucleotide
  Sense strand starting at position 1504 of SEQ ID NO: 1882956
gaaugaucauuugauguau

SEQ ID NO: 2160063 - RNA, 19 nt, Artificial Sequence
  Description of Artificial Sequence: Synthetic oligonucleotide
  Antisense strand to SEQ ID NO: 2160062
auacaucaaaugaucauuc

SEQ ID NO: 2160064 - RNA, 19 nt, Artificial Sequence
  Description of Artificial Sequence: Synthetic oligonucleotide
  Sense strand starting at position 1609 of SEQ ID NO: 1882956
uguauuagauaugcuaaac

SEQ ID NO: 2160065 - RNA, 19 nt, Artificial Sequence
  Description of Artificial Sequence: Synthetic oligonucleotide
  Antisense strand to SEQ ID NO: 2160064
guuuagcauaucuaauaca

SEQ ID NO: 2160066 - RNA, 19 nt, Artificial Sequence
  Description of Artificial Sequence: Synthetic oligonucleotide
  Sense strand starting at position 1620 of SEQ ID NO: 1882956
ugcuaaacacugggaagua

SEQ ID NO: 2160067 - RNA, 19 nt, Artificial Sequence
  Description of Artificial Sequence: Synthetic oligonucleotide
  Antisense strand to SEQ ID NO: 2160066
uacuucccaguguuuagca

SEQ ID NO: 2160068 - RNA, 19 nt, Artificial Sequence
  Description of Artificial Sequence: Synthetic oligonucleotide
  Sense strand starting at position 1858 of SEQ ID NO: 1882956
uacgacaaucuguauacga

SEQ ID NO: 2160069 - RNA, 19 nt, Artificial Sequence
  Description of Artificial Sequence: Synthetic oligonucleotide
  Antisense strand to SEQ ID NO: 2160068
ucguauacagauugucgua

SEQ ID NO: 2160070 - RNA, 19 nt, Artificial Sequence
  Description of Artificial Sequence: Synthetic oligonucleotide
  Sense strand starting at position 1860 of SEQ ID NO: 1882956
cgacaaucuguauacgagu

SEQ ID NO: 2160071 - RNA, 19 nt, Artificial Sequence
  Description of Artificial Sequence: Synthetic oligonucleotide
  Antisense strand to SEQ ID NO: 2160070
acucguauacagauugucg

SEQ ID NO: 2160072 - RNA, 19 nt, Artificial Sequence
  Description of Artificial Sequence: Synthetic oligonucleotide
  Sense strand starting at position 1894 of SEQ ID NO: 1882956
ugaugaaaguagcuuccau

SEQ ID NO: 2160073 - RNA, 19 nt, Artificial Sequence
  Description of Artificial Sequence: Synthetic oligonucleotide
  Antisense strand to SEQ ID NO: 2160072
auggaagcuacuuucauca

SEQ ID NO: 2160074 - RNA, 19 nt, Artificial Sequence
  Description of Artificial Sequence: Synthetic oligonucleotide
  Sense strand starting at position 2029 of SEQ ID NO: 1882956
aguaauaaucugcaucagu

SEQ ID NO: 2160075 - RNA, 19 nt, Artificial Sequence
  Description of Artificial Sequence: Synthetic oligonucleotide
  Antisense strand to SEQ ID NO: 2160074
acugaugcagauuauuacu

SEQ ID NO: 2160076 - RNA, 19 nt, Artificial Sequence
  Description of Artificial Sequence: Synthetic oligonucleotide
  Sense strand starting at position 2144 of SEQ ID NO: 1882956
gggcauuacguuuauacau

SEQ ID NO: 2160077 - RNA, 19 nt, Artificial Sequence
  Description of Artificial Sequence: Synthetic oligonucleotide
  Antisense strand to SEQ ID NO: 2160076
auguauaaacguaaugccc

SEQ ID NO: 2160078 - RNA, 19 nt, Artificial Sequence
  Description of Artificial Sequence: Synthetic oligonucleotide
  Sense strand starting at position 2221 of SEQ ID NO: 1882956
aucugaggaugcuuaggua

SEQ ID NO: 2160079 - RNA, 19 nt, Artificial Sequence
  Description of Artificial Sequence: Synthetic oligonucleotide
  Antisense strand to SEQ ID NO: 2160078
uaccuaagcauccucagau

SEQ ID NO: 2160080 - RNA, 19 nt, Artificial Sequence
  Description of Artificial Sequence: Synthetic oligonucleotide
  Sense strand starting at position 2264 of SEQ ID NO: 1882956
ugcauauguggauaccaaa

SEQ ID NO: 2160081 - RNA, 19 nt, Artificial Sequence
  Description of Artificial Sequence: Synthetic oligonucleotide
  Antisense strand to SEQ ID NO: 2160080
uuugguauccacauaugca

SEQ ID NO: 2160082 - RNA, 19 nt, Artificial Sequence
  Description of Artificial Sequence: Synthetic oligonucleotide
  Sense strand starting at position 2510 of SEQ ID NO: 1882956
ucaaucuauggauguacaa

SEQ ID NO: 2160083 - RNA, 19 nt, Artificial Sequence
  Description of Artificial Sequence: Synthetic oligonucleotide
  Antisense strand to SEQ ID NO: 2160082
uuguacauccauagauuga

SEQ ID NO: 2160084 - RNA, 19 nt, Artificial Sequence
  Description of Artificial Sequence: Synthetic oligonucleotide
  Sense strand starting at position 2541 of SEQ ID NO: 1882956
gagggcugacuguauagau

SEQ ID NO: 2160085 - RNA, 19 nt, Artificial Sequence
  Description of Artificial Sequence: Synthetic oligonucleotide
  Antisense strand to SEQ ID NO: 2160084
aucuauacagucagcccuc

SEQ ID NO: 2160086 - RNA, 19 nt, Artificial Sequence
  Description of Artificial Sequence: Synthetic oligonucleotide
  Sense strand starting at position 2545 of SEQ ID NO: 1882956
gcugacuguauagauagau

SEQ ID NO: 2160087 - RNA, 19 nt, Artificial Sequence
  Description of Artificial Sequence: Synthetic oligonucleotide
  Antisense strand to SEQ ID NO: 2160086
aucuaucuauacagucagc

SEQ ID NO: 2160088 - RNA, 19 nt, Artificial Sequence
  Description of Artificial Sequence: Synthetic oligonucleotide
  Sense strand starting at position 2771 of SEQ ID NO: 1882956
uaagaauugcugggaaggu

SEQ ID NO: 2160089 - RNA, 19 nt, Artificial Sequence
  Description of Artificial Sequence: Synthetic oligonucleotide
  Antisense strand to SEQ ID NO: 2160088
accuucccagcaauucuua

SEQ ID NO: 2160090 - RNA, 19 nt, Artificial Sequence
  Description of Artificial Sequence: Synthetic oligonucleotide
  Sense strand starting at position 2824 of SEQ ID NO: 1882956
accaguagugauuggauga

SEQ ID NO: 2160091 - RNA, 19 nt, Artificial Sequence
  Description of Artificial Sequence: Synthetic oligonucleotide
  Antisense strand to SEQ ID NO: 2160090
ucauccaaucacuacuggu

SEQ ID NO: 2160092 - RNA, 19 nt, Artificial Sequence
  Description of Artificial Sequence: Synthetic oligonucleotide
  Sense strand starting at position 2825 of SEQ ID NO: 1882956
ccaguagugauuggaugaa

SEQ ID NO: 2160093 - RNA, 19 nt, Artificial Sequence
  Description of Artificial Sequence: Synthetic oligonucleotide
  Antisense strand to SEQ ID NO: 2160092
uucauccaaucacuacugg

SEQ ID NO: 2160094 - RNA, 19 nt, Artificial Sequence
  Description of Artificial Sequence: Synthetic oligonucleotide
  Sense strand starting at position 2961 of SEQ ID NO: 1882956
ugagauauuaagggcauau

SEQ ID NO: 2160095 - RNA, 19 nt, Artificial Sequence
  Description of Artificial Sequence: Synthetic oligonucleotide
  Antisense strand to SEQ ID NO: 2160094
auaugcccuuaauaucuca

SEQ ID NO: 2160096 - RNA, 19 nt, Artificial Sequence
  Description of Artificial Sequence: Synthetic oligonucleotide
  Sense strand starting at position 3084 of SEQ ID NO: 1882956
gcaguuuagcugccguaua

SEQ ID NO: 2160097 - RNA, 19 nt, Artificial Sequence
  Description of Artificial Sequence: Synthetic oligonucleotide
  Antisense strand to SEQ ID NO: 2160096
uauacggcagcuaaacugc

SEQ ID NO: 2160098 - RNA, 19 nt, Artificial Sequence
  Description of Artificial Sequence: Synthetic oligonucleotide
  Sense strand starting at position 3127 of SEQ ID NO: 1882956
aguaaauggcgucacacau

SEQ ID NO: 2160099 - RNA, 19 nt, Artificial Sequence
  Description of Artificial Sequence: Synthetic oligonucleotide
  Antisense strand to SEQ ID NO: 2160098
augugugacgccauuuacu

SEQ ID NO: 2160100 - RNA, 19 nt, Artificial Sequence
  Description of Artificial Sequence: Synthetic oligonucleotide
  Sense strand starting at position 3392 of SEQ ID NO: 1882956
ccuacugugauguaggaca

SEQ ID NO: 2160101 - RNA, 19 nt, Artificial Sequence
  Description of Artificial Sequence: Synthetic oligonucleotide
  Antisense strand to SEQ ID NO: 2160100
uguccuacaucacaguagg

SEQ ID NO: 2160102 - RNA, 19 nt, Artificial Sequence
  Description of Artificial Sequence: Synthetic oligonucleotide
  Sense strand starting at position 3623 of SEQ ID NO: 1882956
ugaugcaaccaaugagauu

SEQ ID NO: 2160103 - RNA, 19 nt, Artificial Sequence
  Description of Artificial Sequence: Synthetic oligonucleotide
  Antisense strand to SEQ ID NO: 2160102
aaucucauugguugcauca

SEQ ID NO: 2160104 - RNA, 19 nt, Artificial Sequence
  Description of Artificial Sequence: Synthetic oligonucleotide
  Sense strand starting at position 3646 of SEQ ID NO: 1882956
ugucaccauccuuaauguu

SEQ ID NO: 2160105 - RNA, 19 nt, Artificial Sequence
  Description of Artificial Sequence: Synthetic oligonucleotide
  Antisense strand to SEQ ID NO: 2160104
aacauuaaggauggugaca

SEQ ID NO: 2160106 - RNA, 19 nt, Artificial Sequence
  Description of Artificial Sequence: Synthetic oligonucleotide
  Sense strand starting at position 3978 of SEQ ID NO: 1882956
gagagcucacuguauacca

SEQ ID NO: 2160107 - RNA, 19 nt, Artificial Sequence
  Description of Artificial Sequence: Synthetic oligonucleotide
  Antisense strand to SEQ ID NO: 2160106
ugguauacagugagcucuc

SEQ ID NO: 2160108 - RNA, 19 nt, Artificial Sequence
  Description of Artificial Sequence: Synthetic oligonucleotide
  Sense strand starting at position 28 of SEQ ID NO: 1882957
agggaaugaucucguuccu

SEQ ID NO: 2160109 - RNA, 19 nt, Artificial Sequence
  Description of Artificial Sequence: Synthetic oligonucleotide
  Antisense strand to SEQ ID NO: 2160108
aggaacgagaucauucccu

SEQ ID NO: 2160110 - RNA, 19 nt, Artificial Sequence
  Description of Artificial Sequence: Synthetic oligonucleotide
  Sense strand starting at position 199 of SEQ ID NO: 1882957
gacggcgugcuaugacauu

SEQ ID NO: 2160111 - RNA, 19 nt, Artificial Sequence
  Description of Artificial Sequence: Synthetic oligonucleotide
  Antisense strand to SEQ ID NO: 2160110
aaugucauagcacgccguc

SEQ ID NO: 2160112 - RNA, 19 nt, Artificial Sequence
  Description of Artificial Sequence: Synthetic oligonucleotide
  Sense strand starting at position 288 of SEQ ID NO: 1882957
agaucagugcucuggacag

SEQ ID NO: 2160113 - RNA, 19 nt, Artificial Sequence
  Description of Artificial Sequence: Synthetic oligonucleotide
  Antisense strand to SEQ ID NO: 2160112
cuguccagagcacugaucu

SEQ ID NO: 2160114 - RNA, 19 nt, Artificial Sequence
  Description of Artificial Sequence: Synthetic oligonucleotide
  Sense strand starting at position 290 of SEQ ID NO: 1882957
aucagugcucuggacagua

SEQ ID NO: 2160115 - RNA, 19 nt, Artificial Sequence
  Description of Artificial Sequence: Synthetic oligonucleotide
  Antisense strand to SEQ ID NO: 2160114
uacuguccagagcacugau

SEQ ID NO: 2160116 - RNA, 19 nt, Artificial Sequence
  Description of Artificial Sequence: Synthetic oligonucleotide
  Sense strand starting at position 393 of SEQ ID NO: 1882957
agaugagcagucuggguua

SEQ ID NO: 2160117 - RNA, 19 nt, Artificial Sequence
  Description of Artificial Sequence: Synthetic oligonucleotide
  Antisense strand to SEQ ID NO: 2160116
uaacccagacugcucaucu

SEQ ID NO: 2160118 - RNA, 19 nt, Artificial Sequence
  Description of Artificial Sequence: Synthetic oligonucleotide
  Sense strand starting at position 395 of SEQ ID NO: 1882957
augagcagucuggguuaaa

SEQ ID NO: 2160119 - RNA, 19 nt, Artificial Sequence
  Description of Artificial Sequence: Synthetic oligonucleotide
  Antisense strand to SEQ ID NO: 2160118
uuuaacccagacugcucau

SEQ ID NO: 2160120 - RNA, 19 nt, Artificial Sequence
  Description of Artificial Sequence: Synthetic oligonucleotide
  Sense strand starting at position 396 of SEQ ID NO: 1882957
ugagcagucuggguuaaau

SEQ ID NO: 2160121 - RNA, 19 nt, Artificial Sequence
  Description of Artificial Sequence: Synthetic oligonucleotide
  Antisense strand to SEQ ID NO: 2160120
auuuaacccagacugcuca

SEQ ID NO: 2160122 - RNA, 19 nt, Artificial Sequence
  Description of Artificial Sequence: Synthetic oligonucleotide
  Sense strand starting at position 398 of SEQ ID NO: 1882957
agcagucuggguuaaauua

SEQ ID NO: 2160123 - RNA, 19 nt, Artificial Sequence
  Description of Artificial Sequence: Synthetic oligonucleotide
  Antisense strand to SEQ ID NO: 2160122
uaauuuaacccagacugcu

SEQ ID NO: 2160124 - RNA, 19 nt, Artificial Sequence
  Description of Artificial Sequence: Synthetic oligonucleotide
  Sense strand starting at position 672 of SEQ ID NO: 1882957
gcagauccaugagacgauu

SEQ ID NO: 2160125 - RNA, 19 nt, Artificial Sequence
  Description of Artificial Sequence: Synthetic oligonucleotide
  Antisense strand to SEQ ID NO: 2160124
aaucgucucauggaucugc

SEQ ID NO: 2160126 - RNA, 19 nt, Artificial Sequence
  Description of Artificial Sequence: Synthetic oligonucleotide
  Sense strand starting at position 681 of SEQ ID NO: 1882957
ugagacgauugaguccaua

SEQ ID NO: 2160127 - RNA, 19 nt, Artificial Sequence
  Description of Artificial Sequence: Synthetic oligonucleotide
  Antisense strand to SEQ ID NO: 2160126
uauggacucaaucgucuca

SEQ ID NO: 2160128 - RNA, 19 nt, Artificial Sequence
  Description of Artificial Sequence: Synthetic oligonucleotide
  Sense strand starting at position 728 of SEQ ID NO: 1882957
ugcuaagcuucuccagaga

SEQ ID NO: 2160129 - RNA, 19 nt, Artificial Sequence
  Description of Artificial Sequence: Synthetic oligonucleotide
  Antisense strand to SEQ ID NO: 2160128
ucucuggagaagcuuagca

SEQ ID NO: 2160130 - RNA, 19 nt, Artificial Sequence
  Description of Artificial Sequence: Synthetic oligonucleotide
  Sense strand starting at position 854 of SEQ ID NO: 1882957
gaguaaacguuguacucca

SEQ ID NO: 2160131 - RNA, 19 nt, Artificial Sequence
  Description of Artificial Sequence: Synthetic oligonucleotide
  Antisense strand to SEQ ID NO: 2160130
uggaguacaacguuuacuc

SEQ ID NO: 2160132 - RNA, 19 nt, Artificial Sequence
  Description of Artificial Sequence: Synthetic oligonucleotide
  Sense strand starting at position 1011 of SEQ ID NO: 1882957
cuacuucuacugcaaggua

SEQ ID NO: 2160133 - RNA, 19 nt, Artificial Sequence
  Description of Artificial Sequence: Synthetic oligonucleotide
  Antisense strand to SEQ ID NO: 2160132
uaccuugcaguagaaguag

SEQ ID NO: 2160134 - RNA, 19 nt, Artificial Sequence
  Description of Artificial Sequence: Synthetic oligonucleotide
  Sense strand starting at position 1202 of SEQ ID NO: 1882957
gugggauuguccugaucac

SEQ ID NO: 2160135 - RNA, 19 nt, Artificial Sequence
  Description of Artificial Sequence: Synthetic oligonucleotide
  Antisense strand to SEQ ID NO: 2160134
gugaucaggacaaucccac

SEQ ID NO: 2160136 - RNA, 19 nt, Artificial Sequence
  Description of Artificial Sequence: Synthetic oligonucleotide
  Sense strand starting at position 1203 of SEQ ID NO: 1882957
ugggauuguccugaucacu

SEQ ID NO: 2160137 - RNA, 19 nt, Artificial Sequence
  Description of Artificial Sequence: Synthetic oligonucleotide
  Antisense strand to SEQ ID NO: 2160136
agugaucaggacaauccca

SEQ ID NO: 2160138 - RNA, 19 nt, Artificial Sequence
  Description of Artificial Sequence: Synthetic oligonucleotide
  Sense strand starting at position 1454 of SEQ ID NO: 1882957
ccguguggucauuggaaac

SEQ ID NO: 2160139 - RNA, 19 nt, Artificial Sequence
  Description of Artificial Sequence: Synthetic oligonucleotide
  Antisense strand to SEQ ID NO: 2160138
guuuccaaugaccacacgg

SEQ ID NO: 2160140 - RNA, 19 nt, Artificial Sequence
  Description of Artificial Sequence: Synthetic oligonucleotide
  Sense strand starting at position 3109 of SEQ ID NO: 1882957
cugccugggcucugagauu

SEQ ID NO: 2160141 - RNA, 19 nt, Artificial Sequence
  Description of Artificial Sequence: Synthetic oligonucleotide
  Antisense strand to SEQ ID NO: 2160140
aaucucagagcccaggcag

SEQ ID NO: 2160142 - RNA, 19 nt, Artificial Sequence
  Description of Artificial Sequence: Synthetic oligonucleotide
  Sense strand starting at position 3173 of SEQ ID NO: 1882957
gucccuugcuaaucacuga

SEQ ID NO: 2160143 - RNA, 19 nt, Artificial Sequence
  Description of Artificial Sequence: Synthetic oligonucleotide
  Antisense strand to SEQ ID NO: 2160142
ucagugauuagcaagggac

SEQ ID NO: 2160144 - RNA, 19 nt, Artificial Sequence
  Description of Artificial Sequence: Synthetic oligonucleotide
  Sense strand starting at position 3186 of SEQ ID NO: 1882957
cacugaaucccuuguacgu

SEQ ID NO: 2160145 - RNA, 19 nt, Artificial Sequence
  Description of Artificial Sequence: Synthetic oligonucleotide
  Antisense strand to SEQ ID NO: 2160144
acguacaagggauucagug

SEQ ID NO: 2160146 - RNA, 19 nt, Artificial Sequence
  Description of Artificial Sequence: Synthetic oligonucleotide
  Sense strand starting at position 3188 of SEQ ID NO: 1882957
cugaaucccuuguacguua

SEQ ID NO: 2160147 - RNA, 19 nt, Artificial Sequence
  Description of Artificial Sequence: Synthetic oligonucleotide
  Antisense strand to SEQ ID NO: 2160146
uaacguacaagggauucag

SEQ ID NO: 2160148 - RNA, 19 nt, Artificial Sequence
  Description of Artificial Sequence: Synthetic oligonucleotide
  Sense strand starting at position 3447 of SEQ ID NO: 1882957
ugggcuuucuugggacagu

SEQ ID NO: 2160149 - RNA, 19 nt, Artificial Sequence
  Description of Artificial Sequence: Synthetic oligonucleotide
  Antisense strand to SEQ ID NO: 2160148
acugucccaagaaagccca

SEQ ID NO: 2160150 - RNA, 19 nt, Artificial Sequence
  Description of Artificial Sequence: Synthetic oligonucleotide
  Sense strand starting at position 3448 of SEQ ID NO: 1882957
gggcuuucuugggacaguu

SEQ ID NO: 2160151 - RNA, 19 nt, Artificial Sequence
  Description of Artificial Sequence: Synthetic oligonucleotide
  Antisense strand to SEQ ID NO: 2160150
aacugucccaagaaagccc

SEQ ID NO: 2160152 - RNA, 19 nt, Artificial Sequence
  Description of Artificial Sequence: Synthetic oligonucleotide
  Sense strand starting at position 3456 of SEQ ID NO: 1882957
uugggacaguucuagaagu

SEQ ID NO: 2160153 - RNA, 19 nt, Artificial Sequence
  Description of Artificial Sequence: Synthetic oligonucleotide
  Antisense strand to SEQ ID NO: 2160152
acuucuagaacugucccaa

SEQ ID NO: 2160154 - RNA, 19 nt, Artificial Sequence
  Description of Artificial Sequence: Synthetic oligonucleotide
  Sense strand starting at position 3563 of SEQ ID NO: 1882957
uccugauccucagagucua

SEQ ID NO: 2160155 - RNA, 19 nt, Artificial Sequence
  Description of Artificial Sequence: Synthetic oligonucleotide
  Antisense strand to SEQ ID NO: 2160154
uagacucugaggaucagga

SEQ ID NO: 2160156 - RNA, 19 nt, Artificial Sequence
  Description of Artificial Sequence: Synthetic oligonucleotide
  Sense strand starting at position 3571 of SEQ ID NO: 1882957
cucagagucuacuugcaaa

SEQ ID NO: 2160157 - RNA, 19 nt, Artificial Sequence
  Description of Artificial Sequence: Synthetic oligonucleotide
  Antisense strand to SEQ ID NO: 2160156
uuugcaaguagacucugag

SEQ ID NO: 2160158 - RNA, 19 nt, Artificial Sequence
  Description of Artificial Sequence: Synthetic oligonucleotide
  Sense strand starting at position 3606 of SEQ ID NO: 1882957
caaguugugcugggagcuu

SEQ ID NO: 2160159 - RNA, 19 nt, Artificial Sequence
  Description of Artificial Sequence: Synthetic oligonucleotide
  Antisense strand to SEQ ID NO: 2160158
aagcucccagcacaacuug

SEQ ID NO: 2160160 - RNA, 19 nt, Artificial Sequence
  Description of Artificial Sequence: Synthetic oligonucleotide
  Sense strand starting at position 3615 of SEQ ID NO: 1882957
cugggagcuuaccuuauga

SEQ ID NO: 2160161 - RNA, 19 nt, Artificial Sequence
  Description of Artificial Sequence: Synthetic oligonucleotide
  Antisense strand to SEQ ID NO: 2160160
ucauaagguaagcucccag

SEQ ID NO: 2160162 - RNA, 19 nt, Artificial Sequence
  Description of Artificial Sequence: Synthetic oligonucleotide
  Sense strand starting at position 3617 of SEQ ID NO: 1882957
gggagcuuaccuuaugauu

SEQ ID NO: 2160163 - RNA, 19 nt, Artificial Sequence
  Description of Artificial Sequence: Synthetic oligonucleotide
  Antisense strand to SEQ ID NO: 2160162
aaucauaagguaagcuccc

SEQ ID NO: 2160164 - RNA, 19 nt, Artificial Sequence
  Description of Artificial Sequence: Synthetic oligonucleotide
  Sense strand starting at position 3625 of SEQ ID NO: 1882957
accuuaugauugcuuugga

SEQ ID NO: 2160165 - RNA, 19 nt, Artificial Sequence
  Description of Artificial Sequence: Synthetic oligonucleotide
  Antisense strand to SEQ ID NO: 2160164
uccaaagcaaucauaaggu

SEQ ID NO: 2160166 - RNA, 19 nt, Artificial Sequence
  Description of Artificial Sequence: Synthetic oligonucleotide
  Sense strand starting at position 3651 of SEQ ID NO: 1882957
agaccuuugucccuguagu

SEQ ID NO: 2160167 - RNA, 19 nt, Artificial Sequence
  Description of Artificial Sequence: Synthetic oligonucleotide
  Antisense strand to SEQ ID NO: 2160166
acuacagggacaaaggucu

SEQ ID NO: 2160168 - RNA, 19 nt, Artificial Sequence
  Description of Artificial Sequence: Synthetic oligonucleotide
  Sense strand starting at position 3661 of SEQ ID NO: 1882957
cccuguaguugcuuuaaau

SEQ ID NO: 2160169 - RNA, 19 nt, Artificial Sequence
  Description of Artificial Sequence: Synthetic oligonucleotide
  Antisense strand to SEQ ID NO: 2160168
auuuaaagcaacuacaggg

SEQ ID NO: 2160170 - RNA, 19 nt, Artificial Sequence
  Description of Artificial Sequence: Synthetic oligonucleotide
  Sense strand starting at position 4 of SEQ ID NO: 1882958
ucagaaauaugagucggau

SEQ ID NO: 2160171 - RNA, 19 nt, Artificial Sequence
  Description of Artificial Sequence: Synthetic oligonucleotide
  Antisense strand to SEQ ID NO: 2160170
auccgacucauauuucuga

SEQ ID NO: 2160172 - RNA, 19 nt, Artificial Sequence
  Description of Artificial Sequence: Synthetic oligonucleotide
  Sense strand starting at position 6 of SEQ ID NO: 1882958
agaaauaugagucggaugu

SEQ ID NO: 2160173 - RNA, 19 nt, Artificial Sequence
  Description of Artificial Sequence: Synthetic oligonucleotide
  Antisense strand to SEQ ID NO: 2160172
acauccgacucauauuucu

SEQ ID NO: 2160174 - RNA, 19 nt, Artificial Sequence
  Description of Artificial Sequence: Synthetic oligonucleotide
  Sense strand starting at position 7 of SEQ ID NO: 1882958
gaaauaugagucggaugug

SEQ ID NO: 2160175 - RNA, 19 nt, Artificial Sequence
  Description of Artificial Sequence: Synthetic oligonucleotide
  Antisense strand to SEQ ID NO: 2160174
cacauccgacucauauuuc

SEQ ID NO: 2160176 - RNA, 19 nt, Artificial Sequence
  Description of Artificial Sequence: Synthetic oligonucleotide
  Sense strand starting at position 396 of SEQ ID NO: 1882958
gcaucacagggcuggaaau

SEQ ID NO: 2160177 - RNA, 19 nt, Artificial Sequence
  Description of Artificial Sequence: Synthetic oligonucleotide
  Antisense strand to SEQ ID NO: 2160176
auuuccagcccugugaugc

SEQ ID NO: 2160178 - RNA, 19 nt, Artificial Sequence
  Description of Artificial Sequence: Synthetic oligonucleotide
  Sense strand starting at position 397 of SEQ ID NO: 1882958
caucacagggcuggaaauu

SEQ ID NO: 2160179 - RNA, 19 nt, Artificial Sequence
  Description of Artificial Sequence: Synthetic oligonucleotide
  Antisense strand to SEQ ID NO: 2160178
aauuuccagcccugugaug

SEQ ID NO: 2160180 - RNA, 19 nt, Artificial Sequence
  Description of Artificial Sequence: Synthetic oligonucleotide
  Sense strand starting at position 406 of SEQ ID NO: 1882958
gcuggaaauuccucaccac

SEQ ID NO: 2160181 - RNA, 19 nt, Artificial Sequence
  Description of Artificial Sequence: Synthetic oligonucleotide
  Antisense strand to SEQ ID NO: 2160180
guggugaggaauuuccagc

SEQ ID NO: 2160182 - RNA, 19 nt, Artificial Sequence
  Description of Artificial Sequence: Synthetic oligonucleotide
  Sense strand starting at position 550 of SEQ ID NO: 1882958
cuggccaucucacagugau

SEQ ID NO: 2160183 - RNA, 19 nt, Artificial Sequence
  Description of Artificial Sequence: Synthetic oligonucleotide
  Antisense strand to SEQ ID NO: 2160182
aucacugugagauggccag

SEQ ID NO: 2160184 - RNA, 19 nt, Artificial Sequence
  Description of Artificial Sequence: Synthetic oligonucleotide
  Sense strand starting at position 683 of SEQ ID NO: 1882958
uguggaaucucgugaccac

SEQ ID NO: 2160185 - RNA, 19 nt, Artificial Sequence
  Description of Artificial Sequence: Synthetic oligonucleotide
  Antisense strand to SEQ ID NO: 2160184
guggucacgagauuccaca

SEQ ID NO: 2160186 - RNA, 19 nt, Artificial Sequence
  Description of Artificial Sequence: Synthetic oligonucleotide
  Sense strand starting at position 792 of SEQ ID NO: 1882958
caaggugcucgccuguaau

SEQ ID NO: 2160187 - RNA, 19 nt, Artificial Sequence
  Description of Artificial Sequence: Synthetic oligonucleotide
  Antisense strand to SEQ ID NO: 2160186
auuacaggcgagcaccuug

SEQ ID NO: 2160188 - RNA, 19 nt, Artificial Sequence
  Description of Artificial Sequence: Synthetic oligonucleotide
  Sense strand starting at position 827 of SEQ ID NO: 1882958
ugagcuggccaccagaaau

SEQ ID NO: 2160189 - RNA, 19 nt, Artificial Sequence
  Description of Artificial Sequence: Synthetic oligonucleotide
  Antisense strand to SEQ ID NO: 2160188
auuucugguggccagcuca

SEQ ID NO: 2160190 - RNA, 19 nt, Artificial Sequence
  Description of Artificial Sequence: Synthetic oligonucleotide
  Sense strand starting at position 878 of SEQ ID NO: 1882958
uuucuucucccaggcugaa

SEQ ID NO: 2160191 - RNA, 19 nt, Artificial Sequence
  Description of Artificial Sequence: Synthetic oligonucleotide
  Antisense strand to SEQ ID NO: 2160190
uucagccugggagaagaaa

SEQ ID NO: 2160192 - RNA, 19 nt, Artificial Sequence
  Description of Artificial Sequence: Synthetic oligonucleotide
  Sense strand starting at position 903 of SEQ ID NO: 1882958
gccaucugcucuggaggaa

SEQ ID NO: 2160193 - RNA, 19 nt, Artificial Sequence
  Description of Artificial Sequence: Synthetic oligonucleotide
  Antisense strand to SEQ ID NO: 2160192
uuccuccagagcagauggc

SEQ ID NO: 2160194 - RNA, 19 nt, Artificial Sequence
  Description of Artificial Sequence: Synthetic oligonucleotide
  Sense strand starting at position 1000 of SEQ ID NO: 1882958
gggagcucugcgggcuuua

SEQ ID NO: 2160195 - RNA, 19 nt, Artificial Sequence
  Description of Artificial Sequence: Synthetic oligonucleotide
  Antisense strand to SEQ ID NO: 2160194
uaaagcccgcagagcuccc

SEQ ID NO: 2160196 - RNA, 19 nt, Artificial Sequence
  Description of Artificial Sequence: Synthetic oligonucleotide
  Sense strand starting at position 1304 of SEQ ID NO: 1882958
ugcccuuggaucugagagu

SEQ ID NO: 2160197 - RNA, 19 nt, Artificial Sequence
  Description of Artificial Sequence: Synthetic oligonucleotide
  Antisense strand to SEQ ID NO: 2160196
acucucagauccaagggca

SEQ ID NO: 2160198 - RNA, 19 nt, Artificial Sequence
  Description of Artificial Sequence: Synthetic oligonucleotide
  Sense strand starting at position 1305 of SEQ ID NO: 1882958
gcccuuggaucugagaguu

SEQ ID NO: 2160199 - RNA, 19 nt, Artificial Sequence
  Description of Artificial Sequence: Synthetic oligonucleotide
  Antisense strand to SEQ ID NO: 2160198
aacucucagauccaagggc

SEQ ID NO: 2160200 - RNA, 19 nt, Artificial Sequence
  Description of Artificial Sequence: Synthetic oligonucleotide
  Sense strand starting at position 1311 of SEQ ID NO: 1882958
ggaucugagaguugacgaa

SEQ ID NO: 2160201 - RNA, 19 nt, Artificial Sequence
  Description of Artificial Sequence: Synthetic oligonucleotide
  Antisense strand to SEQ ID NO: 2160200
uucgucaacucucagaucc

SEQ ID NO: 2160202 - RNA, 19 nt, Artificial Sequence
  Description of Artificial Sequence: Synthetic oligonucleotide
  Sense strand starting at position 1416 of SEQ ID NO: 1882958
gcagcuccaucgucugaau

SEQ ID NO: 2160203 - RNA, 19 nt, Artificial Sequence
  Description of Artificial Sequence: Synthetic oligonucleotide
  Antisense strand to SEQ ID NO: 2160202
auucagacgauggagcugc

SEQ ID NO: 2160204 - RNA, 19 nt, Artificial Sequence
  Description of Artificial Sequence: Synthetic oligonucleotide
  Sense strand starting at position 2094 of SEQ ID NO: 1882958
cuugaaggauccuaagauc

SEQ ID NO: 2160205 - RNA, 19 nt, Artificial Sequence
  Description of Artificial Sequence: Synthetic oligonucleotide
  Antisense strand to SEQ ID NO: 2160204
gaucuuaggauccuucaag

SEQ ID NO: 2160206 - RNA, 19 nt, Artificial Sequence
  Description of Artificial Sequence: Synthetic oligonucleotide
  Sense strand starting at position 2744 of SEQ ID NO: 1882958
agcagucuugaugggaaca

SEQ ID NO: 2160207 - RNA, 19 nt, Artificial Sequence
  Description of Artificial Sequence: Synthetic oligonucleotide
  Antisense strand to SEQ ID NO: 2160206
uguucccaucaagacugcu

SEQ ID NO: 2160208 - RNA, 19 nt, Artificial Sequence
  Description of Artificial Sequence: Synthetic oligonucleotide
  Sense strand starting at position 2745 of SEQ ID NO: 1882958
gcagucuugaugggaacaa

SEQ ID NO: 2160209 - RNA, 19 nt, Artificial Sequence
  Description of Artificial Sequence: Synthetic oligonucleotide
  Antisense strand to SEQ ID NO: 2160208
uuguucccaucaagacugc

SEQ ID NO: 2160210 - RNA, 19 nt, Artificial Sequence
  Description of Artificial Sequence: Synthetic oligonucleotide
  Sense strand starting at position 2948 of SEQ ID NO: 1882958
cgcugugagccgugugcaa

SEQ ID NO: 2160211 - RNA, 19 nt, Artificial Sequence
  Description of Artificial Sequence: Synthetic oligonucleotide
  Antisense strand to SEQ ID NO: 2160210
uugcacacggcucacagcg

SEQ ID NO: 2160212 - RNA, 19 nt, Artificial Sequence
  Description of Artificial Sequence: Synthetic oligonucleotide
  Sense strand starting at position 3003 of SEQ ID NO: 1882958
ggguguugucuccgcauca

SEQ ID NO: 2160213 - RNA, 19 nt, Artificial Sequence
  Description of Artificial Sequence: Synthetic oligonucleotide
  Antisense strand to SEQ ID NO: 2160212
ugaugcggagacaacaccc

SEQ ID NO: 2160214 - RNA, 19 nt, Artificial Sequence
  Description of Artificial Sequence: Synthetic oligonucleotide
  Sense strand starting at position 3007 of SEQ ID NO: 1882958
guugucuccgcaucaguaa

SEQ ID NO: 2160215 - RNA, 19 nt, Artificial Sequence
  Description of Artificial Sequence: Synthetic oligonucleotide
  Antisense strand to SEQ ID NO: 2160214
uuacugaugcggagacaac

SEQ ID NO: 2160216 - RNA, 19 nt, Artificial Sequence
  Description of Artificial Sequence: Synthetic oligonucleotide
  Sense strand starting at position 3491 of SEQ ID NO: 1882958
agaggcaucugcgguauga

SEQ ID NO: 2160217 - RNA, 19 nt, Artificial Sequence
  Description of Artificial Sequence: Synthetic oligonucleotide
  Antisense strand to SEQ ID NO: 2160216
ucauaccgcagaugccucu

SEQ ID NO: 2160218 - RNA, 19 nt, Artificial Sequence
  Description of Artificial Sequence: Synthetic oligonucleotide
  Sense strand starting at position 3493 of SEQ ID NO: 1882958
aggcaucugcgguaugaag

SEQ ID NO: 2160219 - RNA, 19 nt, Artificial Sequence
  Description of Artificial Sequence: Synthetic oligonucleotide
  Antisense strand to SEQ ID NO: 2160218
cuucauaccgcagaugccu

SEQ ID NO: 2160220 - RNA, 19 nt, Artificial Sequence
  Description of Artificial Sequence: Synthetic oligonucleotide
  Sense strand starting at position 3504 of SEQ ID NO: 1882958
guaugaagagucgguccaa

SEQ ID NO: 2160221 - RNA, 19 nt, Artificial Sequence
  Description of Artificial Sequence: Synthetic oligonucleotide
  Antisense strand to SEQ ID NO: 2160220
uuggaccgacucuucauac

SEQ ID NO: 2160222 - RNA, 19 nt, Artificial Sequence
  Description of Artificial Sequence: Synthetic oligonucleotide
  Sense strand starting at position 3505 of SEQ ID NO: 1882958
uaugaagagucgguccaaa

SEQ ID NO: 2160223 - RNA, 19 nt, Artificial Sequence
  Description of Artificial Sequence: Synthetic oligonucleotide
  Antisense strand to SEQ ID NO: 2160222
uuuggaccgacucuucaua

SEQ ID NO: 2160224 - RNA, 19 nt, Artificial Sequence
  Description of Artificial Sequence: Synthetic oligonucleotide
  Sense strand starting at position 98 of SEQ ID NO: 1882959
ucuggagaauuucggauuu

SEQ ID NO: 2160225 - RNA, 19 nt, Artificial Sequence
  Description of Artificial Sequence: Synthetic oligonucleotide
  Antisense strand to SEQ ID NO: 2160224
aaauccgaaauucuccaga

SEQ ID NO: 2160226 - RNA, 19 nt, Artificial Sequence
  Description of Artificial Sequence: Synthetic oligonucleotide
  Sense strand starting at position 202 of SEQ ID NO: 1882959
ccuguauaucgauaagcug

SEQ ID NO: 2160227 - RNA, 19 nt, Artificial Sequence
  Description of Artificial Sequence: Synthetic oligonucleotide
  Antisense strand to SEQ ID NO: 2160226
cagcuuaucgauauacagg

SEQ ID NO: 2160228 - RNA, 19 nt, Artificial Sequence
  Description of Artificial Sequence: Synthetic oligonucleotide
  Sense strand starting at position 208 of SEQ ID NO: 1882959
uaucgauaagcugggaauu

SEQ ID NO: 2160229 - RNA, 19 nt, Artificial Sequence
  Description of Artificial Sequence: Synthetic oligonucleotide
  Antisense strand to SEQ ID NO: 2160228
aauucccagcuuaucgaua

SEQ ID NO: 2160230 - RNA, 19 nt, Artificial Sequence
  Description of Artificial Sequence: Synthetic oligonucleotide
  Sense strand starting at position 221 of SEQ ID NO: 1882959
ggaauucucuuaucagcuc

SEQ ID NO: 2160231 - RNA, 19 nt, Artificial Sequence
  Description of Artificial Sequence: Synthetic oligonucleotide
  Antisense strand to SEQ ID NO: 2160230
gagcugauaagagaauucc

SEQ ID NO: 2160232 - RNA, 19 nt, Artificial Sequence
  Description of Artificial Sequence: Synthetic oligonucleotide
  Sense strand starting at position 255 of SEQ ID NO: 1882959
gguauagcugaagaaaugu

SEQ ID NO: 2160233 - RNA, 19 nt, Artificial Sequence
  Description of Artificial Sequence: Synthetic oligonucleotide
  Antisense strand to SEQ ID NO: 2160232
acauuucuucagcuauacc

SEQ ID NO: 2160234 - RNA, 19 nt, Artificial Sequence
  Description of Artificial Sequence: Synthetic oligonucleotide
  Sense strand starting at position 263 of SEQ ID NO: 1882959
ugaagaaauguuggcagaa

SEQ ID NO: 2160235 - RNA, 19 nt, Artificial Sequence
  Description of Artificial Sequence: Synthetic oligonucleotide
  Antisense strand to SEQ ID NO: 2160234
uucugccaacauuucuuca

SEQ ID NO: 2160236 - RNA, 19 nt, Artificial Sequence
  Description of Artificial Sequence: Synthetic oligonucleotide
  Sense strand starting at position 264 of SEQ ID NO: 1882959
gaagaaauguuggcagaac

SEQ ID NO: 2160237 - RNA, 19 nt, Artificial Sequence
  Description of Artificial Sequence: Synthetic oligonucleotide
  Antisense strand to SEQ ID NO: 2160236
guucugccaacauuucuuc

SEQ ID NO: 2160238 - RNA, 19 nt, Artificial Sequence
  Description of Artificial Sequence: Synthetic oligonucleotide
  Sense strand starting at position 299 of SEQ ID NO: 1882959
gagucuccuuugccagaga

SEQ ID NO: 2160239 - RNA, 19 nt, Artificial Sequence
  Description of Artificial Sequence: Synthetic oligonucleotide
  Antisense strand to SEQ ID NO: 2160238
ucucuggcaaaggagacuc

SEQ ID NO: 2160240 - RNA, 19 nt, Artificial Sequence
  Description of Artificial Sequence: Synthetic oligonucleotide
  Sense strand starting at position 302 of SEQ ID NO: 1882959
ucuccuuugccagagaaau

SEQ ID NO: 2160241 - RNA, 19 nt, Artificial Sequence
  Description of Artificial Sequence: Synthetic oligonucleotide
  Antisense strand to SEQ ID NO: 2160240
auuucucuggcaaaggaga

SEQ ID NO: 2160242 - RNA, 19 nt, Artificial Sequence
  Description of Artificial Sequence: Synthetic oligonucleotide
  Sense strand starting at position 387 of SEQ ID NO: 1882959
gguucuauuauaggacuga

SEQ ID NO: 2160243 - RNA, 19 nt, Artificial Sequence
  Description of Artificial Sequence: Synthetic oligonucleotide
  Antisense strand to SEQ ID NO: 2160242
ucaguccuauaauagaacc

SEQ ID NO: 2160244 - RNA, 19 nt, Artificial Sequence
  Description of Artificial Sequence: Synthetic oligonucleotide
  Sense strand starting at position 404 of SEQ ID NO: 1882959
gacauaacuccauguagag

SEQ ID NO: 2160245 - RNA, 19 nt, Artificial Sequence
  Description of Artificial Sequence: Synthetic oligonucleotide
  Antisense strand to SEQ ID NO: 2160244
cucuacauggaguuauguc

SEQ ID NO: 2160246 - RNA, 19 nt, Artificial Sequence
  Description of Artificial Sequence: Synthetic oligonucleotide
  Sense strand starting at position 486 of SEQ ID NO: 1882959
ccuccaaauccugacggua

SEQ ID NO: 2160247 - RNA, 19 nt, Artificial Sequence
  Description of Artificial Sequence: Synthetic oligonucleotide
  Antisense strand to SEQ ID NO: 2160246
uaccgucaggauuuggagg

SEQ ID NO: 2160248 - RNA, 19 nt, Artificial Sequence
  Description of Artificial Sequence: Synthetic oligonucleotide
  Sense strand starting at position 489 of SEQ ID NO: 1882959
ccaaauccugacgguauua

SEQ ID NO: 2160249 - RNA, 19 nt, Artificial Sequence
  Description of Artificial Sequence: Synthetic oligonucleotide
  Antisense strand to SEQ ID NO: 2160248
uaauaccgucaggauuugg

SEQ ID NO: 2160250 - RNA, 19 nt, Artificial Sequence
  Description of Artificial Sequence: Synthetic oligonucleotide
  Sense strand starting at position 696 of SEQ ID NO: 1882959
ggcagagagcauuagcuau

SEQ ID NO: 2160251 - RNA, 19 nt, Artificial Sequence
  Description of Artificial Sequence: Synthetic oligonucleotide
  Antisense strand to SEQ ID NO: 2160250
auagcuaaugcucucugcc

SEQ ID NO: 2160252 - RNA, 19 nt, Artificial Sequence
  Description of Artificial Sequence: Synthetic oligonucleotide
  Sense strand starting at position 698 of SEQ ID NO: 1882959
cagagagcauuagcuauga

SEQ ID NO: 2160253 - RNA, 19 nt, Artificial Sequence
  Description of Artificial Sequence: Synthetic oligonucleotide
  Antisense strand to SEQ ID NO: 2160252
ucauagcuaaugcucucug

SEQ ID NO: 2160254 - RNA, 19 nt, Artificial Sequence
  Description of Artificial Sequence: Synthetic oligonucleotide
  Sense strand starting at position 702 of SEQ ID NO: 1882959
gagcauuagcuaugagcac

SEQ ID NO: 2160255 - RNA, 19 nt, Artificial Sequence
  Description of Artificial Sequence: Synthetic oligonucleotide
  Antisense strand to SEQ ID NO: 2160254
gugcucauagcuaaugcuc

SEQ ID NO: 2160256 - RNA, 19 nt, Artificial Sequence
  Description of Artificial Sequence: Synthetic oligonucleotide
  Sense strand starting at position 1035 of SEQ ID NO: 1882959
gcaucacaugggugaggua

SEQ ID NO: 2160257 - RNA, 19 nt, Artificial Sequence
  Description of Artificial Sequence: Synthetic oligonucleotide
  Antisense strand to SEQ ID NO: 2160256
uaccucacccaugugaugc

SEQ ID NO: 2160258 - RNA, 19 nt, Artificial Sequence
  Description of Artificial Sequence: Synthetic oligonucleotide
  Sense strand starting at position 1077 of SEQ ID NO: 1882959
cauggauucucccugggca

SEQ ID NO: 2160259 - RNA, 19 nt, Artificial Sequence
  Description of Artificial Sequence: Synthetic oligonucleotide
  Antisense strand to SEQ ID NO: 2160258
ugcccagggagaauccaug

SEQ ID NO: 2160260 - RNA, 19 nt, Artificial Sequence
  Description of Artificial Sequence: Synthetic oligonucleotide
  Sense strand starting at position 1519 of SEQ ID NO: 1882959
ggcucucuacuccaucaga

SEQ ID NO: 2160261 - RNA, 19 nt, Artificial Sequence
  Description of Artificial Sequence: Synthetic oligonucleotide
  Antisense strand to SEQ ID NO: 2160260
ucugauggaguagagagcc

SEQ ID NO: 2160262 - RNA, 19 nt, Artificial Sequence
  Description of Artificial Sequence: Synthetic oligonucleotide
  Sense strand starting at position 1600 of SEQ ID NO: 1882959
gaagaacucuaggcuugga

SEQ ID NO: 2160263 - RNA, 19 nt, Artificial Sequence
  Description of Artificial Sequence: Synthetic oligonucleotide
  Antisense strand to SEQ ID NO: 2160262
uccaagccuagaguucuuc

SEQ ID NO: 2160264 - RNA, 19 nt, Artificial Sequence
  Description of Artificial Sequence: Synthetic oligonucleotide
  Sense strand starting at position 1619 of SEQ ID NO: 1882959
aggugaauucugcauagca

SEQ ID NO: 2160265 - RNA, 19 nt, Artificial Sequence
  Description of Artificial Sequence: Synthetic oligonucleotide
  Antisense strand to SEQ ID NO: 2160264
ugcuaugcagaauucaccu

SEQ ID NO: 2160266 - RNA, 19 nt, Artificial Sequence
  Description of Artificial Sequence: Synthetic oligonucleotide
  Sense strand starting at position 1621 of SEQ ID NO: 1882959
gugaauucugcauagcaaa

SEQ ID NO: 2160267 - RNA, 19 nt, Artificial Sequence
  Description of Artificial Sequence: Synthetic oligonucleotide
  Antisense strand to SEQ ID NO: 2160266
uuugcuaugcagaauucac

SEQ ID NO: 2160268 - RNA, 19 nt, Artificial Sequence
  Description of Artificial Sequence: Synthetic oligonucleotide
  Sense strand starting at position 1632 of SEQ ID NO: 1882959
auagcaaagccacaguuau

SEQ ID NO: 2160269 - RNA, 19 nt, Artificial Sequence
  Description of Artificial Sequence: Synthetic oligonucleotide
  Antisense strand to SEQ ID NO: 2160268
auaacuguggcuuugcuau

SEQ ID NO: 2160270 - RNA, 19 nt, Artificial Sequence
  Description of Artificial Sequence: Synthetic oligonucleotide
  Sense strand starting at position 1643 of SEQ ID NO: 1882959
acaguuauucuuugggcca

SEQ ID NO: 2160271 - RNA, 19 nt, Artificial Sequence
  Description of Artificial Sequence: Synthetic oligonucleotide
  Antisense strand to SEQ ID NO: 2160270
uggcccaaagaauaacugu

SEQ ID NO: 2160272 - RNA, 19 nt, Artificial Sequence
  Description of Artificial Sequence: Synthetic oligonucleotide
  Sense strand starting at position 1646 of SEQ ID NO: 1882959
guuauucuuugggccacaa

SEQ ID NO: 2160273 - RNA, 19 nt, Artificial Sequence
  Description of Artificial Sequence: Synthetic oligonucleotide
  Antisense strand to SEQ ID NO: 2160272
uuguggcccaaagaauaac

SEQ ID NO: 2160274 - RNA, 19 nt, Artificial Sequence
  Description of Artificial Sequence: Synthetic oligonucleotide
  Sense strand starting at position 1650 of SEQ ID NO: 1882959
uucuuugggccacaaugaa

SEQ ID NO: 2160275 - RNA, 19 nt, Artificial Sequence
  Description of Artificial Sequence: Synthetic oligonucleotide
  Antisense strand to SEQ ID NO: 2160274
uucauuguggcccaaagaa

SEQ ID NO: 2160276 - RNA, 19 nt, Artificial Sequence
  Description of Artificial Sequence: Synthetic oligonucleotide
  Sense strand starting at position 1704 of SEQ ID NO: 1882959
cuguucuauugaucuacua

SEQ ID NO: 2160277 - RNA, 19 nt, Artificial Sequence
  Description of Artificial Sequence: Synthetic oligonucleotide
  Antisense strand to SEQ ID NO: 2160276
uaguagaucaauagaacag

SEQ ID NO: 2160278 - RNA, 19 nt, Artificial Sequence
  Description of Artificial Sequence: Synthetic oligonucleotide
  Sense strand starting at position 2135 of SEQ ID NO: 1882959
gaccuagaagucugcgauu

SEQ ID NO: 2160279 - RNA, 19 nt, Artificial Sequence
  Description of Artificial Sequence: Synthetic oligonucleotide
  Antisense strand to SEQ ID NO: 2160278
aaucgcagacuucuagguc

SEQ ID NO: 2160280 - RNA, 19 nt, Artificial Sequence
  Description of Artificial Sequence: Synthetic oligonucleotide
  Sense strand starting at position 2243 of SEQ ID NO: 1882959
ggucauuuccacggcaaac

SEQ ID NO: 2160281 - RNA, 19 nt, Artificial Sequence
  Description of Artificial Sequence: Synthetic oligonucleotide
  Antisense strand to SEQ ID NO: 2160280
guuugccguggaaaugacc

SEQ ID NO: 2160282 - RNA, 19 nt, Artificial Sequence
  Description of Artificial Sequence: Synthetic oligonucleotide
  Sense strand starting at position 2282 of SEQ ID NO: 1882959
ggaggauggcuacgucaaa

SEQ ID NO: 2160283 - RNA, 19 nt, Artificial Sequence
  Description of Artificial Sequence: Synthetic oligonucleotide
  Antisense strand to SEQ ID NO: 2160282
uuugacguagccauccucc

SEQ ID NO: 2160284 - RNA, 19 nt, Artificial Sequence
  Description of Artificial Sequence: Synthetic oligonucleotide
  Sense strand starting at position 2831 of SEQ ID NO: 1882959
gacaucaaaccguggagaa

SEQ ID NO: 2160285 - RNA, 19 nt, Artificial Sequence
  Description of Artificial Sequence: Synthetic oligonucleotide
  Antisense strand to SEQ ID NO: 2160284
uucuccacgguuugauguc

SEQ ID NO: 2160286 - RNA, 19 nt, Artificial Sequence
  Description of Artificial Sequence: Synthetic oligonucleotide
  Sense strand starting at position 3051 of SEQ ID NO: 1882959
cgugacuaucugcagugau

SEQ ID NO: 2160287 - RNA, 19 nt, Artificial Sequence
  Description of Artificial Sequence: Synthetic oligonucleotide
  Antisense strand to SEQ ID NO: 2160286
aucacugcagauagucacg

SEQ ID NO: 2160288 - RNA, 19 nt, Artificial Sequence
  Description of Artificial Sequence: Synthetic oligonucleotide
  Sense strand starting at position 3054 of SEQ ID NO: 1882959
gacuaucugcagugauacu

SEQ ID NO: 2160289 - RNA, 19 nt, Artificial Sequence
  Description of Artificial Sequence: Synthetic oligonucleotide
  Antisense strand to SEQ ID NO: 2160288
aguaucacugcagauaguc

SEQ ID NO: 2160290 - RNA, 19 nt, Artificial Sequence
  Description of Artificial Sequence: Synthetic oligonucleotide
  Sense strand starting at position 3072 of SEQ ID NO: 1882959
ugccucucccagugaggau

SEQ ID NO: 2160291 - RNA, 19 nt, Artificial Sequence
  Description of Artificial Sequence: Synthetic oligonucleotide
  Antisense strand to SEQ ID NO: 2160290
auccucacugggagaggca

SEQ ID NO: 2160292 - RNA, 19 nt, Artificial Sequence
  Description of Artificial Sequence: Synthetic oligonucleotide
  Sense strand starting at position 3140 of SEQ ID NO: 1882959
agaagauaugucuguggac

SEQ ID NO: 2160293 - RNA, 19 nt, Artificial Sequence
  Description of Artificial Sequence: Synthetic oligonucleotide
  Antisense strand to SEQ ID NO: 2160292
guccacagacauaucuucu

SEQ ID NO: 2160294 - RNA, 19 nt, Artificial Sequence
  Description of Artificial Sequence: Synthetic oligonucleotide
  Sense strand starting at position 3141 of SEQ ID NO: 1882959
gaagauaugucuguggacu

SEQ ID NO: 2160295 - RNA, 19 nt, Artificial Sequence
  Description of Artificial Sequence: Synthetic oligonucleotide
  Antisense strand to SEQ ID NO: 2160294
aguccacagacauaucuuc

SEQ ID NO: 2160296 - RNA, 19 nt, Artificial Sequence
  Description of Artificial Sequence: Synthetic oligonucleotide
  Sense strand starting at position 3142 of SEQ ID NO: 1882959
aagauaugucuguggacuu

SEQ ID NO: 2160297 - RNA, 19 nt, Artificial Sequence
  Description of Artificial Sequence: Synthetic oligonucleotide
  Antisense strand to SEQ ID NO: 2160296
aaguccacagacauaucuu

SEQ ID NO: 2160298 - RNA, 19 nt, Artificial Sequence
  Description of Artificial Sequence: Synthetic oligonucleotide
  Sense strand starting at position 3600 of SEQ ID NO: 1882959
ccguauccaccaugacuuu

SEQ ID NO: 2160299 - RNA, 19 nt, Artificial Sequence
  Description of Artificial Sequence: Synthetic oligonucleotide
  Antisense strand to SEQ ID NO: 2160298
aaagucaugguggauacgg

SEQ ID NO: 2160300 - RNA, 19 nt, Artificial Sequence
  Description of Artificial Sequence: Synthetic oligonucleotide
  Sense strand starting at position 3701 of SEQ ID NO: 1882959
gcagguucucaguaggcaa

SEQ ID NO: 2160301 - RNA, 19 nt, Artificial Sequence
  Description of Artificial Sequence: Synthetic oligonucleotide
  Antisense strand to SEQ ID NO: 2160300
uugccuacugagaaccugc

SEQ ID NO: 2160302 - RNA, 19 nt, Artificial Sequence
  Description of Artificial Sequence: Synthetic oligonucleotide
  Sense strand starting at position 3901 of SEQ ID NO: 1882959
guauauggauuugaagaga

SEQ ID NO: 2160303 - RNA, 19 nt, Artificial Sequence
  Description of Artificial Sequence: Synthetic oligonucleotide
  Antisense strand to SEQ ID NO: 2160302
ucucuucaaauccauauac

SEQ ID NO: 2160304 - RNA, 19 nt, Artificial Sequence
  Description of Artificial Sequence: Synthetic oligonucleotide
  Sense strand starting at position 44 of SEQ ID NO: 1882960
cuuggcucuuaugaaauaa

SEQ ID NO: 2160305 - RNA, 19 nt, Artificial Sequence
  Description of Artificial Sequence: Synthetic oligonucleotide
  Antisense strand to SEQ ID NO: 2160304
uuauuucauaagagccaag

SEQ ID NO: 2160306 - RNA, 19 nt, Artificial Sequence
  Description of Artificial Sequence: Synthetic oligonucleotide
  Sense strand starting at position 83 of SEQ ID NO: 1882960
ccaguaauccugugccuau

SEQ ID NO: 2160307 - RNA, 19 nt, Artificial Sequence
  Description of Artificial Sequence: Synthetic oligonucleotide
  Antisense strand to SEQ ID NO: 2160306
auaggcacaggauuacugg

SEQ ID NO: 2160308 - RNA, 19 nt, Artificial Sequence
  Description of Artificial Sequence: Synthetic oligonucleotide
  Sense strand starting at position 86 of SEQ ID NO: 1882960
guaauccugugccuauuua

SEQ ID NO: 2160309 - RNA, 19 nt, Artificial Sequence
  Description of Artificial Sequence: Synthetic oligonucleotide
  Antisense strand to SEQ ID NO: 2160308
uaaauaggcacaggauuac

SEQ ID NO: 2160310 - RNA, 19 nt, Artificial Sequence
  Description of Artificial Sequence: Synthetic oligonucleotide
  Sense strand starting at position 114 of SEQ ID NO: 1882960
aaugaagacccauguguua

SEQ ID NO: 2160311 - RNA, 19 nt, Artificial Sequence
  Description of Artificial Sequence: Synthetic oligonucleotide
  Antisense strand to SEQ ID NO: 2160310
uaacacaugggucuucauu

SEQ ID NO: 2160312 - RNA, 19 nt, Artificial Sequence
  Description of Artificial Sequence: Synthetic oligonucleotide
  Sense strand starting at position 632 of SEQ ID NO: 1882960
gguuaaauauaguuugguu

SEQ ID NO: 2160313 - RNA, 19 nt, Artificial Sequence
  Description of Artificial Sequence: Synthetic oligonucleotide
  Antisense strand to SEQ ID NO: 2160312
aaccaaacuauauuuaacc

SEQ ID NO: 2160314 - RNA, 19 nt, Artificial Sequence
  Description of Artificial Sequence: Synthetic oligonucleotide
  Sense strand starting at position 640 of SEQ ID NO: 1882960
auaguuugguucuauuuac

SEQ ID NO: 2160315 - RNA, 19 nt, Artificial Sequence
  Description of Artificial Sequence: Synthetic oligonucleotide
  Antisense strand to SEQ ID NO: 2160314
guaaauagaaccaaacuau

SEQ ID NO: 2160316 - RNA, 19 nt, Artificial Sequence
  Description of Artificial Sequence: Synthetic oligonucleotide
  Sense strand starting at position 646 of SEQ ID NO: 1882960
ugguucuauuuacaugaca

SEQ ID NO: 2160317 - RNA, 19 nt, Artificial Sequence
  Description of Artificial Sequence: Synthetic oligonucleotide
  Antisense strand to SEQ ID NO: 2160316
ugucauguaaauagaacca

SEQ ID NO: 2160318 - RNA, 19 nt, Artificial Sequence
  Description of Artificial Sequence: Synthetic oligonucleotide
  Sense strand starting at position 844 of SEQ ID NO: 1882960
ugugaugaguggucuggga

SEQ ID NO: 2160319 - RNA, 19 nt, Artificial Sequence
  Description of Artificial Sequence: Synthetic oligonucleotide
  Antisense strand to SEQ ID NO: 2160318
ucccagaccacucaucaca

SEQ ID NO: 2160320 - RNA, 19 nt, Artificial Sequence
  Description of Artificial Sequence: Synthetic oligonucleotide
  Sense strand starting at position 846 of SEQ ID NO: 1882960
ugaugaguggucugggaaa

SEQ ID NO: 2160321 - RNA, 19 nt, Artificial Sequence
  Description of Artificial Sequence: Synthetic oligonucleotide
  Antisense strand to SEQ ID NO: 2160320
uuucccagaccacucauca

SEQ ID NO: 2160322 - RNA, 19 nt, Artificial Sequence
  Description of Artificial Sequence: Synthetic oligonucleotide
  Sense strand starting at position 848 of SEQ ID NO: 1882960
augaguggucugggaaauc

SEQ ID NO: 2160323 - RNA, 19 nt, Artificial Sequence
  Description of Artificial Sequence: Synthetic oligonucleotide
  Antisense strand to SEQ ID NO: 2160322
gauuucccagaccacucau

SEQ ID NO: 2160324 - RNA, 19 nt, Artificial Sequence
  Description of Artificial Sequence: Synthetic oligonucleotide
  Sense strand starting at position 857 of SEQ ID NO: 1882960
cugggaaauccucgccuaa

SEQ ID NO: 2160325 - RNA, 19 nt, Artificial Sequence
  Description of Artificial Sequence: Synthetic oligonucleotide
  Antisense strand to SEQ ID NO: 2160324
uuaggcgaggauuucccag

SEQ ID NO: 2160326 - RNA, 19 nt, Artificial Sequence
  Description of Artificial Sequence: Synthetic oligonucleotide
  Sense strand starting at position 859 of SEQ ID NO: 1882960
gggaaauccucgccuaaca

SEQ ID NO: 2160327 - RNA, 19 nt, Artificial Sequence
  Description of Artificial Sequence: Synthetic oligonucleotide
  Antisense strand to SEQ ID NO: 2160326
uguuaggcgaggauuuccc

SEQ ID NO: 2160328 - RNA, 19 nt, Artificial Sequence
  Description of Artificial Sequence: Synthetic oligonucleotide
  Sense strand starting at position 1016 of SEQ ID NO: 1882960
gcuucugccucagugagaa

SEQ ID NO: 2160329 - RNA, 19 nt, Artificial Sequence
  Description of Artificial Sequence: Synthetic oligonucleotide
  Antisense strand to SEQ ID NO: 2160328
uucucacugaggcagaagc

SEQ ID NO: 2160330 - RNA, 19 nt, Artificial Sequence
  Description of Artificial Sequence: Synthetic oligonucleotide
  Sense strand starting at position 1135 of SEQ ID NO: 1882960
gggcuauguguggacuuag

SEQ ID NO: 2160331 - RNA, 19 nt, Artificial Sequence
  Description of Artificial Sequence: Synthetic oligonucleotide
  Antisense strand to SEQ ID NO: 2160330
cuaaguccacacauagccc

SEQ ID NO: 2160332 - RNA, 19 nt, Artificial Sequence
  Description of Artificial Sequence: Synthetic oligonucleotide
  Sense strand starting at position 1208 of SEQ ID NO: 1882960
uugagacauugugcugaga

SEQ ID NO: 2160333 - RNA, 19 nt, Artificial Sequence
  Description of Artificial Sequence: Synthetic oligonucleotide
  Antisense strand to SEQ ID NO: 2160332
ucucagcacaaugucucaa

SEQ ID NO: 2160334 - RNA, 19 nt, Artificial Sequence
  Description of Artificial Sequence: Synthetic oligonucleotide
  Sense strand starting at position 1483 of SEQ ID NO: 1882960
cagugcaacuaaugagaca

SEQ ID NO: 2160335 - RNA, 19 nt, Artificial Sequence
  Description of Artificial Sequence: Synthetic oligonucleotide
  Antisense strand to SEQ ID NO: 2160334
ugucucauuaguugcacug

SEQ ID NO: 2160336 - RNA, 19 nt, Artificial Sequence
  Description of Artificial Sequence: Synthetic oligonucleotide
  Sense strand starting at position 1715 of SEQ ID NO: 1882960
acaauugaccuccggaaga

SEQ ID NO: 2160337 - RNA, 19 nt, Artificial Sequence
  Description of Artificial Sequence: Synthetic oligonucleotide
  Antisense strand to SEQ ID NO: 2160336
ucuuccggaggucaauugu

SEQ ID NO: 2160338 - RNA, 19 nt, Artificial Sequence
  Description of Artificial Sequence: Synthetic oligonucleotide
  Sense strand starting at position 1776 of SEQ ID NO: 1882960
cagcauaucugccuggaga

SEQ ID NO: 2160339 - RNA, 19 nt, Artificial Sequence
  Description of Artificial Sequence: Synthetic oligonucleotide
  Antisense strand to SEQ ID NO: 2160338
ucuccaggcagauaugcug

SEQ ID NO: 2160340 - RNA, 19 nt, Artificial Sequence
  Description of Artificial Sequence: Synthetic oligonucleotide
  Sense strand starting at position 1777 of SEQ ID NO: 1882960
agcauaucugccuggagac

SEQ ID NO: 2160341 - RNA, 19 nt, Artificial Sequence
  Description of Artificial Sequence: Synthetic oligonucleotide
  Antisense strand to SEQ ID NO: 2160340
gucuccaggcagauaugcu

SEQ ID NO: 2160342 - RNA, 19 nt, Artificial Sequence
  Description of Artificial Sequence: Synthetic oligonucleotide
  Sense strand starting at position 1778 of SEQ ID NO: 1882960
gcauaucugccuggagaca

SEQ ID NO: 2160343 - RNA, 19 nt, Artificial Sequence
  Description of Artificial Sequence: Synthetic oligonucleotide
  Antisense strand to SEQ ID NO: 2160342
ugucuccaggcagauaugc

SEQ ID NO: 2160344 - RNA, 19 nt, Artificial Sequence
  Description of Artificial Sequence: Synthetic oligonucleotide
  Sense strand starting at position 1779 of SEQ ID NO: 1882960
cauaucugccuggagacau

SEQ ID NO: 2160345 - RNA, 19 nt, Artificial Sequence
  Description of Artificial Sequence: Synthetic oligonucleotide
  Antisense strand to SEQ ID NO: 2160344
augucuccaggcagauaug

SEQ ID NO: 2160346 - RNA, 19 nt, Artificial Sequence
  Description of Artificial Sequence: Synthetic oligonucleotide
  Sense strand starting at position 1864 of SEQ ID NO: 1882960
guuucucugcucuggagga

SEQ ID NO: 2160347 - RNA, 19 nt, Artificial Sequence
  Description of Artificial Sequence: Synthetic oligonucleotide
  Antisense strand to SEQ ID NO: 2160346
uccuccagagcagagaaac

SEQ ID NO: 2160348 - RNA, 19 nt, Artificial Sequence
  Description of Artificial Sequence: Synthetic oligonucleotide
  Sense strand starting at position 1893 of SEQ ID NO: 1882960
ggcccaggugucugaagau

SEQ ID NO: 2160349 - RNA, 19 nt, Artificial Sequence
  Description of Artificial Sequence: Synthetic oligonucleotide
  Antisense strand to SEQ ID NO: 2160348
aucuucagacaccugggcc

SEQ ID NO: 2160350 - RNA, 19 nt, Artificial Sequence
  Description of Artificial Sequence: Synthetic oligonucleotide
  Sense strand starting at position 1906 of SEQ ID NO: 1882960
gaagaugucuuccucugaa

SEQ ID NO: 2160351 - RNA, 19 nt, Artificial Sequence
  Description of Artificial Sequence: Synthetic oligonucleotide
  Antisense strand to SEQ ID NO: 2160350
uucagaggaagacaucuuc

SEQ ID NO: 2160352 - RNA, 19 nt, Artificial Sequence
  Description of Artificial Sequence: Synthetic oligonucleotide
  Sense strand starting at position 1956 of SEQ ID NO: 1882960
gcaggacuuccgugaccua

SEQ ID NO: 2160353 - RNA, 19 nt, Artificial Sequence
  Description of Artificial Sequence: Synthetic oligonucleotide
  Antisense strand to SEQ ID NO: 2160352
uaggucacggaaguccugc

SEQ ID NO: 2160354 - RNA, 19 nt, Artificial Sequence
  Description of Artificial Sequence: Synthetic oligonucleotide
  Sense strand starting at position 2188 of SEQ ID NO: 1882960
guaccugcuccgggucaaa

SEQ ID NO: 2160355 - RNA, 19 nt, Artificial Sequence
  Description of Artificial Sequence: Synthetic oligonucleotide
  Antisense strand to SEQ ID NO: 2160354
uuugacccggagcagguac

SEQ ID NO: 2160356 - RNA, 19 nt, Artificial Sequence
  Description of Artificial Sequence: Synthetic oligonucleotide
  Sense strand starting at position 2284 of SEQ ID NO: 1882960
aagggauuguccucagcag

SEQ ID NO: 2160357 - RNA, 19 nt, Artificial Sequence
  Description of Artificial Sequence: Synthetic oligonucleotide
  Antisense strand to SEQ ID NO: 2160356
cugcugaggacaaucccuu

SEQ ID NO: 2160358 - RNA, 19 nt, Artificial Sequence
  Description of Artificial Sequence: Synthetic oligonucleotide
  Sense strand starting at position 2954 of SEQ ID NO: 1882960
ggccuucuuaccugcggaa

SEQ ID NO: 2160359 - RNA, 19 nt, Artificial Sequence
  Description of Artificial Sequence: Synthetic oligonucleotide
  Antisense strand to SEQ ID NO: 2160358
uuccgcagguaagaaggcc

SEQ ID NO: 2160360 - RNA, 19 nt, Artificial Sequence
  Description of Artificial Sequence: Synthetic oligonucleotide
  Sense strand starting at position 3431 of SEQ ID NO: 1882960
auauaaggauacugauguu

SEQ ID NO: 2160361 - RNA, 19 nt, Artificial Sequence
  Description of Artificial Sequence: Synthetic oligonucleotide
  Antisense strand to SEQ ID NO: 2160360
aacaucaguauccuuauau

SEQ ID NO: 2160362 - RNA, 19 nt, Artificial Sequence
  Description of Artificial Sequence: Synthetic oligonucleotide
  Sense strand starting at position 3434 of SEQ ID NO: 1882960
uaaggauacugauguugau

SEQ ID NO: 2160363 - RNA, 19 nt, Artificial Sequence
  Description of Artificial Sequence: Synthetic oligonucleotide
  Antisense strand to SEQ ID NO: 2160362
aucaacaucaguauccuua

SEQ ID NO: 2160364 - RNA, 19 nt, Artificial Sequence
  Description of Artificial Sequence: Synthetic oligonucleotide
  Sense strand starting at position 3532 of SEQ ID NO: 1882960
ggaagauggcuuugccaug

SEQ ID NO: 2160365 - RNA, 19 nt, Artificial Sequence
  Description of Artificial Sequence: Synthetic oligonucleotide
  Antisense strand to SEQ ID NO: 2160364
cauggcaaagccaucuucc

SEQ ID NO: 2160366 - RNA, 19 nt, Artificial Sequence
  Description of Artificial Sequence: Synthetic oligonucleotide
  Sense strand starting at position 3533 of SEQ ID NO: 1882960
gaagauggcuuugccauga

SEQ ID NO: 2160367 - RNA, 19 nt, Artificial Sequence
  Description of Artificial Sequence: Synthetic oligonucleotide
  Antisense strand to SEQ ID NO: 2160366
ucauggcaaagccaucuuc

SEQ ID NO: 2160368 - RNA, 19 nt, Artificial Sequence
  Description of Artificial Sequence: Synthetic oligonucleotide
  Sense strand starting at position 3537 of SEQ ID NO: 1882960
auggcuuugccaugacgaa

SEQ ID NO: 2160369 - RNA, 19 nt, Artificial Sequence
  Description of Artificial Sequence: Synthetic oligonucleotide
  Antisense strand to SEQ ID NO: 2160368
uucgucauggcaaagccau

SEQ ID NO: 2160370 - RNA, 19 nt, Artificial Sequence
  Description of Artificial Sequence: Synthetic oligonucleotide
  Sense strand starting at position 3606 of SEQ ID NO: 1882960
caguuaaggagagguuuau

SEQ ID NO: 2160371 - RNA, 19 nt, Artificial Sequence
  Description of Artificial Sequence: Synthetic oligonucleotide
  Antisense strand to SEQ ID NO: 2160370
auaaaccucuccuuaacug

SEQ ID NO: 2160372 - RNA, 19 nt, Artificial Sequence
  Description of Artificial Sequence: Synthetic oligonucleotide
  Sense strand starting at position 3676 of SEQ ID NO: 1882960
ggcgcaaucugagcuuacu

SEQ ID NO: 2160373 - RNA, 19 nt, Artificial Sequence
  Description of Artificial Sequence: Synthetic oligonucleotide
  Antisense strand to SEQ ID NO: 2160372
aguaagcucagauugcgcc

SEQ ID NO: 2160374 - RNA, 19 nt, Artificial Sequence
  Description of Artificial Sequence: Synthetic oligonucleotide
  Sense strand starting at position 3891 of SEQ ID NO: 1882960
acauaaagaugugagucau

SEQ ID NO: 2160375 - RNA, 19 nt, Artificial Sequence
  Description of Artificial Sequence: Synthetic oligonucleotide
  Antisense strand to SEQ ID NO: 2160374
augacucacaucuuuaugu

SEQ ID NO: 2160376 - RNA, 19 nt, Artificial Sequence
  Description of Artificial Sequence: Synthetic oligonucleotide
  Sense strand starting at position 3895 of SEQ ID NO: 1882960
aaagaugugagucauggca

SEQ ID NO: 2160377 - RNA, 19 nt, Artificial Sequence
  Description of Artificial Sequence: Synthetic oligonucleotide
  Antisense strand to SEQ ID NO: 2160376
ugccaugacucacaucuuu

SEQ ID NO: 2160378 - RNA, 19 nt, Artificial Sequence
  Description of Artificial Sequence: Synthetic oligonucleotide
  Sense strand starting at position 3926 of SEQ ID NO: 1882960
gagguuuaaaugugaggaa

SEQ ID NO: 2160379 - RNA, 19 nt, Artificial Sequence
  Description of Artificial Sequence: Synthetic oligonucleotide
  Antisense strand to SEQ ID NO: 2160378
uuccucacauuuaaaccuc

SEQ ID NO: 2160380 - RNA, 19 nt, Artificial Sequence
  Description of Artificial Sequence: Synthetic oligonucleotide
  Sense strand starting at position 3927 of SEQ ID NO: 1882960
agguuuaaaugugaggaac

SEQ ID NO: 2160381 - RNA, 19 nt, Artificial Sequence
  Description of Artificial Sequence: Synthetic oligonucleotide
  Antisense strand to SEQ ID NO: 2160380
guuccucacauuuaaaccu

SEQ ID NO: 2160382 - RNA, 19 nt, Artificial Sequence
  Description of Artificial Sequence: Synthetic oligonucleotide
  Sense strand starting at position 3929 of SEQ ID NO: 1882960
guuuaaaugugaggaacag

SEQ ID NO: 2160383 - RNA, 19 nt, Artificial Sequence
  Description of Artificial Sequence: Synthetic oligonucleotide
  Antisense strand to SEQ ID NO: 2160382
cuguuccucacauuuaaac

SEQ ID NO: 2160384 - RNA, 19 nt, Artificial Sequence
  Description of Artificial Sequence: Synthetic oligonucleotide
  Sense strand starting at position 143 of SEQ ID NO: 1882961
cggucuggaugccuugaaa

SEQ ID NO: 2160385 - RNA, 19 nt, Artificial Sequence
  Description of Artificial Sequence: Synthetic oligonucleotide
  Antisense strand to SEQ ID NO: 2160384
uuucaaggcauccagaccg

SEQ ID NO: 2160386 - RNA, 19 nt, Artificial Sequence
  Description of Artificial Sequence: Synthetic oligonucleotide
  Sense strand starting at position 347 of SEQ ID NO: 1882961
gggagcugacuggguaaua

SEQ ID NO: 2160387 - RNA, 19 nt, Artificial Sequence
  Description of Artificial Sequence: Synthetic oligonucleotide
  Antisense strand to SEQ ID NO: 2160386
uauuacccagucagcuccc

SEQ ID NO: 2160388 - RNA, 19 nt, Artificial Sequence
  Description of Artificial Sequence: Synthetic oligonucleotide
  Sense strand starting at position 461 of SEQ ID NO: 1882961
ugcccugagugauuucuuu

SEQ ID NO: 2160389 - RNA, 19 nt, Artificial Sequence
  Description of Artificial Sequence: Synthetic oligonucleotide
  Antisense strand to SEQ ID NO: 2160388
aaagaaaucacucagggca

SEQ ID NO: 2160390 - RNA, 19 nt, Artificial Sequence
  Description of Artificial Sequence: Synthetic oligonucleotide
  Sense strand starting at position 530 of SEQ ID NO: 1882961
cuaagcaagugaucauaua

SEQ ID NO: 2160391 - RNA, 19 nt, Artificial Sequence
  Description of Artificial Sequence: Synthetic oligonucleotide
  Antisense strand to SEQ ID NO: 2160390
uauaugaucacuugcuuag

SEQ ID NO: 2160392 - RNA, 19 nt, Artificial Sequence
  Description of Artificial Sequence: Synthetic oligonucleotide
  Sense strand starting at position 567 of SEQ ID NO: 1882961
aggagauccuguuugauag

SEQ ID NO: 2160393 - RNA, 19 nt, Artificial Sequence
  Description of Artificial Sequence: Synthetic oligonucleotide
  Antisense strand to SEQ ID NO: 2160392
cuaucaaacaggaucuccu

SEQ ID NO: 2160394 - RNA, 19 nt, Artificial Sequence
  Description of Artificial Sequence: Synthetic oligonucleotide
  Sense strand starting at position 568 of SEQ ID NO: 1882961
ggagauccuguuugauagu

SEQ ID NO: 2160395 - RNA, 19 nt, Artificial Sequence
  Description of Artificial Sequence: Synthetic oligonucleotide
  Antisense strand to SEQ ID NO: 2160394
acuaucaaacaggaucucc

SEQ ID NO: 2160396 - RNA, 19 nt, Artificial Sequence
  Description of Artificial Sequence: Synthetic oligonucleotide
  Sense strand starting at position 574 of SEQ ID NO: 1882961
ccuguuugauaguuccacu

SEQ ID NO: 2160397 - RNA, 19 nt, Artificial Sequence
  Description of Artificial Sequence: Synthetic oligonucleotide
  Antisense strand to SEQ ID NO: 2160396
aguggaacuaucaaacagg

SEQ ID NO: 2160398 - RNA, 19 nt, Artificial Sequence
  Description of Artificial Sequence: Synthetic oligonucleotide
  Sense strand starting at position 705 of SEQ ID NO: 1882961
aagugaggaugacauuuaa

SEQ ID NO: 2160399 - RNA, 19 nt, Artificial Sequence
  Description of Artificial Sequence: Synthetic oligonucleotide
  Antisense strand to SEQ ID NO: 2160398
uuaaaugucauccucacuu

SEQ ID NO: 2160400 - RNA, 19 nt, Artificial Sequence
  Description of Artificial Sequence: Synthetic oligonucleotide
  Sense strand starting at position 737 of SEQ ID NO: 1882961
agguuauaagacugaguua

SEQ ID NO: 2160401 - RNA, 19 nt, Artificial Sequence
  Description of Artificial Sequence: Synthetic oligonucleotide
  Antisense strand to SEQ ID NO: 2160400
uaacucagucuuauaaccu

SEQ ID NO: 2160402 - RNA, 19 nt, Artificial Sequence
  Description of Artificial Sequence: Synthetic oligonucleotide
  Sense strand starting at position 771 of SEQ ID NO: 1882961
ggauauauuuaguggaguc

SEQ ID NO: 2160403 - RNA, 19 nt, Artificial Sequence
  Description of Artificial Sequence: Synthetic oligonucleotide
  Antisense strand to SEQ ID NO: 2160402
gacuccacuaaauauaucc

SEQ ID NO: 2160404 - RNA, 19 nt, Artificial Sequence
  Description of Artificial Sequence: Synthetic oligonucleotide
  Sense strand starting at position 931 of SEQ ID NO: 1882961
accaaauugucagccaguu

SEQ ID NO: 2160405 - RNA, 19 nt, Artificial Sequence
  Description of Artificial Sequence: Synthetic oligonucleotide
  Antisense strand to SEQ ID NO: 2160404
aacuggcugacaauuuggu

SEQ ID NO: 2160406 - RNA, 19 nt, Artificial Sequence
  Description of Artificial Sequence: Synthetic oligonucleotide
  Sense strand starting at position 988 of SEQ ID NO: 1882961
aggcaugguauggguagaa

SEQ ID NO: 2160407 - RNA, 19 nt, Artificial Sequence
  Description of Artificial Sequence: Synthetic oligonucleotide
  Antisense strand to SEQ ID NO: 2160406
uucuacccauaccaugccu

SEQ ID NO: 2160408 - RNA, 19 nt, Artificial Sequence
  Description of Artificial Sequence: Synthetic oligonucleotide
  Sense strand starting at position 1151 of SEQ ID NO: 1882961
gacaaauugcauugggaac

SEQ ID NO: 2160409 - RNA, 19 nt, Artificial Sequence
  Description of Artificial Sequence: Synthetic oligonucleotide
  Antisense strand to SEQ ID NO: 2160408
guucccaaugcaauuuguc

SEQ ID NO: 2160410 - RNA, 19 nt, Artificial Sequence
  Description of Artificial Sequence: Synthetic oligonucleotide
  Sense strand starting at position 1353 of SEQ ID NO: 1882961
ugagauguuuagguuccaa

SEQ ID NO: 2160411 - RNA, 19 nt, Artificial Sequence
  Description of Artificial Sequence: Synthetic oligonucleotide
  Antisense strand to SEQ ID NO: 2160410
uuggaaccuaaacaucuca

SEQ ID NO: 2160412 - RNA, 19 nt, Artificial Sequence
  Description of Artificial Sequence: Synthetic oligonucleotide
  Sense strand starting at position 1443 of SEQ ID NO: 1882961
guggaagggugcccauaau

SEQ ID NO: 2160413 - RNA, 19 nt, Artificial Sequence
  Description of Artificial Sequence: Synthetic oligonucleotide
  Antisense strand to SEQ ID NO: 2160412
auuaugggcacccuuccac

SEQ ID NO: 2160414 - RNA, 19 nt, Artificial Sequence
  Description of Artificial Sequence: Synthetic oligonucleotide
  Sense strand starting at position 1611 of SEQ ID NO: 1882961
ggaagccugucuucccaga

SEQ ID NO: 2160415 - RNA, 19 nt, Artificial Sequence
  Description of Artificial Sequence: Synthetic oligonucleotide
  Antisense strand to SEQ ID NO: 2160414
ucugggaagacaggcuucc

SEQ ID NO: 2160416 - RNA, 19 nt, Artificial Sequence
  Description of Artificial Sequence: Synthetic oligonucleotide
  Sense strand starting at position 1613 of SEQ ID NO: 1882961
aagccugucuucccagaga

SEQ ID NO: 2160417 - RNA, 19 nt, Artificial Sequence
  Description of Artificial Sequence: Synthetic oligonucleotide
  Antisense strand to SEQ ID NO: 2160416
ucucugggaagacaggcuu

SEQ ID NO: 2160418 - RNA, 19 nt, Artificial Sequence
  Description of Artificial Sequence: Synthetic oligonucleotide
  Sense strand starting at position 1616 of SEQ ID NO: 1882961
ccugucuucccagagauaa

SEQ ID NO: 2160419 - RNA, 19 nt, Artificial Sequence
  Description of Artificial Sequence: Synthetic oligonucleotide
  Antisense strand to SEQ ID NO: 2160418
uuaucucugggaagacagg

SEQ ID NO: 2160420 - RNA, 19 nt, Artificial Sequence
  Description of Artificial Sequence: Synthetic oligonucleotide
  Sense strand starting at position 1634 of SEQ ID NO: 1882961
auccaugaccaauguuaga

SEQ ID NO: 2160421 - RNA, 19 nt, Artificial Sequence
  Description of Artificial Sequence: Synthetic oligonucleotide
  Antisense strand to SEQ ID NO: 2160420
ucuaacauuggucauggau

SEQ ID NO: 2160422 - RNA, 19 nt, Artificial Sequence
  Description of Artificial Sequence: Synthetic oligonucleotide
  Sense strand starting at position 1639 of SEQ ID NO: 1882961
ugaccaauguuagauuuag

SEQ ID NO: 2160423 - RNA, 19 nt, Artificial Sequence
  Description of Artificial Sequence: Synthetic oligonucleotide
  Antisense strand to SEQ ID NO: 2160422
cuaaaucuaacauugguca

SEQ ID NO: 2160424 - RNA, 19 nt, Artificial Sequence
  Description of Artificial Sequence: Synthetic oligonucleotide
  Sense strand starting at position 1645 of SEQ ID NO: 1882961
auguuagauuuaggaaaca

SEQ ID NO: 2160425 - RNA, 19 nt, Artificial Sequence
  Description of Artificial Sequence: Synthetic oligonucleotide
  Antisense strand to SEQ ID NO: 2160424
uguuuccuaaaucuaacau

SEQ ID NO: 2160426 - RNA, 19 nt, Artificial Sequence
  Description of Artificial Sequence: Synthetic oligonucleotide
  Sense strand starting at position 1694 of SEQ ID NO: 1882961
aaaggaaaguuugagaaag

SEQ ID NO: 2160427 - RNA, 19 nt, Artificial Sequence
  Description of Artificial Sequence: Synthetic oligonucleotide
  Antisense strand to SEQ ID NO: 2160426
cuuucucaaacuuuccuuu

SEQ ID NO: 2160428 - RNA, 19 nt, Artificial Sequence
  Description of Artificial Sequence: Synthetic oligonucleotide
  Sense strand starting at position 1696 of SEQ ID NO: 1882961
aggaaaguuugagaaagga

SEQ ID NO: 2160429 - RNA, 19 nt, Artificial Sequence
  Description of Artificial Sequence: Synthetic oligonucleotide
  Antisense strand to SEQ ID NO: 2160428
uccuuucucaaacuuuccu

SEQ ID NO: 2160430 - RNA, 19 nt, Artificial Sequence
  Description of Artificial Sequence: Synthetic oligonucleotide
  Sense strand starting at position 1880 of SEQ ID NO: 1882961
uggcacagucuggauugaa

SEQ ID NO: 2160431 - RNA, 19 nt, Artificial Sequence
  Description of Artificial Sequence: Synthetic oligonucleotide
  Antisense strand to SEQ ID NO: 2160430
uucaauccagacugugcca

SEQ ID NO: 2160432 - RNA, 19 nt, Artificial Sequence
  Description of Artificial Sequence: Synthetic oligonucleotide
  Sense strand starting at position 2076 of SEQ ID NO: 1882961
acuggaauaugccugacaa

SEQ ID NO: 2160433 - RNA, 19 nt, Artificial Sequence
  Description of Artificial Sequence: Synthetic oligonucleotide
  Antisense strand to SEQ ID NO: 2160432
uugucaggcauauuccagu

SEQ ID NO: 2160434 - RNA, 19 nt, Artificial Sequence
  Description of Artificial Sequence: Synthetic oligonucleotide
  Sense strand starting at position 2077 of SEQ ID NO: 1882961
cuggaauaugccugacaau

SEQ ID NO: 2160435 - RNA, 19 nt, Artificial Sequence
  Description of Artificial Sequence: Synthetic oligonucleotide
  Antisense strand to SEQ ID NO: 2160434
auugucaggcauauuccag

SEQ ID NO: 2160436 - RNA, 19 nt, Artificial Sequence
  Description of Artificial Sequence: Synthetic oligonucleotide
  Sense strand starting at position 2166 of SEQ ID NO: 1882961
caucauggcuaagugaaga

SEQ ID NO: 2160437 - RNA, 19 nt, Artificial Sequence
  Description of Artificial Sequence: Synthetic oligonucleotide
  Antisense strand to SEQ ID NO: 2160436
ucuucacuuagccaugaug

SEQ ID NO: 2160438 - RNA, 19 nt, Artificial Sequence
  Description of Artificial Sequence: Synthetic oligonucleotide
  Sense strand starting at position 2171 of SEQ ID NO: 1882961
uggcuaagugaagagcuau

SEQ ID NO: 2160439 - RNA, 19 nt, Artificial Sequence
  Description of Artificial Sequence: Synthetic oligonucleotide
  Antisense strand to SEQ ID NO: 2160438
auagcucuucacuuagcca

SEQ ID NO: 2160440 - RNA, 19 nt, Artificial Sequence
  Description of Artificial Sequence: Synthetic oligonucleotide
  Sense strand starting at position 2566 of SEQ ID NO: 1882961
aauugauaugaaugcaguu

SEQ ID NO: 2160441 - RNA, 19 nt, Artificial Sequence
  Description of Artificial Sequence: Synthetic oligonucleotide
  Antisense strand to SEQ ID NO: 2160440
aacugcauucauaucaauu

SEQ ID NO: 2160442 - RNA, 19 nt, Artificial Sequence
  Description of Artificial Sequence: Synthetic oligonucleotide
  Sense strand starting at position 2722 of SEQ ID NO: 1882961
uuagauaauuacguuggau

SEQ ID NO: 2160443 - RNA, 19 nt, Artificial Sequence
  Description of Artificial Sequence: Synthetic oligonucleotide
  Antisense strand to SEQ ID NO: 2160442
auccaacguaauuaucuaa

SEQ ID NO: 2160444 - RNA, 19 nt, Artificial Sequence
  Description of Artificial Sequence: Synthetic oligonucleotide
  Sense strand starting at position 2724 of SEQ ID NO: 1882961
agauaauuacguuggauaa

SEQ ID NO: 2160445 - RNA, 19 nt, Artificial Sequence
  Description of Artificial Sequence: Synthetic oligonucleotide
  Antisense strand to SEQ ID NO: 2160444
uuauccaacguaauuaucu

SEQ ID NO: 2160446 - RNA, 19 nt, Artificial Sequence
  Description of Artificial Sequence: Synthetic oligonucleotide
  Sense strand starting at position 2725 of SEQ ID NO: 1882961
gauaauuacguuggauaau

SEQ ID NO: 2160447 - RNA, 19 nt, Artificial Sequence
  Description of Artificial Sequence: Synthetic oligonucleotide
  Antisense strand to SEQ ID NO: 2160446
auuauccaacguaauuauc

SEQ ID NO: 2160448 - RNA, 19 nt, Artificial Sequence
  Description of Artificial Sequence: Synthetic oligonucleotide
  Sense strand starting at position 2859 of SEQ ID NO: 1882961
uuaaacaaaucugugucua

SEQ ID NO: 2160449 - RNA, 19 nt, Artificial Sequence
  Description of Artificial Sequence: Synthetic oligonucleotide
  Antisense strand to SEQ ID NO: 2160448
uagacacagauuuguuuaa

SEQ ID NO: 2160450 - RNA, 19 nt, Artificial Sequence
  Description of Artificial Sequence: Synthetic oligonucleotide
  Sense strand starting at position 3150 of SEQ ID NO: 1882961
cagacaggucucuggacau

SEQ ID NO: 2160451 - RNA, 19 nt, Artificial Sequence
  Description of Artificial Sequence: Synthetic oligonucleotide
  Antisense strand to SEQ ID NO: 2160450
auguccagagaccugucug

SEQ ID NO: 2160452 - RNA, 19 nt, Artificial Sequence
  Description of Artificial Sequence: Synthetic oligonucleotide
  Sense strand starting at position 3493 of SEQ ID NO: 1882961
cgaacucuuggacaucuua

SEQ ID NO: 2160453 - RNA, 19 nt, Artificial Sequence
  Description of Artificial Sequence: Synthetic oligonucleotide
  Antisense strand to SEQ ID NO: 2160452
uaagauguccaagaguucg

SEQ ID NO: 2160454 - RNA, 19 nt, Artificial Sequence
  Description of Artificial Sequence: Synthetic oligonucleotide
  Sense strand starting at position 3888 of SEQ ID NO: 1882961
aauccauggguauguuaau

SEQ ID NO: 2160455 - RNA, 19 nt, Artificial Sequence
  Description of Artificial Sequence: Synthetic oligonucleotide
  Antisense strand to SEQ ID NO: 2160454
auuaacauacccauggauu

SEQ ID NO: 2160456 - RNA, 19 nt, Artificial Sequence
  Description of Artificial Sequence: Synthetic oligonucleotide
  Sense strand starting at position 3894 of SEQ ID NO: 1882961
uggguauguuaauccagaa

SEQ ID NO: 2160457 - RNA, 19 nt, Artificial Sequence
  Description of Artificial Sequence: Synthetic oligonucleotide
  Antisense strand to SEQ ID NO: 2160456
uucuggauuaacauaccca

SEQ ID NO: 2160458 - RNA, 19 nt, Artificial Sequence
  Description of Artificial Sequence: Synthetic oligonucleotide
  Sense strand starting at position 3964 of SEQ ID NO: 1882961
ggaggugugcccuggagac

SEQ ID NO: 2160459 - RNA, 19 nt, Artificial Sequence
  Description of Artificial Sequence: Synthetic oligonucleotide
  Antisense strand to SEQ ID NO: 2160458
gucuccagggcacaccucc

SEQ ID NO: 2160460 - RNA, 19 nt, Artificial Sequence
  Description of Artificial Sequence: Synthetic oligonucleotide
  Sense strand starting at position 3966 of SEQ ID NO: 1882961
aggugugcccuggagacaa

SEQ ID NO: 2160461 - RNA, 19 nt, Artificial Sequence
  Description of Artificial Sequence: Synthetic oligonucleotide
  Antisense strand to SEQ ID NO: 2160460
uugucuccagggcacaccu

SEQ ID NO: 2160462 - RNA, 19 nt, Artificial Sequence
  Description of Artificial Sequence: Synthetic oligonucleotide
  Sense strand starting at position 3978 of SEQ ID NO: 1882961
gagacaagucuaugucuuu

SEQ ID NO: 2160463 - RNA, 19 nt, Artificial Sequence
  Description of Artificial Sequence: Synthetic oligonucleotide
  Antisense strand to SEQ ID NO: 2160462
aaagacauagacuugucuc

SEQ ID NO: 2160464 - RNA, 19 nt, Artificial Sequence
  Description of Artificial Sequence: Synthetic oligonucleotide
  Sense strand starting at position 810 of SEQ ID NO: 1882962
guuccugaucuuggaggca

SEQ ID NO: 2160465 - RNA, 19 nt, Artificial Sequence
  Description of Artificial Sequence: Synthetic oligonucleotide
  Antisense strand to SEQ ID NO: 2160464
ugccuccaagaucaggaac

SEQ ID NO: 2160466 - RNA, 19 nt, Artificial Sequence
  Description of Artificial Sequence: Synthetic oligonucleotide
  Sense strand starting at position 924 of SEQ ID NO: 1882962
ccugguuuguggaguguuu

SEQ ID NO: 2160467 - RNA, 19 nt, Artificial Sequence
  Description of Artificial Sequence: Synthetic oligonucleotide
  Antisense strand to SEQ ID NO: 2160466
aaacacuccacaaaccagg

SEQ ID NO: 2160468 - RNA, 19 nt, Artificial Sequence
  Description of Artificial Sequence: Synthetic oligonucleotide
  Sense strand starting at position 1395 of SEQ ID NO: 1882962
ggaccacagucuugcucaa

SEQ ID NO: 2160469 - RNA, 19 nt, Artificial Sequence
  Description of Artificial Sequence: Synthetic oligonucleotide
  Antisense strand to SEQ ID NO: 2160468
uugagcaagacuguggucc

SEQ ID NO: 2160470 - RNA, 19 nt, Artificial Sequence
  Description of Artificial Sequence: Synthetic oligonucleotide
  Sense strand starting at position 1667 of SEQ ID NO: 1882962
ggagguuguucccucauac

SEQ ID NO: 2160471 - RNA, 19 nt, Artificial Sequence
  Description of Artificial Sequence: Synthetic oligonucleotide
  Antisense strand to SEQ ID NO: 2160470
guaugagggaacaaccucc

SEQ ID NO: 2160472 - RNA, 19 nt, Artificial Sequence
  Description of Artificial Sequence: Synthetic oligonucleotide
  Sense strand starting at position 2046 of SEQ ID NO: 1882962
gcccauccucuccagagua

SEQ ID NO: 2160473 - RNA, 19 nt, Artificial Sequence
  Description of Artificial Sequence: Synthetic oligonucleotide
  Antisense strand to SEQ ID NO: 2160472
uacucuggagaggaugggc

SEQ ID NO: 2160474 - RNA, 19 nt, Artificial Sequence
  Description of Artificial Sequence: Synthetic oligonucleotide
  Sense strand starting at position 2778 of SEQ ID NO: 1882962
gacugacucuucguuccau

SEQ ID NO: 2160475 - RNA, 19 nt, Artificial Sequence
  Description of Artificial Sequence: Synthetic oligonucleotide
  Antisense strand to SEQ ID NO: 2160474
auggaacgaagagucaguc

SEQ ID NO: 2160476 - RNA, 19 nt, Artificial Sequence
  Description of Artificial Sequence: Synthetic oligonucleotide
  Sense strand starting at position 2779 of SEQ ID NO: 1882962
acugacucuucguuccauu

SEQ ID NO: 2160477 - RNA, 19 nt, Artificial Sequence
  Description of Artificial Sequence: Synthetic oligonucleotide
  Antisense strand to SEQ ID NO: 2160476
aauggaacgaagagucagu

SEQ ID NO: 2160478 - RNA, 19 nt, Artificial Sequence
  Description of Artificial Sequence: Synthetic oligonucleotide
  Sense strand starting at position 2950 of SEQ ID NO: 1882962
cgugcauucuccuuagaug

SEQ ID NO: 2160479 - RNA, 19 nt, Artificial Sequence
  Description of Artificial Sequence: Synthetic oligonucleotide
  Antisense strand to SEQ ID NO: 2160478
caucuaaggagaaugcacg

SEQ ID NO: 2160480 - RNA, 19 nt, Artificial Sequence
  Description of Artificial Sequence: Synthetic oligonucleotide
  Sense strand starting at position 2953 of SEQ ID NO: 1882962
gcauucuccuuagaugcaa

SEQ ID NO: 2160481 - RNA, 19 nt, Artificial Sequence
  Description of Artificial Sequence: Synthetic oligonucleotide
  Antisense strand to SEQ ID NO: 2160480
uugcaucuaaggagaaugc

SEQ ID NO: 2160482 - RNA, 19 nt, Artificial Sequence
  Description of Artificial Sequence: Synthetic oligonucleotide
  Sense strand starting at position 2965 of SEQ ID NO: 1882962
gaugcaaggugcguguuua

SEQ ID NO: 2160483 - RNA, 19 nt, Artificial Sequence
  Description of Artificial Sequence: Synthetic oligonucleotide
  Antisense strand to SEQ ID NO: 2160482
uaaacacgcaccuugcauc

SEQ ID NO: 2160484 - RNA, 19 nt, Artificial Sequence
  Description of Artificial Sequence: Synthetic oligonucleotide
  Sense strand starting at position 2966 of SEQ ID NO: 1882962
augcaaggugcguguuuau

SEQ ID NO: 2160485 - RNA, 19 nt, Artificial Sequence
  Description of Artificial Sequence: Synthetic oligonucleotide
  Antisense strand to SEQ ID NO: 2160484
auaaacacgcaccuugcau

SEQ ID NO: 2160486 - RNA, 19 nt, Artificial Sequence
  Description of Artificial Sequence: Synthetic oligonucleotide
  Sense strand starting at position 2973 of SEQ ID NO: 1882962
gugcguguuuaugucacuu

SEQ ID NO: 2160487 - RNA, 19 nt, Artificial Sequence
  Description of Artificial Sequence: Synthetic oligonucleotide
  Antisense strand to SEQ ID NO: 2160486
aagugacauaaacacgcac

SEQ ID NO: 2160488 - RNA, 19 nt, Artificial Sequence
  Description of Artificial Sequence: Synthetic oligonucleotide
  Sense strand starting at position 3255 of SEQ ID NO: 1882962
ggaugcaguguucagcaga

SEQ ID NO: 2160489 - RNA, 19 nt, Artificial Sequence
  Description of Artificial Sequence: Synthetic oligonucleotide
  Antisense strand to SEQ ID NO: 2160488
ucugcugaacacugcaucc

SEQ ID NO: 2160490 - RNA, 19 nt, Artificial Sequence
  Description of Artificial Sequence: Synthetic oligonucleotide
  Sense strand starting at position 3306 of SEQ ID NO: 1882962
gagaacugcugcuuguaug

SEQ ID NO: 2160491 - RNA, 19 nt, Artificial Sequence
  Description of Artificial Sequence: Synthetic oligonucleotide
  Antisense strand to SEQ ID NO: 2160490
cauacaagcagcaguucuc

SEQ ID NO: 2160492 - RNA, 19 nt, Artificial Sequence
  Description of Artificial Sequence: Synthetic oligonucleotide
  Sense strand starting at position 3500 of SEQ ID NO: 1882962
cgcgcuaugccugaaggga

SEQ ID NO: 2160493 - RNA, 19 nt, Artificial Sequence
  Description of Artificial Sequence: Synthetic oligonucleotide
  Antisense strand to SEQ ID NO: 2160492
ucccuucaggcauagcgcg

SEQ ID NO: 2160494 - RNA, 19 nt, Artificial Sequence
  Description of Artificial Sequence: Synthetic oligonucleotide
  Sense strand starting at position 3520 of SEQ ID NO: 1882962
auacaagugcucugugucu

SEQ ID NO: 2160495 - RNA, 19 nt, Artificial Sequence
  Description of Artificial Sequence: Synthetic oligonucleotide
  Antisense strand to SEQ ID NO: 2160494
agacacagagcacuuguau

SEQ ID NO: 2160496 - RNA, 19 nt, Artificial Sequence
  Description of Artificial Sequence: Synthetic oligonucleotide
  Sense strand starting at position 3581 of SEQ ID NO: 1882962
gggcccauauuaucuauau

SEQ ID NO: 2160497 - RNA, 19 nt, Artificial Sequence
  Description of Artificial Sequence: Synthetic oligonucleotide
  Antisense strand to SEQ ID NO: 2160496
auauagauaauaugggccc

SEQ ID NO: 2160498 - RNA, 19 nt, Artificial Sequence
  Description of Artificial Sequence: Synthetic oligonucleotide
  Sense strand starting at position 3647 of SEQ ID NO: 1882962
gccuguaggugggacuaua

SEQ ID NO: 2160499 - RNA, 19 nt, Artificial Sequence
  Description of Artificial Sequence: Synthetic oligonucleotide
  Antisense strand to SEQ ID NO: 2160498
uauagucccaccuacaggc

SEQ ID NO: 2160500 - RNA, 19 nt, Artificial Sequence
  Description of Artificial Sequence: Synthetic oligonucleotide
  Sense strand starting at position 3767 of SEQ ID NO: 1882962
gugugcugggauuacacau

SEQ ID NO: 2160501 - RNA, 19 nt, Artificial Sequence
  Description of Artificial Sequence: Synthetic oligonucleotide
  Antisense strand to SEQ ID NO: 2160500
auguguaaucccagcacac

SEQ ID NO: 2160502 - RNA, 19 nt, Artificial Sequence
  Description of Artificial Sequence: Synthetic oligonucleotide
  Sense strand starting at position 3905 of SEQ ID NO: 1882962
auuaaaucagcuggucaau

SEQ ID NO: 2160503 - RNA, 19 nt, Artificial Sequence
  Description of Artificial Sequence: Synthetic oligonucleotide
  Antisense strand to SEQ ID NO: 2160502
auugaccagcugauuuaau

SEQ ID NO: 2160504 - RNA, 19 nt, Artificial Sequence
  Description of Artificial Sequence: Synthetic oligonucleotide
  Sense strand starting at position 547 of SEQ ID NO: 1882963
ggcagaccuucuuugaaac

SEQ ID NO: 2160505 - RNA, 19 nt, Artificial Sequence
  Description of Artificial Sequence: Synthetic oligonucleotide
  Antisense strand to SEQ ID NO: 2160504
guuucaaagaaggucugcc

SEQ ID NO: 2160506 - RNA, 19 nt, Artificial Sequence
  Description of Artificial Sequence: Synthetic oligonucleotide
  Sense strand starting at position 559 of SEQ ID NO: 1882963
uugaaaccuuaccaggaaa

SEQ ID NO: 2160507 - RNA, 19 nt, Artificial Sequence
  Description of Artificial Sequence: Synthetic oligonucleotide
  Antisense strand to SEQ ID NO: 2160506
uuuccugguaagguuucaa

SEQ ID NO: 2160508 - RNA, 19 nt, Artificial Sequence
  Description of Artificial Sequence: Synthetic oligonucleotide
  Sense strand starting at position 667 of SEQ ID NO: 1882963
aguagacuuuccuuauauu

SEQ ID NO: 2160509 - RNA, 19 nt, Artificial Sequence
  Description of Artificial Sequence: Synthetic oligonucleotide
  Antisense strand to SEQ ID NO: 2160508
aauauaaggaaagucuacu

SEQ ID NO: 2160510 - RNA, 19 nt, Artificial Sequence
  Description of Artificial Sequence: Synthetic oligonucleotide
  Sense strand starting at position 945 of SEQ ID NO: 1882963
gcacucugcuuucuuaaga

SEQ ID NO: 2160511 - RNA, 19 nt, Artificial Sequence
  Description of Artificial Sequence: Synthetic oligonucleotide
  Antisense strand to SEQ ID NO: 2160510
ucuuaagaaagcagagugc

SEQ ID NO: 2160512 - RNA, 19 nt, Artificial Sequence
  Description of Artificial Sequence: Synthetic oligonucleotide
  Sense strand starting at position 983 of SEQ ID NO: 1882963
uguugugacaauuguuaua

SEQ ID NO: 2160513 - RNA, 19 nt, Artificial Sequence
  Description of Artificial Sequence: Synthetic oligonucleotide
  Antisense strand to SEQ ID NO: 2160512
uauaacaauugucacaaca

SEQ ID NO: 2160514 - RNA, 19 nt, Artificial Sequence
  Description of Artificial Sequence: Synthetic oligonucleotide
  Sense strand starting at position 1186 of SEQ ID NO: 1882963
uggcuuagagcguauuugu

SEQ ID NO: 2160515 - RNA, 19 nt, Artificial Sequence
  Description of Artificial Sequence: Synthetic oligonucleotide
  Antisense strand to SEQ ID NO: 2160514
acaaauacgcucuaagcca

SEQ ID NO: 2160516 - RNA, 19 nt, Artificial Sequence
  Description of Artificial Sequence: Synthetic oligonucleotide
  Sense strand starting at position 1189 of SEQ ID NO: 1882963
cuuagagcguauuugucua

SEQ ID NO: 2160517 - RNA, 19 nt, Artificial Sequence
  Description of Artificial Sequence: Synthetic oligonucleotide
  Antisense strand to SEQ ID NO: 2160516
uagacaaauacgcucuaag

SEQ ID NO: 2160518 - RNA, 19 nt, Artificial Sequence
  Description of Artificial Sequence: Synthetic oligonucleotide
  Sense strand starting at position 1193 of SEQ ID NO: 1882963
gagcguauuugucuaggug

SEQ ID NO: 2160519 - RNA, 19 nt, Artificial Sequence
  Description of Artificial Sequence: Synthetic oligonucleotide
  Antisense strand to SEQ ID NO: 2160518
caccuagacaaauacgcuc

SEQ ID NO: 2160520 - RNA, 19 nt, Artificial Sequence
  Description of Artificial Sequence: Synthetic oligonucleotide
  Sense strand starting at position 1195 of SEQ ID NO: 1882963
gcguauuugucuaggugga

SEQ ID NO: 2160521 - RNA, 19 nt, Artificial Sequence
  Description of Artificial Sequence: Synthetic oligonucleotide
  Antisense strand to SEQ ID NO: 2160520
uccaccuagacaaauacgc

SEQ ID NO: 2160522 - RNA, 19 nt, Artificial Sequence
  Description of Artificial Sequence: Synthetic oligonucleotide
  Sense strand starting at position 1196 of SEQ ID NO: 1882963
cguauuugucuagguggau

SEQ ID NO: 2160523 - RNA, 19 nt, Artificial Sequence
  Description of Artificial Sequence: Synthetic oligonucleotide
  Antisense strand to SEQ ID NO: 2160522
auccaccuagacaaauacg

SEQ ID NO: 2160524 - RNA, 19 nt, Artificial Sequence
  Description of Artificial Sequence: Synthetic oligonucleotide
  Sense strand starting at position 1202 of SEQ ID NO: 1882963
ugucuagguggaugcuaau

SEQ ID NO: 2160525 - RNA, 19 nt, Artificial Sequence
  Description of Artificial Sequence: Synthetic oligonucleotide
  Antisense strand to SEQ ID NO: 2160524
auuagcauccaccuagaca

SEQ ID NO: 2160526 - RNA, 19 nt, Artificial Sequence
  Description of Artificial Sequence: Synthetic oligonucleotide
  Sense strand starting at position 1239 of SEQ ID NO: 1882963
guggcuucuaaauagcuga

SEQ ID NO: 2160527 - RNA, 19 nt, Artificial Sequence
  Description of Artificial Sequence: Synthetic oligonucleotide
  Antisense strand to SEQ ID NO: 2160526
ucagcuauuuagaagccac

SEQ ID NO: 2160528 - RNA, 19 nt, Artificial Sequence
  Description of Artificial Sequence: Synthetic oligonucleotide
  Sense strand starting at position 1347 of SEQ ID NO: 1882963
acguaauauagucaguucu

SEQ ID NO: 2160529 - RNA, 19 nt, Artificial Sequence
  Description of Artificial Sequence: Synthetic oligonucleotide
  Antisense strand to SEQ ID NO: 2160528
agaacugacuauauuacgu

SEQ ID NO: 2160530 - RNA, 19 nt, Artificial Sequence
  Description of Artificial Sequence: Synthetic oligonucleotide
  Sense strand starting at position 1357 of SEQ ID NO: 1882963
gucaguucucaugaggaga

SEQ ID NO: 2160531 - RNA, 19 nt, Artificial Sequence
  Description of Artificial Sequence: Synthetic oligonucleotide
  Antisense strand to SEQ ID NO: 2160530
ucuccucaugagaacugac

SEQ ID NO: 2160532 - RNA, 19 nt, Artificial Sequence
  Description of Artificial Sequence: Synthetic oligonucleotide
  Sense strand starting at position 1591 of SEQ ID NO: 1882963
auuauaguaucuguccuaa

SEQ ID NO: 2160533 - RNA, 19 nt, Artificial Sequence
  Description of Artificial Sequence: Synthetic oligonucleotide
  Antisense strand to SEQ ID NO: 2160532
uuaggacagauacuauaau

SEQ ID NO: 2160534 - RNA, 19 nt, Artificial Sequence
  Description of Artificial Sequence: Synthetic oligonucleotide
  Sense strand starting at position 1635 of SEQ ID NO: 1882963
agagcuuuguaacuggagu

SEQ ID NO: 2160535 - RNA, 19 nt, Artificial Sequence
  Description of Artificial Sequence: Synthetic oligonucleotide
  Antisense strand to SEQ ID NO: 2160534
acuccaguuacaaagcucu

SEQ ID NO: 2160536 - RNA, 19 nt, Artificial Sequence
  Description of Artificial Sequence: Synthetic oligonucleotide
  Sense strand starting at position 1684 of SEQ ID NO: 1882963
gucaaccguuacucacaaa

SEQ ID NO: 2160537 - RNA, 19 nt, Artificial Sequence
  Description of Artificial Sequence: Synthetic oligonucleotide
  Antisense strand to SEQ ID NO: 2160536
uuugugaguaacgguugac

SEQ ID NO: 2160538 - RNA, 19 nt, Artificial Sequence
  Description of Artificial Sequence: Synthetic oligonucleotide
  Sense strand starting at position 1708 of SEQ ID NO: 1882963
cguccucauuugcuuauga

SEQ ID NO: 2160539 - RNA, 19 nt, Artificial Sequence
  Description of Artificial Sequence: Synthetic oligonucleotide
  Antisense strand to SEQ ID NO: 2160538
ucauaagcaaaugaggacg

SEQ ID NO: 2160540 - RNA, 19 nt, Artificial Sequence
  Description of Artificial Sequence: Synthetic oligonucleotide
  Sense strand starting at position 1709 of SEQ ID NO: 1882963
guccucauuugcuuaugaa

SEQ ID NO: 2160541 - RNA, 19 nt, Artificial Sequence
  Description of Artificial Sequence: Synthetic oligonucleotide
  Antisense strand to SEQ ID NO: 2160540
uucauaagcaaaugaggac

SEQ ID NO: 2160542 - RNA, 19 nt, Artificial Sequence
  Description of Artificial Sequence: Synthetic oligonucleotide
  Sense strand starting at position 1849 of SEQ ID NO: 1882963
accuuucggcagugaggau

SEQ ID NO: 2160543 - RNA, 19 nt, Artificial Sequence
  Description of Artificial Sequence: Synthetic oligonucleotide
  Antisense strand to SEQ ID NO: 2160542
auccucacugccgaaaggu

SEQ ID NO: 2160544 - RNA, 19 nt, Artificial Sequence
  Description of Artificial Sequence: Synthetic oligonucleotide
  Sense strand starting at position 1967 of SEQ ID NO: 1882963
auuaaagccugaucugguu

SEQ ID NO: 2160545 - RNA, 19 nt, Artificial Sequence
  Description of Artificial Sequence: Synthetic oligonucleotide
  Antisense strand to SEQ ID NO: 2160544
aaccagaucaggcuuuaau

SEQ ID NO: 2160546 - RNA, 19 nt, Artificial Sequence
  Description of Artificial Sequence: Synthetic oligonucleotide
  Sense strand starting at position 2127 of SEQ ID NO: 1882963
ugagguccugacugaauau

SEQ ID NO: 2160547 - RNA, 19 nt, Artificial Sequence
  Description of Artificial Sequence: Synthetic oligonucleotide
  Antisense strand to SEQ ID NO: 2160546
auauucagucaggaccuca

SEQ ID NO: 2160548 - RNA, 19 nt, Artificial Sequence
  Description of Artificial Sequence: Synthetic oligonucleotide
  Sense strand starting at position 2176 of SEQ ID NO: 1882963
augagaacuccuugcauau

SEQ ID NO: 2160549 - RNA, 19 nt, Artificial Sequence
  Description of Artificial Sequence: Synthetic oligonucleotide
  Antisense strand to SEQ ID NO: 2160548
auaugcaaggaguucucau

SEQ ID NO: 2160550 - RNA, 19 nt, Artificial Sequence
  Description of Artificial Sequence: Synthetic oligonucleotide
  Sense strand starting at position 2225 of SEQ ID NO: 1882963
auuguaucuacgggccaga

SEQ ID NO: 2160551 - RNA, 19 nt, Artificial Sequence
  Description of Artificial Sequence: Synthetic oligonucleotide
  Antisense strand to SEQ ID NO: 2160550
ucuggcccguagauacaau

SEQ ID NO: 2160552 - RNA, 19 nt, Artificial Sequence
  Description of Artificial Sequence: Synthetic oligonucleotide
  Sense strand starting at position 2228 of SEQ ID NO: 1882963
guaucuacgggccagaaga

SEQ ID NO: 2160553 - RNA, 19 nt, Artificial Sequence
  Description of Artificial Sequence: Synthetic oligonucleotide
  Antisense strand to SEQ ID NO: 2160552
ucuucuggcccguagauac

SEQ ID NO: 2160554 - RNA, 19 nt, Artificial Sequence
  Description of Artificial Sequence: Synthetic oligonucleotide
  Sense strand starting at position 2254 of SEQ ID NO: 1882963
gugccaagauauguagaca

SEQ ID NO: 2160555 - RNA, 19 nt, Artificial Sequence
  Description of Artificial Sequence: Synthetic oligonucleotide
  Antisense strand to SEQ ID NO: 2160554
ugucuacauaucuuggcac

SEQ ID NO: 2160556 - RNA, 19 nt, Artificial Sequence
  Description of Artificial Sequence: Synthetic oligonucleotide
  Sense strand starting at position 2267 of SEQ ID NO: 1882963
uagacagaaguuugagcua

SEQ ID NO: 2160557 - RNA, 19 nt, Artificial Sequence
  Description of Artificial Sequence: Synthetic oligonucleotide
  Antisense strand to SEQ ID NO: 2160556
uagcucaaacuucugucua

SEQ ID NO: 2160558 - RNA, 19 nt, Artificial Sequence
  Description of Artificial Sequence: Synthetic oligonucleotide
  Sense strand starting at position 2272 of SEQ ID NO: 1882963
agaaguuugagcuacaguc

SEQ ID NO: 2160559 - RNA, 19 nt, Artificial Sequence
  Description of Artificial Sequence: Synthetic oligonucleotide
  Antisense strand to SEQ ID NO: 2160558
gacuguagcucaaacuucu

SEQ ID NO: 2160560 - RNA, 19 nt, Artificial Sequence
  Description of Artificial Sequence: Synthetic oligonucleotide
  Sense strand starting at position 2853 of SEQ ID NO: 1882963
cgcucauaguacuuauaca

SEQ ID NO: 2160561 - RNA, 19 nt, Artificial Sequence
  Description of Artificial Sequence: Synthetic oligonucleotide
  Antisense strand to SEQ ID NO: 2160560
uguauaaguacuaugagcg

SEQ ID NO: 2160562 - RNA, 19 nt, Artificial Sequence
  Description of Artificial Sequence: Synthetic oligonucleotide
  Sense strand starting at position 2896 of SEQ ID NO: 1882963
ccagcucacugguugggaa

SEQ ID NO: 2160563 - RNA, 19 nt, Artificial Sequence
  Description of Artificial Sequence: Synthetic oligonucleotide
  Antisense strand to SEQ ID NO: 2160562
uucccaaccagugagcugg

SEQ ID NO: 2160564 - RNA, 19 nt, Artificial Sequence
  Description of Artificial Sequence: Synthetic oligonucleotide
  Sense strand starting at position 3120 of SEQ ID NO: 1882963
uccaguacaucuuugauau

SEQ ID NO: 2160565 - RNA, 19 nt, Artificial Sequence
  Description of Artificial Sequence: Synthetic oligonucleotide
  Antisense strand to SEQ ID NO: 2160564
auaucaaagauguacugga

SEQ ID NO: 2160566 - RNA, 19 nt, Artificial Sequence
  Description of Artificial Sequence: Synthetic oligonucleotide
  Sense strand starting at position 3121 of SEQ ID NO: 1882963
ccaguacaucuuugauauc

SEQ ID NO: 2160567 - RNA, 19 nt, Artificial Sequence
  Description of Artificial Sequence: Synthetic oligonucleotide
  Antisense strand to SEQ ID NO: 2160566
gauaucaaagauguacugg

SEQ ID NO: 2160568 - RNA, 19 nt, Artificial Sequence
  Description of Artificial Sequence: Synthetic oligonucleotide
  Sense strand starting at position 3196 of SEQ ID NO: 1882963
gggcaaauggcuuagcaga

SEQ ID NO: 2160569 - RNA, 19 nt, Artificial Sequence
  Description of Artificial Sequence: Synthetic oligonucleotide
  Antisense strand to SEQ ID NO: 2160568
ucugcuaagccauuugccc

SEQ ID NO: 2160570 - RNA, 19 nt, Artificial Sequence
  Description of Artificial Sequence: Synthetic oligonucleotide
  Sense strand starting at position 3403 of SEQ ID NO: 1882963
gaaggaauuggcugacucu

SEQ ID NO: 2160571 - RNA, 19 nt, Artificial Sequence
  Description of Artificial Sequence: Synthetic oligonucleotide
  Antisense strand to SEQ ID NO: 2160570
agagucagccaauuccuuc

SEQ ID NO: 2160572 - RNA, 19 nt, Artificial Sequence
  Description of Artificial Sequence: Synthetic oligonucleotide
  Sense strand starting at position 3409 of SEQ ID NO: 1882963
auuggcugacucugagaga

SEQ ID NO: 2160573 - RNA, 19 nt, Artificial Sequence
  Description of Artificial Sequence: Synthetic oligonucleotide
  Antisense strand to SEQ ID NO: 2160572
ucucucagagucagccaau

SEQ ID NO: 2160574 - RNA, 19 nt, Artificial Sequence
  Description of Artificial Sequence: Synthetic oligonucleotide
  Sense strand starting at position 3412 of SEQ ID NO: 1882963
ggcugacucugagagaaau

SEQ ID NO: 2160575 - RNA, 19 nt, Artificial Sequence
  Description of Artificial Sequence: Synthetic oligonucleotide
  Antisense strand to SEQ ID NO: 2160574
auuucucucagagucagcc

SEQ ID NO: 2160576 - RNA, 19 nt, Artificial Sequence
  Description of Artificial Sequence: Synthetic oligonucleotide
  Sense strand starting at position 3526 of SEQ ID NO: 1882963
ugaaauggagucugcauaa

SEQ ID NO: 2160577 - RNA, 19 nt, Artificial Sequence
  Description of Artificial Sequence: Synthetic oligonucleotide
  Antisense strand to SEQ ID NO: 2160576
uuaugcagacuccauuuca

SEQ ID NO: 2160578 - RNA, 19 nt, Artificial Sequence
  Description of Artificial Sequence: Synthetic oligonucleotide
  Sense strand starting at position 3707 of SEQ ID NO: 1882963
agucaaacucacuggucua

SEQ ID NO: 2160579 - RNA, 19 nt, Artificial Sequence
  Description of Artificial Sequence: Synthetic oligonucleotide
  Antisense strand to SEQ ID NO: 2160578
uagaccagugaguuugacu

SEQ ID NO: 2160580 - RNA, 19 nt, Artificial Sequence
  Description of Artificial Sequence: Synthetic oligonucleotide
  Sense strand starting at position 3876 of SEQ ID NO: 1882963
aggcauuuaccauguguca

SEQ ID NO: 2160581 - RNA, 19 nt, Artificial Sequence
  Description of Artificial Sequence: Synthetic oligonucleotide
  Antisense strand to SEQ ID NO: 2160580
ugacacaugguaaaugccu

SEQ ID NO: 2160582 - RNA, 19 nt, Artificial Sequence
  Description of Artificial Sequence: Synthetic oligonucleotide
  Sense strand starting at position 3968 of SEQ ID NO: 1882963
ggaagaaacaguggcuuaa

SEQ ID NO: 2160583 - RNA, 19 nt, Artificial Sequence
  Description of Artificial Sequence: Synthetic oligonucleotide
  Antisense strand to SEQ ID NO: 2160582
uuaagccacuguuucuucc

SEQ ID NO: 2160584 - RNA, 19 nt, Artificial Sequence
  Description of Artificial Sequence: Synthetic oligonucleotide
  Sense strand starting at position 39 of SEQ ID NO: 1882964
gauccuacaugauggugaa

SEQ ID NO: 2160585 - RNA, 19 nt, Artificial Sequence
  Description of Artificial Sequence: Synthetic oligonucleotide
  Antisense strand to SEQ ID NO: 2160584
uucaccaucauguaggauc

SEQ ID NO: 2160586 - RNA, 19 nt, Artificial Sequence
  Description of Artificial Sequence: Synthetic oligonucleotide
  Sense strand starting at position 40 of SEQ ID NO: 1882964
auccuacaugauggugaau

SEQ ID NO: 2160587 - RNA, 19 nt, Artificial Sequence
  Description of Artificial Sequence: Synthetic oligonucleotide
  Antisense strand to SEQ ID NO: 2160586
auucaccaucauguaggau

SEQ ID NO: 2160588 - RNA, 19 nt, Artificial Sequence
  Description of Artificial Sequence: Synthetic oligonucleotide
  Sense strand starting at position 51 of SEQ ID NO: 1882964
uggugaauuguauaauugu

SEQ ID NO: 2160589 - RNA, 19 nt, Artificial Sequence
  Description of Artificial Sequence: Synthetic oligonucleotide
  Antisense strand to SEQ ID NO: 2160588
acaauuauacaauucacca

SEQ ID NO: 2160590 - RNA, 19 nt, Artificial Sequence
  Description of Artificial Sequence: Synthetic oligonucleotide
  Sense strand starting at position 58 of SEQ ID NO: 1882964
uuguauaauuguuucggua

SEQ ID NO: 2160591 - RNA, 19 nt, Artificial Sequence
  Description of Artificial Sequence: Synthetic oligonucleotide
  Antisense strand to SEQ ID NO: 2160590
uaccgaaacaauuauacaa

SEQ ID NO: 2160592 - RNA, 19 nt, Artificial Sequence
  Description of Artificial Sequence: Synthetic oligonucleotide
  Sense strand starting at position 60 of SEQ ID NO: 1882964
guauaauuguuucgguaua

SEQ ID NO: 2160593 - RNA, 19 nt, Artificial Sequence
  Description of Artificial Sequence: Synthetic oligonucleotide
  Antisense strand to SEQ ID NO: 2160592
uauaccgaaacaauuauac

SEQ ID NO: 2160594 - RNA, 19 nt, Artificial Sequence
  Description of Artificial Sequence: Synthetic oligonucleotide
  Sense strand starting at position 72 of SEQ ID NO: 1882964
cgguauauauuacauugua

SEQ ID NO: 2160595 - RNA, 19 nt, Artificial Sequence
  Description of Artificial Sequence: Synthetic oligonucleotide
  Antisense strand to SEQ ID NO: 2160594
uacaauguaauauauaccg

SEQ ID NO: 2160596 - RNA, 19 nt, Artificial Sequence
  Description of Artificial Sequence: Synthetic oligonucleotide
  Sense strand starting at position 99 of SEQ ID NO: 1882964
uguaauauauaccgaaaca

SEQ ID NO: 2160597 - RNA, 19 nt, Artificial Sequence
  Description of Artificial Sequence: Synthetic oligonucleotide
  Antisense strand to SEQ ID NO: 2160596
uguuucgguauauauuaca

SEQ ID NO: 2160598 - RNA, 19 nt, Artificial Sequence
  Description of Artificial Sequence: Synthetic oligonucleotide
  Sense strand starting at position 293 of SEQ ID NO: 1882964
cugcuauaaugucucugaa

SEQ ID NO: 2160599 - RNA, 19 nt, Artificial Sequence
  Description of Artificial Sequence: Synthetic oligonucleotide
  Antisense strand to SEQ ID NO: 2160598
uucagagacauuauagcag

SEQ ID NO: 2160600 - RNA, 19 nt, Artificial Sequence
  Description of Artificial Sequence: Synthetic oligonucleotide
  Sense strand starting at position 295 of SEQ ID NO: 1882964
gcuauaaugucucugaagg

SEQ ID NO: 2160601 - RNA, 19 nt, Artificial Sequence
  Description of Artificial Sequence: Synthetic oligonucleotide
  Antisense strand to SEQ ID NO: 2160600
ccuucagagacauuauagc

SEQ ID NO: 2160602 - RNA, 19 nt, Artificial Sequence
  Description of Artificial Sequence: Synthetic oligonucleotide
  Sense strand starting at position 296 of SEQ ID NO: 1882964
cuauaaugucucugaaggu

SEQ ID NO: 2160603 - RNA, 19 nt, Artificial Sequence
  Description of Artificial Sequence: Synthetic oligonucleotide
  Antisense strand to SEQ ID NO: 2160602
accuucagagacauuauag

SEQ ID NO: 2160604 - RNA, 19 nt, Artificial Sequence
  Description of Artificial Sequence: Synthetic oligonucleotide
  Sense strand starting at position 320 of SEQ ID NO: 1882964
ggcaguuccagcuagaaag

SEQ ID NO: 2160605 - RNA, 19 nt, Artificial Sequence
  Description of Artificial Sequence: Synthetic oligonucleotide
  Antisense strand to SEQ ID NO: 2160604
cuuucuagcuggaacugcc

SEQ ID NO: 2160606 - RNA, 19 nt, Artificial Sequence
  Description of Artificial Sequence: Synthetic oligonucleotide
  Sense strand starting at position 331 of SEQ ID NO: 1882964
cuagaaagcucaucugaga

SEQ ID NO: 2160607 - RNA, 19 nt, Artificial Sequence
  Description of Artificial Sequence: Synthetic oligonucleotide
  Antisense strand to SEQ ID NO: 2160606
ucucagaugagcuuucuag

SEQ ID NO: 2160608 - RNA, 19 nt, Artificial Sequence
  Description of Artificial Sequence: Synthetic oligonucleotide
  Sense strand starting at position 944 of SEQ ID NO: 1882964
gugccuguaauccaguuau

SEQ ID NO: 2160609 - RNA, 19 nt, Artificial Sequence
  Description of Artificial Sequence: Synthetic oligonucleotide
  Antisense strand to SEQ ID NO: 2160608
auaacuggauuacaggcac

SEQ ID NO: 2160610 - RNA, 19 nt, Artificial Sequence
  Description of Artificial Sequence: Synthetic oligonucleotide
  Sense strand starting at position 1133 of SEQ ID NO: 1882964
gucuguagggccugaaauc

SEQ ID NO: 2160611 - RNA, 19 nt, Artificial Sequence
  Description of Artificial Sequence: Synthetic oligonucleotide
  Antisense strand to SEQ ID NO: 2160610
gauuucaggcccuacagac

SEQ ID NO: 2160612 - RNA, 19 nt, Artificial Sequence
  Description of Artificial Sequence: Synthetic oligonucleotide
  Sense strand starting at position 1532 of SEQ ID NO: 1882964
ggcucauaugccugaggag

SEQ ID NO: 2160613 - RNA, 19 nt, Artificial Sequence
  Description of Artificial Sequence: Synthetic oligonucleotide
  Antisense strand to SEQ ID NO: 2160612
cuccucaggcauaugagcc

SEQ ID NO: 2160614 - RNA, 19 nt, Artificial Sequence
  Description of Artificial Sequence: Synthetic oligonucleotide
  Sense strand starting at position 1533 of SEQ ID NO: 1882964
gcucauaugccugaggaga

SEQ ID NO: 2160615 - RNA, 19 nt, Artificial Sequence
  Description of Artificial Sequence: Synthetic oligonucleotide
  Antisense strand to SEQ ID NO: 2160614
ucuccucaggcauaugagc

SEQ ID NO: 2160616 - RNA, 19 nt, Artificial Sequence
  Description of Artificial Sequence: Synthetic oligonucleotide
  Sense strand starting at position 1535 of SEQ ID NO: 1882964
ucauaugccugaggagaaa

SEQ ID NO: 2160617 - RNA, 19 nt, Artificial Sequence
  Description of Artificial Sequence: Synthetic oligonucleotide
  Antisense strand to SEQ ID NO: 2160616
uuucuccucaggcauauga

SEQ ID NO: 2160618 - RNA, 19 nt, Artificial Sequence
  Description of Artificial Sequence: Synthetic oligonucleotide
  Sense strand starting at position 1591 of SEQ ID NO: 1882964
gacccacauuuguggaaau

SEQ ID NO: 2160619 - RNA, 19 nt, Artificial Sequence
  Description of Artificial Sequence: Synthetic oligonucleotide
  Antisense strand to SEQ ID NO: 2160618
auuuccacaaauguggguc

SEQ ID NO: 2160620 - RNA, 19 nt, Artificial Sequence
  Description of Artificial Sequence: Synthetic oligonucleotide
  Sense strand starting at position 1668 of SEQ ID NO: 1882964
ggcugacauguugguacuu

SEQ ID NO: 2160621 - RNA, 19 nt, Artificial Sequence
  Description of Artificial Sequence: Synthetic oligonucleotide
  Antisense strand to SEQ ID NO: 2160620
aaguaccaacaugucagcc

SEQ ID NO: 2160622 - RNA, 19 nt, Artificial Sequence
  Description of Artificial Sequence: Synthetic oligonucleotide
  Sense strand starting at position 2227 of SEQ ID NO: 1882964
guguauauuugaggagcca

SEQ ID NO: 2160623 - RNA, 19 nt, Artificial Sequence
  Description of Artificial Sequence: Synthetic oligonucleotide
  Antisense strand to SEQ ID NO: 2160622
uggcuccucaaauauacac

SEQ ID NO: 2160624 - RNA, 19 nt, Artificial Sequence
  Description of Artificial Sequence: Synthetic oligonucleotide
  Sense strand starting at position 2755 of SEQ ID NO: 1882964
ugccauuucucccugaguc

SEQ ID NO: 2160625 - RNA, 19 nt, Artificial Sequence
  Description of Artificial Sequence: Synthetic oligonucleotide
  Antisense strand to SEQ ID NO: 2160624
gacucagggagaaauggca

SEQ ID NO: 2160626 - RNA, 19 nt, Artificial Sequence
  Description of Artificial Sequence: Synthetic oligonucleotide
  Sense strand starting at position 2756 of SEQ ID NO: 1882964
gccauuucucccugaguca

SEQ ID NO: 2160627 - RNA, 19 nt, Artificial Sequence
  Description of Artificial Sequence: Synthetic oligonucleotide
  Antisense strand to SEQ ID NO: 2160626
ugacucagggagaaauggc

SEQ ID NO: 2160628 - RNA, 19 nt, Artificial Sequence
  Description of Artificial Sequence: Synthetic oligonucleotide
  Sense strand starting at position 65 of SEQ ID NO: 1882965
auuacuauugcccaagagu

SEQ ID NO: 2160629 - RNA, 19 nt, Artificial Sequence
  Description of Artificial Sequence: Synthetic oligonucleotide
  Antisense strand to SEQ ID NO: 2160628
acucuugggcaauaguaau

SEQ ID NO: 2160630 - RNA, 19 nt, Artificial Sequence
  Description of Artificial Sequence: Synthetic oligonucleotide
  Sense strand starting at position 68 of SEQ ID NO: 1882965
acuauugcccaagagugaa

SEQ ID NO: 2160631 - RNA, 19 nt, Artificial Sequence
  Description of Artificial Sequence: Synthetic oligonucleotide
  Antisense strand to SEQ ID NO: 2160630
uucacucuugggcaauagu

SEQ ID NO: 2160632 - RNA, 19 nt, Artificial Sequence
  Description of Artificial Sequence: Synthetic oligonucleotide
  Sense strand starting at position 100 of SEQ ID NO: 1882965
cugaccucccucgaauaca

SEQ ID NO: 2160633 - RNA, 19 nt, Artificial Sequence
  Description of Artificial Sequence: Synthetic oligonucleotide
  Antisense strand to SEQ ID NO: 2160632
uguauucgagggaggucag

SEQ ID NO: 2160634 - RNA, 19 nt, Artificial Sequence
  Description of Artificial Sequence: Synthetic oligonucleotide
  Sense strand starting at position 116 of SEQ ID NO: 1882965
acacaucucugcuggugaa

SEQ ID NO: 2160635 - RNA, 19 nt, Artificial Sequence
  Description of Artificial Sequence: Synthetic oligonucleotide
  Antisense strand to SEQ ID NO: 2160634
uucaccagcagagaugugu

SEQ ID NO: 2160636 - RNA, 19 nt, Artificial Sequence
  Description of Artificial Sequence: Synthetic oligonucleotide
  Sense strand starting at position 117 of SEQ ID NO: 1882965
cacaucucugcuggugaaa

SEQ ID NO: 2160637 - RNA, 19 nt, Artificial Sequence
  Description of Artificial Sequence: Synthetic oligonucleotide
  Antisense strand to SEQ ID NO: 2160636
uuucaccagcagagaugug

SEQ ID NO: 2160638 - RNA, 19 nt, Artificial Sequence
  Description of Artificial Sequence: Synthetic oligonucleotide
  Sense strand starting at position 119 of SEQ ID NO: 1882965
caucucugcuggugaaacu

SEQ ID NO: 2160639 - RNA, 19 nt, Artificial Sequence
  Description of Artificial Sequence: Synthetic oligonucleotide
  Antisense strand to SEQ ID NO: 2160638
aguuucaccagcagagaug

SEQ ID NO: 2160640 - RNA, 19 nt, Artificial Sequence
  Description of Artificial Sequence: Synthetic oligonucleotide
  Sense strand starting at position 129 of SEQ ID NO: 1882965
ggugaaacuuuccagaaag

SEQ ID NO: 2160641 - RNA, 19 nt, Artificial Sequence
  Description of Artificial Sequence: Synthetic oligonucleotide
  Antisense strand to SEQ ID NO: 2160640
cuuucuggaaaguuucacc

SEQ ID NO: 2160642 - RNA, 19 nt, Artificial Sequence
  Description of Artificial Sequence: Synthetic oligonucleotide
  Sense strand starting at position 226 of SEQ ID NO: 1882965
ucaagagcuccuuggguga

SEQ ID NO: 2160643 - RNA, 19 nt, Artificial Sequence
  Description of Artificial Sequence: Synthetic oligonucleotide
  Antisense strand to SEQ ID NO: 2160642
ucacccaaggagcucuuga

SEQ ID NO: 2160644 - RNA, 19 nt, Artificial Sequence
  Description of Artificial Sequence: Synthetic oligonucleotide
  Sense strand starting at position 273 of SEQ ID NO: 1882965
ccgcuugccucuccaagua

SEQ ID NO: 2160645 - RNA, 19 nt, Artificial Sequence
  Description of Artificial Sequence: Synthetic oligonucleotide
  Antisense strand to SEQ ID NO: 2160644
uacuuggagaggcaagcgg

SEQ ID NO: 2160646 - RNA, 19 nt, Artificial Sequence
  Description of Artificial Sequence: Synthetic oligonucleotide
  Sense strand starting at position 379 of SEQ ID NO: 1882965
uucgaagccuuuccuaauu

SEQ ID NO: 2160647 - RNA, 19 nt, Artificial Sequence
  Description of Artificial Sequence: Synthetic oligonucleotide
  Antisense strand to SEQ ID NO: 2160646
aauuaggaaaggcuucgaa

SEQ ID NO: 2160648 - RNA, 19 nt, Artificial Sequence
  Description of Artificial Sequence: Synthetic oligonucleotide
  Sense strand starting at position 429 of SEQ ID NO: 1882965
gccugugacucacaggauu

SEQ ID NO: 2160649 - RNA, 19 nt, Artificial Sequence
  Description of Artificial Sequence: Synthetic oligonucleotide
  Antisense strand to SEQ ID NO: 2160648
aauccugugagucacaggc

SEQ ID NO: 2160650 - RNA, 19 nt, Artificial Sequence
  Description of Artificial Sequence: Synthetic oligonucleotide
  Sense strand starting at position 481 of SEQ ID NO: 1882965
uaugcuguguccgagugua

SEQ ID NO: 2160651 - RNA, 19 nt, Artificial Sequence
  Description of Artificial Sequence: Synthetic oligonucleotide
  Antisense strand to SEQ ID NO: 2160650
uacacucggacacagcaua

SEQ ID NO: 2160652 - RNA, 19 nt, Artificial Sequence
  Description of Artificial Sequence: Synthetic oligonucleotide
  Sense strand starting at position 526 of SEQ ID NO: 1882965
ucuggaugcuuggacuaga

SEQ ID NO: 2160653 - RNA, 19 nt, Artificial Sequence
  Description of Artificial Sequence: Synthetic oligonucleotide
  Antisense strand to SEQ ID NO: 2160652
ucuaguccaagcauccaga

SEQ ID NO: 2160654 - RNA, 19 nt, Artificial Sequence
  Description of Artificial Sequence: Synthetic oligonucleotide
  Sense strand starting at position 554 of SEQ ID NO: 1882965
gggucaucuucgucaccag

SEQ ID NO: 2160655 - RNA, 19 nt, Artificial Sequence
  Description of Artificial Sequence: Synthetic oligonucleotide
  Antisense strand to SEQ ID NO: 2160654
cuggugacgaagaugaccc

SEQ ID NO: 2160656 - RNA, 19 nt, Artificial Sequence
  Description of Artificial Sequence: Synthetic oligonucleotide
  Sense strand starting at position 555 of SEQ ID NO: 1882965
ggucaucuucgucaccaga

SEQ ID NO: 2160657 - RNA, 19 nt, Artificial Sequence
  Description of Artificial Sequence: Synthetic oligonucleotide
  Antisense strand to SEQ ID NO: 2160656
ucuggugacgaagaugacc

SEQ ID NO: 2160658 - RNA, 19 nt, Artificial Sequence
  Description of Artificial Sequence: Synthetic oligonucleotide
  Sense strand starting at position 569 of SEQ ID NO: 1882965
ccagaaauuggacgaucuu

SEQ ID NO: 2160659 - RNA, 19 nt, Artificial Sequence
  Description of Artificial Sequence: Synthetic oligonucleotide
  Antisense strand to SEQ ID NO: 2160658
aagaucguccaauuucugg

SEQ ID NO: 2160660 - RNA, 19 nt, Artificial Sequence
  Description of Artificial Sequence: Synthetic oligonucleotide
  Sense strand starting at position 640 of SEQ ID NO: 1882965
ugagcauuccuguacuaga

SEQ ID NO: 2160661 - RNA, 19 nt, Artificial Sequence
  Description of Artificial Sequence: Synthetic oligonucleotide
  Antisense strand to SEQ ID NO: 2160660
ucuaguacaggaaugcuca

SEQ ID NO: 2160662 - RNA, 19 nt, Artificial Sequence
  Description of Artificial Sequence: Synthetic oligonucleotide
  Sense strand starting at position 643 of SEQ ID NO: 1882965
gcauuccuguacuagauac

SEQ ID NO: 2160663 - RNA, 19 nt, Artificial Sequence
  Description of Artificial Sequence: Synthetic oligonucleotide
  Antisense strand to SEQ ID NO: 2160662
guaucuaguacaggaaugc

SEQ ID NO: 2160664 - RNA, 19 nt, Artificial Sequence
  Description of Artificial Sequence: Synthetic oligonucleotide
  Sense strand starting at position 680 of SEQ ID NO: 1882965
gguauuagcucacccaauc

SEQ ID NO: 2160665 - RNA, 19 nt, Artificial Sequence
  Description of Artificial Sequence: Synthetic oligonucleotide
  Antisense strand to SEQ ID NO: 2160664
gauugggugagcuaauacc

SEQ ID NO: 2160666 - RNA, 19 nt, Artificial Sequence
  Description of Artificial Sequence: Synthetic oligonucleotide
  Sense strand starting at position 717 of SEQ ID NO: 1882965
aguagagaauguuaaagau

SEQ ID NO: 2160667 - RNA, 19 nt, Artificial Sequence
  Description of Artificial Sequence: Synthetic oligonucleotide
  Antisense strand to SEQ ID NO: 2160666
aucuuuaacauucucuacu

SEQ ID NO: 2160668 - RNA, 19 nt, Artificial Sequence
  Description of Artificial Sequence: Synthetic oligonucleotide
  Sense strand starting at position 727 of SEQ ID NO: 1882965
guuaaagauugagaaacug

SEQ ID NO: 2160669 - RNA, 19 nt, Artificial Sequence
  Description of Artificial Sequence: Synthetic oligonucleotide
  Antisense strand to SEQ ID NO: 2160668
caguuucucaaucuuuaac

SEQ ID NO: 2160670 - RNA, 19 nt, Artificial Sequence
  Description of Artificial Sequence: Synthetic oligonucleotide
  Sense strand starting at position 836 of SEQ ID NO: 1882965
cugagcuucuugcagagau

SEQ ID NO: 2160671 - RNA, 19 nt, Artificial Sequence
  Description of Artificial Sequence: Synthetic oligonucleotide
  Antisense strand to SEQ ID NO: 2160670
aucucugcaagaagcucag

SEQ ID NO: 2160672 - RNA, 19 nt, Artificial Sequence
  Description of Artificial Sequence: Synthetic oligonucleotide
  Sense strand starting at position 838 of SEQ ID NO: 1882965
gagcuucuugcagagaucu

SEQ ID NO: 2160673 - RNA, 19 nt, Artificial Sequence
  Description of Artificial Sequence: Synthetic oligonucleotide
  Antisense strand to SEQ ID NO: 2160672
agaucucugcaagaagcuc

SEQ ID NO: 2160674 - RNA, 19 nt, Artificial Sequence
  Description of Artificial Sequence: Synthetic oligonucleotide
  Sense strand starting at position 940 of SEQ ID NO: 1882965
ggcugucucuuaccuccaa

SEQ ID NO: 2160675 - RNA, 19 nt, Artificial Sequence
  Description of Artificial Sequence: Synthetic oligonucleotide
  Antisense strand to SEQ ID NO: 2160674
uuggagguaagagacagcc

SEQ ID NO: 2160676 - RNA, 19 nt, Artificial Sequence
  Description of Artificial Sequence: Synthetic oligonucleotide
  Sense strand starting at position 1029 of SEQ ID NO: 1882965
gguggaacuggugaucuca

SEQ ID NO: 2160677 - RNA, 19 nt, Artificial Sequence
  Description of Artificial Sequence: Synthetic oligonucleotide
  Antisense strand to SEQ ID NO: 2160676
ugagaucaccaguuccacc

SEQ ID NO: 2160678 - RNA, 19 nt, Artificial Sequence
  Description of Artificial Sequence: Synthetic oligonucleotide
  Sense strand starting at position 1332 of SEQ ID NO: 1882965
gguaccaagccuuguccua

SEQ ID NO: 2160679 - RNA, 19 nt, Artificial Sequence
  Description of Artificial Sequence: Synthetic oligonucleotide
  Antisense strand to SEQ ID NO: 2160678
uaggacaaggcuugguacc

SEQ ID NO: 2160680 - RNA, 19 nt, Artificial Sequence
  Description of Artificial Sequence: Synthetic oligonucleotide
  Sense strand starting at position 2772 of SEQ ID NO: 1882965
agaacaucugcucgggaca

SEQ ID NO: 2160681 - RNA, 19 nt, Artificial Sequence
  Description of Artificial Sequence: Synthetic oligonucleotide
  Antisense strand to SEQ ID NO: 2160680
ugucccgagcagauguucu

SEQ ID NO: 2160682 - RNA, 19 nt, Artificial Sequence
  Description of Artificial Sequence: Synthetic oligonucleotide
  Sense strand starting at position 3625 of SEQ ID NO: 1882965
acaggccucugaugucauu

SEQ ID NO: 2160683 - RNA, 19 nt, Artificial Sequence
  Description of Artificial Sequence: Synthetic oligonucleotide
  Antisense strand to SEQ ID NO: 2160682
aaugacaucagaggccugu

SEQ ID NO: 2160684 - RNA, 19 nt, Artificial Sequence
  Description of Artificial Sequence: Synthetic oligonucleotide
  Sense strand starting at position 3676 of SEQ ID NO: 1882965
gcgggugcccgagaucuga

SEQ ID NO: 2160685 - RNA, 19 nt, Artificial Sequence
  Description of Artificial Sequence: Synthetic oligonucleotide
  Antisense strand to SEQ ID NO: 2160684
ucagaucucgggcacccgc

SEQ ID NO: 2160686 - RNA, 19 nt, Artificial Sequence
  Description of Artificial Sequence: Synthetic oligonucleotide
  Sense strand starting at position 383 of SEQ ID NO: 1882966
aagggauaguaagcagauu

SEQ ID NO: 2160687 - RNA, 19 nt, Artificial Sequence
  Description of Artificial Sequence: Synthetic oligonucleotide
  Antisense strand to SEQ ID NO: 2160686
aaucugcuuacuaucccuu

SEQ ID NO: 2160688 - RNA, 19 nt, Artificial Sequence
  Description of Artificial Sequence: Synthetic oligonucleotide
  Sense strand starting at position 503 of SEQ ID NO: 1882966
uaggaaguggucuaaaggu

SEQ ID NO: 2160689 - RNA, 19 nt, Artificial Sequence
  Description of Artificial Sequence: Synthetic oligonucleotide
  Antisense strand to SEQ ID NO: 2160688
accuuuagaccacuuccua

SEQ ID NO: 2160690 - RNA, 19 nt, Artificial Sequence
  Description of Artificial Sequence: Synthetic oligonucleotide
  Sense strand starting at position 510 of SEQ ID NO: 1882966
uggucuaaagguugggauu

SEQ ID NO: 2160691 - RNA, 19 nt, Artificial Sequence
  Description of Artificial Sequence: Synthetic oligonucleotide
  Antisense strand to SEQ ID NO: 2160690
aaucccaaccuuuagacca

SEQ ID NO: 2160692 - RNA, 19 nt, Artificial Sequence
  Description of Artificial Sequence: Synthetic oligonucleotide
  Sense strand starting at position 516 of SEQ ID NO: 1882966
aaagguugggauugcugua

SEQ ID NO: 2160693 - RNA, 19 nt, Artificial Sequence
  Description of Artificial Sequence: Synthetic oligonucleotide
  Antisense strand to SEQ ID NO: 2160692
uacagcaaucccaaccuuu

SEQ ID NO: 2160694 - RNA, 19 nt, Artificial Sequence
  Description of Artificial Sequence: Synthetic oligonucleotide
  Sense strand starting at position 521 of SEQ ID NO: 1882966
uugggauugcuguauguga

SEQ ID NO: 2160695 - RNA, 19 nt, Artificial Sequence
  Description of Artificial Sequence: Synthetic oligonucleotide
  Antisense strand to SEQ ID NO: 2160694
ucacauacagcaaucccaa

SEQ ID NO: 2160696 - RNA, 19 nt, Artificial Sequence
  Description of Artificial Sequence: Synthetic oligonucleotide
  Sense strand starting at position 572 of SEQ ID NO: 1882966
agagcuuuagagugggagu

SEQ ID NO: 2160697 - RNA, 19 nt, Artificial Sequence
  Description of Artificial Sequence: Synthetic oligonucleotide
  Antisense strand to SEQ ID NO: 2160696
acucccacucuaaagcucu

SEQ ID NO: 2160698 - RNA, 19 nt, Artificial Sequence
  Description of Artificial Sequence: Synthetic oligonucleotide
  Sense strand starting at position 573 of SEQ ID NO: 1882966
gagcuuuagagugggaguu

SEQ ID NO: 2160699 - RNA, 19 nt, Artificial Sequence
  Description of Artificial Sequence: Synthetic oligonucleotide
  Antisense strand to SEQ ID NO: 2160698
aacucccacucuaaagcuc

SEQ ID NO: 2160700 - RNA, 19 nt, Artificial Sequence
  Description of Artificial Sequence: Synthetic oligonucleotide
  Sense strand starting at position 602 of SEQ ID NO: 1882966
uaaugaccugucugcuaga

SEQ ID NO: 2160701 - RNA, 19 nt, Artificial Sequence
  Description of Artificial Sequence: Synthetic oligonucleotide
  Antisense strand to SEQ ID NO: 2160700
ucuagcagacaggucauua

SEQ ID NO: 2160702 - RNA, 19 nt, Artificial Sequence
  Description of Artificial Sequence: Synthetic oligonucleotide
  Sense strand starting at position 603 of SEQ ID NO: 1882966
aaugaccugucugcuagaa

SEQ ID NO: 2160703 - RNA, 19 nt, Artificial Sequence
  Description of Artificial Sequence: Synthetic oligonucleotide
  Antisense strand to SEQ ID NO: 2160702
uucuagcagacaggucauu

SEQ ID NO: 2160704 - RNA, 19 nt, Artificial Sequence
  Description of Artificial Sequence: Synthetic oligonucleotide
  Sense strand starting at position 769 of SEQ ID NO: 1882966
cgcuuaguccuugccgcau

SEQ ID NO: 2160705 - RNA, 19 nt, Artificial Sequence
  Description of Artificial Sequence: Synthetic oligonucleotide
  Antisense strand to SEQ ID NO: 2160704
augcggcaaggacuaagcg

SEQ ID NO: 2160706 - RNA, 19 nt, Artificial Sequence
  Description of Artificial Sequence: Synthetic oligonucleotide
  Sense strand starting at position 820 of SEQ ID NO: 1882966
gaugcacuuuacucaggua

SEQ ID NO: 2160707 - RNA, 19 nt, Artificial Sequence
  Description of Artificial Sequence: Synthetic oligonucleotide
  Antisense strand to SEQ ID NO: 2160706
uaccugaguaaagugcauc

SEQ ID NO: 2160708 - RNA, 19 nt, Artificial Sequence
  Description of Artificial Sequence: Synthetic oligonucleotide
  Sense strand starting at position 1197 of SEQ ID NO: 1882966
cgcugcucugccucagaga

SEQ ID NO: 2160709 - RNA, 19 nt, Artificial Sequence
  Description of Artificial Sequence: Synthetic oligonucleotide
  Antisense strand to SEQ ID NO: 2160708
ucucugaggcagagcagcg

SEQ ID NO: 2160710 - RNA, 19 nt, Artificial Sequence
  Description of Artificial Sequence: Synthetic oligonucleotide
  Sense strand starting at position 1292 of SEQ ID NO: 1882966
ggaaaugagugggugugua

SEQ ID NO: 2160711 - RNA, 19 nt, Artificial Sequence
  Description of Artificial Sequence: Synthetic oligonucleotide
  Antisense strand to SEQ ID NO: 2160710
uacacacccacucauuucc

SEQ ID NO: 2160712 - RNA, 19 nt, Artificial Sequence
  Description of Artificial Sequence: Synthetic oligonucleotide
  Sense strand starting at position 1306 of SEQ ID NO: 1882966
guguaaggucaggauacaa

SEQ ID NO: 2160713 - RNA, 19 nt, Artificial Sequence
  Description of Artificial Sequence: Synthetic oligonucleotide
  Antisense strand to SEQ ID NO: 2160712
uuguauccugaccuuacac

SEQ ID NO: 2160714 - RNA, 19 nt, Artificial Sequence
  Description of Artificial Sequence: Synthetic oligonucleotide
  Sense strand starting at position 1325 of SEQ ID NO: 1882966
acaggaaugcucgacauca

SEQ ID NO: 2160715 - RNA, 19 nt, Artificial Sequence
  Description of Artificial Sequence: Synthetic oligonucleotide
  Antisense strand to SEQ ID NO: 2160714
ugaugucgagcauuccugu

SEQ ID NO: 2160716 - RNA, 19 nt, Artificial Sequence
  Description of Artificial Sequence: Synthetic oligonucleotide
  Sense strand starting at position 1327 of SEQ ID NO: 1882966
aggaaugcucgacaucaac

SEQ ID NO: 2160717 - RNA, 19 nt, Artificial Sequence
  Description of Artificial Sequence: Synthetic oligonucleotide
  Antisense strand to SEQ ID NO: 2160716
guugaugucgagcauuccu

SEQ ID NO: 2160718 - RNA, 19 nt, Artificial Sequence
  Description of Artificial Sequence: Synthetic oligonucleotide
  Sense strand starting at position 1471 of SEQ ID NO: 1882966
aagagaguccuuugacauc

SEQ ID NO: 2160719 - RNA, 19 nt, Artificial Sequence
  Description of Artificial Sequence: Synthetic oligonucleotide
  Antisense strand to SEQ ID NO: 2160718
gaugucaaaggacucucuu

SEQ ID NO: 2160720 - RNA, 19 nt, Artificial Sequence
  Description of Artificial Sequence: Synthetic oligonucleotide
  Sense strand starting at position 1759 of SEQ ID NO: 1882966
ccagcaauugcccaagucu

SEQ ID NO: 2160721 - RNA, 19 nt, Artificial Sequence
  Description of Artificial Sequence: Synthetic oligonucleotide
  Antisense strand to SEQ ID NO: 2160720
agacuugggcaauugcugg

SEQ ID NO: 2160722 - RNA, 19 nt, Artificial Sequence
  Description of Artificial Sequence: Synthetic oligonucleotide
  Sense strand starting at position 2415 of SEQ ID NO: 1882966
ccacguaugcugcugugau

SEQ ID NO: 2160723 - RNA, 19 nt, Artificial Sequence
  Description of Artificial Sequence: Synthetic oligonucleotide
  Antisense strand to SEQ ID NO: 2160722
aucacagcagcauacgugg

SEQ ID NO: 2160724 - RNA, 19 nt, Artificial Sequence
  Description of Artificial Sequence: Synthetic oligonucleotide
  Sense strand starting at position 2431 of SEQ ID NO: 1882966
gauguagucagccagagac

SEQ ID NO: 2160725 - RNA, 19 nt, Artificial Sequence
  Description of Artificial Sequence: Synthetic oligonucleotide
  Antisense strand to SEQ ID NO: 2160724
gucucuggcugacuacauc

SEQ ID NO: 2160726 - RNA, 19 nt, Artificial Sequence
  Description of Artificial Sequence: Synthetic oligonucleotide
  Sense strand starting at position 2622 of SEQ ID NO: 1882966
acacaaauuagugggugau

SEQ ID NO: 2160727 - RNA, 19 nt, Artificial Sequence
  Description of Artificial Sequence: Synthetic oligonucleotide
  Antisense strand to SEQ ID NO: 2160726
aucacccacuaauuugugu

SEQ ID NO: 2160728 - RNA, 19 nt, Artificial Sequence
  Description of Artificial Sequence: Synthetic oligonucleotide
  Sense strand starting at position 2623 of SEQ ID NO: 1882966
cacaaauuagugggugauu

SEQ ID NO: 2160729 - RNA, 19 nt, Artificial Sequence
  Description of Artificial Sequence: Synthetic oligonucleotide
  Antisense strand to SEQ ID NO: 2160728
aaucacccacuaauuugug

SEQ ID NO: 2160730 - RNA, 19 nt, Artificial Sequence
  Description of Artificial Sequence: Synthetic oligonucleotide
  Sense strand starting at position 2624 of SEQ ID NO: 1882966
acaaauuagugggugauua

SEQ ID NO: 2160731 - RNA, 19 nt, Artificial Sequence
  Description of Artificial Sequence: Synthetic oligonucleotide
  Antisense strand to SEQ ID NO: 2160730
uaaucacccacuaauuugu

SEQ ID NO: 2160732 - RNA, 19 nt, Artificial Sequence
  Description of Artificial Sequence: Synthetic oligonucleotide
  Sense strand starting at position 2625 of SEQ ID NO: 1882966
caaauuagugggugauuau

SEQ ID NO: 2160733 - RNA, 19 nt, Artificial Sequence
  Description of Artificial Sequence: Synthetic oligonucleotide
  Antisense strand to SEQ ID NO: 2160732
auaaucacccacuaauuug

SEQ ID NO: 2160734 - RNA, 19 nt, Artificial Sequence
  Description of Artificial Sequence: Synthetic oligonucleotide
  Sense strand starting at position 2636 of SEQ ID NO: 1882966
gugauuauuugcuuggcuu

SEQ ID NO: 2160735 - RNA, 19 nt, Artificial Sequence
  Description of Artificial Sequence: Synthetic oligonucleotide
  Antisense strand to SEQ ID NO: 2160734
aagccaagcaaauaaucac

SEQ ID NO: 2160736 - RNA, 19 nt, Artificial Sequence
  Description of Artificial Sequence: Synthetic oligonucleotide
  Sense strand starting at position 2638 of SEQ ID NO: 1882966
gauuauuugcuuggcuuga

SEQ ID NO: 2160737 - RNA, 19 nt, Artificial Sequence
  Description of Artificial Sequence: Synthetic oligonucleotide
  Antisense strand to SEQ ID NO: 2160736
ucaagccaagcaaauaauc

SEQ ID NO: 2160738 - RNA, 19 nt, Artificial Sequence
  Description of Artificial Sequence: Synthetic oligonucleotide
  Sense strand starting at position 2639 of SEQ ID NO: 1882966
auuauuugcuuggcuugaa

SEQ ID NO: 2160739 - RNA, 19 nt, Artificial Sequence
  Description of Artificial Sequence: Synthetic oligonucleotide
  Antisense strand to SEQ ID NO: 2160738
uucaagccaagcaaauaau

SEQ ID NO: 2160740 - RNA, 19 nt, Artificial Sequence
  Description of Artificial Sequence: Synthetic oligonucleotide
  Sense strand starting at position 2640 of SEQ ID NO: 1882966
uuauuugcuuggcuugaau

SEQ ID NO: 2160741 - RNA, 19 nt, Artificial Sequence
  Description of Artificial Sequence: Synthetic oligonucleotide
  Antisense strand to SEQ ID NO: 2160740
auucaagccaagcaaauaa

SEQ ID NO: 2160742 - RNA, 19 nt, Artificial Sequence
  Description of Artificial Sequence: Synthetic oligonucleotide
  Sense strand starting at position 2642 of SEQ ID NO: 1882966
auuugcuuggcuugaauau

SEQ ID NO: 2160743 - RNA, 19 nt, Artificial Sequence
  Description of Artificial Sequence: Synthetic oligonucleotide
  Antisense strand to SEQ ID NO: 2160742
auauucaagccaagcaaau

SEQ ID NO: 2160744 - RNA, 19 nt, Artificial Sequence
  Description of Artificial Sequence: Synthetic oligonucleotide
  Sense strand starting at position 2693 of SEQ ID NO: 1882966
accaguauccuccaaguua

SEQ ID NO: 2160745 - RNA, 19 nt, Artificial Sequence
  Description of Artificial Sequence: Synthetic oligonucleotide
  Antisense strand to SEQ ID NO: 2160744
uaacuuggaggauacuggu

SEQ ID NO: 2160746 - RNA, 19 nt, Artificial Sequence
  Description of Artificial Sequence: Synthetic oligonucleotide
  Sense strand starting at position 2752 of SEQ ID NO: 1882966
uccgucugucauuaagaga

SEQ ID NO: 2160747 - RNA, 19 nt, Artificial Sequence
  Description of Artificial Sequence: Synthetic oligonucleotide
  Antisense strand to SEQ ID NO: 2160746
ucucuuaaugacagacgga

SEQ ID NO: 2160748 - RNA, 19 nt, Artificial Sequence
  Description of Artificial Sequence: Synthetic oligonucleotide
  Sense strand starting at position 2896 of SEQ ID NO: 1882966
agcgauagagauuaucauc

SEQ ID NO: 2160749 - RNA, 19 nt, Artificial Sequence
  Description of Artificial Sequence: Synthetic oligonucleotide
  Antisense strand to SEQ ID NO: 2160748
gaugauaaucucuaucgcu

SEQ ID NO: 2160750 - RNA, 19 nt, Artificial Sequence
  Description of Artificial Sequence: Synthetic oligonucleotide
  Sense strand starting at position 2960 of SEQ ID NO: 1882966
uuugcauaugcaugagaua

SEQ ID NO: 2160751 - RNA, 19 nt, Artificial Sequence
  Description of Artificial Sequence: Synthetic oligonucleotide
  Antisense strand to SEQ ID NO: 2160750
uaucucaugcauaugcaaa

SEQ ID NO: 2160752 - RNA, 19 nt, Artificial Sequence
  Description of Artificial Sequence: Synthetic oligonucleotide
  Sense strand starting at position 2961 of SEQ ID NO: 1882966
uugcauaugcaugagauag

SEQ ID NO: 2160753 - RNA, 19 nt, Artificial Sequence
  Description of Artificial Sequence: Synthetic oligonucleotide
  Antisense strand to SEQ ID NO: 2160752
cuaucucaugcauaugcaa

SEQ ID NO: 2160754 - RNA, 19 nt, Artificial Sequence
  Description of Artificial Sequence: Synthetic oligonucleotide
  Sense strand starting at position 3371 of SEQ ID NO: 1882966
ugauaugaaguguggaauu

SEQ ID NO: 2160755 - RNA, 19 nt, Artificial Sequence
  Description of Artificial Sequence: Synthetic oligonucleotide
  Antisense strand to SEQ ID NO: 2160754
aauuccacacuucauauca

SEQ ID NO: 2160756 - RNA, 19 nt, Artificial Sequence
  Description of Artificial Sequence: Synthetic oligonucleotide
  Sense strand starting at position 3728 of SEQ ID NO: 1882966
ggacaagcuuucccgggaa

SEQ ID NO: 2160757 - RNA, 19 nt, Artificial Sequence
  Description of Artificial Sequence: Synthetic oligonucleotide
  Antisense strand to SEQ ID NO: 2160756
uucccgggaaagcuugucc

SEQ ID NO: 2160758 - RNA, 19 nt, Artificial Sequence
  Description of Artificial Sequence: Synthetic oligonucleotide
  Sense strand starting at position 3730 of SEQ ID NO: 1882966
acaagcuuucccgggaaau

SEQ ID NO: 2160759 - RNA, 19 nt, Artificial Sequence
  Description of Artificial Sequence: Synthetic oligonucleotide
  Antisense strand to SEQ ID NO: 2160758
auuucccgggaaagcuugu

SEQ ID NO: 2160760 - RNA, 19 nt, Artificial Sequence
  Description of Artificial Sequence: Synthetic oligonucleotide
  Sense strand starting at position 3731 of SEQ ID NO: 1882966
caagcuuucccgggaaauc

SEQ ID NO: 2160761 - RNA, 19 nt, Artificial Sequence
  Description of Artificial Sequence: Synthetic oligonucleotide
  Antisense strand to SEQ ID NO: 2160760
gauuucccgggaaagcuug

SEQ ID NO: 2160762 - RNA, 19 nt, Artificial Sequence
  Description of Artificial Sequence: Synthetic oligonucleotide
  Sense strand starting at position 3742 of SEQ ID NO: 1882966
gggaaauccucaucagcau

SEQ ID NO: 2160763 - RNA, 19 nt, Artificial Sequence
  Description of Artificial Sequence: Synthetic oligonucleotide
  Antisense strand to SEQ ID NO: 2160762
augcugaugaggauuuccc

SEQ ID NO: 2160764 - RNA, 19 nt, Artificial Sequence
  Description of Artificial Sequence: Synthetic oligonucleotide
  Sense strand starting at position 3743 of SEQ ID NO: 1882966
ggaaauccucaucagcauu

SEQ ID NO: 2160765 - RNA, 19 nt, Artificial Sequence
  Description of Artificial Sequence: Synthetic oligonucleotide
  Antisense strand to SEQ ID NO: 2160764
aaugcugaugaggauuucc

SEQ ID NO: 2160766 - RNA, 19 nt, Artificial Sequence
  Description of Artificial Sequence: Synthetic oligonucleotide
  Sense strand starting at position 514 of SEQ ID NO: 1882967
uggagagcuucuguagaga

SEQ ID NO: 2160767 - RNA, 19 nt, Artificial Sequence
  Description of Artificial Sequence: Synthetic oligonucleotide
  Antisense strand to SEQ ID NO: 2160766
ucucuacagaagcucucca

SEQ ID NO: 2160768 - RNA, 19 nt, Artificial Sequence
  Description of Artificial Sequence: Synthetic oligonucleotide
  Sense strand starting at position 577 of SEQ ID NO: 1882967
gcgguuuggugauagcuaa

SEQ ID NO: 2160769 - RNA, 19 nt, Artificial Sequence
  Description of Artificial Sequence: Synthetic oligonucleotide
  Antisense strand to SEQ ID NO: 2160768
uuagcuaucaccaaaccgc

SEQ ID NO: 2160770 - RNA, 19 nt, Artificial Sequence
  Description of Artificial Sequence: Synthetic oligonucleotide
  Sense strand starting at position 581 of SEQ ID NO: 1882967
uuuggugauagcuaacuga

SEQ ID NO: 2160771 - RNA, 19 nt, Artificial Sequence
  Description of Artificial Sequence: Synthetic oligonucleotide
  Antisense strand to SEQ ID NO: 2160770
ucaguuagcuaucaccaaa

SEQ ID NO: 2160772 - RNA, 19 nt, Artificial Sequence
  Description of Artificial Sequence: Synthetic oligonucleotide
  Sense strand starting at position 584 of SEQ ID NO: 1882967
ggugauagcuaacugacaa

SEQ ID NO: 2160773 - RNA, 19 nt, Artificial Sequence
  Description of Artificial Sequence: Synthetic oligonucleotide
  Antisense strand to SEQ ID NO: 2160772
uugucaguuagcuaucacc

SEQ ID NO: 2160774 - RNA, 19 nt, Artificial Sequence
  Description of Artificial Sequence: Synthetic oligonucleotide
  Sense strand starting at position 585 of SEQ ID NO: 1882967
gugauagcuaacugacaag

SEQ ID NO: 2160775 - RNA, 19 nt, Artificial Sequence
  Description of Artificial Sequence: Synthetic oligonucleotide
  Antisense strand to SEQ ID NO: 2160774
cuugucaguuagcuaucac

SEQ ID NO: 2160776 - RNA, 19 nt, Artificial Sequence
  Description of Artificial Sequence: Synthetic oligonucleotide
  Sense strand starting at position 588 of SEQ ID NO: 1882967
auagcuaacugacaagaaa

SEQ ID NO: 2160777 - RNA, 19 nt, Artificial Sequence
  Description of Artificial Sequence: Synthetic oligonucleotide
  Antisense strand to SEQ ID NO: 2160776
uuucuugucaguuagcuau

SEQ ID NO: 2160778 - RNA, 19 nt, Artificial Sequence
  Description of Artificial Sequence: Synthetic oligonucleotide
  Sense strand starting at position 1228 of SEQ ID NO: 1882967
ggugggaacuguugggauu

SEQ ID NO: 2160779 - RNA, 19 nt, Artificial Sequence
  Description of Artificial Sequence: Synthetic oligonucleotide
  Antisense strand to SEQ ID NO: 2160778
aaucccaacaguucccacc

SEQ ID NO: 2160780 - RNA, 19 nt, Artificial Sequence
  Description of Artificial Sequence: Synthetic oligonucleotide
  Sense strand starting at position 1229 of SEQ ID NO: 1882967
gugggaacuguugggauua

SEQ ID NO: 2160781 - RNA, 19 nt, Artificial Sequence
  Description of Artificial Sequence: Synthetic oligonucleotide
  Antisense strand to SEQ ID NO: 2160780
uaaucccaacaguucccac

SEQ ID NO: 2160782 - RNA, 19 nt, Artificial Sequence
  Description of Artificial Sequence: Synthetic oligonucleotide
  Sense strand starting at position 1230 of SEQ ID NO: 1882967
ugggaacuguugggauuau

SEQ ID NO: 2160783 - RNA, 19 nt, Artificial Sequence
  Description of Artificial Sequence: Synthetic oligonucleotide
  Antisense strand to SEQ ID NO: 2160782
auaaucccaacaguuccca

SEQ ID NO: 2160784 - RNA, 19 nt, Artificial Sequence
  Description of Artificial Sequence: Synthetic oligonucleotide
  Sense strand starting at position 1231 of SEQ ID NO: 1882967
gggaacuguugggauuaua

SEQ ID NO: 2160785 - RNA, 19 nt, Artificial Sequence
  Description of Artificial Sequence: Synthetic oligonucleotide
  Antisense strand to SEQ ID NO: 2160784
uauaaucccaacaguuccc

SEQ ID NO: 2160786 - RNA, 19 nt, Artificial Sequence
  Description of Artificial Sequence: Synthetic oligonucleotide
  Sense strand starting at position 1240 of SEQ ID NO: 1882967
ugggauuauauauguaaug

SEQ ID NO: 2160787 - RNA, 19 nt, Artificial Sequence
  Description of Artificial Sequence: Synthetic oligonucleotide
  Antisense strand to SEQ ID NO: 2160786
cauuacauauauaauccca

SEQ ID NO: 2160788 - RNA, 19 nt, Artificial Sequence
  Description of Artificial Sequence: Synthetic oligonucleotide
  Sense strand starting at position 1241 of SEQ ID NO: 1882967
gggauuauauauguaaugu

SEQ ID NO: 2160789 - RNA, 19 nt, Artificial Sequence
  Description of Artificial Sequence: Synthetic oligonucleotide
  Antisense strand to SEQ ID NO: 2160788
acauuacauauauaauccc

SEQ ID NO: 2160790 - RNA, 19 nt, Artificial Sequence
  Description of Artificial Sequence: Synthetic oligonucleotide
  Sense strand starting at position 1287 of SEQ ID NO: 1882967
gccaguuagucauagccca

SEQ ID NO: 2160791 - RNA, 19 nt, Artificial Sequence
  Description of Artificial Sequence: Synthetic oligonucleotide
  Antisense strand to SEQ ID NO: 2160790
ugggcuaugacuaacuggc

SEQ ID NO: 2160792 - RNA, 19 nt, Artificial Sequence
  Description of Artificial Sequence: Synthetic oligonucleotide
  Sense strand starting at position 1437 of SEQ ID NO: 1882967
cuuggagcuguucggagau

SEQ ID NO: 2160793 - RNA, 19 nt, Artificial Sequence
  Description of Artificial Sequence: Synthetic oligonucleotide
  Antisense strand to SEQ ID NO: 2160792
aucuccgaacagcuccaag

SEQ ID NO: 2160794 - RNA, 19 nt, Artificial Sequence
  Description of Artificial Sequence: Synthetic oligonucleotide
  Sense strand starting at position 1439 of SEQ ID NO: 1882967
uggagcuguucggagauga

SEQ ID NO: 2160795 - RNA, 19 nt, Artificial Sequence
  Description of Artificial Sequence: Synthetic oligonucleotide
  Antisense strand to SEQ ID NO: 2160794
ucaucuccgaacagcucca

SEQ ID NO: 2160796 - RNA, 19 nt, Artificial Sequence
  Description of Artificial Sequence: Synthetic oligonucleotide
  Sense strand starting at position 1943 of SEQ ID NO: 1882967
caugauugcucagagcgga

SEQ ID NO: 2160797 - RNA, 19 nt, Artificial Sequence
  Description of Artificial Sequence: Synthetic oligonucleotide
  Antisense strand to SEQ ID NO: 2160796
uccgcucugagcaaucaug

SEQ ID NO: 2160798 - RNA, 19 nt, Artificial Sequence
  Description of Artificial Sequence: Synthetic oligonucleotide
  Sense strand starting at position 2144 of SEQ ID NO: 1882967
cugucucugcucuguuuau

SEQ ID NO: 2160799 - RNA, 19 nt, Artificial Sequence
  Description of Artificial Sequence: Synthetic oligonucleotide
  Antisense strand to SEQ ID NO: 2160798
auaaacagagcagagacag

SEQ ID NO: 2160800 - RNA, 19 nt, Artificial Sequence
  Description of Artificial Sequence: Synthetic oligonucleotide
  Sense strand starting at position 2579 of SEQ ID NO: 1882967
ccaucuccuugccagagua

SEQ ID NO: 2160801 - RNA, 19 nt, Artificial Sequence
  Description of Artificial Sequence: Synthetic oligonucleotide
  Antisense strand to SEQ ID NO: 2160800
uacucuggcaaggagaugg

SEQ ID NO: 2160802 - RNA, 19 nt, Artificial Sequence
  Description of Artificial Sequence: Synthetic oligonucleotide
  Sense strand starting at position 2733 of SEQ ID NO: 1882967
gcacuuuggucuccauuau

SEQ ID NO: 2160803 - RNA, 19 nt, Artificial Sequence
  Description of Artificial Sequence: Synthetic oligonucleotide
  Antisense strand to SEQ ID NO: 2160802
auaauggagaccaaagugc

SEQ ID NO: 2160804 - RNA, 19 nt, Artificial Sequence
  Description of Artificial Sequence: Synthetic oligonucleotide
  Sense strand starting at position 3066 of SEQ ID NO: 1882967
cugggaagguugcaucagu

SEQ ID NO: 2160805 - RNA, 19 nt, Artificial Sequence
  Description of Artificial Sequence: Synthetic oligonucleotide
  Antisense strand to SEQ ID NO: 2160804
acugaugcaaccuucccag

SEQ ID NO: 2160806 - RNA, 19 nt, Artificial Sequence
  Description of Artificial Sequence: Synthetic oligonucleotide
  Sense strand starting at position 3348 of SEQ ID NO: 1882967
agaccucuuggcgauguua

SEQ ID NO: 2160807 - RNA, 19 nt, Artificial Sequence
  Description of Artificial Sequence: Synthetic oligonucleotide
  Antisense strand to SEQ ID NO: 2160806
uaacaucgccaagaggucu

SEQ ID NO: 2160808 - RNA, 19 nt, Artificial Sequence
  Description of Artificial Sequence: Synthetic oligonucleotide
  Sense strand starting at position 3568 of SEQ ID NO: 1882967
uggugaucucaggaaguca

SEQ ID NO: 2160809 - RNA, 19 nt, Artificial Sequence
  Description of Artificial Sequence: Synthetic oligonucleotide
  Antisense strand to SEQ ID NO: 2160808
ugacuuccugagaucacca

SEQ ID NO: 2160810 - RNA, 19 nt, Artificial Sequence
  Description of Artificial Sequence: Synthetic oligonucleotide
  Sense strand starting at position 3601 of SEQ ID NO: 1882967
gccucaguuucccuuacua

SEQ ID NO: 2160811 - RNA, 19 nt, Artificial Sequence
  Description of Artificial Sequence: Synthetic oligonucleotide
  Antisense strand to SEQ ID NO: 2160810
uaguaagggaaacugaggc

SEQ ID NO: 2160812 - RNA, 19 nt, Artificial Sequence
  Description of Artificial Sequence: Synthetic oligonucleotide
  Sense strand starting at position 3626 of SEQ ID NO: 1882967
ucugaacucuacuaaggaa

SEQ ID NO: 2160813 - RNA, 19 nt, Artificial Sequence
  Description of Artificial Sequence: Synthetic oligonucleotide
  Antisense strand to SEQ ID NO: 2160812
uuccuuaguagaguucaga

SEQ ID NO: 2160814 - RNA, 19 nt, Artificial Sequence
  Description of Artificial Sequence: Synthetic oligonucleotide
  Sense strand starting at position 3684 of SEQ ID NO: 1882967
gggugauggcaggguguua

SEQ ID NO: 2160815 - RNA, 19 nt, Artificial Sequence
  Description of Artificial Sequence: Synthetic oligonucleotide
  Antisense strand to SEQ ID NO: 2160814
uaacacccugccaucaccc

SEQ ID NO: 2160816 - RNA, 19 nt, Artificial Sequence
  Description of Artificial Sequence: Synthetic oligonucleotide
  Sense strand starting at position 3696 of SEQ ID NO: 1882967
gguguuagcaaagaguaug

SEQ ID NO: 2160817 - RNA, 19 nt, Artificial Sequence
  Description of Artificial Sequence: Synthetic oligonucleotide
  Antisense strand to SEQ ID NO: 2160816
cauacucuuugcuaacacc

SEQ ID NO: 2160818 - RNA, 19 nt, Artificial Sequence
  Description of Artificial Sequence: Synthetic oligonucleotide
  Sense strand starting at position 3717 of SEQ ID NO: 1882967
guggguaguuaugaacauu

SEQ ID NO: 2160819 - RNA, 19 nt, Artificial Sequence
  Description of Artificial Sequence: Synthetic oligonucleotide
  Antisense strand to SEQ ID NO: 2160818
aauguucauaacuacccac

SEQ ID NO: 2160820 - RNA, 19 nt, Artificial Sequence
  Description of Artificial Sequence: Synthetic oligonucleotide
  Sense strand starting at position 3729 of SEQ ID NO: 1882967
gaacauugcuuagggugua

SEQ ID NO: 2160821 - RNA, 19 nt, Artificial Sequence
  Description of Artificial Sequence: Synthetic oligonucleotide
  Antisense strand to SEQ ID NO: 2160820
uacacccuaagcaauguuc

SEQ ID NO: 2160822 - RNA, 19 nt, Artificial Sequence
  Description of Artificial Sequence: Synthetic oligonucleotide
  Sense strand starting at position 3763 of SEQ ID NO: 1882967
caaggagccuguugaaaug

SEQ ID NO: 2160823 - RNA, 19 nt, Artificial Sequence
  Description of Artificial Sequence: Synthetic oligonucleotide
  Antisense strand to SEQ ID NO: 2160822
cauuucaacaggcuccuug

SEQ ID NO: 2160824 - RNA, 19 nt, Artificial Sequence
  Description of Artificial Sequence: Synthetic oligonucleotide
  Sense strand starting at position 3772 of SEQ ID NO: 1882967
uguugaaauguagauucuu

SEQ ID NO: 2160825 - RNA, 19 nt, Artificial Sequence
  Description of Artificial Sequence: Synthetic oligonucleotide
  Antisense strand to SEQ ID NO: 2160824
aagaaucuacauuucaaca

SEQ ID NO: 2160826 - RNA, 19 nt, Artificial Sequence
  Description of Artificial Sequence: Synthetic oligonucleotide
  Sense strand starting at position 3778 of SEQ ID NO: 1882967
aauguagauucuugagccu

SEQ ID NO: 2160827 - RNA, 19 nt, Artificial Sequence
  Description of Artificial Sequence: Synthetic oligonucleotide
  Antisense strand to SEQ ID NO: 2160826
aggcucaagaaucuacauu

SEQ ID NO: 2160828 - RNA, 19 nt, Artificial Sequence
  Description of Artificial Sequence: Synthetic oligonucleotide
  Sense strand starting at position 3787 of SEQ ID NO: 1882967
ucuugagccugccuggaaa

SEQ ID NO: 2160829 - RNA, 19 nt, Artificial Sequence
  Description of Artificial Sequence: Synthetic oligonucleotide
  Antisense strand to SEQ ID NO: 2160828
uuuccaggcaggcucaaga

SEQ ID NO: 2160830 - RNA, 19 nt, Artificial Sequence
  Description of Artificial Sequence: Synthetic oligonucleotide
  Sense strand starting at position 3873 of SEQ ID NO: 1882967
agaaaucuuucccaagaag

SEQ ID NO: 2160831 - RNA, 19 nt, Artificial Sequence
  Description of Artificial Sequence: Synthetic oligonucleotide
  Antisense strand to SEQ ID NO: 2160830
cuucuugggaaagauuucu

SEQ ID NO: 2160832 - RNA, 19 nt, Artificial Sequence
  Description of Artificial Sequence: Synthetic oligonucleotide
  Sense strand starting at position 3888 of SEQ ID NO: 1882967
gaagccucacccugggaua

SEQ ID NO: 2160833 - RNA, 19 nt, Artificial Sequence
  Description of Artificial Sequence: Synthetic oligonucleotide
  Antisense strand to SEQ ID NO: 2160832
uaucccagggugaggcuuc

SEQ ID NO: 2160834 - RNA, 19 nt, Artificial Sequence
  Description of Artificial Sequence: Synthetic oligonucleotide
  Sense strand starting at position 3890 of SEQ ID NO: 1882967
agccucacccugggauaau

SEQ ID NO: 2160835 - RNA, 19 nt, Artificial Sequence
  Description of Artificial Sequence: Synthetic oligonucleotide
  Antisense strand to SEQ ID NO: 2160834
auuaucccagggugaggcu

SEQ ID NO: 2160836 - RNA, 19 nt, Artificial Sequence
  Description of Artificial Sequence: Synthetic oligonucleotide
  Sense strand starting at position 3891 of SEQ ID NO: 1882967
gccucacccugggauaauu

SEQ ID NO: 2160837 - RNA, 19 nt, Artificial Sequence
  Description of Artificial Sequence: Synthetic oligonucleotide
  Antisense strand to SEQ ID NO: 2160836
aauuaucccagggugaggc

SEQ ID NO: 2160838 - RNA, 19 nt, Artificial Sequence
  Description of Artificial Sequence: Synthetic oligonucleotide
  Sense strand starting at position 188 of SEQ ID NO: 1882968
aacaguuuagaaggguauu

SEQ ID NO: 2160839 - RNA, 19 nt, Artificial Sequence
  Description of Artificial Sequence: Synthetic oligonucleotide
  Antisense strand to SEQ ID NO: 2160838
aauacccuucuaaacuguu

SEQ ID NO: 2160840 - RNA, 19 nt, Artificial Sequence
  Description of Artificial Sequence: Synthetic oligonucleotide
  Sense strand starting at position 350 of SEQ ID NO: 1882968
aaggaauuggagugaguua

SEQ ID NO: 2160841 - RNA, 19 nt, Artificial Sequence
  Description of Artificial Sequence: Synthetic oligonucleotide
  Antisense strand to SEQ ID NO: 2160840
uaacucacuccaauuccuu

SEQ ID NO: 2160842 - RNA, 19 nt, Artificial Sequence
  Description of Artificial Sequence: Synthetic oligonucleotide
  Sense strand starting at position 902 of SEQ ID NO: 1882968
aguagagcccacuauuaaa

SEQ ID NO: 2160843 - RNA, 19 nt, Artificial Sequence
  Description of Artificial Sequence: Synthetic oligonucleotide
  Antisense strand to SEQ ID NO: 2160842
uuuaauagugggcucuacu

SEQ ID NO: 2160844 - RNA, 19 nt, Artificial Sequence
  Description of Artificial Sequence: Synthetic oligonucleotide
  Sense strand starting at position 971 of SEQ ID NO: 1882968
gcagguuaaugauuacaac

SEQ ID NO: 2160845 - RNA, 19 nt, Artificial Sequence
  Description of Artificial Sequence: Synthetic oligonucleotide
  Antisense strand to SEQ ID NO: 2160844
guuguaaucauuaaccugc

SEQ ID NO: 2160846 - RNA, 19 nt, Artificial Sequence
  Description of Artificial Sequence: Synthetic oligonucleotide
  Sense strand starting at position 1038 of SEQ ID NO: 1882968
cugagaaacucuuugcuug

SEQ ID NO: 2160847 - RNA, 19 nt, Artificial Sequence
  Description of Artificial Sequence: Synthetic oligonucleotide
  Antisense strand to SEQ ID NO: 2160846
caagcaaagaguuucucag

SEQ ID NO: 2160848 - RNA, 19 nt, Artificial Sequence
  Description of Artificial Sequence: Synthetic oligonucleotide
  Sense strand starting at position 1039 of SEQ ID NO: 1882968
ugagaaacucuuugcuuga

SEQ ID NO: 2160849 - RNA, 19 nt, Artificial Sequence
  Description of Artificial Sequence: Synthetic oligonucleotide
  Antisense strand to SEQ ID NO: 2160848
ucaagcaaagaguuucuca

SEQ ID NO: 2160850 - RNA, 19 nt, Artificial Sequence
  Description of Artificial Sequence: Synthetic oligonucleotide
  Sense strand starting at position 1041 of SEQ ID NO: 1882968
agaaacucuuugcuugaau

SEQ ID NO: 2160851 - RNA, 19 nt, Artificial Sequence
  Description of Artificial Sequence: Synthetic oligonucleotide
  Antisense strand to SEQ ID NO: 2160850
auucaagcaaagaguuucu

SEQ ID NO: 2160852 - RNA, 19 nt, Artificial Sequence
  Description of Artificial Sequence: Synthetic oligonucleotide
  Sense strand starting at position 1154 of SEQ ID NO: 1882968
uggcuaagccaaggaauaa

SEQ ID NO: 2160853 - RNA, 19 nt, Artificial Sequence
  Description of Artificial Sequence: Synthetic oligonucleotide
  Antisense strand to SEQ ID NO: 2160852
uuauuccuuggcuuagcca

SEQ ID NO: 2160854 - RNA, 19 nt, Artificial Sequence
  Description of Artificial Sequence: Synthetic oligonucleotide
  Sense strand starting at position 1198 of SEQ ID NO: 1882968
acuugaugagaacguuauc

SEQ ID NO: 2160855 - RNA, 19 nt, Artificial Sequence
  Description of Artificial Sequence: Synthetic oligonucleotide
  Antisense strand to SEQ ID NO: 2160854
gauaacguucucaucaagu

SEQ ID NO: 2160856 - RNA, 19 nt, Artificial Sequence
  Description of Artificial Sequence: Synthetic oligonucleotide
  Sense strand starting at position 1203 of SEQ ID NO: 1882968
augagaacguuaucuagag

SEQ ID NO: 2160857 - RNA, 19 nt, Artificial Sequence
  Description of Artificial Sequence: Synthetic oligonucleotide
  Antisense strand to SEQ ID NO: 2160856
cucuagauaacguucucau

SEQ ID NO: 2160858 - RNA, 19 nt, Artificial Sequence
  Description of Artificial Sequence: Synthetic oligonucleotide
  Sense strand starting at position 1268 of SEQ ID NO: 1882968
guaugauguccacauaguu

SEQ ID NO: 2160859 - RNA, 19 nt, Artificial Sequence
  Description of Artificial Sequence: Synthetic oligonucleotide
  Antisense strand to SEQ ID NO: 2160858
aacuauguggacaucauac

SEQ ID NO: 2160860 - RNA, 19 nt, Artificial Sequence
  Description of Artificial Sequence: Synthetic oligonucleotide
  Sense strand starting at position 1295 of SEQ ID NO: 1882968
ugcuguucccucuaagaag

SEQ ID NO: 2160861 - RNA, 19 nt, Artificial Sequence
  Description of Artificial Sequence: Synthetic oligonucleotide
  Antisense strand to SEQ ID NO: 2160860
cuucuuagagggaacagca

SEQ ID NO: 2160862 - RNA, 19 nt, Artificial Sequence
  Description of Artificial Sequence: Synthetic oligonucleotide
  Sense strand starting at position 1482 of SEQ ID NO: 1882968
gccacaagauuaguaggau

SEQ ID NO: 2160863 - RNA, 19 nt, Artificial Sequence
  Description of Artificial Sequence: Synthetic oligonucleotide
  Antisense strand to SEQ ID NO: 2160862
auccuacuaaucuuguggc

SEQ ID NO: 2160864 - RNA, 19 nt, Artificial Sequence
  Description of Artificial Sequence: Synthetic oligonucleotide
  Sense strand starting at position 1680 of SEQ ID NO: 1882968
uucaguguuguuuccguaa

SEQ ID NO: 2160865 - RNA, 19 nt, Artificial Sequence
  Description of Artificial Sequence: Synthetic oligonucleotide
  Antisense strand to SEQ ID NO: 2160864
uuacggaaacaacacugaa

SEQ ID NO: 2160866 - RNA, 19 nt, Artificial Sequence
  Description of Artificial Sequence: Synthetic oligonucleotide
  Sense strand starting at position 2671 of SEQ ID NO: 1882968
aggagugucuauuccagag

SEQ ID NO: 2160867 - RNA, 19 nt, Artificial Sequence
  Description of Artificial Sequence: Synthetic oligonucleotide
  Antisense strand to SEQ ID NO: 2160866
cucuggaauagacacuccu

SEQ ID NO: 2160868 - RNA, 19 nt, Artificial Sequence
  Description of Artificial Sequence: Synthetic oligonucleotide
  Sense strand starting at position 2703 of SEQ ID NO: 1882968
agugauuagcucuagagua

SEQ ID NO: 2160869 - RNA, 19 nt, Artificial Sequence
  Description of Artificial Sequence: Synthetic oligonucleotide
  Antisense strand to SEQ ID NO: 2160868
uacucuagagcuaaucacu

SEQ ID NO: 2160870 - RNA, 19 nt, Artificial Sequence
  Description of Artificial Sequence: Synthetic oligonucleotide
  Sense strand starting at position 2705 of SEQ ID NO: 1882968
ugauuagcucuagaguagu

SEQ ID NO: 2160871 - RNA, 19 nt, Artificial Sequence
  Description of Artificial Sequence: Synthetic oligonucleotide
  Antisense strand to SEQ ID NO: 2160870
acuacucuagagcuaauca

SEQ ID NO: 2160872 - RNA, 19 nt, Artificial Sequence
  Description of Artificial Sequence: Synthetic oligonucleotide
  Sense strand starting at position 2748 of SEQ ID NO: 1882968
aguuguggaauccaucuga

SEQ ID NO: 2160873 - RNA, 19 nt, Artificial Sequence
  Description of Artificial Sequence: Synthetic oligonucleotide
  Antisense strand to SEQ ID NO: 2160872
ucagauggauuccacaacu

SEQ ID NO: 2160874 - RNA, 19 nt, Artificial Sequence
  Description of Artificial Sequence: Synthetic oligonucleotide
  Sense strand starting at position 2780 of SEQ ID NO: 1882968
gggagaacuuguaggauug

SEQ ID NO: 2160875 - RNA, 19 nt, Artificial Sequence
  Description of Artificial Sequence: Synthetic oligonucleotide
  Antisense strand to SEQ ID NO: 2160874
caauccuacaaguucuccc

SEQ ID NO: 2160876 - RNA, 19 nt, Artificial Sequence
  Description of Artificial Sequence: Synthetic oligonucleotide
  Sense strand starting at position 2810 of SEQ ID NO: 1882968
cuuuaaugccuggaaguuc

SEQ ID NO: 2160877 - RNA, 19 nt, Artificial Sequence
  Description of Artificial Sequence: Synthetic oligonucleotide
  Antisense strand to SEQ ID NO: 2160876
gaacuuccaggcauuaaag

SEQ ID NO: 2160878 - RNA, 19 nt, Artificial Sequence
  Description of Artificial Sequence: Synthetic oligonucleotide
  Sense strand starting at position 2853 of SEQ ID NO: 1882968
agggacguuaccgaagaau

SEQ ID NO: 2160879 - RNA, 19 nt, Artificial Sequence
  Description of Artificial Sequence: Synthetic oligonucleotide
  Antisense strand to SEQ ID NO: 2160878
auucuucgguaacgucccu

SEQ ID NO: 2160880 - RNA, 19 nt, Artificial Sequence
  Description of Artificial Sequence: Synthetic oligonucleotide
  Sense strand starting at position 2875 of SEQ ID NO: 1882968
aguauuacggcucauuaga

SEQ ID NO: 2160881 - RNA, 19 nt, Artificial Sequence
  Description of Artificial Sequence: Synthetic oligonucleotide
  Antisense strand to SEQ ID NO: 2160880
ucuaaugagccguaauacu

SEQ ID NO: 2160882 - RNA, 19 nt, Artificial Sequence
  Description of Artificial Sequence: Synthetic oligonucleotide
  Sense strand starting at position 2888 of SEQ ID NO: 1882968
auuagaagauggguuugua

SEQ ID NO: 2160883 - RNA, 19 nt, Artificial Sequence
  Description of Artificial Sequence: Synthetic oligonucleotide
  Antisense strand to SEQ ID NO: 2160882
uacaaacccaucuucuaau

SEQ ID NO: 2160884 - RNA, 19 nt, Artificial Sequence
  Description of Artificial Sequence: Synthetic oligonucleotide
  Sense strand starting at position 2892 of SEQ ID NO: 1882968
gaagauggguuuguaugga

SEQ ID NO: 2160885 - RNA, 19 nt, Artificial Sequence
  Description of Artificial Sequence: Synthetic oligonucleotide
  Antisense strand to SEQ ID NO: 2160884
uccauacaaacccaucuuc

SEQ ID NO: 2160886 - RNA, 19 nt, Artificial Sequence
  Description of Artificial Sequence: Synthetic oligonucleotide
  Sense strand starting at position 2946 of SEQ ID NO: 1882968
agaaacaucuggcuuuaau

SEQ ID NO: 2160887 - RNA, 19 nt, Artificial Sequence
  Description of Artificial Sequence: Synthetic oligonucleotide
  Antisense strand to SEQ ID NO: 2160886
auuaaagccagauguuucu

SEQ ID NO: 2160888 - RNA, 19 nt, Artificial Sequence
  Description of Artificial Sequence: Synthetic oligonucleotide
  Sense strand starting at position 3118 of SEQ ID NO: 1882968
uuuggcuuaucuuugaaag

SEQ ID NO: 2160889 - RNA, 19 nt, Artificial Sequence
  Description of Artificial Sequence: Synthetic oligonucleotide
  Antisense strand to SEQ ID NO: 2160888
cuuucaaagauaagccaaa

SEQ ID NO: 2160890 - RNA, 19 nt, Artificial Sequence
  Description of Artificial Sequence: Synthetic oligonucleotide
  Sense strand starting at position 3119 of SEQ ID NO: 1882968
uuggcuuaucuuugaaagg

SEQ ID NO: 2160891 - RNA, 19 nt, Artificial Sequence
  Description of Artificial Sequence: Synthetic oligonucleotide
  Antisense strand to SEQ ID NO: 2160890
ccuuucaaagauaagccaa

SEQ ID NO: 2160892 - RNA, 19 nt, Artificial Sequence
  Description of Artificial Sequence: Synthetic oligonucleotide
  Sense strand starting at position 3327 of SEQ ID NO: 1882968
ugacuagaucugugaagca

SEQ ID NO: 2160893 - RNA, 19 nt, Artificial Sequence
  Description of Artificial Sequence: Synthetic oligonucleotide
  Antisense strand to SEQ ID NO: 2160892
ugcuucacagaucuaguca

SEQ ID NO: 2160894 - RNA, 19 nt, Artificial Sequence
  Description of Artificial Sequence: Synthetic oligonucleotide
  Sense strand starting at position 3334 of SEQ ID NO: 1882968
aucugugaagcauacucaa

SEQ ID NO: 2160895 - RNA, 19 nt, Artificial Sequence
  Description of Artificial Sequence: Synthetic oligonucleotide
  Antisense strand to SEQ ID NO: 2160894
uugaguaugcuucacagau

SEQ ID NO: 2160896 - RNA, 19 nt, Artificial Sequence
  Description of Artificial Sequence: Synthetic oligonucleotide
  Sense strand starting at position 3447 of SEQ ID NO: 1882968
acuggaagaaucugucaug

SEQ ID NO: 2160897 - RNA, 19 nt, Artificial Sequence
  Description of Artificial Sequence: Synthetic oligonucleotide
  Antisense strand to SEQ ID NO: 2160896
caugacagauucuuccagu

SEQ ID NO: 2160898 - RNA, 19 nt, Artificial Sequence
  Description of Artificial Sequence: Synthetic oligonucleotide
  Sense strand starting at position 3448 of SEQ ID NO: 1882968
cuggaagaaucugucauga

SEQ ID NO: 2160899 - RNA, 19 nt, Artificial Sequence
  Description of Artificial Sequence: Synthetic oligonucleotide
  Antisense strand to SEQ ID NO: 2160898
ucaugacagauucuuccag

SEQ ID NO: 2160900 - RNA, 19 nt, Artificial Sequence
  Description of Artificial Sequence: Synthetic oligonucleotide
  Sense strand starting at position 3551 of SEQ ID NO: 1882968
guuugaucuggccugcgua

SEQ ID NO: 2160901 - RNA, 19 nt, Artificial Sequence
  Description of Artificial Sequence: Synthetic oligonucleotide
  Antisense strand to SEQ ID NO: 2160900
uacgcaggccagaucaaac

SEQ ID NO: 2160902 - RNA, 19 nt, Artificial Sequence
  Description of Artificial Sequence: Synthetic oligonucleotide
  Sense strand starting at position 3580 of SEQ ID NO: 1882968
ggccauaucccugauugau

SEQ ID NO: 2160903 - RNA, 19 nt, Artificial Sequence
  Description of Artificial Sequence: Synthetic oligonucleotide
  Antisense strand to SEQ ID NO: 2160902
aucaaucagggauauggcc

SEQ ID NO: 2160904 - RNA, 19 nt, Artificial Sequence
  Description of Artificial Sequence: Synthetic oligonucleotide
  Sense strand starting at position 3611 of SEQ ID NO: 1882968
cuuugaauuugagagugag

SEQ ID NO: 2160905 - RNA, 19 nt, Artificial Sequence
  Description of Artificial Sequence: Synthetic oligonucleotide
  Antisense strand to SEQ ID NO: 2160904
cucacucucaaauucaaag

SEQ ID NO: 2160906 - RNA, 19 nt, Artificial Sequence
  Description of Artificial Sequence: Synthetic oligonucleotide
  Sense strand starting at position 3651 of SEQ ID NO: 1882968
guaguuggaguugaaaugu

SEQ ID NO: 2160907 - RNA, 19 nt, Artificial Sequence
  Description of Artificial Sequence: Synthetic oligonucleotide
  Antisense strand to SEQ ID NO: 2160906
acauuucaacuccaacuac

SEQ ID NO: 2160908 - RNA, 19 nt, Artificial Sequence
  Description of Artificial Sequence: Synthetic oligonucleotide
  Sense strand starting at position 3787 of SEQ ID NO: 1882968
guuugaucuaacuguagag

SEQ ID NO: 2160909 - RNA, 19 nt, Artificial Sequence
  Description of Artificial Sequence: Synthetic oligonucleotide
  Antisense strand to SEQ ID NO: 2160908
cucuacaguuagaucaaac

SEQ ID NO: 2160910 - RNA, 19 nt, Artificial Sequence
  Description of Artificial Sequence: Synthetic oligonucleotide
  Sense strand starting at position 3828 of SEQ ID NO: 1882968
gcguauuuccaggacguca

SEQ ID NO: 2160911 - RNA, 19 nt, Artificial Sequence
  Description of Artificial Sequence: Synthetic oligonucleotide
  Antisense strand to SEQ ID NO: 2160910
ugacguccuggaaauacgc

SEQ ID NO: 2160912 - RNA, 19 nt, Artificial Sequence
  Description of Artificial Sequence: Synthetic oligonucleotide
  Sense strand starting at position 3890 of SEQ ID NO: 1882968
guaccauccgcguuaucug

SEQ ID NO: 2160913 - RNA, 19 nt, Artificial Sequence
  Description of Artificial Sequence: Synthetic oligonucleotide
  Antisense strand to SEQ ID NO: 2160912
cagauaacgcggaugguac

SEQ ID NO: 2160914 - RNA, 19 nt, Artificial Sequence
  Description of Artificial Sequence: Synthetic oligonucleotide
  Sense strand starting at position 3897 of SEQ ID NO: 1882968
ccgcguuaucuguuguaua

SEQ ID NO: 2160915 - RNA, 19 nt, Artificial Sequence
  Description of Artificial Sequence: Synthetic oligonucleotide
  Antisense strand to SEQ ID NO: 2160914
uauacaacagauaacgcgg

SEQ ID NO: 2160916 - RNA, 19 nt, Artificial Sequence
  Description of Artificial Sequence: Synthetic oligonucleotide
  Sense strand starting at position 3902 of SEQ ID NO: 1882968
uuaucuguuguauagacau

SEQ ID NO: 2160917 - RNA, 19 nt, Artificial Sequence
  Description of Artificial Sequence: Synthetic oligonucleotide
  Antisense strand to SEQ ID NO: 2160916
augucuauacaacagauaa

SEQ ID NO: 2160918 - RNA, 19 nt, Artificial Sequence
  Description of Artificial Sequence: Synthetic oligonucleotide
  Sense strand starting at position 240 of SEQ ID NO: 1882969
auagaucaacuguagcauu

SEQ ID NO: 2160919 - RNA, 19 nt, Artificial Sequence
  Description of Artificial Sequence: Synthetic oligonucleotide
  Antisense strand to SEQ ID NO: 2160918
aaugcuacaguugaucuau

SEQ ID NO: 2160920 - RNA, 19 nt, Artificial Sequence
  Description of Artificial Sequence: Synthetic oligonucleotide
  Sense strand starting at position 286 of SEQ ID NO: 1882969
uuugcuccaugaguagaaa

SEQ ID NO: 2160921 - RNA, 19 nt, Artificial Sequence
  Description of Artificial Sequence: Synthetic oligonucleotide
  Antisense strand to SEQ ID NO: 2160920
uuucuacucauggagcaaa

SEQ ID NO: 2160922 - RNA, 19 nt, Artificial Sequence
  Description of Artificial Sequence: Synthetic oligonucleotide
  Sense strand starting at position 289 of SEQ ID NO: 1882969
gcuccaugaguagaaacuu

SEQ ID NO: 2160923 - RNA, 19 nt, Artificial Sequence
  Description of Artificial Sequence: Synthetic oligonucleotide
  Antisense strand to SEQ ID NO: 2160922
aaguuucuacucauggagc

SEQ ID NO: 2160924 - RNA, 19 nt, Artificial Sequence
  Description of Artificial Sequence: Synthetic oligonucleotide
  Sense strand starting at position 338 of SEQ ID NO: 1882969
uuuacaauccaccgaugaa

SEQ ID NO: 2160925 - RNA, 19 nt, Artificial Sequence
  Description of Artificial Sequence: Synthetic oligonucleotide
  Antisense strand to SEQ ID NO: 2160924
uucaucgguggauuguaaa

SEQ ID NO: 2160926 - RNA, 19 nt, Artificial Sequence
  Description of Artificial Sequence: Synthetic oligonucleotide
  Sense strand starting at position 368 of SEQ ID NO: 1882969
accugaaauugcguuuaug

SEQ ID NO: 2160927 - RNA, 19 nt, Artificial Sequence
  Description of Artificial Sequence: Synthetic oligonucleotide
  Antisense strand to SEQ ID NO: 2160926
cauaaacgcaauuucaggu

SEQ ID NO: 2160928 - RNA, 19 nt, Artificial Sequence
  Description of Artificial Sequence: Synthetic oligonucleotide
  Sense strand starting at position 371 of SEQ ID NO: 1882969
ugaaauugcguuuaugcuu

SEQ ID NO: 2160929 - RNA, 19 nt, Artificial Sequence
  Description of Artificial Sequence: Synthetic oligonucleotide
  Antisense strand to SEQ ID NO: 2160928
aagcauaaacgcaauuuca

SEQ ID NO: 2160930 - RNA, 19 nt, Artificial Sequence
  Description of Artificial Sequence: Synthetic oligonucleotide
  Sense strand starting at position 377 of SEQ ID NO: 1882969
ugcguuuaugcuuucuaca

SEQ ID NO: 2160931 - RNA, 19 nt, Artificial Sequence
  Description of Artificial Sequence: Synthetic oligonucleotide
  Antisense strand to SEQ ID NO: 2160930
uguagaaagcauaaacgca

SEQ ID NO: 2160932 - RNA, 19 nt, Artificial Sequence
  Description of Artificial Sequence: Synthetic oligonucleotide
  Sense strand starting at position 378 of SEQ ID NO: 1882969
gcguuuaugcuuucuacau

SEQ ID NO: 2160933 - RNA, 19 nt, Artificial Sequence
  Description of Artificial Sequence: Synthetic oligonucleotide
  Antisense strand to SEQ ID NO: 2160932
auguagaaagcauaaacgc

SEQ ID NO: 2160934 - RNA, 19 nt, Artificial Sequence
  Description of Artificial Sequence: Synthetic oligonucleotide
  Sense strand starting at position 455 of SEQ ID NO: 1882969
cugagagaccuucgaaggu

SEQ ID NO: 2160935 - RNA, 19 nt, Artificial Sequence
  Description of Artificial Sequence: Synthetic oligonucleotide
  Antisense strand to SEQ ID NO: 2160934
accuucgaaggucucucag

SEQ ID NO: 2160936 - RNA, 19 nt, Artificial Sequence
  Description of Artificial Sequence: Synthetic oligonucleotide
  Sense strand starting at position 468 of SEQ ID NO: 1882969
gaaggucgccaggauaaau

SEQ ID NO: 2160937 - RNA, 19 nt, Artificial Sequence
  Description of Artificial Sequence: Synthetic oligonucleotide
  Antisense strand to SEQ ID NO: 2160936
auuuauccuggcgaccuuc

SEQ ID NO: 2160938 - RNA, 19 nt, Artificial Sequence
  Description of Artificial Sequence: Synthetic oligonucleotide
  Sense strand starting at position 479 of SEQ ID NO: 1882969
ggauaaauguaucacauca

SEQ ID NO: 2160939 - RNA, 19 nt, Artificial Sequence
  Description of Artificial Sequence: Synthetic oligonucleotide
  Antisense strand to SEQ ID NO: 2160938
ugaugugauacauuuaucc

SEQ ID NO: 2160940 - RNA, 19 nt, Artificial Sequence
  Description of Artificial Sequence: Synthetic oligonucleotide
  Sense strand starting at position 639 of SEQ ID NO: 1882969
gcuuacagucgcuacugau

SEQ ID NO: 2160941 - RNA, 19 nt, Artificial Sequence
  Description of Artificial Sequence: Synthetic oligonucleotide
  Antisense strand to SEQ ID NO: 2160940
aucaguagcgacuguaagc

SEQ ID NO: 2160942 - RNA, 19 nt, Artificial Sequence
  Description of Artificial Sequence: Synthetic oligonucleotide
  Sense strand starting at position 645 of SEQ ID NO: 1882969
agucgcuacugaucacuau

SEQ ID NO: 2160943 - RNA, 19 nt, Artificial Sequence
  Description of Artificial Sequence: Synthetic oligonucleotide
  Antisense strand to SEQ ID NO: 2160942
auagugaucaguagcgacu

SEQ ID NO: 2160944 - RNA, 19 nt, Artificial Sequence
  Description of Artificial Sequence: Synthetic oligonucleotide
  Sense strand starting at position 646 of SEQ ID NO: 1882969
gucgcuacugaucacuauu

SEQ ID NO: 2160945 - RNA, 19 nt, Artificial Sequence
  Description of Artificial Sequence: Synthetic oligonucleotide
  Antisense strand to SEQ ID NO: 2160944
aauagugaucaguagcgac

SEQ ID NO: 2160946 - RNA, 19 nt, Artificial Sequence
  Description of Artificial Sequence: Synthetic oligonucleotide
  Sense strand starting at position 779 of SEQ ID NO: 1882969
uuucgucucgcauaucaaa

SEQ ID NO: 2160947 - RNA, 19 nt, Artificial Sequence
  Description of Artificial Sequence: Synthetic oligonucleotide
  Antisense strand to SEQ ID NO: 2160946
uuugauaugcgagacgaaa

SEQ ID NO: 2160948 - RNA, 19 nt, Artificial Sequence
  Description of Artificial Sequence: Synthetic oligonucleotide
  Sense strand starting at position 813 of SEQ ID NO: 1882969
ucucucuuccgggagcgaa

SEQ ID NO: 2160949 - RNA, 19 nt, Artificial Sequence
  Description of Artificial Sequence: Synthetic oligonucleotide
  Antisense strand to SEQ ID NO: 2160948
uucgcucccggaagagaga

SEQ ID NO: 2160950 - RNA, 19 nt, Artificial Sequence
  Description of Artificial Sequence: Synthetic oligonucleotide
  Sense strand starting at position 848 of SEQ ID NO: 1882969
uucggaagaugcguaaauu

SEQ ID NO: 2160951 - RNA, 19 nt, Artificial Sequence
  Description of Artificial Sequence: Synthetic oligonucleotide
  Antisense strand to SEQ ID NO: 2160950
aauuuacgcaucuuccgaa

SEQ ID NO: 2160952 - RNA, 19 nt, Artificial Sequence
  Description of Artificial Sequence: Synthetic oligonucleotide
  Sense strand starting at position 893 of SEQ ID NO: 1882969
aggguaauaaucugcagcu

SEQ ID NO: 2160953 - RNA, 19 nt, Artificial Sequence
  Description of Artificial Sequence: Synthetic oligonucleotide
  Antisense strand to SEQ ID NO: 2160952
agcugcagauuauuacccu

SEQ ID NO: 2160954 - RNA, 19 nt, Artificial Sequence
  Description of Artificial Sequence: Synthetic oligonucleotide
  Sense strand starting at position 895 of SEQ ID NO: 1882969
gguaauaaucugcagcuca

SEQ ID NO: 2160955 - RNA, 19 nt, Artificial Sequence
  Description of Artificial Sequence: Synthetic oligonucleotide
  Antisense strand to SEQ ID NO: 2160954
ugagcugcagauuauuacc

SEQ ID NO: 2160956 - RNA, 19 nt, Artificial Sequence
  Description of Artificial Sequence: Synthetic oligonucleotide
  Sense strand starting at position 1452 of SEQ ID NO: 1882969
gcugcagagaucgagacaa

SEQ ID NO: 2160957 - RNA, 19 nt, Artificial Sequence
  Description of Artificial Sequence: Synthetic oligonucleotide
  Antisense strand to SEQ ID NO: 2160956
uugucucgaucucugcagc

SEQ ID NO: 2160958 - RNA, 19 nt, Artificial Sequence
  Description of Artificial Sequence: Synthetic oligonucleotide
  Sense strand starting at position 1746 of SEQ ID NO: 1882969
uguuguuccgggaguugca

SEQ ID NO: 2160959 - RNA, 19 nt, Artificial Sequence
  Description of Artificial Sequence: Synthetic oligonucleotide
  Antisense strand to SEQ ID NO: 2160958
ugcaacucccggaacaaca

SEQ ID NO: 2160960 - RNA, 19 nt, Artificial Sequence
  Description of Artificial Sequence: Synthetic oligonucleotide
  Sense strand starting at position 1778 of SEQ ID NO: 1882969
cuguuuaucccacacagca

SEQ ID NO: 2160961 - RNA, 19 nt, Artificial Sequence
  Description of Artificial Sequence: Synthetic oligonucleotide
  Antisense strand to SEQ ID NO: 2160960
ugcugugugggauaaacag

SEQ ID NO: 2160962 - RNA, 19 nt, Artificial Sequence
  Description of Artificial Sequence: Synthetic oligonucleotide
  Sense strand starting at position 2006 of SEQ ID NO: 1882969
ggacgucuccuccggaaag

SEQ ID NO: 2160963 - RNA, 19 nt, Artificial Sequence
  Description of Artificial Sequence: Synthetic oligonucleotide
  Antisense strand to SEQ ID NO: 2160962
cuuuccggaggagacgucc

SEQ ID NO: 2160964 - RNA, 19 nt, Artificial Sequence
  Description of Artificial Sequence: Synthetic oligonucleotide
  Sense strand starting at position 2078 of SEQ ID NO: 1882969
gacgaaaguccauaguuag

SEQ ID NO: 2160965 - RNA, 19 nt, Artificial Sequence
  Description of Artificial Sequence: Synthetic oligonucleotide
  Antisense strand to SEQ ID NO: 2160964
cuaacuauggacuuucguc

SEQ ID NO: 2160966 - RNA, 19 nt, Artificial Sequence
  Description of Artificial Sequence: Synthetic oligonucleotide
  Sense strand starting at position 2107 of SEQ ID NO: 1882969
ccuagcagaggcugauaua

SEQ ID NO: 2160967 - RNA, 19 nt, Artificial Sequence
  Description of Artificial Sequence: Synthetic oligonucleotide
  Antisense strand to SEQ ID NO: 2160966
uauaucagccucugcuagg

SEQ ID NO: 2160968 - RNA, 19 nt, Artificial Sequence
  Description of Artificial Sequence: Synthetic oligonucleotide
  Sense strand starting at position 2148 of SEQ ID NO: 1882969
gggacuugcagucggaaga

SEQ ID NO: 2160969 - RNA, 19 nt, Artificial Sequence
  Description of Artificial Sequence: Synthetic oligonucleotide
  Antisense strand to SEQ ID NO: 2160968
ucuuccgacugcaaguccc

SEQ ID NO: 2160970 - RNA, 19 nt, Artificial Sequence
  Description of Artificial Sequence: Synthetic oligonucleotide
  Sense strand starting at position 2159 of SEQ ID NO: 1882969
ucggaagaccuggguuuga

SEQ ID NO: 2160971 - RNA, 19 nt, Artificial Sequence
  Description of Artificial Sequence: Synthetic oligonucleotide
  Antisense strand to SEQ ID NO: 2160970
ucaaacccaggucuuccga

SEQ ID NO: 2160972 - RNA, 19 nt, Artificial Sequence
  Description of Artificial Sequence: Synthetic oligonucleotide
  Sense strand starting at position 2246 of SEQ ID NO: 1882969
gccucucucgaauaaggau

SEQ ID NO: 2160973 - RNA, 19 nt, Artificial Sequence
  Description of Artificial Sequence: Synthetic oligonucleotide
  Antisense strand to SEQ ID NO: 2160972
auccuuauucgagagaggc

SEQ ID NO: 2160974 - RNA, 19 nt, Artificial Sequence
  Description of Artificial Sequence: Synthetic oligonucleotide
  Sense strand starting at position 2296 of SEQ ID NO: 1882969
auuauaugauguccuuaga

SEQ ID NO: 2160975 - RNA, 19 nt, Artificial Sequence
  Description of Artificial Sequence: Synthetic oligonucleotide
  Antisense strand to SEQ ID NO: 2160974
ucuaaggacaucauauaau

SEQ ID NO: 2160976 - RNA, 19 nt, Artificial Sequence
  Description of Artificial Sequence: Synthetic oligonucleotide
  Sense strand starting at position 2312 of SEQ ID NO: 1882969
agaaaucacugagcuuagu

SEQ ID NO: 2160977 - RNA, 19 nt, Artificial Sequence
  Description of Artificial Sequence: Synthetic oligonucleotide
  Antisense strand to SEQ ID NO: 2160976
acuaagcucagugauuucu

SEQ ID NO: 2160978 - RNA, 19 nt, Artificial Sequence
  Description of Artificial Sequence: Synthetic oligonucleotide
  Sense strand starting at position 2322 of SEQ ID NO: 1882969
gagcuuagugccugguaca

SEQ ID NO: 2160979 - RNA, 19 nt, Artificial Sequence
  Description of Artificial Sequence: Synthetic oligonucleotide
  Antisense strand to SEQ ID NO: 2160978
uguaccaggcacuaagcuc

SEQ ID NO: 2160980 - RNA, 19 nt, Artificial Sequence
  Description of Artificial Sequence: Synthetic oligonucleotide
  Sense strand starting at position 2360 of SEQ ID NO: 1882969
guuaucucauuccugguau

SEQ ID NO: 2160981 - RNA, 19 nt, Artificial Sequence
  Description of Artificial Sequence: Synthetic oligonucleotide
  Antisense strand to SEQ ID NO: 2160980
auaccaggaaugagauaac

SEQ ID NO: 2160982 - RNA, 19 nt, Artificial Sequence
  Description of Artificial Sequence: Synthetic oligonucleotide
  Sense strand starting at position 2371 of SEQ ID NO: 1882969
ccugguaucagagauguga

SEQ ID NO: 2160983 - RNA, 19 nt, Artificial Sequence
  Description of Artificial Sequence: Synthetic oligonucleotide
  Antisense strand to SEQ ID NO: 2160982
ucacaucucugauaccagg

SEQ ID NO: 2160984 - RNA, 19 nt, Artificial Sequence
  Description of Artificial Sequence: Synthetic oligonucleotide
  Sense strand starting at position 2373 of SEQ ID NO: 1882969
ugguaucagagaugugauc

SEQ ID NO: 2160985 - RNA, 19 nt, Artificial Sequence
  Description of Artificial Sequence: Synthetic oligonucleotide
  Antisense strand to SEQ ID NO: 2160984
gaucacaucucugauacca

SEQ ID NO: 2160986 - RNA, 19 nt, Artificial Sequence
  Description of Artificial Sequence: Synthetic oligonucleotide
  Sense strand starting at position 2375 of SEQ ID NO: 1882969
guaucagagaugugaucuu

SEQ ID NO: 2160987 - RNA, 19 nt, Artificial Sequence
  Description of Artificial Sequence: Synthetic oligonucleotide
  Antisense strand to SEQ ID NO: 2160986
aagaucacaucucugauac

SEQ ID NO: 2160988 - RNA, 19 nt, Artificial Sequence
  Description of Artificial Sequence: Synthetic oligonucleotide
  Sense strand starting at position 2382 of SEQ ID NO: 1882969
agaugugaucuuggccaag

SEQ ID NO: 2160989 - RNA, 19 nt, Artificial Sequence
  Description of Artificial Sequence: Synthetic oligonucleotide
  Antisense strand to SEQ ID NO: 2160988
cuuggccaagaucacaucu

SEQ ID NO: 2160990 - RNA, 19 nt, Artificial Sequence
  Description of Artificial Sequence: Synthetic oligonucleotide
  Sense strand starting at position 2855 of SEQ ID NO: 1882969
cagagauggcugugaaagu

SEQ ID NO: 2160991 - RNA, 19 nt, Artificial Sequence
  Description of Artificial Sequence: Synthetic oligonucleotide
  Antisense strand to SEQ ID NO: 2160990
acuuucacagccaucucug

SEQ ID NO: 2160992 - RNA, 19 nt, Artificial Sequence
  Description of Artificial Sequence: Synthetic oligonucleotide
  Sense strand starting at position 2862 of SEQ ID NO: 1882969
ggcugugaaaguuaaauga

SEQ ID NO: 2160993 - RNA, 19 nt, Artificial Sequence
  Description of Artificial Sequence: Synthetic oligonucleotide
  Antisense strand to SEQ ID NO: 2160992
ucauuuaacuuucacagcc

SEQ ID NO: 2160994 - RNA, 19 nt, Artificial Sequence
  Description of Artificial Sequence: Synthetic oligonucleotide
  Sense strand starting at position 3931 of SEQ ID NO: 1882969
cugguaaaccacuguucua

SEQ ID NO: 2160995 - RNA, 19 nt, Artificial Sequence
  Description of Artificial Sequence: Synthetic oligonucleotide
  Antisense strand to SEQ ID NO: 2160994
uagaacagugguuuaccag

SEQ ID NO: 2160996 - RNA, 19 nt, Artificial Sequence
  Description of Artificial Sequence: Synthetic oligonucleotide
  Sense strand starting at position 3983 of SEQ ID NO: 1882969
ucacguauaagugagauaa

SEQ ID NO: 2160997 - RNA, 19 nt, Artificial Sequence
  Description of Artificial Sequence: Synthetic oligonucleotide
  Antisense strand to SEQ ID NO: 2160996
uuaucucacuuauacguga

SEQ ID NO: 2160998 - RNA, 19 nt, Artificial Sequence
  Description of Artificial Sequence: Synthetic oligonucleotide
  Sense strand starting at position 102 of SEQ ID NO: 1882970
agccuuagugugggugaca

SEQ ID NO: 2160999 - RNA, 19 nt, Artificial Sequence
  Description of Artificial Sequence: Synthetic oligonucleotide
  Antisense strand to SEQ ID NO: 2160998
ugucacccacacuaaggcu

SEQ ID NO: 2161000 - RNA, 19 nt, Artificial Sequence
  Description of Artificial Sequence: Synthetic oligonucleotide
  Sense strand starting at position 484 of SEQ ID NO: 1882970
cagagucaauccgcaggaa

SEQ ID NO: 2161001 - RNA, 19 nt, Artificial Sequence
  Description of Artificial Sequence: Synthetic oligonucleotide
  Antisense strand to SEQ ID NO: 2161000
uuccugcggauugacucug

SEQ ID NO: 2161002 - RNA, 19 nt, Artificial Sequence
  Description of Artificial Sequence: Synthetic oligonucleotide
  Sense strand starting at position 487 of SEQ ID NO: 1882970
agucaauccgcaggaacuu

SEQ ID NO: 2161003 - RNA, 19 nt, Artificial Sequence
  Description of Artificial Sequence: Synthetic oligonucleotide
  Antisense strand to SEQ ID NO: 2161002
aaguuccugcggauugacu

SEQ ID NO: 2161004 - RNA, 19 nt, Artificial Sequence
  Description of Artificial Sequence: Synthetic oligonucleotide
  Sense strand starting at position 531 of SEQ ID NO: 1882970
cacaucucugggugggauu

SEQ ID NO: 2161005 - RNA, 19 nt, Artificial Sequence
  Description of Artificial Sequence: Synthetic oligonucleotide
  Antisense strand to SEQ ID NO: 2161004
aaucccacccagagaugug

SEQ ID NO: 2161006 - RNA, 19 nt, Artificial Sequence
  Description of Artificial Sequence: Synthetic oligonucleotide
  Sense strand starting at position 562 of SEQ ID NO: 1882970
gagauagacucaucauguc

SEQ ID NO: 2161007 - RNA, 19 nt, Artificial Sequence
  Description of Artificial Sequence: Synthetic oligonucleotide
  Antisense strand to SEQ ID NO: 2161006
gacaugaugagucuaucuc

SEQ ID NO: 2161008 - RNA, 19 nt, Artificial Sequence
  Description of Artificial Sequence: Synthetic oligonucleotide
  Sense strand starting at position 681 of SEQ ID NO: 1882970
cuugucaagcugugcucaa

SEQ ID NO: 2161009 - RNA, 19 nt, Artificial Sequence
  Description of Artificial Sequence: Synthetic oligonucleotide
  Antisense strand to SEQ ID NO: 2161008
uugagcacagcuugacaag

SEQ ID NO: 2161010 - RNA, 19 nt, Artificial Sequence
  Description of Artificial Sequence: Synthetic oligonucleotide
  Sense strand starting at position 682 of SEQ ID NO: 1882970
uugucaagcugugcucaau

SEQ ID NO: 2161011 - RNA, 19 nt, Artificial Sequence
  Description of Artificial Sequence: Synthetic oligonucleotide
  Antisense strand to SEQ ID NO: 2161010
auugagcacagcuugacaa

SEQ ID NO: 2161012 - RNA, 19 nt, Artificial Sequence
  Description of Artificial Sequence: Synthetic oligonucleotide
  Sense strand starting at position 704 of SEQ ID NO: 1882970
accagaacuuguggagacu

SEQ ID NO: 2161013 - RNA, 19 nt, Artificial Sequence
  Description of Artificial Sequence: Synthetic oligonucleotide
  Antisense strand to SEQ ID NO: 2161012
agucuccacaaguucuggu

SEQ ID NO: 2161014 - RNA, 19 nt, Artificial Sequence
  Description of Artificial Sequence: Synthetic oligonucleotide
  Sense strand starting at position 774 of SEQ ID NO: 1882970
ugaugugaguaggaagaau

SEQ ID NO: 2161015 - RNA, 19 nt, Artificial Sequence
  Description of Artificial Sequence: Synthetic oligonucleotide
  Antisense strand to SEQ ID NO: 2161014
auucuuccuacucacauca

SEQ ID NO: 2161016 - RNA, 19 nt, Artificial Sequence
  Description of Artificial Sequence: Synthetic oligonucleotide
  Sense strand starting at position 958 of SEQ ID NO: 1882970
ggucugugcucgccgaaga

SEQ ID NO: 2161017 - RNA, 19 nt, Artificial Sequence
  Description of Artificial Sequence: Synthetic oligonucleotide
  Antisense strand to SEQ ID NO: 2161016
ucuucggcgagcacagacc

SEQ ID NO: 2161018 - RNA, 19 nt, Artificial Sequence
  Description of Artificial Sequence: Synthetic oligonucleotide
  Sense strand starting at position 1142 of SEQ ID NO: 1882970
auaucacaaugucuguuaa

SEQ ID NO: 2161019 - RNA, 19 nt, Artificial Sequence
  Description of Artificial Sequence: Synthetic oligonucleotide
  Antisense strand to SEQ ID NO: 2161018
uuaacagacauugugauau

SEQ ID NO: 2161020 - RNA, 19 nt, Artificial Sequence
  Description of Artificial Sequence: Synthetic oligonucleotide
  Sense strand starting at position 1144 of SEQ ID NO: 1882970
aucacaaugucuguuaauc

SEQ ID NO: 2161021 - RNA, 19 nt, Artificial Sequence
  Description of Artificial Sequence: Synthetic oligonucleotide
  Antisense strand to SEQ ID NO: 2161020
gauuaacagacauugugau

SEQ ID NO: 2161022 - RNA, 19 nt, Artificial Sequence
  Description of Artificial Sequence: Synthetic oligonucleotide
  Sense strand starting at position 1416 of SEQ ID NO: 1882970
ugcgcaaagugcucugcaa

SEQ ID NO: 2161023 - RNA, 19 nt, Artificial Sequence
  Description of Artificial Sequence: Synthetic oligonucleotide
  Antisense strand to SEQ ID NO: 2161022
uugcagagcacuuugcgca

SEQ ID NO: 2161024 - RNA, 19 nt, Artificial Sequence
  Description of Artificial Sequence: Synthetic oligonucleotide
  Sense strand starting at position 1494 of SEQ ID NO: 1882970
uuugcaaacguggaaauga

SEQ ID NO: 2161025 - RNA, 19 nt, Artificial Sequence
  Description of Artificial Sequence: Synthetic oligonucleotide
  Antisense strand to SEQ ID NO: 2161024
ucauuuccacguuugcaaa

SEQ ID NO: 2161026 - RNA, 19 nt, Artificial Sequence
  Description of Artificial Sequence: Synthetic oligonucleotide
  Sense strand starting at position 1762 of SEQ ID NO: 1882970
cguauuucgucuucuggaa

SEQ ID NO: 2161027 - RNA, 19 nt, Artificial Sequence
  Description of Artificial Sequence: Synthetic oligonucleotide
  Antisense strand to SEQ ID NO: 2161026
uuccagaagacgaaauacg

SEQ ID NO: 2161028 - RNA, 19 nt, Artificial Sequence
  Description of Artificial Sequence: Synthetic oligonucleotide
  Sense strand starting at position 1764 of SEQ ID NO: 1882970
uauuucgucuucuggaaau

SEQ ID NO: 2161029 - RNA, 19 nt, Artificial Sequence
  Description of Artificial Sequence: Synthetic oligonucleotide
  Antisense strand to SEQ ID NO: 2161028
auuuccagaagacgaaaua

SEQ ID NO: 2161030 - RNA, 19 nt, Artificial Sequence
  Description of Artificial Sequence: Synthetic oligonucleotide
  Sense strand starting at position 1808 of SEQ ID NO: 1882970
ggcgcuuccaugggaaucu

SEQ ID NO: 2161031 - RNA, 19 nt, Artificial Sequence
  Description of Artificial Sequence: Synthetic oligonucleotide
  Antisense strand to SEQ ID NO: 2161030
agauucccauggaagcgcc

SEQ ID NO: 2161032 - RNA, 19 nt, Artificial Sequence
  Description of Artificial Sequence: Synthetic oligonucleotide
  Sense strand starting at position 3064 of SEQ ID NO: 1882970
ccagguauccuccaccagu

SEQ ID NO: 2161033 - RNA, 19 nt, Artificial Sequence
  Description of Artificial Sequence: Synthetic oligonucleotide
  Antisense strand to SEQ ID NO: 2161032
acugguggaggauaccugg

SEQ ID NO: 2161034 - RNA, 19 nt, Artificial Sequence
  Description of Artificial Sequence: Synthetic oligonucleotide
  Sense strand starting at position 3374 of SEQ ID NO: 1882970
ccgccaugacagggucauu

SEQ ID NO: 2161035 - RNA, 19 nt, Artificial Sequence
  Description of Artificial Sequence: Synthetic oligonucleotide
  Antisense strand to SEQ ID NO: 2161034
aaugacccugucauggcgg

SEQ ID NO: 2161036 - RNA, 19 nt, Artificial Sequence
  Description of Artificial Sequence: Synthetic oligonucleotide
  Sense strand starting at position 3406 of SEQ ID NO: 1882970
uggauucccgaguacaaau

SEQ ID NO: 2161037 - RNA, 19 nt, Artificial Sequence
  Description of Artificial Sequence: Synthetic oligonucleotide
  Antisense strand to SEQ ID NO: 2161036
auuuguacucgggaaucca

SEQ ID NO: 2161038 - RNA, 19 nt, Artificial Sequence
  Description of Artificial Sequence: Synthetic oligonucleotide
  Sense strand starting at position 3426 of SEQ ID NO: 1882970
ccagcuuucucccguagga

SEQ ID NO: 2161039 - RNA, 19 nt, Artificial Sequence
  Description of Artificial Sequence: Synthetic oligonucleotide
  Antisense strand to SEQ ID NO: 2161038
uccuacgggagaaagcugg

SEQ ID NO: 2161040 - RNA, 19 nt, Artificial Sequence
  Description of Artificial Sequence: Synthetic oligonucleotide
  Sense strand starting at position 3428 of SEQ ID NO: 1882970
agcuuucucccguaggaga

SEQ ID NO: 2161041 - RNA, 19 nt, Artificial Sequence
  Description of Artificial Sequence: Synthetic oligonucleotide
  Antisense strand to SEQ ID NO: 2161040
ucuccuacgggagaaagcu

SEQ ID NO: 2161042 - RNA, 19 nt, Artificial Sequence
  Description of Artificial Sequence: Synthetic oligonucleotide
  Sense strand starting at position 3679 of SEQ ID NO: 1882970
uugagauccugcugaacau

SEQ ID NO: 2161043 - RNA, 19 nt, Artificial Sequence
  Description of Artificial Sequence: Synthetic oligonucleotide
  Antisense strand to SEQ ID NO: 2161042
auguucagcaggaucucaa

SEQ ID NO: 2161044 - RNA, 19 nt, Artificial Sequence
  Description of Artificial Sequence: Synthetic oligonucleotide
  Sense strand starting at position 3680 of SEQ ID NO: 1882970
ugagauccugcugaacauu

SEQ ID NO: 2161045 - RNA, 19 nt, Artificial Sequence
  Description of Artificial Sequence: Synthetic oligonucleotide
  Antisense strand to SEQ ID NO: 2161044
aauguucagcaggaucuca

SEQ ID NO: 2161046 - RNA, 19 nt, Artificial Sequence
  Description of Artificial Sequence: Synthetic oligonucleotide
  Sense strand starting at position 391 of SEQ ID NO: 1882971
ucuuccuucuagugucaua

SEQ ID NO: 2161047 - RNA, 19 nt, Artificial Sequence
  Description of Artificial Sequence: Synthetic oligonucleotide
  Antisense strand to SEQ ID NO: 2161046
uaugacacuagaaggaaga

SEQ ID NO: 2161048 - RNA, 19 nt, Artificial Sequence
  Description of Artificial Sequence: Synthetic oligonucleotide
  Sense strand starting at position 408 of SEQ ID NO: 1882971
uagugaagauuacggauga

SEQ ID NO: 2161049 - RNA, 19 nt, Artificial Sequence
  Description of Artificial Sequence: Synthetic oligonucleotide
  Antisense strand to SEQ ID NO: 2161048
ucauccguaaucuucacua

SEQ ID NO: 2161050 - RNA, 19 nt, Artificial Sequence
  Description of Artificial Sequence: Synthetic oligonucleotide
  Sense strand starting at position 419 of SEQ ID NO: 1882971
acggaugagaauugcagaa

SEQ ID NO: 2161051 - RNA, 19 nt, Artificial Sequence
  Description of Artificial Sequence: Synthetic oligonucleotide
  Antisense strand to SEQ ID NO: 2161050
uucugcaauucucauccgu

SEQ ID NO: 2161052 - RNA, 19 nt, Artificial Sequence
  Description of Artificial Sequence: Synthetic oligonucleotide
  Sense strand starting at position 421 of SEQ ID NO: 1882971
ggaugagaauugcagaaag

SEQ ID NO: 2161053 - RNA, 19 nt, Artificial Sequence
  Description of Artificial Sequence: Synthetic oligonucleotide
  Antisense strand to SEQ ID NO: 2161052
cuuucugcaauucucaucc

SEQ ID NO: 2161054 - RNA, 19 nt, Artificial Sequence
  Description of Artificial Sequence: Synthetic oligonucleotide
  Sense strand starting at position 432 of SEQ ID NO: 1882971
gcagaaagcucauagcaca

SEQ ID NO: 2161055 - RNA, 19 nt, Artificial Sequence
  Description of Artificial Sequence: Synthetic oligonucleotide
  Antisense strand to SEQ ID NO: 2161054
ugugcuaugagcuuucugc

SEQ ID NO: 2161056 - RNA, 19 nt, Artificial Sequence
  Description of Artificial Sequence: Synthetic oligonucleotide
  Sense strand starting at position 461 of SEQ ID NO: 1882971
ucaagaaaugcgcguguuu

SEQ ID NO: 2161057 - RNA, 19 nt, Artificial Sequence
  Description of Artificial Sequence: Synthetic oligonucleotide
  Antisense strand to SEQ ID NO: 2161056
aaacacgcgcauuucuuga

SEQ ID NO: 2161058 - RNA, 19 nt, Artificial Sequence
  Description of Artificial Sequence: Synthetic oligonucleotide
  Sense strand starting at position 462 of SEQ ID NO: 1882971
caagaaaugcgcguguuuc

SEQ ID NO: 2161059 - RNA, 19 nt, Artificial Sequence
  Description of Artificial Sequence: Synthetic oligonucleotide
  Antisense strand to SEQ ID NO: 2161058
gaaacacgcgcauuucuug

SEQ ID NO: 2161060 - RNA, 19 nt, Artificial Sequence
  Description of Artificial Sequence: Synthetic oligonucleotide
  Sense strand starting at position 472 of SEQ ID NO: 1882971
gcguguuucccucucucca

SEQ ID NO: 2161061 - RNA, 19 nt, Artificial Sequence
  Description of Artificial Sequence: Synthetic oligonucleotide
  Antisense strand to SEQ ID NO: 2161060
uggagagagggaaacacgc

SEQ ID NO: 2161062 - RNA, 19 nt, Artificial Sequence
  Description of Artificial Sequence: Synthetic oligonucleotide
  Sense strand starting at position 485 of SEQ ID NO: 1882971
ucuccagugagagguagaa

SEQ ID NO: 2161063 - RNA, 19 nt, Artificial Sequence
  Description of Artificial Sequence: Synthetic oligonucleotide
  Antisense strand to SEQ ID NO: 2161062
uucuaccucucacuggaga

SEQ ID NO: 2161064 - RNA, 19 nt, Artificial Sequence
  Description of Artificial Sequence: Synthetic oligonucleotide
  Sense strand starting at position 504 of SEQ ID NO: 1882971
cugcauuugugucaccaca

SEQ ID NO: 2161065 - RNA, 19 nt, Artificial Sequence
  Description of Artificial Sequence: Synthetic oligonucleotide
  Antisense strand to SEQ ID NO: 2161064
uguggugacacaaaugcag

SEQ ID NO: 2161066 - RNA, 19 nt, Artificial Sequence
  Description of Artificial Sequence: Synthetic oligonucleotide
  Sense strand starting at position 539 of SEQ ID NO: 1882971
cgacaaacuccaugugaau

SEQ ID NO: 2161067 - RNA, 19 nt, Artificial Sequence
  Description of Artificial Sequence: Synthetic oligonucleotide
  Antisense strand to SEQ ID NO: 2161066
auucacauggaguuugucg

SEQ ID NO: 2161068 - RNA, 19 nt, Artificial Sequence
  Description of Artificial Sequence: Synthetic oligonucleotide
  Sense strand starting at position 552 of SEQ ID NO: 1882971
gugaaugccugggauuucu

SEQ ID NO: 2161069 - RNA, 19 nt, Artificial Sequence
  Description of Artificial Sequence: Synthetic oligonucleotide
  Antisense strand to SEQ ID NO: 2161068
agaaaucccaggcauucac

SEQ ID NO: 2161070 - RNA, 19 nt, Artificial Sequence
  Description of Artificial Sequence: Synthetic oligonucleotide
  Sense strand starting at position 673 of SEQ ID NO: 1882971
ugggaacuacccuguguua

SEQ ID NO: 2161071 - RNA, 19 nt, Artificial Sequence
  Description of Artificial Sequence: Synthetic oligonucleotide
  Antisense strand to SEQ ID NO: 2161070
uaacacaggguaguuccca

SEQ ID NO: 2161072 - RNA, 19 nt, Artificial Sequence
  Description of Artificial Sequence: Synthetic oligonucleotide
  Sense strand starting at position 675 of SEQ ID NO: 1882971
ggaacuacccuguguuaua

SEQ ID NO: 2161073 - RNA, 19 nt, Artificial Sequence
  Description of Artificial Sequence: Synthetic oligonucleotide
  Antisense strand to SEQ ID NO: 2161072
uauaacacaggguaguucc

SEQ ID NO: 2161074 - RNA, 19 nt, Artificial Sequence
  Description of Artificial Sequence: Synthetic oligonucleotide
  Sense strand starting at position 715 of SEQ ID NO: 1882971
gcaacagagucacugucau

SEQ ID NO: 2161075 - RNA, 19 nt, Artificial Sequence
  Description of Artificial Sequence: Synthetic oligonucleotide
  Antisense strand to SEQ ID NO: 2161074
augacagugacucuguugc

SEQ ID NO: 2161076 - RNA, 19 nt, Artificial Sequence
  Description of Artificial Sequence: Synthetic oligonucleotide
  Sense strand starting at position 770 of SEQ ID NO: 1882971
guggcaaggucucuauauu

SEQ ID NO: 2161077 - RNA, 19 nt, Artificial Sequence
  Description of Artificial Sequence: Synthetic oligonucleotide
  Antisense strand to SEQ ID NO: 2161076
aauauagagaccuugccac

SEQ ID NO: 2161078 - RNA, 19 nt, Artificial Sequence
  Description of Artificial Sequence: Synthetic oligonucleotide
  Sense strand starting at position 814 of SEQ ID NO: 1882971
gcaaccuggcgugcuaauu

SEQ ID NO: 2161079 - RNA, 19 nt, Artificial Sequence
  Description of Artificial Sequence: Synthetic oligonucleotide
  Antisense strand to SEQ ID NO: 2161078
aauuagcacgccagguugc

SEQ ID NO: 2161080 - RNA, 19 nt, Artificial Sequence
  Description of Artificial Sequence: Synthetic oligonucleotide
  Sense strand starting at position 981 of SEQ ID NO: 1882971
gucuaauggcgcuauugac

SEQ ID NO: 2161081 - RNA, 19 nt, Artificial Sequence
  Description of Artificial Sequence: Synthetic oligonucleotide
  Antisense strand to SEQ ID NO: 2161080
gucaauagcgccauuagac

SEQ ID NO: 2161082 - RNA, 19 nt, Artificial Sequence
  Description of Artificial Sequence: Synthetic oligonucleotide
  Sense strand starting at position 997 of SEQ ID NO: 1882971
gacaaagccugguguugau

SEQ ID NO: 2161083 - RNA, 19 nt, Artificial Sequence
  Description of Artificial Sequence: Synthetic oligonucleotide
  Antisense strand to SEQ ID NO: 2161082
aucaacaccaggcuuuguc

SEQ ID NO: 2161084 - RNA, 19 nt, Artificial Sequence
  Description of Artificial Sequence: Synthetic oligonucleotide
  Sense strand starting at position 1009 of SEQ ID NO: 1882971
uguugaugccgcuugacuu

SEQ ID NO: 2161085 - RNA, 19 nt, Artificial Sequence
  Description of Artificial Sequence: Synthetic oligonucleotide
  Antisense strand to SEQ ID NO: 2161084
aagucaagcggcaucaaca

SEQ ID NO: 2161086 - RNA, 19 nt, Artificial Sequence
  Description of Artificial Sequence: Synthetic oligonucleotide
  Sense strand starting at position 1196 of SEQ ID NO: 1882971
gcacgagagacauagccuu

SEQ ID NO: 2161087 - RNA, 19 nt, Artificial Sequence
  Description of Artificial Sequence: Synthetic oligonucleotide
  Antisense strand to SEQ ID NO: 2161086
aaggcuaugucucucgugc

SEQ ID NO: 2161088 - RNA, 19 nt, Artificial Sequence
  Description of Artificial Sequence: Synthetic oligonucleotide
  Sense strand starting at position 1351 of SEQ ID NO: 1882971
ggaagagccuugucaccga

SEQ ID NO: 2161089 - RNA, 19 nt, Artificial Sequence
  Description of Artificial Sequence: Synthetic oligonucleotide
  Antisense strand to SEQ ID NO: 2161088
ucggugacaaggcucuucc

SEQ ID NO: 2161090 - RNA, 19 nt, Artificial Sequence
  Description of Artificial Sequence: Synthetic oligonucleotide
  Sense strand starting at position 1417 of SEQ ID NO: 1882971
uuggguucugcaggccaga

SEQ ID NO: 2161091 - RNA, 19 nt, Artificial Sequence
  Description of Artificial Sequence: Synthetic oligonucleotide
  Antisense strand to SEQ ID NO: 2161090
ucuggccugcagaacccaa

SEQ ID NO: 2161092 - RNA, 19 nt, Artificial Sequence
  Description of Artificial Sequence: Synthetic oligonucleotide
  Sense strand starting at position 1483 of SEQ ID NO: 1882971
agaggauucguggaggcca

SEQ ID NO: 2161093 - RNA, 19 nt, Artificial Sequence
  Description of Artificial Sequence: Synthetic oligonucleotide
  Antisense strand to SEQ ID NO: 2161092
uggccuccacgaauccucu

SEQ ID NO: 2161094 - RNA, 19 nt, Artificial Sequence
  Description of Artificial Sequence: Synthetic oligonucleotide
  Sense strand starting at position 1485 of SEQ ID NO: 1882971
aggauucguggaggccaaa

SEQ ID NO: 2161095 - RNA, 19 nt, Artificial Sequence
  Description of Artificial Sequence: Synthetic oligonucleotide
  Antisense strand to SEQ ID NO: 2161094
uuuggccuccacgaauccu

SEQ ID NO: 2161096 - RNA, 19 nt, Artificial Sequence
  Description of Artificial Sequence: Synthetic oligonucleotide
  Sense strand starting at position 2367 of SEQ ID NO: 1882971
ggcggcgacuuugauuauu

SEQ ID NO: 2161097 - RNA, 19 nt, Artificial Sequence
  Description of Artificial Sequence: Synthetic oligonucleotide
  Antisense strand to SEQ ID NO: 2161096
aauaaucaaagucgccgcc

SEQ ID NO: 2161098 - RNA, 19 nt, Artificial Sequence
  Description of Artificial Sequence: Synthetic oligonucleotide
  Sense strand starting at position 2372 of SEQ ID NO: 1882971
cgacuuugauuauuggcaa

SEQ ID NO: 2161099 - RNA, 19 nt, Artificial Sequence
  Description of Artificial Sequence: Synthetic oligonucleotide
  Antisense strand to SEQ ID NO: 2161098
uugccaauaaucaaagucg

SEQ ID NO: 2161100 - RNA, 19 nt, Artificial Sequence
  Description of Artificial Sequence: Synthetic oligonucleotide
  Sense strand starting at position 3163 of SEQ ID NO: 1882971
cgggcaugauccugccuaa

SEQ ID NO: 2161101 - RNA, 19 nt, Artificial Sequence
  Description of Artificial Sequence: Synthetic oligonucleotide
  Antisense strand to SEQ ID NO: 2161100
uuaggcaggaucaugcccg

SEQ ID NO: 2161102 - RNA, 19 nt, Artificial Sequence
  Description of Artificial Sequence: Synthetic oligonucleotide
  Sense strand starting at position 3166 of SEQ ID NO: 1882971
gcaugauccugccuaagau

SEQ ID NO: 2161103 - RNA, 19 nt, Artificial Sequence
  Description of Artificial Sequence: Synthetic oligonucleotide
  Antisense strand to SEQ ID NO: 2161102
aucuuaggcaggaucaugc

SEQ ID NO: 2161104 - RNA, 19 nt, Artificial Sequence
  Description of Artificial Sequence: Synthetic oligonucleotide
  Sense strand starting at position 3373 of SEQ ID NO: 1882971
cgggcagcgaauuauuaaa

SEQ ID NO: 2161105 - RNA, 19 nt, Artificial Sequence
  Description of Artificial Sequence: Synthetic oligonucleotide
  Antisense strand to SEQ ID NO: 2161104
uuuaauaauucgcugcccg

SEQ ID NO: 2161106 - RNA, 19 nt, Artificial Sequence
  Description of Artificial Sequence: Synthetic oligonucleotide
  Sense strand starting at position 3439 of SEQ ID NO: 1882971
ggcaguuggaggugugaga

SEQ ID NO: 2161107 - RNA, 19 nt, Artificial Sequence
  Description of Artificial Sequence: Synthetic oligonucleotide
  Antisense strand to SEQ ID NO: 2161106
ucucacaccuccaacugcc

SEQ ID NO: 2161108 - RNA, 19 nt, Artificial Sequence
  Description of Artificial Sequence: Synthetic oligonucleotide
  Sense strand starting at position 3450 of SEQ ID NO: 1882971
gugugagacugagaucuaa

SEQ ID NO: 2161109 - RNA, 19 nt, Artificial Sequence
  Description of Artificial Sequence: Synthetic oligonucleotide
  Antisense strand to SEQ ID NO: 2161108
uuagaucucagucucacac

SEQ ID NO: 2161110 - RNA, 19 nt, Artificial Sequence
  Description of Artificial Sequence: Synthetic oligonucleotide
  Sense strand starting at position 3467 of SEQ ID NO: 1882971
aaugauuaacccgaaggcu

SEQ ID NO: 2161111 - RNA, 19 nt, Artificial Sequence
  Description of Artificial Sequence: Synthetic oligonucleotide
  Antisense strand to SEQ ID NO: 2161110
agccuucggguuaaucauu

SEQ ID NO: 2161112 - RNA, 19 nt, Artificial Sequence
  Description of Artificial Sequence: Synthetic oligonucleotide
  Sense strand starting at position 3518 of SEQ ID NO: 1882971
ccgagagcgcccugaauua

SEQ ID NO: 2161113 - RNA, 19 nt, Artificial Sequence
  Description of Artificial Sequence: Synthetic oligonucleotide
  Antisense strand to SEQ ID NO: 2161112
uaauucagggcgcucucgg

SEQ ID NO: 2161114 - RNA, 19 nt, Artificial Sequence
  Description of Artificial Sequence: Synthetic oligonucleotide
  Sense strand starting at position 76 of SEQ ID NO: 1882972
auuggcaguccuuaggaga

SEQ ID NO: 2161115 - RNA, 19 nt, Artificial Sequence
  Description of Artificial Sequence: Synthetic oligonucleotide
  Antisense strand to SEQ ID NO: 2161114
ucuccuaaggacugccaau

SEQ ID NO: 2161116 - RNA, 19 nt, Artificial Sequence
  Description of Artificial Sequence: Synthetic oligonucleotide
  Sense strand starting at position 203 of SEQ ID NO: 1882972
gugggaugaaggugucuua

SEQ ID NO: 2161117 - RNA, 19 nt, Artificial Sequence
  Description of Artificial Sequence: Synthetic oligonucleotide
  Antisense strand to SEQ ID NO: 2161116
uaagacaccuucaucccac

SEQ ID NO: 2161118 - RNA, 19 nt, Artificial Sequence
  Description of Artificial Sequence: Synthetic oligonucleotide
  Sense strand starting at position 206 of SEQ ID NO: 1882972
ggaugaaggugucuuacau

SEQ ID NO: 2161119 - RNA, 19 nt, Artificial Sequence
  Description of Artificial Sequence: Synthetic oligonucleotide
  Antisense strand to SEQ ID NO: 2161118
auguaagacaccuucaucc

SEQ ID NO: 2161120 - RNA, 19 nt, Artificial Sequence
  Description of Artificial Sequence: Synthetic oligonucleotide
  Sense strand starting at position 213 of SEQ ID NO: 1882972
ggugucuuacauuagugau

SEQ ID NO: 2161121 - RNA, 19 nt, Artificial Sequence
  Description of Artificial Sequence: Synthetic oligonucleotide
  Antisense strand to SEQ ID NO: 2161120
aucacuaauguaagacacc

SEQ ID NO: 2161122 - RNA, 19 nt, Artificial Sequence
  Description of Artificial Sequence: Synthetic oligonucleotide
  Sense strand starting at position 223 of SEQ ID NO: 1882972
auuagugaucuccaaguca

SEQ ID NO: 2161123 - RNA, 19 nt, Artificial Sequence
  Description of Artificial Sequence: Synthetic oligonucleotide
  Antisense strand to SEQ ID NO: 2161122
ugacuuggagaucacuaau

SEQ ID NO: 2161124 - RNA, 19 nt, Artificial Sequence
  Description of Artificial Sequence: Synthetic oligonucleotide
  Sense strand starting at position 231 of SEQ ID NO: 1882972
ucuccaagucauggaugau

SEQ ID NO: 2161125 - RNA, 19 nt, Artificial Sequence
  Description of Artificial Sequence: Synthetic oligonucleotide
  Antisense strand to SEQ ID NO: 2161124
aucauccaugacuuggaga

SEQ ID NO: 2161126 - RNA, 19 nt, Artificial Sequence
  Description of Artificial Sequence: Synthetic oligonucleotide
  Sense strand starting at position 285 of SEQ ID NO: 1882972
cgacuuguagcagaaagau

SEQ ID NO: 2161127 - RNA, 19 nt, Artificial Sequence
  Description of Artificial Sequence: Synthetic oligonucleotide
  Antisense strand to SEQ ID NO: 2161126
aucuuucugcuacaagucg

SEQ ID NO: 2161128 - RNA, 19 nt, Artificial Sequence
  Description of Artificial Sequence: Synthetic oligonucleotide
  Sense strand starting at position 474 of SEQ ID NO: 1882972
ucaugucuacaugguggaa

SEQ ID NO: 2161129 - RNA, 19 nt, Artificial Sequence
  Description of Artificial Sequence: Synthetic oligonucleotide
  Antisense strand to SEQ ID NO: 2161128
uuccaccauguagacauga

SEQ ID NO: 2161130 - RNA, 19 nt, Artificial Sequence
  Description of Artificial Sequence: Synthetic oligonucleotide
  Sense strand starting at position 515 of SEQ ID NO: 1882972
gugagaacuaguuaaguuc

SEQ ID NO: 2161131 - RNA, 19 nt, Artificial Sequence
  Description of Artificial Sequence: Synthetic oligonucleotide
  Antisense strand to SEQ ID NO: 2161130
gaacuuaacuaguucucac

SEQ ID NO: 2161132 - RNA, 19 nt, Artificial Sequence
  Description of Artificial Sequence: Synthetic oligonucleotide
  Sense strand starting at position 518 of SEQ ID NO: 1882972
agaacuaguuaaguucuau

SEQ ID NO: 2161133 - RNA, 19 nt, Artificial Sequence
  Description of Artificial Sequence: Synthetic oligonucleotide
  Antisense strand to SEQ ID NO: 2161132
auagaacuuaacuaguucu

SEQ ID NO: 2161134 - RNA, 19 nt, Artificial Sequence
  Description of Artificial Sequence: Synthetic oligonucleotide
  Sense strand starting at position 558 of SEQ ID NO: 1882972
gcuggugaucuugagcaag

SEQ ID NO: 2161135 - RNA, 19 nt, Artificial Sequence
  Description of Artificial Sequence: Synthetic oligonucleotide
  Antisense strand to SEQ ID NO: 2161134
cuugcucaagaucaccagc

SEQ ID NO: 2161136 - RNA, 19 nt, Artificial Sequence
  Description of Artificial Sequence: Synthetic oligonucleotide
  Sense strand starting at position 673 of SEQ ID NO: 1882972
agcgaaacugggcagaauu

SEQ ID NO: 2161137 - RNA, 19 nt, Artificial Sequence
  Description of Artificial Sequence: Synthetic oligonucleotide
  Antisense strand to SEQ ID NO: 2161136
aauucugcccaguuucgcu

SEQ ID NO: 2161138 - RNA, 19 nt, Artificial Sequence
  Description of Artificial Sequence: Synthetic oligonucleotide
  Sense strand starting at position 1063 of SEQ ID NO: 1882972
gauccuuggguccagugaa

SEQ ID NO: 2161139 - RNA, 19 nt, Artificial Sequence
  Description of Artificial Sequence: Synthetic oligonucleotide
  Antisense strand to SEQ ID NO: 2161138
uucacuggacccaaggauc

SEQ ID NO: 2161140 - RNA, 19 nt, Artificial Sequence
  Description of Artificial Sequence: Synthetic oligonucleotide
  Sense strand starting at position 1173 of SEQ ID NO: 1882972
ccagguguucuuuauuaug

SEQ ID NO: 2161141 - RNA, 19 nt, Artificial Sequence
  Description of Artificial Sequence: Synthetic oligonucleotide
  Antisense strand to SEQ ID NO: 2161140
cauaauaaagaacaccugg

SEQ ID NO: 2161142 - RNA, 19 nt, Artificial Sequence
  Description of Artificial Sequence: Synthetic oligonucleotide
  Sense strand starting at position 1209 of SEQ ID NO: 1882972
caaagcauggcaugaagaa

SEQ ID NO: 2161143 - RNA, 19 nt, Artificial Sequence
  Description of Artificial Sequence: Synthetic oligonucleotide
  Antisense strand to SEQ ID NO: 2161142
uucuucaugccaugcuuug

SEQ ID NO: 2161144 - RNA, 19 nt, Artificial Sequence
  Description of Artificial Sequence: Synthetic oligonucleotide
  Sense strand starting at position 1298 of SEQ ID NO: 1882972
aucucauguccauaaaguc

SEQ ID NO: 2161145 - RNA, 19 nt, Artificial Sequence
  Description of Artificial Sequence: Synthetic oligonucleotide
  Antisense strand to SEQ ID NO: 2161144
gacuuuauggacaugagau

SEQ ID NO: 2161146 - RNA, 19 nt, Artificial Sequence
  Description of Artificial Sequence: Synthetic oligonucleotide
  Sense strand starting at position 1305 of SEQ ID NO: 1882972
guccauaaagucuaauauu

SEQ ID NO: 2161147 - RNA, 19 nt, Artificial Sequence
  Description of Artificial Sequence: Synthetic oligonucleotide
  Antisense strand to SEQ ID NO: 2161146
aauauuagacuuuauggac

SEQ ID NO: 2161148 - RNA, 19 nt, Artificial Sequence
  Description of Artificial Sequence: Synthetic oligonucleotide
  Sense strand starting at position 1401 of SEQ ID NO: 1882972
guaacuauuucucagacag

SEQ ID NO: 2161149 - RNA, 19 nt, Artificial Sequence
  Description of Artificial Sequence: Synthetic oligonucleotide
  Antisense strand to SEQ ID NO: 2161148
cugucugagaaauaguuac

SEQ ID NO: 2161150 - RNA, 19 nt, Artificial Sequence
  Description of Artificial Sequence: Synthetic oligonucleotide
  Sense strand starting at position 1462 of SEQ ID NO: 1882972
aaguaaguggugcaagacu

SEQ ID NO: 2161151 - RNA, 19 nt, Artificial Sequence
  Description of Artificial Sequence: Synthetic oligonucleotide
  Antisense strand to SEQ ID NO: 2161150
agucuugcaccacuuacuu

SEQ ID NO: 2161152 - RNA, 19 nt, Artificial Sequence
  Description of Artificial Sequence: Synthetic oligonucleotide
  Sense strand starting at position 1471 of SEQ ID NO: 1882972
gugcaagacuaucucacaa

SEQ ID NO: 2161153 - RNA, 19 nt, Artificial Sequence
  Description of Artificial Sequence: Synthetic oligonucleotide
  Antisense strand to SEQ ID NO: 2161152
uugugagauagucuugcac

SEQ ID NO: 2161154 - RNA, 19 nt, Artificial Sequence
  Description of Artificial Sequence: Synthetic oligonucleotide
  Sense strand starting at position 1521 of SEQ ID NO: 1882972
agacuugcagucuggaaga

SEQ ID NO: 2161155 - RNA, 19 nt, Artificial Sequence
  Description of Artificial Sequence: Synthetic oligonucleotide
  Antisense strand to SEQ ID NO: 2161154
ucuuccagacugcaagucu

SEQ ID NO: 2161156 - RNA, 19 nt, Artificial Sequence
  Description of Artificial Sequence: Synthetic oligonucleotide
  Sense strand starting at position 1523 of SEQ ID NO: 1882972
acuugcagucuggaagaca

SEQ ID NO: 2161157 - RNA, 19 nt, Artificial Sequence
  Description of Artificial Sequence: Synthetic oligonucleotide
  Antisense strand to SEQ ID NO: 2161156
ugucuuccagacugcaagu

SEQ ID NO: 2161158 - RNA, 19 nt, Artificial Sequence
  Description of Artificial Sequence: Synthetic oligonucleotide
  Sense strand starting at position 1633 of SEQ ID NO: 1882972
ugugaauccuuucuggaca

SEQ ID NO: 2161159 - RNA, 19 nt, Artificial Sequence
  Description of Artificial Sequence: Synthetic oligonucleotide
  Antisense strand to SEQ ID NO: 2161158
uguccagaaaggauucaca

SEQ ID NO: 2161160 - RNA, 19 nt, Artificial Sequence
  Description of Artificial Sequence: Synthetic oligonucleotide
  Sense strand starting at position 1715 of SEQ ID NO: 1882972
agaaauagacauugccauu

SEQ ID NO: 2161161 - RNA, 19 nt, Artificial Sequence
  Description of Artificial Sequence: Synthetic oligonucleotide
  Antisense strand to SEQ ID NO: 2161160
aauggcaaugucuauuucu

SEQ ID NO: 2161162 - RNA, 19 nt, Artificial Sequence
  Description of Artificial Sequence: Synthetic oligonucleotide
  Sense strand starting at position 1721 of SEQ ID NO: 1882972
agacauugccauuaggcaa

SEQ ID NO: 2161163 - RNA, 19 nt, Artificial Sequence
  Description of Artificial Sequence: Synthetic oligonucleotide
  Antisense strand to SEQ ID NO: 2161162
uugccuaauggcaaugucu

SEQ ID NO: 2161164 - RNA, 19 nt, Artificial Sequence
  Description of Artificial Sequence: Synthetic oligonucleotide
  Sense strand starting at position 1773 of SEQ ID NO: 1882972
gguguagcgauuugugaca

SEQ ID NO: 2161165 - RNA, 19 nt, Artificial Sequence
  Description of Artificial Sequence: Synthetic oligonucleotide
  Antisense strand to SEQ ID NO: 2161164
ugucacaaaucgcuacacc

SEQ ID NO: 2161166 - RNA, 19 nt, Artificial Sequence
  Description of Artificial Sequence: Synthetic oligonucleotide
  Sense strand starting at position 2039 of SEQ ID NO: 1882972
auucgagagcuucagaguu

SEQ ID NO: 2161167 - RNA, 19 nt, Artificial Sequence
  Description of Artificial Sequence: Synthetic oligonucleotide
  Antisense strand to SEQ ID NO: 2161166
aacucugaagcucucgaau

SEQ ID NO: 2161168 - RNA, 19 nt, Artificial Sequence
  Description of Artificial Sequence: Synthetic oligonucleotide
  Sense strand starting at position 2107 of SEQ ID NO: 1882972
gggcacuucugaucugauu

SEQ ID NO: 2161169 - RNA, 19 nt, Artificial Sequence
  Description of Artificial Sequence: Synthetic oligonucleotide
  Antisense strand to SEQ ID NO: 2161168
aaucagaucagaagugccc

SEQ ID NO: 2161170 - RNA, 19 nt, Artificial Sequence
  Description of Artificial Sequence: Synthetic oligonucleotide
  Sense strand starting at position 2441 of SEQ ID NO: 1882972
uuugucuauguauagaacu

SEQ ID NO: 2161171 - RNA, 19 nt, Artificial Sequence
  Description of Artificial Sequence: Synthetic oligonucleotide
  Antisense strand to SEQ ID NO: 2161170
aguucuauacauagacaaa

SEQ ID NO: 2161172 - RNA, 19 nt, Artificial Sequence
  Description of Artificial Sequence: Synthetic oligonucleotide
  Sense strand starting at position 2580 of SEQ ID NO: 1882972
agaggaggcuuugcuacua

SEQ ID NO: 2161173 - RNA, 19 nt, Artificial Sequence
  Description of Artificial Sequence: Synthetic oligonucleotide
  Antisense strand to SEQ ID NO: 2161172
uaguagcaaagccuccucu

SEQ ID NO: 2161174 - RNA, 19 nt, Artificial Sequence
  Description of Artificial Sequence: Synthetic oligonucleotide
  Sense strand starting at position 2711 of SEQ ID NO: 1882972
ggaagaagaugagaaauaa

SEQ ID NO: 2161175 - RNA, 19 nt, Artificial Sequence
  Description of Artificial Sequence: Synthetic oligonucleotide
  Antisense strand to SEQ ID NO: 2161174
uuauuucucaucuucuucc

SEQ ID NO: 2161176 - RNA, 19 nt, Artificial Sequence
  Description of Artificial Sequence: Synthetic oligonucleotide
  Sense strand starting at position 2828 of SEQ ID NO: 1882972
cccgauugagcacauuagu

SEQ ID NO: 2161177 - RNA, 19 nt, Artificial Sequence
  Description of Artificial Sequence: Synthetic oligonucleotide
  Antisense strand to SEQ ID NO: 2161176
acuaaugugcucaaucggg

SEQ ID NO: 2161178 - RNA, 19 nt, Artificial Sequence
  Description of Artificial Sequence: Synthetic oligonucleotide
  Sense strand starting at position 2831 of SEQ ID NO: 1882972
gauugagcacauuaguauu

SEQ ID NO: 2161179 - RNA, 19 nt, Artificial Sequence
  Description of Artificial Sequence: Synthetic oligonucleotide
  Antisense strand to SEQ ID NO: 2161178
aauacuaaugugcucaauc

SEQ ID NO: 2161180 - RNA, 19 nt, Artificial Sequence
  Description of Artificial Sequence: Synthetic oligonucleotide
  Sense strand starting at position 2955 of SEQ ID NO: 1882972
auuucuagaugaugaaaug

SEQ ID NO: 2161181 - RNA, 19 nt, Artificial Sequence
  Description of Artificial Sequence: Synthetic oligonucleotide
  Antisense strand to SEQ ID NO: 2161180
cauuucaucaucuagaaau

SEQ ID NO: 2161182 - RNA, 19 nt, Artificial Sequence
  Description of Artificial Sequence: Synthetic oligonucleotide
  Sense strand starting at position 3027 of SEQ ID NO: 1882972
gggucauggucccugacca

SEQ ID NO: 2161183 - RNA, 19 nt, Artificial Sequence
  Description of Artificial Sequence: Synthetic oligonucleotide
  Antisense strand to SEQ ID NO: 2161182
uggucagggaccaugaccc

SEQ ID NO: 2161184 - RNA, 19 nt, Artificial Sequence
  Description of Artificial Sequence: Synthetic oligonucleotide
  Sense strand starting at position 3108 of SEQ ID NO: 1882972
cuuguccugguggaagaau

SEQ ID NO: 2161185 - RNA, 19 nt, Artificial Sequence
  Description of Artificial Sequence: Synthetic oligonucleotide
  Antisense strand to SEQ ID NO: 2161184
auucuuccaccaggacaag

SEQ ID NO: 2161186 - RNA, 19 nt, Artificial Sequence
  Description of Artificial Sequence: Synthetic oligonucleotide
  Sense strand starting at position 3426 of SEQ ID NO: 1882972
ggcuacugagcucaucaaa

SEQ ID NO: 2161187 - RNA, 19 nt, Artificial Sequence
  Description of Artificial Sequence: Synthetic oligonucleotide
  Antisense strand to SEQ ID NO: 2161186
uuugaugagcucaguagcc

SEQ ID NO: 2161188 - RNA, 19 nt, Artificial Sequence
  Description of Artificial Sequence: Synthetic oligonucleotide
  Sense strand starting at position 3483 of SEQ ID NO: 1882972
ugagcacuugaguaguaau

SEQ ID NO: 2161189 - RNA, 19 nt, Artificial Sequence
  Description of Artificial Sequence: Synthetic oligonucleotide
  Antisense strand to SEQ ID NO: 2161188
auuacuacucaagugcuca

SEQ ID NO: 2161190 - RNA, 19 nt, Artificial Sequence
  Description of Artificial Sequence: Synthetic oligonucleotide
  Sense strand starting at position 3504 of SEQ ID NO: 1882972
ggguguggugagggagaaa

SEQ ID NO: 2161191 - RNA, 19 nt, Artificial Sequence
  Description of Artificial Sequence: Synthetic oligonucleotide
  Antisense strand to SEQ ID NO: 2161190
uuucucccucaccacaccc

SEQ ID NO: 2161192 - RNA, 19 nt, Artificial Sequence
  Description of Artificial Sequence: Synthetic oligonucleotide
  Sense strand starting at position 3867 of SEQ ID NO: 1882972
gaggcaagguccucaauaa

SEQ ID NO: 2161193 - RNA, 19 nt, Artificial Sequence
  Description of Artificial Sequence: Synthetic oligonucleotide
  Antisense strand to SEQ ID NO: 2161192
uuauugaggaccuugccuc

SEQ ID NO: 2161194 - RNA, 19 nt, Artificial Sequence
  Description of Artificial Sequence: Synthetic oligonucleotide
  Sense strand starting at position 17 of SEQ ID NO: 1882973
cgcuguguaccuguaaucu

SEQ ID NO: 2161195 - RNA, 19 nt, Artificial Sequence
  Description of Artificial Sequence: Synthetic oligonucleotide
  Antisense strand to SEQ ID NO: 2161194
agauuacagguacacagcg

SEQ ID NO: 2161196 - RNA, 19 nt, Artificial Sequence
  Description of Artificial Sequence: Synthetic oligonucleotide
  Sense strand starting at position 162 of SEQ ID NO: 1882973
acaccuauagucugagcua

SEQ ID NO: 2161197 - RNA, 19 nt, Artificial Sequence
  Description of Artificial Sequence: Synthetic oligonucleotide
  Antisense strand to SEQ ID NO: 2161196
uagcucagacuauaggugu

SEQ ID NO: 2161198 - RNA, 19 nt, Artificial Sequence
  Description of Artificial Sequence: Synthetic oligonucleotide
  Sense strand starting at position 165 of SEQ ID NO: 1882973
ccuauagucugagcuauuc

SEQ ID NO: 2161199 - RNA, 19 nt, Artificial Sequence
  Description of Artificial Sequence: Synthetic oligonucleotide
  Antisense strand to SEQ ID NO: 2161198
gaauagcucagacuauagg

SEQ ID NO: 2161200 - RNA, 19 nt, Artificial Sequence
  Description of Artificial Sequence: Synthetic oligonucleotide
  Sense strand starting at position 206 of SEQ ID NO: 1882973
gcuugagcccggaguuaga

SEQ ID NO: 2161201 - RNA, 19 nt, Artificial Sequence
  Description of Artificial Sequence: Synthetic oligonucleotide
  Antisense strand to SEQ ID NO: 2161200
ucuaacuccgggcucaagc

SEQ ID NO: 2161202 - RNA, 19 nt, Artificial Sequence
  Description of Artificial Sequence: Synthetic oligonucleotide
  Sense strand starting at position 480 of SEQ ID NO: 1882973
agaugcauguaaucccaga

SEQ ID NO: 2161203 - RNA, 19 nt, Artificial Sequence
  Description of Artificial Sequence: Synthetic oligonucleotide
  Antisense strand to SEQ ID NO: 2161202
ucugggauuacaugcaucu

SEQ ID NO: 2161204 - RNA, 19 nt, Artificial Sequence
  Description of Artificial Sequence: Synthetic oligonucleotide
  Sense strand starting at position 695 of SEQ ID NO: 1882973
acgccuggccuuugagaca

SEQ ID NO: 2161205 - RNA, 19 nt, Artificial Sequence
  Description of Artificial Sequence: Synthetic oligonucleotide
  Antisense strand to SEQ ID NO: 2161204
ugucucaaaggccaggcgu

SEQ ID NO: 2161206 - RNA, 19 nt, Artificial Sequence
  Description of Artificial Sequence: Synthetic oligonucleotide
  Sense strand starting at position 708 of SEQ ID NO: 1882973
gagacaugcucaccuagau

SEQ ID NO: 2161207 - RNA, 19 nt, Artificial Sequence
  Description of Artificial Sequence: Synthetic oligonucleotide
  Antisense strand to SEQ ID NO: 2161206
aucuaggugagcaugucuc

SEQ ID NO: 2161208 - RNA, 19 nt, Artificial Sequence
  Description of Artificial Sequence: Synthetic oligonucleotide
  Sense strand starting at position 859 of SEQ ID NO: 1882973
aaagaaacuuccuugugag

SEQ ID NO: 2161209 - RNA, 19 nt, Artificial Sequence
  Description of Artificial Sequence: Synthetic oligonucleotide
  Antisense strand to SEQ ID NO: 2161208
cucacaaggaaguuucuuu

SEQ ID NO: 2161210 - RNA, 19 nt, Artificial Sequence
  Description of Artificial Sequence: Synthetic oligonucleotide
  Sense strand starting at position 860 of SEQ ID NO: 1882973
aagaaacuuccuugugagc

SEQ ID NO: 2161211 - RNA, 19 nt, Artificial Sequence
  Description of Artificial Sequence: Synthetic oligonucleotide
  Antisense strand to SEQ ID NO: 2161210
gcucacaaggaaguuucuu

SEQ ID NO: 2161212 - RNA, 19 nt, Artificial Sequence
  Description of Artificial Sequence: Synthetic oligonucleotide
  Sense strand starting at position 869 of SEQ ID NO: 1882973
ccuugugagcuauggagga

SEQ ID NO: 2161213 - RNA, 19 nt, Artificial Sequence
  Description of Artificial Sequence: Synthetic oligonucleotide
  Antisense strand to SEQ ID NO: 2161212
uccuccauagcucacaagg

SEQ ID NO: 2161214 - RNA, 19 nt, Artificial Sequence
  Description of Artificial Sequence: Synthetic oligonucleotide
  Sense strand starting at position 991 of SEQ ID NO: 1882973
agagacaugucccucuuaa

SEQ ID NO: 2161215 - RNA, 19 nt, Artificial Sequence
  Description of Artificial Sequence: Synthetic oligonucleotide
  Antisense strand to SEQ ID NO: 2161214
uuaagagggacaugucucu

SEQ ID NO: 2161216 - RNA, 19 nt, Artificial Sequence
  Description of Artificial Sequence: Synthetic oligonucleotide
  Sense strand starting at position 1141 of SEQ ID NO: 1882973
acucauugcuguuucggaa

SEQ ID NO: 2161217 - RNA, 19 nt, Artificial Sequence
  Description of Artificial Sequence: Synthetic oligonucleotide
  Antisense strand to SEQ ID NO: 2161216
uuccgaaacagcaaugagu

SEQ ID NO: 2161218 - RNA, 19 nt, Artificial Sequence
  Description of Artificial Sequence: Synthetic oligonucleotide
  Sense strand starting at position 1167 of SEQ ID NO: 1882973
aaaugagaggucggaccuu

SEQ ID NO: 2161219 - RNA, 19 nt, Artificial Sequence
  Description of Artificial Sequence: Synthetic oligonucleotide
  Antisense strand to SEQ ID NO: 2161218
aagguccgaccucucauuu

SEQ ID NO: 2161220 - RNA, 19 nt, Artificial Sequence
  Description of Artificial Sequence: Synthetic oligonucleotide
  Sense strand starting at position 1173 of SEQ ID NO: 1882973
gaggucggaccuuaucauu

SEQ ID NO: 2161221 - RNA, 19 nt, Artificial Sequence
  Description of Artificial Sequence: Synthetic oligonucleotide
  Antisense strand to SEQ ID NO: 2161220
aaugauaagguccgaccuc

SEQ ID NO: 2161222 - RNA, 19 nt, Artificial Sequence
  Description of Artificial Sequence: Synthetic oligonucleotide
  Sense strand starting at position 1208 of SEQ ID NO: 1882973
gcucuaagccaagaacuca

SEQ ID NO: 2161223 - RNA, 19 nt, Artificial Sequence
  Description of Artificial Sequence: Synthetic oligonucleotide
  Antisense strand to SEQ ID NO: 2161222
ugaguucuuggcuuagagc

SEQ ID NO: 2161224 - RNA, 19 nt, Artificial Sequence
  Description of Artificial Sequence: Synthetic oligonucleotide
  Sense strand starting at position 1216 of SEQ ID NO: 1882973
ccaagaacucacuggaguu

SEQ ID NO: 2161225 - RNA, 19 nt, Artificial Sequence
  Description of Artificial Sequence: Synthetic oligonucleotide
  Antisense strand to SEQ ID NO: 2161224
aacuccagugaguucuugg

SEQ ID NO: 2161226 - RNA, 19 nt, Artificial Sequence
  Description of Artificial Sequence: Synthetic oligonucleotide
  Sense strand starting at position 1222 of SEQ ID NO: 1882973
acucacuggaguugaagau

SEQ ID NO: 2161227 - RNA, 19 nt, Artificial Sequence
  Description of Artificial Sequence: Synthetic oligonucleotide
  Antisense strand to SEQ ID NO: 2161226
aucuucaacuccagugagu

SEQ ID NO: 2161228 - RNA, 19 nt, Artificial Sequence
  Description of Artificial Sequence: Synthetic oligonucleotide
  Sense strand starting at position 1231 of SEQ ID NO: 1882973
aguugaagaugccucaaca

SEQ ID NO: 2161229 - RNA, 19 nt, Artificial Sequence
  Description of Artificial Sequence: Synthetic oligonucleotide
  Antisense strand to SEQ ID NO: 2161228
uguugaggcaucuucaacu

SEQ ID NO: 2161230 - RNA, 19 nt, Artificial Sequence
  Description of Artificial Sequence: Synthetic oligonucleotide
  Sense strand starting at position 1298 of SEQ ID NO: 1882973
gugguauggcgcucuccau

SEQ ID NO: 2161231 - RNA, 19 nt, Artificial Sequence
  Description of Artificial Sequence: Synthetic oligonucleotide
  Antisense strand to SEQ ID NO: 2161230
auggagagcgccauaccac

SEQ ID NO: 2161232 - RNA, 19 nt, Artificial Sequence
  Description of Artificial Sequence: Synthetic oligonucleotide
  Sense strand starting at position 1305 of SEQ ID NO: 1882973
ggcgcucuccaucuuaagu

SEQ ID NO: 2161233 - RNA, 19 nt, Artificial Sequence
  Description of Artificial Sequence: Synthetic oligonucleotide
  Antisense strand to SEQ ID NO: 2161232
acuuaagauggagagcgcc

SEQ ID NO: 2161234 - RNA, 19 nt, Artificial Sequence
  Description of Artificial Sequence: Synthetic oligonucleotide
  Sense strand starting at position 1310 of SEQ ID NO: 1882973
ucuccaucuuaaguggauu

SEQ ID NO: 2161235 - RNA, 19 nt, Artificial Sequence
  Description of Artificial Sequence: Synthetic oligonucleotide
  Antisense strand to SEQ ID NO: 2161234
aauccacuuaagauggaga

SEQ ID NO: 2161236 - RNA, 19 nt, Artificial Sequence
  Description of Artificial Sequence: Synthetic oligonucleotide
  Sense strand starting at position 1798 of SEQ ID NO: 1882973
gggcaucucuguccaggau

SEQ ID NO: 2161237 - RNA, 19 nt, Artificial Sequence
  Description of Artificial Sequence: Synthetic oligonucleotide
  Antisense strand to SEQ ID NO: 2161236
auccuggacagagaugccc

SEQ ID NO: 2161238 - RNA, 19 nt, Artificial Sequence
  Description of Artificial Sequence: Synthetic oligonucleotide
  Sense strand starting at position 1987 of SEQ ID NO: 1882973
gguuacaaugaagguguua

SEQ ID NO: 2161239 - RNA, 19 nt, Artificial Sequence
  Description of Artificial Sequence: Synthetic oligonucleotide
  Antisense strand to SEQ ID NO: 2161238
uaacaccuucauuguaacc

SEQ ID NO: 2161240 - RNA, 19 nt, Artificial Sequence
  Description of Artificial Sequence: Synthetic oligonucleotide
  Sense strand starting at position 2142 of SEQ ID NO: 1882973
agagcuuagcagcacgaua

SEQ ID NO: 2161241 - RNA, 19 nt, Artificial Sequence
  Description of Artificial Sequence: Synthetic oligonucleotide
  Antisense strand to SEQ ID NO: 2161240
uaucgugcugcuaagcucu

SEQ ID NO: 2161242 - RNA, 19 nt, Artificial Sequence
  Description of Artificial Sequence: Synthetic oligonucleotide
  Sense strand starting at position 2292 of SEQ ID NO: 1882973
ucugcaaaguugcuggaau

SEQ ID NO: 2161243 - RNA, 19 nt, Artificial Sequence
  Description of Artificial Sequence: Synthetic oligonucleotide
  Antisense strand to SEQ ID NO: 2161242
auuccagcaacuuugcaga

SEQ ID NO: 2161244 - RNA, 19 nt, Artificial Sequence
  Description of Artificial Sequence: Synthetic oligonucleotide
  Sense strand starting at position 2294 of SEQ ID NO: 1882973
ugcaaaguugcuggaaucu

SEQ ID NO: 2161245 - RNA, 19 nt, Artificial Sequence
  Description of Artificial Sequence: Synthetic oligonucleotide
  Antisense strand to SEQ ID NO: 2161244
agauuccagcaacuuugca

SEQ ID NO: 2161246 - RNA, 19 nt, Artificial Sequence
  Description of Artificial Sequence: Synthetic oligonucleotide
  Sense strand starting at position 2385 of SEQ ID NO: 1882973
gcugaaucaggccaagauc

SEQ ID NO: 2161247 - RNA, 19 nt, Artificial Sequence
  Description of Artificial Sequence: Synthetic oligonucleotide
  Antisense strand to SEQ ID NO: 2161246
gaucuuggccugauucagc

SEQ ID NO: 2161248 - RNA, 19 nt, Artificial Sequence
  Description of Artificial Sequence: Synthetic oligonucleotide
  Sense strand starting at position 2393 of SEQ ID NO: 1882973
aggccaagaucccucacau

SEQ ID NO: 2161249 - RNA, 19 nt, Artificial Sequence
  Description of Artificial Sequence: Synthetic oligonucleotide
  Antisense strand to SEQ ID NO: 2161248
augugagggaucuuggccu

SEQ ID NO: 2161250 - RNA, 19 nt, Artificial Sequence
  Description of Artificial Sequence: Synthetic oligonucleotide
  Sense strand starting at position 2519 of SEQ ID NO: 1882973
acaggucaucugggaugga

SEQ ID NO: 2161251 - RNA, 19 nt, Artificial Sequence
  Description of Artificial Sequence: Synthetic oligonucleotide
  Antisense strand to SEQ ID NO: 2161250
uccaucccagaugaccugu

SEQ ID NO: 2161252 - RNA, 19 nt, Artificial Sequence
  Description of Artificial Sequence: Synthetic oligonucleotide
  Sense strand starting at position 2620 of SEQ ID NO: 1882973
uuuguacucccuggcucaa

SEQ ID NO: 2161253 - RNA, 19 nt, Artificial Sequence
  Description of Artificial Sequence: Synthetic oligonucleotide
  Antisense strand to SEQ ID NO: 2161252
uugagccagggaguacaaa

SEQ ID NO: 2161254 - RNA, 19 nt, Artificial Sequence
  Description of Artificial Sequence: Synthetic oligonucleotide
  Sense strand starting at position 2918 of SEQ ID NO: 1882973
gagugagaauugcugaguu

SEQ ID NO: 2161255 - RNA, 19 nt, Artificial Sequence
  Description of Artificial Sequence: Synthetic oligonucleotide
  Antisense strand to SEQ ID NO: 2161254
aacucagcaauucucacuc

SEQ ID NO: 2161256 - RNA, 19 nt, Artificial Sequence
  Description of Artificial Sequence: Synthetic oligonucleotide
  Sense strand starting at position 2920 of SEQ ID NO: 1882973
gugagaauugcugaguucu

SEQ ID NO: 2161257 - RNA, 19 nt, Artificial Sequence
  Description of Artificial Sequence: Synthetic oligonucleotide
  Antisense strand to SEQ ID NO: 2161256
agaacucagcaauucucac

SEQ ID NO: 2161258 - RNA, 19 nt, Artificial Sequence
  Description of Artificial Sequence: Synthetic oligonucleotide
  Sense strand starting at position 2922 of SEQ ID NO: 1882973
gagaauugcugaguucuaa

SEQ ID NO: 2161259 - RNA, 19 nt, Artificial Sequence
  Description of Artificial Sequence: Synthetic oligonucleotide
  Antisense strand to SEQ ID NO: 2161258
uuagaacucagcaauucuc

SEQ ID NO: 2161260 - RNA, 19 nt, Artificial Sequence
  Description of Artificial Sequence: Synthetic oligonucleotide
  Sense strand starting at position 3063 of SEQ ID NO: 1882973
agaggaaggcugugacaug

SEQ ID NO: 2161261 - RNA, 19 nt, Artificial Sequence
  Description of Artificial Sequence: Synthetic oligonucleotide
  Antisense strand to SEQ ID NO: 2161260
caugucacagccuuccucu

SEQ ID NO: 2161262 - RNA, 19 nt, Artificial Sequence
  Description of Artificial Sequence: Synthetic oligonucleotide
  Sense strand starting at position 3101 of SEQ ID NO: 1882973
ggguuuauauuaguuguuu

SEQ ID NO: 2161263 - RNA, 19 nt, Artificial Sequence
  Description of Artificial Sequence: Synthetic oligonucleotide
  Antisense strand to SEQ ID NO: 2161262
aaacaacuaauauaaaccc

SEQ ID NO: 2161264 - RNA, 19 nt, Artificial Sequence
  Description of Artificial Sequence: Synthetic oligonucleotide
  Sense strand starting at position 3144 of SEQ ID NO: 1882973
uccgaaaggauacguugaa

SEQ ID NO: 2161265 - RNA, 19 nt, Artificial Sequence
  Description of Artificial Sequence: Synthetic oligonucleotide
  Antisense strand to SEQ ID NO: 2161264
uucaacguauccuuucgga

SEQ ID NO: 2161266 - RNA, 19 nt, Artificial Sequence
  Description of Artificial Sequence: Synthetic oligonucleotide
  Sense strand starting at position 3187 of SEQ ID NO: 1882973
gggaaccuuguuugggaau

SEQ ID NO: 2161267 - RNA, 19 nt, Artificial Sequence
  Description of Artificial Sequence: Synthetic oligonucleotide
  Antisense strand to SEQ ID NO: 2161266
auucccaaacaagguuccc

SEQ ID NO: 2161268 - RNA, 19 nt, Artificial Sequence
  Description of Artificial Sequence: Synthetic oligonucleotide
  Sense strand starting at position 3229 of SEQ ID NO: 1882973
uuaagaugagguggucaua

SEQ ID NO: 2161269 - RNA, 19 nt, Artificial Sequence
  Description of Artificial Sequence: Synthetic oligonucleotide
  Antisense strand to SEQ ID NO: 2161268
uaugaccaccucaucuuaa

SEQ ID NO: 2161270 - RNA, 19 nt, Artificial Sequence
  Description of Artificial Sequence: Synthetic oligonucleotide
  Sense strand starting at position 3238 of SEQ ID NO: 1882973
gguggucauacuggaguaa

SEQ ID NO: 2161271 - RNA, 19 nt, Artificial Sequence
  Description of Artificial Sequence: Synthetic oligonucleotide
  Antisense strand to SEQ ID NO: 2161270
uuacuccaguaugaccacc

SEQ ID NO: 2161272 - RNA, 19 nt, Artificial Sequence
  Description of Artificial Sequence: Synthetic oligonucleotide
  Sense strand starting at position 3384 of SEQ ID NO: 1882973
uugaaaugagccuaggcaa

SEQ ID NO: 2161273 - RNA, 19 nt, Artificial Sequence
  Description of Artificial Sequence: Synthetic oligonucleotide
  Antisense strand to SEQ ID NO: 2161272
uugccuaggcucauuucaa

SEQ ID NO: 2161274 - RNA, 19 nt, Artificial Sequence
  Description of Artificial Sequence: Synthetic oligonucleotide
  Sense strand starting at position 3 of SEQ ID NO: 1882974
aacagugaagucuggucau

SEQ ID NO: 2161275 - RNA, 19 nt, Artificial Sequence
  Description of Artificial Sequence: Synthetic oligonucleotide
  Antisense strand to SEQ ID NO: 2161274
augaccagacuucacuguu

SEQ ID NO: 2161276 - RNA, 19 nt, Artificial Sequence
  Description of Artificial Sequence: Synthetic oligonucleotide
  Sense strand starting at position 6 of SEQ ID NO: 1882974
agugaagucuggucaucuc

SEQ ID NO: 2161277 - RNA, 19 nt, Artificial Sequence
  Description of Artificial Sequence: Synthetic oligonucleotide
  Antisense strand to SEQ ID NO: 2161276
gagaugaccagacuucacu

SEQ ID NO: 2161278 - RNA, 19 nt, Artificial Sequence
  Description of Artificial Sequence: Synthetic oligonucleotide
  Sense strand starting at position 9 of SEQ ID NO: 1882974
gaagucuggucaucucauu

SEQ ID NO: 2161279 - RNA, 19 nt, Artificial Sequence
  Description of Artificial Sequence: Synthetic oligonucleotide
  Antisense strand to SEQ ID NO: 2161278
aaugagaugaccagacuuc

SEQ ID NO: 2161280 - RNA, 19 nt, Artificial Sequence
  Description of Artificial Sequence: Synthetic oligonucleotide
  Sense strand starting at position 39 of SEQ ID NO: 1882974
auggcugaacuaugaacua

SEQ ID NO: 2161281 - RNA, 19 nt, Artificial Sequence
  Description of Artificial Sequence: Synthetic oligonucleotide
  Antisense strand to SEQ ID NO: 2161280
uaguucauaguucagccau

SEQ ID NO: 2161282 - RNA, 19 nt, Artificial Sequence
  Description of Artificial Sequence: Synthetic oligonucleotide
  Sense strand starting at position 158 of SEQ ID NO: 1882974
cuuagauauguuuagcgau

SEQ ID NO: 2161283 - RNA, 19 nt, Artificial Sequence
  Description of Artificial Sequence: Synthetic oligonucleotide
  Antisense strand to SEQ ID NO: 2161282
aucgcuaaacauaucuaag

SEQ ID NO: 2161284 - RNA, 19 nt, Artificial Sequence
  Description of Artificial Sequence: Synthetic oligonucleotide
  Sense strand starting at position 166 of SEQ ID NO: 1882974
uguuuagcgaugcaaauac

SEQ ID NO: 2161285 - RNA, 19 nt, Artificial Sequence
  Description of Artificial Sequence: Synthetic oligonucleotide
  Antisense strand to SEQ ID NO: 2161284
guauuugcaucgcuaaaca

SEQ ID NO: 2161286 - RNA, 19 nt, Artificial Sequence
  Description of Artificial Sequence: Synthetic oligonucleotide
  Sense strand starting at position 341 of SEQ ID NO: 1882974
gugucucccucuuuaaauc

SEQ ID NO: 2161287 - RNA, 19 nt, Artificial Sequence
  Description of Artificial Sequence: Synthetic oligonucleotide
  Antisense strand to SEQ ID NO: 2161286
gauuuaaagagggagacac

SEQ ID NO: 2161288 - RNA, 19 nt, Artificial Sequence
  Description of Artificial Sequence: Synthetic oligonucleotide
  Sense strand starting at position 563 of SEQ ID NO: 1882974
uuucuuguuugcucuauuu

SEQ ID NO: 2161289 - RNA, 19 nt, Artificial Sequence
  Description of Artificial Sequence: Synthetic oligonucleotide
  Antisense strand to SEQ ID NO: 2161288
aaauagagcaaacaagaaa

SEQ ID NO: 2161290 - RNA, 19 nt, Artificial Sequence
  Description of Artificial Sequence: Synthetic oligonucleotide
  Sense strand starting at position 584 of SEQ ID NO: 1882974
aaguguaccucuuuggcau

SEQ ID NO: 2161291 - RNA, 19 nt, Artificial Sequence
  Description of Artificial Sequence: Synthetic oligonucleotide
  Antisense strand to SEQ ID NO: 2161290
augccaaagagguacacuu

SEQ ID NO: 2161292 - RNA, 19 nt, Artificial Sequence
  Description of Artificial Sequence: Synthetic oligonucleotide
  Sense strand starting at position 596 of SEQ ID NO: 1882974
uuggcauguuaguccaacu

SEQ ID NO: 2161293 - RNA, 19 nt, Artificial Sequence
  Description of Artificial Sequence: Synthetic oligonucleotide
  Antisense strand to SEQ ID NO: 2161292
aguuggacuaacaugccaa

SEQ ID NO: 2161294 - RNA, 19 nt, Artificial Sequence
  Description of Artificial Sequence: Synthetic oligonucleotide
  Sense strand starting at position 730 of SEQ ID NO: 1882974
ggcaauauuccauguuucu

SEQ ID NO: 2161295 - RNA, 19 nt, Artificial Sequence
  Description of Artificial Sequence: Synthetic oligonucleotide
  Antisense strand to SEQ ID NO: 2161294
agaaacauggaauauugcc

SEQ ID NO: 2161296 - RNA, 19 nt, Artificial Sequence
  Description of Artificial Sequence: Synthetic oligonucleotide
  Sense strand starting at position 750 of SEQ ID NO: 1882974
guaccauaugugcauaaga

SEQ ID NO: 2161297 - RNA, 19 nt, Artificial Sequence
  Description of Artificial Sequence: Synthetic oligonucleotide
  Antisense strand to SEQ ID NO: 2161296
ucuuaugcacauaugguac

SEQ ID NO: 2161298 - RNA, 19 nt, Artificial Sequence
  Description of Artificial Sequence: Synthetic oligonucleotide
  Sense strand starting at position 806 of SEQ ID NO: 1882974
ggagucaucucaccaucca

SEQ ID NO: 2161299 - RNA, 19 nt, Artificial Sequence
  Description of Artificial Sequence: Synthetic oligonucleotide
  Antisense strand to SEQ ID NO: 2161298
uggauggugagaugacucc

SEQ ID NO: 2161300 - RNA, 19 nt, Artificial Sequence
  Description of Artificial Sequence: Synthetic oligonucleotide
  Sense strand starting at position 823 of SEQ ID NO: 1882974
caguuaucaguccgaagag

SEQ ID NO: 2161301 - RNA, 19 nt, Artificial Sequence
  Description of Artificial Sequence: Synthetic oligonucleotide
  Antisense strand to SEQ ID NO: 2161300
cucuucggacugauaacug

SEQ ID NO: 2161302 - RNA, 19 nt, Artificial Sequence
  Description of Artificial Sequence: Synthetic oligonucleotide
  Sense strand starting at position 895 of SEQ ID NO: 1882974
agaagaaaucccuguuacc

SEQ ID NO: 2161303 - RNA, 19 nt, Artificial Sequence
  Description of Artificial Sequence: Synthetic oligonucleotide
  Antisense strand to SEQ ID NO: 2161302
gguaacagggauuucuucu

SEQ ID NO: 2161304 - RNA, 19 nt, Artificial Sequence
  Description of Artificial Sequence: Synthetic oligonucleotide
  Sense strand starting at position 1004 of SEQ ID NO: 1882974
gacugaugucucugaggac

SEQ ID NO: 2161305 - RNA, 19 nt, Artificial Sequence
  Description of Artificial Sequence: Synthetic oligonucleotide
  Antisense strand to SEQ ID NO: 2161304
guccucagagacaucaguc

SEQ ID NO: 2161306 - RNA, 19 nt, Artificial Sequence
  Description of Artificial Sequence: Synthetic oligonucleotide
  Sense strand starting at position 2739 of SEQ ID NO: 1882974
uaauuugugucagcgaaua

SEQ ID NO: 2161307 - RNA, 19 nt, Artificial Sequence
  Description of Artificial Sequence: Synthetic oligonucleotide
  Antisense strand to SEQ ID NO: 2161306
uauucgcugacacaaauua

SEQ ID NO: 2161308 - RNA, 19 nt, Artificial Sequence
  Description of Artificial Sequence: Synthetic oligonucleotide
  Sense strand starting at position 2878 of SEQ ID NO: 1882974
gcuugagaugucuagagug

SEQ ID NO: 2161309 - RNA, 19 nt, Artificial Sequence
  Description of Artificial Sequence: Synthetic oligonucleotide
  Antisense strand to SEQ ID NO: 2161308
cacucuagacaucucaagc

SEQ ID NO: 2161310 - RNA, 19 nt, Artificial Sequence
  Description of Artificial Sequence: Synthetic oligonucleotide
  Sense strand starting at position 2880 of SEQ ID NO: 1882974
uugagaugucuagaguggu

SEQ ID NO: 2161311 - RNA, 19 nt, Artificial Sequence
  Description of Artificial Sequence: Synthetic oligonucleotide
  Antisense strand to SEQ ID NO: 2161310
accacucuagacaucucaa

SEQ ID NO: 2161312 - RNA, 19 nt, Artificial Sequence
  Description of Artificial Sequence: Synthetic oligonucleotide
  Sense strand starting at position 2883 of SEQ ID NO: 1882974
agaugucuagagugguauc

SEQ ID NO: 2161313 - RNA, 19 nt, Artificial Sequence
  Description of Artificial Sequence: Synthetic oligonucleotide
  Antisense strand to SEQ ID NO: 2161312
gauaccacucuagacaucu

SEQ ID NO: 2161314 - RNA, 19 nt, Artificial Sequence
  Description of Artificial Sequence: Synthetic oligonucleotide
  Sense strand starting at position 2884 of SEQ ID NO: 1882974
gaugucuagagugguaucu

SEQ ID NO: 2161315 - RNA, 19 nt, Artificial Sequence
  Description of Artificial Sequence: Synthetic oligonucleotide
  Antisense strand to SEQ ID NO: 2161314
agauaccacucuagacauc

SEQ ID NO: 2161316 - RNA, 19 nt, Artificial Sequence
  Description of Artificial Sequence: Synthetic oligonucleotide
  Sense strand starting at position 2923 of SEQ ID NO: 1882974
gccagaggucuuggcgaga

SEQ ID NO: 2161317 - RNA, 19 nt, Artificial Sequence
  Description of Artificial Sequence: Synthetic oligonucleotide
  Antisense strand to SEQ ID NO: 2161316
ucucgccaagaccucuggc

SEQ ID NO: 2161318 - RNA, 19 nt, Artificial Sequence
  Description of Artificial Sequence: Synthetic oligonucleotide
  Sense strand starting at position 2928 of SEQ ID NO: 1882974
aggucuuggcgagauugaa

SEQ ID NO: 2161319 - RNA, 19 nt, Artificial Sequence
  Description of Artificial Sequence: Synthetic oligonucleotide
  Antisense strand to SEQ ID NO: 2161318
uucaaucucgccaagaccu

SEQ ID NO: 2161320 - RNA, 19 nt, Artificial Sequence
  Description of Artificial Sequence: Synthetic oligonucleotide
  Sense strand starting at position 3008 of SEQ ID NO: 1882974
cuuguaaauuucuagugac

SEQ ID NO: 2161321 - RNA, 19 nt, Artificial Sequence
  Description of Artificial Sequence: Synthetic oligonucleotide
  Antisense strand to SEQ ID NO: 2161320
gucacuagaaauuuacaag

SEQ ID NO: 2161322 - RNA, 19 nt, Artificial Sequence
  Description of Artificial Sequence: Synthetic oligonucleotide
  Sense strand starting at position 3175 of SEQ ID NO: 1882974
ggaagcuugcaacagugaa

SEQ ID NO: 2161323 - RNA, 19 nt, Artificial Sequence
  Description of Artificial Sequence: Synthetic oligonucleotide
  Antisense strand to SEQ ID NO: 2161322
uucacuguugcaagcuucc

SEQ ID NO: 2161324 - RNA, 19 nt, Artificial Sequence
  Description of Artificial Sequence: Synthetic oligonucleotide
  Sense strand starting at position 3261 of SEQ ID NO: 1882974
acagguggccgauaucuaa

SEQ ID NO: 2161325 - RNA, 19 nt, Artificial Sequence
  Description of Artificial Sequence: Synthetic oligonucleotide
  Antisense strand to SEQ ID NO: 2161324
uuagauaucggccaccugu

SEQ ID NO: 2161326 - RNA, 19 nt, Artificial Sequence
  Description of Artificial Sequence: Synthetic oligonucleotide
  Sense strand starting at position 3265 of SEQ ID NO: 1882974
guggccgauaucuaacauu

SEQ ID NO: 2161327 - RNA, 19 nt, Artificial Sequence
  Description of Artificial Sequence: Synthetic oligonucleotide
  Antisense strand to SEQ ID NO: 2161326
aauguuagauaucggccac

SEQ ID NO: 2161328 - RNA, 19 nt, Artificial Sequence
  Description of Artificial Sequence: Synthetic oligonucleotide
  Sense strand starting at position 3462 of SEQ ID NO: 1882974
uuugcaagacacgguuauu

SEQ ID NO: 2161329 - RNA, 19 nt, Artificial Sequence
  Description of Artificial Sequence: Synthetic oligonucleotide
  Antisense strand to SEQ ID NO: 2161328
aauaaccgugucuugcaaa

SEQ ID NO: 2161330 - RNA, 19 nt, Artificial Sequence
  Description of Artificial Sequence: Synthetic oligonucleotide
  Sense strand starting at position 3630 of SEQ ID NO: 1882974
gguuuccacuuccugagua

SEQ ID NO: 2161331 - RNA, 19 nt, Artificial Sequence
  Description of Artificial Sequence: Synthetic oligonucleotide
  Antisense strand to SEQ ID NO: 2161330
uacucaggaaguggaaacc

SEQ ID NO: 2161332 - RNA, 19 nt, Artificial Sequence
  Description of Artificial Sequence: Synthetic oligonucleotide
  Sense strand starting at position 3634 of SEQ ID NO: 1882974
uccacuuccugaguaggaa

SEQ ID NO: 2161333 - RNA, 19 nt, Artificial Sequence
  Description of Artificial Sequence: Synthetic oligonucleotide
  Antisense strand to SEQ ID NO: 2161332
uuccuacucaggaagugga

SEQ ID NO: 2161334 - RNA, 19 nt, Artificial Sequence
  Description of Artificial Sequence: Synthetic oligonucleotide
  Sense strand starting at position 3637 of SEQ ID NO: 1882974
acuuccugaguaggaauaa

SEQ ID NO: 2161335 - RNA, 19 nt, Artificial Sequence
  Description of Artificial Sequence: Synthetic oligonucleotide
  Antisense strand to SEQ ID NO: 2161334
uuauuccuacucaggaagu

SEQ ID NO: 2161336 - RNA, 19 nt, Artificial Sequence
  Description of Artificial Sequence: Synthetic oligonucleotide
  Sense strand starting at position 3723 of SEQ ID NO: 1882974
gcuggugaccuuugacaag

SEQ ID NO: 2161337 - RNA, 19 nt, Artificial Sequence
  Description of Artificial Sequence: Synthetic oligonucleotide
  Antisense strand to SEQ ID NO: 2161336
cuugucaaaggucaccagc

SEQ ID NO: 2161338 - RNA, 19 nt, Artificial Sequence
  Description of Artificial Sequence: Synthetic oligonucleotide
  Sense strand starting at position 3817 of SEQ ID NO: 1882974
uguuaugaggccuaaaugu

SEQ ID NO: 2161339 - RNA, 19 nt, Artificial Sequence
  Description of Artificial Sequence: Synthetic oligonucleotide
  Antisense strand to SEQ ID NO: 2161338
acauuuaggccucauaaca

SEQ ID NO: 2161340 - RNA, 19 nt, Artificial Sequence
  Description of Artificial Sequence: Synthetic oligonucleotide
  Sense strand starting at position 3824 of SEQ ID NO: 1882974
aggccuaaaugucuguaua

SEQ ID NO: 2161341 - RNA, 19 nt, Artificial Sequence
  Description of Artificial Sequence: Synthetic oligonucleotide
  Antisense strand to SEQ ID NO: 2161340
uauacagacauuuaggccu

SEQ ID NO: 2161342 - RNA, 19 nt, Artificial Sequence
  Description of Artificial Sequence: Synthetic oligonucleotide
  Sense strand starting at position 3825 of SEQ ID NO: 1882974
ggccuaaaugucuguauaa

SEQ ID NO: 2161343 - RNA, 19 nt, Artificial Sequence
  Description of Artificial Sequence: Synthetic oligonucleotide
  Antisense strand to SEQ ID NO: 2161342
uuauacagacauuuaggcc

SEQ ID NO: 2161344 - RNA, 19 nt, Artificial Sequence
  Description of Artificial Sequence: Synthetic oligonucleotide
  Sense strand starting at position 3826 of SEQ ID NO: 1882974
gccuaaaugucuguauaau

SEQ ID NO: 2161345 - RNA, 19 nt, Artificial Sequence
  Description of Artificial Sequence: Synthetic oligonucleotide
  Antisense strand to SEQ ID NO: 2161344
auuauacagacauuuaggc

SEQ ID NO: 2161346 - RNA, 19 nt, Artificial Sequence
  Description of Artificial Sequence: Synthetic oligonucleotide
  Sense strand starting at position 3827 of SEQ ID NO: 1882974
ccuaaaugucuguauaaug

SEQ ID NO: 2161347 - RNA, 19 nt, Artificial Sequence
  Description of Artificial Sequence: Synthetic oligonucleotide
  Antisense strand to SEQ ID NO: 2161346
cauuauacagacauuuagg

SEQ ID NO: 2161348 - RNA, 19 nt, Artificial Sequence
  Description of Artificial Sequence: Synthetic oligonucleotide
  Sense strand starting at position 3836 of SEQ ID NO: 1882974
cuguauaaugcagagcuca

SEQ ID NO: 2161349 - RNA, 19 nt, Artificial Sequence
  Description of Artificial Sequence: Synthetic oligonucleotide
  Antisense strand to SEQ ID NO: 2161348
ugagcucugcauuauacag

SEQ ID NO: 2161350 - RNA, 19 nt, Artificial Sequence
  Description of Artificial Sequence: Synthetic oligonucleotide
  Sense strand starting at position 3878 of SEQ ID NO: 1882974
aggccuaaaugucuaugua

SEQ ID NO: 2161351 - RNA, 19 nt, Artificial Sequence
  Description of Artificial Sequence: Synthetic oligonucleotide
  Antisense strand to SEQ ID NO: 2161350
uacauagacauuuaggccu

SEQ ID NO: 2161352 - RNA, 19 nt, Artificial Sequence
  Description of Artificial Sequence: Synthetic oligonucleotide
  Sense strand starting at position 3881 of SEQ ID NO: 1882974
ccuaaaugucuauguagug

SEQ ID NO: 2161353 - RNA, 19 nt, Artificial Sequence
  Description of Artificial Sequence: Synthetic oligonucleotide
  Antisense strand to SEQ ID NO: 2161352
cacuacauagacauuuagg

SEQ ID NO: 2161354 - RNA, 19 nt, Artificial Sequence
  Description of Artificial Sequence: Synthetic oligonucleotide
  Sense strand starting at position 3671 of SEQ ID NO: 1882975
ucaugaguucaugaguggu

SEQ ID NO: 2161355 - RNA, 19 nt, Artificial Sequence
  Description of Artificial Sequence: Synthetic oligonucleotide
  Antisense strand to SEQ ID NO: 2161354
accacucaugaacucauga

SEQ ID NO: 2161356 - RNA, 19 nt, Artificial Sequence
  Description of Artificial Sequence: Synthetic oligonucleotide
  Sense strand starting at position 272 of SEQ ID NO: 1882976
gguuaaaggcuaugacauu

SEQ ID NO: 2161357 - RNA, 19 nt, Artificial Sequence
  Description of Artificial Sequence: Synthetic oligonucleotide
  Antisense strand to SEQ ID NO: 2161356
aaugucauagccuuuaacc

SEQ ID NO: 2161358 - RNA, 19 nt, Artificial Sequence
  Description of Artificial Sequence: Synthetic oligonucleotide
  Sense strand starting at position 278 of SEQ ID NO: 1882976
aggcuaugacauugauccu

SEQ ID NO: 2161359 - RNA, 19 nt, Artificial Sequence
  Description of Artificial Sequence: Synthetic oligonucleotide
  Antisense strand to SEQ ID NO: 2161358
aggaucaaugucauagccu

SEQ ID NO: 2161360 - RNA, 19 nt, Artificial Sequence
  Description of Artificial Sequence: Synthetic oligonucleotide
  Sense strand starting at position 281 of SEQ ID NO: 1882976
cuaugacauugauccuuga

SEQ ID NO: 2161361 - RNA, 19 nt, Artificial Sequence
  Description of Artificial Sequence: Synthetic oligonucleotide
  Antisense strand to SEQ ID NO: 2161360
ucaaggaucaaugucauag

SEQ ID NO: 2161362 - RNA, 19 nt, Artificial Sequence
  Description of Artificial Sequence: Synthetic oligonucleotide
  Sense strand starting at position 284 of SEQ ID NO: 1882976
ugacauugauccuugacug

SEQ ID NO: 2161363 - RNA, 19 nt, Artificial Sequence
  Description of Artificial Sequence: Synthetic oligonucleotide
  Antisense strand to SEQ ID NO: 2161362
cagucaaggaucaauguca

SEQ ID NO: 2161364 - RNA, 19 nt, Artificial Sequence
  Description of Artificial Sequence: Synthetic oligonucleotide
  Sense strand starting at position 366 of SEQ ID NO: 1882976
uaaagucuguggguggaua

SEQ ID NO: 2161365 - RNA, 19 nt, Artificial Sequence
  Description of Artificial Sequence: Synthetic oligonucleotide
  Antisense strand to SEQ ID NO: 2161364
uauccacccacagacuuua

SEQ ID NO: 2161366 - RNA, 19 nt, Artificial Sequence
  Description of Artificial Sequence: Synthetic oligonucleotide
  Sense strand starting at position 367 of SEQ ID NO: 1882976
aaagucuguggguggauaa

SEQ ID NO: 2161367 - RNA, 19 nt, Artificial Sequence
  Description of Artificial Sequence: Synthetic oligonucleotide
  Antisense strand to SEQ ID NO: 2161366
uuauccacccacagacuuu

SEQ ID NO: 2161368 - RNA, 19 nt, Artificial Sequence
  Description of Artificial Sequence: Synthetic oligonucleotide
  Sense strand starting at position 368 of SEQ ID NO: 1882976
aagucuguggguggauaau

SEQ ID NO: 2161369 - RNA, 19 nt, Artificial Sequence
  Description of Artificial Sequence: Synthetic oligonucleotide
  Antisense strand to SEQ ID NO: 2161368
auuauccacccacagacuu

SEQ ID NO: 2161370 - RNA, 19 nt, Artificial Sequence
  Description of Artificial Sequence: Synthetic oligonucleotide
  Sense strand starting at position 423 of SEQ ID NO: 1882976
guguguugugauuauguaa

SEQ ID NO: 2161371 - RNA, 19 nt, Artificial Sequence
  Description of Artificial Sequence: Synthetic oligonucleotide
  Antisense strand to SEQ ID NO: 2161370
uuacauaaucacaacacac

SEQ ID NO: 2161372 - RNA, 19 nt, Artificial Sequence
  Description of Artificial Sequence: Synthetic oligonucleotide
  Sense strand starting at position 426 of SEQ ID NO: 1882976
uguugugauuauguaagag

SEQ ID NO: 2161373 - RNA, 19 nt, Artificial Sequence
  Description of Artificial Sequence: Synthetic oligonucleotide
  Antisense strand to SEQ ID NO: 2161372
cucuuacauaaucacaaca

SEQ ID NO: 2161374 - RNA, 19 nt, Artificial Sequence
  Description of Artificial Sequence: Synthetic oligonucleotide
  Sense strand starting at position 438 of SEQ ID NO: 1882976
guaagagaaugccuugauu

SEQ ID NO: 2161375 - RNA, 19 nt, Artificial Sequence
  Description of Artificial Sequence: Synthetic oligonucleotide
  Antisense strand to SEQ ID NO: 2161374
aaucaaggcauucucuuac

SEQ ID NO: 2161376 - RNA, 19 nt, Artificial Sequence
  Description of Artificial Sequence: Synthetic oligonucleotide
  Sense strand starting at position 605 of SEQ ID NO: 1882976
aguagccuuucuguaaauu

SEQ ID NO: 2161377 - RNA, 19 nt, Artificial Sequence
  Description of Artificial Sequence: Synthetic oligonucleotide
  Antisense strand to SEQ ID NO: 2161376
aauuuacagaaaggcuacu

SEQ ID NO: 2161378 - RNA, 19 nt, Artificial Sequence
  Description of Artificial Sequence: Synthetic oligonucleotide
  Sense strand starting at position 715 of SEQ ID NO: 1882976
agaccagaggguugcuuaa

SEQ ID NO: 2161379 - RNA, 19 nt, Artificial Sequence
  Description of Artificial Sequence: Synthetic oligonucleotide
  Antisense strand to SEQ ID NO: 2161378
uuaagcaacccucuggucu

SEQ ID NO: 2161380 - RNA, 19 nt, Artificial Sequence
  Description of Artificial Sequence: Synthetic oligonucleotide
  Sense strand starting at position 1245 of SEQ ID NO: 1882976
gagaaaggucuuggcacau

SEQ ID NO: 2161381 - RNA, 19 nt, Artificial Sequence
  Description of Artificial Sequence: Synthetic oligonucleotide
  Antisense strand to SEQ ID NO: 2161380
augugccaagaccuuucuc

SEQ ID NO: 2161382 - RNA, 19 nt, Artificial Sequence
  Description of Artificial Sequence: Synthetic oligonucleotide
  Sense strand starting at position 1313 of SEQ ID NO: 1882976
cuggccuuccuaugggauu

SEQ ID NO: 2161383 - RNA, 19 nt, Artificial Sequence
  Description of Artificial Sequence: Synthetic oligonucleotide
  Antisense strand to SEQ ID NO: 2161382
aaucccauaggaaggccag

SEQ ID NO: 2161384 - RNA, 19 nt, Artificial Sequence
  Description of Artificial Sequence: Synthetic oligonucleotide
  Sense strand starting at position 1477 of SEQ ID NO: 1882976
gagagagcuuuaguuucca

SEQ ID NO: 2161385 - RNA, 19 nt, Artificial Sequence
  Description of Artificial Sequence: Synthetic oligonucleotide
  Antisense strand to SEQ ID NO: 2161384
uggaaacuaaagcucucuc

SEQ ID NO: 2161386 - RNA, 19 nt, Artificial Sequence
  Description of Artificial Sequence: Synthetic oligonucleotide
  Sense strand starting at position 1699 of SEQ ID NO: 1882976
ggaacugucuucccaggga

SEQ ID NO: 2161387 - RNA, 19 nt, Artificial Sequence
  Description of Artificial Sequence: Synthetic oligonucleotide
  Antisense strand to SEQ ID NO: 2161386
ucccugggaagacaguucc

SEQ ID NO: 2161388 - RNA, 19 nt, Artificial Sequence
  Description of Artificial Sequence: Synthetic oligonucleotide
  Sense strand starting at position 1702 of SEQ ID NO: 1882976
acugucuucccagggauca

SEQ ID NO: 2161389 - RNA, 19 nt, Artificial Sequence
  Description of Artificial Sequence: Synthetic oligonucleotide
  Antisense strand to SEQ ID NO: 2161388
ugaucccugggaagacagu

SEQ ID NO: 2161390 - RNA, 19 nt, Artificial Sequence
  Description of Artificial Sequence: Synthetic oligonucleotide
  Sense strand starting at position 1772 of SEQ ID NO: 1882976
cccguuaguccucacugga

SEQ ID NO: 2161391 - RNA, 19 nt, Artificial Sequence
  Description of Artificial Sequence: Synthetic oligonucleotide
  Antisense strand to SEQ ID NO: 2161390
uccagugaggacuaacggg

SEQ ID NO: 2161392 - RNA, 19 nt, Artificial Sequence
  Description of Artificial Sequence: Synthetic oligonucleotide
  Sense strand starting at position 1915 of SEQ ID NO: 1882976
gggcgaugugacggaugaa

SEQ ID NO: 2161393 - RNA, 19 nt, Artificial Sequence
  Description of Artificial Sequence: Synthetic oligonucleotide
  Antisense strand to SEQ ID NO: 2161392
uucauccgucacaucgccc

SEQ ID NO: 2161394 - RNA, 19 nt, Artificial Sequence
  Description of Artificial Sequence: Synthetic oligonucleotide
  Sense strand starting at position 1916 of SEQ ID NO: 1882976
ggcgaugugacggaugaag

SEQ ID NO: 2161395 - RNA, 19 nt, Artificial Sequence
  Description of Artificial Sequence: Synthetic oligonucleotide
  Antisense strand to SEQ ID NO: 2161394
cuucauccgucacaucgcc

SEQ ID NO: 2161396 - RNA, 19 nt, Artificial Sequence
  Description of Artificial Sequence: Synthetic oligonucleotide
  Sense strand starting at position 1918 of SEQ ID NO: 1882976
cgaugugacggaugaaggu

SEQ ID NO: 2161397 - RNA, 19 nt, Artificial Sequence
  Description of Artificial Sequence: Synthetic oligonucleotide
  Antisense strand to SEQ ID NO: 2161396
accuucauccgucacaucg

SEQ ID NO: 2161398 - RNA, 19 nt, Artificial Sequence
  Description of Artificial Sequence: Synthetic oligonucleotide
  Sense strand starting at position 2097 of SEQ ID NO: 1882976
gcuugcaggguguaaacau

SEQ ID NO: 2161399 - RNA, 19 nt, Artificial Sequence
  Description of Artificial Sequence: Synthetic oligonucleotide
  Antisense strand to SEQ ID NO: 2161398
auguuuacacccugcaagc

SEQ ID NO: 2161400 - RNA, 19 nt, Artificial Sequence
  Description of Artificial Sequence: Synthetic oligonucleotide
  Sense strand starting at position 2104 of SEQ ID NO: 1882976
ggguguaaacaugggcaga

SEQ ID NO: 2161401 - RNA, 19 nt, Artificial Sequence
  Description of Artificial Sequence: Synthetic oligonucleotide
  Antisense strand to SEQ ID NO: 2161400
ucugcccauguuuacaccc

SEQ ID NO: 2161402 - RNA, 19 nt, Artificial Sequence
  Description of Artificial Sequence: Synthetic oligonucleotide
  Sense strand starting at position 2281 of SEQ ID NO: 1882976
ccauauuccuggucuugac

SEQ ID NO: 2161403 - RNA, 19 nt, Artificial Sequence
  Description of Artificial Sequence: Synthetic oligonucleotide
  Antisense strand to SEQ ID NO: 2161402
gucaagaccaggaauaugg

SEQ ID NO: 2161404 - RNA, 19 nt, Artificial Sequence
  Description of Artificial Sequence: Synthetic oligonucleotide
  Sense strand starting at position 2370 of SEQ ID NO: 1882976
cgagaagccuuccuugaua

SEQ ID NO: 2161405 - RNA, 19 nt, Artificial Sequence
  Description of Artificial Sequence: Synthetic oligonucleotide
  Antisense strand to SEQ ID NO: 2161404
uaucaaggaaggcuucucg

SEQ ID NO: 2161406 - RNA, 19 nt, Artificial Sequence
  Description of Artificial Sequence: Synthetic oligonucleotide
  Sense strand starting at position 2372 of SEQ ID NO: 1882976
agaagccuuccuugauaac

SEQ ID NO: 2161407 - RNA, 19 nt, Artificial Sequence
  Description of Artificial Sequence: Synthetic oligonucleotide
  Antisense strand to SEQ ID NO: 2161406
guuaucaaggaaggcuucu

SEQ ID NO: 2161408 - RNA, 19 nt, Artificial Sequence
  Description of Artificial Sequence: Synthetic oligonucleotide
  Sense strand starting at position 2452 of SEQ ID NO: 1882976
agcacuuaucacugaugca

SEQ ID NO: 2161409 - RNA, 19 nt, Artificial Sequence
  Description of Artificial Sequence: Synthetic oligonucleotide
  Antisense strand to SEQ ID NO: 2161408
ugcaucagugauaagugcu

SEQ ID NO: 2161410 - RNA, 19 nt, Artificial Sequence
  Description of Artificial Sequence: Synthetic oligonucleotide
  Sense strand starting at position 2533 of SEQ ID NO: 1882976
cuuuguuauccaggcuuaa

SEQ ID NO: 2161411 - RNA, 19 nt, Artificial Sequence
  Description of Artificial Sequence: Synthetic oligonucleotide
  Antisense strand to SEQ ID NO: 2161410
uuaagccuggauaacaaag

SEQ ID NO: 2161412 - RNA, 19 nt, Artificial Sequence
  Description of Artificial Sequence: Synthetic oligonucleotide
  Sense strand starting at position 3308 of SEQ ID NO: 1882976
gugcaugcaagcguuagau

SEQ ID NO: 2161413 - RNA, 19 nt, Artificial Sequence
  Description of Artificial Sequence: Synthetic oligonucleotide
  Antisense strand to SEQ ID NO: 2161412
aucuaacgcuugcaugcac

SEQ ID NO: 2161414 - RNA, 19 nt, Artificial Sequence
  Description of Artificial Sequence: Synthetic oligonucleotide
  Sense strand starting at position 3382 of SEQ ID NO: 1882976
acagacuuugagugagacu

SEQ ID NO: 2161415 - RNA, 19 nt, Artificial Sequence
  Description of Artificial Sequence: Synthetic oligonucleotide
  Antisense strand to SEQ ID NO: 2161414
agucucacucaaagucugu

SEQ ID NO: 2161416 - RNA, 19 nt, Artificial Sequence
  Description of Artificial Sequence: Synthetic oligonucleotide
  Sense strand starting at position 3389 of SEQ ID NO: 1882976
uugagugagacuugaguuc

SEQ ID NO: 2161417 - RNA, 19 nt, Artificial Sequence
  Description of Artificial Sequence: Synthetic oligonucleotide
  Antisense strand to SEQ ID NO: 2161416
gaacucaagucucacucaa

SEQ ID NO: 2161418 - RNA, 19 nt, Artificial Sequence
  Description of Artificial Sequence: Synthetic oligonucleotide
  Sense strand starting at position 3435 of SEQ ID NO: 1882976
ugaauuguuccuuagggcu

SEQ ID NO: 2161419 - RNA, 19 nt, Artificial Sequence
  Description of Artificial Sequence: Synthetic oligonucleotide
  Antisense strand to SEQ ID NO: 2161418
agcccuaaggaacaauuca

SEQ ID NO: 2161420 - RNA, 19 nt, Artificial Sequence
  Description of Artificial Sequence: Synthetic oligonucleotide
  Sense strand starting at position 3617 of SEQ ID NO: 1882976
aggucaugaguucaugagu

SEQ ID NO: 2161421 - RNA, 19 nt, Artificial Sequence
  Description of Artificial Sequence: Synthetic oligonucleotide
  Antisense strand to SEQ ID NO: 2161420
acucaugaacucaugaccu

SEQ ID NO: 2161422 - RNA, 19 nt, Artificial Sequence
  Description of Artificial Sequence: Synthetic oligonucleotide
  Sense strand starting at position 3620 of SEQ ID NO: 1882976
ucaugaguucaugaguggu

SEQ ID NO: 2161423 - RNA, 19 nt, Artificial Sequence
  Description of Artificial Sequence: Synthetic oligonucleotide
  Antisense strand to SEQ ID NO: 2161422
accacucaugaacucauga

SEQ ID NO: 2161424 - RNA, 19 nt, Artificial Sequence
  Description of Artificial Sequence: Synthetic oligonucleotide
  Sense strand starting at position 3759 of SEQ ID NO: 1882976
aggguugaggucuggcaga

SEQ ID NO: 2161425 - RNA, 19 nt, Artificial Sequence
  Description of Artificial Sequence: Synthetic oligonucleotide
  Antisense strand to SEQ ID NO: 2161424
ucugccagaccucaacccu

SEQ ID NO: 2161426 - RNA, 19 nt, Artificial Sequence
  Description of Artificial Sequence: Synthetic oligonucleotide
  Sense strand starting at position 3786 of SEQ ID NO: 1882976
aagacaugcugggcguuaa

SEQ ID NO: 2161427 - RNA, 19 nt, Artificial Sequence
  Description of Artificial Sequence: Synthetic oligonucleotide
  Antisense strand to SEQ ID NO: 2161426
uuaacgcccagcaugucuu

SEQ ID NO: 2161428 - RNA, 19 nt, Artificial Sequence
  Description of Artificial Sequence: Synthetic oligonucleotide
  Sense strand starting at position 3790 of SEQ ID NO: 1882976
caugcugggcguuaauuua

SEQ ID NO: 2161429 - RNA, 19 nt, Artificial Sequence
  Description of Artificial Sequence: Synthetic oligonucleotide
  Antisense strand to SEQ ID NO: 2161428
uaaauuaacgcccagcaug

SEQ ID NO: 2161430 - RNA, 19 nt, Artificial Sequence
  Description of Artificial Sequence: Synthetic oligonucleotide
  Sense strand starting at position 3804 of SEQ ID NO: 1882976
auuuauuuguuugaagcga

SEQ ID NO: 2161431 - RNA, 19 nt, Artificial Sequence
  Description of Artificial Sequence: Synthetic oligonucleotide
  Antisense strand to SEQ ID NO: 2161430
ucgcuucaaacaaauaaau

SEQ ID NO: 2161432 - RNA, 19 nt, Artificial Sequence
  Description of Artificial Sequence: Synthetic oligonucleotide
  Sense strand starting at position 3808 of SEQ ID NO: 1882976
auuuguuugaagcgaaguu

SEQ ID NO: 2161433 - RNA, 19 nt, Artificial Sequence
  Description of Artificial Sequence: Synthetic oligonucleotide
  Antisense strand to SEQ ID NO: 2161432
aacuucgcuucaaacaaau

SEQ ID NO: 2161434 - RNA, 19 nt, Artificial Sequence
  Description of Artificial Sequence: Synthetic oligonucleotide
  Sense strand starting at position 3809 of SEQ ID NO: 1882976
uuuguuugaagcgaaguuu

SEQ ID NO: 2161435 - RNA, 19 nt, Artificial Sequence
  Description of Artificial Sequence: Synthetic oligonucleotide
  Antisense strand to SEQ ID NO: 2161434
aaacuucgcuucaaacaaa

SEQ ID NO: 2161436 - RNA, 19 nt, Artificial Sequence
  Description of Artificial Sequence: Synthetic oligonucleotide
  Sense strand starting at position 47 of SEQ ID NO: 1882977
agcauugagaggcaguuaa

SEQ ID NO: 2161437 - RNA, 19 nt, Artificial Sequence
  Description of Artificial Sequence: Synthetic oligonucleotide
  Antisense strand to SEQ ID NO: 2161436
uuaacugccucucaaugcu

SEQ ID NO: 2161438 - RNA, 19 nt, Artificial Sequence
  Description of Artificial Sequence: Synthetic oligonucleotide
  Sense strand starting at position 62 of SEQ ID NO: 1882977
uuaagaagugaaugcaauu

SEQ ID NO: 2161439 - RNA, 19 nt, Artificial Sequence
  Description of Artificial Sequence: Synthetic oligonucleotide
  Antisense strand to SEQ ID NO: 2161438
aauugcauucacuucuuaa

SEQ ID NO: 2161440 - RNA, 19 nt, Artificial Sequence
  Description of Artificial Sequence: Synthetic oligonucleotide
  Sense strand starting at position 196 of SEQ ID NO: 1882977
acaaauguggaguguaaga

SEQ ID NO: 2161441 - RNA, 19 nt, Artificial Sequence
  Description of Artificial Sequence: Synthetic oligonucleotide
  Antisense strand to SEQ ID NO: 2161440
ucuuacacuccacauuugu

SEQ ID NO: 2161442 - RNA, 19 nt, Artificial Sequence
  Description of Artificial Sequence: Synthetic oligonucleotide
  Sense strand starting at position 242 of SEQ ID NO: 1882977
aguuucugaccugagucaa

SEQ ID NO: 2161443 - RNA, 19 nt, Artificial Sequence
  Description of Artificial Sequence: Synthetic oligonucleotide
  Antisense strand to SEQ ID NO: 2161442
uugacucaggucagaaacu

SEQ ID NO: 2161444 - RNA, 19 nt, Artificial Sequence
  Description of Artificial Sequence: Synthetic oligonucleotide
  Sense strand starting at position 266 of SEQ ID NO: 1882977
uugagcugccauuaauuga

SEQ ID NO: 2161445 - RNA, 19 nt, Artificial Sequence
  Description of Artificial Sequence: Synthetic oligonucleotide
  Antisense strand to SEQ ID NO: 2161444
ucaauuaauggcagcucaa

SEQ ID NO: 2161446 - RNA, 19 nt, Artificial Sequence
  Description of Artificial Sequence: Synthetic oligonucleotide
  Sense strand starting at position 383 of SEQ ID NO: 1882977
agagaugcccacuaagcaa

SEQ ID NO: 2161447 - RNA, 19 nt, Artificial Sequence
  Description of Artificial Sequence: Synthetic oligonucleotide
  Antisense strand to SEQ ID NO: 2161446
uugcuuagugggcaucucu

SEQ ID NO: 2161448 - RNA, 19 nt, Artificial Sequence
  Description of Artificial Sequence: Synthetic oligonucleotide
  Sense strand starting at position 436 of SEQ ID NO: 1882977
agugcuuuacauggaaauc

SEQ ID NO: 2161449 - RNA, 19 nt, Artificial Sequence
  Description of Artificial Sequence: Synthetic oligonucleotide
  Antisense strand to SEQ ID NO: 2161448
gauuuccauguaaagcacu

SEQ ID NO: 2161450 - RNA, 19 nt, Artificial Sequence
  Description of Artificial Sequence: Synthetic oligonucleotide
  Sense strand starting at position 461 of SEQ ID NO: 1882977
caguguauaggugguauuu

SEQ ID NO: 2161451 - RNA, 19 nt, Artificial Sequence
  Description of Artificial Sequence: Synthetic oligonucleotide
  Antisense strand to SEQ ID NO: 2161450
aaauaccaccuauacacug

SEQ ID NO: 2161452 - RNA, 19 nt, Artificial Sequence
  Description of Artificial Sequence: Synthetic oligonucleotide
  Sense strand starting at position 483 of SEQ ID NO: 1882977
accguucucuauuuggauu

SEQ ID NO: 2161453 - RNA, 19 nt, Artificial Sequence
  Description of Artificial Sequence: Synthetic oligonucleotide
  Antisense strand to SEQ ID NO: 2161452
aauccaaauagagaacggu

SEQ ID NO: 2161454 - RNA, 19 nt, Artificial Sequence
  Description of Artificial Sequence: Synthetic oligonucleotide
  Sense strand starting at position 651 of SEQ ID NO: 1882977
aguccugaagcccaguaaa

SEQ ID NO: 2161455 - RNA, 19 nt, Artificial Sequence
  Description of Artificial Sequence: Synthetic oligonucleotide
  Antisense strand to SEQ ID NO: 2161454
uuuacugggcuucaggacu

SEQ ID NO: 2161456 - RNA, 19 nt, Artificial Sequence
  Description of Artificial Sequence: Synthetic oligonucleotide
  Sense strand starting at position 838 of SEQ ID NO: 1882977
cugcuauuaggucaaugaa

SEQ ID NO: 2161457 - RNA, 19 nt, Artificial Sequence
  Description of Artificial Sequence: Synthetic oligonucleotide
  Antisense strand to SEQ ID NO: 2161456
uucauugaccuaauagcag

SEQ ID NO: 2161458 - RNA, 19 nt, Artificial Sequence
  Description of Artificial Sequence: Synthetic oligonucleotide
  Sense strand starting at position 841 of SEQ ID NO: 1882977
cuauuaggucaaugaaggu

SEQ ID NO: 2161459 - RNA, 19 nt, Artificial Sequence
  Description of Artificial Sequence: Synthetic oligonucleotide
  Antisense strand to SEQ ID NO: 2161458
accuucauugaccuaauag

SEQ ID NO: 2161460 - RNA, 19 nt, Artificial Sequence
  Description of Artificial Sequence: Synthetic oligonucleotide
  Sense strand starting at position 927 of SEQ ID NO: 1882977
ggugacugagugcauucaa

SEQ ID NO: 2161461 - RNA, 19 nt, Artificial Sequence
  Description of Artificial Sequence: Synthetic oligonucleotide
  Antisense strand to SEQ ID NO: 2161460
uugaaugcacucagucacc

SEQ ID NO: 2161462 - RNA, 19 nt, Artificial Sequence
  Description of Artificial Sequence: Synthetic oligonucleotide
  Sense strand starting at position 988 of SEQ ID NO: 1882977
uugaguuaucuguaaagug

SEQ ID NO: 2161463 - RNA, 19 nt, Artificial Sequence
  Description of Artificial Sequence: Synthetic oligonucleotide
  Antisense strand to SEQ ID NO: 2161462
cacuuuacagauaacucaa

SEQ ID NO: 2161464 - RNA, 19 nt, Artificial Sequence
  Description of Artificial Sequence: Synthetic oligonucleotide
  Sense strand starting at position 1011 of SEQ ID NO: 1882977
aaagaaauggugugauuau

SEQ ID NO: 2161465 - RNA, 19 nt, Artificial Sequence
  Description of Artificial Sequence: Synthetic oligonucleotide
  Antisense strand to SEQ ID NO: 2161464
auaaucacaccauuucuuu

SEQ ID NO: 2161466 - RNA, 19 nt, Artificial Sequence
  Description of Artificial Sequence: Synthetic oligonucleotide
  Sense strand starting at position 1292 of SEQ ID NO: 1882977
gcuuaauaaagaggucaug

SEQ ID NO: 2161467 - RNA, 19 nt, Artificial Sequence
  Description of Artificial Sequence: Synthetic oligonucleotide
  Antisense strand to SEQ ID NO: 2161466
caugaccucuuuauuaagc

SEQ ID NO: 2161468 - RNA, 19 nt, Artificial Sequence
  Description of Artificial Sequence: Synthetic oligonucleotide
  Sense strand starting at position 1329 of SEQ ID NO: 1882977
gugacaucggaucaacgaa

SEQ ID NO: 2161469 - RNA, 19 nt, Artificial Sequence
  Description of Artificial Sequence: Synthetic oligonucleotide
  Antisense strand to SEQ ID NO: 2161468
uucguugauccgaugucac

SEQ ID NO: 2161470 - RNA, 19 nt, Artificial Sequence
  Description of Artificial Sequence: Synthetic oligonucleotide
  Sense strand starting at position 1375 of SEQ ID NO: 1882977
agcucacgcggcuuguaau

SEQ ID NO: 2161471 - RNA, 19 nt, Artificial Sequence
  Description of Artificial Sequence: Synthetic oligonucleotide
  Antisense strand to SEQ ID NO: 2161470
auuacaagccgcgugagcu

SEQ ID NO: 2161472 - RNA, 19 nt, Artificial Sequence
  Description of Artificial Sequence: Synthetic oligonucleotide
  Sense strand starting at position 1386 of SEQ ID NO: 1882977
cuuguaauuaagggcuuga

SEQ ID NO: 2161473 - RNA, 19 nt, Artificial Sequence
  Description of Artificial Sequence: Synthetic oligonucleotide
  Antisense strand to SEQ ID NO: 2161472
ucaagcccuuaauuacaag

SEQ ID NO: 2161474 - RNA, 19 nt, Artificial Sequence
  Description of Artificial Sequence: Synthetic oligonucleotide
  Sense strand starting at position 1417 of SEQ ID NO: 1882977
ccguuaacccugcaauaag

SEQ ID NO: 2161475 - RNA, 19 nt, Artificial Sequence
  Description of Artificial Sequence: Synthetic oligonucleotide
  Antisense strand to SEQ ID NO: 2161474
cuuauugcaggguuaacgg

SEQ ID NO: 2161476 - RNA, 19 nt, Artificial Sequence
  Description of Artificial Sequence: Synthetic oligonucleotide
  Sense strand starting at position 1451 of SEQ ID NO: 1882977
uuagucuuccuugggaauu

SEQ ID NO: 2161477 - RNA, 19 nt, Artificial Sequence
  Description of Artificial Sequence: Synthetic oligonucleotide
  Antisense strand to SEQ ID NO: 2161476
aauucccaaggaagacuaa

SEQ ID NO: 2161478 - RNA, 19 nt, Artificial Sequence
  Description of Artificial Sequence: Synthetic oligonucleotide
  Sense strand starting at position 1493 of SEQ ID NO: 1882977
uacauaccucgugaggagu

SEQ ID NO: 2161479 - RNA, 19 nt, Artificial Sequence
  Description of Artificial Sequence: Synthetic oligonucleotide
  Antisense strand to SEQ ID NO: 2161478
acuccucacgagguaugua

SEQ ID NO: 2161480 - RNA, 19 nt, Artificial Sequence
  Description of Artificial Sequence: Synthetic oligonucleotide
  Sense strand starting at position 1496 of SEQ ID NO: 1882977
auaccucgugaggaguauu

SEQ ID NO: 2161481 - RNA, 19 nt, Artificial Sequence
  Description of Artificial Sequence: Synthetic oligonucleotide
  Antisense strand to SEQ ID NO: 2161480
aauacuccucacgagguau

SEQ ID NO: 2161482 - RNA, 19 nt, Artificial Sequence
  Description of Artificial Sequence: Synthetic oligonucleotide
  Sense strand starting at position 1800 of SEQ ID NO: 1882977
gggaaguagggcuaucgga

SEQ ID NO: 2161483 - RNA, 19 nt, Artificial Sequence
  Description of Artificial Sequence: Synthetic oligonucleotide
  Antisense strand to SEQ ID NO: 2161482
uccgauagcccuacuuccc

SEQ ID NO: 2161484 - RNA, 19 nt, Artificial Sequence
  Description of Artificial Sequence: Synthetic oligonucleotide
  Sense strand starting at position 1971 of SEQ ID NO: 1882977
cucugucacccuggaaaca

SEQ ID NO: 2161485 - RNA, 19 nt, Artificial Sequence
  Description of Artificial Sequence: Synthetic oligonucleotide
  Antisense strand to SEQ ID NO: 2161484
uguuuccagggugacagag

SEQ ID NO: 2161486 - RNA, 19 nt, Artificial Sequence
  Description of Artificial Sequence: Synthetic oligonucleotide
  Sense strand starting at position 2086 of SEQ ID NO: 1882977
gccuaaagcuaagcuagaa

SEQ ID NO: 2161487 - RNA, 19 nt, Artificial Sequence
  Description of Artificial Sequence: Synthetic oligonucleotide
  Antisense strand to SEQ ID NO: 2161486
uucuagcuuagcuuuaggc

SEQ ID NO: 2161488 - RNA, 19 nt, Artificial Sequence
  Description of Artificial Sequence: Synthetic oligonucleotide
  Sense strand starting at position 2265 of SEQ ID NO: 1882977
ccuuucucaguuuaguaaa

SEQ ID NO: 2161489 - RNA, 19 nt, Artificial Sequence
  Description of Artificial Sequence: Synthetic oligonucleotide
  Antisense strand to SEQ ID NO: 2161488
uuuacuaaacugagaaagg

SEQ ID NO: 2161490 - RNA, 19 nt, Artificial Sequence
  Description of Artificial Sequence: Synthetic oligonucleotide
  Sense strand starting at position 2286 of SEQ ID NO: 1882977
gaaagugauaacggagcuu

SEQ ID NO: 2161491 - RNA, 19 nt, Artificial Sequence
  Description of Artificial Sequence: Synthetic oligonucleotide
  Antisense strand to SEQ ID NO: 2161490
aagcuccguuaucacuuuc

SEQ ID NO: 2161492 - RNA, 19 nt, Artificial Sequence
  Description of Artificial Sequence: Synthetic oligonucleotide
  Sense strand starting at position 2303 of SEQ ID NO: 1882977
uugagcauccucugaauug

SEQ ID NO: 2161493 - RNA, 19 nt, Artificial Sequence
  Description of Artificial Sequence: Synthetic oligonucleotide
  Antisense strand to SEQ ID NO: 2161492
caauucagaggaugcucaa

SEQ ID NO: 2161494 - RNA, 19 nt, Artificial Sequence
  Description of Artificial Sequence: Synthetic oligonucleotide
  Sense strand starting at position 2339 of SEQ ID NO: 1882977
uaguucuucgcacaaggau

SEQ ID NO: 2161495 - RNA, 19 nt, Artificial Sequence
  Description of Artificial Sequence: Synthetic oligonucleotide
  Antisense strand to SEQ ID NO: 2161494
auccuugugcgaagaacua

SEQ ID NO: 2161496 - RNA, 19 nt, Artificial Sequence
  Description of Artificial Sequence: Synthetic oligonucleotide
  Sense strand starting at position 2587 of SEQ ID NO: 1882977
gaagaaggcguguauuaau

SEQ ID NO: 2161497 - RNA, 19 nt, Artificial Sequence
  Description of Artificial Sequence: Synthetic oligonucleotide
  Antisense strand to SEQ ID NO: 2161496
auuaauacacgccuucuuc

SEQ ID NO: 2161498 - RNA, 19 nt, Artificial Sequence
  Description of Artificial Sequence: Synthetic oligonucleotide
  Sense strand starting at position 2794 of SEQ ID NO: 1882977
uuggaaagguggguuugau

SEQ ID NO: 2161499 - RNA, 19 nt, Artificial Sequence
  Description of Artificial Sequence: Synthetic oligonucleotide
  Antisense strand to SEQ ID NO: 2161498
aucaaacccaccuuuccaa

SEQ ID NO: 2161500 - RNA, 19 nt, Artificial Sequence
  Description of Artificial Sequence: Synthetic oligonucleotide
  Sense strand starting at position 2817 of SEQ ID NO: 1882977
aagguaaacugguuaagau

SEQ ID NO: 2161501 - RNA, 19 nt, Artificial Sequence
  Description of Artificial Sequence: Synthetic oligonucleotide
  Antisense strand to SEQ ID NO: 2161500
aucuuaaccaguuuaccuu

SEQ ID NO: 2161502 - RNA, 19 nt, Artificial Sequence
  Description of Artificial Sequence: Synthetic oligonucleotide
  Sense strand starting at position 2833 of SEQ ID NO: 1882977
gauuaugaaagguguuguu

SEQ ID NO: 2161503 - RNA, 19 nt, Artificial Sequence
  Description of Artificial Sequence: Synthetic oligonucleotide
  Antisense strand to SEQ ID NO: 2161502
aacaacaccuuucauaauc

SEQ ID NO: 2161504 - RNA, 19 nt, Artificial Sequence
  Description of Artificial Sequence: Synthetic oligonucleotide
  Sense strand starting at position 2977 of SEQ ID NO: 1882977
gagaaugaguuggaagaga

SEQ ID NO: 2161505 - RNA, 19 nt, Artificial Sequence
  Description of Artificial Sequence: Synthetic oligonucleotide
  Antisense strand to SEQ ID NO: 2161504
ucucuuccaacucauucuc

SEQ ID NO: 2161506 - RNA, 19 nt, Artificial Sequence
  Description of Artificial Sequence: Synthetic oligonucleotide
  Sense strand starting at position 3005 of SEQ ID NO: 1882977
ucauuagaggcaugagacu

SEQ ID NO: 2161507 - RNA, 19 nt, Artificial Sequence
  Description of Artificial Sequence: Synthetic oligonucleotide
  Antisense strand to SEQ ID NO: 2161506
agucucaugccucuaauga

SEQ ID NO: 2161508 - RNA, 19 nt, Artificial Sequence
  Description of Artificial Sequence: Synthetic oligonucleotide
  Sense strand starting at position 3155 of SEQ ID NO: 1882977
uuggcaaaccuuuagugaa

SEQ ID NO: 2161509 - RNA, 19 nt, Artificial Sequence
  Description of Artificial Sequence: Synthetic oligonucleotide
  Antisense strand to SEQ ID NO: 2161508
uucacuaaagguuugccaa

SEQ ID NO: 2161510 - RNA, 19 nt, Artificial Sequence
  Description of Artificial Sequence: Synthetic oligonucleotide
  Sense strand starting at position 3228 of SEQ ID NO: 1882977
cuaauagccuugcugaaau

SEQ ID NO: 2161511 - RNA, 19 nt, Artificial Sequence
  Description of Artificial Sequence: Synthetic oligonucleotide
  Antisense strand to SEQ ID NO: 2161510
auuucagcaaggcuauuag

SEQ ID NO: 2161512 - RNA, 19 nt, Artificial Sequence
  Description of Artificial Sequence: Synthetic oligonucleotide
  Sense strand starting at position 3307 of SEQ ID NO: 1882977
auggccagauuccuagaaa

SEQ ID NO: 2161513 - RNA, 19 nt, Artificial Sequence
  Description of Artificial Sequence: Synthetic oligonucleotide
  Antisense strand to SEQ ID NO: 2161512
uuucuaggaaucuggccau

SEQ ID NO: 2161514 - RNA, 19 nt, Artificial Sequence
  Description of Artificial Sequence: Synthetic oligonucleotide
  Sense strand starting at position 3619 of SEQ ID NO: 1882977
uguggacucugauuccaac

SEQ ID NO: 2161515 - RNA, 19 nt, Artificial Sequence
  Description of Artificial Sequence: Synthetic oligonucleotide
  Antisense strand to SEQ ID NO: 2161514
guuggaaucagaguccaca

SEQ ID NO: 2161516 - RNA, 19 nt, Artificial Sequence
  Description of Artificial Sequence: Synthetic oligonucleotide
  Sense strand starting at position 159 of SEQ ID NO: 1882978
guauaccuuccuuggaaca

SEQ ID NO: 2161517 - RNA, 19 nt, Artificial Sequence
  Description of Artificial Sequence: Synthetic oligonucleotide
  Antisense strand to SEQ ID NO: 2161516
uguuccaaggaagguauac

SEQ ID NO: 2161518 - RNA, 19 nt, Artificial Sequence
  Description of Artificial Sequence: Synthetic oligonucleotide
  Sense strand starting at position 412 of SEQ ID NO: 1882978
gugcauagaugacuaacua

SEQ ID NO: 2161519 - RNA, 19 nt, Artificial Sequence
  Description of Artificial Sequence: Synthetic oligonucleotide
  Antisense strand to SEQ ID NO: 2161518
uaguuagucaucuaugcac

SEQ ID NO: 2161520 - RNA, 19 nt, Artificial Sequence
  Description of Artificial Sequence: Synthetic oligonucleotide
  Sense strand starting at position 544 of SEQ ID NO: 1882978
agaaacaguaagugguaaa

SEQ ID NO: 2161521 - RNA, 19 nt, Artificial Sequence
  Description of Artificial Sequence: Synthetic oligonucleotide
  Antisense strand to SEQ ID NO: 2161520
uuuaccacuuacuguuucu

SEQ ID NO: 2161522 - RNA, 19 nt, Artificial Sequence
  Description of Artificial Sequence: Synthetic oligonucleotide
  Sense strand starting at position 719 of SEQ ID NO: 1882978
gcauaccaucauuaguuua

SEQ ID NO: 2161523 - RNA, 19 nt, Artificial Sequence
  Description of Artificial Sequence: Synthetic oligonucleotide
  Antisense strand to SEQ ID NO: 2161522
uaaacuaaugaugguaugc

SEQ ID NO: 2161524 - RNA, 19 nt, Artificial Sequence
  Description of Artificial Sequence: Synthetic oligonucleotide
  Sense strand starting at position 1039 of SEQ ID NO: 1882978
guuugcuuugaagaugacu

SEQ ID NO: 2161525 - RNA, 19 nt, Artificial Sequence
  Description of Artificial Sequence: Synthetic oligonucleotide
  Antisense strand to SEQ ID NO: 2161524
agucaucuucaaagcaaac

SEQ ID NO: 2161526 - RNA, 19 nt, Artificial Sequence
  Description of Artificial Sequence: Synthetic oligonucleotide
  Sense strand starting at position 1227 of SEQ ID NO: 1882978
cguguagugcucccaguag

SEQ ID NO: 2161527 - RNA, 19 nt, Artificial Sequence
  Description of Artificial Sequence: Synthetic oligonucleotide
  Antisense strand to SEQ ID NO: 2161526
cuacugggagcacuacacg

SEQ ID NO: 2161528 - RNA, 19 nt, Artificial Sequence
  Description of Artificial Sequence: Synthetic oligonucleotide
  Sense strand starting at position 1245 of SEQ ID NO: 1882978
gcuuaagaaguagagaguu

SEQ ID NO: 2161529 - RNA, 19 nt, Artificial Sequence
  Description of Artificial Sequence: Synthetic oligonucleotide
  Antisense strand to SEQ ID NO: 2161528
aacucucuacuucuuaagc

SEQ ID NO: 2161530 - RNA, 19 nt, Artificial Sequence
  Description of Artificial Sequence: Synthetic oligonucleotide
  Sense strand starting at position 1275 of SEQ ID NO: 1882978
ggaagaaucacuggcagca

SEQ ID NO: 2161531 - RNA, 19 nt, Artificial Sequence
  Description of Artificial Sequence: Synthetic oligonucleotide
  Antisense strand to SEQ ID NO: 2161530
ugcugccagugauucuucc

SEQ ID NO: 2161532 - RNA, 19 nt, Artificial Sequence
  Description of Artificial Sequence: Synthetic oligonucleotide
  Sense strand starting at position 1342 of SEQ ID NO: 1882978
ugaaaugaguuucuaaugu

SEQ ID NO: 2161533 - RNA, 19 nt, Artificial Sequence
  Description of Artificial Sequence: Synthetic oligonucleotide
  Antisense strand to SEQ ID NO: 2161532
acauuagaaacucauuuca

SEQ ID NO: 2161534 - RNA, 19 nt, Artificial Sequence
  Description of Artificial Sequence: Synthetic oligonucleotide
  Sense strand starting at position 1351 of SEQ ID NO: 1882978
uuucuaauguaagucagaa

SEQ ID NO: 2161535 - RNA, 19 nt, Artificial Sequence
  Description of Artificial Sequence: Synthetic oligonucleotide
  Antisense strand to SEQ ID NO: 2161534
uucugacuuacauuagaaa

SEQ ID NO: 2161536 - RNA, 19 nt, Artificial Sequence
  Description of Artificial Sequence: Synthetic oligonucleotide
  Sense strand starting at position 1461 of SEQ ID NO: 1882978
gaguuaauccaaggauagc

SEQ ID NO: 2161537 - RNA, 19 nt, Artificial Sequence
  Description of Artificial Sequence: Synthetic oligonucleotide
  Antisense strand to SEQ ID NO: 2161536
gcuauccuuggauuaacuc

SEQ ID NO: 2161538 - RNA, 19 nt, Artificial Sequence
  Description of Artificial Sequence: Synthetic oligonucleotide
  Sense strand starting at position 1692 of SEQ ID NO: 1882978
gcccuaucuccgucuguau

SEQ ID NO: 2161539 - RNA, 19 nt, Artificial Sequence
  Description of Artificial Sequence: Synthetic oligonucleotide
  Antisense strand to SEQ ID NO: 2161538
auacagacggagauagggc

SEQ ID NO: 2161540 - RNA, 19 nt, Artificial Sequence
  Description of Artificial Sequence: Synthetic oligonucleotide
  Sense strand starting at position 1706 of SEQ ID NO: 1882978
uguauaucagacuagcaau

SEQ ID NO: 2161541 - RNA, 19 nt, Artificial Sequence
  Description of Artificial Sequence: Synthetic oligonucleotide
  Antisense strand to SEQ ID NO: 2161540
auugcuagucugauauaca

SEQ ID NO: 2161542 - RNA, 19 nt, Artificial Sequence
  Description of Artificial Sequence: Synthetic oligonucleotide
  Sense strand starting at position 1746 of SEQ ID NO: 1882978
agcaaauuaguaugacaag

SEQ ID NO: 2161543 - RNA, 19 nt, Artificial Sequence
  Description of Artificial Sequence: Synthetic oligonucleotide
  Antisense strand to SEQ ID NO: 2161542
cuugucauacuaauuugcu

SEQ ID NO: 2161544 - RNA, 19 nt, Artificial Sequence
  Description of Artificial Sequence: Synthetic oligonucleotide
  Sense strand starting at position 1844 of SEQ ID NO: 1882978
uggauuaggcucugacaac

SEQ ID NO: 2161545 - RNA, 19 nt, Artificial Sequence
  Description of Artificial Sequence: Synthetic oligonucleotide
  Antisense strand to SEQ ID NO: 2161544
guugucagagccuaaucca

SEQ ID NO: 2161546 - RNA, 19 nt, Artificial Sequence
  Description of Artificial Sequence: Synthetic oligonucleotide
  Sense strand starting at position 1986 of SEQ ID NO: 1882978
ucauaagaguucuuugaac

SEQ ID NO: 2161547 - RNA, 19 nt, Artificial Sequence
  Description of Artificial Sequence: Synthetic oligonucleotide
  Antisense strand to SEQ ID NO: 2161546
guucaaagaacucuuauga

SEQ ID NO: 2161548 - RNA, 19 nt, Artificial Sequence
  Description of Artificial Sequence: Synthetic oligonucleotide
  Sense strand starting at position 1988 of SEQ ID NO: 1882978
auaagaguucuuugaacca

SEQ ID NO: 2161549 - RNA, 19 nt, Artificial Sequence
  Description of Artificial Sequence: Synthetic oligonucleotide
  Antisense strand to SEQ ID NO: 2161548
ugguucaaagaacucuuau

SEQ ID NO: 2161550 - RNA, 19 nt, Artificial Sequence
  Description of Artificial Sequence: Synthetic oligonucleotide
  Sense strand starting at position 2067 of SEQ ID NO: 1882978
uagagaagucauggguaau

SEQ ID NO: 2161551 - RNA, 19 nt, Artificial Sequence
  Description of Artificial Sequence: Synthetic oligonucleotide
  Antisense strand to SEQ ID NO: 2161550
auuacccaugacuucucua

SEQ ID NO: 2161552 - RNA, 19 nt, Artificial Sequence
  Description of Artificial Sequence: Synthetic oligonucleotide
  Sense strand starting at position 2437 of SEQ ID NO: 1882978
gcuagaauuuguuugcuua

SEQ ID NO: 2161553 - RNA, 19 nt, Artificial Sequence
  Description of Artificial Sequence: Synthetic oligonucleotide
  Antisense strand to SEQ ID NO: 2161552
uaagcaaacaaauucuagc

SEQ ID NO: 2161554 - RNA, 19 nt, Artificial Sequence
  Description of Artificial Sequence: Synthetic oligonucleotide
  Sense strand starting at position 2438 of SEQ ID NO: 1882978
cuagaauuuguuugcuuau

SEQ ID NO: 2161555 - RNA, 19 nt, Artificial Sequence
  Description of Artificial Sequence: Synthetic oligonucleotide
  Antisense strand to SEQ ID NO: 2161554
auaagcaaacaaauucuag

SEQ ID NO: 2161556 - RNA, 19 nt, Artificial Sequence
  Description of Artificial Sequence: Synthetic oligonucleotide
  Sense strand starting at position 2522 of SEQ ID NO: 1882978
gaaugaguauccuuauaga

SEQ ID NO: 2161557 - RNA, 19 nt, Artificial Sequence
  Description of Artificial Sequence: Synthetic oligonucleotide
  Antisense strand to SEQ ID NO: 2161556
ucuauaaggauacucauuc

SEQ ID NO: 2161558 - RNA, 19 nt, Artificial Sequence
  Description of Artificial Sequence: Synthetic oligonucleotide
  Sense strand starting at position 2740 of SEQ ID NO: 1882978
cgaauagaauuggaaauuu

SEQ ID NO: 2161559 - RNA, 19 nt, Artificial Sequence
  Description of Artificial Sequence: Synthetic oligonucleotide
  Antisense strand to SEQ ID NO: 2161558
aaauuuccaauucuauucg

SEQ ID NO: 2161560 - RNA, 19 nt, Artificial Sequence
  Description of Artificial Sequence: Synthetic oligonucleotide
  Sense strand starting at position 2781 of SEQ ID NO: 1882978
aaucuaaagguuggaaagu

SEQ ID NO: 2161561 - RNA, 19 nt, Artificial Sequence
  Description of Artificial Sequence: Synthetic oligonucleotide
  Antisense strand to SEQ ID NO: 2161560
acuuuccaaccuuuagauu

SEQ ID NO: 2161562 - RNA, 19 nt, Artificial Sequence
  Description of Artificial Sequence: Synthetic oligonucleotide
  Sense strand starting at position 2811 of SEQ ID NO: 1882978
aucugauaucgucacucau

SEQ ID NO: 2161563 - RNA, 19 nt, Artificial Sequence
  Description of Artificial Sequence: Synthetic oligonucleotide
  Antisense strand to SEQ ID NO: 2161562
augagugacgauaucagau

SEQ ID NO: 2161564 - RNA, 19 nt, Artificial Sequence
  Description of Artificial Sequence: Synthetic oligonucleotide
  Sense strand starting at position 2859 of SEQ ID NO: 1882978
aggagcuuucuauaucuaa

SEQ ID NO: 2161565 - RNA, 19 nt, Artificial Sequence
  Description of Artificial Sequence: Synthetic oligonucleotide
  Antisense strand to SEQ ID NO: 2161564
uuagauauagaaagcuccu

SEQ ID NO: 2161566 - RNA, 19 nt, Artificial Sequence
  Description of Artificial Sequence: Synthetic oligonucleotide
  Sense strand starting at position 2883 of SEQ ID NO: 1882978
uuugacuuccacgaaguaa

SEQ ID NO: 2161567 - RNA, 19 nt, Artificial Sequence
  Description of Artificial Sequence: Synthetic oligonucleotide
  Antisense strand to SEQ ID NO: 2161566
uuacuucguggaagucaaa

SEQ ID NO: 2161568 - RNA, 19 nt, Artificial Sequence
  Description of Artificial Sequence: Synthetic oligonucleotide
  Sense strand starting at position 2902 of SEQ ID NO: 1882978
agcagugauguggacaaga

SEQ ID NO: 2161569 - RNA, 19 nt, Artificial Sequence
  Description of Artificial Sequence: Synthetic oligonucleotide
  Antisense strand to SEQ ID NO: 2161568
ucuuguccacaucacugcu

SEQ ID NO: 2161570 - RNA, 19 nt, Artificial Sequence
  Description of Artificial Sequence: Synthetic oligonucleotide
  Sense strand starting at position 2938 of SEQ ID NO: 1882978
uugugcugagauuauuaau

SEQ ID NO: 2161571 - RNA, 19 nt, Artificial Sequence
  Description of Artificial Sequence: Synthetic oligonucleotide
  Antisense strand to SEQ ID NO: 2161570
auuaauaaucucagcacaa

SEQ ID NO: 2161572 - RNA, 19 nt, Artificial Sequence
  Description of Artificial Sequence: Synthetic oligonucleotide
  Sense strand starting at position 3173 of SEQ ID NO: 1882978
cugagucauaguuagagua

SEQ ID NO: 2161573 - RNA, 19 nt, Artificial Sequence
  Description of Artificial Sequence: Synthetic oligonucleotide
  Antisense strand to SEQ ID NO: 2161572
uacucuaacuaugacucag

SEQ ID NO: 2161574 - RNA, 19 nt, Artificial Sequence
  Description of Artificial Sequence: Synthetic oligonucleotide
  Sense strand starting at position 3220 of SEQ ID NO: 1882978
gucagaugacugggcuaua

SEQ ID NO: 2161575 - RNA, 19 nt, Artificial Sequence
  Description of Artificial Sequence: Synthetic oligonucleotide
  Antisense strand to SEQ ID NO: 2161574
uauagcccagucaucugac

SEQ ID NO: 2161576 - RNA, 19 nt, Artificial Sequence
  Description of Artificial Sequence: Synthetic oligonucleotide
  Sense strand starting at position 3221 of SEQ ID NO: 1882978
ucagaugacugggcuauau

SEQ ID NO: 2161577 - RNA, 19 nt, Artificial Sequence
  Description of Artificial Sequence: Synthetic oligonucleotide
  Antisense strand to SEQ ID NO: 2161576
auauagcccagucaucuga

SEQ ID NO: 2161578 - RNA, 19 nt, Artificial Sequence
  Description of Artificial Sequence: Synthetic oligonucleotide
  Sense strand starting at position 3273 of SEQ ID NO: 1882978
uagguaaguuaccuaauga

SEQ ID NO: 2161579 - RNA, 19 nt, Artificial Sequence
  Description of Artificial Sequence: Synthetic oligonucleotide
  Antisense strand to SEQ ID NO: 2161578
ucauuagguaacuuaccua

SEQ ID NO: 2161580 - RNA, 19 nt, Artificial Sequence
  Description of Artificial Sequence: Synthetic oligonucleotide
  Sense strand starting at position 3462 of SEQ ID NO: 1882978
augcuaugugcuuuacugu

SEQ ID NO: 2161581 - RNA, 19 nt, Artificial Sequence
  Description of Artificial Sequence: Synthetic oligonucleotide
  Antisense strand to SEQ ID NO: 2161580
acaguaaagcacauagcau

SEQ ID NO: 2161582 - RNA, 19 nt, Artificial Sequence
  Description of Artificial Sequence: Synthetic oligonucleotide
  Sense strand starting at position 3480 of SEQ ID NO: 1882978
ugugcuaaaccuuaaagag

SEQ ID NO: 2161583 - RNA, 19 nt, Artificial Sequence
  Description of Artificial Sequence: Synthetic oligonucleotide
  Antisense strand to SEQ ID NO: 2161582
cucuuuaagguuuagcaca

SEQ ID NO: 2161584 - RNA, 19 nt, Artificial Sequence
  Description of Artificial Sequence: Synthetic oligonucleotide
  Sense strand starting at position 3606 of SEQ ID NO: 1882978
acaacagacguugaaugua

SEQ ID NO: 2161585 - RNA, 19 nt, Artificial Sequence
  Description of Artificial Sequence: Synthetic oligonucleotide
  Antisense strand to SEQ ID NO: 2161584
uacauucaacgucuguugu

SEQ ID NO: 2161586 - RNA, 19 nt, Artificial Sequence
  Description of Artificial Sequence: Synthetic oligonucleotide
  Sense strand starting at position 3650 of SEQ ID NO: 1882978
gucugaacauccuuaggaa

SEQ ID NO: 2161587 - RNA, 19 nt, Artificial Sequence
  Description of Artificial Sequence: Synthetic oligonucleotide
  Antisense strand to SEQ ID NO: 2161586
uuccuaaggauguucagac

SEQ ID NO: 2161588 - RNA, 19 nt, Artificial Sequence
  Description of Artificial Sequence: Synthetic oligonucleotide
  Sense strand starting at position 3680 of SEQ ID NO: 1882978
cuaagaauugguggguuaa

SEQ ID NO: 2161589 - RNA, 19 nt, Artificial Sequence
  Description of Artificial Sequence: Synthetic oligonucleotide
  Antisense strand to SEQ ID NO: 2161588
uuaacccaccaauucuuag

SEQ ID NO: 2161590 - RNA, 19 nt, Artificial Sequence
  Description of Artificial Sequence: Synthetic oligonucleotide
  Sense strand starting at position 3681 of SEQ ID NO: 1882978
uaagaauugguggguuaau

SEQ ID NO: 2161591 - RNA, 19 nt, Artificial Sequence
  Description of Artificial Sequence: Synthetic oligonucleotide
  Antisense strand to SEQ ID NO: 2161590
auuaacccaccaauucuua

SEQ ID NO: 2161592 - RNA, 19 nt, Artificial Sequence
  Description of Artificial Sequence: Synthetic oligonucleotide
  Sense strand starting at position 3762 of SEQ ID NO: 1882978
uuuguauuacaacaaggua

SEQ ID NO: 2161593 - RNA, 19 nt, Artificial Sequence
  Description of Artificial Sequence: Synthetic oligonucleotide
  Antisense strand to SEQ ID NO: 2161592
uaccuuguuguaauacaaa

SEQ ID NO: 2161594 - RNA, 19 nt, Artificial Sequence
  Description of Artificial Sequence: Synthetic oligonucleotide
  Sense strand starting at position 3957 of SEQ ID NO: 1882978
ucuuuaucaguggagcuua

SEQ ID NO: 2161595 - RNA, 19 nt, Artificial Sequence
  Description of Artificial Sequence: Synthetic oligonucleotide
  Antisense strand to SEQ ID NO: 2161594
uaagcuccacugauaaaga

SEQ ID NO: 2161596 - RNA, 19 nt, Artificial Sequence
  Description of Artificial Sequence: Synthetic oligonucleotide
  Sense strand starting at position 56 of SEQ ID NO: 1882979
gcuauacucccuggucaga

SEQ ID NO: 2161597 - RNA, 19 nt, Artificial Sequence
  Description of Artificial Sequence: Synthetic oligonucleotide
  Antisense strand to SEQ ID NO: 2161596
ucugaccagggaguauagc

SEQ ID NO: 2161598 - RNA, 19 nt, Artificial Sequence
  Description of Artificial Sequence: Synthetic oligonucleotide
  Sense strand starting at position 90 of SEQ ID NO: 1882979
guucccagacuuugauauu

SEQ ID NO: 2161599 - RNA, 19 nt, Artificial Sequence
  Description of Artificial Sequence: Synthetic oligonucleotide
  Antisense strand to SEQ ID NO: 2161598
aauaucaaagucugggaac

SEQ ID NO: 2161600 - RNA, 19 nt, Artificial Sequence
  Description of Artificial Sequence: Synthetic oligonucleotide
  Sense strand starting at position 204 of SEQ ID NO: 1882979
gcuaccugccagcauaaua

SEQ ID NO: 2161601 - RNA, 19 nt, Artificial Sequence
  Description of Artificial Sequence: Synthetic oligonucleotide
  Antisense strand to SEQ ID NO: 2161600
uauuaugcuggcagguagc

SEQ ID NO: 2161602 - RNA, 19 nt, Artificial Sequence
  Description of Artificial Sequence: Synthetic oligonucleotide
  Sense strand starting at position 282 of SEQ ID NO: 1882979
uuugcuaacuccuugguaa

SEQ ID NO: 2161603 - RNA, 19 nt, Artificial Sequence
  Description of Artificial Sequence: Synthetic oligonucleotide
  Antisense strand to SEQ ID NO: 2161602
uuaccaaggaguuagcaaa

SEQ ID NO: 2161604 - RNA, 19 nt, Artificial Sequence
  Description of Artificial Sequence: Synthetic oligonucleotide
  Sense strand starting at position 283 of SEQ ID NO: 1882979
uugcuaacuccuugguaac

SEQ ID NO: 2161605 - RNA, 19 nt, Artificial Sequence
  Description of Artificial Sequence: Synthetic oligonucleotide
  Antisense strand to SEQ ID NO: 2161604
guuaccaaggaguuagcaa

SEQ ID NO: 2161606 - RNA, 19 nt, Artificial Sequence
  Description of Artificial Sequence: Synthetic oligonucleotide
  Sense strand starting at position 285 of SEQ ID NO: 1882979
gcuaacuccuugguaacuu

SEQ ID NO: 2161607 - RNA, 19 nt, Artificial Sequence
  Description of Artificial Sequence: Synthetic oligonucleotide
  Antisense strand to SEQ ID NO: 2161606
aaguuaccaaggaguuagc

SEQ ID NO: 2161608 - RNA, 19 nt, Artificial Sequence
  Description of Artificial Sequence: Synthetic oligonucleotide
  Sense strand starting at position 326 of SEQ ID NO: 1882979
ugaugaaaguggcugacau

SEQ ID NO: 2161609 - RNA, 19 nt, Artificial Sequence
  Description of Artificial Sequence: Synthetic oligonucleotide
  Antisense strand to SEQ ID NO: 2161608
augucagccacuuucauca

SEQ ID NO: 2161610 - RNA, 19 nt, Artificial Sequence
  Description of Artificial Sequence: Synthetic oligonucleotide
  Sense strand starting at position 327 of SEQ ID NO: 1882979
gaugaaaguggcugacaua

SEQ ID NO: 2161611 - RNA, 19 nt, Artificial Sequence
  Description of Artificial Sequence: Synthetic oligonucleotide
  Antisense strand to SEQ ID NO: 2161610
uaugucagccacuuucauc

SEQ ID NO: 2161612 - RNA, 19 nt, Artificial Sequence
  Description of Artificial Sequence: Synthetic oligonucleotide
  Sense strand starting at position 483 of SEQ ID NO: 1882979
gaguuaauauaaccagugu

SEQ ID NO: 2161613 - RNA, 19 nt, Artificial Sequence
  Description of Artificial Sequence: Synthetic oligonucleotide
  Antisense strand to SEQ ID NO: 2161612
acacugguuauauuaacuc

SEQ ID NO: 2161614 - RNA, 19 nt, Artificial Sequence
  Description of Artificial Sequence: Synthetic oligonucleotide
  Sense strand starting at position 791 of SEQ ID NO: 1882979
gaguccugcccugacuaca

SEQ ID NO: 2161615 - RNA, 19 nt, Artificial Sequence
  Description of Artificial Sequence: Synthetic oligonucleotide
  Antisense strand to SEQ ID NO: 2161614
uguagucagggcaggacuc

SEQ ID NO: 2161616 - RNA, 19 nt, Artificial Sequence
  Description of Artificial Sequence: Synthetic oligonucleotide
  Sense strand starting at position 809 of SEQ ID NO: 1882979
aggacuaguuucucccauu

SEQ ID NO: 2161617 - RNA, 19 nt, Artificial Sequence
  Description of Artificial Sequence: Synthetic oligonucleotide
  Antisense strand to SEQ ID NO: 2161616
aaugggagaaacuaguccu

SEQ ID NO: 2161618 - RNA, 19 nt, Artificial Sequence
  Description of Artificial Sequence: Synthetic oligonucleotide
  Sense strand starting at position 810 of SEQ ID NO: 1882979
ggacuaguuucucccauuc

SEQ ID NO: 2161619 - RNA, 19 nt, Artificial Sequence
  Description of Artificial Sequence: Synthetic oligonucleotide
  Antisense strand to SEQ ID NO: 2161618
gaaugggagaaacuagucc

SEQ ID NO: 2161620 - RNA, 19 nt, Artificial Sequence
  Description of Artificial Sequence: Synthetic oligonucleotide
  Sense strand starting at position 832 of SEQ ID NO: 1882979
ccuucuccaggauaaaguu

SEQ ID NO: 2161621 - RNA, 19 nt, Artificial Sequence
  Description of Artificial Sequence: Synthetic oligonucleotide
  Antisense strand to SEQ ID NO: 2161620
aacuuuauccuggagaagg

SEQ ID NO: 2161622 - RNA, 19 nt, Artificial Sequence
  Description of Artificial Sequence: Synthetic oligonucleotide
  Sense strand starting at position 840 of SEQ ID NO: 1882979
aggauaaaguuccucauuc

SEQ ID NO: 2161623 - RNA, 19 nt, Artificial Sequence
  Description of Artificial Sequence: Synthetic oligonucleotide
  Antisense strand to SEQ ID NO: 2161622
gaaugaggaacuuuauccu

SEQ ID NO: 2161624 - RNA, 19 nt, Artificial Sequence
  Description of Artificial Sequence: Synthetic oligonucleotide
  Sense strand starting at position 877 of SEQ ID NO: 1882979
uaugguuuagguggacaga

SEQ ID NO: 2161625 - RNA, 19 nt, Artificial Sequence
  Description of Artificial Sequence: Synthetic oligonucleotide
  Antisense strand to SEQ ID NO: 2161624
ucuguccaccuaaaccaua

SEQ ID NO: 2161626 - RNA, 19 nt, Artificial Sequence
  Description of Artificial Sequence: Synthetic oligonucleotide
  Sense strand starting at position 890 of SEQ ID NO: 1882979
gacagagauuccuuuggug

SEQ ID NO: 2161627 - RNA, 19 nt, Artificial Sequence
  Description of Artificial Sequence: Synthetic oligonucleotide
  Antisense strand to SEQ ID NO: 2161626
caccaaaggaaucucuguc

SEQ ID NO: 2161628 - RNA, 19 nt, Artificial Sequence
  Description of Artificial Sequence: Synthetic oligonucleotide
  Sense strand starting at position 892 of SEQ ID NO: 1882979
cagagauuccuuuggugca

SEQ ID NO: 2161629 - RNA, 19 nt, Artificial Sequence
  Description of Artificial Sequence: Synthetic oligonucleotide
  Antisense strand to SEQ ID NO: 2161628
ugcaccaaaggaaucucug

SEQ ID NO: 2161630 - RNA, 19 nt, Artificial Sequence
  Description of Artificial Sequence: Synthetic oligonucleotide
  Sense strand starting at position 1095 of SEQ ID NO: 1882979
agucucuucccugagccua

SEQ ID NO: 2161631 - RNA, 19 nt, Artificial Sequence
  Description of Artificial Sequence: Synthetic oligonucleotide
  Antisense strand to SEQ ID NO: 2161630
uaggcucagggaagagacu

SEQ ID NO: 2161632 - RNA, 19 nt, Artificial Sequence
  Description of Artificial Sequence: Synthetic oligonucleotide
  Sense strand starting at position 1491 of SEQ ID NO: 1882979
agagguuuccugcagccga

SEQ ID NO: 2161633 - RNA, 19 nt, Artificial Sequence
  Description of Artificial Sequence: Synthetic oligonucleotide
  Antisense strand to SEQ ID NO: 2161632
ucggcugcaggaaaccucu

SEQ ID NO: 2161634 - RNA, 19 nt, Artificial Sequence
  Description of Artificial Sequence: Synthetic oligonucleotide
  Sense strand starting at position 1518 of SEQ ID NO: 1882979
cagcuaaucugggucagga

SEQ ID NO: 2161635 - RNA, 19 nt, Artificial Sequence
  Description of Artificial Sequence: Synthetic oligonucleotide
  Antisense strand to SEQ ID NO: 2161634
uccugacccagauuagcug

SEQ ID NO: 2161636 - RNA, 19 nt, Artificial Sequence
  Description of Artificial Sequence: Synthetic oligonucleotide
  Sense strand starting at position 1952 of SEQ ID NO: 1882979
agagacuucgcugggcaga

SEQ ID NO: 2161637 - RNA, 19 nt, Artificial Sequence
  Description of Artificial Sequence: Synthetic oligonucleotide
  Antisense strand to SEQ ID NO: 2161636
ucugcccagcgaagucucu

SEQ ID NO: 2161638 - RNA, 19 nt, Artificial Sequence
  Description of Artificial Sequence: Synthetic oligonucleotide
  Sense strand starting at position 2206 of SEQ ID NO: 1882979
gucuguucggcagccuuua

SEQ ID NO: 2161639 - RNA, 19 nt, Artificial Sequence
  Description of Artificial Sequence: Synthetic oligonucleotide
  Antisense strand to SEQ ID NO: 2161638
uaaaggcugccgaacagac

SEQ ID NO: 2161640 - RNA, 19 nt, Artificial Sequence
  Description of Artificial Sequence: Synthetic oligonucleotide
  Sense strand starting at position 2208 of SEQ ID NO: 1882979
cuguucggcagccuuuaau

SEQ ID NO: 2161641 - RNA, 19 nt, Artificial Sequence
  Description of Artificial Sequence: Synthetic oligonucleotide
  Antisense strand to SEQ ID NO: 2161640
auuaaaggcugccgaacag

SEQ ID NO: 2161642 - RNA, 19 nt, Artificial Sequence
  Description of Artificial Sequence: Synthetic oligonucleotide
  Sense strand starting at position 2214 of SEQ ID NO: 1882979
ggcagccuuuaaucggaga

SEQ ID NO: 2161643 - RNA, 19 nt, Artificial Sequence
  Description of Artificial Sequence: Synthetic oligonucleotide
  Antisense strand to SEQ ID NO: 2161642
ucuccgauuaaaggcugcc

SEQ ID NO: 2161644 - RNA, 19 nt, Artificial Sequence
  Description of Artificial Sequence: Synthetic oligonucleotide
  Sense strand starting at position 2219 of SEQ ID NO: 1882979
ccuuuaaucggagacguca

SEQ ID NO: 2161645 - RNA, 19 nt, Artificial Sequence
  Description of Artificial Sequence: Synthetic oligonucleotide
  Antisense strand to SEQ ID NO: 2161644
ugacgucuccgauuaaagg

SEQ ID NO: 2161646 - RNA, 19 nt, Artificial Sequence
  Description of Artificial Sequence: Synthetic oligonucleotide
  Sense strand starting at position 2482 of SEQ ID NO: 1882979
guuaguggugugcagagau

SEQ ID NO: 2161647 - RNA, 19 nt, Artificial Sequence
  Description of Artificial Sequence: Synthetic oligonucleotide
  Antisense strand to SEQ ID NO: 2161646
aucucugcacaccacuaac

SEQ ID NO: 2161648 - RNA, 19 nt, Artificial Sequence
  Description of Artificial Sequence: Synthetic oligonucleotide
  Sense strand starting at position 2492 of SEQ ID NO: 1882979
ugcagagauuccguaagag

SEQ ID NO: 2161649 - RNA, 19 nt, Artificial Sequence
  Description of Artificial Sequence: Synthetic oligonucleotide
  Antisense strand to SEQ ID NO: 2161648
cucuuacggaaucucugca

SEQ ID NO: 2161650 - RNA, 19 nt, Artificial Sequence
  Description of Artificial Sequence: Synthetic oligonucleotide
  Sense strand starting at position 2535 of SEQ ID NO: 1882979
gauuccaggucccuuagau

SEQ ID NO: 2161651 - RNA, 19 nt, Artificial Sequence
  Description of Artificial Sequence: Synthetic oligonucleotide
  Antisense strand to SEQ ID NO: 2161650
aucuaagggaccuggaauc

SEQ ID NO: 2161652 - RNA, 19 nt, Artificial Sequence
  Description of Artificial Sequence: Synthetic oligonucleotide
  Sense strand starting at position 2733 of SEQ ID NO: 1882979
cuaaaugaguuacuguuau

SEQ ID NO: 2161653 - RNA, 19 nt, Artificial Sequence
  Description of Artificial Sequence: Synthetic oligonucleotide
  Antisense strand to SEQ ID NO: 2161652
auaacaguaacucauuuag

SEQ ID NO: 2161654 - RNA, 19 nt, Artificial Sequence
  Description of Artificial Sequence: Synthetic oligonucleotide
  Sense strand starting at position 2739 of SEQ ID NO: 1882979
gaguuacuguuaucuaaag

SEQ ID NO: 2161655 - RNA, 19 nt, Artificial Sequence
  Description of Artificial Sequence: Synthetic oligonucleotide
  Antisense strand to SEQ ID NO: 2161654
cuuuagauaacaguaacuc

SEQ ID NO: 2161656 - RNA, 19 nt, Artificial Sequence
  Description of Artificial Sequence: Synthetic oligonucleotide
  Sense strand starting at position 2745 of SEQ ID NO: 1882979
cuguuaucuaaagcguguu

SEQ ID NO: 2161657 - RNA, 19 nt, Artificial Sequence
  Description of Artificial Sequence: Synthetic oligonucleotide
  Antisense strand to SEQ ID NO: 2161656
aacacgcuuuagauaacag

SEQ ID NO: 2161658 - RNA, 19 nt, Artificial Sequence
  Description of Artificial Sequence: Synthetic oligonucleotide
  Sense strand starting at position 2750 of SEQ ID NO: 1882979
aucuaaagcguguuugugu

SEQ ID NO: 2161659 - RNA, 19 nt, Artificial Sequence
  Description of Artificial Sequence: Synthetic oligonucleotide
  Antisense strand to SEQ ID NO: 2161658
acacaaacacgcuuuagau

SEQ ID NO: 2161660 - RNA, 19 nt, Artificial Sequence
  Description of Artificial Sequence: Synthetic oligonucleotide
  Sense strand starting at position 2909 of SEQ ID NO: 1882979
cugcgcuuggucucacuaa

SEQ ID NO: 2161661 - RNA, 19 nt, Artificial Sequence
  Description of Artificial Sequence: Synthetic oligonucleotide
  Antisense strand to SEQ ID NO: 2161660
uuagugagaccaagcgcag

SEQ ID NO: 2161662 - RNA, 19 nt, Artificial Sequence
  Description of Artificial Sequence: Synthetic oligonucleotide
  Sense strand starting at position 2962 of SEQ ID NO: 1882979
ccguacaaguauucuuuaa

SEQ ID NO: 2161663 - RNA, 19 nt, Artificial Sequence
  Description of Artificial Sequence: Synthetic oligonucleotide
  Antisense strand to SEQ ID NO: 2161662
uuaaagaauacuuguacgg

SEQ ID NO: 2161664 - RNA, 19 nt, Artificial Sequence
  Description of Artificial Sequence: Synthetic oligonucleotide
  Sense strand starting at position 2964 of SEQ ID NO: 1882979
guacaaguauucuuuaacu

SEQ ID NO: 2161665 - RNA, 19 nt, Artificial Sequence
  Description of Artificial Sequence: Synthetic oligonucleotide
  Antisense strand to SEQ ID NO: 2161664
aguuaaagaauacuuguac

SEQ ID NO: 2161666 - RNA, 19 nt, Artificial Sequence
  Description of Artificial Sequence: Synthetic oligonucleotide
  Sense strand starting at position 3034 of SEQ ID NO: 1882979
ugaagucccacauggauga

SEQ ID NO: 2161667 - RNA, 19 nt, Artificial Sequence
  Description of Artificial Sequence: Synthetic oligonucleotide
  Antisense strand to SEQ ID NO: 2161666
ucauccaugugggacuuca

SEQ ID NO: 2161668 - RNA, 19 nt, Artificial Sequence
  Description of Artificial Sequence: Synthetic oligonucleotide
  Sense strand starting at position 3219 of SEQ ID NO: 1882979
guuucagagugugugauaa

SEQ ID NO: 2161669 - RNA, 19 nt, Artificial Sequence
  Description of Artificial Sequence: Synthetic oligonucleotide
  Antisense strand to SEQ ID NO: 2161668
uuaucacacacucugaaac

SEQ ID NO: 2161670 - RNA, 19 nt, Artificial Sequence
  Description of Artificial Sequence: Synthetic oligonucleotide
  Sense strand starting at position 3230 of SEQ ID NO: 1882979
ugugauaauuaagugcaua

SEQ ID NO: 2161671 - RNA, 19 nt, Artificial Sequence
  Description of Artificial Sequence: Synthetic oligonucleotide
  Antisense strand to SEQ ID NO: 2161670
uaugcacuuaauuaucaca

SEQ ID NO: 2161672 - RNA, 19 nt, Artificial Sequence
  Description of Artificial Sequence: Synthetic oligonucleotide
  Sense strand starting at position 3730 of SEQ ID NO: 1882979
cagggagccauuggaguuu

SEQ ID NO: 2161673 - RNA, 19 nt, Artificial Sequence
  Description of Artificial Sequence: Synthetic oligonucleotide
  Antisense strand to SEQ ID NO: 2161672
aaacuccaauggcucccug

SEQ ID NO: 2161674 - RNA, 19 nt, Artificial Sequence
  Description of Artificial Sequence: Synthetic oligonucleotide
  Sense strand starting at position 3758 of SEQ ID NO: 1882979
aaaguaauguggucugauu

SEQ ID NO: 2161675 - RNA, 19 nt, Artificial Sequence
  Description of Artificial Sequence: Synthetic oligonucleotide
  Antisense strand to SEQ ID NO: 2161674
aaucagaccacauuacuuu

SEQ ID NO: 2161676 - RNA, 19 nt, Artificial Sequence
  Description of Artificial Sequence: Synthetic oligonucleotide
  Sense strand starting at position 221 of SEQ ID NO: 1882981
uuugaugcuugaucacuaa

SEQ ID NO: 2161677 - RNA, 19 nt, Artificial Sequence
  Description of Artificial Sequence: Synthetic oligonucleotide
  Antisense strand to SEQ ID NO: 2161676
uuagugaucaagcaucaaa

SEQ ID NO: 2161678 - RNA, 19 nt, Artificial Sequence
  Description of Artificial Sequence: Synthetic oligonucleotide
  Sense strand starting at position 284 of SEQ ID NO: 1882981
gguguucgccaugcuaaca

SEQ ID NO: 2161679 - RNA, 19 nt, Artificial Sequence
  Description of Artificial Sequence: Synthetic oligonucleotide
  Antisense strand to SEQ ID NO: 2161678
uguuagcauggcgaacacc

SEQ ID NO: 2161680 - RNA, 19 nt, Artificial Sequence
  Description of Artificial Sequence: Synthetic oligonucleotide
  Sense strand starting at position 317 of SEQ ID NO: 1882981
gguucucacucaucugauu

SEQ ID NO: 2161681 - RNA, 19 nt, Artificial Sequence
  Description of Artificial Sequence: Synthetic oligonucleotide
  Antisense strand to SEQ ID NO: 2161680
aaucagaugagugagaacc

SEQ ID NO: 2161682 - RNA, 19 nt, Artificial Sequence
  Description of Artificial Sequence: Synthetic oligonucleotide
  Sense strand starting at position 329 of SEQ ID NO: 1882981
ucugauuggcccuaaguaa

SEQ ID NO: 2161683 - RNA, 19 nt, Artificial Sequence
  Description of Artificial Sequence: Synthetic oligonucleotide
  Antisense strand to SEQ ID NO: 2161682
uuacuuagggccaaucaga

SEQ ID NO: 2161684 - RNA, 19 nt, Artificial Sequence
  Description of Artificial Sequence: Synthetic oligonucleotide
  Sense strand starting at position 364 of SEQ ID NO: 1882981
ggcccaaaucccuaaagca

SEQ ID NO: 2161685 - RNA, 19 nt, Artificial Sequence
  Description of Artificial Sequence: Synthetic oligonucleotide
  Antisense strand to SEQ ID NO: 2161684
ugcuuuagggauuugggcc

SEQ ID NO: 2161686 - RNA, 19 nt, Artificial Sequence
  Description of Artificial Sequence: Synthetic oligonucleotide
  Sense strand starting at position 406 of SEQ ID NO: 1882981
cuguguacaugguugauaa

SEQ ID NO: 2161687 - RNA, 19 nt, Artificial Sequence
  Description of Artificial Sequence: Synthetic oligonucleotide
  Antisense strand to SEQ ID NO: 2161686
uuaucaaccauguacacag

SEQ ID NO: 2161688 - RNA, 19 nt, Artificial Sequence
  Description of Artificial Sequence: Synthetic oligonucleotide
  Sense strand starting at position 482 of SEQ ID NO: 1882981
uuaacuuuccauggugagu

SEQ ID NO: 2161689 - RNA, 19 nt, Artificial Sequence
  Description of Artificial Sequence: Synthetic oligonucleotide
  Antisense strand to SEQ ID NO: 2161688
acucaccauggaaaguuaa

SEQ ID NO: 2161690 - RNA, 19 nt, Artificial Sequence
  Description of Artificial Sequence: Synthetic oligonucleotide
  Sense strand starting at position 535 of SEQ ID NO: 1882981
ggaagaaguuucccuguuc

SEQ ID NO: 2161691 - RNA, 19 nt, Artificial Sequence
  Description of Artificial Sequence: Synthetic oligonucleotide
  Antisense strand to SEQ ID NO: 2161690
gaacagggaaacuucuucc

SEQ ID NO: 2161692 - RNA, 19 nt, Artificial Sequence
  Description of Artificial Sequence: Synthetic oligonucleotide
  Sense strand starting at position 536 of SEQ ID NO: 1882981
gaagaaguuucccuguucu

SEQ ID NO: 2161693 - RNA, 19 nt, Artificial Sequence
  Description of Artificial Sequence: Synthetic oligonucleotide
  Antisense strand to SEQ ID NO: 2161692
agaacagggaaacuucuuc

SEQ ID NO: 2161694 - RNA, 19 nt, Artificial Sequence
  Description of Artificial Sequence: Synthetic oligonucleotide
  Sense strand starting at position 635 of SEQ ID NO: 1882981
aauagucccugggcaauua

SEQ ID NO: 2161695 - RNA, 19 nt, Artificial Sequence
  Description of Artificial Sequence: Synthetic oligonucleotide
  Antisense strand to SEQ ID NO: 2161694
uaauugcccagggacuauu

SEQ ID NO: 2161696 - RNA, 19 nt, Artificial Sequence
  Description of Artificial Sequence: Synthetic oligonucleotide
  Sense strand starting at position 689 of SEQ ID NO: 1882981
ugagcuuuccuggagcacu

SEQ ID NO: 2161697 - RNA, 19 nt, Artificial Sequence
  Description of Artificial Sequence: Synthetic oligonucleotide
  Antisense strand to SEQ ID NO: 2161696
agugcuccaggaaagcuca

SEQ ID NO: 2161698 - RNA, 19 nt, Artificial Sequence
  Description of Artificial Sequence: Synthetic oligonucleotide
  Sense strand starting at position 739 of SEQ ID NO: 1882981
ggcaguaagaagcagagau

SEQ ID NO: 2161699 - RNA, 19 nt, Artificial Sequence
  Description of Artificial Sequence: Synthetic oligonucleotide
  Antisense strand to SEQ ID NO: 2161698
aucucugcuucuuacugcc

SEQ ID NO: 2161700 - RNA, 19 nt, Artificial Sequence
  Description of Artificial Sequence: Synthetic oligonucleotide
  Sense strand starting at position 916 of SEQ ID NO: 1882981
agucaagaugcuuaaugua

SEQ ID NO: 2161701 - RNA, 19 nt, Artificial Sequence
  Description of Artificial Sequence: Synthetic oligonucleotide
  Antisense strand to SEQ ID NO: 2161700
uacauuaagcaucuugacu

SEQ ID NO: 2161702 - RNA, 19 nt, Artificial Sequence
  Description of Artificial Sequence: Synthetic oligonucleotide
  Sense strand starting at position 1039 of SEQ ID NO: 1882981
uccuguuaggcacagauua

SEQ ID NO: 2161703 - RNA, 19 nt, Artificial Sequence
  Description of Artificial Sequence: Synthetic oligonucleotide
  Antisense strand to SEQ ID NO: 2161702
uaaucugugccuaacagga

SEQ ID NO: 2161704 - RNA, 19 nt, Artificial Sequence
  Description of Artificial Sequence: Synthetic oligonucleotide
  Sense strand starting at position 1061 of SEQ ID NO: 1882981
cauguaagaauugguguga

SEQ ID NO: 2161705 - RNA, 19 nt, Artificial Sequence
  Description of Artificial Sequence: Synthetic oligonucleotide
  Antisense strand to SEQ ID NO: 2161704
ucacaccaauucuuacaug

SEQ ID NO: 2161706 - RNA, 19 nt, Artificial Sequence
  Description of Artificial Sequence: Synthetic oligonucleotide
  Sense strand starting at position 1062 of SEQ ID NO: 1882981
auguaagaauuggugugau

SEQ ID NO: 2161707 - RNA, 19 nt, Artificial Sequence
  Description of Artificial Sequence: Synthetic oligonucleotide
  Antisense strand to SEQ ID NO: 2161706
aucacaccaauucuuacau

SEQ ID NO: 2161708 - RNA, 19 nt, Artificial Sequence
  Description of Artificial Sequence: Synthetic oligonucleotide
  Sense strand starting at position 1065 of SEQ ID NO: 1882981
uaagaauuggugugauaua

SEQ ID NO: 2161709 - RNA, 19 nt, Artificial Sequence
  Description of Artificial Sequence: Synthetic oligonucleotide
  Antisense strand to SEQ ID NO: 2161708
uauaucacaccaauucuua

SEQ ID NO: 2161710 - RNA, 19 nt, Artificial Sequence
  Description of Artificial Sequence: Synthetic oligonucleotide
  Sense strand starting at position 1070 of SEQ ID NO: 1882981
auuggugugauauaguaua

SEQ ID NO: 2161711 - RNA, 19 nt, Artificial Sequence
  Description of Artificial Sequence: Synthetic oligonucleotide
  Antisense strand to SEQ ID NO: 2161710
uauacuauaucacaccaau

SEQ ID NO: 2161712 - RNA, 19 nt, Artificial Sequence
  Description of Artificial Sequence: Synthetic oligonucleotide
  Sense strand starting at position 1114 of SEQ ID NO: 1882981
ggaaauuagucucuacuaa

SEQ ID NO: 2161713 - RNA, 19 nt, Artificial Sequence
  Description of Artificial Sequence: Synthetic oligonucleotide
  Antisense strand to SEQ ID NO: 2161712
uuaguagagacuaauuucc

SEQ ID NO: 2161714 - RNA, 19 nt, Artificial Sequence
  Description of Artificial Sequence: Synthetic oligonucleotide
  Sense strand starting at position 1334 of SEQ ID NO: 1882981
agaauuuggccguggcuua

SEQ ID NO: 2161715 - RNA, 19 nt, Artificial Sequence
  Description of Artificial Sequence: Synthetic oligonucleotide
  Antisense strand to SEQ ID NO: 2161714
uaagccacggccaaauucu

SEQ ID NO: 2161716 - RNA, 19 nt, Artificial Sequence
  Description of Artificial Sequence: Synthetic oligonucleotide
  Sense strand starting at position 1335 of SEQ ID NO: 1882981
gaauuuggccguggcuuaa

SEQ ID NO: 2161717 - RNA, 19 nt, Artificial Sequence
  Description of Artificial Sequence: Synthetic oligonucleotide
  Antisense strand to SEQ ID NO: 2161716
uuaagccacggccaaauuc

SEQ ID NO: 2161718 - RNA, 19 nt, Artificial Sequence
  Description of Artificial Sequence: Synthetic oligonucleotide
  Sense strand starting at position 1667 of SEQ ID NO: 1882981
agggaucauagaugucauu

SEQ ID NO: 2161719 - RNA, 19 nt, Artificial Sequence
  Description of Artificial Sequence: Synthetic oligonucleotide
  Antisense strand to SEQ ID NO: 2161718
aaugacaucuaugaucccu

SEQ ID NO: 2161720 - RNA, 19 nt, Artificial Sequence
  Description of Artificial Sequence: Synthetic oligonucleotide
  Sense strand starting at position 1695 of SEQ ID NO: 1882981
gucuaaagucaggacugua

SEQ ID NO: 2161721 - RNA, 19 nt, Artificial Sequence
  Description of Artificial Sequence: Synthetic oligonucleotide
  Antisense strand to SEQ ID NO: 2161720
uacaguccugacuuuagac

SEQ ID NO: 2161722 - RNA, 19 nt, Artificial Sequence
  Description of Artificial Sequence: Synthetic oligonucleotide
  Sense strand starting at position 1698 of SEQ ID NO: 1882981
uaaagucaggacuguacaa

SEQ ID NO: 2161723 - RNA, 19 nt, Artificial Sequence
  Description of Artificial Sequence: Synthetic oligonucleotide
  Antisense strand to SEQ ID NO: 2161722
uuguacaguccugacuuua

SEQ ID NO: 2161724 - RNA, 19 nt, Artificial Sequence
  Description of Artificial Sequence: Synthetic oligonucleotide
  Sense strand starting at position 1896 of SEQ ID NO: 1882981
guugcaauucuaugaacag

SEQ ID NO: 2161725 - RNA, 19 nt, Artificial Sequence
  Description of Artificial Sequence: Synthetic oligonucleotide
  Antisense strand to SEQ ID NO: 2161724
cuguucauagaauugcaac

SEQ ID NO: 2161726 - RNA, 19 nt, Artificial Sequence
  Description of Artificial Sequence: Synthetic oligonucleotide
  Sense strand starting at position 2115 of SEQ ID NO: 1882981
uuuccaacugcucagguaa

SEQ ID NO: 2161727 - RNA, 19 nt, Artificial Sequence
  Description of Artificial Sequence: Synthetic oligonucleotide
  Antisense strand to SEQ ID NO: 2161726
uuaccugagcaguuggaaa

SEQ ID NO: 2161728 - RNA, 19 nt, Artificial Sequence
  Description of Artificial Sequence: Synthetic oligonucleotide
  Sense strand starting at position 2304 of SEQ ID NO: 1882981
augugaccucccugaaauc

SEQ ID NO: 2161729 - RNA, 19 nt, Artificial Sequence
  Description of Artificial Sequence: Synthetic oligonucleotide
  Antisense strand to SEQ ID NO: 2161728
gauuucagggaggucacau

SEQ ID NO: 2161730 - RNA, 19 nt, Artificial Sequence
  Description of Artificial Sequence: Synthetic oligonucleotide
  Sense strand starting at position 2371 of SEQ ID NO: 1882981
agaguuagccuuugaccua

SEQ ID NO: 2161731 - RNA, 19 nt, Artificial Sequence
  Description of Artificial Sequence: Synthetic oligonucleotide
  Antisense strand to SEQ ID NO: 2161730
uaggucaaaggcuaacucu

SEQ ID NO: 2161732 - RNA, 19 nt, Artificial Sequence
  Description of Artificial Sequence: Synthetic oligonucleotide
  Sense strand starting at position 2542 of SEQ ID NO: 1882981
cugccaucuguccauagaa

SEQ ID NO: 2161733 - RNA, 19 nt, Artificial Sequence
  Description of Artificial Sequence: Synthetic oligonucleotide
  Antisense strand to SEQ ID NO: 2161732
uucuauggacagauggcag

SEQ ID NO: 2161734 - RNA, 19 nt, Artificial Sequence
  Description of Artificial Sequence: Synthetic oligonucleotide
  Sense strand starting at position 2544 of SEQ ID NO: 1882981
gccaucuguccauagaaca

SEQ ID NO: 2161735 - RNA, 19 nt, Artificial Sequence
  Description of Artificial Sequence: Synthetic oligonucleotide
  Antisense strand to SEQ ID NO: 2161734
uguucuauggacagauggc

SEQ ID NO: 2161736 - RNA, 19 nt, Artificial Sequence
  Description of Artificial Sequence: Synthetic oligonucleotide
  Sense strand starting at position 2677 of SEQ ID NO: 1882981
cucaguaaaccugaaugca

SEQ ID NO: 2161737 - RNA, 19 nt, Artificial Sequence
  Description of Artificial Sequence: Synthetic oligonucleotide
  Antisense strand to SEQ ID NO: 2161736
ugcauucagguuuacugag

SEQ ID NO: 2161738 - RNA, 19 nt, Artificial Sequence
  Description of Artificial Sequence: Synthetic oligonucleotide
  Sense strand starting at position 2846 of SEQ ID NO: 1882981
augugauaggucugcagaa

SEQ ID NO: 2161739 - RNA, 19 nt, Artificial Sequence
  Description of Artificial Sequence: Synthetic oligonucleotide
  Antisense strand to SEQ ID NO: 2161738
uucugcagaccuaucacau

SEQ ID NO: 2161740 - RNA, 19 nt, Artificial Sequence
  Description of Artificial Sequence: Synthetic oligonucleotide
  Sense strand starting at position 2848 of SEQ ID NO: 1882981
gugauaggucugcagaaga

SEQ ID NO: 2161741 - RNA, 19 nt, Artificial Sequence
  Description of Artificial Sequence: Synthetic oligonucleotide
  Antisense strand to SEQ ID NO: 2161740
ucuucugcagaccuaucac

SEQ ID NO: 2161742 - RNA, 19 nt, Artificial Sequence
  Description of Artificial Sequence: Synthetic oligonucleotide
  Sense strand starting at position 3062 of SEQ ID NO: 1882981
cuuucuguuccagauguac

SEQ ID NO: 2161743 - RNA, 19 nt, Artificial Sequence
  Description of Artificial Sequence: Synthetic oligonucleotide
  Antisense strand to SEQ ID NO: 2161742
guacaucuggaacagaaag

SEQ ID NO: 2161744 - RNA, 19 nt, Artificial Sequence
  Description of Artificial Sequence: Synthetic oligonucleotide
  Sense strand starting at position 3099 of SEQ ID NO: 1882981
cuggcaaaguuaucuaauc

SEQ ID NO: 2161745 - RNA, 19 nt, Artificial Sequence
  Description of Artificial Sequence: Synthetic oligonucleotide
  Antisense strand to SEQ ID NO: 2161744
gauuagauaacuuugccag

SEQ ID NO: 2161746 - RNA, 19 nt, Artificial Sequence
  Description of Artificial Sequence: Synthetic oligonucleotide
  Sense strand starting at position 3283 of SEQ ID NO: 1882981
aguauuaucgggcacugau

SEQ ID NO: 2161747 - RNA, 19 nt, Artificial Sequence
  Description of Artificial Sequence: Synthetic oligonucleotide
  Antisense strand to SEQ ID NO: 2161746
aucagugcccgauaauacu

SEQ ID NO: 2161748 - RNA, 19 nt, Artificial Sequence
  Description of Artificial Sequence: Synthetic oligonucleotide
  Sense strand starting at position 3308 of SEQ ID NO: 1882981
ugucucuuucccuagaagu

SEQ ID NO: 2161749 - RNA, 19 nt, Artificial Sequence
  Description of Artificial Sequence: Synthetic oligonucleotide
  Antisense strand to SEQ ID NO: 2161748
acuucuagggaaagagaca

SEQ ID NO: 2161750 - RNA, 19 nt, Artificial Sequence
  Description of Artificial Sequence: Synthetic oligonucleotide
  Sense strand starting at position 3435 of SEQ ID NO: 1882981
auagcaugguuccugacua

SEQ ID NO: 2161751 - RNA, 19 nt, Artificial Sequence
  Description of Artificial Sequence: Synthetic oligonucleotide
  Antisense strand to SEQ ID NO: 2161750
uagucaggaaccaugcuau

SEQ ID NO: 2161752 - RNA, 19 nt, Artificial Sequence
  Description of Artificial Sequence: Synthetic oligonucleotide
  Sense strand starting at position 3668 of SEQ ID NO: 1882981
cagagucauagguggcuga

SEQ ID NO: 2161753 - RNA, 19 nt, Artificial Sequence
  Description of Artificial Sequence: Synthetic oligonucleotide
  Antisense strand to SEQ ID NO: 2161752
ucagccaccuaugacucug

SEQ ID NO: 2161754 - RNA, 19 nt, Artificial Sequence
  Description of Artificial Sequence: Synthetic oligonucleotide
  Sense strand starting at position 3704 of SEQ ID NO: 1882981
caguguaaccaagagaugu

SEQ ID NO: 2161755 - RNA, 19 nt, Artificial Sequence
  Description of Artificial Sequence: Synthetic oligonucleotide
  Antisense strand to SEQ ID NO: 2161754
acaucucuugguuacacug

SEQ ID NO: 2161756 - RNA, 19 nt, Artificial Sequence
  Description of Artificial Sequence: Synthetic oligonucleotide
  Sense strand starting at position 85 of SEQ ID NO: 1882980
ccaagaaugccaggagauu

SEQ ID NO: 2161757 - RNA, 19 nt, Artificial Sequence
  Description of Artificial Sequence: Synthetic oligonucleotide
  Antisense strand to SEQ ID NO: 2161756
aaucuccuggcauucuugg

SEQ ID NO: 2161758 - RNA, 19 nt, Artificial Sequence
  Description of Artificial Sequence: Synthetic oligonucleotide
  Sense strand starting at position 98 of SEQ ID NO: 1882980
gagauuaagcaaugucaca

SEQ ID NO: 2161759 - RNA, 19 nt, Artificial Sequence
  Description of Artificial Sequence: Synthetic oligonucleotide
  Antisense strand to SEQ ID NO: 2161758
ugugacauugcuuaaucuc

SEQ ID NO: 2161760 - RNA, 19 nt, Artificial Sequence
  Description of Artificial Sequence: Synthetic oligonucleotide
  Sense strand starting at position 514 of SEQ ID NO: 1882980
uguggcuuucgacauauua

SEQ ID NO: 2161761 - RNA, 19 nt, Artificial Sequence
  Description of Artificial Sequence: Synthetic oligonucleotide
  Antisense strand to SEQ ID NO: 2161760
uaauaugucgaaagccaca

SEQ ID NO: 2161762 - RNA, 19 nt, Artificial Sequence
  Description of Artificial Sequence: Synthetic oligonucleotide
  Sense strand starting at position 702 of SEQ ID NO: 1882980
uaguuacgaugauuaagaa

SEQ ID NO: 2161763 - RNA, 19 nt, Artificial Sequence
  Description of Artificial Sequence: Synthetic oligonucleotide
  Antisense strand to SEQ ID NO: 2161762
uucuuaaucaucguaacua

SEQ ID NO: 2161764 - RNA, 19 nt, Artificial Sequence
  Description of Artificial Sequence: Synthetic oligonucleotide
  Sense strand starting at position 1261 of SEQ ID NO: 1882980
aggccaaggccuuaucaga

SEQ ID NO: 2161765 - RNA, 19 nt, Artificial Sequence
  Description of Artificial Sequence: Synthetic oligonucleotide
  Antisense strand to SEQ ID NO: 2161764
ucugauaaggccuuggccu

SEQ ID NO: 2161766 - RNA, 19 nt, Artificial Sequence
  Description of Artificial Sequence: Synthetic oligonucleotide
  Sense strand starting at position 1480 of SEQ ID NO: 1882980
gcgacuguucugcuagucu

SEQ ID NO: 2161767 - RNA, 19 nt, Artificial Sequence
  Description of Artificial Sequence: Synthetic oligonucleotide
  Antisense strand to SEQ ID NO: 2161766
agacuagcagaacagucgc

SEQ ID NO: 2161768 - RNA, 19 nt, Artificial Sequence
  Description of Artificial Sequence: Synthetic oligonucleotide
  Sense strand starting at position 1600 of SEQ ID NO: 1882980
agcucagacucuucuagag

SEQ ID NO: 2161769 - RNA, 19 nt, Artificial Sequence
  Description of Artificial Sequence: Synthetic oligonucleotide
  Antisense strand to SEQ ID NO: 2161768
cucuagaagagucugagcu

SEQ ID NO: 2161770 - RNA, 19 nt, Artificial Sequence
  Description of Artificial Sequence: Synthetic oligonucleotide
  Sense strand starting at position 1610 of SEQ ID NO: 1882980
cuucuagaggucuaauccu

SEQ ID NO: 2161771 - RNA, 19 nt, Artificial Sequence
  Description of Artificial Sequence: Synthetic oligonucleotide
  Antisense strand to SEQ ID NO: 2161770
aggauuagaccucuagaag

SEQ ID NO: 2161772 - RNA, 19 nt, Artificial Sequence
  Description of Artificial Sequence: Synthetic oligonucleotide
  Sense strand starting at position 1618 of SEQ ID NO: 1882980
ggucuaauccuggacaccu

SEQ ID NO: 2161773 - RNA, 19 nt, Artificial Sequence
  Description of Artificial Sequence: Synthetic oligonucleotide
  Antisense strand to SEQ ID NO: 2161772
agguguccaggauuagacc

SEQ ID NO: 2161774 - RNA, 19 nt, Artificial Sequence
  Description of Artificial Sequence: Synthetic oligonucleotide
  Sense strand starting at position 1777 of SEQ ID NO: 1882980
acuaauacuugggugaguu

SEQ ID NO: 2161775 - RNA, 19 nt, Artificial Sequence
  Description of Artificial Sequence: Synthetic oligonucleotide
  Antisense strand to SEQ ID NO: 2161774
aacucacccaaguauuagu

SEQ ID NO: 2161776 - RNA, 19 nt, Artificial Sequence
  Description of Artificial Sequence: Synthetic oligonucleotide
  Sense strand starting at position 1778 of SEQ ID NO: 1882980
cuaauacuugggugaguua

SEQ ID NO: 2161777 - RNA, 19 nt, Artificial Sequence
  Description of Artificial Sequence: Synthetic oligonucleotide
  Antisense strand to SEQ ID NO: 2161776
uaacucacccaaguauuag

SEQ ID NO: 2161778 - RNA, 19 nt, Artificial Sequence
  Description of Artificial Sequence: Synthetic oligonucleotide
  Sense strand starting at position 1864 of SEQ ID NO: 1882980
uaggguuauggugaugauu

SEQ ID NO: 2161779 - RNA, 19 nt, Artificial Sequence
  Description of Artificial Sequence: Synthetic oligonucleotide
  Antisense strand to SEQ ID NO: 2161778
aaucaucaccauaacccua

SEQ ID NO: 2161780 - RNA, 19 nt, Artificial Sequence
  Description of Artificial Sequence: Synthetic oligonucleotide
  Sense strand starting at position 2029 of SEQ ID NO: 1882980
guuucaugggaacagaugu

SEQ ID NO: 2161781 - RNA, 19 nt, Artificial Sequence
  Description of Artificial Sequence: Synthetic oligonucleotide
  Antisense strand to SEQ ID NO: 2161780
acaucuguucccaugaaac

SEQ ID NO: 2161782 - RNA, 19 nt, Artificial Sequence
  Description of Artificial Sequence: Synthetic oligonucleotide
  Sense strand starting at position 2117 of SEQ ID NO: 1882980
agccuauacuggucugaac

SEQ ID NO: 2161783 - RNA, 19 nt, Artificial Sequence
  Description of Artificial Sequence: Synthetic oligonucleotide
  Antisense strand to SEQ ID NO: 2161782
guucagaccaguauaggcu

SEQ ID NO: 2161784 - RNA, 19 nt, Artificial Sequence
  Description of Artificial Sequence: Synthetic oligonucleotide
  Sense strand starting at position 2119 of SEQ ID NO: 1882980
ccuauacuggucugaacaa

SEQ ID NO: 2161785 - RNA, 19 nt, Artificial Sequence
  Description of Artificial Sequence: Synthetic oligonucleotide
  Antisense strand to SEQ ID NO: 2161784
uuguucagaccaguauagg

SEQ ID NO: 2161786 - RNA, 19 nt, Artificial Sequence
  Description of Artificial Sequence: Synthetic oligonucleotide
  Sense strand starting at position 2378 of SEQ ID NO: 1882980
ccauguacccuguacacau

SEQ ID NO: 2161787 - RNA, 19 nt, Artificial Sequence
  Description of Artificial Sequence: Synthetic oligonucleotide
  Antisense strand to SEQ ID NO: 2161786
auguguacaggguacaugg

SEQ ID NO: 2161788 - RNA, 19 nt, Artificial Sequence
  Description of Artificial Sequence: Synthetic oligonucleotide
  Sense strand starting at position 2598 of SEQ ID NO: 1882980
guacguuuaguguucuuua

SEQ ID NO: 2161789 - RNA, 19 nt, Artificial Sequence
  Description of Artificial Sequence: Synthetic oligonucleotide
  Antisense strand to SEQ ID NO: 2161788
uaaagaacacuaaacguac

SEQ ID NO: 2161790 - RNA, 19 nt, Artificial Sequence
  Description of Artificial Sequence: Synthetic oligonucleotide
  Sense strand starting at position 2668 of SEQ ID NO: 1882980
uaaauagcauagguuagau

SEQ ID NO: 2161791 - RNA, 19 nt, Artificial Sequence
  Description of Artificial Sequence: Synthetic oligonucleotide
  Antisense strand to SEQ ID NO: 2161790
aucuaaccuaugcuauuua

SEQ ID NO: 2161792 - RNA, 19 nt, Artificial Sequence
  Description of Artificial Sequence: Synthetic oligonucleotide
  Sense strand starting at position 2788 of SEQ ID NO: 1882980
uuccucuuaguauauagua

SEQ ID NO: 2161793 - RNA, 19 nt, Artificial Sequence
  Description of Artificial Sequence: Synthetic oligonucleotide
  Antisense strand to SEQ ID NO: 2161792
uacuauauacuaagaggaa

SEQ ID NO: 2161794 - RNA, 19 nt, Artificial Sequence
  Description of Artificial Sequence: Synthetic oligonucleotide
  Sense strand starting at position 2810 of SEQ ID NO: 1882980
gcagacacaguauaucaau

SEQ ID NO: 2161795 - RNA, 19 nt, Artificial Sequence
  Description of Artificial Sequence: Synthetic oligonucleotide
  Antisense strand to SEQ ID NO: 2161794
auugauauacugugucugc

SEQ ID NO: 2161796 - RNA, 19 nt, Artificial Sequence
  Description of Artificial Sequence: Synthetic oligonucleotide
  Sense strand starting at position 2958 of SEQ ID NO: 1882980
cuuaccauacaguguagau

SEQ ID NO: 2161797 - RNA, 19 nt, Artificial Sequence
  Description of Artificial Sequence: Synthetic oligonucleotide
  Antisense strand to SEQ ID NO: 2161796
aucuacacuguaugguaag

SEQ ID NO: 2161798 - RNA, 19 nt, Artificial Sequence
  Description of Artificial Sequence: Synthetic oligonucleotide
  Sense strand starting at position 2971 of SEQ ID NO: 1882980
guagauuccugucugaauc

SEQ ID NO: 2161799 - RNA, 19 nt, Artificial Sequence
  Description of Artificial Sequence: Synthetic oligonucleotide
  Antisense strand to SEQ ID NO: 2161798
gauucagacaggaaucuac

SEQ ID NO: 2161800 - RNA, 19 nt, Artificial Sequence
  Description of Artificial Sequence: Synthetic oligonucleotide
  Sense strand starting at position 2994 of SEQ ID NO: 1882980
cuauaaagguuuccaaaug

SEQ ID NO: 2161801 - RNA, 19 nt, Artificial Sequence
  Description of Artificial Sequence: Synthetic oligonucleotide
  Antisense strand to SEQ ID NO: 2161800
cauuuggaaaccuuuauag

SEQ ID NO: 2161802 - RNA, 19 nt, Artificial Sequence
  Description of Artificial Sequence: Synthetic oligonucleotide
  Sense strand starting at position 3054 of SEQ ID NO: 1882980
gucucucuacuuuaaggaa

SEQ ID NO: 2161803 - RNA, 19 nt, Artificial Sequence
  Description of Artificial Sequence: Synthetic oligonucleotide
  Antisense strand to SEQ ID NO: 2161802
uuccuuaaaguagagagac

SEQ ID NO: 2161804 - RNA, 19 nt, Artificial Sequence
  Description of Artificial Sequence: Synthetic oligonucleotide
  Sense strand starting at position 3131 of SEQ ID NO: 1882980
ggguuauaauuuguugcca

SEQ ID NO: 2161805 - RNA, 19 nt, Artificial Sequence
  Description of Artificial Sequence: Synthetic oligonucleotide
  Antisense strand to SEQ ID NO: 2161804
uggcaacaaauuauaaccc

SEQ ID NO: 2161806 - RNA, 19 nt, Artificial Sequence
  Description of Artificial Sequence: Synthetic oligonucleotide
  Sense strand starting at position 3132 of SEQ ID NO: 1882980
gguuauaauuuguugccau

SEQ ID NO: 2161807 - RNA, 19 nt, Artificial Sequence
  Description of Artificial Sequence: Synthetic oligonucleotide
  Antisense strand to SEQ ID NO: 2161806
auggcaacaaauuauaacc

SEQ ID NO: 2161808 - RNA, 19 nt, Artificial Sequence
  Description of Artificial Sequence: Synthetic oligonucleotide
  Sense strand starting at position 3144 of SEQ ID NO: 1882980
uugccauaguuauuucuuu

SEQ ID NO: 2161809 - RNA, 19 nt, Artificial Sequence
  Description of Artificial Sequence: Synthetic oligonucleotide
  Antisense strand to SEQ ID NO: 2161808
aaagaaauaacuauggcaa

SEQ ID NO: 2161810 - RNA, 19 nt, Artificial Sequence
  Description of Artificial Sequence: Synthetic oligonucleotide
  Sense strand starting at position 3380 of SEQ ID NO: 1882980
auaaucauggcggguauaa

SEQ ID NO: 2161811 - RNA, 19 nt, Artificial Sequence
  Description of Artificial Sequence: Synthetic oligonucleotide
  Antisense strand to SEQ ID NO: 2161810
uuauacccgccaugauuau

SEQ ID NO: 2161812 - RNA, 19 nt, Artificial Sequence
  Description of Artificial Sequence: Synthetic oligonucleotide
  Sense strand starting at position 3389 of SEQ ID NO: 1882980
gcggguauaaacugaaacu

SEQ ID NO: 2161813 - RNA, 19 nt, Artificial Sequence
  Description of Artificial Sequence: Synthetic oligonucleotide
  Antisense strand to SEQ ID NO: 2161812
aguuucaguuuauacccgc

SEQ ID NO: 2161814 - RNA, 19 nt, Artificial Sequence
  Description of Artificial Sequence: Synthetic oligonucleotide
  Sense strand starting at position 3410 of SEQ ID NO: 1882980
ccuagaaaugcugggucau

SEQ ID NO: 2161815 - RNA, 19 nt, Artificial Sequence
  Description of Artificial Sequence: Synthetic oligonucleotide
  Antisense strand to SEQ ID NO: 2161814
augacccagcauuucuagg

SEQ ID NO: 2161816 - RNA, 19 nt, Artificial Sequence
  Description of Artificial Sequence: Synthetic oligonucleotide
  Sense strand starting at position 3411 of SEQ ID NO: 1882980
cuagaaaugcugggucaua

SEQ ID NO: 2161817 - RNA, 19 nt, Artificial Sequence
  Description of Artificial Sequence: Synthetic oligonucleotide
  Antisense strand to SEQ ID NO: 2161816
uaugacccagcauuucuag

SEQ ID NO: 2161818 - RNA, 19 nt, Artificial Sequence
  Description of Artificial Sequence: Synthetic oligonucleotide
  Sense strand starting at position 3497 of SEQ ID NO: 1882980
uuuggaaauggugggauau

SEQ ID NO: 2161819 - RNA, 19 nt, Artificial Sequence
  Description of Artificial Sequence: Synthetic oligonucleotide
  Antisense strand to SEQ ID NO: 2161818
auaucccaccauuuccaaa

SEQ ID NO: 2161820 - RNA, 19 nt, Artificial Sequence
  Description of Artificial Sequence: Synthetic oligonucleotide
  Sense strand starting at position 3498 of SEQ ID NO: 1882980
uuggaaauggugggauauu

SEQ ID NO: 2161821 - RNA, 19 nt, Artificial Sequence
  Description of Artificial Sequence: Synthetic oligonucleotide
  Antisense strand to SEQ ID NO: 2161820
aauaucccaccauuuccaa

SEQ ID NO: 2161822 - RNA, 19 nt, Artificial Sequence
  Description of Artificial Sequence: Synthetic oligonucleotide
  Sense strand starting at position 3499 of SEQ ID NO: 1882980
uggaaauggugggauauuu

SEQ ID NO: 2161823 - RNA, 19 nt, Artificial Sequence
  Description of Artificial Sequence: Synthetic oligonucleotide
  Antisense strand to SEQ ID NO: 2161822
aaauaucccaccauuucca

SEQ ID NO: 2161824 - RNA, 19 nt, Artificial Sequence
  Description of Artificial Sequence: Synthetic oligonucleotide
  Sense strand starting at position 3658 of SEQ ID NO: 1882980
uggcccaaucccugaacua

SEQ ID NO: 2161825 - RNA, 19 nt, Artificial Sequence
  Description of Artificial Sequence: Synthetic oligonucleotide
  Antisense strand to SEQ ID NO: 2161824
uaguucagggauugggcca

SEQ ID NO: 2161826 - RNA, 19 nt, Artificial Sequence
  Description of Artificial Sequence: Synthetic oligonucleotide
  Sense strand starting at position 3659 of SEQ ID NO: 1882980
ggcccaaucccugaacuaa

SEQ ID NO: 2161827 - RNA, 19 nt, Artificial Sequence
  Description of Artificial Sequence: Synthetic oligonucleotide
  Antisense strand to SEQ ID NO: 2161826
uuaguucagggauugggcc

SEQ ID NO: 2161828 - RNA, 19 nt, Artificial Sequence
  Description of Artificial Sequence: Synthetic oligonucleotide
  Sense strand starting at position 3695 of SEQ ID NO: 1882980
ucucucaaggauuggcuua

SEQ ID NO: 2161829 - RNA, 19 nt, Artificial Sequence
  Description of Artificial Sequence: Synthetic oligonucleotide
  Antisense strand to SEQ ID NO: 2161828
uaagccaauccuugagaga

SEQ ID NO: 2161830 - RNA, 19 nt, Artificial Sequence
  Description of Artificial Sequence: Synthetic oligonucleotide
  Sense strand starting at position 3700 of SEQ ID NO: 1882980
caaggauuggcuuaguucu

SEQ ID NO: 2161831 - RNA, 19 nt, Artificial Sequence
  Description of Artificial Sequence: Synthetic oligonucleotide
  Antisense strand to SEQ ID NO: 2161830
agaacuaagccaauccuug

SEQ ID NO: 2161832 - RNA, 19 nt, Artificial Sequence
  Description of Artificial Sequence: Synthetic oligonucleotide
  Sense strand starting at position 3779 of SEQ ID NO: 1882980
auauuagacugaucaagug

SEQ ID NO: 2161833 - RNA, 19 nt, Artificial Sequence
  Description of Artificial Sequence: Synthetic oligonucleotide
  Antisense strand to SEQ ID NO: 2161832
cacuugaucagucuaauau

SEQ ID NO: 2161834 - RNA, 19 nt, Artificial Sequence
  Description of Artificial Sequence: Synthetic oligonucleotide
  Sense strand starting at position 3786 of SEQ ID NO: 1882980
acugaucaaguguguuaau

SEQ ID NO: 2161835 - RNA, 19 nt, Artificial Sequence
  Description of Artificial Sequence: Synthetic oligonucleotide
  Antisense strand to SEQ ID NO: 2161834
auuaacacacuugaucagu

SEQ ID NO: 2161836 - RNA, 19 nt, Artificial Sequence
  Description of Artificial Sequence: Synthetic oligonucleotide
  Sense strand starting at position 28 of SEQ ID NO: 1882982
gagcgagacucaguccuaa

SEQ ID NO: 2161837 - RNA, 19 nt, Artificial Sequence
  Description of Artificial Sequence: Synthetic oligonucleotide
  Antisense strand to SEQ ID NO: 2161836
uuaggacugagucucgcuc

SEQ ID NO: 2161838 - RNA, 19 nt, Artificial Sequence
  Description of Artificial Sequence: Synthetic oligonucleotide
  Sense strand starting at position 73 of SEQ ID NO: 1882982
ugagaaagaugcucaaggu

SEQ ID NO: 2161839 - RNA, 19 nt, Artificial Sequence
  Description of Artificial Sequence: Synthetic oligonucleotide
  Antisense strand to SEQ ID NO: 2161838
accuugagcaucuuucuca

SEQ ID NO: 2161840 - RNA, 19 nt, Artificial Sequence
  Description of Artificial Sequence: Synthetic oligonucleotide
  Sense strand starting at position 141 of SEQ ID NO: 1882982
gguuucuggcuugaccaaa

SEQ ID NO: 2161841 - RNA, 19 nt, Artificial Sequence
  Description of Artificial Sequence: Synthetic oligonucleotide
  Antisense strand to SEQ ID NO: 2161840
uuuggucaagccagaaacc

SEQ ID NO: 2161842 - RNA, 19 nt, Artificial Sequence
  Description of Artificial Sequence: Synthetic oligonucleotide
  Sense strand starting at position 169 of SEQ ID NO: 1882982
aacggugacaucuguuaga

SEQ ID NO: 2161843 - RNA, 19 nt, Artificial Sequence
  Description of Artificial Sequence: Synthetic oligonucleotide
  Antisense strand to SEQ ID NO: 2161842
ucuaacagaugucaccguu

SEQ ID NO: 2161844 - RNA, 19 nt, Artificial Sequence
  Description of Artificial Sequence: Synthetic oligonucleotide
  Sense strand starting at position 197 of SEQ ID NO: 1882982
ggauguacuaaguguaaag

SEQ ID NO: 2161845 - RNA, 19 nt, Artificial Sequence
  Description of Artificial Sequence: Synthetic oligonucleotide
  Antisense strand to SEQ ID NO: 2161844
cuuuacacuuaguacaucc

SEQ ID NO: 2161846 - RNA, 19 nt, Artificial Sequence
  Description of Artificial Sequence: Synthetic oligonucleotide
  Sense strand starting at position 244 of SEQ ID NO: 1882982
guggcaucuguggugcauu

SEQ ID NO: 2161847 - RNA, 19 nt, Artificial Sequence
  Description of Artificial Sequence: Synthetic oligonucleotide
  Antisense strand to SEQ ID NO: 2161846
aaugcaccacagaugccac

SEQ ID NO: 2161848 - RNA, 19 nt, Artificial Sequence
  Description of Artificial Sequence: Synthetic oligonucleotide
  Sense strand starting at position 359 of SEQ ID NO: 1882982
cggagagcuccggaagaau

SEQ ID NO: 2161849 - RNA, 19 nt, Artificial Sequence
  Description of Artificial Sequence: Synthetic oligonucleotide
  Antisense strand to SEQ ID NO: 2161848
auucuuccggagcucuccg

SEQ ID NO: 2161850 - RNA, 19 nt, Artificial Sequence
  Description of Artificial Sequence: Synthetic oligonucleotide
  Sense strand starting at position 389 of SEQ ID NO: 1882982
cuccuaggaguucgauguu

SEQ ID NO: 2161851 - RNA, 19 nt, Artificial Sequence
  Description of Artificial Sequence: Synthetic oligonucleotide
  Antisense strand to SEQ ID NO: 2161850
aacaucgaacuccuaggag

SEQ ID NO: 2161852 - RNA, 19 nt, Artificial Sequence
  Description of Artificial Sequence: Synthetic oligonucleotide
  Sense strand starting at position 392 of SEQ ID NO: 1882982
cuaggaguucgauguuuaa

SEQ ID NO: 2161853 - RNA, 19 nt, Artificial Sequence
  Description of Artificial Sequence: Synthetic oligonucleotide
  Antisense strand to SEQ ID NO: 2161852
uuaaacaucgaacuccuag

SEQ ID NO: 2161854 - RNA, 19 nt, Artificial Sequence
  Description of Artificial Sequence: Synthetic oligonucleotide
  Sense strand starting at position 396 of SEQ ID NO: 1882982
gaguucgauguuuaaggga

SEQ ID NO: 2161855 - RNA, 19 nt, Artificial Sequence
  Description of Artificial Sequence: Synthetic oligonucleotide
  Antisense strand to SEQ ID NO: 2161854
ucccuuaaacaucgaacuc

SEQ ID NO: 2161856 - RNA, 19 nt, Artificial Sequence
  Description of Artificial Sequence: Synthetic oligonucleotide
  Sense strand starting at position 401 of SEQ ID NO: 1882982
cgauguuuaagggaugcga

SEQ ID NO: 2161857 - RNA, 19 nt, Artificial Sequence
  Description of Artificial Sequence: Synthetic oligonucleotide
  Antisense strand to SEQ ID NO: 2161856
ucgcaucccuuaaacaucg

SEQ ID NO: 2161858 - RNA, 19 nt, Artificial Sequence
  Description of Artificial Sequence: Synthetic oligonucleotide
  Sense strand starting at position 943 of SEQ ID NO: 1882982
cgcccuaagcaagaaguau

SEQ ID NO: 2161859 - RNA, 19 nt, Artificial Sequence
  Description of Artificial Sequence: Synthetic oligonucleotide
  Antisense strand to SEQ ID NO: 2161858
auacuucuugcuuagggcg

SEQ ID NO: 2161860 - RNA, 19 nt, Artificial Sequence
  Description of Artificial Sequence: Synthetic oligonucleotide
  Sense strand starting at position 958 of SEQ ID NO: 1882982
guaugaaugccuuagaacu

SEQ ID NO: 2161861 - RNA, 19 nt, Artificial Sequence
  Description of Artificial Sequence: Synthetic oligonucleotide
  Antisense strand to SEQ ID NO: 2161860
aguucuaaggcauucauac

SEQ ID NO: 2161862 - RNA, 19 nt, Artificial Sequence
  Description of Artificial Sequence: Synthetic oligonucleotide
  Sense strand starting at position 1020 of SEQ ID NO: 1882982
cugacuagaugguuacaga

SEQ ID NO: 2161863 - RNA, 19 nt, Artificial Sequence
  Description of Artificial Sequence: Synthetic oligonucleotide
  Antisense strand to SEQ ID NO: 2161862
ucuguaaccaucuagucag

SEQ ID NO: 2161864 - RNA, 19 nt, Artificial Sequence
  Description of Artificial Sequence: Synthetic oligonucleotide
  Sense strand starting at position 1395 of SEQ ID NO: 1882982
cuuuguacuucgguuauuu

SEQ ID NO: 2161865 - RNA, 19 nt, Artificial Sequence
  Description of Artificial Sequence: Synthetic oligonucleotide
  Antisense strand to SEQ ID NO: 2161864
aaauaaccgaaguacaaag

SEQ ID NO: 2161866 - RNA, 19 nt, Artificial Sequence
  Description of Artificial Sequence: Synthetic oligonucleotide
  Sense strand starting at position 1399 of SEQ ID NO: 1882982
guacuucgguuauuuaauc

SEQ ID NO: 2161867 - RNA, 19 nt, Artificial Sequence
  Description of Artificial Sequence: Synthetic oligonucleotide
  Antisense strand to SEQ ID NO: 2161866
gauuaaauaaccgaaguac

SEQ ID NO: 2161868 - RNA, 19 nt, Artificial Sequence
  Description of Artificial Sequence: Synthetic oligonucleotide
  Sense strand starting at position 1469 of SEQ ID NO: 1882982
cagggaaggucugcucaua

SEQ ID NO: 2161869 - RNA, 19 nt, Artificial Sequence
  Description of Artificial Sequence: Synthetic oligonucleotide
  Antisense strand to SEQ ID NO: 2161868
uaugagcagaccuucccug

SEQ ID NO: 2161870 - RNA, 19 nt, Artificial Sequence
  Description of Artificial Sequence: Synthetic oligonucleotide
  Sense strand starting at position 2199 of SEQ ID NO: 1882982
ugucaaucugauggauaaa

SEQ ID NO: 2161871 - RNA, 19 nt, Artificial Sequence
  Description of Artificial Sequence: Synthetic oligonucleotide
  Antisense strand to SEQ ID NO: 2161870
uuuauccaucagauugaca

SEQ ID NO: 2161872 - RNA, 19 nt, Artificial Sequence
  Description of Artificial Sequence: Synthetic oligonucleotide
  Sense strand starting at position 2232 of SEQ ID NO: 1882982
ugcuguuuaaccgcaguua

SEQ ID NO: 2161873 - RNA, 19 nt, Artificial Sequence
  Description of Artificial Sequence: Synthetic oligonucleotide
  Antisense strand to SEQ ID NO: 2161872
uaacugcgguuaaacagca

SEQ ID NO: 2161874 - RNA, 19 nt, Artificial Sequence
  Description of Artificial Sequence: Synthetic oligonucleotide
  Sense strand starting at position 2246 of SEQ ID NO: 1882982
aguuauugcguugaauaug

SEQ ID NO: 2161875 - RNA, 19 nt, Artificial Sequence
  Description of Artificial Sequence: Synthetic oligonucleotide
  Antisense strand to SEQ ID NO: 2161874
cauauucaacgcaauaacu

SEQ ID NO: 2161876 - RNA, 19 nt, Artificial Sequence
  Description of Artificial Sequence: Synthetic oligonucleotide
  Sense strand starting at position 2618 of SEQ ID NO: 1882982
ccacgcuggccauaauuau

SEQ ID NO: 2161877 - RNA, 19 nt, Artificial Sequence
  Description of Artificial Sequence: Synthetic oligonucleotide
  Antisense strand to SEQ ID NO: 2161876
auaauuauggccagcgugg

SEQ ID NO: 2161878 - RNA, 19 nt, Artificial Sequence
  Description of Artificial Sequence: Synthetic oligonucleotide
  Sense strand starting at position 2629 of SEQ ID NO: 1882982
auaauuaugugucucuguu

SEQ ID NO: 2161879 - RNA, 19 nt, Artificial Sequence
  Description of Artificial Sequence: Synthetic oligonucleotide
  Antisense strand to SEQ ID NO: 2161878
aacagagacacauaauuau

SEQ ID NO: 2161880 - RNA, 19 nt, Artificial Sequence
  Description of Artificial Sequence: Synthetic oligonucleotide
  Sense strand starting at position 2682 of SEQ ID NO: 1882982
auggcuguguucucaggga

SEQ ID NO: 2161881 - RNA, 19 nt, Artificial Sequence
  Description of Artificial Sequence: Synthetic oligonucleotide
  Antisense strand to SEQ ID NO: 2161880
ucccugagaacacagccau

SEQ ID NO: 2161882 - RNA, 19 nt, Artificial Sequence
  Description of Artificial Sequence: Synthetic oligonucleotide
  Sense strand starting at position 2686 of SEQ ID NO: 1882982
cuguguucucagggaggau

SEQ ID NO: 2161883 - RNA, 19 nt, Artificial Sequence
  Description of Artificial Sequence: Synthetic oligonucleotide
  Antisense strand to SEQ ID NO: 2161882
auccucccugagaacacag

SEQ ID NO: 2161884 - RNA, 19 nt, Artificial Sequence
  Description of Artificial Sequence: Synthetic oligonucleotide
  Sense strand starting at position 2687 of SEQ ID NO: 1882982
uguguucucagggaggauu

SEQ ID NO: 2161885 - RNA, 19 nt, Artificial Sequence
  Description of Artificial Sequence: Synthetic oligonucleotide
  Antisense strand to SEQ ID NO: 2161884
aauccucccugagaacaca

SEQ ID NO: 2161886 - RNA, 19 nt, Artificial Sequence
  Description of Artificial Sequence: Synthetic oligonucleotide
  Sense strand starting at position 2793 of SEQ ID NO: 1882982
acauuagucccagagccaa

SEQ ID NO: 2161887 - RNA, 19 nt, Artificial Sequence
  Description of Artificial Sequence: Synthetic oligonucleotide
  Antisense strand to SEQ ID NO: 2161886
uuggcucugggacuaaugu

SEQ ID NO: 2161888 - RNA, 19 nt, Artificial Sequence
  Description of Artificial Sequence: Synthetic oligonucleotide
  Sense strand starting at position 2874 of SEQ ID NO: 1882982
guaguuaugauccaggccu

SEQ ID NO: 2161889 - RNA, 19 nt, Artificial Sequence
  Description of Artificial Sequence: Synthetic oligonucleotide
  Antisense strand to SEQ ID NO: 2161888
aggccuggaucauaacuac

SEQ ID NO: 2161890 - RNA, 19 nt, Artificial Sequence
  Description of Artificial Sequence: Synthetic oligonucleotide
  Sense strand starting at position 2876 of SEQ ID NO: 1882982
aguuaugauccaggccuca

SEQ ID NO: 2161891 - RNA, 19 nt, Artificial Sequence
  Description of Artificial Sequence: Synthetic oligonucleotide
  Antisense strand to SEQ ID NO: 2161890
ugaggccuggaucauaacu

SEQ ID NO: 2161892 - RNA, 19 nt, Artificial Sequence
  Description of Artificial Sequence: Synthetic oligonucleotide
  Sense strand starting at position 3107 of SEQ ID NO: 1882982
gcccauggauggucucgaa

SEQ ID NO: 2161893 - RNA, 19 nt, Artificial Sequence
  Description of Artificial Sequence: Synthetic oligonucleotide
  Antisense strand to SEQ ID NO: 2161892
uucgagaccauccaugggc

SEQ ID NO: 2161894 - RNA, 19 nt, Artificial Sequence
  Description of Artificial Sequence: Synthetic oligonucleotide
  Sense strand starting at position 3218 of SEQ ID NO: 1882982
ucuugagauaaaugguagu

SEQ ID NO: 2161895 - RNA, 19 nt, Artificial Sequence
  Description of Artificial Sequence: Synthetic oligonucleotide
  Antisense strand to SEQ ID NO: 2161894
acuaccauuuaucucaaga

SEQ ID NO: 2161896 - RNA, 19 nt, Artificial Sequence
  Description of Artificial Sequence: Synthetic oligonucleotide
  Sense strand starting at position 3224 of SEQ ID NO: 1882982
gauaaaugguaguccucuu

SEQ ID NO: 2161897 - RNA, 19 nt, Artificial Sequence
  Description of Artificial Sequence: Synthetic oligonucleotide
  Antisense strand to SEQ ID NO: 2161896
aagaggacuaccauuuauc

SEQ ID NO: 2161898 - RNA, 19 nt, Artificial Sequence
  Description of Artificial Sequence: Synthetic oligonucleotide
  Sense strand starting at position 3258 of SEQ ID NO: 1882982
uggagugcuguguucaugu

SEQ ID NO: 2161899 - RNA, 19 nt, Artificial Sequence
  Description of Artificial Sequence: Synthetic oligonucleotide
  Antisense strand to SEQ ID NO: 2161898
acaugaacacagcacucca

SEQ ID NO: 2161900 - RNA, 19 nt, Artificial Sequence
  Description of Artificial Sequence: Synthetic oligonucleotide
  Sense strand starting at position 3600 of SEQ ID NO: 1882982
uaaucagucugguuacagu

SEQ ID NO: 2161901 - RNA, 19 nt, Artificial Sequence
  Description of Artificial Sequence: Synthetic oligonucleotide
  Antisense strand to SEQ ID NO: 2161900
acuguaaccagacugauua

SEQ ID NO: 2161902 - RNA, 19 nt, Artificial Sequence
  Description of Artificial Sequence: Synthetic oligonucleotide
  Sense strand starting at position 3743 of SEQ ID NO: 1882982
ggcagugugaccgcuaagu

SEQ ID NO: 2161903 - RNA, 19 nt, Artificial Sequence
  Description of Artificial Sequence: Synthetic oligonucleotide
  Antisense strand to SEQ ID NO: 2161902
acuuagcggucacacugcc

SEQ ID NO: 2161904 - RNA, 19 nt, Artificial Sequence
  Description of Artificial Sequence: Synthetic oligonucleotide
  Sense strand starting at position 3745 of SEQ ID NO: 1882982
cagugugaccgcuaaguua

SEQ ID NO: 2161905 - RNA, 19 nt, Artificial Sequence
  Description of Artificial Sequence: Synthetic oligonucleotide
  Antisense strand to SEQ ID NO: 2161904
uaacuuagcggucacacug

SEQ ID NO: 2161906 - RNA, 19 nt, Artificial Sequence
  Description of Artificial Sequence: Synthetic oligonucleotide
  Sense strand starting at position 3789 of SEQ ID NO: 1882982
aggucaggucgagaauaac

SEQ ID NO: 2161907 - RNA, 19 nt, Artificial Sequence
  Description of Artificial Sequence: Synthetic oligonucleotide
  Antisense strand to SEQ ID NO: 2161906
guuauucucgaccugaccu

SEQ ID NO: 2161908 - RNA, 19 nt, Artificial Sequence
  Description of Artificial Sequence: Synthetic oligonucleotide
  Sense strand starting at position 3919 of SEQ ID NO: 1882982
auuccuagagccuggaaau

SEQ ID NO: 2161909 - RNA, 19 nt, Artificial Sequence
  Description of Artificial Sequence: Synthetic oligonucleotide
  Antisense strand to SEQ ID NO: 2161908
auuuccaggcucuaggaau

SEQ ID NO: 2161910 - RNA, 19 nt, Artificial Sequence
  Description of Artificial Sequence: Synthetic oligonucleotide
  Sense strand starting at position 3930 of SEQ ID NO: 1882982
cuggaaaugucaccuucua

SEQ ID NO: 2161911 - RNA, 19 nt, Artificial Sequence
  Description of Artificial Sequence: Synthetic oligonucleotide
  Antisense strand to SEQ ID NO: 2161910
uagaaggugacauuuccag

SEQ ID NO: 2161912 - RNA, 19 nt, Artificial Sequence
  Description of Artificial Sequence: Synthetic oligonucleotide
  Sense strand starting at position 3937 of SEQ ID NO: 1882982
ugucaccuucuauggaaga

SEQ ID NO: 2161913 - RNA, 19 nt, Artificial Sequence
  Description of Artificial Sequence: Synthetic oligonucleotide
  Antisense strand to SEQ ID NO: 2161912
ucuuccauagaaggugaca

SEQ ID NO: 2161914 - RNA, 19 nt, Artificial Sequence
  Description of Artificial Sequence: Synthetic oligonucleotide
  Sense strand starting at position 3952 of SEQ ID NO: 1882982
aagagaucuguaggaguga

SEQ ID NO: 2161915 - RNA, 19 nt, Artificial Sequence
  Description of Artificial Sequence: Synthetic oligonucleotide
  Antisense strand to SEQ ID NO: 2161914
ucacuccuacagaucucuu

SEQ ID NO: 2161916 - RNA, 19 nt, Artificial Sequence
  Description of Artificial Sequence: Synthetic oligonucleotide
  Sense strand starting at position 139 of SEQ ID NO: 1882983
cgguuucuggcuugaccaa

SEQ ID NO: 2161917 - RNA, 19 nt, Artificial Sequence
  Description of Artificial Sequence: Synthetic oligonucleotide
  Antisense strand to SEQ ID NO: 2161916
uuggucaagccagaaaccg

SEQ ID NO: 2161918 - RNA, 19 nt, Artificial Sequence
  Description of Artificial Sequence: Synthetic oligonucleotide
  Sense strand starting at position 140 of SEQ ID NO: 1882983
gguuucuggcuugaccaaa

SEQ ID NO: 2161919 - RNA, 19 nt, Artificial Sequence
  Description of Artificial Sequence: Synthetic oligonucleotide
  Antisense strand to SEQ ID NO: 2161918
uuuggucaagccagaaacc

SEQ ID NO: 2161920 - RNA, 19 nt, Artificial Sequence
  Description of Artificial Sequence: Synthetic oligonucleotide
  Sense strand starting at position 168 of SEQ ID NO: 1882983
aacggugacaucuguuaga

SEQ ID NO: 2161921 - RNA, 19 nt, Artificial Sequence
  Description of Artificial Sequence: Synthetic oligonucleotide
  Antisense strand to SEQ ID NO: 2161920
ucuaacagaugucaccguu

SEQ ID NO: 2161922 - RNA, 19 nt, Artificial Sequence
  Description of Artificial Sequence: Synthetic oligonucleotide
  Sense strand starting at position 171 of SEQ ID NO: 1882983
ggugacaucuguuagauua

SEQ ID NO: 2161923 - RNA, 19 nt, Artificial Sequence
  Description of Artificial Sequence: Synthetic oligonucleotide
  Antisense strand to SEQ ID NO: 2161922
uaaucuaacagaugucacc

SEQ ID NO: 2161924 - RNA, 19 nt, Artificial Sequence
  Description of Artificial Sequence: Synthetic oligonucleotide
  Sense strand starting at position 173 of SEQ ID NO: 1882983
ugacaucuguuagauuaaa

SEQ ID NO: 2161925 - RNA, 19 nt, Artificial Sequence
  Description of Artificial Sequence: Synthetic oligonucleotide
  Antisense strand to SEQ ID NO: 2161924
uuuaaucuaacagauguca

SEQ ID NO: 2161926 - RNA, 19 nt, Artificial Sequence
  Description of Artificial Sequence: Synthetic oligonucleotide
  Sense strand starting at position 196 of SEQ ID NO: 1882983
ggauguacuaaguguaaag

SEQ ID NO: 2161927 - RNA, 19 nt, Artificial Sequence
  Description of Artificial Sequence: Synthetic oligonucleotide
  Antisense strand to SEQ ID NO: 2161926
cuuuacacuuaguacaucc

SEQ ID NO: 2161928 - RNA, 19 nt, Artificial Sequence
  Description of Artificial Sequence: Synthetic oligonucleotide
  Sense strand starting at position 206 of SEQ ID NO: 1882983
aguguaaagucugagagga

SEQ ID NO: 2161929 - RNA, 19 nt, Artificial Sequence
  Description of Artificial Sequence: Synthetic oligonucleotide
  Antisense strand to SEQ ID NO: 2161928
uccucucagacuuuacacu

SEQ ID NO: 2161930 - RNA, 19 nt, Artificial Sequence
  Description of Artificial Sequence: Synthetic oligonucleotide
  Sense strand starting at position 243 of SEQ ID NO: 1882983
guggcaucuguggugcauu

SEQ ID NO: 2161931 - RNA, 19 nt, Artificial Sequence
  Description of Artificial Sequence: Synthetic oligonucleotide
  Antisense strand to SEQ ID NO: 2161930
aaugcaccacagaugccac

SEQ ID NO: 2161932 - RNA, 19 nt, Artificial Sequence
  Description of Artificial Sequence: Synthetic oligonucleotide
  Sense strand starting at position 358 of SEQ ID NO: 1882983
cggagagcuccggaagaau

SEQ ID NO: 2161933 - RNA, 19 nt, Artificial Sequence
  Description of Artificial Sequence: Synthetic oligonucleotide
  Antisense strand to SEQ ID NO: 2161932
auucuuccggagcucuccg

SEQ ID NO: 2161934 - RNA, 19 nt, Artificial Sequence
  Description of Artificial Sequence: Synthetic oligonucleotide
  Sense strand starting at position 400 of SEQ ID NO: 1882983
cgauguuuaagggaugcga

SEQ ID NO: 2161935 - RNA, 19 nt, Artificial Sequence
  Description of Artificial Sequence: Synthetic oligonucleotide
  Antisense strand to SEQ ID NO: 2161934
ucgcaucccuuaaacaucg

SEQ ID NO: 2161936 - RNA, 19 nt, Artificial Sequence
  Description of Artificial Sequence: Synthetic oligonucleotide
  Sense strand starting at position 942 of SEQ ID NO: 1882983
cgcccuaagcaagaaguau

SEQ ID NO: 2161937 - RNA, 19 nt, Artificial Sequence
  Description of Artificial Sequence: Synthetic oligonucleotide
  Antisense strand to SEQ ID NO: 2161936
auacuucuugcuuagggcg

SEQ ID NO: 2161938 - RNA, 19 nt, Artificial Sequence
  Description of Artificial Sequence: Synthetic oligonucleotide
  Sense strand starting at position 957 of SEQ ID NO: 1882983
guaugaaugccuuagaacu

SEQ ID NO: 2161939 - RNA, 19 nt, Artificial Sequence
  Description of Artificial Sequence: Synthetic oligonucleotide
  Antisense strand to SEQ ID NO: 2161938
aguucuaaggcauucauac

SEQ ID NO: 2161940 - RNA, 19 nt, Artificial Sequence
  Description of Artificial Sequence: Synthetic oligonucleotide
  Sense strand starting at position 1019 of SEQ ID NO: 1882983
cugacuagaugguuacaga

SEQ ID NO: 2161941 - RNA, 19 nt, Artificial Sequence
  Description of Artificial Sequence: Synthetic oligonucleotide
  Antisense strand to SEQ ID NO: 2161940
ucuguaaccaucuagucag

SEQ ID NO: 2161942 - RNA, 19 nt, Artificial Sequence
  Description of Artificial Sequence: Synthetic oligonucleotide
  Sense strand starting at position 1022 of SEQ ID NO: 1882983
acuagaugguuacagauaa

SEQ ID NO: 2161943 - RNA, 19 nt, Artificial Sequence
  Description of Artificial Sequence: Synthetic oligonucleotide
  Antisense strand to SEQ ID NO: 2161942
uuaucuguaaccaucuagu

SEQ ID NO: 2161944 - RNA, 19 nt, Artificial Sequence
  Description of Artificial Sequence: Synthetic oligonucleotide
  Sense strand starting at position 1392 of SEQ ID NO: 1882983
uacuuuguacuucgguuau

SEQ ID NO: 2161945 - RNA, 19 nt, Artificial Sequence
  Description of Artificial Sequence: Synthetic oligonucleotide
  Antisense strand to SEQ ID NO: 2161944
auaaccgaaguacaaagua

SEQ ID NO: 2161946 - RNA, 19 nt, Artificial Sequence
  Description of Artificial Sequence: Synthetic oligonucleotide
  Sense strand starting at position 1468 of SEQ ID NO: 1882983
cagggaaggucugcucaua

SEQ ID NO: 2161947 - RNA, 19 nt, Artificial Sequence
  Description of Artificial Sequence: Synthetic oligonucleotide
  Antisense strand to SEQ ID NO: 2161946
uaugagcagaccuucccug

SEQ ID NO: 2161948 - RNA, 19 nt, Artificial Sequence
  Description of Artificial Sequence: Synthetic oligonucleotide
  Sense strand starting at position 2208 of SEQ ID NO: 1882983
auggauaaauaaugggauu

SEQ ID NO: 2161949 - RNA, 19 nt, Artificial Sequence
  Description of Artificial Sequence: Synthetic oligonucleotide
  Antisense strand to SEQ ID NO: 2161948
aaucccauuauuuauccau

SEQ ID NO: 2161950 - RNA, 19 nt, Artificial Sequence
  Description of Artificial Sequence: Synthetic oligonucleotide
  Sense strand starting at position 2231 of SEQ ID NO: 1882983
ugcuguuuaaccgcaguua

SEQ ID NO: 2161951 - RNA, 19 nt, Artificial Sequence
  Description of Artificial Sequence: Synthetic oligonucleotide
  Antisense strand to SEQ ID NO: 2161950
uaacugcgguuaaacagca

SEQ ID NO: 2161952 - RNA, 19 nt, Artificial Sequence
  Description of Artificial Sequence: Synthetic oligonucleotide
  Sense strand starting at position 2232 of SEQ ID NO: 1882983
gcuguuuaaccgcaguuau

SEQ ID NO: 2161953 - RNA, 19 nt, Artificial Sequence
  Description of Artificial Sequence: Synthetic oligonucleotide
  Antisense strand to SEQ ID NO: 2161952
auaacugcgguuaaacagc

SEQ ID NO: 2161954 - RNA, 19 nt, Artificial Sequence
  Description of Artificial Sequence: Synthetic oligonucleotide
  Sense strand starting at position 2244 of SEQ ID NO: 1882983
caguuauugcguugaauau

SEQ ID NO: 2161955 - RNA, 19 nt, Artificial Sequence
  Description of Artificial Sequence: Synthetic oligonucleotide
  Antisense strand to SEQ ID NO: 2161954
auauucaacgcaauaacug

SEQ ID NO: 2161956 - RNA, 19 nt, Artificial Sequence
  Description of Artificial Sequence: Synthetic oligonucleotide
  Sense strand starting at position 2245 of SEQ ID NO: 1882983
aguuauugcguugaauaug

SEQ ID NO: 2161957 - RNA, 19 nt, Artificial Sequence
  Description of Artificial Sequence: Synthetic oligonucleotide
  Antisense strand to SEQ ID NO: 2161956
cauauucaacgcaauaacu

SEQ ID NO: 2161958 - RNA, 19 nt, Artificial Sequence
  Description of Artificial Sequence: Synthetic oligonucleotide
  Sense strand starting at position 2267 of SEQ ID NO: 1882983
acauguguauuggucauuu

SEQ ID NO: 2161959 - RNA, 19 nt, Artificial Sequence
  Description of Artificial Sequence: Synthetic oligonucleotide
  Antisense strand to SEQ ID NO: 2161958
aaaugaccaauacacaugu

SEQ ID NO: 2161960 - RNA, 19 nt, Artificial Sequence
  Description of Artificial Sequence: Synthetic oligonucleotide
  Sense strand starting at position 2302 of SEQ ID NO: 1882983
uguguauuauguguguaug

SEQ ID NO: 2161961 - RNA, 19 nt, Artificial Sequence
  Description of Artificial Sequence: Synthetic oligonucleotide
  Antisense strand to SEQ ID NO: 2161960
cauacacacauaauacaca

SEQ ID NO: 2161962 - RNA, 19 nt, Artificial Sequence
  Description of Artificial Sequence: Synthetic oligonucleotide
  Sense strand starting at position 2305 of SEQ ID NO: 1882983
guauuauguguguaugugu

SEQ ID NO: 2161963 - RNA, 19 nt, Artificial Sequence
  Description of Artificial Sequence: Synthetic oligonucleotide
  Antisense strand to SEQ ID NO: 2161962
acacauacacacauaauac

SEQ ID NO: 2161964 - RNA, 19 nt, Artificial Sequence
  Description of Artificial Sequence: Synthetic oligonucleotide
  Sense strand starting at position 2622 of SEQ ID NO: 1882983
ccacgcuggccauaauuau

SEQ ID NO: 2161965 - RNA, 19 nt, Artificial Sequence
  Description of Artificial Sequence: Synthetic oligonucleotide
  Antisense strand to SEQ ID NO: 2161964
auaauuauggccagcgugg

SEQ ID NO: 2161966 - RNA, 19 nt, Artificial Sequence
  Description of Artificial Sequence: Synthetic oligonucleotide
  Sense strand starting at position 2633 of SEQ ID NO: 1882983
auaauuaugugucucuguu

SEQ ID NO: 2161967 - RNA, 19 nt, Artificial Sequence
  Description of Artificial Sequence: Synthetic oligonucleotide
  Antisense strand to SEQ ID NO: 2161966
aacagagacacauaauuau

SEQ ID NO: 2161968 - RNA, 19 nt, Artificial Sequence
  Description of Artificial Sequence: Synthetic oligonucleotide
  Sense strand starting at position 2670 of SEQ ID NO: 1882983
ugccauguguccuccaaug

SEQ ID NO: 2161969 - RNA, 19 nt, Artificial Sequence
  Description of Artificial Sequence: Synthetic oligonucleotide
  Antisense strand to SEQ ID NO: 2161968
cauuggaggacacauggca

SEQ ID NO: 2161970 - RNA, 19 nt, Artificial Sequence
  Description of Artificial Sequence: Synthetic oligonucleotide
  Sense strand starting at position 2690 of SEQ ID NO: 1882983
cuguguucucagggaggau

SEQ ID NO: 2161971 - RNA, 19 nt, Artificial Sequence
  Description of Artificial Sequence: Synthetic oligonucleotide
  Antisense strand to SEQ ID NO: 2161970
auccucccugagaacacag

SEQ ID NO: 2161972 - RNA, 19 nt, Artificial Sequence
  Description of Artificial Sequence: Synthetic oligonucleotide
  Sense strand starting at position 2691 of SEQ ID NO: 1882983
uguguucucagggaggauu

SEQ ID NO: 2161973 - RNA, 19 nt, Artificial Sequence
  Description of Artificial Sequence: Synthetic oligonucleotide
  Antisense strand to SEQ ID NO: 2161972
aauccucccugagaacaca

SEQ ID NO: 2161974 - RNA, 19 nt, Artificial Sequence
  Description of Artificial Sequence: Synthetic oligonucleotide
  Sense strand starting at position 2878 of SEQ ID NO: 1882983
guaguuaugauccaggccu

SEQ ID NO: 2161975 - RNA, 19 nt, Artificial Sequence
  Description of Artificial Sequence: Synthetic oligonucleotide
  Antisense strand to SEQ ID NO: 2161974
aggccuggaucauaacuac

SEQ ID NO: 2161976 - RNA, 19 nt, Artificial Sequence
  Description of Artificial Sequence: Synthetic oligonucleotide
  Sense strand starting at position 2880 of SEQ ID NO: 1882983
aguuaugauccaggccuca

SEQ ID NO: 2161977 - RNA, 19 nt, Artificial Sequence
  Description of Artificial Sequence: Synthetic oligonucleotide
  Antisense strand to SEQ ID NO: 2161976
ugaggccuggaucauaacu

SEQ ID NO: 2161978 - RNA, 19 nt, Artificial Sequence
  Description of Artificial Sequence: Synthetic oligonucleotide
  Sense strand starting at position 3222 of SEQ ID NO: 1882983
ucuugagauaaaugguagu

SEQ ID NO: 2161979 - RNA, 19 nt, Artificial Sequence
  Description of Artificial Sequence: Synthetic oligonucleotide
  Antisense strand to SEQ ID NO: 2161978
acuaccauuuaucucaaga

SEQ ID NO: 2161980 - RNA, 19 nt, Artificial Sequence
  Description of Artificial Sequence: Synthetic oligonucleotide
  Sense strand starting at position 3228 of SEQ ID NO: 1882983
gauaaaugguaguccucuu

SEQ ID NO: 2161981 - RNA, 19 nt, Artificial Sequence
  Description of Artificial Sequence: Synthetic oligonucleotide
  Antisense strand to SEQ ID NO: 2161980
aagaggacuaccauuuauc

SEQ ID NO: 2161982 - RNA, 19 nt, Artificial Sequence
  Description of Artificial Sequence: Synthetic oligonucleotide
  Sense strand starting at position 3262 of SEQ ID NO: 1882983
uggagugcuguguucaugu

SEQ ID NO: 2161983 - RNA, 19 nt, Artificial Sequence
  Description of Artificial Sequence: Synthetic oligonucleotide
  Antisense strand to SEQ ID NO: 2161982
acaugaacacagcacucca

SEQ ID NO: 2161984 - RNA, 19 nt, Artificial Sequence
  Description of Artificial Sequence: Synthetic oligonucleotide
  Sense strand starting at position 3485 of SEQ ID NO: 1882983
gaggcagaaucguuugaac

SEQ ID NO: 2161985 - RNA, 19 nt, Artificial Sequence
  Description of Artificial Sequence: Synthetic oligonucleotide
  Antisense strand to SEQ ID NO: 2161984
guucaaacgauucugccuc

SEQ ID NO: 2161986 - RNA, 19 nt, Artificial Sequence
  Description of Artificial Sequence: Synthetic oligonucleotide
  Sense strand starting at position 3487 of SEQ ID NO: 1882983
ggcagaaucguuugaaccu

SEQ ID NO: 2161987 - RNA, 19 nt, Artificial Sequence
  Description of Artificial Sequence: Synthetic oligonucleotide
  Antisense strand to SEQ ID NO: 2161986
agguucaaacgauucugcc

SEQ ID NO: 2161988 - RNA, 19 nt, Artificial Sequence
  Description of Artificial Sequence: Synthetic oligonucleotide
  Sense strand starting at position 3728 of SEQ ID NO: 1882983
guggaguucgguugaaguu

SEQ ID NO: 2161989 - RNA, 19 nt, Artificial Sequence
  Description of Artificial Sequence: Synthetic oligonucleotide
  Antisense strand to SEQ ID NO: 2161988
aacuucaaccgaacuccac

SEQ ID NO: 2161990 - RNA, 19 nt, Artificial Sequence
  Description of Artificial Sequence: Synthetic oligonucleotide
  Sense strand starting at position 3803 of SEQ ID NO: 1882983
gagaauaacucauagguuu

SEQ ID NO: 2161991 - RNA, 19 nt, Artificial Sequence
  Description of Artificial Sequence: Synthetic oligonucleotide
  Antisense strand to SEQ ID NO: 2161990
aaaccuaugaguuauucuc

SEQ ID NO: 2161992 - RNA, 19 nt, Artificial Sequence
  Description of Artificial Sequence: Synthetic oligonucleotide
  Sense strand starting at position 3956 of SEQ ID NO: 1882983
aagagaucuguaggaguga

SEQ ID NO: 2161993 - RNA, 19 nt, Artificial Sequence
  Description of Artificial Sequence: Synthetic oligonucleotide
  Antisense strand to SEQ ID NO: 2161992
ucacuccuacagaucucuu

SEQ ID NO: 2161994 - RNA, 19 nt, Artificial Sequence
  Description of Artificial Sequence: Synthetic oligonucleotide
  Sense strand starting at position 3957 of SEQ ID NO: 1882983
agagaucuguaggagugau

SEQ ID NO: 2161995 - RNA, 19 nt, Artificial Sequence
  Description of Artificial Sequence: Synthetic oligonucleotide
  Antisense strand to SEQ ID NO: 2161994
aucacuccuacagaucucu

SEQ ID NO: 2161996 - RNA, 19 nt, Artificial Sequence
  Description of Artificial Sequence: Synthetic oligonucleotide
  Sense strand starting at position 149 of SEQ ID NO: 1882984
cuagaaauggucuagccaa

SEQ ID NO: 2161997 - RNA, 19 nt, Artificial Sequence
  Description of Artificial Sequence: Synthetic oligonucleotide
  Antisense strand to SEQ ID NO: 2161996
uuggcuagaccauuucuag

SEQ ID NO: 2161998 - RNA, 19 nt, Artificial Sequence
  Description of Artificial Sequence: Synthetic oligonucleotide
  Sense strand starting at position 236 of SEQ ID NO: 1882984
ugacuuaugucaccaugga

SEQ ID NO: 2161999 - RNA, 19 nt, Artificial Sequence
  Description of Artificial Sequence: Synthetic oligonucleotide
  Antisense strand to SEQ ID NO: 2161998
uccauggugacauaaguca

SEQ ID NO: 2162000 - RNA, 19 nt, Artificial Sequence
  Description of Artificial Sequence: Synthetic oligonucleotide
  Sense strand starting at position 328 of SEQ ID NO: 1882984
gguaaaggauuccuacuuu

SEQ ID NO: 2162001 - RNA, 19 nt, Artificial Sequence
  Description of Artificial Sequence: Synthetic oligonucleotide
  Antisense strand to SEQ ID NO: 2162000
aaaguaggaauccuuuacc

SEQ ID NO: 2162002 - RNA, 19 nt, Artificial Sequence
  Description of Artificial Sequence: Synthetic oligonucleotide
  Sense strand starting at position 792 of SEQ ID NO: 1882984
aggagacacucuuuauucu

SEQ ID NO: 2162003 - RNA, 19 nt, Artificial Sequence
  Description of Artificial Sequence: Synthetic oligonucleotide
  Antisense strand to SEQ ID NO: 2162002
agaauaaagagugucuccu

SEQ ID NO: 2162004 - RNA, 19 nt, Artificial Sequence
  Description of Artificial Sequence: Synthetic oligonucleotide
  Sense strand starting at position 1177 of SEQ ID NO: 1882984
accaaugaggccugaagau

SEQ ID NO: 2162005 - RNA, 19 nt, Artificial Sequence
  Description of Artificial Sequence: Synthetic oligonucleotide
  Antisense strand to SEQ ID NO: 2162004
aucuucaggccucauuggu

SEQ ID NO: 2162006 - RNA, 19 nt, Artificial Sequence
  Description of Artificial Sequence: Synthetic oligonucleotide
  Sense strand starting at position 2174 of SEQ ID NO: 1882984
guuccuuaccuggagaggu

SEQ ID NO: 2162007 - RNA, 19 nt, Artificial Sequence
  Description of Artificial Sequence: Synthetic oligonucleotide
  Antisense strand to SEQ ID NO: 2162006
accucuccagguaaggaac

SEQ ID NO: 2162008 - RNA, 19 nt, Artificial Sequence
  Description of Artificial Sequence: Synthetic oligonucleotide
  Sense strand starting at position 2539 of SEQ ID NO: 1882984
uugugauacuacgucauuu

SEQ ID NO: 2162009 - RNA, 19 nt, Artificial Sequence
  Description of Artificial Sequence: Synthetic oligonucleotide
  Antisense strand to SEQ ID NO: 2162008
aaaugacguaguaucacaa

SEQ ID NO: 2162010 - RNA, 19 nt, Artificial Sequence
  Description of Artificial Sequence: Synthetic oligonucleotide
  Sense strand starting at position 2618 of SEQ ID NO: 1882984
ccugucuaccuagaaguga

SEQ ID NO: 2162011 - RNA, 19 nt, Artificial Sequence
  Description of Artificial Sequence: Synthetic oligonucleotide
  Antisense strand to SEQ ID NO: 2162010
ucacuucuagguagacagg

SEQ ID NO: 2162012 - RNA, 19 nt, Artificial Sequence
  Description of Artificial Sequence: Synthetic oligonucleotide
  Sense strand starting at position 2665 of SEQ ID NO: 1882984
gagagaagggugugucaaa

SEQ ID NO: 2162013 - RNA, 19 nt, Artificial Sequence
  Description of Artificial Sequence: Synthetic oligonucleotide
  Antisense strand to SEQ ID NO: 2162012
uuugacacacccuucucuc

SEQ ID NO: 2162014 - RNA, 19 nt, Artificial Sequence
  Description of Artificial Sequence: Synthetic oligonucleotide
  Sense strand starting at position 2672 of SEQ ID NO: 1882984
gggugugucaaacagauga

SEQ ID NO: 2162015 - RNA, 19 nt, Artificial Sequence
  Description of Artificial Sequence: Synthetic oligonucleotide
  Antisense strand to SEQ ID NO: 2162014
ucaucuguuugacacaccc

SEQ ID NO: 2162016 - RNA, 19 nt, Artificial Sequence
  Description of Artificial Sequence: Synthetic oligonucleotide
  Sense strand starting at position 2674 of SEQ ID NO: 1882984
gugugucaaacagaugaga

SEQ ID NO: 2162017 - RNA, 19 nt, Artificial Sequence
  Description of Artificial Sequence: Synthetic oligonucleotide
  Antisense strand to SEQ ID NO: 2162016
ucucaucuguuugacacac

SEQ ID NO: 2162018 - RNA, 19 nt, Artificial Sequence
  Description of Artificial Sequence: Synthetic oligonucleotide
  Sense strand starting at position 2886 of SEQ ID NO: 1882984
augggugucauuuguuaac

SEQ ID NO: 2162019 - RNA, 19 nt, Artificial Sequence
  Description of Artificial Sequence: Synthetic oligonucleotide
  Antisense strand to SEQ ID NO: 2162018
guuaacaaaugacacccau

SEQ ID NO: 2162020 - RNA, 19 nt, Artificial Sequence
  Description of Artificial Sequence: Synthetic oligonucleotide
  Sense strand starting at position 3448 of SEQ ID NO: 1882984
acccucaaggucuauguua

SEQ ID NO: 2162021 - RNA, 19 nt, Artificial Sequence
  Description of Artificial Sequence: Synthetic oligonucleotide
  Antisense strand to SEQ ID NO: 2162020
uaacauagaccuugagggu

SEQ ID NO: 2162022 - RNA, 19 nt, Artificial Sequence
  Description of Artificial Sequence: Synthetic oligonucleotide
  Sense strand starting at position 3663 of SEQ ID NO: 1882984
gggacuuuccugcaaugga

SEQ ID NO: 2162023 - RNA, 19 nt, Artificial Sequence
  Description of Artificial Sequence: Synthetic oligonucleotide
  Antisense strand to SEQ ID NO: 2162022
uccauugcaggaaaguccc

SEQ ID NO: 2162024 - RNA, 19 nt, Artificial Sequence
  Description of Artificial Sequence: Synthetic oligonucleotide
  Sense strand starting at position 3741 of SEQ ID NO: 1882984
uaguauugagggcagugau

SEQ ID NO: 2162025 - RNA, 19 nt, Artificial Sequence
  Description of Artificial Sequence: Synthetic oligonucleotide
  Antisense strand to SEQ ID NO: 2162024
aucacugcccucaauacua

SEQ ID NO: 2162026 - RNA, 19 nt, Artificial Sequence
  Description of Artificial Sequence: Synthetic oligonucleotide
  Sense strand starting at position 3757 of SEQ ID NO: 1882984
gaugucaaacagugaauaa

SEQ ID NO: 2162027 - RNA, 19 nt, Artificial Sequence
  Description of Artificial Sequence: Synthetic oligonucleotide
  Antisense strand to SEQ ID NO: 2162026
uuauucacuguuugacauc

SEQ ID NO: 2162028 - RNA, 19 nt, Artificial Sequence
  Description of Artificial Sequence: Synthetic oligonucleotide
  Sense strand starting at position 3835 of SEQ ID NO: 1882984
gucagaauauuugaaauca

SEQ ID NO: 2162029 - RNA, 19 nt, Artificial Sequence
  Description of Artificial Sequence: Synthetic oligonucleotide
  Antisense strand to SEQ ID NO: 2162028
ugauuucaaauauucugac

SEQ ID NO: 2162030 - RNA, 19 nt, Artificial Sequence
  Description of Artificial Sequence: Synthetic oligonucleotide
  Sense strand starting at position 3846 of SEQ ID NO: 1882984
ugaaaucaaccuugcuaga

SEQ ID NO: 2162031 - RNA, 19 nt, Artificial Sequence
  Description of Artificial Sequence: Synthetic oligonucleotide
  Antisense strand to SEQ ID NO: 2162030
ucuagcaagguugauuuca

SEQ ID NO: 2162032 - RNA, 19 nt, Artificial Sequence
  Description of Artificial Sequence: Synthetic oligonucleotide
  Sense strand starting at position 3946 of SEQ ID NO: 1882984
gguuguauccuugaaauac

SEQ ID NO: 2162033 - RNA, 19 nt, Artificial Sequence
  Description of Artificial Sequence: Synthetic oligonucleotide
  Antisense strand to SEQ ID NO: 2162032
guauuucaaggauacaacc

SEQ ID NO: 2162034 - RNA, 19 nt, Artificial Sequence
  Description of Artificial Sequence: Synthetic oligonucleotide
  Sense strand starting at position 3971 of SEQ ID NO: 1882984
guuucuagugacuagaaau

SEQ ID NO: 2162035 - RNA, 19 nt, Artificial Sequence
  Description of Artificial Sequence: Synthetic oligonucleotide
  Antisense strand to SEQ ID NO: 2162034
auuucuagucacuagaaac

SEQ ID NO: 2162036 - RNA, 19 nt, Artificial Sequence
  Description of Artificial Sequence: Synthetic oligonucleotide
  Sense strand starting at position 119 of SEQ ID NO: 1882985
cuggaaauggucuagccaa

SEQ ID NO: 2162037 - RNA, 19 nt, Artificial Sequence
  Description of Artificial Sequence: Synthetic oligonucleotide
  Antisense strand to SEQ ID NO: 2162036
uuggcuagaccauuuccag

SEQ ID NO: 2162038 - RNA, 19 nt, Artificial Sequence
  Description of Artificial Sequence: Synthetic oligonucleotide
  Sense strand starting at position 206 of SEQ ID NO: 1882985
ugacuuaugucaccaugga

SEQ ID NO: 2162039 - RNA, 19 nt, Artificial Sequence
  Description of Artificial Sequence: Synthetic oligonucleotide
  Antisense strand to SEQ ID NO: 2162038
uccauggugacauaaguca

SEQ ID NO: 2162040 - RNA, 19 nt, Artificial Sequence
  Description of Artificial Sequence: Synthetic oligonucleotide
  Sense strand starting at position 298 of SEQ ID NO: 1882985
gguaaaggauuccuacuuu

SEQ ID NO: 2162041 - RNA, 19 nt, Artificial Sequence
  Description of Artificial Sequence: Synthetic oligonucleotide
  Antisense strand to SEQ ID NO: 2162040
aaaguaggaauccuuuacc

SEQ ID NO: 2162042 - RNA, 19 nt, Artificial Sequence
  Description of Artificial Sequence: Synthetic oligonucleotide
  Sense strand starting at position 761 of SEQ ID NO: 1882985
aggagacacucuuuauucu

SEQ ID NO: 2162043 - RNA, 19 nt, Artificial Sequence
  Description of Artificial Sequence: Synthetic oligonucleotide
  Antisense strand to SEQ ID NO: 2162042
agaauaaagagugucuccu

SEQ ID NO: 2162044 - RNA, 19 nt, Artificial Sequence
  Description of Artificial Sequence: Synthetic oligonucleotide
  Sense strand starting at position 1176 of SEQ ID NO: 1882985
accaaugaggccugaagau

SEQ ID NO: 2162045 - RNA, 19 nt, Artificial Sequence
  Description of Artificial Sequence: Synthetic oligonucleotide
  Antisense strand to SEQ ID NO: 2162044
aucuucaggccucauuggu

SEQ ID NO: 2162046 - RNA, 19 nt, Artificial Sequence
  Description of Artificial Sequence: Synthetic oligonucleotide
  Sense strand starting at position 2173 of SEQ ID NO: 1882985
guuccuuaccuggagaggu

SEQ ID NO: 2162047 - RNA, 19 nt, Artificial Sequence
  Description of Artificial Sequence: Synthetic oligonucleotide
  Antisense strand to SEQ ID NO: 2162046
accucuccagguaaggaac

SEQ ID NO: 2162048 - RNA, 19 nt, Artificial Sequence
  Description of Artificial Sequence: Synthetic oligonucleotide
  Sense strand starting at position 2538 of SEQ ID NO: 1882985
uugugauacuacgucauuu

SEQ ID NO: 2162049 - RNA, 19 nt, Artificial Sequence
  Description of Artificial Sequence: Synthetic oligonucleotide
  Antisense strand to SEQ ID NO: 2162048
aaaugacguaguaucacaa

SEQ ID NO: 2162050 - RNA, 19 nt, Artificial Sequence
  Description of Artificial Sequence: Synthetic oligonucleotide
  Sense strand starting at position 2617 of SEQ ID NO: 1882985
ccugucuaccuagaaguga

SEQ ID NO: 2162051 - RNA, 19 nt, Artificial Sequence
  Description of Artificial Sequence: Synthetic oligonucleotide
  Antisense strand to SEQ ID NO: 2162050
ucacuucuagguagacagg

SEQ ID NO: 2162052 - RNA, 19 nt, Artificial Sequence
  Description of Artificial Sequence: Synthetic oligonucleotide
  Sense strand starting at position 2664 of SEQ ID NO: 1882985
gagagaagggugugucaaa

SEQ ID NO: 2162053 - RNA, 19 nt, Artificial Sequence
  Description of Artificial Sequence: Synthetic oligonucleotide
  Antisense strand to SEQ ID NO: 2162052
uuugacacacccuucucuc

SEQ ID NO: 2162054 - RNA, 19 nt, Artificial Sequence
  Description of Artificial Sequence: Synthetic oligonucleotide
  Sense strand starting at position 2671 of SEQ ID NO: 1882985
gggugugucaaacagauga

SEQ ID NO: 2162055 - RNA, 19 nt, Artificial Sequence
  Description of Artificial Sequence: Synthetic oligonucleotide
  Antisense strand to SEQ ID NO: 2162054
ucaucuguuugacacaccc

SEQ ID NO: 2162056 - RNA, 19 nt, Artificial Sequence
  Description of Artificial Sequence: Synthetic oligonucleotide
  Sense strand starting at position 2673 of SEQ ID NO: 1882985
gugugucaaacagaugaga

SEQ ID NO: 2162057 - RNA, 19 nt, Artificial Sequence
  Description of Artificial Sequence: Synthetic oligonucleotide
  Antisense strand to SEQ ID NO: 2162056
ucucaucuguuugacacac

SEQ ID NO: 2162058 - RNA, 19 nt, Artificial Sequence
  Description of Artificial Sequence: Synthetic oligonucleotide
  Sense strand starting at position 2885 of SEQ ID NO: 1882985
augggugucauuuguuaac

SEQ ID NO: 2162059 - RNA, 19 nt, Artificial Sequence
  Description of Artificial Sequence: Synthetic oligonucleotide
  Antisense strand to SEQ ID NO: 2162058
guuaacaaaugacacccau

SEQ ID NO: 2162060 - RNA, 19 nt, Artificial Sequence
  Description of Artificial Sequence: Synthetic oligonucleotide
  Sense strand starting at position 3662 of SEQ ID NO: 1882985
gggacuuuccugcaaugga

SEQ ID NO: 2162061 - RNA, 19 nt, Artificial Sequence
  Description of Artificial Sequence: Synthetic oligonucleotide
  Antisense strand to SEQ ID NO: 2162060
uccauugcaggaaaguccc

SEQ ID NO: 2162062 - RNA, 19 nt, Artificial Sequence
  Description of Artificial Sequence: Synthetic oligonucleotide
  Sense strand starting at position 3698 of SEQ ID NO: 1882985
uagucagugguccagaaag

SEQ ID NO: 2162063 - RNA, 19 nt, Artificial Sequence
  Description of Artificial Sequence: Synthetic oligonucleotide
  Antisense strand to SEQ ID NO: 2162062
cuuucuggaccacugacua

SEQ ID NO: 2162064 - RNA, 19 nt, Artificial Sequence
  Description of Artificial Sequence: Synthetic oligonucleotide
  Sense strand starting at position 3740 of SEQ ID NO: 1882985
uaguauugagggcagugau

SEQ ID NO: 2162065 - RNA, 19 nt, Artificial Sequence
  Description of Artificial Sequence: Synthetic oligonucleotide
  Antisense strand to SEQ ID NO: 2162064
aucacugcccucaauacua

SEQ ID NO: 2162066 - RNA, 19 nt, Artificial Sequence
  Description of Artificial Sequence: Synthetic oligonucleotide
  Sense strand starting at position 3756 of SEQ ID NO: 1882985
gaugucaaacagugaauaa

SEQ ID NO: 2162067 - RNA, 19 nt, Artificial Sequence
  Description of Artificial Sequence: Synthetic oligonucleotide
  Antisense strand to SEQ ID NO: 2162066
uuauucacuguuugacauc

SEQ ID NO: 2162068 - RNA, 19 nt, Artificial Sequence
  Description of Artificial Sequence: Synthetic oligonucleotide
  Sense strand starting at position 3834 of SEQ ID NO: 1882985
gucagaauauuugaaauca

SEQ ID NO: 2162069 - RNA, 19 nt, Artificial Sequence
  Description of Artificial Sequence: Synthetic oligonucleotide
  Antisense strand to SEQ ID NO: 2162068
ugauuucaaauauucugac

SEQ ID NO: 2162070 - RNA, 19 nt, Artificial Sequence
  Description of Artificial Sequence: Synthetic oligonucleotide
  Sense strand starting at position 3845 of SEQ ID NO: 1882985
ugaaaucaaccuugcuaga

SEQ ID NO: 2162071 - RNA, 19 nt, Artificial Sequence
  Description of Artificial Sequence: Synthetic oligonucleotide
  Antisense strand to SEQ ID NO: 2162070
ucuagcaagguugauuuca

SEQ ID NO: 2162072 - RNA, 19 nt, Artificial Sequence
  Description of Artificial Sequence: Synthetic oligonucleotide
  Sense strand starting at position 3945 of SEQ ID NO: 1882985
gguuguauccuugaaauac

SEQ ID NO: 2162073 - RNA, 19 nt, Artificial Sequence
  Description of Artificial Sequence: Synthetic oligonucleotide
  Antisense strand to SEQ ID NO: 2162072
guauuucaaggauacaacc

SEQ ID NO: 2162074 - RNA, 19 nt, Artificial Sequence
  Description of Artificial Sequence: Synthetic oligonucleotide
  Sense strand starting at position 3970 of SEQ ID NO: 1882985
guuucuagugacuagaaau

SEQ ID NO: 2162075 - RNA, 19 nt, Artificial Sequence
  Description of Artificial Sequence: Synthetic oligonucleotide
  Antisense strand to SEQ ID NO: 2162074
auuucuagucacuagaaac

SEQ ID NO: 2162076 - RNA, 19 nt, Artificial Sequence
  Description of Artificial Sequence: Synthetic oligonucleotide
  Sense strand starting at position 177 of SEQ ID NO: 1882986
aguuaacuccuguacauga

SEQ ID NO: 2162077 - RNA, 19 nt, Artificial Sequence
  Description of Artificial Sequence: Synthetic oligonucleotide
  Antisense strand to SEQ ID NO: 2162076
ucauguacaggaguuaacu

SEQ ID NO: 2162078 - RNA, 19 nt, Artificial Sequence
  Description of Artificial Sequence: Synthetic oligonucleotide
  Sense strand starting at position 182 of SEQ ID NO: 1882986
acuccuguacaugaguuaa

SEQ ID NO: 2162079 - RNA, 19 nt, Artificial Sequence
  Description of Artificial Sequence: Synthetic oligonucleotide
  Antisense strand to SEQ ID NO: 2162078
uuaacucauguacaggagu

SEQ ID NO: 2162080 - RNA, 19 nt, Artificial Sequence
  Description of Artificial Sequence: Synthetic oligonucleotide
  Sense strand starting at position 388 of SEQ ID NO: 1882986
cgguguauuagucugcuuu

SEQ ID NO: 2162081 - RNA, 19 nt, Artificial Sequence
  Description of Artificial Sequence: Synthetic oligonucleotide
  Antisense strand to SEQ ID NO: 2162080
aaagcagacuaauacaccg

SEQ ID NO: 2162082 - RNA, 19 nt, Artificial Sequence
  Description of Artificial Sequence: Synthetic oligonucleotide
  Sense strand starting at position 960 of SEQ ID NO: 1882986
gucaguaaagcacagauaa

SEQ ID NO: 2162083 - RNA, 19 nt, Artificial Sequence
  Description of Artificial Sequence: Synthetic oligonucleotide
  Antisense strand to SEQ ID NO: 2162082
uuaucugugcuuuacugac

SEQ ID NO: 2162084 - RNA, 19 nt, Artificial Sequence
  Description of Artificial Sequence: Synthetic oligonucleotide
  Sense strand starting at position 1005 of SEQ ID NO: 1882986
gcaauaauugggcaucaag

SEQ ID NO: 2162085 - RNA, 19 nt, Artificial Sequence
  Description of Artificial Sequence: Synthetic oligonucleotide
  Antisense strand to SEQ ID NO: 2162084
cuugaugcccaauuauugc

SEQ ID NO: 2162086 - RNA, 19 nt, Artificial Sequence
  Description of Artificial Sequence: Synthetic oligonucleotide
  Sense strand starting at position 1063 of SEQ ID NO: 1882986
accucuuaggaaugacuuu

SEQ ID NO: 2162087 - RNA, 19 nt, Artificial Sequence
  Description of Artificial Sequence: Synthetic oligonucleotide
  Antisense strand to SEQ ID NO: 2162086
aaagucauuccuaagaggu

SEQ ID NO: 2162088 - RNA, 19 nt, Artificial Sequence
  Description of Artificial Sequence: Synthetic oligonucleotide
  Sense strand starting at position 1562 of SEQ ID NO: 1882986
aagugauggccagagugau

SEQ ID NO: 2162089 - RNA, 19 nt, Artificial Sequence
  Description of Artificial Sequence: Synthetic oligonucleotide
  Antisense strand to SEQ ID NO: 2162088
aucacucuggccaucacuu

SEQ ID NO: 2162090 - RNA, 19 nt, Artificial Sequence
  Description of Artificial Sequence: Synthetic oligonucleotide
  Sense strand starting at position 2369 of SEQ ID NO: 1882986
aucaaugaauuagcaguaa

SEQ ID NO: 2162091 - RNA, 19 nt, Artificial Sequence
  Description of Artificial Sequence: Synthetic oligonucleotide
  Antisense strand to SEQ ID NO: 2162090
uuacugcuaauucauugau

SEQ ID NO: 2162092 - RNA, 19 nt, Artificial Sequence
  Description of Artificial Sequence: Synthetic oligonucleotide
  Sense strand starting at position 2608 of SEQ ID NO: 1882986
caguacuaacugggauaua

SEQ ID NO: 2162093 - RNA, 19 nt, Artificial Sequence
  Description of Artificial Sequence: Synthetic oligonucleotide
  Antisense strand to SEQ ID NO: 2162092
uauaucccaguuaguacug

SEQ ID NO: 2162094 - RNA, 19 nt, Artificial Sequence
  Description of Artificial Sequence: Synthetic oligonucleotide
  Sense strand starting at position 2680 of SEQ ID NO: 1882986
uugugaaacccacauguaa

SEQ ID NO: 2162095 - RNA, 19 nt, Artificial Sequence
  Description of Artificial Sequence: Synthetic oligonucleotide
  Antisense strand to SEQ ID NO: 2162094
uuacauguggguuucacaa

SEQ ID NO: 2162096 - RNA, 19 nt, Artificial Sequence
  Description of Artificial Sequence: Synthetic oligonucleotide
  Sense strand starting at position 2744 of SEQ ID NO: 1882986
gaaacauugaguggagagu

SEQ ID NO: 2162097 - RNA, 19 nt, Artificial Sequence
  Description of Artificial Sequence: Synthetic oligonucleotide
  Antisense strand to SEQ ID NO: 2162096
acucuccacucaauguuuc

SEQ ID NO: 2162098 - RNA, 19 nt, Artificial Sequence
  Description of Artificial Sequence: Synthetic oligonucleotide
  Sense strand starting at position 2787 of SEQ ID NO: 1882986
gcgggugcuuugaugaaau

SEQ ID NO: 2162099 - RNA, 19 nt, Artificial Sequence
  Description of Artificial Sequence: Synthetic oligonucleotide
  Antisense strand to SEQ ID NO: 2162098
auuucaucaaagcacccgc

SEQ ID NO: 2162100 - RNA, 19 nt, Artificial Sequence
  Description of Artificial Sequence: Synthetic oligonucleotide
  Sense strand starting at position 2799 of SEQ ID NO: 1882986
augaaaucucugggaggca

SEQ ID NO: 2162101 - RNA, 19 nt, Artificial Sequence
  Description of Artificial Sequence: Synthetic oligonucleotide
  Antisense strand to SEQ ID NO: 2162100
ugccucccagagauuucau

SEQ ID NO: 2162102 - RNA, 19 nt, Artificial Sequence
  Description of Artificial Sequence: Synthetic oligonucleotide
  Sense strand starting at position 2817 of SEQ ID NO: 1882986
acagcagaagaaugugauu

SEQ ID NO: 2162103 - RNA, 19 nt, Artificial Sequence
  Description of Artificial Sequence: Synthetic oligonucleotide
  Antisense strand to SEQ ID NO: 2162102
aaucacauucuucugcugu

SEQ ID NO: 2162104 - RNA, 19 nt, Artificial Sequence
  Description of Artificial Sequence: Synthetic oligonucleotide
  Sense strand starting at position 2915 of SEQ ID NO: 1882986
caauauggaguguagucau

SEQ ID NO: 2162105 - RNA, 19 nt, Artificial Sequence
  Description of Artificial Sequence: Synthetic oligonucleotide
  Antisense strand to SEQ ID NO: 2162104
augacuacacuccauauug

SEQ ID NO: 2162106 - RNA, 19 nt, Artificial Sequence
  Description of Artificial Sequence: Synthetic oligonucleotide
  Sense strand starting at position 3037 of SEQ ID NO: 1882986
gucuacagucuggauagau

SEQ ID NO: 2162107 - RNA, 19 nt, Artificial Sequence
  Description of Artificial Sequence: Synthetic oligonucleotide
  Antisense strand to SEQ ID NO: 2162106
aucuauccagacuguagac

SEQ ID NO: 2162108 - RNA, 19 nt, Artificial Sequence
  Description of Artificial Sequence: Synthetic oligonucleotide
  Sense strand starting at position 3176 of SEQ ID NO: 1882986
aagaaauguguugaguacu

SEQ ID NO: 2162109 - RNA, 19 nt, Artificial Sequence
  Description of Artificial Sequence: Synthetic oligonucleotide
  Antisense strand to SEQ ID NO: 2162108
aguacucaacacauuucuu

SEQ ID NO: 2162110 - RNA, 19 nt, Artificial Sequence
  Description of Artificial Sequence: Synthetic oligonucleotide
  Sense strand starting at position 3179 of SEQ ID NO: 1882986
aaauguguugaguacuaaa

SEQ ID NO: 2162111 - RNA, 19 nt, Artificial Sequence
  Description of Artificial Sequence: Synthetic oligonucleotide
  Antisense strand to SEQ ID NO: 2162110
uuuaguacucaacacauuu

SEQ ID NO: 2162112 - RNA, 19 nt, Artificial Sequence
  Description of Artificial Sequence: Synthetic oligonucleotide
  Sense strand starting at position 3296 of SEQ ID NO: 1882986
gaugcaguuccugaacaaa

SEQ ID NO: 2162113 - RNA, 19 nt, Artificial Sequence
  Description of Artificial Sequence: Synthetic oligonucleotide
  Antisense strand to SEQ ID NO: 2162112
uuuguucaggaacugcauc

SEQ ID NO: 2162114 - RNA, 19 nt, Artificial Sequence
  Description of Artificial Sequence: Synthetic oligonucleotide
  Sense strand starting at position 3360 of SEQ ID NO: 1882986
aggaaaccucauugaagca

SEQ ID NO: 2162115 - RNA, 19 nt, Artificial Sequence
  Description of Artificial Sequence: Synthetic oligonucleotide
  Antisense strand to SEQ ID NO: 2162114
ugcuucaaugagguuuccu

SEQ ID NO: 2162116 - RNA, 19 nt, Artificial Sequence
  Description of Artificial Sequence: Synthetic oligonucleotide
  Sense strand starting at position 3444 of SEQ ID NO: 1882986
cauuauugauaggugauca

SEQ ID NO: 2162117 - RNA, 19 nt, Artificial Sequence
  Description of Artificial Sequence: Synthetic oligonucleotide
  Antisense strand to SEQ ID NO: 2162116
ugaucaccuaucaauaaug

SEQ ID NO: 2162118 - RNA, 19 nt, Artificial Sequence
  Description of Artificial Sequence: Synthetic oligonucleotide
  Sense strand starting at position 3457 of SEQ ID NO: 1882986
ugaucaaguuaccuugaca

SEQ ID NO: 2162119 - RNA, 19 nt, Artificial Sequence
  Description of Artificial Sequence: Synthetic oligonucleotide
  Antisense strand to SEQ ID NO: 2162118
ugucaagguaacuugauca

SEQ ID NO: 2162120 - RNA, 19 nt, Artificial Sequence
  Description of Artificial Sequence: Synthetic oligonucleotide
  Sense strand starting at position 187 of SEQ ID NO: 1882987
ccguacaugaguuaauaag

SEQ ID NO: 2162121 - RNA, 19 nt, Artificial Sequence
  Description of Artificial Sequence: Synthetic oligonucleotide
  Antisense strand to SEQ ID NO: 2162120
cuuauuaacucauguacgg

SEQ ID NO: 2162122 - RNA, 19 nt, Artificial Sequence
  Description of Artificial Sequence: Synthetic oligonucleotide
  Sense strand starting at position 389 of SEQ ID NO: 1882987
cgguguauuagucugcuuu

SEQ ID NO: 2162123 - RNA, 19 nt, Artificial Sequence
  Description of Artificial Sequence: Synthetic oligonucleotide
  Antisense strand to SEQ ID NO: 2162122
aaagcagacuaauacaccg

SEQ ID NO: 2162124 - RNA, 19 nt, Artificial Sequence
  Description of Artificial Sequence: Synthetic oligonucleotide
  Sense strand starting at position 771 of SEQ ID NO: 1882987
aaguaaguggccuguauuu

SEQ ID NO: 2162125 - RNA, 19 nt, Artificial Sequence
  Description of Artificial Sequence: Synthetic oligonucleotide
  Antisense strand to SEQ ID NO: 2162124
aaauacaggccacuuacuu

SEQ ID NO: 2162126 - RNA, 19 nt, Artificial Sequence
  Description of Artificial Sequence: Synthetic oligonucleotide
  Sense strand starting at position 2370 of SEQ ID NO: 1882987
aucaaugaauuagcaguaa

SEQ ID NO: 2162127 - RNA, 19 nt, Artificial Sequence
  Description of Artificial Sequence: Synthetic oligonucleotide
  Antisense strand to SEQ ID NO: 2162126
uuacugcuaauucauugau

SEQ ID NO: 2162128 - RNA, 19 nt, Artificial Sequence
  Description of Artificial Sequence: Synthetic oligonucleotide
  Sense strand starting at position 2609 of SEQ ID NO: 1882987
caguacuaacugggauaua

SEQ ID NO: 2162129 - RNA, 19 nt, Artificial Sequence
  Description of Artificial Sequence: Synthetic oligonucleotide
  Antisense strand to SEQ ID NO: 2162128
uauaucccaguuaguacug

SEQ ID NO: 2162130 - RNA, 19 nt, Artificial Sequence
  Description of Artificial Sequence: Synthetic oligonucleotide
  Sense strand starting at position 2681 of SEQ ID NO: 1882987
uugugaaacccacauguaa

SEQ ID NO: 2162131 - RNA, 19 nt, Artificial Sequence
  Description of Artificial Sequence: Synthetic oligonucleotide
  Antisense strand to SEQ ID NO: 2162130
uuacauguggguuucacaa

SEQ ID NO: 2162132 - RNA, 19 nt, Artificial Sequence
  Description of Artificial Sequence: Synthetic oligonucleotide
  Sense strand starting at position 2745 of SEQ ID NO: 1882987
gaaacauugaguggagagu

SEQ ID NO: 2162133 - RNA, 19 nt, Artificial Sequence
  Description of Artificial Sequence: Synthetic oligonucleotide
  Antisense strand to SEQ ID NO: 2162132
acucuccacucaauguuuc

SEQ ID NO: 2162134 - RNA, 19 nt, Artificial Sequence
  Description of Artificial Sequence: Synthetic oligonucleotide
  Sense strand starting at position 2788 of SEQ ID NO: 1882987
gcgggugcuuugaugaaau

SEQ ID NO: 2162135 - RNA, 19 nt, Artificial Sequence
  Description of Artificial Sequence: Synthetic oligonucleotide
  Antisense strand to SEQ ID NO: 2162134
auuucaucaaagcacccgc

SEQ ID NO: 2162136 - RNA, 19 nt, Artificial Sequence
  Description of Artificial Sequence: Synthetic oligonucleotide
  Sense strand starting at position 2800 of SEQ ID NO: 1882987
augaaaucucugggaggca

SEQ ID NO: 2162137 - RNA, 19 nt, Artificial Sequence
  Description of Artificial Sequence: Synthetic oligonucleotide
  Antisense strand to SEQ ID NO: 2162136
ugccucccagagauuucau

SEQ ID NO: 2162138 - RNA, 19 nt, Artificial Sequence
  Description of Artificial Sequence: Synthetic oligonucleotide
  Sense strand starting at position 2818 of SEQ ID NO: 1882987
acagcagaagaaugugauu

SEQ ID NO: 2162139 - RNA, 19 nt, Artificial Sequence
  Description of Artificial Sequence: Synthetic oligonucleotide
  Antisense strand to SEQ ID NO: 2162138
aaucacauucuucugcugu

SEQ ID NO: 2162140 - RNA, 19 nt, Artificial Sequence
  Description of Artificial Sequence: Synthetic oligonucleotide
  Sense strand starting at position 2916 of SEQ ID NO: 1882987
caauauggaguguagucau

SEQ ID NO: 2162141 - RNA, 19 nt, Artificial Sequence
  Description of Artificial Sequence: Synthetic oligonucleotide
  Antisense strand to SEQ ID NO: 2162140
augacuacacuccauauug

SEQ ID NO: 2162142 - RNA, 19 nt, Artificial Sequence
  Description of Artificial Sequence: Synthetic oligonucleotide
  Sense strand starting at position 3038 of SEQ ID NO: 1882987
gucuacagucuggauagau

SEQ ID NO: 2162143 - RNA, 19 nt, Artificial Sequence
  Description of Artificial Sequence: Synthetic oligonucleotide
  Antisense strand to SEQ ID NO: 2162142
aucuauccagacuguagac

SEQ ID NO: 2162144 - RNA, 19 nt, Artificial Sequence
  Description of Artificial Sequence: Synthetic oligonucleotide
  Sense strand starting at position 3177 of SEQ ID NO: 1882987
aagaaauguguugaguacu

SEQ ID NO: 2162145 - RNA, 19 nt, Artificial Sequence
  Description of Artificial Sequence: Synthetic oligonucleotide
  Antisense strand to SEQ ID NO: 2162144
aguacucaacacauuucuu

SEQ ID NO: 2162146 - RNA, 19 nt, Artificial Sequence
  Description of Artificial Sequence: Synthetic oligonucleotide
  Sense strand starting at position 3180 of SEQ ID NO: 1882987
aaauguguugaguacuaaa

SEQ ID NO: 2162147 - RNA, 19 nt, Artificial Sequence
  Description of Artificial Sequence: Synthetic oligonucleotide
  Antisense strand to SEQ ID NO: 2162146
uuuaguacucaacacauuu

SEQ ID NO: 2162148 - RNA, 19 nt, Artificial Sequence
  Description of Artificial Sequence: Synthetic oligonucleotide
  Sense strand starting at position 3297 of SEQ ID NO: 1882987
gaugcaguuccugaacaaa

SEQ ID NO: 2162149 - RNA, 19 nt, Artificial Sequence
  Description of Artificial Sequence: Synthetic oligonucleotide
  Antisense strand to SEQ ID NO: 2162148
uuuguucaggaacugcauc

SEQ ID NO: 2162150 - RNA, 19 nt, Artificial Sequence
  Description of Artificial Sequence: Synthetic oligonucleotide
  Sense strand starting at position 3361 of SEQ ID NO: 1882987
aggaaaccucauugaagca

SEQ ID NO: 2162151 - RNA, 19 nt, Artificial Sequence
  Description of Artificial Sequence: Synthetic oligonucleotide
  Antisense strand to SEQ ID NO: 2162150
ugcuucaaugagguuuccu

SEQ ID NO: 2162152 - RNA, 19 nt, Artificial Sequence
  Description of Artificial Sequence: Synthetic oligonucleotide
  Sense strand starting at position 3445 of SEQ ID NO: 1882987
cauuauugauaggugauca

SEQ ID NO: 2162153 - RNA, 19 nt, Artificial Sequence
  Description of Artificial Sequence: Synthetic oligonucleotide
  Antisense strand to SEQ ID NO: 2162152
ugaucaccuaucaauaaug

SEQ ID NO: 2162154 - RNA, 19 nt, Artificial Sequence
  Description of Artificial Sequence: Synthetic oligonucleotide
  Sense strand starting at position 3458 of SEQ ID NO: 1882987
ugaucaaguuaccuugaca

SEQ ID NO: 2162155 - RNA, 19 nt, Artificial Sequence
  Description of Artificial Sequence: Synthetic oligonucleotide
  Antisense strand to SEQ ID NO: 2162154
ugucaagguaacuugauca

SEQ ID NO: 2162156 - RNA, 19 nt, Artificial Sequence
  Description of Artificial Sequence: Synthetic oligonucleotide
  Sense strand starting at position 107 of SEQ ID NO: 1882988
accagaauagcugggauca

SEQ ID NO: 2162157 - RNA, 19 nt, Artificial Sequence
  Description of Artificial Sequence: Synthetic oligonucleotide
  Antisense strand to SEQ ID NO: 2162156
ugaucccagcuauucuggu

SEQ ID NO: 2162158 - RNA, 19 nt, Artificial Sequence
  Description of Artificial Sequence: Synthetic oligonucleotide
  Sense strand starting at position 325 of SEQ ID NO: 1882988
aguuaacuccuguacauga

SEQ ID NO: 2162159 - RNA, 19 nt, Artificial Sequence
  Description of Artificial Sequence: Synthetic oligonucleotide
  Antisense strand to SEQ ID NO: 2162158
ucauguacaggaguuaacu

SEQ ID NO: 2162160 - RNA, 19 nt, Artificial Sequence
  Description of Artificial Sequence: Synthetic oligonucleotide
  Sense strand starting at position 330 of SEQ ID NO: 1882988
acuccuguacaugaguuaa

SEQ ID NO: 2162161 - RNA, 19 nt, Artificial Sequence
  Description of Artificial Sequence: Synthetic oligonucleotide
  Antisense strand to SEQ ID NO: 2162160
uuaacucauguacaggagu

SEQ ID NO: 2162162 - RNA, 19 nt, Artificial Sequence
  Description of Artificial Sequence: Synthetic oligonucleotide
  Sense strand starting at position 332 of SEQ ID NO: 1882988
uccuguacaugaguuaaua

SEQ ID NO: 2162163 - RNA, 19 nt, Artificial Sequence
  Description of Artificial Sequence: Synthetic oligonucleotide
  Antisense strand to SEQ ID NO: 2162162
uauuaacucauguacagga

SEQ ID NO: 2162164 - RNA, 19 nt, Artificial Sequence
  Description of Artificial Sequence: Synthetic oligonucleotide
  Sense strand starting at position 397 of SEQ ID NO: 1882988
cccucuauuuaacagggaa

SEQ ID NO: 2162165 - RNA, 19 nt, Artificial Sequence
  Description of Artificial Sequence: Synthetic oligonucleotide
  Antisense strand to SEQ ID NO: 2162164
uucccuguuaaauagaggg

SEQ ID NO: 2162166 - RNA, 19 nt, Artificial Sequence
  Description of Artificial Sequence: Synthetic oligonucleotide
  Sense strand starting at position 536 of SEQ ID NO: 1882988
cgguguauuagucugcuuu

SEQ ID NO: 2162167 - RNA, 19 nt, Artificial Sequence
  Description of Artificial Sequence: Synthetic oligonucleotide
  Antisense strand to SEQ ID NO: 2162166
aaagcagacuaauacaccg

SEQ ID NO: 2162168 - RNA, 19 nt, Artificial Sequence
  Description of Artificial Sequence: Synthetic oligonucleotide
  Sense strand starting at position 918 of SEQ ID NO: 1882988
aaguaaguggccuguauuu

SEQ ID NO: 2162169 - RNA, 19 nt, Artificial Sequence
  Description of Artificial Sequence: Synthetic oligonucleotide
  Antisense strand to SEQ ID NO: 2162168
aaauacaggccacuuacuu

SEQ ID NO: 2162170 - RNA, 19 nt, Artificial Sequence
  Description of Artificial Sequence: Synthetic oligonucleotide
  Sense strand starting at position 1108 of SEQ ID NO: 1882988
gucaguaaagcacagauaa

SEQ ID NO: 2162171 - RNA, 19 nt, Artificial Sequence
  Description of Artificial Sequence: Synthetic oligonucleotide
  Antisense strand to SEQ ID NO: 2162170
uuaucugugcuuuacugac

SEQ ID NO: 2162172 - RNA, 19 nt, Artificial Sequence
  Description of Artificial Sequence: Synthetic oligonucleotide
  Sense strand starting at position 1152 of SEQ ID NO: 1882988
ggcaauaauugggcaucaa

SEQ ID NO: 2162173 - RNA, 19 nt, Artificial Sequence
  Description of Artificial Sequence: Synthetic oligonucleotide
  Antisense strand to SEQ ID NO: 2162172
uugaugcccaauuauugcc

SEQ ID NO: 2162174 - RNA, 19 nt, Artificial Sequence
  Description of Artificial Sequence: Synthetic oligonucleotide
  Sense strand starting at position 1153 of SEQ ID NO: 1882988
gcaauaauugggcaucaag

SEQ ID NO: 2162175 - RNA, 19 nt, Artificial Sequence
  Description of Artificial Sequence: Synthetic oligonucleotide
  Antisense strand to SEQ ID NO: 2162174
cuugaugcccaauuauugc

SEQ ID NO: 2162176 - RNA, 19 nt, Artificial Sequence
  Description of Artificial Sequence: Synthetic oligonucleotide
  Sense strand starting at position 1211 of SEQ ID NO: 1882988
accucuuaggaaugacuuu

SEQ ID NO: 2162177 - RNA, 19 nt, Artificial Sequence
  Description of Artificial Sequence: Synthetic oligonucleotide
  Antisense strand to SEQ ID NO: 2162176
aaagucauuccuaagaggu

SEQ ID NO: 2162178 - RNA, 19 nt, Artificial Sequence
  Description of Artificial Sequence: Synthetic oligonucleotide
  Sense strand starting at position 1218 of SEQ ID NO: 1882988
aggaaugacuuuccuugca

SEQ ID NO: 2162179 - RNA, 19 nt, Artificial Sequence
  Description of Artificial Sequence: Synthetic oligonucleotide
  Antisense strand to SEQ ID NO: 2162178
ugcaaggaaagucauuccu

SEQ ID NO: 2162180 - RNA, 19 nt, Artificial Sequence
  Description of Artificial Sequence: Synthetic oligonucleotide
  Sense strand starting at position 1710 of SEQ ID NO: 1882988
aagugauggccagagugau

SEQ ID NO: 2162181 - RNA, 19 nt, Artificial Sequence
  Description of Artificial Sequence: Synthetic oligonucleotide
  Antisense strand to SEQ ID NO: 2162180
aucacucuggccaucacuu

SEQ ID NO: 2162182 - RNA, 19 nt, Artificial Sequence
  Description of Artificial Sequence: Synthetic oligonucleotide
  Sense strand starting at position 1843 of SEQ ID NO: 1882988
gagaaaggucuaugucaug

SEQ ID NO: 2162183 - RNA, 19 nt, Artificial Sequence
  Description of Artificial Sequence: Synthetic oligonucleotide
  Antisense strand to SEQ ID NO: 2162182
caugacauagaccuuucuc

SEQ ID NO: 2162184 - RNA, 19 nt, Artificial Sequence
  Description of Artificial Sequence: Synthetic oligonucleotide
  Sense strand starting at position 2517 of SEQ ID NO: 1882988
aucaaugaauuagcaguaa

SEQ ID NO: 2162185 - RNA, 19 nt, Artificial Sequence
  Description of Artificial Sequence: Synthetic oligonucleotide
  Antisense strand to SEQ ID NO: 2162184
uuacugcuaauucauugau

SEQ ID NO: 2162186 - RNA, 19 nt, Artificial Sequence
  Description of Artificial Sequence: Synthetic oligonucleotide
  Sense strand starting at position 2559 of SEQ ID NO: 1882988
gugugcugaauugaugaau

SEQ ID NO: 2162187 - RNA, 19 nt, Artificial Sequence
  Description of Artificial Sequence: Synthetic oligonucleotide
  Antisense strand to SEQ ID NO: 2162186
auucaucaauucagcacac

SEQ ID NO: 2162188 - RNA, 19 nt, Artificial Sequence
  Description of Artificial Sequence: Synthetic oligonucleotide
  Sense strand starting at position 2601 of SEQ ID NO: 1882988
ggaucacaguuuccuuaau

SEQ ID NO: 2162189 - RNA, 19 nt, Artificial Sequence
  Description of Artificial Sequence: Synthetic oligonucleotide
  Antisense strand to SEQ ID NO: 2162188
auuaaggaaacugugaucc

SEQ ID NO: 2162190 - RNA, 19 nt, Artificial Sequence
  Description of Artificial Sequence: Synthetic oligonucleotide
  Sense strand starting at position 2687 of SEQ ID NO: 1882988
uuaucuacuuuagugagau

SEQ ID NO: 2162191 - RNA, 19 nt, Artificial Sequence
  Description of Artificial Sequence: Synthetic oligonucleotide
  Antisense strand to SEQ ID NO: 2162190
aucucacuaaaguagauaa

SEQ ID NO: 2162192 - RNA, 19 nt, Artificial Sequence
  Description of Artificial Sequence: Synthetic oligonucleotide
  Sense strand starting at position 2754 of SEQ ID NO: 1882988
gucaguacuaacugggaua

SEQ ID NO: 2162193 - RNA, 19 nt, Artificial Sequence
  Description of Artificial Sequence: Synthetic oligonucleotide
  Antisense strand to SEQ ID NO: 2162192
uaucccaguuaguacugac

SEQ ID NO: 2162194 - RNA, 19 nt, Artificial Sequence
  Description of Artificial Sequence: Synthetic oligonucleotide
  Sense strand starting at position 2756 of SEQ ID NO: 1882988
caguacuaacugggauaua

SEQ ID NO: 2162195 - RNA, 19 nt, Artificial Sequence
  Description of Artificial Sequence: Synthetic oligonucleotide
  Antisense strand to SEQ ID NO: 2162194
uauaucccaguuaguacug

SEQ ID NO: 2162196 - RNA, 19 nt, Artificial Sequence
  Description of Artificial Sequence: Synthetic oligonucleotide
  Sense strand starting at position 2767 of SEQ ID NO: 1882988
gggauauaaagguguguuu

SEQ ID NO: 2162197 - RNA, 19 nt, Artificial Sequence
  Description of Artificial Sequence: Synthetic oligonucleotide
  Antisense strand to SEQ ID NO: 2162196
aaacacaccuuuauauccc

SEQ ID NO: 2162198 - RNA, 19 nt, Artificial Sequence
  Description of Artificial Sequence: Synthetic oligonucleotide
  Sense strand starting at position 2780 of SEQ ID NO: 1882988
guguuucccgaggauauaa

SEQ ID NO: 2162199 - RNA, 19 nt, Artificial Sequence
  Description of Artificial Sequence: Synthetic oligonucleotide
  Antisense strand to SEQ ID NO: 2162198
uuauauccucgggaaacac

SEQ ID NO: 2162200 - RNA, 19 nt, Artificial Sequence
  Description of Artificial Sequence: Synthetic oligonucleotide
  Sense strand starting at position 2828 of SEQ ID NO: 1882988
uugugaaacccacauguaa

SEQ ID NO: 2162201 - RNA, 19 nt, Artificial Sequence
  Description of Artificial Sequence: Synthetic oligonucleotide
  Antisense strand to SEQ ID NO: 2162200
uuacauguggguuucacaa

SEQ ID NO: 2162202 - RNA, 19 nt, Artificial Sequence
  Description of Artificial Sequence: Synthetic oligonucleotide
  Sense strand starting at position 2892 of SEQ ID NO: 1882988
gaaacauugaguggagagu

SEQ ID NO: 2162203 - RNA, 19 nt, Artificial Sequence
  Description of Artificial Sequence: Synthetic oligonucleotide
  Antisense strand to SEQ ID NO: 2162202
acucuccacucaauguuuc

SEQ ID NO: 2162204 - RNA, 19 nt, Artificial Sequence
  Description of Artificial Sequence: Synthetic oligonucleotide
  Sense strand starting at position 2935 of SEQ ID NO: 1882988
gcgggugcuuugaugaaau

SEQ ID NO: 2162205 - RNA, 19 nt, Artificial Sequence
  Description of Artificial Sequence: Synthetic oligonucleotide
  Antisense strand to SEQ ID NO: 2162204
auuucaucaaagcacccgc

SEQ ID NO: 2162206 - RNA, 19 nt, Artificial Sequence
  Description of Artificial Sequence: Synthetic oligonucleotide
  Sense strand starting at position 2937 of SEQ ID NO: 1882988
gggugcuuugaugaaaucu

SEQ ID NO: 2162207 - RNA, 19 nt, Artificial Sequence
  Description of Artificial Sequence: Synthetic oligonucleotide
  Antisense strand to SEQ ID NO: 2162206
agauuucaucaaagcaccc

SEQ ID NO: 2162208 - RNA, 19 nt, Artificial Sequence
  Description of Artificial Sequence: Synthetic oligonucleotide
  Sense strand starting at position 2947 of SEQ ID NO: 1882988
augaaaucucugggaggca

SEQ ID NO: 2162209 - RNA, 19 nt, Artificial Sequence
  Description of Artificial Sequence: Synthetic oligonucleotide
  Antisense strand to SEQ ID NO: 2162208
ugccucccagagauuucau

SEQ ID NO: 2162210 - RNA, 19 nt, Artificial Sequence
  Description of Artificial Sequence: Synthetic oligonucleotide
  Sense strand starting at position 2965 of SEQ ID NO: 1882988
acagcagaagaaugugauu

SEQ ID NO: 2162211 - RNA, 19 nt, Artificial Sequence
  Description of Artificial Sequence: Synthetic oligonucleotide
  Antisense strand to SEQ ID NO: 2162210
aaucacauucuucugcugu

SEQ ID NO: 2162212 - RNA, 19 nt, Artificial Sequence
  Description of Artificial Sequence: Synthetic oligonucleotide
  Sense strand starting at position 3063 of SEQ ID NO: 1882988
caauauggaguguagucau

SEQ ID NO: 2162213 - RNA, 19 nt, Artificial Sequence
  Description of Artificial Sequence: Synthetic oligonucleotide
  Antisense strand to SEQ ID NO: 2162212
augacuacacuccauauug

SEQ ID NO: 2162214 - RNA, 19 nt, Artificial Sequence
  Description of Artificial Sequence: Synthetic oligonucleotide
  Sense strand starting at position 3165 of SEQ ID NO: 1882988
uagccaucuggugauucua

SEQ ID NO: 2162215 - RNA, 19 nt, Artificial Sequence
  Description of Artificial Sequence: Synthetic oligonucleotide
  Antisense strand to SEQ ID NO: 2162214
uagaaucaccagauggcua

SEQ ID NO: 2162216 - RNA, 19 nt, Artificial Sequence
  Description of Artificial Sequence: Synthetic oligonucleotide
  Sense strand starting at position 3185 of SEQ ID NO: 1882988
gucuacagucuggauagau

SEQ ID NO: 2162217 - RNA, 19 nt, Artificial Sequence
  Description of Artificial Sequence: Synthetic oligonucleotide
  Antisense strand to SEQ ID NO: 2162216
aucuauccagacuguagac

SEQ ID NO: 2162218 - RNA, 19 nt, Artificial Sequence
  Description of Artificial Sequence: Synthetic oligonucleotide
  Sense strand starting at position 3210 of SEQ ID NO: 1882988
gguaaauagcccuagcuag

SEQ ID NO: 2162219 - RNA, 19 nt, Artificial Sequence
  Description of Artificial Sequence: Synthetic oligonucleotide
  Antisense strand to SEQ ID NO: 2162218
cuagcuagggcuauuuacc

SEQ ID NO: 2162220 - RNA, 19 nt, Artificial Sequence
  Description of Artificial Sequence: Synthetic oligonucleotide
  Sense strand starting at position 3324 of SEQ ID NO: 1882988
aagaaauguguugaguacu

SEQ ID NO: 2162221 - RNA, 19 nt, Artificial Sequence
  Description of Artificial Sequence: Synthetic oligonucleotide
  Antisense strand to SEQ ID NO: 2162220
aguacucaacacauuucuu

SEQ ID NO: 2162222 - RNA, 19 nt, Artificial Sequence
  Description of Artificial Sequence: Synthetic oligonucleotide
  Sense strand starting at position 3327 of SEQ ID NO: 1882988
aaauguguugaguacuaaa

SEQ ID NO: 2162223 - RNA, 19 nt, Artificial Sequence
  Description of Artificial Sequence: Synthetic oligonucleotide
  Antisense strand to SEQ ID NO: 2162222
uuuaguacucaacacauuu

SEQ ID NO: 2162224 - RNA, 19 nt, Artificial Sequence
  Description of Artificial Sequence: Synthetic oligonucleotide
  Sense strand starting at position 3444 of SEQ ID NO: 1882988
gaugcaguuccugaacaaa

SEQ ID NO: 2162225 - RNA, 19 nt, Artificial Sequence
  Description of Artificial Sequence: Synthetic oligonucleotide
  Antisense strand to SEQ ID NO: 2162224
uuuguucaggaacugcauc

SEQ ID NO: 2162226 - RNA, 19 nt, Artificial Sequence
  Description of Artificial Sequence: Synthetic oligonucleotide
  Sense strand starting at position 3508 of SEQ ID NO: 1882988
aggaaaccucauugaagca

SEQ ID NO: 2162227 - RNA, 19 nt, Artificial Sequence
  Description of Artificial Sequence: Synthetic oligonucleotide
  Antisense strand to SEQ ID NO: 2162226
ugcuucaaugagguuuccu

SEQ ID NO: 2162228 - RNA, 19 nt, Artificial Sequence
  Description of Artificial Sequence: Synthetic oligonucleotide
  Sense strand starting at position 3592 of SEQ ID NO: 1882988
cauuauugauaggugauca

SEQ ID NO: 2162229 - RNA, 19 nt, Artificial Sequence
  Description of Artificial Sequence: Synthetic oligonucleotide
  Antisense strand to SEQ ID NO: 2162228
ugaucaccuaucaauaaug

SEQ ID NO: 2162230 - RNA, 19 nt, Artificial Sequence
  Description of Artificial Sequence: Synthetic oligonucleotide
  Sense strand starting at position 3596 of SEQ ID NO: 1882988
auugauaggugaucaaguu

SEQ ID NO: 2162231 - RNA, 19 nt, Artificial Sequence
  Description of Artificial Sequence: Synthetic oligonucleotide
  Antisense strand to SEQ ID NO: 2162230
aacuugaucaccuaucaau

SEQ ID NO: 2162232 - RNA, 19 nt, Artificial Sequence
  Description of Artificial Sequence: Synthetic oligonucleotide
  Sense strand starting at position 3605 of SEQ ID NO: 1882988
ugaucaaguuaccuugaca

SEQ ID NO: 2162233 - RNA, 19 nt, Artificial Sequence
  Description of Artificial Sequence: Synthetic oligonucleotide
  Antisense strand to SEQ ID NO: 2162232
ugucaagguaacuugauca

SEQ ID NO: 2162234 - RNA, 19 nt, Artificial Sequence
  Description of Artificial Sequence: Synthetic oligonucleotide
  Sense strand starting at position 3904 of SEQ ID NO: 1882988
auauuugacugugaaagau

SEQ ID NO: 2162235 - RNA, 19 nt, Artificial Sequence
  Description of Artificial Sequence: Synthetic oligonucleotide
  Antisense strand to SEQ ID NO: 2162234
aucuuucacagucaaauau

SEQ ID NO: 2162236 - RNA, 19 nt, Artificial Sequence
  Description of Artificial Sequence: Synthetic oligonucleotide
  Sense strand starting at position 108 of SEQ ID NO: 1882989
accagaauagcugggauca

SEQ ID NO: 2162237 - RNA, 19 nt, Artificial Sequence
  Description of Artificial Sequence: Synthetic oligonucleotide
  Antisense strand to SEQ ID NO: 2162236
ugaucccagcuauucuggu

SEQ ID NO: 2162238 - RNA, 19 nt, Artificial Sequence
  Description of Artificial Sequence: Synthetic oligonucleotide
  Sense strand starting at position 326 of SEQ ID NO: 1882989
aguuaacucccguacauga

SEQ ID NO: 2162239 - RNA, 19 nt, Artificial Sequence
  Description of Artificial Sequence: Synthetic oligonucleotide
  Antisense strand to SEQ ID NO: 2162238
ucauguacgggaguuaacu

SEQ ID NO: 2162240 - RNA, 19 nt, Artificial Sequence
  Description of Artificial Sequence: Synthetic oligonucleotide
  Sense strand starting at position 335 of SEQ ID NO: 1882989
ccguacaugaguuaauaag

SEQ ID NO: 2162241 - RNA, 19 nt, Artificial Sequence
  Description of Artificial Sequence: Synthetic oligonucleotide
  Antisense strand to SEQ ID NO: 2162240
cuuauuaacucauguacgg

SEQ ID NO: 2162242 - RNA, 19 nt, Artificial Sequence
  Description of Artificial Sequence: Synthetic oligonucleotide
  Sense strand starting at position 398 of SEQ ID NO: 1882989
cccucuauuuaacagggaa

SEQ ID NO: 2162243 - RNA, 19 nt, Artificial Sequence
  Description of Artificial Sequence: Synthetic oligonucleotide
  Antisense strand to SEQ ID NO: 2162242
uucccuguuaaauagaggg

SEQ ID NO: 2162244 - RNA, 19 nt, Artificial Sequence
  Description of Artificial Sequence: Synthetic oligonucleotide
  Sense strand starting at position 416 of SEQ ID NO: 1882989
aagugcaauugugugagaa

SEQ ID NO: 2162245 - RNA, 19 nt, Artificial Sequence
  Description of Artificial Sequence: Synthetic oligonucleotide
  Antisense strand to SEQ ID NO: 2162244
uucucacacaauugcacuu

SEQ ID NO: 2162246 - RNA, 19 nt, Artificial Sequence
  Description of Artificial Sequence: Synthetic oligonucleotide
  Sense strand starting at position 507 of SEQ ID NO: 1882989
gacauaugccguuagugag

SEQ ID NO: 2162247 - RNA, 19 nt, Artificial Sequence
  Description of Artificial Sequence: Synthetic oligonucleotide
  Antisense strand to SEQ ID NO: 2162246
cucacuaacggcauauguc

SEQ ID NO: 2162248 - RNA, 19 nt, Artificial Sequence
  Description of Artificial Sequence: Synthetic oligonucleotide
  Sense strand starting at position 537 of SEQ ID NO: 1882989
cgguguauuagucugcuuu

SEQ ID NO: 2162249 - RNA, 19 nt, Artificial Sequence
  Description of Artificial Sequence: Synthetic oligonucleotide
  Antisense strand to SEQ ID NO: 2162248
aaagcagacuaauacaccg

SEQ ID NO: 2162250 - RNA, 19 nt, Artificial Sequence
  Description of Artificial Sequence: Synthetic oligonucleotide
  Sense strand starting at position 919 of SEQ ID NO: 1882989
aaguaaguggccuguauuu

SEQ ID NO: 2162251 - RNA, 19 nt, Artificial Sequence
  Description of Artificial Sequence: Synthetic oligonucleotide
  Antisense strand to SEQ ID NO: 2162250
aaauacaggccacuuacuu

SEQ ID NO: 2162252 - RNA, 19 nt, Artificial Sequence
  Description of Artificial Sequence: Synthetic oligonucleotide
  Sense strand starting at position 2265 of SEQ ID NO: 1882989
guuaguaaaugucuuuaag

SEQ ID NO: 2162253 - RNA, 19 nt, Artificial Sequence
  Description of Artificial Sequence: Synthetic oligonucleotide
  Antisense strand to SEQ ID NO: 2162252
cuuaaagacauuuacuaac

SEQ ID NO: 2162254 - RNA, 19 nt, Artificial Sequence
  Description of Artificial Sequence: Synthetic oligonucleotide
  Sense strand starting at position 2518 of SEQ ID NO: 1882989
aucaaugaauuagcaguaa

SEQ ID NO: 2162255 - RNA, 19 nt, Artificial Sequence
  Description of Artificial Sequence: Synthetic oligonucleotide
  Antisense strand to SEQ ID NO: 2162254
uuacugcuaauucauugau

SEQ ID NO: 2162256 - RNA, 19 nt, Artificial Sequence
  Description of Artificial Sequence: Synthetic oligonucleotide
  Sense strand starting at position 2560 of SEQ ID NO: 1882989
gugugcugaauugaugaau

SEQ ID NO: 2162257 - RNA, 19 nt, Artificial Sequence
  Description of Artificial Sequence: Synthetic oligonucleotide
  Antisense strand to SEQ ID NO: 2162256
auucaucaauucagcacac

SEQ ID NO: 2162258 - RNA, 19 nt, Artificial Sequence
  Description of Artificial Sequence: Synthetic oligonucleotide
  Sense strand starting at position 2602 of SEQ ID NO: 1882989
ggaucacaguuuccuuaau

SEQ ID NO: 2162259 - RNA, 19 nt, Artificial Sequence
  Description of Artificial Sequence: Synthetic oligonucleotide
  Antisense strand to SEQ ID NO: 2162258
auuaaggaaacugugaucc

SEQ ID NO: 2162260 - RNA, 19 nt, Artificial Sequence
  Description of Artificial Sequence: Synthetic oligonucleotide
  Sense strand starting at position 2679 of SEQ ID NO: 1882989
acuugagucuuaucuacuu

SEQ ID NO: 2162261 - RNA, 19 nt, Artificial Sequence
  Description of Artificial Sequence: Synthetic oligonucleotide
  Antisense strand to SEQ ID NO: 2162260
aaguagauaagacucaagu

SEQ ID NO: 2162262 - RNA, 19 nt, Artificial Sequence
  Description of Artificial Sequence: Synthetic oligonucleotide
  Sense strand starting at position 2688 of SEQ ID NO: 1882989
uuaucuacuuuagugagau

SEQ ID NO: 2162263 - RNA, 19 nt, Artificial Sequence
  Description of Artificial Sequence: Synthetic oligonucleotide
  Antisense strand to SEQ ID NO: 2162262
aucucacuaaaguagauaa

SEQ ID NO: 2162264 - RNA, 19 nt, Artificial Sequence
  Description of Artificial Sequence: Synthetic oligonucleotide
  Sense strand starting at position 2755 of SEQ ID NO: 1882989
gucaguacuaacugggaua

SEQ ID NO: 2162265 - RNA, 19 nt, Artificial Sequence
  Description of Artificial Sequence: Synthetic oligonucleotide
  Antisense strand to SEQ ID NO: 2162264
uaucccaguuaguacugac

SEQ ID NO: 2162266 - RNA, 19 nt, Artificial Sequence
  Description of Artificial Sequence: Synthetic oligonucleotide
  Sense strand starting at position 2757 of SEQ ID NO: 1882989
caguacuaacugggauaua

SEQ ID NO: 2162267 - RNA, 19 nt, Artificial Sequence
  Description of Artificial Sequence: Synthetic oligonucleotide
  Antisense strand to SEQ ID NO: 2162266
uauaucccaguuaguacug

SEQ ID NO: 2162268 - RNA, 19 nt, Artificial Sequence
  Description of Artificial Sequence: Synthetic oligonucleotide
  Sense strand starting at position 2768 of SEQ ID NO: 1882989
gggauauaaagguguguuu

SEQ ID NO: 2162269 - RNA, 19 nt, Artificial Sequence
  Description of Artificial Sequence: Synthetic oligonucleotide
  Antisense strand to SEQ ID NO: 2162268
aaacacaccuuuauauccc

SEQ ID NO: 2162270 - RNA, 19 nt, Artificial Sequence
  Description of Artificial Sequence: Synthetic oligonucleotide
  Sense strand starting at position 2781 of SEQ ID NO: 1882989
guguuucccgaggauauaa

SEQ ID NO: 2162271 - RNA, 19 nt, Artificial Sequence
  Description of Artificial Sequence: Synthetic oligonucleotide
  Antisense strand to SEQ ID NO: 2162270
uuauauccucgggaaacac

SEQ ID NO: 2162272 - RNA, 19 nt, Artificial Sequence
  Description of Artificial Sequence: Synthetic oligonucleotide
  Sense strand starting at position 2829 of SEQ ID NO: 1882989
uugugaaacccacauguaa

SEQ ID NO: 2162273 - RNA, 19 nt, Artificial Sequence
  Description of Artificial Sequence: Synthetic oligonucleotide
  Antisense strand to SEQ ID NO: 2162272
uuacauguggguuucacaa

SEQ ID NO: 2162274 - RNA, 19 nt, Artificial Sequence
  Description of Artificial Sequence: Synthetic oligonucleotide
  Sense strand starting at position 2893 of SEQ ID NO: 1882989
gaaacauugaguggagagu

SEQ ID NO: 2162275 - RNA, 19 nt, Artificial Sequence
  Description of Artificial Sequence: Synthetic oligonucleotide
  Antisense strand to SEQ ID NO: 2162274
acucuccacucaauguuuc

SEQ ID NO: 2162276 - RNA, 19 nt, Artificial Sequence
  Description of Artificial Sequence: Synthetic oligonucleotide
  Sense strand starting at position 2936 of SEQ ID NO: 1882989
gcgggugcuuugaugaaau

SEQ ID NO: 2162277 - RNA, 19 nt, Artificial Sequence
  Description of Artificial Sequence: Synthetic oligonucleotide
  Antisense strand to SEQ ID NO: 2162276
auuucaucaaagcacccgc

SEQ ID NO: 2162278 - RNA, 19 nt, Artificial Sequence
  Description of Artificial Sequence: Synthetic oligonucleotide
  Sense strand starting at position 2938 of SEQ ID NO: 1882989
gggugcuuugaugaaaucu

SEQ ID NO: 2162279 - RNA, 19 nt, Artificial Sequence
  Description of Artificial Sequence: Synthetic oligonucleotide
  Antisense strand to SEQ ID NO: 2162278
agauuucaucaaagcaccc

SEQ ID NO: 2162280 - RNA, 19 nt, Artificial Sequence
  Description of Artificial Sequence: Synthetic oligonucleotide
  Sense strand starting at position 2948 of SEQ ID NO: 1882989
augaaaucucugggaggca

SEQ ID NO: 2162281 - RNA, 19 nt, Artificial Sequence
  Description of Artificial Sequence: Synthetic oligonucleotide
  Antisense strand to SEQ ID NO: 2162280
ugccucccagagauuucau

SEQ ID NO: 2162282 - RNA, 19 nt, Artificial Sequence
  Description of Artificial Sequence: Synthetic oligonucleotide
  Sense strand starting at position 2966 of SEQ ID NO: 1882989
acagcagaagaaugugauu

SEQ ID NO: 2162283 - RNA, 19 nt, Artificial Sequence
  Description of Artificial Sequence: Synthetic oligonucleotide
  Antisense strand to SEQ ID NO: 2162282
aaucacauucuucugcugu

SEQ ID NO: 2162284 - RNA, 19 nt, Artificial Sequence
  Description of Artificial Sequence: Synthetic oligonucleotide
  Sense strand starting at position 3064 of SEQ ID NO: 1882989
caauauggaguguagucau

SEQ ID NO: 2162285 - RNA, 19 nt, Artificial Sequence
  Description of Artificial Sequence: Synthetic oligonucleotide
  Antisense strand to SEQ ID NO: 2162284
augacuacacuccauauug

SEQ ID NO: 2162286 - RNA, 19 nt, Artificial Sequence
  Description of Artificial Sequence: Synthetic oligonucleotide
  Sense strand starting at position 3071 of SEQ ID NO: 1882989
gaguguagucaucaggcca

SEQ ID NO: 2162287 - RNA, 19 nt, Artificial Sequence
  Description of Artificial Sequence: Synthetic oligonucleotide
  Antisense strand to SEQ ID NO: 2162286
uggccugaugacuacacuc

SEQ ID NO: 2162288 - RNA, 19 nt, Artificial Sequence
  Description of Artificial Sequence: Synthetic oligonucleotide
  Sense strand starting at position 3104 of SEQ ID NO: 1882989
ggcaaugcauccuuaauga

SEQ ID NO: 2162289 - RNA, 19 nt, Artificial Sequence
  Description of Artificial Sequence: Synthetic oligonucleotide
  Antisense strand to SEQ ID NO: 2162288
ucauuaaggaugcauugcc

SEQ ID NO: 2162290 - RNA, 19 nt, Artificial Sequence
  Description of Artificial Sequence: Synthetic oligonucleotide
  Sense strand starting at position 3166 of SEQ ID NO: 1882989
uagccaucuggugauucua

SEQ ID NO: 2162291 - RNA, 19 nt, Artificial Sequence
  Description of Artificial Sequence: Synthetic oligonucleotide
  Antisense strand to SEQ ID NO: 2162290
uagaaucaccagauggcua

SEQ ID NO: 2162292 - RNA, 19 nt, Artificial Sequence
  Description of Artificial Sequence: Synthetic oligonucleotide
  Sense strand starting at position 3174 of SEQ ID NO: 1882989
uggugauucuaugucuaca

SEQ ID NO: 2162293 - RNA, 19 nt, Artificial Sequence
  Description of Artificial Sequence: Synthetic oligonucleotide
  Antisense strand to SEQ ID NO: 2162292
uguagacauagaaucacca

SEQ ID NO: 2162294 - RNA, 19 nt, Artificial Sequence
  Description of Artificial Sequence: Synthetic oligonucleotide
  Sense strand starting at position 3186 of SEQ ID NO: 1882989
gucuacagucuggauagau

SEQ ID NO: 2162295 - RNA, 19 nt, Artificial Sequence
  Description of Artificial Sequence: Synthetic oligonucleotide
  Antisense strand to SEQ ID NO: 2162294
aucuauccagacuguagac

SEQ ID NO: 2162296 - RNA, 19 nt, Artificial Sequence
  Description of Artificial Sequence: Synthetic oligonucleotide
  Sense strand starting at position 3211 of SEQ ID NO: 1882989
gguaaauagcccuagcuag

SEQ ID NO: 2162297 - RNA, 19 nt, Artificial Sequence
  Description of Artificial Sequence: Synthetic oligonucleotide
  Antisense strand to SEQ ID NO: 2162296
cuagcuagggcuauuuacc

SEQ ID NO: 2162298 - RNA, 19 nt, Artificial Sequence
  Description of Artificial Sequence: Synthetic oligonucleotide
  Sense strand starting at position 3279 of SEQ ID NO: 1882989
acuguuagguaacaauuua

SEQ ID NO: 2162299 - RNA, 19 nt, Artificial Sequence
  Description of Artificial Sequence: Synthetic oligonucleotide
  Antisense strand to SEQ ID NO: 2162298
uaaauuguuaccuaacagu

SEQ ID NO: 2162300 - RNA, 19 nt, Artificial Sequence
  Description of Artificial Sequence: Synthetic oligonucleotide
  Sense strand starting at position 3325 of SEQ ID NO: 1882989
aagaaauguguugaguacu

SEQ ID NO: 2162301 - RNA, 19 nt, Artificial Sequence
  Description of Artificial Sequence: Synthetic oligonucleotide
  Antisense strand to SEQ ID NO: 2162300
aguacucaacacauuucuu

SEQ ID NO: 2162302 - RNA, 19 nt, Artificial Sequence
  Description of Artificial Sequence: Synthetic oligonucleotide
  Sense strand starting at position 3328 of SEQ ID NO: 1882989
aaauguguugaguacuaaa

SEQ ID NO: 2162303 - RNA, 19 nt, Artificial Sequence
  Description of Artificial Sequence: Synthetic oligonucleotide
  Antisense strand to SEQ ID NO: 2162302
uuuaguacucaacacauuu

SEQ ID NO: 2162304 - RNA, 19 nt, Artificial Sequence
  Description of Artificial Sequence: Synthetic oligonucleotide
  Sense strand starting at position 3445 of SEQ ID NO: 1882989
gaugcaguuccugaacaaa

SEQ ID NO: 2162305 - RNA, 19 nt, Artificial Sequence
  Description of Artificial Sequence: Synthetic oligonucleotide
  Antisense strand to SEQ ID NO: 2162304
uuuguucaggaacugcauc

SEQ ID NO: 2162306 - RNA, 19 nt, Artificial Sequence
  Description of Artificial Sequence: Synthetic oligonucleotide
  Sense strand starting at position 3509 of SEQ ID NO: 1882989
aggaaaccucauugaagca

SEQ ID NO: 2162307 - RNA, 19 nt, Artificial Sequence
  Description of Artificial Sequence: Synthetic oligonucleotide
  Antisense strand to SEQ ID NO: 2162306
ugcuucaaugagguuuccu

SEQ ID NO: 2162308 - RNA, 19 nt, Artificial Sequence
  Description of Artificial Sequence: Synthetic oligonucleotide
  Sense strand starting at position 3592 of SEQ ID NO: 1882989
gcauuauugauaggugauc

SEQ ID NO: 2162309 - RNA, 19 nt, Artificial Sequence
  Description of Artificial Sequence: Synthetic oligonucleotide
  Antisense strand to SEQ ID NO: 2162308
gaucaccuaucaauaaugc

SEQ ID NO: 2162310 - RNA, 19 nt, Artificial Sequence
  Description of Artificial Sequence: Synthetic oligonucleotide
  Sense strand starting at position 3593 of SEQ ID NO: 1882989
cauuauugauaggugauca

SEQ ID NO: 2162311 - RNA, 19 nt, Artificial Sequence
  Description of Artificial Sequence: Synthetic oligonucleotide
  Antisense strand to SEQ ID NO: 2162310
ugaucaccuaucaauaaug

SEQ ID NO: 2162312 - RNA, 19 nt, Artificial Sequence
  Description of Artificial Sequence: Synthetic oligonucleotide
  Sense strand starting at position 3597 of SEQ ID NO: 1882989
auugauaggugaucaaguu

SEQ ID NO: 2162313 - RNA, 19 nt, Artificial Sequence
  Description of Artificial Sequence: Synthetic oligonucleotide
  Antisense strand to SEQ ID NO: 2162312
aacuugaucaccuaucaau

SEQ ID NO: 2162314 - RNA, 19 nt, Artificial Sequence
  Description of Artificial Sequence: Synthetic oligonucleotide
  Sense strand starting at position 3606 of SEQ ID NO: 1882989
ugaucaaguuaccuugaca

SEQ ID NO: 2162315 - RNA, 19 nt, Artificial Sequence
  Description of Artificial Sequence: Synthetic oligonucleotide
  Antisense strand to SEQ ID NO: 2162314
ugucaagguaacuugauca

SEQ ID NO: 2162316 - RNA, 19 nt, Artificial Sequence
  Description of Artificial Sequence: Synthetic oligonucleotide
  Sense strand starting at position 358 of SEQ ID NO: 1882990
cugagcucuuacuuaaugu

SEQ ID NO: 2162317 - RNA, 19 nt, Artificial Sequence
  Description of Artificial Sequence: Synthetic oligonucleotide
  Antisense strand to SEQ ID NO: 2162316
acauuaaguaagagcucag

SEQ ID NO: 2162318 - RNA, 19 nt, Artificial Sequence
  Description of Artificial Sequence: Synthetic oligonucleotide
  Sense strand starting at position 390 of SEQ ID NO: 1882990
cuaagagccuuauuuguuu

SEQ ID NO: 2162319 - RNA, 19 nt, Artificial Sequence
  Description of Artificial Sequence: Synthetic oligonucleotide
  Antisense strand to SEQ ID NO: 2162318
aaacaaauaaggcucuuag

SEQ ID NO: 2162320 - RNA, 19 nt, Artificial Sequence
  Description of Artificial Sequence: Synthetic oligonucleotide
  Sense strand starting at position 395 of SEQ ID NO: 1882990
agccuuauuuguuuggauu

SEQ ID NO: 2162321 - RNA, 19 nt, Artificial Sequence
  Description of Artificial Sequence: Synthetic oligonucleotide
  Antisense strand to SEQ ID NO: 2162320
aauccaaacaaauaaggcu

SEQ ID NO: 2162322 - RNA, 19 nt, Artificial Sequence
  Description of Artificial Sequence: Synthetic oligonucleotide
  Sense strand starting at position 396 of SEQ ID NO: 1882990
gccuuauuuguuuggauua

SEQ ID NO: 2162323 - RNA, 19 nt, Artificial Sequence
  Description of Artificial Sequence: Synthetic oligonucleotide
  Antisense strand to SEQ ID NO: 2162322
uaauccaaacaaauaaggc

SEQ ID NO: 2162324 - RNA, 19 nt, Artificial Sequence
  Description of Artificial Sequence: Synthetic oligonucleotide
  Sense strand starting at position 398 of SEQ ID NO: 1882990
cuuauuuguuuggauuauc

SEQ ID NO: 2162325 - RNA, 19 nt, Artificial Sequence
  Description of Artificial Sequence: Synthetic oligonucleotide
  Antisense strand to SEQ ID NO: 2162324
gauaauccaaacaaauaag

SEQ ID NO: 2162326 - RNA, 19 nt, Artificial Sequence
  Description of Artificial Sequence: Synthetic oligonucleotide
  Sense strand starting at position 506 of SEQ ID NO: 1882990
acauucuaccaaugugugu

SEQ ID NO: 2162327 - RNA, 19 nt, Artificial Sequence
  Description of Artificial Sequence: Synthetic oligonucleotide
  Antisense strand to SEQ ID NO: 2162326
acacacauugguagaaugu

SEQ ID NO: 2162328 - RNA, 19 nt, Artificial Sequence
  Description of Artificial Sequence: Synthetic oligonucleotide
  Sense strand starting at position 511 of SEQ ID NO: 1882990
cuaccaauguguguccauu

SEQ ID NO: 2162329 - RNA, 19 nt, Artificial Sequence
  Description of Artificial Sequence: Synthetic oligonucleotide
  Antisense strand to SEQ ID NO: 2162328
aauggacacacauugguag

SEQ ID NO: 2162330 - RNA, 19 nt, Artificial Sequence
  Description of Artificial Sequence: Synthetic oligonucleotide
  Sense strand starting at position 517 of SEQ ID NO: 1882990
auguguguccauuaguucu

SEQ ID NO: 2162331 - RNA, 19 nt, Artificial Sequence
  Description of Artificial Sequence: Synthetic oligonucleotide
  Antisense strand to SEQ ID NO: 2162330
agaacuaauggacacacau

SEQ ID NO: 2162332 - RNA, 19 nt, Artificial Sequence
  Description of Artificial Sequence: Synthetic oligonucleotide
  Sense strand starting at position 548 of SEQ ID NO: 1882990
agaagaaacuugcaugaag

SEQ ID NO: 2162333 - RNA, 19 nt, Artificial Sequence
  Description of Artificial Sequence: Synthetic oligonucleotide
  Antisense strand to SEQ ID NO: 2162332
cuucaugcaaguuucuucu

SEQ ID NO: 2162334 - RNA, 19 nt, Artificial Sequence
  Description of Artificial Sequence: Synthetic oligonucleotide
  Sense strand starting at position 642 of SEQ ID NO: 1882990
aagucuacuccucgugacu

SEQ ID NO: 2162335 - RNA, 19 nt, Artificial Sequence
  Description of Artificial Sequence: Synthetic oligonucleotide
  Antisense strand to SEQ ID NO: 2162334
agucacgaggaguagacuu

SEQ ID NO: 2162336 - RNA, 19 nt, Artificial Sequence
  Description of Artificial Sequence: Synthetic oligonucleotide
  Sense strand starting at position 713 of SEQ ID NO: 1882990
cugggucuccaaggaagau

SEQ ID NO: 2162337 - RNA, 19 nt, Artificial Sequence
  Description of Artificial Sequence: Synthetic oligonucleotide
  Antisense strand to SEQ ID NO: 2162336
aucuuccuuggagacccag

SEQ ID NO: 2162338 - RNA, 19 nt, Artificial Sequence
  Description of Artificial Sequence: Synthetic oligonucleotide
  Sense strand starting at position 869 of SEQ ID NO: 1882990
gccucacguagaugaagau

SEQ ID NO: 2162339 - RNA, 19 nt, Artificial Sequence
  Description of Artificial Sequence: Synthetic oligonucleotide
  Antisense strand to SEQ ID NO: 2162338
aucuucaucuacgugaggc

SEQ ID NO: 2162340 - RNA, 19 nt, Artificial Sequence
  Description of Artificial Sequence: Synthetic oligonucleotide
  Sense strand starting at position 881 of SEQ ID NO: 1882990
ugaagauggcacugccaua

SEQ ID NO: 2162341 - RNA, 19 nt, Artificial Sequence
  Description of Artificial Sequence: Synthetic oligonucleotide
  Antisense strand to SEQ ID NO: 2162340
uauggcagugccaucuuca

SEQ ID NO: 2162342 - RNA, 19 nt, Artificial Sequence
  Description of Artificial Sequence: Synthetic oligonucleotide
  Sense strand starting at position 1107 of SEQ ID NO: 1882990
ggcagagucacagaaguag

SEQ ID NO: 2162343 - RNA, 19 nt, Artificial Sequence
  Description of Artificial Sequence: Synthetic oligonucleotide
  Antisense strand to SEQ ID NO: 2162342
cuacuucugugacucugcc

SEQ ID NO: 2162344 - RNA, 19 nt, Artificial Sequence
  Description of Artificial Sequence: Synthetic oligonucleotide
  Sense strand starting at position 1118 of SEQ ID NO: 1882990
agaaguaguggccgaugau

SEQ ID NO: 2162345 - RNA, 19 nt, Artificial Sequence
  Description of Artificial Sequence: Synthetic oligonucleotide
  Antisense strand to SEQ ID NO: 2162344
aucaucggccacuacuucu

SEQ ID NO: 2162346 - RNA, 19 nt, Artificial Sequence
  Description of Artificial Sequence: Synthetic oligonucleotide
  Sense strand starting at position 1119 of SEQ ID NO: 1882990
gaaguaguggccgaugaug

SEQ ID NO: 2162347 - RNA, 19 nt, Artificial Sequence
  Description of Artificial Sequence: Synthetic oligonucleotide
  Antisense strand to SEQ ID NO: 2162346
caucaucggccacuacuuc

SEQ ID NO: 2162348 - RNA, 19 nt, Artificial Sequence
  Description of Artificial Sequence: Synthetic oligonucleotide
  Sense strand starting at position 1236 of SEQ ID NO: 1882990
uggaccauucgugaugguu

SEQ ID NO: 2162349 - RNA, 19 nt, Artificial Sequence
  Description of Artificial Sequence: Synthetic oligonucleotide
  Antisense strand to SEQ ID NO: 2162348
aaccaucacgaauggucca

SEQ ID NO: 2162350 - RNA, 19 nt, Artificial Sequence
  Description of Artificial Sequence: Synthetic oligonucleotide
  Sense strand starting at position 1295 of SEQ ID NO: 1882990
aggccaugaccaugaguau

SEQ ID NO: 2162351 - RNA, 19 nt, Artificial Sequence
  Description of Artificial Sequence: Synthetic oligonucleotide
  Antisense strand to SEQ ID NO: 2162350
auacucauggucauggccu

SEQ ID NO: 2162352 - RNA, 19 nt, Artificial Sequence
  Description of Artificial Sequence: Synthetic oligonucleotide
  Sense strand starting at position 1378 of SEQ ID NO: 1882990
auggucuugugaguggaua

SEQ ID NO: 2162353 - RNA, 19 nt, Artificial Sequence
  Description of Artificial Sequence: Synthetic oligonucleotide
  Antisense strand to SEQ ID NO: 2162352
uauccacucacaagaccau

SEQ ID NO: 2162354 - RNA, 19 nt, Artificial Sequence
  Description of Artificial Sequence: Synthetic oligonucleotide
  Sense strand starting at position 1436 of SEQ ID NO: 1882990
ccaccaucuccaugaggga

SEQ ID NO: 2162355 - RNA, 19 nt, Artificial Sequence
  Description of Artificial Sequence: Synthetic oligonucleotide
  Antisense strand to SEQ ID NO: 2162354
ucccucauggagauggugg

SEQ ID NO: 2162356 - RNA, 19 nt, Artificial Sequence
  Description of Artificial Sequence: Synthetic oligonucleotide
  Sense strand starting at position 1502 of SEQ ID NO: 1882990
ggcaaaugaagcugaugau

SEQ ID NO: 2162357 - RNA, 19 nt, Artificial Sequence
  Description of Artificial Sequence: Synthetic oligonucleotide
  Antisense strand to SEQ ID NO: 2162356
aucaucagcuucauuugcc

SEQ ID NO: 2162358 - RNA, 19 nt, Artificial Sequence
  Description of Artificial Sequence: Synthetic oligonucleotide
  Sense strand starting at position 1535 of SEQ ID NO: 1882990
gcagcaucagcacauauau

SEQ ID NO: 2162359 - RNA, 19 nt, Artificial Sequence
  Description of Artificial Sequence: Synthetic oligonucleotide
  Antisense strand to SEQ ID NO: 2162358
auauaugugcugaugcugc

SEQ ID NO: 2162360 - RNA, 19 nt, Artificial Sequence
  Description of Artificial Sequence: Synthetic oligonucleotide
  Sense strand starting at position 1612 of SEQ ID NO: 1882990
agcuccucugccuaggaaa

SEQ ID NO: 2162361 - RNA, 19 nt, Artificial Sequence
  Description of Artificial Sequence: Synthetic oligonucleotide
  Antisense strand to SEQ ID NO: 2162360
uuuccuaggcagaggagcu

SEQ ID NO: 2162362 - RNA, 19 nt, Artificial Sequence
  Description of Artificial Sequence: Synthetic oligonucleotide
  Sense strand starting at position 1802 of SEQ ID NO: 1882990
gcacuugaugcccauucua

SEQ ID NO: 2162363 - RNA, 19 nt, Artificial Sequence
  Description of Artificial Sequence: Synthetic oligonucleotide
  Antisense strand to SEQ ID NO: 2162362
uagaaugggcaucaagugc

SEQ ID NO: 2162364 - RNA, 19 nt, Artificial Sequence
  Description of Artificial Sequence: Synthetic oligonucleotide
  Sense strand starting at position 1809 of SEQ ID NO: 1882990
augcccauucuaugugaca

SEQ ID NO: 2162365 - RNA, 19 nt, Artificial Sequence
  Description of Artificial Sequence: Synthetic oligonucleotide
  Antisense strand to SEQ ID NO: 2162364
ugucacauagaaugggcau

SEQ ID NO: 2162366 - RNA, 19 nt, Artificial Sequence
  Description of Artificial Sequence: Synthetic oligonucleotide
  Sense strand starting at position 1818 of SEQ ID NO: 1882990
cuaugugacaccugugaga

SEQ ID NO: 2162367 - RNA, 19 nt, Artificial Sequence
  Description of Artificial Sequence: Synthetic oligonucleotide
  Antisense strand to SEQ ID NO: 2162366
ucucacaggugucacauag

SEQ ID NO: 2162368 - RNA, 19 nt, Artificial Sequence
  Description of Artificial Sequence: Synthetic oligonucleotide
  Sense strand starting at position 1989 of SEQ ID NO: 1882990
auggauuacuggcugggau

SEQ ID NO: 2162369 - RNA, 19 nt, Artificial Sequence
  Description of Artificial Sequence: Synthetic oligonucleotide
  Antisense strand to SEQ ID NO: 2162368
aucccagccaguaauccau

SEQ ID NO: 2162370 - RNA, 19 nt, Artificial Sequence
  Description of Artificial Sequence: Synthetic oligonucleotide
  Sense strand starting at position 1991 of SEQ ID NO: 1882990
ggauuacuggcugggauga

SEQ ID NO: 2162371 - RNA, 19 nt, Artificial Sequence
  Description of Artificial Sequence: Synthetic oligonucleotide
  Antisense strand to SEQ ID NO: 2162370
ucaucccagccaguaaucc

SEQ ID NO: 2162372 - RNA, 19 nt, Artificial Sequence
  Description of Artificial Sequence: Synthetic oligonucleotide
  Sense strand starting at position 2065 of SEQ ID NO: 1882990
ucugucuucuacucauuga

SEQ ID NO: 2162373 - RNA, 19 nt, Artificial Sequence
  Description of Artificial Sequence: Synthetic oligonucleotide
  Antisense strand to SEQ ID NO: 2162372
ucaaugaguagaagacaga

SEQ ID NO: 2162374 - RNA, 19 nt, Artificial Sequence
  Description of Artificial Sequence: Synthetic oligonucleotide
  Sense strand starting at position 2068 of SEQ ID NO: 1882990
gucuucuacucauugauua

SEQ ID NO: 2162375 - RNA, 19 nt, Artificial Sequence
  Description of Artificial Sequence: Synthetic oligonucleotide
  Antisense strand to SEQ ID NO: 2162374
uaaucaaugaguagaagac

SEQ ID NO: 2162376 - RNA, 19 nt, Artificial Sequence
  Description of Artificial Sequence: Synthetic oligonucleotide
  Sense strand starting at position 2109 of SEQ ID NO: 1882990
gcuccaacucugugcaaga

SEQ ID NO: 2162377 - RNA, 19 nt, Artificial Sequence
  Description of Artificial Sequence: Synthetic oligonucleotide
  Antisense strand to SEQ ID NO: 2162376
ucuugcacagaguuggagc

SEQ ID NO: 2162378 - RNA, 19 nt, Artificial Sequence
  Description of Artificial Sequence: Synthetic oligonucleotide
  Sense strand starting at position 2703 of SEQ ID NO: 1882990
ccauguuuauggcucccaa

SEQ ID NO: 2162379 - RNA, 19 nt, Artificial Sequence
  Description of Artificial Sequence: Synthetic oligonucleotide
  Antisense strand to SEQ ID NO: 2162378
uugggagccauaaacaugg

SEQ ID NO: 2162380 - RNA, 19 nt, Artificial Sequence
  Description of Artificial Sequence: Synthetic oligonucleotide
  Sense strand starting at position 2726 of SEQ ID NO: 1882990
ccagucaucugggcuggaa

SEQ ID NO: 2162381 - RNA, 19 nt, Artificial Sequence
  Description of Artificial Sequence: Synthetic oligonucleotide
  Antisense strand to SEQ ID NO: 2162380
uuccagcccagaugacugg

SEQ ID NO: 2162382 - RNA, 19 nt, Artificial Sequence
  Description of Artificial Sequence: Synthetic oligonucleotide
  Sense strand starting at position 2728 of SEQ ID NO: 1882990
agucaucugggcuggaaac

SEQ ID NO: 2162383 - RNA, 19 nt, Artificial Sequence
  Description of Artificial Sequence: Synthetic oligonucleotide
  Antisense strand to SEQ ID NO: 2162382
guuuccagcccagaugacu

SEQ ID NO: 2162384 - RNA, 19 nt, Artificial Sequence
  Description of Artificial Sequence: Synthetic oligonucleotide
  Sense strand starting at position 2797 of SEQ ID NO: 1882990
aggaucuguuuccucuuaa

SEQ ID NO: 2162385 - RNA, 19 nt, Artificial Sequence
  Description of Artificial Sequence: Synthetic oligonucleotide
  Antisense strand to SEQ ID NO: 2162384
uuaagaggaaacagauccu

SEQ ID NO: 2162386 - RNA, 19 nt, Artificial Sequence
  Description of Artificial Sequence: Synthetic oligonucleotide
  Sense strand starting at position 2798 of SEQ ID NO: 1882990
ggaucuguuuccucuuaac

SEQ ID NO: 2162387 - RNA, 19 nt, Artificial Sequence
  Description of Artificial Sequence: Synthetic oligonucleotide
  Antisense strand to SEQ ID NO: 2162386
guuaagaggaaacagaucc

SEQ ID NO: 2162388 - RNA, 19 nt, Artificial Sequence
  Description of Artificial Sequence: Synthetic oligonucleotide
  Sense strand starting at position 2848 of SEQ ID NO: 1882990
uugguagauugcucaauca

SEQ ID NO: 2162389 - RNA, 19 nt, Artificial Sequence
  Description of Artificial Sequence: Synthetic oligonucleotide
  Antisense strand to SEQ ID NO: 2162388
ugauugagcaaucuaccaa

SEQ ID NO: 2162390 - RNA, 19 nt, Artificial Sequence
  Description of Artificial Sequence: Synthetic oligonucleotide
  Sense strand starting at position 2909 of SEQ ID NO: 1882990
uuaaguuauugugucaauc

SEQ ID NO: 2162391 - RNA, 19 nt, Artificial Sequence
  Description of Artificial Sequence: Synthetic oligonucleotide
  Antisense strand to SEQ ID NO: 2162390
gauugacacaauaacuuaa

SEQ ID NO: 2162392 - RNA, 19 nt, Artificial Sequence
  Description of Artificial Sequence: Synthetic oligonucleotide
  Sense strand starting at position 3824 of SEQ ID NO: 1882990
aauguauaucaugagguuu

SEQ ID NO: 2162393 - RNA, 19 nt, Artificial Sequence
  Description of Artificial Sequence: Synthetic oligonucleotide
  Antisense strand to SEQ ID NO: 2162392
aaaccucaugauauacauu

SEQ ID NO: 2162394 - RNA, 19 nt, Artificial Sequence
  Description of Artificial Sequence: Synthetic oligonucleotide
  Sense strand starting at position 3979 of SEQ ID NO: 1882990
acaguaucauuaccuguaa

SEQ ID NO: 2162395 - RNA, 19 nt, Artificial Sequence
  Description of Artificial Sequence: Synthetic oligonucleotide
  Antisense strand to SEQ ID NO: 2162394
uuacagguaaugauacugu

SEQ ID NO: 2162396 - RNA, 19 nt, Artificial Sequence
  Description of Artificial Sequence: Synthetic oligonucleotide
  Sense strand starting at position 125 of SEQ ID NO: 1882991
agaugaccauuugaugaau

SEQ ID NO: 2162397 - RNA, 19 nt, Artificial Sequence
  Description of Artificial Sequence: Synthetic oligonucleotide
  Antisense strand to SEQ ID NO: 2162396
auucaucaaauggucaucu

SEQ ID NO: 2162398 - RNA, 19 nt, Artificial Sequence
  Description of Artificial Sequence: Synthetic oligonucleotide
  Sense strand starting at position 142 of SEQ ID NO: 1882991
augagugacugauugacca

SEQ ID NO: 2162399 - RNA, 19 nt, Artificial Sequence
  Description of Artificial Sequence: Synthetic oligonucleotide
  Antisense strand to SEQ ID NO: 2162398
uggucaaucagucacucau

SEQ ID NO: 2162400 - RNA, 19 nt, Artificial Sequence
  Description of Artificial Sequence: Synthetic oligonucleotide
  Sense strand starting at position 146 of SEQ ID NO: 1882991
gugacugauugaccaagca

SEQ ID NO: 2162401 - RNA, 19 nt, Artificial Sequence
  Description of Artificial Sequence: Synthetic oligonucleotide
  Antisense strand to SEQ ID NO: 2162400
ugcuuggucaaucagucac

SEQ ID NO: 2162402 - RNA, 19 nt, Artificial Sequence
  Description of Artificial Sequence: Synthetic oligonucleotide
  Sense strand starting at position 287 of SEQ ID NO: 1882991
aguauuugaucugagaauu

SEQ ID NO: 2162403 - RNA, 19 nt, Artificial Sequence
  Description of Artificial Sequence: Synthetic oligonucleotide
  Antisense strand to SEQ ID NO: 2162402
aauucucagaucaaauacu

SEQ ID NO: 2162404 - RNA, 19 nt, Artificial Sequence
  Description of Artificial Sequence: Synthetic oligonucleotide
  Sense strand starting at position 557 of SEQ ID NO: 1882991
ugcauuagccaaugacuaa

SEQ ID NO: 2162405 - RNA, 19 nt, Artificial Sequence
  Description of Artificial Sequence: Synthetic oligonucleotide
  Antisense strand to SEQ ID NO: 2162404
uuagucauuggcuaaugca

SEQ ID NO: 2162406 - RNA, 19 nt, Artificial Sequence
  Description of Artificial Sequence: Synthetic oligonucleotide
  Sense strand starting at position 720 of SEQ ID NO: 1882991
acagauucauggguggcaa

SEQ ID NO: 2162407 - RNA, 19 nt, Artificial Sequence
  Description of Artificial Sequence: Synthetic oligonucleotide
  Antisense strand to SEQ ID NO: 2162406
uugccacccaugaaucugu

SEQ ID NO: 2162408 - RNA, 19 nt, Artificial Sequence
  Description of Artificial Sequence: Synthetic oligonucleotide
  Sense strand starting at position 734 of SEQ ID NO: 1882991
ggcaaagcuccuuauccca

SEQ ID NO: 2162409 - RNA, 19 nt, Artificial Sequence
  Description of Artificial Sequence: Synthetic oligonucleotide
  Antisense strand to SEQ ID NO: 2162408
ugggauaaggagcuuugcc

SEQ ID NO: 2162410 - RNA, 19 nt, Artificial Sequence
  Description of Artificial Sequence: Synthetic oligonucleotide
  Sense strand starting at position 775 of SEQ ID NO: 1882991
cccugaugaugugucauaa

SEQ ID NO: 2162411 - RNA, 19 nt, Artificial Sequence
  Description of Artificial Sequence: Synthetic oligonucleotide
  Antisense strand to SEQ ID NO: 2162410
uuaugacacaucaucaggg

SEQ ID NO: 2162412 - RNA, 19 nt, Artificial Sequence
  Description of Artificial Sequence: Synthetic oligonucleotide
  Sense strand starting at position 934 of SEQ ID NO: 1882991
cagagaccacuuuggucau

SEQ ID NO: 2162413 - RNA, 19 nt, Artificial Sequence
  Description of Artificial Sequence: Synthetic oligonucleotide
  Antisense strand to SEQ ID NO: 2162412
augaccaaaguggucucug

SEQ ID NO: 2162414 - RNA, 19 nt, Artificial Sequence
  Description of Artificial Sequence: Synthetic oligonucleotide
  Sense strand starting at position 936 of SEQ ID NO: 1882991
gagaccacuuuggucauaa

SEQ ID NO: 2162415 - RNA, 19 nt, Artificial Sequence
  Description of Artificial Sequence: Synthetic oligonucleotide
  Antisense strand to SEQ ID NO: 2162414
uuaugaccaaaguggucuc

SEQ ID NO: 2162416 - RNA, 19 nt, Artificial Sequence
  Description of Artificial Sequence: Synthetic oligonucleotide
  Sense strand starting at position 937 of SEQ ID NO: 1882991
agaccacuuuggucauaaa

SEQ ID NO: 2162417 - RNA, 19 nt, Artificial Sequence
  Description of Artificial Sequence: Synthetic oligonucleotide
  Antisense strand to SEQ ID NO: 2162416
uuuaugaccaaaguggucu

SEQ ID NO: 2162418 - RNA, 19 nt, Artificial Sequence
  Description of Artificial Sequence: Synthetic oligonucleotide
  Sense strand starting at position 1111 of SEQ ID NO: 1882991
acaguuauuuaggaguuaa

SEQ ID NO: 2162419 - RNA, 19 nt, Artificial Sequence
  Description of Artificial Sequence: Synthetic oligonucleotide
  Antisense strand to SEQ ID NO: 2162418
uuaacuccuaaauaacugu

SEQ ID NO: 2162420 - RNA, 19 nt, Artificial Sequence
  Description of Artificial Sequence: Synthetic oligonucleotide
  Sense strand starting at position 1191 of SEQ ID NO: 1882991
uguagauuagguuaccuca

SEQ ID NO: 2162421 - RNA, 19 nt, Artificial Sequence
  Description of Artificial Sequence: Synthetic oligonucleotide
  Antisense strand to SEQ ID NO: 2162420
ugagguaaccuaaucuaca

SEQ ID NO: 2162422 - RNA, 19 nt, Artificial Sequence
  Description of Artificial Sequence: Synthetic oligonucleotide
  Sense strand starting at position 1354 of SEQ ID NO: 1882991
uuugcuuagcaggauauaa

SEQ ID NO: 2162423 - RNA, 19 nt, Artificial Sequence
  Description of Artificial Sequence: Synthetic oligonucleotide
  Antisense strand to SEQ ID NO: 2162422
uuauauccugcuaagcaaa

SEQ ID NO: 2162424 - RNA, 19 nt, Artificial Sequence
  Description of Artificial Sequence: Synthetic oligonucleotide
  Sense strand starting at position 1579 of SEQ ID NO: 1882991
guaggcacacauuauuaaa

SEQ ID NO: 2162425 - RNA, 19 nt, Artificial Sequence
  Description of Artificial Sequence: Synthetic oligonucleotide
  Antisense strand to SEQ ID NO: 2162424
uuuaauaaugugugccuac

SEQ ID NO: 2162426 - RNA, 19 nt, Artificial Sequence
  Description of Artificial Sequence: Synthetic oligonucleotide
  Sense strand starting at position 1677 of SEQ ID NO: 1882991
caaguaaaugugugcauuu

SEQ ID NO: 2162427 - RNA, 19 nt, Artificial Sequence
  Description of Artificial Sequence: Synthetic oligonucleotide
  Antisense strand to SEQ ID NO: 2162426
aaaugcacacauuuacuug

SEQ ID NO: 2162428 - RNA, 19 nt, Artificial Sequence
  Description of Artificial Sequence: Synthetic oligonucleotide
  Sense strand starting at position 1712 of SEQ ID NO: 1882991
uggcuuacauuugcauauu

SEQ ID NO: 2162429 - RNA, 19 nt, Artificial Sequence
  Description of Artificial Sequence: Synthetic oligonucleotide
  Antisense strand to SEQ ID NO: 2162428
aauaugcaaauguaagcca

SEQ ID NO: 2162430 - RNA, 19 nt, Artificial Sequence
  Description of Artificial Sequence: Synthetic oligonucleotide
  Sense strand starting at position 1741 of SEQ ID NO: 1882991
ugaguuaaacuuuaccugu

SEQ ID NO: 2162431 - RNA, 19 nt, Artificial Sequence
  Description of Artificial Sequence: Synthetic oligonucleotide
  Antisense strand to SEQ ID NO: 2162430
acagguaaaguuuaacuca

SEQ ID NO: 2162432 - RNA, 19 nt, Artificial Sequence
  Description of Artificial Sequence: Synthetic oligonucleotide
  Sense strand starting at position 1761 of SEQ ID NO: 1882991
gacuuccuugcuuggaaga

SEQ ID NO: 2162433 - RNA, 19 nt, Artificial Sequence
  Description of Artificial Sequence: Synthetic oligonucleotide
  Antisense strand to SEQ ID NO: 2162432
ucuuccaagcaaggaaguc

SEQ ID NO: 2162434 - RNA, 19 nt, Artificial Sequence
  Description of Artificial Sequence: Synthetic oligonucleotide
  Sense strand starting at position 1829 of SEQ ID NO: 1882991
agguucuucucaucacuca

SEQ ID NO: 2162435 - RNA, 19 nt, Artificial Sequence
  Description of Artificial Sequence: Synthetic oligonucleotide
  Antisense strand to SEQ ID NO: 2162434
ugagugaugagaagaaccu

SEQ ID NO: 2162436 - RNA, 19 nt, Artificial Sequence
  Description of Artificial Sequence: Synthetic oligonucleotide
  Sense strand starting at position 1830 of SEQ ID NO: 1882991
gguucuucucaucacucau

SEQ ID NO: 2162437 - RNA, 19 nt, Artificial Sequence
  Description of Artificial Sequence: Synthetic oligonucleotide
  Antisense strand to SEQ ID NO: 2162436
augagugaugagaagaacc

SEQ ID NO: 2162438 - RNA, 19 nt, Artificial Sequence
  Description of Artificial Sequence: Synthetic oligonucleotide
  Sense strand starting at position 1862 of SEQ ID NO: 1882991
ucacuuggccucgagacaa

SEQ ID NO: 2162439 - RNA, 19 nt, Artificial Sequence
  Description of Artificial Sequence: Synthetic oligonucleotide
  Antisense strand to SEQ ID NO: 2162438
uugucucgaggccaaguga

SEQ ID NO: 2162440 - RNA, 19 nt, Artificial Sequence
  Description of Artificial Sequence: Synthetic oligonucleotide
  Sense strand starting at position 2068 of SEQ ID NO: 1882991
cugcaaguggcuuaaacau

SEQ ID NO: 2162441 - RNA, 19 nt, Artificial Sequence
  Description of Artificial Sequence: Synthetic oligonucleotide
  Antisense strand to SEQ ID NO: 2162440
auguuuaagccacuugcag

SEQ ID NO: 2162442 - RNA, 19 nt, Artificial Sequence
  Description of Artificial Sequence: Synthetic oligonucleotide
  Sense strand starting at position 2308 of SEQ ID NO: 1882991
cugugauagcuauaauaau

SEQ ID NO: 2162443 - RNA, 19 nt, Artificial Sequence
  Description of Artificial Sequence: Synthetic oligonucleotide
  Antisense strand to SEQ ID NO: 2162442
auuauuauagcuaucacag

SEQ ID NO: 2162444 - RNA, 19 nt, Artificial Sequence
  Description of Artificial Sequence: Synthetic oligonucleotide
  Sense strand starting at position 2341 of SEQ ID NO: 1882991
auaacuaguguuggaaaga

SEQ ID NO: 2162445 - RNA, 19 nt, Artificial Sequence
  Description of Artificial Sequence: Synthetic oligonucleotide
  Antisense strand to SEQ ID NO: 2162444
ucuuuccaacacuaguuau

SEQ ID NO: 2162446 - RNA, 19 nt, Artificial Sequence
  Description of Artificial Sequence: Synthetic oligonucleotide
  Sense strand starting at position 2431 of SEQ ID NO: 1882991
uuugguagcuguucuauuu

SEQ ID NO: 2162447 - RNA, 19 nt, Artificial Sequence
  Description of Artificial Sequence: Synthetic oligonucleotide
  Antisense strand to SEQ ID NO: 2162446
aaauagaacagcuaccaaa

SEQ ID NO: 2162448 - RNA, 19 nt, Artificial Sequence
  Description of Artificial Sequence: Synthetic oligonucleotide
  Sense strand starting at position 2489 of SEQ ID NO: 1882991
auuccaauccuagguauag

SEQ ID NO: 2162449 - RNA, 19 nt, Artificial Sequence
  Description of Artificial Sequence: Synthetic oligonucleotide
  Antisense strand to SEQ ID NO: 2162448
cuauaccuaggauuggaau

SEQ ID NO: 2162450 - RNA, 19 nt, Artificial Sequence
  Description of Artificial Sequence: Synthetic oligonucleotide
  Sense strand starting at position 2490 of SEQ ID NO: 1882991
uuccaauccuagguauaga

SEQ ID NO: 2162451 - RNA, 19 nt, Artificial Sequence
  Description of Artificial Sequence: Synthetic oligonucleotide
  Antisense strand to SEQ ID NO: 2162450
ucuauaccuaggauuggaa

SEQ ID NO: 2162452 - RNA, 19 nt, Artificial Sequence
  Description of Artificial Sequence: Synthetic oligonucleotide
  Sense strand starting at position 2720 of SEQ ID NO: 1882991
acaacauuaggcuaaguca

SEQ ID NO: 2162453 - RNA, 19 nt, Artificial Sequence
  Description of Artificial Sequence: Synthetic oligonucleotide
  Antisense strand to SEQ ID NO: 2162452
ugacuuagccuaauguugu

SEQ ID NO: 2162454 - RNA, 19 nt, Artificial Sequence
  Description of Artificial Sequence: Synthetic oligonucleotide
  Sense strand starting at position 2723 of SEQ ID NO: 1882991
acauuaggcuaagucaaau

SEQ ID NO: 2162455 - RNA, 19 nt, Artificial Sequence
  Description of Artificial Sequence: Synthetic oligonucleotide
  Antisense strand to SEQ ID NO: 2162454
auuugacuuagccuaaugu

SEQ ID NO: 2162456 - RNA, 19 nt, Artificial Sequence
  Description of Artificial Sequence: Synthetic oligonucleotide
  Sense strand starting at position 2822 of SEQ ID NO: 1882991
aauaauuagugguuacuga

SEQ ID NO: 2162457 - RNA, 19 nt, Artificial Sequence
  Description of Artificial Sequence: Synthetic oligonucleotide
  Antisense strand to SEQ ID NO: 2162456
ucaguaaccacuaauuauu

SEQ ID NO: 2162458 - RNA, 19 nt, Artificial Sequence
  Description of Artificial Sequence: Synthetic oligonucleotide
  Sense strand starting at position 2845 of SEQ ID NO: 1882991
agaguagagugacugcuua

SEQ ID NO: 2162459 - RNA, 19 nt, Artificial Sequence
  Description of Artificial Sequence: Synthetic oligonucleotide
  Antisense strand to SEQ ID NO: 2162458
uaagcagucacucuacucu

SEQ ID NO: 2162460 - RNA, 19 nt, Artificial Sequence
  Description of Artificial Sequence: Synthetic oligonucleotide
  Sense strand starting at position 3164 of SEQ ID NO: 1882991
gagucuugcccugauggag

SEQ ID NO: 2162461 - RNA, 19 nt, Artificial Sequence
  Description of Artificial Sequence: Synthetic oligonucleotide
  Antisense strand to SEQ ID NO: 2162460
cuccaucagggcaagacuc

SEQ ID NO: 2162462 - RNA, 19 nt, Artificial Sequence
  Description of Artificial Sequence: Synthetic oligonucleotide
  Sense strand starting at position 3201 of SEQ ID NO: 1882991
gaggaaaugugggccuaga

SEQ ID NO: 2162463 - RNA, 19 nt, Artificial Sequence
  Description of Artificial Sequence: Synthetic oligonucleotide
  Antisense strand to SEQ ID NO: 2162462
ucuaggcccacauuuccuc

SEQ ID NO: 2162464 - RNA, 19 nt, Artificial Sequence
  Description of Artificial Sequence: Synthetic oligonucleotide
  Sense strand starting at position 3245 of SEQ ID NO: 1882991
gguuaagaguaacuaacau

SEQ ID NO: 2162465 - RNA, 19 nt, Artificial Sequence
  Description of Artificial Sequence: Synthetic oligonucleotide
  Antisense strand to SEQ ID NO: 2162464
auguuaguuacucuuaacc

SEQ ID NO: 2162466 - RNA, 19 nt, Artificial Sequence
  Description of Artificial Sequence: Synthetic oligonucleotide
  Sense strand starting at position 3451 of SEQ ID NO: 1882991
ggaaccagcuaguuaacua

SEQ ID NO: 2162467 - RNA, 19 nt, Artificial Sequence
  Description of Artificial Sequence: Synthetic oligonucleotide
  Antisense strand to SEQ ID NO: 2162466
uaguuaacuagcugguucc

SEQ ID NO: 2162468 - RNA, 19 nt, Artificial Sequence
  Description of Artificial Sequence: Synthetic oligonucleotide
  Sense strand starting at position 3455 of SEQ ID NO: 1882991
ccagcuaguuaacuaugau

SEQ ID NO: 2162469 - RNA, 19 nt, Artificial Sequence
  Description of Artificial Sequence: Synthetic oligonucleotide
  Antisense strand to SEQ ID NO: 2162468
aucauaguuaacuagcugg

SEQ ID NO: 2162470 - RNA, 19 nt, Artificial Sequence
  Description of Artificial Sequence: Synthetic oligonucleotide
  Sense strand starting at position 3771 of SEQ ID NO: 1882991
cuagguguaccugaaguua

SEQ ID NO: 2162471 - RNA, 19 nt, Artificial Sequence
  Description of Artificial Sequence: Synthetic oligonucleotide
  Antisense strand to SEQ ID NO: 2162470
uaacuucagguacaccuag

SEQ ID NO: 2162472 - RNA, 19 nt, Artificial Sequence
  Description of Artificial Sequence: Synthetic oligonucleotide
  Sense strand starting at position 3811 of SEQ ID NO: 1882991
guagcaagagaguacugua

SEQ ID NO: 2162473 - RNA, 19 nt, Artificial Sequence
  Description of Artificial Sequence: Synthetic oligonucleotide
  Antisense strand to SEQ ID NO: 2162472
uacaguacucucuugcuac

SEQ ID NO: 2162474 - RNA, 19 nt, Artificial Sequence
  Description of Artificial Sequence: Synthetic oligonucleotide
  Sense strand starting at position 3978 of SEQ ID NO: 1882991
cagauuccacaguggauua

SEQ ID NO: 2162475 - RNA, 19 nt, Artificial Sequence
  Description of Artificial Sequence: Synthetic oligonucleotide
  Antisense strand to SEQ ID NO: 2162474
uaauccacuguggaaucug

SEQ ID NO: 2162476 - RNA, 19 nt, Artificial Sequence
  Description of Artificial Sequence: Synthetic oligonucleotide
  Sense strand starting at position 2522 of SEQ ID NO: 1882992
caaaguuccugaggagaug

SEQ ID NO: 2162477 - RNA, 19 nt, Artificial Sequence
  Description of Artificial Sequence: Synthetic oligonucleotide
  Antisense strand to SEQ ID NO: 2162476
caucuccucaggaacuuug

SEQ ID NO: 2162478 - RNA, 19 nt, Artificial Sequence
  Description of Artificial Sequence: Synthetic oligonucleotide
  Sense strand starting at position 2533 of SEQ ID NO: 1882992
aggagauguucagggaggu

SEQ ID NO: 2162479 - RNA, 19 nt, Artificial Sequence
  Description of Artificial Sequence: Synthetic oligonucleotide
  Antisense strand to SEQ ID NO: 2162478
accucccugaacaucuccu

SEQ ID NO: 2162480 - RNA, 19 nt, Artificial Sequence
  Description of Artificial Sequence: Synthetic oligonucleotide
  Sense strand starting at position 3161 of SEQ ID NO: 1882992
uggcauucgucuuccuuga

SEQ ID NO: 2162481 - RNA, 19 nt, Artificial Sequence
  Description of Artificial Sequence: Synthetic oligonucleotide
  Antisense strand to SEQ ID NO: 2162480
ucaaggaagacgaaugcca

SEQ ID NO: 2162482 - RNA, 19 nt, Artificial Sequence
  Description of Artificial Sequence: Synthetic oligonucleotide
  Sense strand starting at position 3163 of SEQ ID NO: 1882992
gcauucgucuuccuugauu

SEQ ID NO: 2162483 - RNA, 19 nt, Artificial Sequence
  Description of Artificial Sequence: Synthetic oligonucleotide
  Antisense strand to SEQ ID NO: 2162482
aaucaaggaagacgaaugc

SEQ ID NO: 2162484 - RNA, 19 nt, Artificial Sequence
  Description of Artificial Sequence: Synthetic oligonucleotide
  Sense strand starting at position 3183 of SEQ ID NO: 1882992
ucccacuuggacgauuaau

SEQ ID NO: 2162485 - RNA, 19 nt, Artificial Sequence
  Description of Artificial Sequence: Synthetic oligonucleotide
  Antisense strand to SEQ ID NO: 2162484
auuaaucguccaaguggga

SEQ ID NO: 2162486 - RNA, 19 nt, Artificial Sequence
  Description of Artificial Sequence: Synthetic oligonucleotide
  Sense strand starting at position 3304 of SEQ ID NO: 1882992
auauaucuguuugauguca

SEQ ID NO: 2162487 - RNA, 19 nt, Artificial Sequence
  Description of Artificial Sequence: Synthetic oligonucleotide
  Antisense strand to SEQ ID NO: 2162486
ugacaucaaacagauauau

SEQ ID NO: 2162488 - RNA, 19 nt, Artificial Sequence
  Description of Artificial Sequence: Synthetic oligonucleotide
  Sense strand starting at position 3306 of SEQ ID NO: 1882992
auaucuguuugaugucaca

SEQ ID NO: 2162489 - RNA, 19 nt, Artificial Sequence
  Description of Artificial Sequence: Synthetic oligonucleotide
  Antisense strand to SEQ ID NO: 2162488
ugugacaucaaacagauau

SEQ ID NO: 2162490 - RNA, 19 nt, Artificial Sequence
  Description of Artificial Sequence: Synthetic oligonucleotide
  Sense strand starting at position 3325 of SEQ ID NO: 1882992
caguuaucaguccguggua

SEQ ID NO: 2162491 - RNA, 19 nt, Artificial Sequence
  Description of Artificial Sequence: Synthetic oligonucleotide
  Antisense strand to SEQ ID NO: 2162490
uaccacggacugauaacug

SEQ ID NO: 2162492 - RNA, 19 nt, Artificial Sequence
  Description of Artificial Sequence: Synthetic oligonucleotide
  Sense strand starting at position 3328 of SEQ ID NO: 1882992
uuaucaguccgugguagga

SEQ ID NO: 2162493 - RNA, 19 nt, Artificial Sequence
  Description of Artificial Sequence: Synthetic oligonucleotide
  Antisense strand to SEQ ID NO: 2162492
uccuaccacggacugauaa

SEQ ID NO: 2162494 - RNA, 19 nt, Artificial Sequence
  Description of Artificial Sequence: Synthetic oligonucleotide
  Sense strand starting at position 3330 of SEQ ID NO: 1882992
aucaguccgugguaggaau

SEQ ID NO: 2162495 - RNA, 19 nt, Artificial Sequence
  Description of Artificial Sequence: Synthetic oligonucleotide
  Antisense strand to SEQ ID NO: 2162494
auuccuaccacggacugau

SEQ ID NO: 2162496 - RNA, 19 nt, Artificial Sequence
  Description of Artificial Sequence: Synthetic oligonucleotide
  Sense strand starting at position 3338 of SEQ ID NO: 1882992
gugguaggaaugcaucuua

SEQ ID NO: 2162497 - RNA, 19 nt, Artificial Sequence
  Description of Artificial Sequence: Synthetic oligonucleotide
  Antisense strand to SEQ ID NO: 2162496
uaagaugcauuccuaccac

SEQ ID NO: 2162498 - RNA, 19 nt, Artificial Sequence
  Description of Artificial Sequence: Synthetic oligonucleotide
  Sense strand starting at position 3343 of SEQ ID NO: 1882992
aggaaugcaucuuaguuga

SEQ ID NO: 2162499 - RNA, 19 nt, Artificial Sequence
  Description of Artificial Sequence: Synthetic oligonucleotide
  Antisense strand to SEQ ID NO: 2162498
ucaacuaagaugcauuccu

SEQ ID NO: 2162500 - RNA, 19 nt, Artificial Sequence
  Description of Artificial Sequence: Synthetic oligonucleotide
  Sense strand starting at position 3345 of SEQ ID NO: 1882992
gaaugcaucuuaguugaau

SEQ ID NO: 2162501 - RNA, 19 nt, Artificial Sequence
  Description of Artificial Sequence: Synthetic oligonucleotide
  Antisense strand to SEQ ID NO: 2162500
auucaacuaagaugcauuc

SEQ ID NO: 2162502 - RNA, 19 nt, Artificial Sequence
  Description of Artificial Sequence: Synthetic oligonucleotide
  Sense strand starting at position 3402 of SEQ ID NO: 1882992
aaaguuuagcuguacaguu

SEQ ID NO: 2162503 - RNA, 19 nt, Artificial Sequence
  Description of Artificial Sequence: Synthetic oligonucleotide
  Antisense strand to SEQ ID NO: 2162502
aacuguacagcuaaacuuu

SEQ ID NO: 2162504 - RNA, 19 nt, Artificial Sequence
  Description of Artificial Sequence: Synthetic oligonucleotide
  Sense strand starting at position 3504 of SEQ ID NO: 1882992
agacucauauuucgcagau

SEQ ID NO: 2162505 - RNA, 19 nt, Artificial Sequence
  Description of Artificial Sequence: Synthetic oligonucleotide
  Antisense strand to SEQ ID NO: 2162504
aucugcgaaauaugagucu

SEQ ID NO: 2162506 - RNA, 19 nt, Artificial Sequence
  Description of Artificial Sequence: Synthetic oligonucleotide
  Sense strand starting at position 3506 of SEQ ID NO: 1882992
acucauauuucgcagauga

SEQ ID NO: 2162507 - RNA, 19 nt, Artificial Sequence
  Description of Artificial Sequence: Synthetic oligonucleotide
  Antisense strand to SEQ ID NO: 2162506
ucaucugcgaaauaugagu

SEQ ID NO: 2162508 - RNA, 19 nt, Artificial Sequence
  Description of Artificial Sequence: Synthetic oligonucleotide
  Sense strand starting at position 3520 of SEQ ID NO: 1882992
gaugaacuuggauggugua

SEQ ID NO: 2162509 - RNA, 19 nt, Artificial Sequence
  Description of Artificial Sequence: Synthetic oligonucleotide
  Antisense strand to SEQ ID NO: 2162508
uacaccauccaaguucauc

SEQ ID NO: 2162510 - RNA, 19 nt, Artificial Sequence
  Description of Artificial Sequence: Synthetic oligonucleotide
  Sense strand starting at position 3523 of SEQ ID NO: 1882992
gaacuuggaugguguagaa

SEQ ID NO: 2162511 - RNA, 19 nt, Artificial Sequence
  Description of Artificial Sequence: Synthetic oligonucleotide
  Antisense strand to SEQ ID NO: 2162510
uucuacaccauccaaguuc

SEQ ID NO: 2162512 - RNA, 19 nt, Artificial Sequence
  Description of Artificial Sequence: Synthetic oligonucleotide
  Sense strand starting at position 3548 of SEQ ID NO: 1882992
guagaaggcugagugaucu

SEQ ID NO: 2162513 - RNA, 19 nt, Artificial Sequence
  Description of Artificial Sequence: Synthetic oligonucleotide
  Antisense strand to SEQ ID NO: 2162512
agaucacucagccuucuac

SEQ ID NO: 2162514 - RNA, 19 nt, Artificial Sequence
  Description of Artificial Sequence: Synthetic oligonucleotide
  Sense strand starting at position 3558 of SEQ ID NO: 1882992
gagugaucuuggccuucuu

SEQ ID NO: 2162515 - RNA, 19 nt, Artificial Sequence
  Description of Artificial Sequence: Synthetic oligonucleotide
  Antisense strand to SEQ ID NO: 2162514
aagaaggccaagaucacuc

SEQ ID NO: 2162516 - RNA, 19 nt, Artificial Sequence
  Description of Artificial Sequence: Synthetic oligonucleotide
  Sense strand starting at position 3576 of SEQ ID NO: 1882992
ugagguucguccuuguaac

SEQ ID NO: 2162517 - RNA, 19 nt, Artificial Sequence
  Description of Artificial Sequence: Synthetic oligonucleotide
  Antisense strand to SEQ ID NO: 2162516
guuacaaggacgaaccuca

SEQ ID NO: 2162518 - RNA, 19 nt, Artificial Sequence
  Description of Artificial Sequence: Synthetic oligonucleotide
  Sense strand starting at position 3577 of SEQ ID NO: 1882992
gagguucguccuuguaaca

SEQ ID NO: 2162519 - RNA, 19 nt, Artificial Sequence
  Description of Artificial Sequence: Synthetic oligonucleotide
  Antisense strand to SEQ ID NO: 2162518
uguuacaaggacgaaccuc

SEQ ID NO: 2162520 - RNA, 19 nt, Artificial Sequence
  Description of Artificial Sequence: Synthetic oligonucleotide
  Sense strand starting at position 3616 of SEQ ID NO: 1882992
ccuguaacuuuaggguaaa

SEQ ID NO: 2162521 - RNA, 19 nt, Artificial Sequence
  Description of Artificial Sequence: Synthetic oligonucleotide
  Antisense strand to SEQ ID NO: 2162520
uuuacccuaaaguuacagg

SEQ ID NO: 2162522 - RNA, 19 nt, Artificial Sequence
  Description of Artificial Sequence: Synthetic oligonucleotide
  Sense strand starting at position 102 of SEQ ID NO: 1882993
uacugaugaucgcuaagag

SEQ ID NO: 2162523 - RNA, 19 nt, Artificial Sequence
  Description of Artificial Sequence: Synthetic oligonucleotide
  Antisense strand to SEQ ID NO: 2162522
cucuuagcgaucaucagua

SEQ ID NO: 2162524 - RNA, 19 nt, Artificial Sequence
  Description of Artificial Sequence: Synthetic oligonucleotide
  Sense strand starting at position 143 of SEQ ID NO: 1882993
gggagagggcuugaugcau

SEQ ID NO: 2162525 - RNA, 19 nt, Artificial Sequence
  Description of Artificial Sequence: Synthetic oligonucleotide
  Antisense strand to SEQ ID NO: 2162524
augcaucaagcccucuccc

SEQ ID NO: 2162526 - RNA, 19 nt, Artificial Sequence
  Description of Artificial Sequence: Synthetic oligonucleotide
  Sense strand starting at position 147 of SEQ ID NO: 1882993
gagggcuugaugcauggua

SEQ ID NO: 2162527 - RNA, 19 nt, Artificial Sequence
  Description of Artificial Sequence: Synthetic oligonucleotide
  Antisense strand to SEQ ID NO: 2162526
uaccaugcaucaagcccuc

SEQ ID NO: 2162528 - RNA, 19 nt, Artificial Sequence
  Description of Artificial Sequence: Synthetic oligonucleotide
  Sense strand starting at position 156 of SEQ ID NO: 1882993
augcaugguacaugaggaa

SEQ ID NO: 2162529 - RNA, 19 nt, Artificial Sequence
  Description of Artificial Sequence: Synthetic oligonucleotide
  Antisense strand to SEQ ID NO: 2162528
uuccucauguaccaugcau

SEQ ID NO: 2162530 - RNA, 19 nt, Artificial Sequence
  Description of Artificial Sequence: Synthetic oligonucleotide
  Sense strand starting at position 489 of SEQ ID NO: 1882993
gccuaaucuguauauugag

SEQ ID NO: 2162531 - RNA, 19 nt, Artificial Sequence
  Description of Artificial Sequence: Synthetic oligonucleotide
  Antisense strand to SEQ ID NO: 2162530
cucaauauacagauuaggc

SEQ ID NO: 2162532 - RNA, 19 nt, Artificial Sequence
  Description of Artificial Sequence: Synthetic oligonucleotide
  Sense strand starting at position 505 of SEQ ID NO: 1882993
gagauuaguaaagguaggu

SEQ ID NO: 2162533 - RNA, 19 nt, Artificial Sequence
  Description of Artificial Sequence: Synthetic oligonucleotide
  Antisense strand to SEQ ID NO: 2162532
accuaccuuuacuaaucuc

SEQ ID NO: 2162534 - RNA, 19 nt, Artificial Sequence
  Description of Artificial Sequence: Synthetic oligonucleotide
  Sense strand starting at position 918 of SEQ ID NO: 1882993
ugaaacaggugccuagaau

SEQ ID NO: 2162535 - RNA, 19 nt, Artificial Sequence
  Description of Artificial Sequence: Synthetic oligonucleotide
  Antisense strand to SEQ ID NO: 2162534
auucuaggcaccuguuuca

SEQ ID NO: 2162536 - RNA, 19 nt, Artificial Sequence
  Description of Artificial Sequence: Synthetic oligonucleotide
  Sense strand starting at position 942 of SEQ ID NO: 1882993
ggguaaggacaagguuuaa

SEQ ID NO: 2162537 - RNA, 19 nt, Artificial Sequence
  Description of Artificial Sequence: Synthetic oligonucleotide
  Antisense strand to SEQ ID NO: 2162536
uuaaaccuuguccuuaccc

SEQ ID NO: 2162538 - RNA, 19 nt, Artificial Sequence
  Description of Artificial Sequence: Synthetic oligonucleotide
  Sense strand starting at position 968 of SEQ ID NO: 1882993
acaccuguugcuuaagaga

SEQ ID NO: 2162539 - RNA, 19 nt, Artificial Sequence
  Description of Artificial Sequence: Synthetic oligonucleotide
  Antisense strand to SEQ ID NO: 2162538
ucucuuaagcaacaggugu

SEQ ID NO: 2162540 - RNA, 19 nt, Artificial Sequence
  Description of Artificial Sequence: Synthetic oligonucleotide
  Sense strand starting at position 975 of SEQ ID NO: 1882993
uugcuuaagagacgcauuu

SEQ ID NO: 2162541 - RNA, 19 nt, Artificial Sequence
  Description of Artificial Sequence: Synthetic oligonucleotide
  Antisense strand to SEQ ID NO: 2162540
aaaugcgucucuuaagcaa

SEQ ID NO: 2162542 - RNA, 19 nt, Artificial Sequence
  Description of Artificial Sequence: Synthetic oligonucleotide
  Sense strand starting at position 1554 of SEQ ID NO: 1882993
cucgucaaucugggaggau

SEQ ID NO: 2162543 - RNA, 19 nt, Artificial Sequence
  Description of Artificial Sequence: Synthetic oligonucleotide
  Antisense strand to SEQ ID NO: 2162542
auccucccagauugacgag

SEQ ID NO: 2162544 - RNA, 19 nt, Artificial Sequence
  Description of Artificial Sequence: Synthetic oligonucleotide
  Sense strand starting at position 1603 of SEQ ID NO: 1882993
gugacaucagcccagauga

SEQ ID NO: 2162545 - RNA, 19 nt, Artificial Sequence
  Description of Artificial Sequence: Synthetic oligonucleotide
  Antisense strand to SEQ ID NO: 2162544
ucaucugggcugaugucac

SEQ ID NO: 2162546 - RNA, 19 nt, Artificial Sequence
  Description of Artificial Sequence: Synthetic oligonucleotide
  Sense strand starting at position 2005 of SEQ ID NO: 1882993
ggaguuucgcgucauuucu

SEQ ID NO: 2162547 - RNA, 19 nt, Artificial Sequence
  Description of Artificial Sequence: Synthetic oligonucleotide
  Antisense strand to SEQ ID NO: 2162546
agaaaugacgcgaaacucc

SEQ ID NO: 2162548 - RNA, 19 nt, Artificial Sequence
  Description of Artificial Sequence: Synthetic oligonucleotide
  Sense strand starting at position 2011 of SEQ ID NO: 1882993
ucgcgucauuucucuaaag

SEQ ID NO: 2162549 - RNA, 19 nt, Artificial Sequence
  Description of Artificial Sequence: Synthetic oligonucleotide
  Antisense strand to SEQ ID NO: 2162548
cuuuagagaaaugacgcga

SEQ ID NO: 2162550 - RNA, 19 nt, Artificial Sequence
  Description of Artificial Sequence: Synthetic oligonucleotide
  Sense strand starting at position 2012 of SEQ ID NO: 1882993
cgcgucauuucucuaaaga

SEQ ID NO: 2162551 - RNA, 19 nt, Artificial Sequence
  Description of Artificial Sequence: Synthetic oligonucleotide
  Antisense strand to SEQ ID NO: 2162550
ucuuuagagaaaugacgcg

SEQ ID NO: 2162552 - RNA, 19 nt, Artificial Sequence
  Description of Artificial Sequence: Synthetic oligonucleotide
  Sense strand starting at position 2023 of SEQ ID NO: 1882993
ucuaaagauucugcuauug

SEQ ID NO: 2162553 - RNA, 19 nt, Artificial Sequence
  Description of Artificial Sequence: Synthetic oligonucleotide
  Antisense strand to SEQ ID NO: 2162552
caauagcagaaucuuuaga

SEQ ID NO: 2162554 - RNA, 19 nt, Artificial Sequence
  Description of Artificial Sequence: Synthetic oligonucleotide
  Sense strand starting at position 2245 of SEQ ID NO: 1882993
ggagaaagugaauguuugu

SEQ ID NO: 2162555 - RNA, 19 nt, Artificial Sequence
  Description of Artificial Sequence: Synthetic oligonucleotide
  Antisense strand to SEQ ID NO: 2162554
acaaacauucacuuucucc

SEQ ID NO: 2162556 - RNA, 19 nt, Artificial Sequence
  Description of Artificial Sequence: Synthetic oligonucleotide
  Sense strand starting at position 2301 of SEQ ID NO: 1882993
uuuggaucuugguuaacau

SEQ ID NO: 2162557 - RNA, 19 nt, Artificial Sequence
  Description of Artificial Sequence: Synthetic oligonucleotide
  Antisense strand to SEQ ID NO: 2162556
auguuaaccaagauccaaa

SEQ ID NO: 2162558 - RNA, 19 nt, Artificial Sequence
  Description of Artificial Sequence: Synthetic oligonucleotide
  Sense strand starting at position 2302 of SEQ ID NO: 1882993
uuggaucuugguuaacauu

SEQ ID NO: 2162559 - RNA, 19 nt, Artificial Sequence
  Description of Artificial Sequence: Synthetic oligonucleotide
  Antisense strand to SEQ ID NO: 2162558
aauguuaaccaagauccaa

SEQ ID NO: 2162560 - RNA, 19 nt, Artificial Sequence
  Description of Artificial Sequence: Synthetic oligonucleotide
  Sense strand starting at position 2308 of SEQ ID NO: 1882993
cuugguuaacauugagauu

SEQ ID NO: 2162561 - RNA, 19 nt, Artificial Sequence
  Description of Artificial Sequence: Synthetic oligonucleotide
  Antisense strand to SEQ ID NO: 2162560
aaucucaauguuaaccaag

SEQ ID NO: 2162562 - RNA, 19 nt, Artificial Sequence
  Description of Artificial Sequence: Synthetic oligonucleotide
  Sense strand starting at position 2311 of SEQ ID NO: 1882993
gguuaacauugagauuuaa

SEQ ID NO: 2162563 - RNA, 19 nt, Artificial Sequence
  Description of Artificial Sequence: Synthetic oligonucleotide
  Antisense strand to SEQ ID NO: 2162562
uuaaaucucaauguuaacc

SEQ ID NO: 2162564 - RNA, 19 nt, Artificial Sequence
  Description of Artificial Sequence: Synthetic oligonucleotide
  Sense strand starting at position 2325 of SEQ ID NO: 1882993
uuuaaaguuucuuccugag

SEQ ID NO: 2162565 - RNA, 19 nt, Artificial Sequence
  Description of Artificial Sequence: Synthetic oligonucleotide
  Antisense strand to SEQ ID NO: 2162564
cucaggaagaaacuuuaaa

SEQ ID NO: 2162566 - RNA, 19 nt, Artificial Sequence
  Description of Artificial Sequence: Synthetic oligonucleotide
  Sense strand starting at position 2365 of SEQ ID NO: 1882993
uuggaaugaggacgugaua

SEQ ID NO: 2162567 - RNA, 19 nt, Artificial Sequence
  Description of Artificial Sequence: Synthetic oligonucleotide
  Antisense strand to SEQ ID NO: 2162566
uaucacguccucauuccaa

SEQ ID NO: 2162568 - RNA, 19 nt, Artificial Sequence
  Description of Artificial Sequence: Synthetic oligonucleotide
  Sense strand starting at position 2376 of SEQ ID NO: 1882993
acgugauaagcugaagaca

SEQ ID NO: 2162569 - RNA, 19 nt, Artificial Sequence
  Description of Artificial Sequence: Synthetic oligonucleotide
  Antisense strand to SEQ ID NO: 2162568
ugucuucagcuuaucacgu

SEQ ID NO: 2162570 - RNA, 19 nt, Artificial Sequence
  Description of Artificial Sequence: Synthetic oligonucleotide
  Sense strand starting at position 2570 of SEQ ID NO: 1882993
guuucucugagguagguaa

SEQ ID NO: 2162571 - RNA, 19 nt, Artificial Sequence
  Description of Artificial Sequence: Synthetic oligonucleotide
  Antisense strand to SEQ ID NO: 2162570
uuaccuaccucagagaaac

SEQ ID NO: 2162572 - RNA, 19 nt, Artificial Sequence
  Description of Artificial Sequence: Synthetic oligonucleotide
  Sense strand starting at position 2610 of SEQ ID NO: 1882993
gugauaccuccaggaauaa

SEQ ID NO: 2162573 - RNA, 19 nt, Artificial Sequence
  Description of Artificial Sequence: Synthetic oligonucleotide
  Antisense strand to SEQ ID NO: 2162572
uuauuccuggagguaucac

SEQ ID NO: 2162574 - RNA, 19 nt, Artificial Sequence
  Description of Artificial Sequence: Synthetic oligonucleotide
  Sense strand starting at position 2771 of SEQ ID NO: 1882993
guuuauguacaagacuuau

SEQ ID NO: 2162575 - RNA, 19 nt, Artificial Sequence
  Description of Artificial Sequence: Synthetic oligonucleotide
  Antisense strand to SEQ ID NO: 2162574
auaagucuuguacauaaac

SEQ ID NO: 2162576 - RNA, 19 nt, Artificial Sequence
  Description of Artificial Sequence: Synthetic oligonucleotide
  Sense strand starting at position 2791 of SEQ ID NO: 1882993
gcgccaccuccugucgaua

SEQ ID NO: 2162577 - RNA, 19 nt, Artificial Sequence
  Description of Artificial Sequence: Synthetic oligonucleotide
  Antisense strand to SEQ ID NO: 2162576
uaucgacaggagguggcgc

SEQ ID NO: 2162578 - RNA, 19 nt, Artificial Sequence
  Description of Artificial Sequence: Synthetic oligonucleotide
  Sense strand starting at position 2814 of SEQ ID NO: 1882993
gagaaauggucuuauuuga

SEQ ID NO: 2162579 - RNA, 19 nt, Artificial Sequence
  Description of Artificial Sequence: Synthetic oligonucleotide
  Antisense strand to SEQ ID NO: 2162578
ucaaauaagaccauuucuc

SEQ ID NO: 2162580 - RNA, 19 nt, Artificial Sequence
  Description of Artificial Sequence: Synthetic oligonucleotide
  Sense strand starting at position 2875 of SEQ ID NO: 1882993
uugaaauagcuagauuagu

SEQ ID NO: 2162581 - RNA, 19 nt, Artificial Sequence
  Description of Artificial Sequence: Synthetic oligonucleotide
  Antisense strand to SEQ ID NO: 2162580
acuaaucuagcuauuucaa

SEQ ID NO: 2162582 - RNA, 19 nt, Artificial Sequence
  Description of Artificial Sequence: Synthetic oligonucleotide
  Sense strand starting at position 2945 of SEQ ID NO: 1882993
uuaagagaguuacuuccaa

SEQ ID NO: 2162583 - RNA, 19 nt, Artificial Sequence
  Description of Artificial Sequence: Synthetic oligonucleotide
  Antisense strand to SEQ ID NO: 2162582
uuggaaguaacucucuuaa

SEQ ID NO: 2162584 - RNA, 19 nt, Artificial Sequence
  Description of Artificial Sequence: Synthetic oligonucleotide
  Sense strand starting at position 3213 of SEQ ID NO: 1882993
gggaaccugcuuuaucaau

SEQ ID NO: 2162585 - RNA, 19 nt, Artificial Sequence
  Description of Artificial Sequence: Synthetic oligonucleotide
  Antisense strand to SEQ ID NO: 2162584
auugauaaagcagguuccc

SEQ ID NO: 2162586 - RNA, 19 nt, Artificial Sequence
  Description of Artificial Sequence: Synthetic oligonucleotide
  Sense strand starting at position 3323 of SEQ ID NO: 1882993
agcuuaugacccuaguuau

SEQ ID NO: 2162587 - RNA, 19 nt, Artificial Sequence
  Description of Artificial Sequence: Synthetic oligonucleotide
  Antisense strand to SEQ ID NO: 2162586
auaacuagggucauaagcu

SEQ ID NO: 2162588 - RNA, 19 nt, Artificial Sequence
  Description of Artificial Sequence: Synthetic oligonucleotide
  Sense strand starting at position 3516 of SEQ ID NO: 1882993
agaguagucaacuggaaca

SEQ ID NO: 2162589 - RNA, 19 nt, Artificial Sequence
  Description of Artificial Sequence: Synthetic oligonucleotide
  Antisense strand to SEQ ID NO: 2162588
uguuccaguugacuacucu

SEQ ID NO: 2162590 - RNA, 19 nt, Artificial Sequence
  Description of Artificial Sequence: Synthetic oligonucleotide
  Sense strand starting at position 3555 of SEQ ID NO: 1882993
ucagaugagucaguaauau

SEQ ID NO: 2162591 - RNA, 19 nt, Artificial Sequence
  Description of Artificial Sequence: Synthetic oligonucleotide
  Antisense strand to SEQ ID NO: 2162590
auauuacugacucaucuga

SEQ ID NO: 2162592 - RNA, 19 nt, Artificial Sequence
  Description of Artificial Sequence: Synthetic oligonucleotide
  Sense strand starting at position 3573 of SEQ ID NO: 1882993
uacuuugagggcuguggaa

SEQ ID NO: 2162593 - RNA, 19 nt, Artificial Sequence
  Description of Artificial Sequence: Synthetic oligonucleotide
  Antisense strand to SEQ ID NO: 2162592
uuccacagcccucaaagua

SEQ ID NO: 2162594 - RNA, 19 nt, Artificial Sequence
  Description of Artificial Sequence: Synthetic oligonucleotide
  Sense strand starting at position 3631 of SEQ ID NO: 1882993
gugcuaaucaucgaaauga

SEQ ID NO: 2162595 - RNA, 19 nt, Artificial Sequence
  Description of Artificial Sequence: Synthetic oligonucleotide
  Antisense strand to SEQ ID NO: 2162594
ucauuucgaugauuagcac

SEQ ID NO: 2162596 - RNA, 19 nt, Artificial Sequence
  Description of Artificial Sequence: Synthetic oligonucleotide
  Sense strand starting at position 3648 of SEQ ID NO: 1882993
gauacucgacuccaguuua

SEQ ID NO: 2162597 - RNA, 19 nt, Artificial Sequence
  Description of Artificial Sequence: Synthetic oligonucleotide
  Antisense strand to SEQ ID NO: 2162596
uaaacuggagucgaguauc

SEQ ID NO: 2162598 - RNA, 19 nt, Artificial Sequence
  Description of Artificial Sequence: Synthetic oligonucleotide
  Sense strand starting at position 3653 of SEQ ID NO: 1882993
ucgacuccaguuuaacaaa

SEQ ID NO: 2162599 - RNA, 19 nt, Artificial Sequence
  Description of Artificial Sequence: Synthetic oligonucleotide
  Antisense strand to SEQ ID NO: 2162598
uuuguuaaacuggagucga

SEQ ID NO: 2162600 - RNA, 19 nt, Artificial Sequence
  Description of Artificial Sequence: Synthetic oligonucleotide
  Sense strand starting at position 3748 of SEQ ID NO: 1882993
auugaccgguuaucugaua

SEQ ID NO: 2162601 - RNA, 19 nt, Artificial Sequence
  Description of Artificial Sequence: Synthetic oligonucleotide
  Antisense strand to SEQ ID NO: 2162600
uaucagauaaccggucaau

SEQ ID NO: 2162602 - RNA, 19 nt, Artificial Sequence
  Description of Artificial Sequence: Synthetic oligonucleotide
  Sense strand starting at position 91 of SEQ ID NO: 1882994
cucagaaguucccggagau

SEQ ID NO: 2162603 - RNA, 19 nt, Artificial Sequence
  Description of Artificial Sequence: Synthetic oligonucleotide
  Antisense strand to SEQ ID NO: 2162602
aucuccgggaacuucugag

SEQ ID NO: 2162604 - RNA, 19 nt, Artificial Sequence
  Description of Artificial Sequence: Synthetic oligonucleotide
  Sense strand starting at position 92 of SEQ ID NO: 1882994
ucagaaguucccggagaua

SEQ ID NO: 2162605 - RNA, 19 nt, Artificial Sequence
  Description of Artificial Sequence: Synthetic oligonucleotide
  Antisense strand to SEQ ID NO: 2162604
uaucuccgggaacuucuga

SEQ ID NO: 2162606 - RNA, 19 nt, Artificial Sequence
  Description of Artificial Sequence: Synthetic oligonucleotide
  Sense strand starting at position 135 of SEQ ID NO: 1882994
ucccgaugacguuacuuga

SEQ ID NO: 2162607 - RNA, 19 nt, Artificial Sequence
  Description of Artificial Sequence: Synthetic oligonucleotide
  Antisense strand to SEQ ID NO: 2162606
ucaaguaacgucaucggga

SEQ ID NO: 2162608 - RNA, 19 nt, Artificial Sequence
  Description of Artificial Sequence: Synthetic oligonucleotide
  Sense strand starting at position 146 of SEQ ID NO: 1882994
uuacuugaggccugggaga

SEQ ID NO: 2162609 - RNA, 19 nt, Artificial Sequence
  Description of Artificial Sequence: Synthetic oligonucleotide
  Antisense strand to SEQ ID NO: 2162608
ucucccaggccucaaguaa

SEQ ID NO: 2162610 - RNA, 19 nt, Artificial Sequence
  Description of Artificial Sequence: Synthetic oligonucleotide
  Sense strand starting at position 207 of SEQ ID NO: 1882994
auuuauguguccuagaccu

SEQ ID NO: 2162611 - RNA, 19 nt, Artificial Sequence
  Description of Artificial Sequence: Synthetic oligonucleotide
  Antisense strand to SEQ ID NO: 2162610
aggucuaggacacauaaau

SEQ ID NO: 2162612 - RNA, 19 nt, Artificial Sequence
  Description of Artificial Sequence: Synthetic oligonucleotide
  Sense strand starting at position 209 of SEQ ID NO: 1882994
uuauguguccuagaccuag

SEQ ID NO: 2162613 - RNA, 19 nt, Artificial Sequence
  Description of Artificial Sequence: Synthetic oligonucleotide
  Antisense strand to SEQ ID NO: 2162612
cuaggucuaggacacauaa

SEQ ID NO: 2162614 - RNA, 19 nt, Artificial Sequence
  Description of Artificial Sequence: Synthetic oligonucleotide
  Sense strand starting at position 514 of SEQ ID NO: 1882994
guaggucucuuggcaucuu

SEQ ID NO: 2162615 - RNA, 19 nt, Artificial Sequence
  Description of Artificial Sequence: Synthetic oligonucleotide
  Antisense strand to SEQ ID NO: 2162614
aagaugccaagagaccuac

SEQ ID NO: 2162616 - RNA, 19 nt, Artificial Sequence
  Description of Artificial Sequence: Synthetic oligonucleotide
  Sense strand starting at position 573 of SEQ ID NO: 1882994
ggguuaugccuggagauau

SEQ ID NO: 2162617 - RNA, 19 nt, Artificial Sequence
  Description of Artificial Sequence: Synthetic oligonucleotide
  Antisense strand to SEQ ID NO: 2162616
auaucuccaggcauaaccc

SEQ ID NO: 2162618 - RNA, 19 nt, Artificial Sequence
  Description of Artificial Sequence: Synthetic oligonucleotide
  Sense strand starting at position 726 of SEQ ID NO: 1882994
guccucuggucucuuaagu

SEQ ID NO: 2162619 - RNA, 19 nt, Artificial Sequence
  Description of Artificial Sequence: Synthetic oligonucleotide
  Antisense strand to SEQ ID NO: 2162618
acuuaagagaccagaggac

SEQ ID NO: 2162620 - RNA, 19 nt, Artificial Sequence
  Description of Artificial Sequence: Synthetic oligonucleotide
  Sense strand starting at position 832 of SEQ ID NO: 1882994
ggaauucgagagggauugu

SEQ ID NO: 2162621 - RNA, 19 nt, Artificial Sequence
  Description of Artificial Sequence: Synthetic oligonucleotide
  Antisense strand to SEQ ID NO: 2162620
acaaucccucucgaauucc

SEQ ID NO: 2162622 - RNA, 19 nt, Artificial Sequence
  Description of Artificial Sequence: Synthetic oligonucleotide
  Sense strand starting at position 883 of SEQ ID NO: 1882994
ggagucagaaucugaagua

SEQ ID NO: 2162623 - RNA, 19 nt, Artificial Sequence
  Description of Artificial Sequence: Synthetic oligonucleotide
  Antisense strand to SEQ ID NO: 2162622
uacuucagauucugacucc

SEQ ID NO: 2162624 - RNA, 19 nt, Artificial Sequence
  Description of Artificial Sequence: Synthetic oligonucleotide
  Sense strand starting at position 893 of SEQ ID NO: 1882994
ucugaaguaguuuggaaca

SEQ ID NO: 2162625 - RNA, 19 nt, Artificial Sequence
  Description of Artificial Sequence: Synthetic oligonucleotide
  Antisense strand to SEQ ID NO: 2162624
uguuccaaacuacuucaga

SEQ ID NO: 2162626 - RNA, 19 nt, Artificial Sequence
  Description of Artificial Sequence: Synthetic oligonucleotide
  Sense strand starting at position 1028 of SEQ ID NO: 1882994
guguccacaucuggaagua

SEQ ID NO: 2162627 - RNA, 19 nt, Artificial Sequence
  Description of Artificial Sequence: Synthetic oligonucleotide
  Antisense strand to SEQ ID NO: 2162626
uacuuccagauguggacac

SEQ ID NO: 2162628 - RNA, 19 nt, Artificial Sequence
  Description of Artificial Sequence: Synthetic oligonucleotide
  Sense strand starting at position 1108 of SEQ ID NO: 1882994
cgaggaggauuccgggaau

SEQ ID NO: 2162629 - RNA, 19 nt, Artificial Sequence
  Description of Artificial Sequence: Synthetic oligonucleotide
  Antisense strand to SEQ ID NO: 2162628
auucccggaauccuccucg

SEQ ID NO: 2162630 - RNA, 19 nt, Artificial Sequence
  Description of Artificial Sequence: Synthetic oligonucleotide
  Sense strand starting at position 1191 of SEQ ID NO: 1882994
uucccuuaucuuuguggga

SEQ ID NO: 2162631 - RNA, 19 nt, Artificial Sequence
  Description of Artificial Sequence: Synthetic oligonucleotide
  Antisense strand to SEQ ID NO: 2162630
ucccacaaagauaagggaa

SEQ ID NO: 2162632 - RNA, 19 nt, Artificial Sequence
  Description of Artificial Sequence: Synthetic oligonucleotide
  Sense strand starting at position 1193 of SEQ ID NO: 1882994
cccuuaucuuugugggagu

SEQ ID NO: 2162633 - RNA, 19 nt, Artificial Sequence
  Description of Artificial Sequence: Synthetic oligonucleotide
  Antisense strand to SEQ ID NO: 2162632
acucccacaaagauaaggg

SEQ ID NO: 2162634 - RNA, 19 nt, Artificial Sequence
  Description of Artificial Sequence: Synthetic oligonucleotide
  Sense strand starting at position 1530 of SEQ ID NO: 1882994
guuaaagucucagaggcaa

SEQ ID NO: 2162635 - RNA, 19 nt, Artificial Sequence
  Description of Artificial Sequence: Synthetic oligonucleotide
  Antisense strand to SEQ ID NO: 2162634
uugccucugagacuuuaac

SEQ ID NO: 2162636 - RNA, 19 nt, Artificial Sequence
  Description of Artificial Sequence: Synthetic oligonucleotide
  Sense strand starting at position 1620 of SEQ ID NO: 1882994
gugucuucccucugucacu

SEQ ID NO: 2162637 - RNA, 19 nt, Artificial Sequence
  Description of Artificial Sequence: Synthetic oligonucleotide
  Antisense strand to SEQ ID NO: 2162636
agugacagagggaagacac

SEQ ID NO: 2162638 - RNA, 19 nt, Artificial Sequence
  Description of Artificial Sequence: Synthetic oligonucleotide
  Sense strand starting at position 1656 of SEQ ID NO: 1882994
cguaacacgcaucaucuua

SEQ ID NO: 2162639 - RNA, 19 nt, Artificial Sequence
  Description of Artificial Sequence: Synthetic oligonucleotide
  Antisense strand to SEQ ID NO: 2162638
uaagaugaugcguguuacg

SEQ ID NO: 2162640 - RNA, 19 nt, Artificial Sequence
  Description of Artificial Sequence: Synthetic oligonucleotide
  Sense strand starting at position 1819 of SEQ ID NO: 1882994
caguccguuucugcaagaa

SEQ ID NO: 2162641 - RNA, 19 nt, Artificial Sequence
  Description of Artificial Sequence: Synthetic oligonucleotide
  Antisense strand to SEQ ID NO: 2162640
uucuugcagaaacggacug

SEQ ID NO: 2162642 - RNA, 19 nt, Artificial Sequence
  Description of Artificial Sequence: Synthetic oligonucleotide
  Sense strand starting at position 2619 of SEQ ID NO: 1882994
gcagaagucucccuugcaa

SEQ ID NO: 2162643 - RNA, 19 nt, Artificial Sequence
  Description of Artificial Sequence: Synthetic oligonucleotide
  Antisense strand to SEQ ID NO: 2162642
uugcaagggagacuucugc

SEQ ID NO: 2162644 - RNA, 19 nt, Artificial Sequence
  Description of Artificial Sequence: Synthetic oligonucleotide
  Sense strand starting at position 2980 of SEQ ID NO: 1882994
agccuagaguucuccugaa

SEQ ID NO: 2162645 - RNA, 19 nt, Artificial Sequence
  Description of Artificial Sequence: Synthetic oligonucleotide
  Antisense strand to SEQ ID NO: 2162644
uucaggagaacucuaggcu

SEQ ID NO: 2162646 - RNA, 19 nt, Artificial Sequence
  Description of Artificial Sequence: Synthetic oligonucleotide
  Sense strand starting at position 2984 of SEQ ID NO: 1882994
uagaguucuccugaagcug

SEQ ID NO: 2162647 - RNA, 19 nt, Artificial Sequence
  Description of Artificial Sequence: Synthetic oligonucleotide
  Antisense strand to SEQ ID NO: 2162646
cagcuucaggagaacucua

SEQ ID NO: 2162648 - RNA, 19 nt, Artificial Sequence
  Description of Artificial Sequence: Synthetic oligonucleotide
  Sense strand starting at position 3353 of SEQ ID NO: 1882994
ugagacaagucucaggaga

SEQ ID NO: 2162649 - RNA, 19 nt, Artificial Sequence
  Description of Artificial Sequence: Synthetic oligonucleotide
  Antisense strand to SEQ ID NO: 2162648
ucuccugagacuugucuca

SEQ ID NO: 2162650 - RNA, 19 nt, Artificial Sequence
  Description of Artificial Sequence: Synthetic oligonucleotide
  Sense strand starting at position 3376 of SEQ ID NO: 1882994
gguacaggguccugguaua

SEQ ID NO: 2162651 - RNA, 19 nt, Artificial Sequence
  Description of Artificial Sequence: Synthetic oligonucleotide
  Antisense strand to SEQ ID NO: 2162650
uauaccaggacccuguacc

SEQ ID NO: 2162652 - RNA, 19 nt, Artificial Sequence
  Description of Artificial Sequence: Synthetic oligonucleotide
  Sense strand starting at position 3401 of SEQ ID NO: 1882994
gggccugucacuugugagu

SEQ ID NO: 2162653 - RNA, 19 nt, Artificial Sequence
  Description of Artificial Sequence: Synthetic oligonucleotide
  Antisense strand to SEQ ID NO: 2162652
acucacaagugacaggccc

SEQ ID NO: 2162654 - RNA, 19 nt, Artificial Sequence
  Description of Artificial Sequence: Synthetic oligonucleotide
  Sense strand starting at position 3979 of SEQ ID NO: 1882994
cgaaguugggacgaaguua

SEQ ID NO: 2162655 - RNA, 19 nt, Artificial Sequence
  Description of Artificial Sequence: Synthetic oligonucleotide
  Antisense strand to SEQ ID NO: 2162654
uaacuucgucccaacuucg

SEQ ID NO: 2162656 - RNA, 19 nt, Artificial Sequence
  Description of Artificial Sequence: Synthetic oligonucleotide
  Sense strand starting at position 127 of SEQ ID NO: 1882995
uuaggagagccauaguacu

SEQ ID NO: 2162657 - RNA, 19 nt, Artificial Sequence
  Description of Artificial Sequence: Synthetic oligonucleotide
  Antisense strand to SEQ ID NO: 2162656
aguacuauggcucuccuaa

SEQ ID NO: 2162658 - RNA, 19 nt, Artificial Sequence
  Description of Artificial Sequence: Synthetic oligonucleotide
  Sense strand starting at position 199 of SEQ ID NO: 1882995
cuauuuacugucuguuguu

SEQ ID NO: 2162659 - RNA, 19 nt, Artificial Sequence
  Description of Artificial Sequence: Synthetic oligonucleotide
  Antisense strand to SEQ ID NO: 2162658
aacaacagacaguaaauag

SEQ ID NO: 2162660 - RNA, 19 nt, Artificial Sequence
  Description of Artificial Sequence: Synthetic oligonucleotide
  Sense strand starting at position 238 of SEQ ID NO: 1882995
uguaauuaccaccagaagu

SEQ ID NO: 2162661 - RNA, 19 nt, Artificial Sequence
  Description of Artificial Sequence: Synthetic oligonucleotide
  Antisense strand to SEQ ID NO: 2162660
acuucuggugguaauuaca

SEQ ID NO: 2162662 - RNA, 19 nt, Artificial Sequence
  Description of Artificial Sequence: Synthetic oligonucleotide
  Sense strand starting at position 248 of SEQ ID NO: 1882995
accagaaguuaaguuuaca

SEQ ID NO: 2162663 - RNA, 19 nt, Artificial Sequence
  Description of Artificial Sequence: Synthetic oligonucleotide
  Antisense strand to SEQ ID NO: 2162662
uguaaacuuaacuucuggu

SEQ ID NO: 2162664 - RNA, 19 nt, Artificial Sequence
  Description of Artificial Sequence: Synthetic oligonucleotide
  Sense strand starting at position 2039 of SEQ ID NO: 1882995
guacuuuaguuauuuccuu

SEQ ID NO: 2162665 - RNA, 19 nt, Artificial Sequence
  Description of Artificial Sequence: Synthetic oligonucleotide
  Antisense strand to SEQ ID NO: 2162664
aaggaaauaacuaaaguac

SEQ ID NO: 2162666 - RNA, 19 nt, Artificial Sequence
  Description of Artificial Sequence: Synthetic oligonucleotide
  Sense strand starting at position 2088 of SEQ ID NO: 1882995
uugagucuccacuacacuu

SEQ ID NO: 2162667 - RNA, 19 nt, Artificial Sequence
  Description of Artificial Sequence: Synthetic oligonucleotide
  Antisense strand to SEQ ID NO: 2162666
aaguguaguggagacucaa

SEQ ID NO: 2162668 - RNA, 19 nt, Artificial Sequence
  Description of Artificial Sequence: Synthetic oligonucleotide
  Sense strand starting at position 2197 of SEQ ID NO: 1882995
acuggauugugguccauua

SEQ ID NO: 2162669 - RNA, 19 nt, Artificial Sequence
  Description of Artificial Sequence: Synthetic oligonucleotide
  Antisense strand to SEQ ID NO: 2162668
uaauggaccacaauccagu

SEQ ID NO: 2162670 - RNA, 19 nt, Artificial Sequence
  Description of Artificial Sequence: Synthetic oligonucleotide
  Sense strand starting at position 2199 of SEQ ID NO: 1882995
uggauugugguccauuaug

SEQ ID NO: 2162671 - RNA, 19 nt, Artificial Sequence
  Description of Artificial Sequence: Synthetic oligonucleotide
  Antisense strand to SEQ ID NO: 2162670
cauaauggaccacaaucca

SEQ ID NO: 2162672 - RNA, 19 nt, Artificial Sequence
  Description of Artificial Sequence: Synthetic oligonucleotide
  Sense strand starting at position 2366 of SEQ ID NO: 1882995
ggucaauacuguuugauua

SEQ ID NO: 2162673 - RNA, 19 nt, Artificial Sequence
  Description of Artificial Sequence: Synthetic oligonucleotide
  Antisense strand to SEQ ID NO: 2162672
uaaucaaacaguauugacc

SEQ ID NO: 2162674 - RNA, 19 nt, Artificial Sequence
  Description of Artificial Sequence: Synthetic oligonucleotide
  Sense strand starting at position 2367 of SEQ ID NO: 1882995
gucaauacuguuugauuag

SEQ ID NO: 2162675 - RNA, 19 nt, Artificial Sequence
  Description of Artificial Sequence: Synthetic oligonucleotide
  Antisense strand to SEQ ID NO: 2162674
cuaaucaaacaguauugac

SEQ ID NO: 2162676 - RNA, 19 nt, Artificial Sequence
  Description of Artificial Sequence: Synthetic oligonucleotide
  Sense strand starting at position 2370 of SEQ ID NO: 1882995
aauacuguuugauuaggga

SEQ ID NO: 2162677 - RNA, 19 nt, Artificial Sequence
  Description of Artificial Sequence: Synthetic oligonucleotide
  Antisense strand to SEQ ID NO: 2162676
ucccuaaucaaacaguauu

SEQ ID NO: 2162678 - RNA, 19 nt, Artificial Sequence
  Description of Artificial Sequence: Synthetic oligonucleotide
  Sense strand starting at position 2383 of SEQ ID NO: 1882995
uagggaaaguuauuaaguc

SEQ ID NO: 2162679 - RNA, 19 nt, Artificial Sequence
  Description of Artificial Sequence: Synthetic oligonucleotide
  Antisense strand to SEQ ID NO: 2162678
gacuuaauaacuuucccua

SEQ ID NO: 2162680 - RNA, 19 nt, Artificial Sequence
  Description of Artificial Sequence: Synthetic oligonucleotide
  Sense strand starting at position 2391 of SEQ ID NO: 1882995
guuauuaagucaucauaca

SEQ ID NO: 2162681 - RNA, 19 nt, Artificial Sequence
  Description of Artificial Sequence: Synthetic oligonucleotide
  Antisense strand to SEQ ID NO: 2162680
uguaugaugacuuaauaac

SEQ ID NO: 2162682 - RNA, 19 nt, Artificial Sequence
  Description of Artificial Sequence: Synthetic oligonucleotide
  Sense strand starting at position 2428 of SEQ ID NO: 1882995
cauucuugucgauguauuu

SEQ ID NO: 2162683 - RNA, 19 nt, Artificial Sequence
  Description of Artificial Sequence: Synthetic oligonucleotide
  Antisense strand to SEQ ID NO: 2162682
aaauacaucgacaagaaug

SEQ ID NO: 2162684 - RNA, 19 nt, Artificial Sequence
  Description of Artificial Sequence: Synthetic oligonucleotide
  Sense strand starting at position 2466 of SEQ ID NO: 1882995
ggaaaucucuuagaaauuu

SEQ ID NO: 2162685 - RNA, 19 nt, Artificial Sequence
  Description of Artificial Sequence: Synthetic oligonucleotide
  Antisense strand to SEQ ID NO: 2162684
aaauuucuaagagauuucc

SEQ ID NO: 2162686 - RNA, 19 nt, Artificial Sequence
  Description of Artificial Sequence: Synthetic oligonucleotide
  Sense strand starting at position 2512 of SEQ ID NO: 1882995
accagcagaccaugagauu

SEQ ID NO: 2162687 - RNA, 19 nt, Artificial Sequence
  Description of Artificial Sequence: Synthetic oligonucleotide
  Antisense strand to SEQ ID NO: 2162686
aaucucauggucugcuggu

SEQ ID NO: 2162688 - RNA, 19 nt, Artificial Sequence
  Description of Artificial Sequence: Synthetic oligonucleotide
  Sense strand starting at position 2521 of SEQ ID NO: 1882995
ccaugagauuagccaguaa

SEQ ID NO: 2162689 - RNA, 19 nt, Artificial Sequence
  Description of Artificial Sequence: Synthetic oligonucleotide
  Antisense strand to SEQ ID NO: 2162688
uuacuggcuaaucucaugg

SEQ ID NO: 2162690 - RNA, 19 nt, Artificial Sequence
  Description of Artificial Sequence: Synthetic oligonucleotide
  Sense strand starting at position 2525 of SEQ ID NO: 1882995
gagauuagccaguaaagcu

SEQ ID NO: 2162691 - RNA, 19 nt, Artificial Sequence
  Description of Artificial Sequence: Synthetic oligonucleotide
  Antisense strand to SEQ ID NO: 2162690
agcuuuacuggcuaaucuc

SEQ ID NO: 2162692 - RNA, 19 nt, Artificial Sequence
  Description of Artificial Sequence: Synthetic oligonucleotide
  Sense strand starting at position 2608 of SEQ ID NO: 1882995
auaguuucucauggaugau

SEQ ID NO: 2162693 - RNA, 19 nt, Artificial Sequence
  Description of Artificial Sequence: Synthetic oligonucleotide
  Antisense strand to SEQ ID NO: 2162692
aucauccaugagaaacuau

SEQ ID NO: 2162694 - RNA, 19 nt, Artificial Sequence
  Description of Artificial Sequence: Synthetic oligonucleotide
  Sense strand starting at position 2611 of SEQ ID NO: 1882995
guuucucauggaugauaau

SEQ ID NO: 2162695 - RNA, 19 nt, Artificial Sequence
  Description of Artificial Sequence: Synthetic oligonucleotide
  Antisense strand to SEQ ID NO: 2162694
auuaucauccaugagaaac

SEQ ID NO: 2162696 - RNA, 19 nt, Artificial Sequence
  Description of Artificial Sequence: Synthetic oligonucleotide
  Sense strand starting at position 2641 of SEQ ID NO: 1882995
ccaggauuauaauuaaguu

SEQ ID NO: 2162697 - RNA, 19 nt, Artificial Sequence
  Description of Artificial Sequence: Synthetic oligonucleotide
  Antisense strand to SEQ ID NO: 2162696
aacuuaauuauaauccugg

SEQ ID NO: 2162698 - RNA, 19 nt, Artificial Sequence
  Description of Artificial Sequence: Synthetic oligonucleotide
  Sense strand starting at position 2768 of SEQ ID NO: 1882995
gcuugaauacuaugcagaa

SEQ ID NO: 2162699 - RNA, 19 nt, Artificial Sequence
  Description of Artificial Sequence: Synthetic oligonucleotide
  Antisense strand to SEQ ID NO: 2162698
uucugcauaguauucaagc

SEQ ID NO: 2162700 - RNA, 19 nt, Artificial Sequence
  Description of Artificial Sequence: Synthetic oligonucleotide
  Sense strand starting at position 2769 of SEQ ID NO: 1882995
cuugaauacuaugcagaau

SEQ ID NO: 2162701 - RNA, 19 nt, Artificial Sequence
  Description of Artificial Sequence: Synthetic oligonucleotide
  Antisense strand to SEQ ID NO: 2162700
auucugcauaguauucaag

SEQ ID NO: 2162702 - RNA, 19 nt, Artificial Sequence
  Description of Artificial Sequence: Synthetic oligonucleotide
  Sense strand starting at position 2880 of SEQ ID NO: 1882995
aguuacaggucuuuggaua

SEQ ID NO: 2162703 - RNA, 19 nt, Artificial Sequence
  Description of Artificial Sequence: Synthetic oligonucleotide
  Antisense strand to SEQ ID NO: 2162702
uauccaaagaccuguaacu

SEQ ID NO: 2162704 - RNA, 19 nt, Artificial Sequence
  Description of Artificial Sequence: Synthetic oligonucleotide
  Sense strand starting at position 2881 of SEQ ID NO: 1882995
guuacaggucuuuggauaa

SEQ ID NO: 2162705 - RNA, 19 nt, Artificial Sequence
  Description of Artificial Sequence: Synthetic oligonucleotide
  Antisense strand to SEQ ID NO: 2162704
uuauccaaagaccuguaac

SEQ ID NO: 2162706 - RNA, 19 nt, Artificial Sequence
  Description of Artificial Sequence: Synthetic oligonucleotide
  Sense strand starting at position 2945 of SEQ ID NO: 1882995
aguuuaccugucuaugaag

SEQ ID NO: 2162707 - RNA, 19 nt, Artificial Sequence
  Description of Artificial Sequence: Synthetic oligonucleotide
  Antisense strand to SEQ ID NO: 2162706
cuucauagacagguaaacu

SEQ ID NO: 2162708 - RNA, 19 nt, Artificial Sequence
  Description of Artificial Sequence: Synthetic oligonucleotide
  Sense strand starting at position 2947 of SEQ ID NO: 1882995
uuuaccugucuaugaagaa

SEQ ID NO: 2162709 - RNA, 19 nt, Artificial Sequence
  Description of Artificial Sequence: Synthetic oligonucleotide
  Antisense strand to SEQ ID NO: 2162708
uucuucauagacagguaaa

SEQ ID NO: 2162710 - RNA, 19 nt, Artificial Sequence
  Description of Artificial Sequence: Synthetic oligonucleotide
  Sense strand starting at position 2997 of SEQ ID NO: 1882995
ucacuacauuaaguguaau

SEQ ID NO: 2162711 - RNA, 19 nt, Artificial Sequence
  Description of Artificial Sequence: Synthetic oligonucleotide
  Antisense strand to SEQ ID NO: 2162710
auuacacuuaauguaguga

SEQ ID NO: 2162712 - RNA, 19 nt, Artificial Sequence
  Description of Artificial Sequence: Synthetic oligonucleotide
  Sense strand starting at position 3010 of SEQ ID NO: 1882995
uguaauuaugucggaagaa

SEQ ID NO: 2162713 - RNA, 19 nt, Artificial Sequence
  Description of Artificial Sequence: Synthetic oligonucleotide
  Antisense strand to SEQ ID NO: 2162712
uucuuccgacauaauuaca

SEQ ID NO: 2162714 - RNA, 19 nt, Artificial Sequence
  Description of Artificial Sequence: Synthetic oligonucleotide
  Sense strand starting at position 3245 of SEQ ID NO: 1882995
uaaccaagggcuggaaauu

SEQ ID NO: 2162715 - RNA, 19 nt, Artificial Sequence
  Description of Artificial Sequence: Synthetic oligonucleotide
  Antisense strand to SEQ ID NO: 2162714
aauuuccagcccuugguua

SEQ ID NO: 2162716 - RNA, 19 nt, Artificial Sequence
  Description of Artificial Sequence: Synthetic oligonucleotide
  Sense strand starting at position 3392 of SEQ ID NO: 1882995
agaguaacauuacugguau

SEQ ID NO: 2162717 - RNA, 19 nt, Artificial Sequence
  Description of Artificial Sequence: Synthetic oligonucleotide
  Antisense strand to SEQ ID NO: 2162716
auaccaguaauguuacucu

SEQ ID NO: 2162718 - RNA, 19 nt, Artificial Sequence
  Description of Artificial Sequence: Synthetic oligonucleotide
  Sense strand starting at position 3409 of SEQ ID NO: 1882995
augcacuuugaauagaagu

SEQ ID NO: 2162719 - RNA, 19 nt, Artificial Sequence
  Description of Artificial Sequence: Synthetic oligonucleotide
  Antisense strand to SEQ ID NO: 2162718
acuucuauucaaagugcau

SEQ ID NO: 2162720 - RNA, 19 nt, Artificial Sequence
  Description of Artificial Sequence: Synthetic oligonucleotide
  Sense strand starting at position 3546 of SEQ ID NO: 1882995
auugucauaucuuuaagga

SEQ ID NO: 2162721 - RNA, 19 nt, Artificial Sequence
  Description of Artificial Sequence: Synthetic oligonucleotide
  Antisense strand to SEQ ID NO: 2162720
uccuuaaagauaugacaau

SEQ ID NO: 2162722 - RNA, 19 nt, Artificial Sequence
  Description of Artificial Sequence: Synthetic oligonucleotide
  Sense strand starting at position 3547 of SEQ ID NO: 1882995
uugucauaucuuuaaggau

SEQ ID NO: 2162723 - RNA, 19 nt, Artificial Sequence
  Description of Artificial Sequence: Synthetic oligonucleotide
  Antisense strand to SEQ ID NO: 2162722
auccuuaaagauaugacaa

SEQ ID NO: 2162724 - RNA, 19 nt, Artificial Sequence
  Description of Artificial Sequence: Synthetic oligonucleotide
  Sense strand starting at position 3844 of SEQ ID NO: 1882995
acaaacaagucucuuggau

SEQ ID NO: 2162725 - RNA, 19 nt, Artificial Sequence
  Description of Artificial Sequence: Synthetic oligonucleotide
  Antisense strand to SEQ ID NO: 2162724
auccaagagacuuguuugu

SEQ ID NO: 2162726 - RNA, 19 nt, Artificial Sequence
  Description of Artificial Sequence: Synthetic oligonucleotide
  Sense strand starting at position 3886 of SEQ ID NO: 1882995
aucguaagaaagugaaaua

SEQ ID NO: 2162727 - RNA, 19 nt, Artificial Sequence
  Description of Artificial Sequence: Synthetic oligonucleotide
  Antisense strand to SEQ ID NO: 2162726
uauuucacuuucuuacgau

SEQ ID NO: 2162728 - RNA, 19 nt, Artificial Sequence
  Description of Artificial Sequence: Synthetic oligonucleotide
  Sense strand starting at position 3904 of SEQ ID NO: 1882995
accuaagugccagagguaa

SEQ ID NO: 2162729 - RNA, 19 nt, Artificial Sequence
  Description of Artificial Sequence: Synthetic oligonucleotide
  Antisense strand to SEQ ID NO: 2162728
uuaccucuggcacuuaggu

SEQ ID NO: 2162730 - RNA, 19 nt, Artificial Sequence
  Description of Artificial Sequence: Synthetic oligonucleotide
  Sense strand starting at position 3928 of SEQ ID NO: 1882995
acagaauggugagugguau

SEQ ID NO: 2162731 - RNA, 19 nt, Artificial Sequence
  Description of Artificial Sequence: Synthetic oligonucleotide
  Antisense strand to SEQ ID NO: 2162730
auaccacucaccauucugu

SEQ ID NO: 2162732 - RNA, 19 nt, Artificial Sequence
  Description of Artificial Sequence: Synthetic oligonucleotide
  Sense strand starting at position 3929 of SEQ ID NO: 1882995
cagaauggugagugguauu

SEQ ID NO: 2162733 - RNA, 19 nt, Artificial Sequence
  Description of Artificial Sequence: Synthetic oligonucleotide
  Antisense strand to SEQ ID NO: 2162732
aauaccacucaccauucug

SEQ ID NO: 2162734 - RNA, 19 nt, Artificial Sequence
  Description of Artificial Sequence: Synthetic oligonucleotide
  Sense strand starting at position 3949 of SEQ ID NO: 1882995
gauaauuaguggcucaaca

SEQ ID NO: 2162735 - RNA, 19 nt, Artificial Sequence
  Description of Artificial Sequence: Synthetic oligonucleotide
  Antisense strand to SEQ ID NO: 2162734
uguugagccacuaauuauc

SEQ ID NO: 2162736 - RNA, 19 nt, Artificial Sequence
  Description of Artificial Sequence: Synthetic oligonucleotide
  Sense strand starting at position 40 of SEQ ID NO: 1882996
gcaaacucucuggaaguau

SEQ ID NO: 2162737 - RNA, 19 nt, Artificial Sequence
  Description of Artificial Sequence: Synthetic oligonucleotide
  Antisense strand to SEQ ID NO: 2162736
auacuuccagagaguuugc

SEQ ID NO: 2162738 - RNA, 19 nt, Artificial Sequence
  Description of Artificial Sequence: Synthetic oligonucleotide
  Sense strand starting at position 320 of SEQ ID NO: 1882996
aguuuaguacaaugugaau

SEQ ID NO: 2162739 - RNA, 19 nt, Artificial Sequence
  Description of Artificial Sequence: Synthetic oligonucleotide
  Antisense strand to SEQ ID NO: 2162738
auucacauuguacuaaacu

SEQ ID NO: 2162740 - RNA, 19 nt, Artificial Sequence
  Description of Artificial Sequence: Synthetic oligonucleotide
  Sense strand starting at position 326 of SEQ ID NO: 1882996
guacaaugugaauauacga

SEQ ID NO: 2162741 - RNA, 19 nt, Artificial Sequence
  Description of Artificial Sequence: Synthetic oligonucleotide
  Antisense strand to SEQ ID NO: 2162740
ucguauauucacauuguac

SEQ ID NO: 2162742 - RNA, 19 nt, Artificial Sequence
  Description of Artificial Sequence: Synthetic oligonucleotide
  Sense strand starting at position 372 of SEQ ID NO: 1882996
aaauauagugagcaagcau

SEQ ID NO: 2162743 - RNA, 19 nt, Artificial Sequence
  Description of Artificial Sequence: Synthetic oligonucleotide
  Antisense strand to SEQ ID NO: 2162742
augcuugcucacuauauuu

SEQ ID NO: 2162744 - RNA, 19 nt, Artificial Sequence
  Description of Artificial Sequence: Synthetic oligonucleotide
  Sense strand starting at position 383 of SEQ ID NO: 1882996
gcaagcaugcaugacuuau

SEQ ID NO: 2162745 - RNA, 19 nt, Artificial Sequence
  Description of Artificial Sequence: Synthetic oligonucleotide
  Antisense strand to SEQ ID NO: 2162744
auaagucaugcaugcuugc

SEQ ID NO: 2162746 - RNA, 19 nt, Artificial Sequence
  Description of Artificial Sequence: Synthetic oligonucleotide
  Sense strand starting at position 532 of SEQ ID NO: 1882996
gagauugucaagugaucug

SEQ ID NO: 2162747 - RNA, 19 nt, Artificial Sequence
  Description of Artificial Sequence: Synthetic oligonucleotide
  Antisense strand to SEQ ID NO: 2162746
cagaucacuugacaaucuc

SEQ ID NO: 2162748 - RNA, 19 nt, Artificial Sequence
  Description of Artificial Sequence: Synthetic oligonucleotide
  Sense strand starting at position 535 of SEQ ID NO: 1882996
auugucaagugaucugaaa

SEQ ID NO: 2162749 - RNA, 19 nt, Artificial Sequence
  Description of Artificial Sequence: Synthetic oligonucleotide
  Antisense strand to SEQ ID NO: 2162748
uuucagaucacuugacaau

SEQ ID NO: 2162750 - RNA, 19 nt, Artificial Sequence
  Description of Artificial Sequence: Synthetic oligonucleotide
  Sense strand starting at position 565 of SEQ ID NO: 1882996
cugcucagggacuauuaau

SEQ ID NO: 2162751 - RNA, 19 nt, Artificial Sequence
  Description of Artificial Sequence: Synthetic oligonucleotide
  Antisense strand to SEQ ID NO: 2162750
auuaauagucccugagcag

SEQ ID NO: 2162752 - RNA, 19 nt, Artificial Sequence
  Description of Artificial Sequence: Synthetic oligonucleotide
  Sense strand starting at position 608 of SEQ ID NO: 1882996
uuucuacuucgggauaucu

SEQ ID NO: 2162753 - RNA, 19 nt, Artificial Sequence
  Description of Artificial Sequence: Synthetic oligonucleotide
  Antisense strand to SEQ ID NO: 2162752
agauaucccgaaguagaaa

SEQ ID NO: 2162754 - RNA, 19 nt, Artificial Sequence
  Description of Artificial Sequence: Synthetic oligonucleotide
  Sense strand starting at position 610 of SEQ ID NO: 1882996
ucuacuucgggauaucuuu

SEQ ID NO: 2162755 - RNA, 19 nt, Artificial Sequence
  Description of Artificial Sequence: Synthetic oligonucleotide
  Antisense strand to SEQ ID NO: 2162754
aaagauaucccgaaguaga

SEQ ID NO: 2162756 - RNA, 19 nt, Artificial Sequence
  Description of Artificial Sequence: Synthetic oligonucleotide
  Sense strand starting at position 722 of SEQ ID NO: 1882996
ugcuaauuaucucugagga

SEQ ID NO: 2162757 - RNA, 19 nt, Artificial Sequence
  Description of Artificial Sequence: Synthetic oligonucleotide
  Antisense strand to SEQ ID NO: 2162756
uccucagagauaauuagca

SEQ ID NO: 2162758 - RNA, 19 nt, Artificial Sequence
  Description of Artificial Sequence: Synthetic oligonucleotide
  Sense strand starting at position 723 of SEQ ID NO: 1882996
gcuaauuaucucugaggaa

SEQ ID NO: 2162759 - RNA, 19 nt, Artificial Sequence
  Description of Artificial Sequence: Synthetic oligonucleotide
  Antisense strand to SEQ ID NO: 2162758
uuccucagagauaauuagc

SEQ ID NO: 2162760 - RNA, 19 nt, Artificial Sequence
  Description of Artificial Sequence: Synthetic oligonucleotide
  Sense strand starting at position 747 of SEQ ID NO: 1882996
aagcaauuauaggucuagu

SEQ ID NO: 2162761 - RNA, 19 nt, Artificial Sequence
  Description of Artificial Sequence: Synthetic oligonucleotide
  Antisense strand to SEQ ID NO: 2162760
acuagaccuauaauugcuu

SEQ ID NO: 2162762 - RNA, 19 nt, Artificial Sequence
  Description of Artificial Sequence: Synthetic oligonucleotide
  Sense strand starting at position 750 of SEQ ID NO: 1882996
caauuauaggucuagugac

SEQ ID NO: 2162763 - RNA, 19 nt, Artificial Sequence
  Description of Artificial Sequence: Synthetic oligonucleotide
  Antisense strand to SEQ ID NO: 2162762
gucacuagaccuauaauug

SEQ ID NO: 2162764 - RNA, 19 nt, Artificial Sequence
  Description of Artificial Sequence: Synthetic oligonucleotide
  Sense strand starting at position 758 of SEQ ID NO: 1882996
ggucuagugacaggaucua

SEQ ID NO: 2162765 - RNA, 19 nt, Artificial Sequence
  Description of Artificial Sequence: Synthetic oligonucleotide
  Antisense strand to SEQ ID NO: 2162764
uagauccugucacuagacc

SEQ ID NO: 2162766 - RNA, 19 nt, Artificial Sequence
  Description of Artificial Sequence: Synthetic oligonucleotide
  Sense strand starting at position 878 of SEQ ID NO: 1882996
agccuaacuccagaaagcu

SEQ ID NO: 2162767 - RNA, 19 nt, Artificial Sequence
  Description of Artificial Sequence: Synthetic oligonucleotide
  Antisense strand to SEQ ID NO: 2162766
agcuuucuggaguuaggcu

SEQ ID NO: 2162768 - RNA, 19 nt, Artificial Sequence
  Description of Artificial Sequence: Synthetic oligonucleotide
  Sense strand starting at position 1145 of SEQ ID NO: 1882996
cuaacugaguucucagcaa

SEQ ID NO: 2162769 - RNA, 19 nt, Artificial Sequence
  Description of Artificial Sequence: Synthetic oligonucleotide
  Antisense strand to SEQ ID NO: 2162768
uugcugagaacucaguuag

SEQ ID NO: 2162770 - RNA, 19 nt, Artificial Sequence
  Description of Artificial Sequence: Synthetic oligonucleotide
  Sense strand starting at position 1343 of SEQ ID NO: 1882996
ccacuuagacaucguaaca

SEQ ID NO: 2162771 - RNA, 19 nt, Artificial Sequence
  Description of Artificial Sequence: Synthetic oligonucleotide
  Antisense strand to SEQ ID NO: 2162770
uguuacgaugucuaagugg

SEQ ID NO: 2162772 - RNA, 19 nt, Artificial Sequence
  Description of Artificial Sequence: Synthetic oligonucleotide
  Sense strand starting at position 1492 of SEQ ID NO: 1882996
ugacuucuagaauggcuga

SEQ ID NO: 2162773 - RNA, 19 nt, Artificial Sequence
  Description of Artificial Sequence: Synthetic oligonucleotide
  Antisense strand to SEQ ID NO: 2162772
ucagccauucuagaaguca

SEQ ID NO: 2162774 - RNA, 19 nt, Artificial Sequence
  Description of Artificial Sequence: Synthetic oligonucleotide
  Sense strand starting at position 2359 of SEQ ID NO: 1882996
gauauugucaccgguagag

SEQ ID NO: 2162775 - RNA, 19 nt, Artificial Sequence
  Description of Artificial Sequence: Synthetic oligonucleotide
  Antisense strand to SEQ ID NO: 2162774
cucuaccggugacaauauc

SEQ ID NO: 2162776 - RNA, 19 nt, Artificial Sequence
  Description of Artificial Sequence: Synthetic oligonucleotide
  Sense strand starting at position 2361 of SEQ ID NO: 1882996
uauugucaccgguagagga

SEQ ID NO: 2162777 - RNA, 19 nt, Artificial Sequence
  Description of Artificial Sequence: Synthetic oligonucleotide
  Antisense strand to SEQ ID NO: 2162776
uccucuaccggugacaaua

SEQ ID NO: 2162778 - RNA, 19 nt, Artificial Sequence
  Description of Artificial Sequence: Synthetic oligonucleotide
  Sense strand starting at position 2625 of SEQ ID NO: 1882996
acgcgcaaucagucugauu

SEQ ID NO: 2162779 - RNA, 19 nt, Artificial Sequence
  Description of Artificial Sequence: Synthetic oligonucleotide
  Antisense strand to SEQ ID NO: 2162778
aaucagacugauugcgcgu

SEQ ID NO: 2162780 - RNA, 19 nt, Artificial Sequence
  Description of Artificial Sequence: Synthetic oligonucleotide
  Sense strand starting at position 2626 of SEQ ID NO: 1882996
cgcgcaaucagucugauug

SEQ ID NO: 2162781 - RNA, 19 nt, Artificial Sequence
  Description of Artificial Sequence: Synthetic oligonucleotide
  Antisense strand to SEQ ID NO: 2162780
caaucagacugauugcgcg

SEQ ID NO: 2162782 - RNA, 19 nt, Artificial Sequence
  Description of Artificial Sequence: Synthetic oligonucleotide
  Sense strand starting at position 2754 of SEQ ID NO: 1882996
gugguauaccucuaugcaa

SEQ ID NO: 2162783 - RNA, 19 nt, Artificial Sequence
  Description of Artificial Sequence: Synthetic oligonucleotide
  Antisense strand to SEQ ID NO: 2162782
uugcauagagguauaccac

SEQ ID NO: 2162784 - RNA, 19 nt, Artificial Sequence
  Description of Artificial Sequence: Synthetic oligonucleotide
  Sense strand starting at position 2756 of SEQ ID NO: 1882996
gguauaccucuaugcaaag

SEQ ID NO: 2162785 - RNA, 19 nt, Artificial Sequence
  Description of Artificial Sequence: Synthetic oligonucleotide
  Antisense strand to SEQ ID NO: 2162784
cuuugcauagagguauacc

SEQ ID NO: 2162786 - RNA, 19 nt, Artificial Sequence
  Description of Artificial Sequence: Synthetic oligonucleotide
  Sense strand starting at position 2786 of SEQ ID NO: 1882996
cugcaaucaguuugauuuc

SEQ ID NO: 2162787 - RNA, 19 nt, Artificial Sequence
  Description of Artificial Sequence: Synthetic oligonucleotide
  Antisense strand to SEQ ID NO: 2162786
gaaaucaaacugauugcag

SEQ ID NO: 2162788 - RNA, 19 nt, Artificial Sequence
  Description of Artificial Sequence: Synthetic oligonucleotide
  Sense strand starting at position 2827 of SEQ ID NO: 1882996
gugauacuucuaugcaaag

SEQ ID NO: 2162789 - RNA, 19 nt, Artificial Sequence
  Description of Artificial Sequence: Synthetic oligonucleotide
  Antisense strand to SEQ ID NO: 2162788
cuuugcauagaaguaucac

SEQ ID NO: 2162790 - RNA, 19 nt, Artificial Sequence
  Description of Artificial Sequence: Synthetic oligonucleotide
  Sense strand starting at position 2984 of SEQ ID NO: 1882996
caauuuaguucuuaggaag

SEQ ID NO: 2162791 - RNA, 19 nt, Artificial Sequence
  Description of Artificial Sequence: Synthetic oligonucleotide
  Antisense strand to SEQ ID NO: 2162790
cuuccuaagaacuaaauug

SEQ ID NO: 2162792 - RNA, 19 nt, Artificial Sequence
  Description of Artificial Sequence: Synthetic oligonucleotide
  Sense strand starting at position 3002 of SEQ ID NO: 1882996
gucggagugacacauccuu

SEQ ID NO: 2162793 - RNA, 19 nt, Artificial Sequence
  Description of Artificial Sequence: Synthetic oligonucleotide
  Antisense strand to SEQ ID NO: 2162792
aaggaugugucacuccgac

SEQ ID NO: 2162794 - RNA, 19 nt, Artificial Sequence
  Description of Artificial Sequence: Synthetic oligonucleotide
  Sense strand starting at position 3007 of SEQ ID NO: 1882996
agugacacauccuuagguu

SEQ ID NO: 2162795 - RNA, 19 nt, Artificial Sequence
  Description of Artificial Sequence: Synthetic oligonucleotide
  Antisense strand to SEQ ID NO: 2162794
aaccuaaggaugugucacu

SEQ ID NO: 2162796 - RNA, 19 nt, Artificial Sequence
  Description of Artificial Sequence: Synthetic oligonucleotide
  Sense strand starting at position 3008 of SEQ ID NO: 1882996
gugacacauccuuagguuc

SEQ ID NO: 2162797 - RNA, 19 nt, Artificial Sequence
  Description of Artificial Sequence: Synthetic oligonucleotide
  Antisense strand to SEQ ID NO: 2162796
gaaccuaaggaugugucac

SEQ ID NO: 2162798 - RNA, 19 nt, Artificial Sequence
  Description of Artificial Sequence: Synthetic oligonucleotide
  Sense strand starting at position 3099 of SEQ ID NO: 1882996
ucuauugugcuauagaaac

SEQ ID NO: 2162799 - RNA, 19 nt, Artificial Sequence
  Description of Artificial Sequence: Synthetic oligonucleotide
  Antisense strand to SEQ ID NO: 2162798
guuucuauagcacaauaga

SEQ ID NO: 2162800 - RNA, 19 nt, Artificial Sequence
  Description of Artificial Sequence: Synthetic oligonucleotide
  Sense strand starting at position 3131 of SEQ ID NO: 1882996
uguauaaccuacuuaguaa

SEQ ID NO: 2162801 - RNA, 19 nt, Artificial Sequence
  Description of Artificial Sequence: Synthetic oligonucleotide
  Antisense strand to SEQ ID NO: 2162800
uuacuaaguagguuauaca

SEQ ID NO: 2162802 - RNA, 19 nt, Artificial Sequence
  Description of Artificial Sequence: Synthetic oligonucleotide
  Sense strand starting at position 3403 of SEQ ID NO: 1882996
cauaucauggacugauagu

SEQ ID NO: 2162803 - RNA, 19 nt, Artificial Sequence
  Description of Artificial Sequence: Synthetic oligonucleotide
  Antisense strand to SEQ ID NO: 2162802
acuaucaguccaugauaug

SEQ ID NO: 2162804 - RNA, 19 nt, Artificial Sequence
  Description of Artificial Sequence: Synthetic oligonucleotide
  Sense strand starting at position 3414 of SEQ ID NO: 1882996
cugauagucuuaucuauga

SEQ ID NO: 2162805 - RNA, 19 nt, Artificial Sequence
  Description of Artificial Sequence: Synthetic oligonucleotide
  Antisense strand to SEQ ID NO: 2162804
ucauagauaagacuaucag

SEQ ID NO: 2162806 - RNA, 19 nt, Artificial Sequence
  Description of Artificial Sequence: Synthetic oligonucleotide
  Sense strand starting at position 3473 of SEQ ID NO: 1882996
uuagauuuauuuggagcaa

SEQ ID NO: 2162807 - RNA, 19 nt, Artificial Sequence
  Description of Artificial Sequence: Synthetic oligonucleotide
  Antisense strand to SEQ ID NO: 2162806
uugcuccaaauaaaucuaa

SEQ ID NO: 2162808 - RNA, 19 nt, Artificial Sequence
  Description of Artificial Sequence: Synthetic oligonucleotide
  Sense strand starting at position 3484 of SEQ ID NO: 1882996
uggagcaauuaugcugaau

SEQ ID NO: 2162809 - RNA, 19 nt, Artificial Sequence
  Description of Artificial Sequence: Synthetic oligonucleotide
  Antisense strand to SEQ ID NO: 2162808
auucagcauaauugcucca

SEQ ID NO: 2162810 - RNA, 19 nt, Artificial Sequence
  Description of Artificial Sequence: Synthetic oligonucleotide
  Sense strand starting at position 3487 of SEQ ID NO: 1882996
agcaauuaugcugaaucau

SEQ ID NO: 2162811 - RNA, 19 nt, Artificial Sequence
  Description of Artificial Sequence: Synthetic oligonucleotide
  Antisense strand to SEQ ID NO: 2162810
augauucagcauaauugcu

SEQ ID NO: 2162812 - RNA, 19 nt, Artificial Sequence
  Description of Artificial Sequence: Synthetic oligonucleotide
  Sense strand starting at position 3526 of SEQ ID NO: 1882996
cuggcauucguguuuaugu

SEQ ID NO: 2162813 - RNA, 19 nt, Artificial Sequence
  Description of Artificial Sequence: Synthetic oligonucleotide
  Antisense strand to SEQ ID NO: 2162812
acauaaacacgaaugccag

SEQ ID NO: 2162814 - RNA, 19 nt, Artificial Sequence
  Description of Artificial Sequence: Synthetic oligonucleotide
  Sense strand starting at position 3610 of SEQ ID NO: 1882996
acaccuaguugcucuagaa

SEQ ID NO: 2162815 - RNA, 19 nt, Artificial Sequence
  Description of Artificial Sequence: Synthetic oligonucleotide
  Antisense strand to SEQ ID NO: 2162814
uucuagagcaacuaggugu

SEQ ID NO: 2162816 - RNA, 19 nt, Artificial Sequence
  Description of Artificial Sequence: Synthetic oligonucleotide
  Sense strand starting at position 552 of SEQ ID NO: 1882997
gaugcaggauuugaggaau

SEQ ID NO: 2162817 - RNA, 19 nt, Artificial Sequence
  Description of Artificial Sequence: Synthetic oligonucleotide
  Antisense strand to SEQ ID NO: 2162816
auuccucaaauccugcauc

SEQ ID NO: 2162818 - RNA, 19 nt, Artificial Sequence
  Description of Artificial Sequence: Synthetic oligonucleotide
  Sense strand starting at position 674 of SEQ ID NO: 1882997
cuaagaaggccuggucuca

SEQ ID NO: 2162819 - RNA, 19 nt, Artificial Sequence
  Description of Artificial Sequence: Synthetic oligonucleotide
  Antisense strand to SEQ ID NO: 2162818
ugagaccaggccuucuuag

SEQ ID NO: 2162820 - RNA, 19 nt, Artificial Sequence
  Description of Artificial Sequence: Synthetic oligonucleotide
  Sense strand starting at position 787 of SEQ ID NO: 1882997
gugccugguuaccagaaga

SEQ ID NO: 2162821 - RNA, 19 nt, Artificial Sequence
  Description of Artificial Sequence: Synthetic oligonucleotide
  Antisense strand to SEQ ID NO: 2162820
ucuucugguaaccaggcac

SEQ ID NO: 2162822 - RNA, 19 nt, Artificial Sequence
  Description of Artificial Sequence: Synthetic oligonucleotide
  Sense strand starting at position 801 of SEQ ID NO: 1882997
gaagaagguuuagaauaac

SEQ ID NO: 2162823 - RNA, 19 nt, Artificial Sequence
  Description of Artificial Sequence: Synthetic oligonucleotide
  Antisense strand to SEQ ID NO: 2162822
guuauucuaaaccuucuuc

SEQ ID NO: 2162824 - RNA, 19 nt, Artificial Sequence
  Description of Artificial Sequence: Synthetic oligonucleotide
  Sense strand starting at position 904 of SEQ ID NO: 1882997
gggacugucuguuucccau

SEQ ID NO: 2162825 - RNA, 19 nt, Artificial Sequence
  Description of Artificial Sequence: Synthetic oligonucleotide
  Antisense strand to SEQ ID NO: 2162824
augggaaacagacaguccc

SEQ ID NO: 2162826 - RNA, 19 nt, Artificial Sequence
  Description of Artificial Sequence: Synthetic oligonucleotide
  Sense strand starting at position 907 of SEQ ID NO: 1882997
acugucuguuucccauaaa

SEQ ID NO: 2162827 - RNA, 19 nt, Artificial Sequence
  Description of Artificial Sequence: Synthetic oligonucleotide
  Antisense strand to SEQ ID NO: 2162826
uuuaugggaaacagacagu

SEQ ID NO: 2162828 - RNA, 19 nt, Artificial Sequence
  Description of Artificial Sequence: Synthetic oligonucleotide
  Sense strand starting at position 930 of SEQ ID NO: 1882997
agcccauuugcugguaagu

SEQ ID NO: 2162829 - RNA, 19 nt, Artificial Sequence
  Description of Artificial Sequence: Synthetic oligonucleotide
  Antisense strand to SEQ ID NO: 2162828
acuuaccagcaaaugggcu

SEQ ID NO: 2162830 - RNA, 19 nt, Artificial Sequence
  Description of Artificial Sequence: Synthetic oligonucleotide
  Sense strand starting at position 946 of SEQ ID NO: 1882997
aguccuaaguccucacaau

SEQ ID NO: 2162831 - RNA, 19 nt, Artificial Sequence
  Description of Artificial Sequence: Synthetic oligonucleotide
  Antisense strand to SEQ ID NO: 2162830
auugugaggacuuaggacu

SEQ ID NO: 2162832 - RNA, 19 nt, Artificial Sequence
  Description of Artificial Sequence: Synthetic oligonucleotide
  Sense strand starting at position 947 of SEQ ID NO: 1882997
guccuaaguccucacaaug

SEQ ID NO: 2162833 - RNA, 19 nt, Artificial Sequence
  Description of Artificial Sequence: Synthetic oligonucleotide
  Antisense strand to SEQ ID NO: 2162832
cauugugaggacuuaggac

SEQ ID NO: 2162834 - RNA, 19 nt, Artificial Sequence
  Description of Artificial Sequence: Synthetic oligonucleotide
  Sense strand starting at position 1027 of SEQ ID NO: 1882997
ccuccaugagcagaaagua

SEQ ID NO: 2162835 - RNA, 19 nt, Artificial Sequence
  Description of Artificial Sequence: Synthetic oligonucleotide
  Antisense strand to SEQ ID NO: 2162834
uacuuucugcucauggagg

SEQ ID NO: 2162836 - RNA, 19 nt, Artificial Sequence
  Description of Artificial Sequence: Synthetic oligonucleotide
  Sense strand starting at position 1827 of SEQ ID NO: 1882997
gcuagcuacucacgguuaa

SEQ ID NO: 2162837 - RNA, 19 nt, Artificial Sequence
  Description of Artificial Sequence: Synthetic oligonucleotide
  Antisense strand to SEQ ID NO: 2162836
uuaaccgugaguagcuagc

SEQ ID NO: 2162838 - RNA, 19 nt, Artificial Sequence
  Description of Artificial Sequence: Synthetic oligonucleotide
  Sense strand starting at position 1862 of SEQ ID NO: 1882997
gaaggagcuugacaagaau

SEQ ID NO: 2162839 - RNA, 19 nt, Artificial Sequence
  Description of Artificial Sequence: Synthetic oligonucleotide
  Antisense strand to SEQ ID NO: 2162838
auucuugucaagcuccuuc

SEQ ID NO: 2162840 - RNA, 19 nt, Artificial Sequence
  Description of Artificial Sequence: Synthetic oligonucleotide
  Sense strand starting at position 1930 of SEQ ID NO: 1882997
cgagcagacacuuggaaga

SEQ ID NO: 2162841 - RNA, 19 nt, Artificial Sequence
  Description of Artificial Sequence: Synthetic oligonucleotide
  Antisense strand to SEQ ID NO: 2162840
ucuuccaagugucugcucg

SEQ ID NO: 2162842 - RNA, 19 nt, Artificial Sequence
  Description of Artificial Sequence: Synthetic oligonucleotide
  Sense strand starting at position 1932 of SEQ ID NO: 1882997
agcagacacuuggaagaua

SEQ ID NO: 2162843 - RNA, 19 nt, Artificial Sequence
  Description of Artificial Sequence: Synthetic oligonucleotide
  Antisense strand to SEQ ID NO: 2162842
uaucuuccaagugucugcu

SEQ ID NO: 2162844 - RNA, 19 nt, Artificial Sequence
  Description of Artificial Sequence: Synthetic oligonucleotide
  Sense strand starting at position 1947 of SEQ ID NO: 1882997
gauaucaucugcuguuguu

SEQ ID NO: 2162845 - RNA, 19 nt, Artificial Sequence
  Description of Artificial Sequence: Synthetic oligonucleotide
  Antisense strand to SEQ ID NO: 2162844
aacaacagcagaugauauc

SEQ ID NO: 2162846 - RNA, 19 nt, Artificial Sequence
  Description of Artificial Sequence: Synthetic oligonucleotide
  Sense strand starting at position 2115 of SEQ ID NO: 1882997
aagcuuguguggccugaga

SEQ ID NO: 2162847 - RNA, 19 nt, Artificial Sequence
  Description of Artificial Sequence: Synthetic oligonucleotide
  Antisense strand to SEQ ID NO: 2162846
ucucaggccacacaagcuu

SEQ ID NO: 2162848 - RNA, 19 nt, Artificial Sequence
  Description of Artificial Sequence: Synthetic oligonucleotide
  Sense strand starting at position 2146 of SEQ ID NO: 1882997
ggauguaagagugaucagu

SEQ ID NO: 2162849 - RNA, 19 nt, Artificial Sequence
  Description of Artificial Sequence: Synthetic oligonucleotide
  Antisense strand to SEQ ID NO: 2162848
acugaucacucuuacaucc

SEQ ID NO: 2162850 - RNA, 19 nt, Artificial Sequence
  Description of Artificial Sequence: Synthetic oligonucleotide
  Sense strand starting at position 2148 of SEQ ID NO: 1882997
auguaagagugaucagucu

SEQ ID NO: 2162851 - RNA, 19 nt, Artificial Sequence
  Description of Artificial Sequence: Synthetic oligonucleotide
  Antisense strand to SEQ ID NO: 2162850
agacugaucacucuuacau

SEQ ID NO: 2162852 - RNA, 19 nt, Artificial Sequence
  Description of Artificial Sequence: Synthetic oligonucleotide
  Sense strand starting at position 2231 of SEQ ID NO: 1882997
cuugcuucucugggagcaa

SEQ ID NO: 2162853 - RNA, 19 nt, Artificial Sequence
  Description of Artificial Sequence: Synthetic oligonucleotide
  Antisense strand to SEQ ID NO: 2162852
uugcucccagagaagcaag

SEQ ID NO: 2162854 - RNA, 19 nt, Artificial Sequence
  Description of Artificial Sequence: Synthetic oligonucleotide
  Sense strand starting at position 2232 of SEQ ID NO: 1882997
uugcuucucugggagcaau

SEQ ID NO: 2162855 - RNA, 19 nt, Artificial Sequence
  Description of Artificial Sequence: Synthetic oligonucleotide
  Antisense strand to SEQ ID NO: 2162854
auugcucccagagaagcaa

SEQ ID NO: 2162856 - RNA, 19 nt, Artificial Sequence
  Description of Artificial Sequence: Synthetic oligonucleotide
  Sense strand starting at position 2281 of SEQ ID NO: 1882997
ccuggagacuuucucaaug

SEQ ID NO: 2162857 - RNA, 19 nt, Artificial Sequence
  Description of Artificial Sequence: Synthetic oligonucleotide
  Antisense strand to SEQ ID NO: 2162856
cauugagaaagucuccagg

SEQ ID NO: 2162858 - RNA, 19 nt, Artificial Sequence
  Description of Artificial Sequence: Synthetic oligonucleotide
  Sense strand starting at position 2283 of SEQ ID NO: 1882997
uggagacuuucucaaugca

SEQ ID NO: 2162859 - RNA, 19 nt, Artificial Sequence
  Description of Artificial Sequence: Synthetic oligonucleotide
  Antisense strand to SEQ ID NO: 2162858
ugcauugagaaagucucca

SEQ ID NO: 2162860 - RNA, 19 nt, Artificial Sequence
  Description of Artificial Sequence: Synthetic oligonucleotide
  Sense strand starting at position 2286 of SEQ ID NO: 1882997
agacuuucucaaugcauga

SEQ ID NO: 2162861 - RNA, 19 nt, Artificial Sequence
  Description of Artificial Sequence: Synthetic oligonucleotide
  Antisense strand to SEQ ID NO: 2162860
ucaugcauugagaaagucu

SEQ ID NO: 2162862 - RNA, 19 nt, Artificial Sequence
  Description of Artificial Sequence: Synthetic oligonucleotide
  Sense strand starting at position 2430 of SEQ ID NO: 1882997
gcgggaggauuguuuaagu

SEQ ID NO: 2162863 - RNA, 19 nt, Artificial Sequence
  Description of Artificial Sequence: Synthetic oligonucleotide
  Antisense strand to SEQ ID NO: 2162862
acuuaaacaauccucccgc

SEQ ID NO: 2162864 - RNA, 19 nt, Artificial Sequence
  Description of Artificial Sequence: Synthetic oligonucleotide
  Sense strand starting at position 2438 of SEQ ID NO: 1882997
auuguuuaaguccaagagu

SEQ ID NO: 2162865 - RNA, 19 nt, Artificial Sequence
  Description of Artificial Sequence: Synthetic oligonucleotide
  Antisense strand to SEQ ID NO: 2162864
acucuuggacuuaaacaau

SEQ ID NO: 2162866 - RNA, 19 nt, Artificial Sequence
  Description of Artificial Sequence: Synthetic oligonucleotide
  Sense strand starting at position 2441 of SEQ ID NO: 1882997
guuuaaguccaagaguuug

SEQ ID NO: 2162867 - RNA, 19 nt, Artificial Sequence
  Description of Artificial Sequence: Synthetic oligonucleotide
  Antisense strand to SEQ ID NO: 2162866
caaacucuuggacuuaaac

SEQ ID NO: 2162868 - RNA, 19 nt, Artificial Sequence
  Description of Artificial Sequence: Synthetic oligonucleotide
  Sense strand starting at position 2644 of SEQ ID NO: 1882997
agagacucagucugaauca

SEQ ID NO: 2162869 - RNA, 19 nt, Artificial Sequence
  Description of Artificial Sequence: Synthetic oligonucleotide
  Antisense strand to SEQ ID NO: 2162868
ugauucagacugagucucu

SEQ ID NO: 2162870 - RNA, 19 nt, Artificial Sequence
  Description of Artificial Sequence: Synthetic oligonucleotide
  Sense strand starting at position 2645 of SEQ ID NO: 1882997
gagacucagucugaaucaa

SEQ ID NO: 2162871 - RNA, 19 nt, Artificial Sequence
  Description of Artificial Sequence: Synthetic oligonucleotide
  Antisense strand to SEQ ID NO: 2162870
uugauucagacugagucuc

SEQ ID NO: 2162872 - RNA, 19 nt, Artificial Sequence
  Description of Artificial Sequence: Synthetic oligonucleotide
  Sense strand starting at position 2695 of SEQ ID NO: 1882997
ggaauccaccucugaucua

SEQ ID NO: 2162873 - RNA, 19 nt, Artificial Sequence
  Description of Artificial Sequence: Synthetic oligonucleotide
  Antisense strand to SEQ ID NO: 2162872
uagaucagagguggauucc

SEQ ID NO: 2162874 - RNA, 19 nt, Artificial Sequence
  Description of Artificial Sequence: Synthetic oligonucleotide
  Sense strand starting at position 310 of SEQ ID NO: 1882998
uauauuguagcacagugaa

SEQ ID NO: 2162875 - RNA, 19 nt, Artificial Sequence
  Description of Artificial Sequence: Synthetic oligonucleotide
  Antisense strand to SEQ ID NO: 2162874
uucacugugcuacaauaua

SEQ ID NO: 2162876 - RNA, 19 nt, Artificial Sequence
  Description of Artificial Sequence: Synthetic oligonucleotide
  Sense strand starting at position 344 of SEQ ID NO: 1882998
ucacaagcucuuugagaca

SEQ ID NO: 2162877 - RNA, 19 nt, Artificial Sequence
  Description of Artificial Sequence: Synthetic oligonucleotide
  Antisense strand to SEQ ID NO: 2162876
ugucucaaagagcuuguga

SEQ ID NO: 2162878 - RNA, 19 nt, Artificial Sequence
  Description of Artificial Sequence: Synthetic oligonucleotide
  Sense strand starting at position 357 of SEQ ID NO: 1882998
gagacacuacaguguauaa

SEQ ID NO: 2162879 - RNA, 19 nt, Artificial Sequence
  Description of Artificial Sequence: Synthetic oligonucleotide
  Antisense strand to SEQ ID NO: 2162878
uuauacacuguagugucuc

SEQ ID NO: 2162880 - RNA, 19 nt, Artificial Sequence
  Description of Artificial Sequence: Synthetic oligonucleotide
  Sense strand starting at position 536 of SEQ ID NO: 1882998
cuggguauuuccuacagca

SEQ ID NO: 2162881 - RNA, 19 nt, Artificial Sequence
  Description of Artificial Sequence: Synthetic oligonucleotide
  Antisense strand to SEQ ID NO: 2162880
ugcuguaggaaauacccag

SEQ ID NO: 2162882 - RNA, 19 nt, Artificial Sequence
  Description of Artificial Sequence: Synthetic oligonucleotide
  Sense strand starting at position 563 of SEQ ID NO: 1882998
aucguaggccuuuaauaaa

SEQ ID NO: 2162883 - RNA, 19 nt, Artificial Sequence
  Description of Artificial Sequence: Synthetic oligonucleotide
  Antisense strand to SEQ ID NO: 2162882
uuuauuaaaggccuacgau

SEQ ID NO: 2162884 - RNA, 19 nt, Artificial Sequence
  Description of Artificial Sequence: Synthetic oligonucleotide
  Sense strand starting at position 707 of SEQ ID NO: 1882998
aaguuuauuuggcagcaca

SEQ ID NO: 2162885 - RNA, 19 nt, Artificial Sequence
  Description of Artificial Sequence: Synthetic oligonucleotide
  Antisense strand to SEQ ID NO: 2162884
ugugcugccaaauaaacuu

SEQ ID NO: 2162886 - RNA, 19 nt, Artificial Sequence
  Description of Artificial Sequence: Synthetic oligonucleotide
  Sense strand starting at position 774 of SEQ ID NO: 1882998
gaccgagucuugcugcguu

SEQ ID NO: 2162887 - RNA, 19 nt, Artificial Sequence
  Description of Artificial Sequence: Synthetic oligonucleotide
  Antisense strand to SEQ ID NO: 2162886
aacgcagcaagacucgguc

SEQ ID NO: 2162888 - RNA, 19 nt, Artificial Sequence
  Description of Artificial Sequence: Synthetic oligonucleotide
  Sense strand starting at position 1197 of SEQ ID NO: 1882998
auggaaugcaaaugugcua

SEQ ID NO: 2162889 - RNA, 19 nt, Artificial Sequence
  Description of Artificial Sequence: Synthetic oligonucleotide
  Antisense strand to SEQ ID NO: 2162888
uagcacauuugcauuccau

SEQ ID NO: 2162890 - RNA, 19 nt, Artificial Sequence
  Description of Artificial Sequence: Synthetic oligonucleotide
  Sense strand starting at position 1261 of SEQ ID NO: 1882998
cagguagaaacguauugca

SEQ ID NO: 2162891 - RNA, 19 nt, Artificial Sequence
  Description of Artificial Sequence: Synthetic oligonucleotide
  Antisense strand to SEQ ID NO: 2162890
ugcaauacguuucuaccug

SEQ ID NO: 2162892 - RNA, 19 nt, Artificial Sequence
  Description of Artificial Sequence: Synthetic oligonucleotide
  Sense strand starting at position 1264 of SEQ ID NO: 1882998
guagaaacguauugcauuu

SEQ ID NO: 2162893 - RNA, 19 nt, Artificial Sequence
  Description of Artificial Sequence: Synthetic oligonucleotide
  Antisense strand to SEQ ID NO: 2162892
aaaugcaauacguuucuac

SEQ ID NO: 2162894 - RNA, 19 nt, Artificial Sequence
  Description of Artificial Sequence: Synthetic oligonucleotide
  Sense strand starting at position 1372 of SEQ ID NO: 1882998
ggugcaucaugccuuuaau

SEQ ID NO: 2162895 - RNA, 19 nt, Artificial Sequence
  Description of Artificial Sequence: Synthetic oligonucleotide
  Antisense strand to SEQ ID NO: 2162894
auuaaaggcaugaugcacc

SEQ ID NO: 2162896 - RNA, 19 nt, Artificial Sequence
  Description of Artificial Sequence: Synthetic oligonucleotide
  Sense strand starting at position 1726 of SEQ ID NO: 1882998
gcacgagaucgcugcaaca

SEQ ID NO: 2162897 - RNA, 19 nt, Artificial Sequence
  Description of Artificial Sequence: Synthetic oligonucleotide
  Antisense strand to SEQ ID NO: 2162896
uguugcagcgaucucgugc

SEQ ID NO: 2162898 - RNA, 19 nt, Artificial Sequence
  Description of Artificial Sequence: Synthetic oligonucleotide
  Sense strand starting at position 1728 of SEQ ID NO: 1882998
acgagaucgcugcaacacu

SEQ ID NO: 2162899 - RNA, 19 nt, Artificial Sequence
  Description of Artificial Sequence: Synthetic oligonucleotide
  Antisense strand to SEQ ID NO: 2162898
aguguugcagcgaucucgu

SEQ ID NO: 2162900 - RNA, 19 nt, Artificial Sequence
  Description of Artificial Sequence: Synthetic oligonucleotide
  Sense strand starting at position 2066 of SEQ ID NO: 1882998
cgccuauuggcucugucaa

SEQ ID NO: 2162901 - RNA, 19 nt, Artificial Sequence
  Description of Artificial Sequence: Synthetic oligonucleotide
  Antisense strand to SEQ ID NO: 2162900
uugacagagccaauaggcg

SEQ ID NO: 2162902 - RNA, 19 nt, Artificial Sequence
  Description of Artificial Sequence: Synthetic oligonucleotide
  Sense strand starting at position 2067 of SEQ ID NO: 1882998
gccuauuggcucugucaaa

SEQ ID NO: 2162903 - RNA, 19 nt, Artificial Sequence
  Description of Artificial Sequence: Synthetic oligonucleotide
  Antisense strand to SEQ ID NO: 2162902
uuugacagagccaauaggc

SEQ ID NO: 2162904 - RNA, 19 nt, Artificial Sequence
  Description of Artificial Sequence: Synthetic oligonucleotide
  Sense strand starting at position 2068 of SEQ ID NO: 1882998
ccuauuggcucugucaaag

SEQ ID NO: 2162905 - RNA, 19 nt, Artificial Sequence
  Description of Artificial Sequence: Synthetic oligonucleotide
  Antisense strand to SEQ ID NO: 2162904
cuuugacagagccaauagg

SEQ ID NO: 2162906 - RNA, 19 nt, Artificial Sequence
  Description of Artificial Sequence: Synthetic oligonucleotide
  Sense strand starting at position 2088 of SEQ ID NO: 1882998
ucgacuucgugacgucaaa

SEQ ID NO: 2162907 - RNA, 19 nt, Artificial Sequence
  Description of Artificial Sequence: Synthetic oligonucleotide
  Antisense strand to SEQ ID NO: 2162906
uuugacgucacgaagucga

SEQ ID NO: 2162908 - RNA, 19 nt, Artificial Sequence
  Description of Artificial Sequence: Synthetic oligonucleotide
  Sense strand starting at position 2706 of SEQ ID NO: 1882998
guggugaggcgccuguaau

SEQ ID NO: 2162909 - RNA, 19 nt, Artificial Sequence
  Description of Artificial Sequence: Synthetic oligonucleotide
  Antisense strand to SEQ ID NO: 2162908
auuacaggcgccucaccac

SEQ ID NO: 2162910 - RNA, 19 nt, Artificial Sequence
  Description of Artificial Sequence: Synthetic oligonucleotide
  Sense strand starting at position 2707 of SEQ ID NO: 1882998
uggugaggcgccuguaauc

SEQ ID NO: 2162911 - RNA, 19 nt, Artificial Sequence
  Description of Artificial Sequence: Synthetic oligonucleotide
  Antisense strand to SEQ ID NO: 2162910
gauuacaggcgccucacca

SEQ ID NO: 2162912 - RNA, 19 nt, Artificial Sequence
  Description of Artificial Sequence: Synthetic oligonucleotide
  Sense strand starting at position 2887 of SEQ ID NO: 1882998
guauguaucuuuccagguc

SEQ ID NO: 2162913 - RNA, 19 nt, Artificial Sequence
  Description of Artificial Sequence: Synthetic oligonucleotide
  Antisense strand to SEQ ID NO: 2162912
gaccuggaaagauacauac

SEQ ID NO: 2162914 - RNA, 19 nt, Artificial Sequence
  Description of Artificial Sequence: Synthetic oligonucleotide
  Sense strand starting at position 2923 of SEQ ID NO: 1882998
ccuggagucucagcgcuuu

SEQ ID NO: 2162915 - RNA, 19 nt, Artificial Sequence
  Description of Artificial Sequence: Synthetic oligonucleotide
  Antisense strand to SEQ ID NO: 2162914
aaagcgcugagacuccagg

SEQ ID NO: 2162916 - RNA, 19 nt, Artificial Sequence
  Description of Artificial Sequence: Synthetic oligonucleotide
  Sense strand starting at position 2929 of SEQ ID NO: 1882998
gucucagcgcuuugggaga

SEQ ID NO: 2162917 - RNA, 19 nt, Artificial Sequence
  Description of Artificial Sequence: Synthetic oligonucleotide
  Antisense strand to SEQ ID NO: 2162916
ucucccaaagcgcugagac

SEQ ID NO: 2162918 - RNA, 19 nt, Artificial Sequence
  Description of Artificial Sequence: Synthetic oligonucleotide
  Sense strand starting at position 2962 of SEQ ID NO: 1882998
ucaauugaaucccaagagu

SEQ ID NO: 2162919 - RNA, 19 nt, Artificial Sequence
  Description of Artificial Sequence: Synthetic oligonucleotide
  Antisense strand to SEQ ID NO: 2162918
acucuugggauucaauuga

SEQ ID NO: 2162920 - RNA, 19 nt, Artificial Sequence
  Description of Artificial Sequence: Synthetic oligonucleotide
  Sense strand starting at position 3076 of SEQ ID NO: 1882998
auauaugguugcuuaaaca

SEQ ID NO: 2162921 - RNA, 19 nt, Artificial Sequence
  Description of Artificial Sequence: Synthetic oligonucleotide
  Antisense strand to SEQ ID NO: 2162920
uguuuaagcaaccauauau

SEQ ID NO: 2162922 - RNA, 19 nt, Artificial Sequence
  Description of Artificial Sequence: Synthetic oligonucleotide
  Sense strand starting at position 3270 of SEQ ID NO: 1882998
ugguaauuaugucuugcuu

SEQ ID NO: 2162923 - RNA, 19 nt, Artificial Sequence
  Description of Artificial Sequence: Synthetic oligonucleotide
  Antisense strand to SEQ ID NO: 2162922
aagcaagacauaauuacca

SEQ ID NO: 2162924 - RNA, 19 nt, Artificial Sequence
  Description of Artificial Sequence: Synthetic oligonucleotide
  Sense strand starting at position 3272 of SEQ ID NO: 1882998
guaauuaugucuugcuugu

SEQ ID NO: 2162925 - RNA, 19 nt, Artificial Sequence
  Description of Artificial Sequence: Synthetic oligonucleotide
  Antisense strand to SEQ ID NO: 2162924
acaagcaagacauaauuac

SEQ ID NO: 2162926 - RNA, 19 nt, Artificial Sequence
  Description of Artificial Sequence: Synthetic oligonucleotide
  Sense strand starting at position 3281 of SEQ ID NO: 1882998
ucuugcuugucucuauuau

SEQ ID NO: 2162927 - RNA, 19 nt, Artificial Sequence
  Description of Artificial Sequence: Synthetic oligonucleotide
  Antisense strand to SEQ ID NO: 2162926
auaauagagacaagcaaga

SEQ ID NO: 2162928 - RNA, 19 nt, Artificial Sequence
  Description of Artificial Sequence: Synthetic oligonucleotide
  Sense strand starting at position 3282 of SEQ ID NO: 1882998
cuugcuugucucuauuauu

SEQ ID NO: 2162929 - RNA, 19 nt, Artificial Sequence
  Description of Artificial Sequence: Synthetic oligonucleotide
  Antisense strand to SEQ ID NO: 2162928
aauaauagagacaagcaag

SEQ ID NO: 2162930 - RNA, 19 nt, Artificial Sequence
  Description of Artificial Sequence: Synthetic oligonucleotide
  Sense strand starting at position 3676 of SEQ ID NO: 1882998
agcguauagucugaugugu

SEQ ID NO: 2162931 - RNA, 19 nt, Artificial Sequence
  Description of Artificial Sequence: Synthetic oligonucleotide
  Antisense strand to SEQ ID NO: 2162930
acacaucagacuauacgcu

SEQ ID NO: 2162932 - RNA, 19 nt, Artificial Sequence
  Description of Artificial Sequence: Synthetic oligonucleotide
  Sense strand starting at position 3678 of SEQ ID NO: 1882998
cguauagucugaugugucu

SEQ ID NO: 2162933 - RNA, 19 nt, Artificial Sequence
  Description of Artificial Sequence: Synthetic oligonucleotide
  Antisense strand to SEQ ID NO: 2162932
agacacaucagacuauacg

SEQ ID NO: 2162934 - RNA, 19 nt, Artificial Sequence
  Description of Artificial Sequence: Synthetic oligonucleotide
  Sense strand starting at position 3684 of SEQ ID NO: 1882998
gucugaugugucugggugu

SEQ ID NO: 2162935 - RNA, 19 nt, Artificial Sequence
  Description of Artificial Sequence: Synthetic oligonucleotide
  Antisense strand to SEQ ID NO: 2162934
acacccagacacaucagac

SEQ ID NO: 2162936 - RNA, 19 nt, Artificial Sequence
  Description of Artificial Sequence: Synthetic oligonucleotide
  Sense strand starting at position 3685 of SEQ ID NO: 1882998
ucugaugugucuggguguu

SEQ ID NO: 2162937 - RNA, 19 nt, Artificial Sequence
  Description of Artificial Sequence: Synthetic oligonucleotide
  Antisense strand to SEQ ID NO: 2162936
aacacccagacacaucaga

SEQ ID NO: 2162938 - RNA, 19 nt, Artificial Sequence
  Description of Artificial Sequence: Synthetic oligonucleotide
  Sense strand starting at position 3765 of SEQ ID NO: 1882998
gacccaagguggucucaau

SEQ ID NO: 2162939 - RNA, 19 nt, Artificial Sequence
  Description of Artificial Sequence: Synthetic oligonucleotide
  Antisense strand to SEQ ID NO: 2162938
auugagaccaccuuggguc

SEQ ID NO: 2162940 - RNA, 19 nt, Artificial Sequence
  Description of Artificial Sequence: Synthetic oligonucleotide
  Sense strand starting at position 3941 of SEQ ID NO: 1882998
cguucuauugcaugacucu

SEQ ID NO: 2162941 - RNA, 19 nt, Artificial Sequence
  Description of Artificial Sequence: Synthetic oligonucleotide
  Antisense strand to SEQ ID NO: 2162940
agagucaugcaauagaacg

SEQ ID NO: 2162942 - RNA, 19 nt, Artificial Sequence
  Description of Artificial Sequence: Synthetic oligonucleotide
  Sense strand starting at position 259 of SEQ ID NO: 1882999
cagggacuauccugaaaug

SEQ ID NO: 2162943 - RNA, 19 nt, Artificial Sequence
  Description of Artificial Sequence: Synthetic oligonucleotide
  Antisense strand to SEQ ID NO: 2162942
cauuucaggauagucccug

SEQ ID NO: 2162944 - RNA, 19 nt, Artificial Sequence
  Description of Artificial Sequence: Synthetic oligonucleotide
  Sense strand starting at position 281 of SEQ ID NO: 1882999
agaggacgugcuuauguga

SEQ ID NO: 2162945 - RNA, 19 nt, Artificial Sequence
  Description of Artificial Sequence: Synthetic oligonucleotide
  Antisense strand to SEQ ID NO: 2162944
ucacauaagcacguccucu

SEQ ID NO: 2162946 - RNA, 19 nt, Artificial Sequence
  Description of Artificial Sequence: Synthetic oligonucleotide
  Sense strand starting at position 284 of SEQ ID NO: 1882999
ggacgugcuuaugugaaca

SEQ ID NO: 2162947 - RNA, 19 nt, Artificial Sequence
  Description of Artificial Sequence: Synthetic oligonucleotide
  Antisense strand to SEQ ID NO: 2162946
uguucacauaagcacgucc

SEQ ID NO: 2162948 - RNA, 19 nt, Artificial Sequence
  Description of Artificial Sequence: Synthetic oligonucleotide
  Sense strand starting at position 289 of SEQ ID NO: 1882999
ugcuuaugugaacagauac

SEQ ID NO: 2162949 - RNA, 19 nt, Artificial Sequence
  Description of Artificial Sequence: Synthetic oligonucleotide
  Antisense strand to SEQ ID NO: 2162948
guaucuguucacauaagca

SEQ ID NO: 2162950 - RNA, 19 nt, Artificial Sequence
  Description of Artificial Sequence: Synthetic oligonucleotide
  Sense strand starting at position 699 of SEQ ID NO: 1882999
augcgauauggccauauac

SEQ ID NO: 2162951 - RNA, 19 nt, Artificial Sequence
  Description of Artificial Sequence: Synthetic oligonucleotide
  Antisense strand to SEQ ID NO: 2162950
guauauggccauaucgcau

SEQ ID NO: 2162952 - RNA, 19 nt, Artificial Sequence
  Description of Artificial Sequence: Synthetic oligonucleotide
  Sense strand starting at position 701 of SEQ ID NO: 1882999
gcgauauggccauauacuc

SEQ ID NO: 2162953 - RNA, 19 nt, Artificial Sequence
  Description of Artificial Sequence: Synthetic oligonucleotide
  Antisense strand to SEQ ID NO: 2162952
gaguauauggccauaucgc

SEQ ID NO: 2162954 - RNA, 19 nt, Artificial Sequence
  Description of Artificial Sequence: Synthetic oligonucleotide
  Sense strand starting at position 755 of SEQ ID NO: 1882999
ucacaaagaucaggaucaa

SEQ ID NO: 2162955 - RNA, 19 nt, Artificial Sequence
  Description of Artificial Sequence: Synthetic oligonucleotide
  Antisense strand to SEQ ID NO: 2162954
uugauccugaucuuuguga

SEQ ID NO: 2162956 - RNA, 19 nt, Artificial Sequence
  Description of Artificial Sequence: Synthetic oligonucleotide
  Sense strand starting at position 783 of SEQ ID NO: 1882999
uugaauaccucugguagga

SEQ ID NO: 2162957 - RNA, 19 nt, Artificial Sequence
  Description of Artificial Sequence: Synthetic oligonucleotide
  Antisense strand to SEQ ID NO: 2162956
uccuaccagagguauucaa

SEQ ID NO: 2162958 - RNA, 19 nt, Artificial Sequence
  Description of Artificial Sequence: Synthetic oligonucleotide
  Sense strand starting at position 785 of SEQ ID NO: 1882999
gaauaccucugguaggaau

SEQ ID NO: 2162959 - RNA, 19 nt, Artificial Sequence
  Description of Artificial Sequence: Synthetic oligonucleotide
  Antisense strand to SEQ ID NO: 2162958
auuccuaccagagguauuc

SEQ ID NO: 2162960 - RNA, 19 nt, Artificial Sequence
  Description of Artificial Sequence: Synthetic oligonucleotide
  Sense strand starting at position 836 of SEQ ID NO: 1882999
gggaauaccuccuaaaucu

SEQ ID NO: 2162961 - RNA, 19 nt, Artificial Sequence
  Description of Artificial Sequence: Synthetic oligonucleotide
  Antisense strand to SEQ ID NO: 2162960
agauuuaggagguauuccc

SEQ ID NO: 2162962 - RNA, 19 nt, Artificial Sequence
  Description of Artificial Sequence: Synthetic oligonucleotide
  Sense strand starting at position 883 of SEQ ID NO: 1882999
agcuacuccuaucagaagu

SEQ ID NO: 2162963 - RNA, 19 nt, Artificial Sequence
  Description of Artificial Sequence: Synthetic oligonucleotide
  Antisense strand to SEQ ID NO: 2162962
acuucugauaggaguagcu

SEQ ID NO: 2162964 - RNA, 19 nt, Artificial Sequence
  Description of Artificial Sequence: Synthetic oligonucleotide
  Sense strand starting at position 941 of SEQ ID NO: 1882999
gcucuuugaggucaggagu

SEQ ID NO: 2162965 - RNA, 19 nt, Artificial Sequence
  Description of Artificial Sequence: Synthetic oligonucleotide
  Antisense strand to SEQ ID NO: 2162964
acuccugaccucaaagagc

SEQ ID NO: 2162966 - RNA, 19 nt, Artificial Sequence
  Description of Artificial Sequence: Synthetic oligonucleotide
  Sense strand starting at position 1189 of SEQ ID NO: 1882999
agaagugucuaucucuaug

SEQ ID NO: 2162967 - RNA, 19 nt, Artificial Sequence
  Description of Artificial Sequence: Synthetic oligonucleotide
  Antisense strand to SEQ ID NO: 2162966
cauagagauagacacuucu

SEQ ID NO: 2162968 - RNA, 19 nt, Artificial Sequence
  Description of Artificial Sequence: Synthetic oligonucleotide
  Sense strand starting at position 1197 of SEQ ID NO: 1882999
cuaucucuaugcucgucaa

SEQ ID NO: 2162969 - RNA, 19 nt, Artificial Sequence
  Description of Artificial Sequence: Synthetic oligonucleotide
  Antisense strand to SEQ ID NO: 2162968
uugacgagcauagagauag

SEQ ID NO: 2162970 - RNA, 19 nt, Artificial Sequence
  Description of Artificial Sequence: Synthetic oligonucleotide
  Sense strand starting at position 1220 of SEQ ID NO: 1882999
cguggaugaggauguucau

SEQ ID NO: 2162971 - RNA, 19 nt, Artificial Sequence
  Description of Artificial Sequence: Synthetic oligonucleotide
  Antisense strand to SEQ ID NO: 2162970
augaacauccucauccacg

SEQ ID NO: 2162972 - RNA, 19 nt, Artificial Sequence
  Description of Artificial Sequence: Synthetic oligonucleotide
  Sense strand starting at position 1250 of SEQ ID NO: 1882999
ucauuauagcccgaaacug

SEQ ID NO: 2162973 - RNA, 19 nt, Artificial Sequence
  Description of Artificial Sequence: Synthetic oligonucleotide
  Antisense strand to SEQ ID NO: 2162972
caguuucgggcuauaauga

SEQ ID NO: 2162974 - RNA, 19 nt, Artificial Sequence
  Description of Artificial Sequence: Synthetic oligonucleotide
  Sense strand starting at position 1346 of SEQ ID NO: 1882999
gccgcaugacuuggaugaa

SEQ ID NO: 2162975 - RNA, 19 nt, Artificial Sequence
  Description of Artificial Sequence: Synthetic oligonucleotide
  Antisense strand to SEQ ID NO: 2162974
uucauccaagucaugcggc

SEQ ID NO: 2162976 - RNA, 19 nt, Artificial Sequence
  Description of Artificial Sequence: Synthetic oligonucleotide
  Sense strand starting at position 1347 of SEQ ID NO: 1882999
ccgcaugacuuggaugaau

SEQ ID NO: 2162977 - RNA, 19 nt, Artificial Sequence
  Description of Artificial Sequence: Synthetic oligonucleotide
  Antisense strand to SEQ ID NO: 2162976
auucauccaagucaugcgg

SEQ ID NO: 2162978 - RNA, 19 nt, Artificial Sequence
  Description of Artificial Sequence: Synthetic oligonucleotide
  Sense strand starting at position 1349 of SEQ ID NO: 1882999
gcaugacuuggaugaaucu

SEQ ID NO: 2162979 - RNA, 19 nt, Artificial Sequence
  Description of Artificial Sequence: Synthetic oligonucleotide
  Antisense strand to SEQ ID NO: 2162978
agauucauccaagucaugc

SEQ ID NO: 2162980 - RNA, 19 nt, Artificial Sequence
  Description of Artificial Sequence: Synthetic oligonucleotide
  Sense strand starting at position 1480 of SEQ ID NO: 1882999
cuguguuucugagacagag

SEQ ID NO: 2162981 - RNA, 19 nt, Artificial Sequence
  Description of Artificial Sequence: Synthetic oligonucleotide
  Antisense strand to SEQ ID NO: 2162980
cucugucucagaaacacag

SEQ ID NO: 2162982 - RNA, 19 nt, Artificial Sequence
  Description of Artificial Sequence: Synthetic oligonucleotide
  Sense strand starting at position 1820 of SEQ ID NO: 1882999
auuguuaucucauuccagu

SEQ ID NO: 2162983 - RNA, 19 nt, Artificial Sequence
  Description of Artificial Sequence: Synthetic oligonucleotide
  Antisense strand to SEQ ID NO: 2162982
acuggaaugagauaacaau

SEQ ID NO: 2162984 - RNA, 19 nt, Artificial Sequence
  Description of Artificial Sequence: Synthetic oligonucleotide
  Sense strand starting at position 1829 of SEQ ID NO: 1882999
ucauuccagucauagcaga

SEQ ID NO: 2162985 - RNA, 19 nt, Artificial Sequence
  Description of Artificial Sequence: Synthetic oligonucleotide
  Antisense strand to SEQ ID NO: 2162984
ucugcuaugacuggaauga

SEQ ID NO: 2162986 - RNA, 19 nt, Artificial Sequence
  Description of Artificial Sequence: Synthetic oligonucleotide
  Sense strand starting at position 1840 of SEQ ID NO: 1882999
auagcagaguuguagaauu

SEQ ID NO: 2162987 - RNA, 19 nt, Artificial Sequence
  Description of Artificial Sequence: Synthetic oligonucleotide
  Antisense strand to SEQ ID NO: 2162986
aauucuacaacucugcuau

SEQ ID NO: 2162988 - RNA, 19 nt, Artificial Sequence
  Description of Artificial Sequence: Synthetic oligonucleotide
  Sense strand starting at position 1872 of SEQ ID NO: 1882999
ugaggcauuagucacuagu

SEQ ID NO: 2162989 - RNA, 19 nt, Artificial Sequence
  Description of Artificial Sequence: Synthetic oligonucleotide
  Antisense strand to SEQ ID NO: 2162988
acuagugacuaaugccuca

SEQ ID NO: 2162990 - RNA, 19 nt, Artificial Sequence
  Description of Artificial Sequence: Synthetic oligonucleotide
  Sense strand starting at position 1875 of SEQ ID NO: 1882999
ggcauuagucacuaguugu

SEQ ID NO: 2162991 - RNA, 19 nt, Artificial Sequence
  Description of Artificial Sequence: Synthetic oligonucleotide
  Antisense strand to SEQ ID NO: 2162990
acaacuagugacuaaugcc

SEQ ID NO: 2162992 - RNA, 19 nt, Artificial Sequence
  Description of Artificial Sequence: Synthetic oligonucleotide
  Sense strand starting at position 1881 of SEQ ID NO: 1882999
agucacuaguuguacugaa

SEQ ID NO: 2162993 - RNA, 19 nt, Artificial Sequence
  Description of Artificial Sequence: Synthetic oligonucleotide
  Antisense strand to SEQ ID NO: 2162992
uucaguacaacuagugacu

SEQ ID NO: 2162994 - RNA, 19 nt, Artificial Sequence
  Description of Artificial Sequence: Synthetic oligonucleotide
  Sense strand starting at position 1895 of SEQ ID NO: 1882999
cugaaaugccaauggaacu

SEQ ID NO: 2162995 - RNA, 19 nt, Artificial Sequence
  Description of Artificial Sequence: Synthetic oligonucleotide
  Antisense strand to SEQ ID NO: 2162994
aguuccauuggcauuucag

SEQ ID NO: 2162996 - RNA, 19 nt, Artificial Sequence
  Description of Artificial Sequence: Synthetic oligonucleotide
  Sense strand starting at position 2134 of SEQ ID NO: 1882999
aaggucucgccuugucaca

SEQ ID NO: 2162997 - RNA, 19 nt, Artificial Sequence
  Description of Artificial Sequence: Synthetic oligonucleotide
  Antisense strand to SEQ ID NO: 2162996
ugugacaaggcgagaccuu

SEQ ID NO: 2162998 - RNA, 19 nt, Artificial Sequence
  Description of Artificial Sequence: Synthetic oligonucleotide
  Sense strand starting at position 2606 of SEQ ID NO: 1882999
agauaugacuaacauggaa

SEQ ID NO: 2162999 - RNA, 19 nt, Artificial Sequence
  Description of Artificial Sequence: Synthetic oligonucleotide
  Antisense strand to SEQ ID NO: 2162998
uuccauguuagucauaucu

SEQ ID NO: 2163000 - RNA, 19 nt, Artificial Sequence
  Description of Artificial Sequence: Synthetic oligonucleotide
  Sense strand starting at position 2744 of SEQ ID NO: 1882999
cucucaaaguguuauuucu

SEQ ID NO: 2163001 - RNA, 19 nt, Artificial Sequence
  Description of Artificial Sequence: Synthetic oligonucleotide
  Antisense strand to SEQ ID NO: 2163000
agaaauaacacuuugagag

SEQ ID NO: 2163002 - RNA, 19 nt, Artificial Sequence
  Description of Artificial Sequence: Synthetic oligonucleotide
  Sense strand starting at position 3116 of SEQ ID NO: 1882999
uaaaguugcucuccgagaa

SEQ ID NO: 2163003 - RNA, 19 nt, Artificial Sequence
  Description of Artificial Sequence: Synthetic oligonucleotide
  Antisense strand to SEQ ID NO: 2163002
uucucggagagcaacuuua

SEQ ID NO: 2163004 - RNA, 19 nt, Artificial Sequence
  Description of Artificial Sequence: Synthetic oligonucleotide
  Sense strand starting at position 3117 of SEQ ID NO: 1882999
aaaguugcucuccgagaaa

SEQ ID NO: 2163005 - RNA, 19 nt, Artificial Sequence
  Description of Artificial Sequence: Synthetic oligonucleotide
  Antisense strand to SEQ ID NO: 2163004
uuucucggagagcaacuuu

SEQ ID NO: 2163006 - RNA, 19 nt, Artificial Sequence
  Description of Artificial Sequence: Synthetic oligonucleotide
  Sense strand starting at position 3120 of SEQ ID NO: 1882999
guugcucuccgagaaauuc

SEQ ID NO: 2163007 - RNA, 19 nt, Artificial Sequence
  Description of Artificial Sequence: Synthetic oligonucleotide
  Antisense strand to SEQ ID NO: 2163006
gaauuucucggagagcaac

SEQ ID NO: 2163008 - RNA, 19 nt, Artificial Sequence
  Description of Artificial Sequence: Synthetic oligonucleotide
  Sense strand starting at position 3130 of SEQ ID NO: 1882999
gagaaauucuagugaaaug

SEQ ID NO: 2163009 - RNA, 19 nt, Artificial Sequence
  Description of Artificial Sequence: Synthetic oligonucleotide
  Antisense strand to SEQ ID NO: 2163008
cauuucacuagaauuucuc

SEQ ID NO: 2163010 - RNA, 19 nt, Artificial Sequence
  Description of Artificial Sequence: Synthetic oligonucleotide
  Sense strand starting at position 3618 of SEQ ID NO: 1882999
gugugagcccaagagauug

SEQ ID NO: 2163011 - RNA, 19 nt, Artificial Sequence
  Description of Artificial Sequence: Synthetic oligonucleotide
  Antisense strand to SEQ ID NO: 2163010
caaucucuugggcucacac

SEQ ID NO: 2163012 - RNA, 19 nt, Artificial Sequence
  Description of Artificial Sequence: Synthetic oligonucleotide
  Sense strand starting at position 3897 of SEQ ID NO: 1882999
gcuggauucgacugcaaug

SEQ ID NO: 2163013 - RNA, 19 nt, Artificial Sequence
  Description of Artificial Sequence: Synthetic oligonucleotide
  Antisense strand to SEQ ID NO: 2163012
cauugcagucgaauccagc

SEQ ID NO: 2163014 - RNA, 19 nt, Artificial Sequence
  Description of Artificial Sequence: Synthetic oligonucleotide
  Sense strand starting at position 3899 of SEQ ID NO: 1882999
uggauucgacugcaaugaa

SEQ ID NO: 2163015 - RNA, 19 nt, Artificial Sequence
  Description of Artificial Sequence: Synthetic oligonucleotide
  Antisense strand to SEQ ID NO: 2163014
uucauugcagucgaaucca

SEQ ID NO: 2163016 - RNA, 19 nt, Artificial Sequence
  Description of Artificial Sequence: Synthetic oligonucleotide
  Sense strand starting at position 3902 of SEQ ID NO: 1882999
auucgacugcaaugaaauc

SEQ ID NO: 2163017 - RNA, 19 nt, Artificial Sequence
  Description of Artificial Sequence: Synthetic oligonucleotide
  Antisense strand to SEQ ID NO: 2163016
gauuucauugcagucgaau

SEQ ID NO: 2163018 - RNA, 19 nt, Artificial Sequence
  Description of Artificial Sequence: Synthetic oligonucleotide
  Sense strand starting at position 3913 of SEQ ID NO: 1882999
augaaaucauugguaaucu

SEQ ID NO: 2163019 - RNA, 19 nt, Artificial Sequence
  Description of Artificial Sequence: Synthetic oligonucleotide
  Antisense strand to SEQ ID NO: 2163018
agauuaccaaugauuucau

SEQ ID NO: 2163020 - RNA, 19 nt, Artificial Sequence
  Description of Artificial Sequence: Synthetic oligonucleotide
  Sense strand starting at position 3914 of SEQ ID NO: 1882999
ugaaaucauugguaaucuu

SEQ ID NO: 2163021 - RNA, 19 nt, Artificial Sequence
  Description of Artificial Sequence: Synthetic oligonucleotide
  Antisense strand to SEQ ID NO: 2163020
aagauuaccaaugauuuca

SEQ ID NO: 2163022 - RNA, 19 nt, Artificial Sequence
  Description of Artificial Sequence: Synthetic oligonucleotide
  Sense strand starting at position 1360 of SEQ ID NO: 1883000
cgcaaauuaggaugugucu

SEQ ID NO: 2163023 - RNA, 19 nt, Artificial Sequence
  Description of Artificial Sequence: Synthetic oligonucleotide
  Antisense strand to SEQ ID NO: 2163022
agacacauccuaauuugcg

SEQ ID NO: 2163024 - RNA, 19 nt, Artificial Sequence
  Description of Artificial Sequence: Synthetic oligonucleotide
  Sense strand starting at position 1955 of SEQ ID NO: 1883000
cucagcucucuccaaggau

SEQ ID NO: 2163025 - RNA, 19 nt, Artificial Sequence
  Description of Artificial Sequence: Synthetic oligonucleotide
  Antisense strand to SEQ ID NO: 2163024
auccuuggagagagcugag

SEQ ID NO: 2163026 - RNA, 19 nt, Artificial Sequence
  Description of Artificial Sequence: Synthetic oligonucleotide
  Sense strand starting at position 3810 of SEQ ID NO: 1883000
ugguaauuaugucaugcuu

SEQ ID NO: 2163027 - RNA, 19 nt, Artificial Sequence
  Description of Artificial Sequence: Synthetic oligonucleotide
  Antisense strand to SEQ ID NO: 2163026
aagcaugacauaauuacca

SEQ ID NO: 2163028 - RNA, 19 nt, Artificial Sequence
  Description of Artificial Sequence: Synthetic oligonucleotide
  Sense strand starting at position 3812 of SEQ ID NO: 1883000
guaauuaugucaugcuugu

SEQ ID NO: 2163029 - RNA, 19 nt, Artificial Sequence
  Description of Artificial Sequence: Synthetic oligonucleotide
  Antisense strand to SEQ ID NO: 2163028
acaagcaugacauaauuac

SEQ ID NO: 2163030 - RNA, 19 nt, Artificial Sequence
  Description of Artificial Sequence: Synthetic oligonucleotide
  Sense strand starting at position 3818 of SEQ ID NO: 1883000
augucaugcuugucucuau

SEQ ID NO: 2163031 - RNA, 19 nt, Artificial Sequence
  Description of Artificial Sequence: Synthetic oligonucleotide
  Antisense strand to SEQ ID NO: 2163030
auagagacaagcaugacau

SEQ ID NO: 2163032 - RNA, 19 nt, Artificial Sequence
  Description of Artificial Sequence: Synthetic oligonucleotide
  Sense strand starting at position 3819 of SEQ ID NO: 1883000
ugucaugcuugucucuauu

SEQ ID NO: 2163033 - RNA, 19 nt, Artificial Sequence
  Description of Artificial Sequence: Synthetic oligonucleotide
  Antisense strand to SEQ ID NO: 2163032
aauagagacaagcaugaca

SEQ ID NO: 2163034 - RNA, 19 nt, Artificial Sequence
  Description of Artificial Sequence: Synthetic oligonucleotide
  Sense strand starting at position 3821 of SEQ ID NO: 1883000
ucaugcuugucucuauuau

SEQ ID NO: 2163035 - RNA, 19 nt, Artificial Sequence
  Description of Artificial Sequence: Synthetic oligonucleotide
  Antisense strand to SEQ ID NO: 2163034
auaauagagacaagcauga

SEQ ID NO: 2163036 - RNA, 19 nt, Artificial Sequence
  Description of Artificial Sequence: Synthetic oligonucleotide
  Sense strand starting at position 3859 of SEQ ID NO: 1883000
uaaacaauguggucugguu

SEQ ID NO: 2163037 - RNA, 19 nt, Artificial Sequence
  Description of Artificial Sequence: Synthetic oligonucleotide
  Antisense strand to SEQ ID NO: 2163036
aaccagaccacauuguuua

SEQ ID NO: 2163038 - RNA, 19 nt, Artificial Sequence
  Description of Artificial Sequence: Synthetic oligonucleotide
  Sense strand starting at position 123 of SEQ ID NO: 1883001
cuuagcaaguuccaguaaa

SEQ ID NO: 2163039 - RNA, 19 nt, Artificial Sequence
  Description of Artificial Sequence: Synthetic oligonucleotide
  Antisense strand to SEQ ID NO: 2163038
uuuacuggaacuugcuaag

SEQ ID NO: 2163040 - RNA, 19 nt, Artificial Sequence
  Description of Artificial Sequence: Synthetic oligonucleotide
  Sense strand starting at position 301 of SEQ ID NO: 1883001
accaaagucugucuaccau

SEQ ID NO: 2163041 - RNA, 19 nt, Artificial Sequence
  Description of Artificial Sequence: Synthetic oligonucleotide
  Antisense strand to SEQ ID NO: 2163040
augguagacagacuuuggu

SEQ ID NO: 2163042 - RNA, 19 nt, Artificial Sequence
  Description of Artificial Sequence: Synthetic oligonucleotide
  Sense strand starting at position 872 of SEQ ID NO: 1883001
guagcuuacuagccagaaa

SEQ ID NO: 2163043 - RNA, 19 nt, Artificial Sequence
  Description of Artificial Sequence: Synthetic oligonucleotide
  Antisense strand to SEQ ID NO: 2163042
uuucuggcuaguaagcuac

SEQ ID NO: 2163044 - RNA, 19 nt, Artificial Sequence
  Description of Artificial Sequence: Synthetic oligonucleotide
  Sense strand starting at position 875 of SEQ ID NO: 1883001
gcuuacuagccagaaauca

SEQ ID NO: 2163045 - RNA, 19 nt, Artificial Sequence
  Description of Artificial Sequence: Synthetic oligonucleotide
  Antisense strand to SEQ ID NO: 2163044
ugauuucuggcuaguaagc

SEQ ID NO: 2163046 - RNA, 19 nt, Artificial Sequence
  Description of Artificial Sequence: Synthetic oligonucleotide
  Sense strand starting at position 1477 of SEQ ID NO: 1883001
cgccgugguucuuaaagag

SEQ ID NO: 2163047 - RNA, 19 nt, Artificial Sequence
  Description of Artificial Sequence: Synthetic oligonucleotide
  Antisense strand to SEQ ID NO: 2163046
cucuuuaagaaccacggcg

SEQ ID NO: 2163048 - RNA, 19 nt, Artificial Sequence
  Description of Artificial Sequence: Synthetic oligonucleotide
  Sense strand starting at position 2614 of SEQ ID NO: 1883001
auauaucuuuccuggucga

SEQ ID NO: 2163049 - RNA, 19 nt, Artificial Sequence
  Description of Artificial Sequence: Synthetic oligonucleotide
  Antisense strand to SEQ ID NO: 2163048
ucgaccaggaaagauauau

SEQ ID NO: 2163050 - RNA, 19 nt, Artificial Sequence
  Description of Artificial Sequence: Synthetic oligonucleotide
  Sense strand starting at position 3161 of SEQ ID NO: 1883001
aagugaguagcacauaaau

SEQ ID NO: 2163051 - RNA, 19 nt, Artificial Sequence
  Description of Artificial Sequence: Synthetic oligonucleotide
  Antisense strand to SEQ ID NO: 2163050
auuuaugugcuacucacuu

SEQ ID NO: 2163052 - RNA, 19 nt, Artificial Sequence
  Description of Artificial Sequence: Synthetic oligonucleotide
  Sense strand starting at position 3303 of SEQ ID NO: 1883001
ugguaauuauguccugcuu

SEQ ID NO: 2163053 - RNA, 19 nt, Artificial Sequence
  Description of Artificial Sequence: Synthetic oligonucleotide
  Antisense strand to SEQ ID NO: 2163052
aagcaggacauaauuacca

SEQ ID NO: 2163054 - RNA, 19 nt, Artificial Sequence
  Description of Artificial Sequence: Synthetic oligonucleotide
  Sense strand starting at position 3314 of SEQ ID NO: 1883001
uccugcuugucucuauuau

SEQ ID NO: 2163055 - RNA, 19 nt, Artificial Sequence
  Description of Artificial Sequence: Synthetic oligonucleotide
  Antisense strand to SEQ ID NO: 2163054
auaauagagacaagcagga

SEQ ID NO: 2163056 - RNA, 19 nt, Artificial Sequence
  Description of Artificial Sequence: Synthetic oligonucleotide
  Sense strand starting at position 3315 of SEQ ID NO: 1883001
ccugcuugucucuauuauu

SEQ ID NO: 2163057 - RNA, 19 nt, Artificial Sequence
  Description of Artificial Sequence: Synthetic oligonucleotide
  Antisense strand to SEQ ID NO: 2163056
aauaauagagacaagcagg

SEQ ID NO: 2163058 - RNA, 19 nt, Artificial Sequence
  Description of Artificial Sequence: Synthetic oligonucleotide
  Sense strand starting at position 3785 of SEQ ID NO: 1883001
uuuguaguucuuuguuguu

SEQ ID NO: 2163059 - RNA, 19 nt, Artificial Sequence
  Description of Artificial Sequence: Synthetic oligonucleotide
  Antisense strand to SEQ ID NO: 2163058
aacaacaaagaacuacaaa

SEQ ID NO: 2163060 - RNA, 19 nt, Artificial Sequence
  Description of Artificial Sequence: Synthetic oligonucleotide
  Sense strand starting at position 3787 of SEQ ID NO: 1883001
uguaguucuuuguuguuaa

SEQ ID NO: 2163061 - RNA, 19 nt, Artificial Sequence
  Description of Artificial Sequence: Synthetic oligonucleotide
  Antisense strand to SEQ ID NO: 2163060
uuaacaacaaagaacuaca

SEQ ID NO: 2163062 - RNA, 19 nt, Artificial Sequence
  Description of Artificial Sequence: Synthetic oligonucleotide
  Sense strand starting at position 3788 of SEQ ID NO: 1883001
guaguucuuuguuguuaac

SEQ ID NO: 2163063 - RNA, 19 nt, Artificial Sequence
  Description of Artificial Sequence: Synthetic oligonucleotide
  Antisense strand to SEQ ID NO: 2163062
guuaacaacaaagaacuac

SEQ ID NO: 2163064 - RNA, 19 nt, Artificial Sequence
  Description of Artificial Sequence: Synthetic oligonucleotide
  Sense strand starting at position 3790 of SEQ ID NO: 1883001
aguucuuuguuguuaacaa

SEQ ID NO: 2163065 - RNA, 19 nt, Artificial Sequence
  Description of Artificial Sequence: Synthetic oligonucleotide
  Antisense strand to SEQ ID NO: 2163064
uuguuaacaacaaagaacu

SEQ ID NO: 2163066 - RNA, 19 nt, Artificial Sequence
  Description of Artificial Sequence: Synthetic oligonucleotide
  Sense strand starting at position 3791 of SEQ ID NO: 1883001
guucuuuguuguuaacaaa

SEQ ID NO: 2163067 - RNA, 19 nt, Artificial Sequence
  Description of Artificial Sequence: Synthetic oligonucleotide
  Antisense strand to SEQ ID NO: 2163066
uuuguuaacaacaaagaac

SEQ ID NO: 2163068 - RNA, 19 nt, Artificial Sequence
  Description of Artificial Sequence: Synthetic oligonucleotide
  Sense strand starting at position 3947 of SEQ ID NO: 1883001
aaacaaugccggugaguca

SEQ ID NO: 2163069 - RNA, 19 nt, Artificial Sequence
  Description of Artificial Sequence: Synthetic oligonucleotide
  Antisense strand to SEQ ID NO: 2163068
ugacucaccggcauuguuu

SEQ ID NO: 2163070 - RNA, 19 nt, Artificial Sequence
  Description of Artificial Sequence: Synthetic oligonucleotide
  Sense strand starting at position 3978 of SEQ ID NO: 1883001
uuugaaucuugucagggaa

SEQ ID NO: 2163071 - RNA, 19 nt, Artificial Sequence
  Description of Artificial Sequence: Synthetic oligonucleotide
  Antisense strand to SEQ ID NO: 2163070
uucccugacaagauucaaa

SEQ ID NO: 2163072 - RNA, 19 nt, Artificial Sequence
  Description of Artificial Sequence: Synthetic oligonucleotide
  Sense strand starting at position 3981 of SEQ ID NO: 1883001
gaaucuugucagggaagca

SEQ ID NO: 2163073 - RNA, 19 nt, Artificial Sequence
  Description of Artificial Sequence: Synthetic oligonucleotide
  Antisense strand to SEQ ID NO: 2163072
ugcuucccugacaagauuc

SEQ ID NO: 2163074 - RNA, 19 nt, Artificial Sequence
  Description of Artificial Sequence: Synthetic oligonucleotide
  Sense strand starting at position 24 of SEQ ID NO: 1883002
cucgaauucuggccucaag

SEQ ID NO: 2163075 - RNA, 19 nt, Artificial Sequence
  Description of Artificial Sequence: Synthetic oligonucleotide
  Antisense strand to SEQ ID NO: 2163074
cuugaggccagaauucgag

SEQ ID NO: 2163076 - RNA, 19 nt, Artificial Sequence
  Description of Artificial Sequence: Synthetic oligonucleotide
  Sense strand starting at position 310 of SEQ ID NO: 1883002
cuaagauaaucagauagua

SEQ ID NO: 2163077 - RNA, 19 nt, Artificial Sequence
  Description of Artificial Sequence: Synthetic oligonucleotide
  Antisense strand to SEQ ID NO: 2163076
uacuaucugauuaucuuag

SEQ ID NO: 2163078 - RNA, 19 nt, Artificial Sequence
  Description of Artificial Sequence: Synthetic oligonucleotide
  Sense strand starting at position 322 of SEQ ID NO: 1883002
gauaguaauuaggugaguu

SEQ ID NO: 2163079 - RNA, 19 nt, Artificial Sequence
  Description of Artificial Sequence: Synthetic oligonucleotide
  Antisense strand to SEQ ID NO: 2163078
aacucaccuaauuacuauc

SEQ ID NO: 2163080 - RNA, 19 nt, Artificial Sequence
  Description of Artificial Sequence: Synthetic oligonucleotide
  Sense strand starting at position 323 of SEQ ID NO: 1883002
auaguaauuaggugaguua

SEQ ID NO: 2163081 - RNA, 19 nt, Artificial Sequence
  Description of Artificial Sequence: Synthetic oligonucleotide
  Antisense strand to SEQ ID NO: 2163080
uaacucaccuaauuacuau

SEQ ID NO: 2163082 - RNA, 19 nt, Artificial Sequence
  Description of Artificial Sequence: Synthetic oligonucleotide
  Sense strand starting at position 324 of SEQ ID NO: 1883002
uaguaauuaggugaguuaa

SEQ ID NO: 2163083 - RNA, 19 nt, Artificial Sequence
  Description of Artificial Sequence: Synthetic oligonucleotide
  Antisense strand to SEQ ID NO: 2163082
uuaacucaccuaauuacua

SEQ ID NO: 2163084 - RNA, 19 nt, Artificial Sequence
  Description of Artificial Sequence: Synthetic oligonucleotide
  Sense strand starting at position 326 of SEQ ID NO: 1883002
guaauuaggugaguuaaga

SEQ ID NO: 2163085 - RNA, 19 nt, Artificial Sequence
  Description of Artificial Sequence: Synthetic oligonucleotide
  Antisense strand to SEQ ID NO: 2163084
ucuuaacucaccuaauuac

SEQ ID NO: 2163086 - RNA, 19 nt, Artificial Sequence
  Description of Artificial Sequence: Synthetic oligonucleotide
  Sense strand starting at position 337 of SEQ ID NO: 1883002
aguuaagacucucaugggu

SEQ ID NO: 2163087 - RNA, 19 nt, Artificial Sequence
  Description of Artificial Sequence: Synthetic oligonucleotide
  Antisense strand to SEQ ID NO: 2163086
acccaugagagucuuaacu

SEQ ID NO: 2163088 - RNA, 19 nt, Artificial Sequence
  Description of Artificial Sequence: Synthetic oligonucleotide
  Sense strand starting at position 354 of SEQ ID NO: 1883002
guaacauggucugccauca

SEQ ID NO: 2163089 - RNA, 19 nt, Artificial Sequence
  Description of Artificial Sequence: Synthetic oligonucleotide
  Antisense strand to SEQ ID NO: 2163088
ugauggcagaccauguuac

SEQ ID NO: 2163090 - RNA, 19 nt, Artificial Sequence
  Description of Artificial Sequence: Synthetic oligonucleotide
  Sense strand starting at position 424 of SEQ ID NO: 1883002
ugugguuuguuugcugaga

SEQ ID NO: 2163091 - RNA, 19 nt, Artificial Sequence
  Description of Artificial Sequence: Synthetic oligonucleotide
  Antisense strand to SEQ ID NO: 2163090
ucucagcaaacaaaccaca

SEQ ID NO: 2163092 - RNA, 19 nt, Artificial Sequence
  Description of Artificial Sequence: Synthetic oligonucleotide
  Sense strand starting at position 773 of SEQ ID NO: 1883002
uugaauaugugagcucuca

SEQ ID NO: 2163093 - RNA, 19 nt, Artificial Sequence
  Description of Artificial Sequence: Synthetic oligonucleotide
  Antisense strand to SEQ ID NO: 2163092
ugagagcucacauauucaa

SEQ ID NO: 2163094 - RNA, 19 nt, Artificial Sequence
  Description of Artificial Sequence: Synthetic oligonucleotide
  Sense strand starting at position 905 of SEQ ID NO: 1883002
agcacuggccugggagaua

SEQ ID NO: 2163095 - RNA, 19 nt, Artificial Sequence
  Description of Artificial Sequence: Synthetic oligonucleotide
  Antisense strand to SEQ ID NO: 2163094
uaucucccaggccagugcu

SEQ ID NO: 2163096 - RNA, 19 nt, Artificial Sequence
  Description of Artificial Sequence: Synthetic oligonucleotide
  Sense strand starting at position 926 of SEQ ID NO: 1883002
acuccugaguucuacuaug

SEQ ID NO: 2163097 - RNA, 19 nt, Artificial Sequence
  Description of Artificial Sequence: Synthetic oligonucleotide
  Antisense strand to SEQ ID NO: 2163096
cauaguagaacucaggagu

SEQ ID NO: 2163098 - RNA, 19 nt, Artificial Sequence
  Description of Artificial Sequence: Synthetic oligonucleotide
  Sense strand starting at position 931 of SEQ ID NO: 1883002
ugaguucuacuaugaguaa

SEQ ID NO: 2163099 - RNA, 19 nt, Artificial Sequence
  Description of Artificial Sequence: Synthetic oligonucleotide
  Antisense strand to SEQ ID NO: 2163098
uuacucauaguagaacuca

SEQ ID NO: 2163100 - RNA, 19 nt, Artificial Sequence
  Description of Artificial Sequence: Synthetic oligonucleotide
  Sense strand starting at position 932 of SEQ ID NO: 1883002
gaguucuacuaugaguaau

SEQ ID NO: 2163101 - RNA, 19 nt, Artificial Sequence
  Description of Artificial Sequence: Synthetic oligonucleotide
  Antisense strand to SEQ ID NO: 2163100
auuacucauaguagaacuc

SEQ ID NO: 2163102 - RNA, 19 nt, Artificial Sequence
  Description of Artificial Sequence: Synthetic oligonucleotide
  Sense strand starting at position 934 of SEQ ID NO: 1883002
guucuacuaugaguaauuc

SEQ ID NO: 2163103 - RNA, 19 nt, Artificial Sequence
  Description of Artificial Sequence: Synthetic oligonucleotide
  Antisense strand to SEQ ID NO: 2163102
gaauuacucauaguagaac

SEQ ID NO: 2163104 - RNA, 19 nt, Artificial Sequence
  Description of Artificial Sequence: Synthetic oligonucleotide
  Sense strand starting at position 1064 of SEQ ID NO: 1883002
acgauucucccagggcaga

SEQ ID NO: 2163105 - RNA, 19 nt, Artificial Sequence
  Description of Artificial Sequence: Synthetic oligonucleotide
  Antisense strand to SEQ ID NO: 2163104
ucugcccugggagaaucgu

SEQ ID NO: 2163106 - RNA, 19 nt, Artificial Sequence
  Description of Artificial Sequence: Synthetic oligonucleotide
  Sense strand starting at position 1065 of SEQ ID NO: 1883002
cgauucucccagggcagau

SEQ ID NO: 2163107 - RNA, 19 nt, Artificial Sequence
  Description of Artificial Sequence: Synthetic oligonucleotide
  Antisense strand to SEQ ID NO: 2163106
aucugcccugggagaaucg

SEQ ID NO: 2163108 - RNA, 19 nt, Artificial Sequence
  Description of Artificial Sequence: Synthetic oligonucleotide
  Sense strand starting at position 1090 of SEQ ID NO: 1883002
ggcgaaucagcagacacuu

SEQ ID NO: 2163109 - RNA, 19 nt, Artificial Sequence
  Description of Artificial Sequence: Synthetic oligonucleotide
  Antisense strand to SEQ ID NO: 2163108
aagugucugcugauucgcc

SEQ ID NO: 2163110 - RNA, 19 nt, Artificial Sequence
  Description of Artificial Sequence: Synthetic oligonucleotide
  Sense strand starting at position 1103 of SEQ ID NO: 1883002
acacuuaaaugagagaaca

SEQ ID NO: 2163111 - RNA, 19 nt, Artificial Sequence
  Description of Artificial Sequence: Synthetic oligonucleotide
  Antisense strand to SEQ ID NO: 2163110
uguucucucauuuaagugu

SEQ ID NO: 2163112 - RNA, 19 nt, Artificial Sequence
  Description of Artificial Sequence: Synthetic oligonucleotide
  Sense strand starting at position 2300 of SEQ ID NO: 1883002
cuggguuagaaccgaguuu

SEQ ID NO: 2163113 - RNA, 19 nt, Artificial Sequence
  Description of Artificial Sequence: Synthetic oligonucleotide
  Antisense strand to SEQ ID NO: 2163112
aaacucgguucuaacccag

SEQ ID NO: 2163114 - RNA, 19 nt, Artificial Sequence
  Description of Artificial Sequence: Synthetic oligonucleotide
  Sense strand starting at position 2311 of SEQ ID NO: 1883002
ccgaguuucccauaaggag

SEQ ID NO: 2163115 - RNA, 19 nt, Artificial Sequence
  Description of Artificial Sequence: Synthetic oligonucleotide
  Antisense strand to SEQ ID NO: 2163114
cuccuuaugggaaacucgg

SEQ ID NO: 2163116 - RNA, 19 nt, Artificial Sequence
  Description of Artificial Sequence: Synthetic oligonucleotide
  Sense strand starting at position 2350 of SEQ ID NO: 1883002
cuuggucacugcgcugaaa

SEQ ID NO: 2163117 - RNA, 19 nt, Artificial Sequence
  Description of Artificial Sequence: Synthetic oligonucleotide
  Antisense strand to SEQ ID NO: 2163116
uuucagcgcagugaccaag

SEQ ID NO: 2163118 - RNA, 19 nt, Artificial Sequence
  Description of Artificial Sequence: Synthetic oligonucleotide
  Sense strand starting at position 2352 of SEQ ID NO: 1883002
uggucacugcgcugaaaug

SEQ ID NO: 2163119 - RNA, 19 nt, Artificial Sequence
  Description of Artificial Sequence: Synthetic oligonucleotide
  Antisense strand to SEQ ID NO: 2163118
cauuucagcgcagugacca

SEQ ID NO: 2163120 - RNA, 19 nt, Artificial Sequence
  Description of Artificial Sequence: Synthetic oligonucleotide
  Sense strand starting at position 2596 of SEQ ID NO: 1883002
aaauucgaguucucucgaa

SEQ ID NO: 2163121 - RNA, 19 nt, Artificial Sequence
  Description of Artificial Sequence: Synthetic oligonucleotide
  Antisense strand to SEQ ID NO: 2163120
uucgagagaacucgaauuu

SEQ ID NO: 2163122 - RNA, 19 nt, Artificial Sequence
  Description of Artificial Sequence: Synthetic oligonucleotide
  Sense strand starting at position 2633 of SEQ ID NO: 1883002
uuucuuugucagcacucau

SEQ ID NO: 2163123 - RNA, 19 nt, Artificial Sequence
  Description of Artificial Sequence: Synthetic oligonucleotide
  Antisense strand to SEQ ID NO: 2163122
augagugcugacaaagaaa

SEQ ID NO: 2163124 - RNA, 19 nt, Artificial Sequence
  Description of Artificial Sequence: Synthetic oligonucleotide
  Sense strand starting at position 2646 of SEQ ID NO: 1883002
acucauugucaggaguguu

SEQ ID NO: 2163125 - RNA, 19 nt, Artificial Sequence
  Description of Artificial Sequence: Synthetic oligonucleotide
  Antisense strand to SEQ ID NO: 2163124
aacacuccugacaaugagu

SEQ ID NO: 2163126 - RNA, 19 nt, Artificial Sequence
  Description of Artificial Sequence: Synthetic oligonucleotide
  Sense strand starting at position 2649 of SEQ ID NO: 1883002
cauugucaggaguguuuaa

SEQ ID NO: 2163127 - RNA, 19 nt, Artificial Sequence
  Description of Artificial Sequence: Synthetic oligonucleotide
  Antisense strand to SEQ ID NO: 2163126
uuaaacacuccugacaaug

SEQ ID NO: 2163128 - RNA, 19 nt, Artificial Sequence
  Description of Artificial Sequence: Synthetic oligonucleotide
  Sense strand starting at position 2917 of SEQ ID NO: 1883002
cuguuaaagcaguacaaau

SEQ ID NO: 2163129 - RNA, 19 nt, Artificial Sequence
  Description of Artificial Sequence: Synthetic oligonucleotide
  Antisense strand to SEQ ID NO: 2163128
auuuguacugcuuuaacag

SEQ ID NO: 2163130 - RNA, 19 nt, Artificial Sequence
  Description of Artificial Sequence: Synthetic oligonucleotide
  Sense strand starting at position 2939 of SEQ ID NO: 1883002
cuaagaaacugacuguagu

SEQ ID NO: 2163131 - RNA, 19 nt, Artificial Sequence
  Description of Artificial Sequence: Synthetic oligonucleotide
  Antisense strand to SEQ ID NO: 2163130
acuacagucaguuucuuag

SEQ ID NO: 2163132 - RNA, 19 nt, Artificial Sequence
  Description of Artificial Sequence: Synthetic oligonucleotide
  Sense strand starting at position 2940 of SEQ ID NO: 1883002
uaagaaacugacuguagua

SEQ ID NO: 2163133 - RNA, 19 nt, Artificial Sequence
  Description of Artificial Sequence: Synthetic oligonucleotide
  Antisense strand to SEQ ID NO: 2163132
uacuacagucaguuucuua

SEQ ID NO: 2163134 - RNA, 19 nt, Artificial Sequence
  Description of Artificial Sequence: Synthetic oligonucleotide
  Sense strand starting at position 3400 of SEQ ID NO: 1883002
gcguucuuggcucauagca

SEQ ID NO: 2163135 - RNA, 19 nt, Artificial Sequence
  Description of Artificial Sequence: Synthetic oligonucleotide
  Antisense strand to SEQ ID NO: 2163134
ugcuaugagccaagaacgc

SEQ ID NO: 2163136 - RNA, 19 nt, Artificial Sequence
  Description of Artificial Sequence: Synthetic oligonucleotide
  Sense strand starting at position 3532 of SEQ ID NO: 1883002
gugguuucuccauguuagg

SEQ ID NO: 2163137 - RNA, 19 nt, Artificial Sequence
  Description of Artificial Sequence: Synthetic oligonucleotide
  Antisense strand to SEQ ID NO: 2163136
ccuaacauggagaaaccac

SEQ ID NO: 2163138 - RNA, 19 nt, Artificial Sequence
  Description of Artificial Sequence: Synthetic oligonucleotide
  Sense strand starting at position 3628 of SEQ ID NO: 1883002
cgugccuggccucaguuau

SEQ ID NO: 2163139 - RNA, 19 nt, Artificial Sequence
  Description of Artificial Sequence: Synthetic oligonucleotide
  Antisense strand to SEQ ID NO: 2163138
auaacugaggccaggcacg

SEQ ID NO: 2163140 - RNA, 19 nt, Artificial Sequence
  Description of Artificial Sequence: Synthetic oligonucleotide
  Sense strand starting at position 3711 of SEQ ID NO: 1883002
cuguuauggcuuuagguac

SEQ ID NO: 2163141 - RNA, 19 nt, Artificial Sequence
  Description of Artificial Sequence: Synthetic oligonucleotide
  Antisense strand to SEQ ID NO: 2163140
guaccuaaagccauaacag

SEQ ID NO: 2163142 - RNA, 19 nt, Artificial Sequence
  Description of Artificial Sequence: Synthetic oligonucleotide
  Sense strand starting at position 3717 of SEQ ID NO: 1883002
uggcuuuagguacgauuca

SEQ ID NO: 2163143 - RNA, 19 nt, Artificial Sequence
  Description of Artificial Sequence: Synthetic oligonucleotide
  Antisense strand to SEQ ID NO: 2163142
ugaaucguaccuaaagcca

SEQ ID NO: 2163144 - RNA, 19 nt, Artificial Sequence
  Description of Artificial Sequence: Synthetic oligonucleotide
  Sense strand starting at position 3745 of SEQ ID NO: 1883002
accucugacuucucugagu

SEQ ID NO: 2163145 - RNA, 19 nt, Artificial Sequence
  Description of Artificial Sequence: Synthetic oligonucleotide
  Antisense strand to SEQ ID NO: 2163144
acucagagaagucagaggu

SEQ ID NO: 2163146 - RNA, 19 nt, Artificial Sequence
  Description of Artificial Sequence: Synthetic oligonucleotide
  Sense strand starting at position 3747 of SEQ ID NO: 1883002
cucugacuucucugaguua

SEQ ID NO: 2163147 - RNA, 19 nt, Artificial Sequence
  Description of Artificial Sequence: Synthetic oligonucleotide
  Antisense strand to SEQ ID NO: 2163146
uaacucagagaagucagag

SEQ ID NO: 2163148 - RNA, 19 nt, Artificial Sequence
  Description of Artificial Sequence: Synthetic oligonucleotide
  Sense strand starting at position 3748 of SEQ ID NO: 1883002
ucugacuucucugaguuaa

SEQ ID NO: 2163149 - RNA, 19 nt, Artificial Sequence
  Description of Artificial Sequence: Synthetic oligonucleotide
  Antisense strand to SEQ ID NO: 2163148
uuaacucagagaagucaga

SEQ ID NO: 2163150 - RNA, 19 nt, Artificial Sequence
  Description of Artificial Sequence: Synthetic oligonucleotide
  Sense strand starting at position 3750 of SEQ ID NO: 1883002
ugacuucucugaguuaaac

SEQ ID NO: 2163151 - RNA, 19 nt, Artificial Sequence
  Description of Artificial Sequence: Synthetic oligonucleotide
  Antisense strand to SEQ ID NO: 2163150
guuuaacucagagaaguca

SEQ ID NO: 2163152 - RNA, 19 nt, Artificial Sequence
  Description of Artificial Sequence: Synthetic oligonucleotide
  Sense strand starting at position 3759 of SEQ ID NO: 1883002
ugaguuaaacuuugcaucu

SEQ ID NO: 2163153 - RNA, 19 nt, Artificial Sequence
  Description of Artificial Sequence: Synthetic oligonucleotide
  Antisense strand to SEQ ID NO: 2163152
agaugcaaaguuuaacuca

SEQ ID NO: 2163154 - RNA, 19 nt, Artificial Sequence
  Description of Artificial Sequence: Synthetic oligonucleotide
  Sense strand starting at position 68 of SEQ ID NO: 1883003
auuauuauuugagagugcu

SEQ ID NO: 2163155 - RNA, 19 nt, Artificial Sequence
  Description of Artificial Sequence: Synthetic oligonucleotide
  Antisense strand to SEQ ID NO: 2163154
agcacucucaaauaauaau

SEQ ID NO: 2163156 - RNA, 19 nt, Artificial Sequence
  Description of Artificial Sequence: Synthetic oligonucleotide
  Sense strand starting at position 363 of SEQ ID NO: 1883003
uauauuguagcgcagugaa

SEQ ID NO: 2163157 - RNA, 19 nt, Artificial Sequence
  Description of Artificial Sequence: Synthetic oligonucleotide
  Antisense strand to SEQ ID NO: 2163156
uucacugcgcuacaauaua

SEQ ID NO: 2163158 - RNA, 19 nt, Artificial Sequence
  Description of Artificial Sequence: Synthetic oligonucleotide
  Sense strand starting at position 377 of SEQ ID NO: 1883003
gugaacaauuguuuccuga

SEQ ID NO: 2163159 - RNA, 19 nt, Artificial Sequence
  Description of Artificial Sequence: Synthetic oligonucleotide
  Antisense strand to SEQ ID NO: 2163158
ucaggaaacaauuguucac

SEQ ID NO: 2163160 - RNA, 19 nt, Artificial Sequence
  Description of Artificial Sequence: Synthetic oligonucleotide
  Sense strand starting at position 531 of SEQ ID NO: 1883003
caguaaaccguuuaauuga

SEQ ID NO: 2163161 - RNA, 19 nt, Artificial Sequence
  Description of Artificial Sequence: Synthetic oligonucleotide
  Antisense strand to SEQ ID NO: 2163160
ucaauuaaacgguuuacug

SEQ ID NO: 2163162 - RNA, 19 nt, Artificial Sequence
  Description of Artificial Sequence: Synthetic oligonucleotide
  Sense strand starting at position 538 of SEQ ID NO: 1883003
ccguuuaauugauaacuug

SEQ ID NO: 2163163 - RNA, 19 nt, Artificial Sequence
  Description of Artificial Sequence: Synthetic oligonucleotide
  Antisense strand to SEQ ID NO: 2163162
caaguuaucaauuaaacgg

SEQ ID NO: 2163164 - RNA, 19 nt, Artificial Sequence
  Description of Artificial Sequence: Synthetic oligonucleotide
  Sense strand starting at position 586 of SEQ ID NO: 1883003
gagaaaucauuggguauuu

SEQ ID NO: 2163165 - RNA, 19 nt, Artificial Sequence
  Description of Artificial Sequence: Synthetic oligonucleotide
  Antisense strand to SEQ ID NO: 2163164
aaauacccaaugauuucuc

SEQ ID NO: 2163166 - RNA, 19 nt, Artificial Sequence
  Description of Artificial Sequence: Synthetic oligonucleotide
  Sense strand starting at position 595 of SEQ ID NO: 1883003
uuggguauuuccuacagca

SEQ ID NO: 2163167 - RNA, 19 nt, Artificial Sequence
  Description of Artificial Sequence: Synthetic oligonucleotide
  Antisense strand to SEQ ID NO: 2163166
ugcuguaggaaauacccaa

SEQ ID NO: 2163168 - RNA, 19 nt, Artificial Sequence
  Description of Artificial Sequence: Synthetic oligonucleotide
  Sense strand starting at position 1222 of SEQ ID NO: 1883003
gagagcgaauuuguguuua

SEQ ID NO: 2163169 - RNA, 19 nt, Artificial Sequence
  Description of Artificial Sequence: Synthetic oligonucleotide
  Antisense strand to SEQ ID NO: 2163168
uaaacacaaauucgcucuc

SEQ ID NO: 2163170 - RNA, 19 nt, Artificial Sequence
  Description of Artificial Sequence: Synthetic oligonucleotide
  Sense strand starting at position 1224 of SEQ ID NO: 1883003
gagcgaauuuguguuuaca

SEQ ID NO: 2163171 - RNA, 19 nt, Artificial Sequence
  Description of Artificial Sequence: Synthetic oligonucleotide
  Antisense strand to SEQ ID NO: 2163170
uguaaacacaaauucgcuc

SEQ ID NO: 2163172 - RNA, 19 nt, Artificial Sequence
  Description of Artificial Sequence: Synthetic oligonucleotide
  Sense strand starting at position 1226 of SEQ ID NO: 1883003
gcgaauuuguguuuacaua

SEQ ID NO: 2163173 - RNA, 19 nt, Artificial Sequence
  Description of Artificial Sequence: Synthetic oligonucleotide
  Antisense strand to SEQ ID NO: 2163172
uauguaaacacaaauucgc

SEQ ID NO: 2163174 - RNA, 19 nt, Artificial Sequence
  Description of Artificial Sequence: Synthetic oligonucleotide
  Sense strand starting at position 1238 of SEQ ID NO: 1883003
uuacauaucugacauggaa

SEQ ID NO: 2163175 - RNA, 19 nt, Artificial Sequence
  Description of Artificial Sequence: Synthetic oligonucleotide
  Antisense strand to SEQ ID NO: 2163174
uuccaugucagauauguaa

SEQ ID NO: 2163176 - RNA, 19 nt, Artificial Sequence
  Description of Artificial Sequence: Synthetic oligonucleotide
  Sense strand starting at position 1251 of SEQ ID NO: 1883003
auggaaugcaacugugcua

SEQ ID NO: 2163177 - RNA, 19 nt, Artificial Sequence
  Description of Artificial Sequence: Synthetic oligonucleotide
  Antisense strand to SEQ ID NO: 2163176
uagcacaguugcauuccau

SEQ ID NO: 2163178 - RNA, 19 nt, Artificial Sequence
  Description of Artificial Sequence: Synthetic oligonucleotide
  Sense strand starting at position 1318 of SEQ ID NO: 1883003
guagaaaugcauugcauuu

SEQ ID NO: 2163179 - RNA, 19 nt, Artificial Sequence
  Description of Artificial Sequence: Synthetic oligonucleotide
  Antisense strand to SEQ ID NO: 2163178
aaaugcaaugcauuucuac

SEQ ID NO: 2163180 - RNA, 19 nt, Artificial Sequence
  Description of Artificial Sequence: Synthetic oligonucleotide
  Sense strand starting at position 1425 of SEQ ID NO: 1883003
gcgugcaucaggccuguaa

SEQ ID NO: 2163181 - RNA, 19 nt, Artificial Sequence
  Description of Artificial Sequence: Synthetic oligonucleotide
  Antisense strand to SEQ ID NO: 2163180
uuacaggccugaugcacgc

SEQ ID NO: 2163182 - RNA, 19 nt, Artificial Sequence
  Description of Artificial Sequence: Synthetic oligonucleotide
  Sense strand starting at position 1426 of SEQ ID NO: 1883003
cgugcaucaggccuguaau

SEQ ID NO: 2163183 - RNA, 19 nt, Artificial Sequence
  Description of Artificial Sequence: Synthetic oligonucleotide
  Antisense strand to SEQ ID NO: 2163182
auuacaggccugaugcacg

SEQ ID NO: 2163184 - RNA, 19 nt, Artificial Sequence
  Description of Artificial Sequence: Synthetic oligonucleotide
  Sense strand starting at position 1427 of SEQ ID NO: 1883003
gugcaucaggccuguaauu

SEQ ID NO: 2163185 - RNA, 19 nt, Artificial Sequence
  Description of Artificial Sequence: Synthetic oligonucleotide
  Antisense strand to SEQ ID NO: 2163184
aauuacaggccugaugcac

SEQ ID NO: 2163186 - RNA, 19 nt, Artificial Sequence
  Description of Artificial Sequence: Synthetic oligonucleotide
  Sense strand starting at position 1989 of SEQ ID NO: 1883003
gaaaguucccuccacgacu

SEQ ID NO: 2163187 - RNA, 19 nt, Artificial Sequence
  Description of Artificial Sequence: Synthetic oligonucleotide
  Antisense strand to SEQ ID NO: 2163186
agucguggagggaacuuuc

SEQ ID NO: 2163188 - RNA, 19 nt, Artificial Sequence
  Description of Artificial Sequence: Synthetic oligonucleotide
  Sense strand starting at position 2109 of SEQ ID NO: 1883003
cgccuauuagcuccgucaa

SEQ ID NO: 2163189 - RNA, 19 nt, Artificial Sequence
  Description of Artificial Sequence: Synthetic oligonucleotide
  Antisense strand to SEQ ID NO: 2163188
uugacggagcuaauaggcg

SEQ ID NO: 2163190 - RNA, 19 nt, Artificial Sequence
  Description of Artificial Sequence: Synthetic oligonucleotide
  Sense strand starting at position 2110 of SEQ ID NO: 1883003
gccuauuagcuccgucaaa

SEQ ID NO: 2163191 - RNA, 19 nt, Artificial Sequence
  Description of Artificial Sequence: Synthetic oligonucleotide
  Antisense strand to SEQ ID NO: 2163190
uuugacggagcuaauaggc

SEQ ID NO: 2163192 - RNA, 19 nt, Artificial Sequence
  Description of Artificial Sequence: Synthetic oligonucleotide
  Sense strand starting at position 2111 of SEQ ID NO: 1883003
ccuauuagcuccgucaaag

SEQ ID NO: 2163193 - RNA, 19 nt, Artificial Sequence
  Description of Artificial Sequence: Synthetic oligonucleotide
  Antisense strand to SEQ ID NO: 2163192
cuuugacggagcuaauagg

SEQ ID NO: 2163194 - RNA, 19 nt, Artificial Sequence
  Description of Artificial Sequence: Synthetic oligonucleotide
  Sense strand starting at position 2746 of SEQ ID NO: 1883003
cguugaagccucgucucua

SEQ ID NO: 2163195 - RNA, 19 nt, Artificial Sequence
  Description of Artificial Sequence: Synthetic oligonucleotide
  Antisense strand to SEQ ID NO: 2163194
uagagacgaggcuucaacg

SEQ ID NO: 2163196 - RNA, 19 nt, Artificial Sequence
  Description of Artificial Sequence: Synthetic oligonucleotide
  Sense strand starting at position 3147 of SEQ ID NO: 1883003
cacguauauguauagauau

SEQ ID NO: 2163197 - RNA, 19 nt, Artificial Sequence
  Description of Artificial Sequence: Synthetic oligonucleotide
  Antisense strand to SEQ ID NO: 2163196
auaucuauacauauacgug

SEQ ID NO: 2163198 - RNA, 19 nt, Artificial Sequence
  Description of Artificial Sequence: Synthetic oligonucleotide
  Sense strand starting at position 3248 of SEQ ID NO: 1883003
uuauauggcugcuuaaaca

SEQ ID NO: 2163199 - RNA, 19 nt, Artificial Sequence
  Description of Artificial Sequence: Synthetic oligonucleotide
  Antisense strand to SEQ ID NO: 2163198
uguuuaagcagccauauaa

SEQ ID NO: 2163200 - RNA, 19 nt, Artificial Sequence
  Description of Artificial Sequence: Synthetic oligonucleotide
  Sense strand starting at position 3277 of SEQ ID NO: 1883003
gagauucugcccugugaaa

SEQ ID NO: 2163201 - RNA, 19 nt, Artificial Sequence
  Description of Artificial Sequence: Synthetic oligonucleotide
  Antisense strand to SEQ ID NO: 2163200
uuucacagggcagaaucuc

SEQ ID NO: 2163202 - RNA, 19 nt, Artificial Sequence
  Description of Artificial Sequence: Synthetic oligonucleotide
  Sense strand starting at position 3445 of SEQ ID NO: 1883003
uauguucuauuugugucua

SEQ ID NO: 2163203 - RNA, 19 nt, Artificial Sequence
  Description of Artificial Sequence: Synthetic oligonucleotide
  Antisense strand to SEQ ID NO: 2163202
uagacacaaauagaacaua

SEQ ID NO: 2163204 - RNA, 19 nt, Artificial Sequence
  Description of Artificial Sequence: Synthetic oligonucleotide
  Sense strand starting at position 3446 of SEQ ID NO: 1883003
auguucuauuugugucuau

SEQ ID NO: 2163205 - RNA, 19 nt, Artificial Sequence
  Description of Artificial Sequence: Synthetic oligonucleotide
  Antisense strand to SEQ ID NO: 2163204
auagacacaaauagaacau

SEQ ID NO: 2163206 - RNA, 19 nt, Artificial Sequence
  Description of Artificial Sequence: Synthetic oligonucleotide
  Sense strand starting at position 3447 of SEQ ID NO: 1883003
uguucuauuugugucuauu

SEQ ID NO: 2163207 - RNA, 19 nt, Artificial Sequence
  Description of Artificial Sequence: Synthetic oligonucleotide
  Antisense strand to SEQ ID NO: 2163206
aauagacacaaauagaaca

SEQ ID NO: 2163208 - RNA, 19 nt, Artificial Sequence
  Description of Artificial Sequence: Synthetic oligonucleotide
  Sense strand starting at position 3489 of SEQ ID NO: 1883003
aacaauauagucuggguuu

SEQ ID NO: 2163209 - RNA, 19 nt, Artificial Sequence
  Description of Artificial Sequence: Synthetic oligonucleotide
  Antisense strand to SEQ ID NO: 2163208
aaacccagacuauauuguu

SEQ ID NO: 2163210 - RNA, 19 nt, Artificial Sequence
  Description of Artificial Sequence: Synthetic oligonucleotide
  Sense strand starting at position 3906 of SEQ ID NO: 1883003
uaucuaaaguguuugugaa

SEQ ID NO: 2163211 - RNA, 19 nt, Artificial Sequence
  Description of Artificial Sequence: Synthetic oligonucleotide
  Antisense strand to SEQ ID NO: 2163210
uucacaaacacuuuagaua

SEQ ID NO: 2163212 - RNA, 19 nt, Artificial Sequence
  Description of Artificial Sequence: Synthetic oligonucleotide
  Sense strand starting at position 3907 of SEQ ID NO: 1883003
aucuaaaguguuugugaaa

SEQ ID NO: 2163213 - RNA, 19 nt, Artificial Sequence
  Description of Artificial Sequence: Synthetic oligonucleotide
  Antisense strand to SEQ ID NO: 2163212
uuucacaaacacuuuagau

SEQ ID NO: 2163214 - RNA, 19 nt, Artificial Sequence
  Description of Artificial Sequence: Synthetic oligonucleotide
  Sense strand starting at position 3908 of SEQ ID NO: 1883003
ucuaaaguguuugugaaau

SEQ ID NO: 2163215 - RNA, 19 nt, Artificial Sequence
  Description of Artificial Sequence: Synthetic oligonucleotide
  Antisense strand to SEQ ID NO: 2163214
auuucacaaacacuuuaga

SEQ ID NO: 2163216 - RNA, 19 nt, Artificial Sequence
  Description of Artificial Sequence: Synthetic oligonucleotide
  Sense strand starting at position 3962 of SEQ ID NO: 1883003
cuagguuuauugugagcca

SEQ ID NO: 2163217 - RNA, 19 nt, Artificial Sequence
  Description of Artificial Sequence: Synthetic oligonucleotide
  Antisense strand to SEQ ID NO: 2163216
uggcucacaauaaaccuag

SEQ ID NO: 2163218 - RNA, 19 nt, Artificial Sequence
  Description of Artificial Sequence: Synthetic oligonucleotide
  Sense strand starting at position 3965 of SEQ ID NO: 1883003
gguuuauugugagccacuc

SEQ ID NO: 2163219 - RNA, 19 nt, Artificial Sequence
  Description of Artificial Sequence: Synthetic oligonucleotide
  Antisense strand to SEQ ID NO: 2163218
gaguggcucacaauaaacc

SEQ ID NO: 2163220 - RNA, 19 nt, Artificial Sequence
  Description of Artificial Sequence: Synthetic oligonucleotide
  Sense strand starting at position 1335 of SEQ ID NO: 1883004
cgcaaauuaggauaugucu

SEQ ID NO: 2163221 - RNA, 19 nt, Artificial Sequence
  Description of Artificial Sequence: Synthetic oligonucleotide
  Antisense strand to SEQ ID NO: 2163220
agacauauccuaauuugcg

SEQ ID NO: 2163222 - RNA, 19 nt, Artificial Sequence
  Description of Artificial Sequence: Synthetic oligonucleotide
  Sense strand starting at position 1342 of SEQ ID NO: 1883004
uaggauaugucuggaugcu

SEQ ID NO: 2163223 - RNA, 19 nt, Artificial Sequence
  Description of Artificial Sequence: Synthetic oligonucleotide
  Antisense strand to SEQ ID NO: 2163222
agcauccagacauauccua

SEQ ID NO: 2163224 - RNA, 19 nt, Artificial Sequence
  Description of Artificial Sequence: Synthetic oligonucleotide
  Sense strand starting at position 1343 of SEQ ID NO: 1883004
aggauaugucuggaugcuc

SEQ ID NO: 2163225 - RNA, 19 nt, Artificial Sequence
  Description of Artificial Sequence: Synthetic oligonucleotide
  Antisense strand to SEQ ID NO: 2163224
gagcauccagacauauccu

SEQ ID NO: 2163226 - RNA, 19 nt, Artificial Sequence
  Description of Artificial Sequence: Synthetic oligonucleotide
  Sense strand starting at position 3854 of SEQ ID NO: 1883004
uaaacaauauggucagguu

SEQ ID NO: 2163227 - RNA, 19 nt, Artificial Sequence
  Description of Artificial Sequence: Synthetic oligonucleotide
  Antisense strand to SEQ ID NO: 2163226
aaccugaccauauuguuua

SEQ ID NO: 2163228 - RNA, 19 nt, Artificial Sequence
  Description of Artificial Sequence: Synthetic oligonucleotide
  Sense strand starting at position 51 of SEQ ID NO: 1883006
uggugaucuggguagaguc

SEQ ID NO: 2163229 - RNA, 19 nt, Artificial Sequence
  Description of Artificial Sequence: Synthetic oligonucleotide
  Antisense strand to SEQ ID NO: 2163228
gacucuacccagaucacca

SEQ ID NO: 2163230 - RNA, 19 nt, Artificial Sequence
  Description of Artificial Sequence: Synthetic oligonucleotide
  Sense strand starting at position 234 of SEQ ID NO: 1883006
cucccaggcucucuguuaa

SEQ ID NO: 2163231 - RNA, 19 nt, Artificial Sequence
  Description of Artificial Sequence: Synthetic oligonucleotide
  Antisense strand to SEQ ID NO: 2163230
uuaacagagagccugggag

SEQ ID NO: 2163232 - RNA, 19 nt, Artificial Sequence
  Description of Artificial Sequence: Synthetic oligonucleotide
  Sense strand starting at position 253 of SEQ ID NO: 1883006
ccagcuuauguccagcaga

SEQ ID NO: 2163233 - RNA, 19 nt, Artificial Sequence
  Description of Artificial Sequence: Synthetic oligonucleotide
  Antisense strand to SEQ ID NO: 2163232
ucugcuggacauaagcugg

SEQ ID NO: 2163234 - RNA, 19 nt, Artificial Sequence
  Description of Artificial Sequence: Synthetic oligonucleotide
  Sense strand starting at position 256 of SEQ ID NO: 1883006
gcuuauguccagcagagcu

SEQ ID NO: 2163235 - RNA, 19 nt, Artificial Sequence
  Description of Artificial Sequence: Synthetic oligonucleotide
  Antisense strand to SEQ ID NO: 2163234
agcucugcuggacauaagc

SEQ ID NO: 2163236 - RNA, 19 nt, Artificial Sequence
  Description of Artificial Sequence: Synthetic oligonucleotide
  Sense strand starting at position 713 of SEQ ID NO: 1883006
gagccuguuugggucugaa

SEQ ID NO: 2163237 - RNA, 19 nt, Artificial Sequence
  Description of Artificial Sequence: Synthetic oligonucleotide
  Antisense strand to SEQ ID NO: 2163236
uucagacccaaacaggcuc

SEQ ID NO: 2163238 - RNA, 19 nt, Artificial Sequence
  Description of Artificial Sequence: Synthetic oligonucleotide
  Sense strand starting at position 768 of SEQ ID NO: 1883006
gggcaagccacgugucuau

SEQ ID NO: 2163239 - RNA, 19 nt, Artificial Sequence
  Description of Artificial Sequence: Synthetic oligonucleotide
  Antisense strand to SEQ ID NO: 2163238
auagacacguggcuugccc

SEQ ID NO: 2163240 - RNA, 19 nt, Artificial Sequence
  Description of Artificial Sequence: Synthetic oligonucleotide
  Sense strand starting at position 777 of SEQ ID NO: 1883006
acgugucuauacuuugauu

SEQ ID NO: 2163241 - RNA, 19 nt, Artificial Sequence
  Description of Artificial Sequence: Synthetic oligonucleotide
  Antisense strand to SEQ ID NO: 2163240
aaucaaaguauagacacgu

SEQ ID NO: 2163242 - RNA, 19 nt, Artificial Sequence
  Description of Artificial Sequence: Synthetic oligonucleotide
  Sense strand starting at position 779 of SEQ ID NO: 1883006
gugucuauacuuugauuuc

SEQ ID NO: 2163243 - RNA, 19 nt, Artificial Sequence
  Description of Artificial Sequence: Synthetic oligonucleotide
  Antisense strand to SEQ ID NO: 2163242
gaaaucaaaguauagacac

SEQ ID NO: 2163244 - RNA, 19 nt, Artificial Sequence
  Description of Artificial Sequence: Synthetic oligonucleotide
  Sense strand starting at position 848 of SEQ ID NO: 1883006
aagauagugccuuguacac

SEQ ID NO: 2163245 - RNA, 19 nt, Artificial Sequence
  Description of Artificial Sequence: Synthetic oligonucleotide
  Antisense strand to SEQ ID NO: 2163244
guguacaaggcacuaucuu

SEQ ID NO: 2163246 - RNA, 19 nt, Artificial Sequence
  Description of Artificial Sequence: Synthetic oligonucleotide
  Sense strand starting at position 876 of SEQ ID NO: 1883006
cuaucauccucuccugagu

SEQ ID NO: 2163247 - RNA, 19 nt, Artificial Sequence
  Description of Artificial Sequence: Synthetic oligonucleotide
  Antisense strand to SEQ ID NO: 2163246
acucaggagaggaugauag

SEQ ID NO: 2163248 - RNA, 19 nt, Artificial Sequence
  Description of Artificial Sequence: Synthetic oligonucleotide
  Sense strand starting at position 906 of SEQ ID NO: 1883006
acuacugaucccugguaau

SEQ ID NO: 2163249 - RNA, 19 nt, Artificial Sequence
  Description of Artificial Sequence: Synthetic oligonucleotide
  Antisense strand to SEQ ID NO: 2163248
auuaccagggaucaguagu

SEQ ID NO: 2163250 - RNA, 19 nt, Artificial Sequence
  Description of Artificial Sequence: Synthetic oligonucleotide
  Sense strand starting at position 967 of SEQ ID NO: 1883006
guucguuugcucucucaac

SEQ ID NO: 2163251 - RNA, 19 nt, Artificial Sequence
  Description of Artificial Sequence: Synthetic oligonucleotide
  Antisense strand to SEQ ID NO: 2163250
guugagagagcaaacgaac

SEQ ID NO: 2163252 - RNA, 19 nt, Artificial Sequence
  Description of Artificial Sequence: Synthetic oligonucleotide
  Sense strand starting at position 1074 of SEQ ID NO: 1883006
agagcuucucagucguguu

SEQ ID NO: 2163253 - RNA, 19 nt, Artificial Sequence
  Description of Artificial Sequence: Synthetic oligonucleotide
  Antisense strand to SEQ ID NO: 2163252
aacacgacugagaagcucu

SEQ ID NO: 2163254 - RNA, 19 nt, Artificial Sequence
  Description of Artificial Sequence: Synthetic oligonucleotide
  Sense strand starting at position 1076 of SEQ ID NO: 1883006
agcuucucagucguguuau

SEQ ID NO: 2163255 - RNA, 19 nt, Artificial Sequence
  Description of Artificial Sequence: Synthetic oligonucleotide
  Antisense strand to SEQ ID NO: 2163254
auaacacgacugagaagcu

SEQ ID NO: 2163256 - RNA, 19 nt, Artificial Sequence
  Description of Artificial Sequence: Synthetic oligonucleotide
  Sense strand starting at position 1090 of SEQ ID NO: 1883006
guuauuuacucaggccuga

SEQ ID NO: 2163257 - RNA, 19 nt, Artificial Sequence
  Description of Artificial Sequence: Synthetic oligonucleotide
  Antisense strand to SEQ ID NO: 2163256
ucaggccugaguaaauaac

SEQ ID NO: 2163258 - RNA, 19 nt, Artificial Sequence
  Description of Artificial Sequence: Synthetic oligonucleotide
  Sense strand starting at position 1499 of SEQ ID NO: 1883006
ccggccuacugcuuauuaa

SEQ ID NO: 2163259 - RNA, 19 nt, Artificial Sequence
  Description of Artificial Sequence: Synthetic oligonucleotide
  Antisense strand to SEQ ID NO: 2163258
uuaauaagcaguaggccgg

SEQ ID NO: 2163260 - RNA, 19 nt, Artificial Sequence
  Description of Artificial Sequence: Synthetic oligonucleotide
  Sense strand starting at position 1500 of SEQ ID NO: 1883006
cggccuacugcuuauuaau

SEQ ID NO: 2163261 - RNA, 19 nt, Artificial Sequence
  Description of Artificial Sequence: Synthetic oligonucleotide
  Antisense strand to SEQ ID NO: 2163260
auuaauaagcaguaggccg

SEQ ID NO: 2163262 - RNA, 19 nt, Artificial Sequence
  Description of Artificial Sequence: Synthetic oligonucleotide
  Sense strand starting at position 1538 of SEQ ID NO: 1883006
ugauucucgcagugauccu

SEQ ID NO: 2163263 - RNA, 19 nt, Artificial Sequence
  Description of Artificial Sequence: Synthetic oligonucleotide
  Antisense strand to SEQ ID NO: 2163262
aggaucacugcgagaauca

SEQ ID NO: 2163264 - RNA, 19 nt, Artificial Sequence
  Description of Artificial Sequence: Synthetic oligonucleotide
  Sense strand starting at position 2181 of SEQ ID NO: 1883006
uuaaauuaaugucucggaa

SEQ ID NO: 2163265 - RNA, 19 nt, Artificial Sequence
  Description of Artificial Sequence: Synthetic oligonucleotide
  Antisense strand to SEQ ID NO: 2163264
uuccgagacauuaauuuaa

SEQ ID NO: 2163266 - RNA, 19 nt, Artificial Sequence
  Description of Artificial Sequence: Synthetic oligonucleotide
  Sense strand starting at position 2184 of SEQ ID NO: 1883006
aauuaaugucucggaaagc

SEQ ID NO: 2163267 - RNA, 19 nt, Artificial Sequence
  Description of Artificial Sequence: Synthetic oligonucleotide
  Antisense strand to SEQ ID NO: 2163266
gcuuuccgagacauuaauu

SEQ ID NO: 2163268 - RNA, 19 nt, Artificial Sequence
  Description of Artificial Sequence: Synthetic oligonucleotide
  Sense strand starting at position 2537 of SEQ ID NO: 1883006
gucgaauggcauuaggaca

SEQ ID NO: 2163269 - RNA, 19 nt, Artificial Sequence
  Description of Artificial Sequence: Synthetic oligonucleotide
  Antisense strand to SEQ ID NO: 2163268
uguccuaaugccauucgac

SEQ ID NO: 2163270 - RNA, 19 nt, Artificial Sequence
  Description of Artificial Sequence: Synthetic oligonucleotide
  Sense strand starting at position 2779 of SEQ ID NO: 1883006
aaauuagagucagaagaua

SEQ ID NO: 2163271 - RNA, 19 nt, Artificial Sequence
  Description of Artificial Sequence: Synthetic oligonucleotide
  Antisense strand to SEQ ID NO: 2163270
uaucuucugacucuaauuu

SEQ ID NO: 2163272 - RNA, 19 nt, Artificial Sequence
  Description of Artificial Sequence: Synthetic oligonucleotide
  Sense strand starting at position 2792 of SEQ ID NO: 1883006
aagauaaacugggauaaag

SEQ ID NO: 2163273 - RNA, 19 nt, Artificial Sequence
  Description of Artificial Sequence: Synthetic oligonucleotide
  Antisense strand to SEQ ID NO: 2163272
cuuuaucccaguuuaucuu

SEQ ID NO: 2163274 - RNA, 19 nt, Artificial Sequence
  Description of Artificial Sequence: Synthetic oligonucleotide
  Sense strand starting at position 2801 of SEQ ID NO: 1883006
ugggauaaagugugagaua

SEQ ID NO: 2163275 - RNA, 19 nt, Artificial Sequence
  Description of Artificial Sequence: Synthetic oligonucleotide
  Antisense strand to SEQ ID NO: 2163274
uaucucacacuuuauccca

SEQ ID NO: 2163276 - RNA, 19 nt, Artificial Sequence
  Description of Artificial Sequence: Synthetic oligonucleotide
  Sense strand starting at position 2802 of SEQ ID NO: 1883006
gggauaaagugugagauau

SEQ ID NO: 2163277 - RNA, 19 nt, Artificial Sequence
  Description of Artificial Sequence: Synthetic oligonucleotide
  Antisense strand to SEQ ID NO: 2163276
auaucucacacuuuauccc

SEQ ID NO: 2163278 - RNA, 19 nt, Artificial Sequence
  Description of Artificial Sequence: Synthetic oligonucleotide
  Sense strand starting at position 2804 of SEQ ID NO: 1883006
gauaaagugugagauauuu

SEQ ID NO: 2163279 - RNA, 19 nt, Artificial Sequence
  Description of Artificial Sequence: Synthetic oligonucleotide
  Antisense strand to SEQ ID NO: 2163278
aaauaucucacacuuuauc

SEQ ID NO: 2163280 - RNA, 19 nt, Artificial Sequence
  Description of Artificial Sequence: Synthetic oligonucleotide
  Sense strand starting at position 2912 of SEQ ID NO: 1883006
cguagaugauucuuagaag

SEQ ID NO: 2163281 - RNA, 19 nt, Artificial Sequence
  Description of Artificial Sequence: Synthetic oligonucleotide
  Antisense strand to SEQ ID NO: 2163280
cuucuaagaaucaucuacg

SEQ ID NO: 2163282 - RNA, 19 nt, Artificial Sequence
  Description of Artificial Sequence: Synthetic oligonucleotide
  Sense strand starting at position 2913 of SEQ ID NO: 1883006
guagaugauucuuagaaga

SEQ ID NO: 2163283 - RNA, 19 nt, Artificial Sequence
  Description of Artificial Sequence: Synthetic oligonucleotide
  Antisense strand to SEQ ID NO: 2163282
ucuucuaagaaucaucuac

SEQ ID NO: 2163284 - RNA, 19 nt, Artificial Sequence
  Description of Artificial Sequence: Synthetic oligonucleotide
  Sense strand starting at position 2915 of SEQ ID NO: 1883006
agaugauucuuagaagaaa

SEQ ID NO: 2163285 - RNA, 19 nt, Artificial Sequence
  Description of Artificial Sequence: Synthetic oligonucleotide
  Antisense strand to SEQ ID NO: 2163284
uuucuucuaagaaucaucu

SEQ ID NO: 2163286 - RNA, 19 nt, Artificial Sequence
  Description of Artificial Sequence: Synthetic oligonucleotide
  Sense strand starting at position 2968 of SEQ ID NO: 1883006
ccuguccagucguuacaga

SEQ ID NO: 2163287 - RNA, 19 nt, Artificial Sequence
  Description of Artificial Sequence: Synthetic oligonucleotide
  Antisense strand to SEQ ID NO: 2163286
ucuguaacgacuggacagg

SEQ ID NO: 2163288 - RNA, 19 nt, Artificial Sequence
  Description of Artificial Sequence: Synthetic oligonucleotide
  Sense strand starting at position 2969 of SEQ ID NO: 1883006
cuguccagucguuacagaa

SEQ ID NO: 2163289 - RNA, 19 nt, Artificial Sequence
  Description of Artificial Sequence: Synthetic oligonucleotide
  Antisense strand to SEQ ID NO: 2163288
uucuguaacgacuggacag

SEQ ID NO: 2163290 - RNA, 19 nt, Artificial Sequence
  Description of Artificial Sequence: Synthetic oligonucleotide
  Sense strand starting at position 2976 of SEQ ID NO: 1883006
gucguuacagaauaccuaa

SEQ ID NO: 2163291 - RNA, 19 nt, Artificial Sequence
  Description of Artificial Sequence: Synthetic oligonucleotide
  Antisense strand to SEQ ID NO: 2163290
uuagguauucuguaacgac

SEQ ID NO: 2163292 - RNA, 19 nt, Artificial Sequence
  Description of Artificial Sequence: Synthetic oligonucleotide
  Sense strand starting at position 3051 of SEQ ID NO: 1883006
guugaaggugcgagguaau

SEQ ID NO: 2163293 - RNA, 19 nt, Artificial Sequence
  Description of Artificial Sequence: Synthetic oligonucleotide
  Antisense strand to SEQ ID NO: 2163292
auuaccucgcaccuucaac

SEQ ID NO: 2163294 - RNA, 19 nt, Artificial Sequence
  Description of Artificial Sequence: Synthetic oligonucleotide
  Sense strand starting at position 3058 of SEQ ID NO: 1883006
gugcgagguaauuggcaau

SEQ ID NO: 2163295 - RNA, 19 nt, Artificial Sequence
  Description of Artificial Sequence: Synthetic oligonucleotide
  Antisense strand to SEQ ID NO: 2163294
auugccaauuaccucgcac

SEQ ID NO: 2163296 - RNA, 19 nt, Artificial Sequence
  Description of Artificial Sequence: Synthetic oligonucleotide
  Sense strand starting at position 3205 of SEQ ID NO: 1883006
gaaaucugaugucuugaua

SEQ ID NO: 2163297 - RNA, 19 nt, Artificial Sequence
  Description of Artificial Sequence: Synthetic oligonucleotide
  Antisense strand to SEQ ID NO: 2163296
uaucaagacaucagauuuc

SEQ ID NO: 2163298 - RNA, 19 nt, Artificial Sequence
  Description of Artificial Sequence: Synthetic oligonucleotide
  Sense strand starting at position 3678 of SEQ ID NO: 1883006
agggucuucgucuguggau

SEQ ID NO: 2163299 - RNA, 19 nt, Artificial Sequence
  Description of Artificial Sequence: Synthetic oligonucleotide
  Antisense strand to SEQ ID NO: 2163298
auccacagacgaagacccu

SEQ ID NO: 2163300 - RNA, 19 nt, Artificial Sequence
  Description of Artificial Sequence: Synthetic oligonucleotide
  Sense strand starting at position 3717 of SEQ ID NO: 1883006
ggaggaggcucugcccaaa

SEQ ID NO: 2163301 - RNA, 19 nt, Artificial Sequence
  Description of Artificial Sequence: Synthetic oligonucleotide
  Antisense strand to SEQ ID NO: 2163300
uuugggcagagccuccucc

SEQ ID NO: 2163302 - RNA, 19 nt, Artificial Sequence
  Description of Artificial Sequence: Synthetic oligonucleotide
  Sense strand starting at position 3720 of SEQ ID NO: 1883006
ggaggcucugcccaaauau

SEQ ID NO: 2163303 - RNA, 19 nt, Artificial Sequence
  Description of Artificial Sequence: Synthetic oligonucleotide
  Antisense strand to SEQ ID NO: 2163302
auauuugggcagagccucc

SEQ ID NO: 2163304 - RNA, 19 nt, Artificial Sequence
  Description of Artificial Sequence: Synthetic oligonucleotide
  Sense strand starting at position 3912 of SEQ ID NO: 1883006
auguuugugcaaggaaucu

SEQ ID NO: 2163305 - RNA, 19 nt, Artificial Sequence
  Description of Artificial Sequence: Synthetic oligonucleotide
  Antisense strand to SEQ ID NO: 2163304
agauuccuugcacaaacau

SEQ ID NO: 2163306 - RNA, 19 nt, Artificial Sequence
  Description of Artificial Sequence: Synthetic oligonucleotide
  Sense strand starting at position 3946 of SEQ ID NO: 1883006
ggaagaaacugccuagcuu

SEQ ID NO: 2163307 - RNA, 19 nt, Artificial Sequence
  Description of Artificial Sequence: Synthetic oligonucleotide
  Antisense strand to SEQ ID NO: 2163306
aagcuaggcaguuucuucc

SEQ ID NO: 2163308 - RNA, 19 nt, Artificial Sequence
  Description of Artificial Sequence: Synthetic oligonucleotide
  Sense strand starting at position 676 of SEQ ID NO: 1883007
accucuauccaguagauuc

SEQ ID NO: 2163309 - RNA, 19 nt, Artificial Sequence
  Description of Artificial Sequence: Synthetic oligonucleotide
  Antisense strand to SEQ ID NO: 2163308
gaaucuacuggauagaggu

SEQ ID NO: 2163310 - RNA, 19 nt, Artificial Sequence
  Description of Artificial Sequence: Synthetic oligonucleotide
  Sense strand starting at position 683 of SEQ ID NO: 1883007
uccaguagauuccagucau

SEQ ID NO: 2163311 - RNA, 19 nt, Artificial Sequence
  Description of Artificial Sequence: Synthetic oligonucleotide
  Antisense strand to SEQ ID NO: 2163310
augacuggaaucuacugga

SEQ ID NO: 2163312 - RNA, 19 nt, Artificial Sequence
  Description of Artificial Sequence: Synthetic oligonucleotide
  Sense strand starting at position 1434 of SEQ ID NO: 1883007
gaaacagggcuccgacaua

SEQ ID NO: 2163313 - RNA, 19 nt, Artificial Sequence
  Description of Artificial Sequence: Synthetic oligonucleotide
  Antisense strand to SEQ ID NO: 2163312
uaugucggagcccuguuuc

SEQ ID NO: 2163314 - RNA, 19 nt, Artificial Sequence
  Description of Artificial Sequence: Synthetic oligonucleotide
  Sense strand starting at position 2442 of SEQ ID NO: 1883007
agaagaucucguggcuaga

SEQ ID NO: 2163315 - RNA, 19 nt, Artificial Sequence
  Description of Artificial Sequence: Synthetic oligonucleotide
  Antisense strand to SEQ ID NO: 2163314
ucuagccacgagaucuucu

SEQ ID NO: 2163316 - RNA, 19 nt, Artificial Sequence
  Description of Artificial Sequence: Synthetic oligonucleotide
  Sense strand starting at position 2453 of SEQ ID NO: 1883007
uggcuagaggcagaucuau

SEQ ID NO: 2163317 - RNA, 19 nt, Artificial Sequence
  Description of Artificial Sequence: Synthetic oligonucleotide
  Antisense strand to SEQ ID NO: 2163316
auagaucugccucuagcca

SEQ ID NO: 2163318 - RNA, 19 nt, Artificial Sequence
  Description of Artificial Sequence: Synthetic oligonucleotide
  Sense strand starting at position 3176 of SEQ ID NO: 1883007
gacaaagagugcgagcuuu

SEQ ID NO: 2163319 - RNA, 19 nt, Artificial Sequence
  Description of Artificial Sequence: Synthetic oligonucleotide
  Antisense strand to SEQ ID NO: 2163318
aaagcucgcacucuuuguc

SEQ ID NO: 2163320 - RNA, 19 nt, Artificial Sequence
  Description of Artificial Sequence: Synthetic oligonucleotide
  Sense strand starting at position 432 of SEQ ID NO: 1883008
gucuguuaucccguaaguu

SEQ ID NO: 2163321 - RNA, 19 nt, Artificial Sequence
  Description of Artificial Sequence: Synthetic oligonucleotide
  Antisense strand to SEQ ID NO: 2163320
aacuuacgggauaacagac

SEQ ID NO: 2163322 - RNA, 19 nt, Artificial Sequence
  Description of Artificial Sequence: Synthetic oligonucleotide
  Sense strand starting at position 540 of SEQ ID NO: 1883008
gagaucaggugauugaucu

SEQ ID NO: 2163323 - RNA, 19 nt, Artificial Sequence
  Description of Artificial Sequence: Synthetic oligonucleotide
  Antisense strand to SEQ ID NO: 2163322
agaucaaucaccugaucuc

SEQ ID NO: 2163324 - RNA, 19 nt, Artificial Sequence
  Description of Artificial Sequence: Synthetic oligonucleotide
  Sense strand starting at position 544 of SEQ ID NO: 1883008
ucaggugauugaucuguca

SEQ ID NO: 2163325 - RNA, 19 nt, Artificial Sequence
  Description of Artificial Sequence: Synthetic oligonucleotide
  Antisense strand to SEQ ID NO: 2163324
ugacagaucaaucaccuga

SEQ ID NO: 2163326 - RNA, 19 nt, Artificial Sequence
  Description of Artificial Sequence: Synthetic oligonucleotide
  Sense strand starting at position 546 of SEQ ID NO: 1883008
aggugauugaucugucaga

SEQ ID NO: 2163327 - RNA, 19 nt, Artificial Sequence
  Description of Artificial Sequence: Synthetic oligonucleotide
  Antisense strand to SEQ ID NO: 2163326
ucugacagaucaaucaccu

SEQ ID NO: 2163328 - RNA, 19 nt, Artificial Sequence
  Description of Artificial Sequence: Synthetic oligonucleotide
  Sense strand starting at position 547 of SEQ ID NO: 1883008
ggugauugaucugucagac

SEQ ID NO: 2163329 - RNA, 19 nt, Artificial Sequence
  Description of Artificial Sequence: Synthetic oligonucleotide
  Antisense strand to SEQ ID NO: 2163328
gucugacagaucaaucacc

SEQ ID NO: 2163330 - RNA, 19 nt, Artificial Sequence
  Description of Artificial Sequence: Synthetic oligonucleotide
  Sense strand starting at position 569 of SEQ ID NO: 1883008
acagaaaugugauuaucuu

SEQ ID NO: 2163331 - RNA, 19 nt, Artificial Sequence
  Description of Artificial Sequence: Synthetic oligonucleotide
  Antisense strand to SEQ ID NO: 2163330
aagauaaucacauuucugu

SEQ ID NO: 2163332 - RNA, 19 nt, Artificial Sequence
  Description of Artificial Sequence: Synthetic oligonucleotide
  Sense strand starting at position 575 of SEQ ID NO: 1883008
augugauuaucuuuaguuc

SEQ ID NO: 2163333 - RNA, 19 nt, Artificial Sequence
  Description of Artificial Sequence: Synthetic oligonucleotide
  Antisense strand to SEQ ID NO: 2163332
gaacuaaagauaaucacau

SEQ ID NO: 2163334 - RNA, 19 nt, Artificial Sequence
  Description of Artificial Sequence: Synthetic oligonucleotide
  Sense strand starting at position 645 of SEQ ID NO: 1883008
acacacgaauuugauaauu

SEQ ID NO: 2163335 - RNA, 19 nt, Artificial Sequence
  Description of Artificial Sequence: Synthetic oligonucleotide
  Antisense strand to SEQ ID NO: 2163334
aauuaucaaauucgugugu

SEQ ID NO: 2163336 - RNA, 19 nt, Artificial Sequence
  Description of Artificial Sequence: Synthetic oligonucleotide
  Sense strand starting at position 647 of SEQ ID NO: 1883008
acacgaauuugauaauugu

SEQ ID NO: 2163337 - RNA, 19 nt, Artificial Sequence
  Description of Artificial Sequence: Synthetic oligonucleotide
  Antisense strand to SEQ ID NO: 2163336
acaauuaucaaauucgugu

SEQ ID NO: 2163338 - RNA, 19 nt, Artificial Sequence
  Description of Artificial Sequence: Synthetic oligonucleotide
  Sense strand starting at position 653 of SEQ ID NO: 1883008
auuugauaauuguucgcua

SEQ ID NO: 2163339 - RNA, 19 nt, Artificial Sequence
  Description of Artificial Sequence: Synthetic oligonucleotide
  Antisense strand to SEQ ID NO: 2163338
uagcgaacaauuaucaaau

SEQ ID NO: 2163340 - RNA, 19 nt, Artificial Sequence
  Description of Artificial Sequence: Synthetic oligonucleotide
  Sense strand starting at position 657 of SEQ ID NO: 1883008
gauaauuguucgcuaaaua

SEQ ID NO: 2163341 - RNA, 19 nt, Artificial Sequence
  Description of Artificial Sequence: Synthetic oligonucleotide
  Antisense strand to SEQ ID NO: 2163340
uauuuagcgaacaauuauc

SEQ ID NO: 2163342 - RNA, 19 nt, Artificial Sequence
  Description of Artificial Sequence: Synthetic oligonucleotide
  Sense strand starting at position 803 of SEQ ID NO: 1883008
aaagcauucugaguuauag

SEQ ID NO: 2163343 - RNA, 19 nt, Artificial Sequence
  Description of Artificial Sequence: Synthetic oligonucleotide
  Antisense strand to SEQ ID NO: 2163342
cuauaacucagaaugcuuu

SEQ ID NO: 2163344 - RNA, 19 nt, Artificial Sequence
  Description of Artificial Sequence: Synthetic oligonucleotide
  Sense strand starting at position 864 of SEQ ID NO: 1883008
gcuguagggauccgaaauc

SEQ ID NO: 2163345 - RNA, 19 nt, Artificial Sequence
  Description of Artificial Sequence: Synthetic oligonucleotide
  Antisense strand to SEQ ID NO: 2163344
gauuucggaucccuacagc

SEQ ID NO: 2163346 - RNA, 19 nt, Artificial Sequence
  Description of Artificial Sequence: Synthetic oligonucleotide
  Sense strand starting at position 874 of SEQ ID NO: 1883008
uccgaaaucuacuuuaugu

SEQ ID NO: 2163347 - RNA, 19 nt, Artificial Sequence
  Description of Artificial Sequence: Synthetic oligonucleotide
  Antisense strand to SEQ ID NO: 2163346
acauaaaguagauuucgga

SEQ ID NO: 2163348 - RNA, 19 nt, Artificial Sequence
  Description of Artificial Sequence: Synthetic oligonucleotide
  Sense strand starting at position 876 of SEQ ID NO: 1883008
cgaaaucuacuuuauguaa

SEQ ID NO: 2163349 - RNA, 19 nt, Artificial Sequence
  Description of Artificial Sequence: Synthetic oligonucleotide
  Antisense strand to SEQ ID NO: 2163348
uuacauaaaguagauuucg

SEQ ID NO: 2163350 - RNA, 19 nt, Artificial Sequence
  Description of Artificial Sequence: Synthetic oligonucleotide
  Sense strand starting at position 1258 of SEQ ID NO: 1883008
ucuguaacgucacuaacaa

SEQ ID NO: 2163351 - RNA, 19 nt, Artificial Sequence
  Description of Artificial Sequence: Synthetic oligonucleotide
  Antisense strand to SEQ ID NO: 2163350
uuguuagugacguuacaga

SEQ ID NO: 2163352 - RNA, 19 nt, Artificial Sequence
  Description of Artificial Sequence: Synthetic oligonucleotide
  Sense strand starting at position 1259 of SEQ ID NO: 1883008
cuguaacgucacuaacaaa

SEQ ID NO: 2163353 - RNA, 19 nt, Artificial Sequence
  Description of Artificial Sequence: Synthetic oligonucleotide
  Antisense strand to SEQ ID NO: 2163352
uuuguuagugacguuacag

SEQ ID NO: 2163354 - RNA, 19 nt, Artificial Sequence
  Description of Artificial Sequence: Synthetic oligonucleotide
  Sense strand starting at position 1401 of SEQ ID NO: 1883008
aucguacuccaacauguuu

SEQ ID NO: 2163355 - RNA, 19 nt, Artificial Sequence
  Description of Artificial Sequence: Synthetic oligonucleotide
  Antisense strand to SEQ ID NO: 2163354
aaacauguuggaguacgau

SEQ ID NO: 2163356 - RNA, 19 nt, Artificial Sequence
  Description of Artificial Sequence: Synthetic oligonucleotide
  Sense strand starting at position 1478 of SEQ ID NO: 1883008
gauuaacuucugcaucgua

SEQ ID NO: 2163357 - RNA, 19 nt, Artificial Sequence
  Description of Artificial Sequence: Synthetic oligonucleotide
  Antisense strand to SEQ ID NO: 2163356
uacgaugcagaaguuaauc

SEQ ID NO: 2163358 - RNA, 19 nt, Artificial Sequence
  Description of Artificial Sequence: Synthetic oligonucleotide
  Sense strand starting at position 1534 of SEQ ID NO: 1883008
cucacuagugucgauaucu

SEQ ID NO: 2163359 - RNA, 19 nt, Artificial Sequence
  Description of Artificial Sequence: Synthetic oligonucleotide
  Antisense strand to SEQ ID NO: 2163358
agauaucgacacuagugag

SEQ ID NO: 2163360 - RNA, 19 nt, Artificial Sequence
  Description of Artificial Sequence: Synthetic oligonucleotide
  Sense strand starting at position 1539 of SEQ ID NO: 1883008
uagugucgauaucuaauuu

SEQ ID NO: 2163361 - RNA, 19 nt, Artificial Sequence
  Description of Artificial Sequence: Synthetic oligonucleotide
  Antisense strand to SEQ ID NO: 2163360
aaauuagauaucgacacua

SEQ ID NO: 2163362 - RNA, 19 nt, Artificial Sequence
  Description of Artificial Sequence: Synthetic oligonucleotide
  Sense strand starting at position 1665 of SEQ ID NO: 1883008
cacagcaggcucgagauaa

SEQ ID NO: 2163363 - RNA, 19 nt, Artificial Sequence
  Description of Artificial Sequence: Synthetic oligonucleotide
  Antisense strand to SEQ ID NO: 2163362
uuaucucgagccugcugug

SEQ ID NO: 2163364 - RNA, 19 nt, Artificial Sequence
  Description of Artificial Sequence: Synthetic oligonucleotide
  Sense strand starting at position 1700 of SEQ ID NO: 1883008
guuucucugcgauaauuac

SEQ ID NO: 2163365 - RNA, 19 nt, Artificial Sequence
  Description of Artificial Sequence: Synthetic oligonucleotide
  Antisense strand to SEQ ID NO: 2163364
guaauuaucgcagagaaac

SEQ ID NO: 2163366 - RNA, 19 nt, Artificial Sequence
  Description of Artificial Sequence: Synthetic oligonucleotide
  Sense strand starting at position 2101 of SEQ ID NO: 1883008
gugacuuuccagcuuucgu

SEQ ID NO: 2163367 - RNA, 19 nt, Artificial Sequence
  Description of Artificial Sequence: Synthetic oligonucleotide
  Antisense strand to SEQ ID NO: 2163366
acgaaagcuggaaagucac

SEQ ID NO: 2163368 - RNA, 19 nt, Artificial Sequence
  Description of Artificial Sequence: Synthetic oligonucleotide
  Sense strand starting at position 2372 of SEQ ID NO: 1883008
ugauuaaccuugucauugu

SEQ ID NO: 2163369 - RNA, 19 nt, Artificial Sequence
  Description of Artificial Sequence: Synthetic oligonucleotide
  Antisense strand to SEQ ID NO: 2163368
acaaugacaagguuaauca

SEQ ID NO: 2163370 - RNA, 19 nt, Artificial Sequence
  Description of Artificial Sequence: Synthetic oligonucleotide
  Sense strand starting at position 3067 of SEQ ID NO: 1883008
aguuauaucccacgcagaa

SEQ ID NO: 2163371 - RNA, 19 nt, Artificial Sequence
  Description of Artificial Sequence: Synthetic oligonucleotide
  Antisense strand to SEQ ID NO: 2163370
uucugcgugggauauaacu

SEQ ID NO: 2163372 - RNA, 19 nt, Artificial Sequence
  Description of Artificial Sequence: Synthetic oligonucleotide
  Sense strand starting at position 3114 of SEQ ID NO: 1883008
agcuguccauuugaggaaa

SEQ ID NO: 2163373 - RNA, 19 nt, Artificial Sequence
  Description of Artificial Sequence: Synthetic oligonucleotide
  Antisense strand to SEQ ID NO: 2163372
uuuccucaaauggacagcu

SEQ ID NO: 2163374 - RNA, 19 nt, Artificial Sequence
  Description of Artificial Sequence: Synthetic oligonucleotide
  Sense strand starting at position 3175 of SEQ ID NO: 1883008
cugcauccggcugagaaau

SEQ ID NO: 2163375 - RNA, 19 nt, Artificial Sequence
  Description of Artificial Sequence: Synthetic oligonucleotide
  Antisense strand to SEQ ID NO: 2163374
auuucucagccggaugcag

SEQ ID NO: 2163376 - RNA, 19 nt, Artificial Sequence
  Description of Artificial Sequence: Synthetic oligonucleotide
  Sense strand starting at position 3181 of SEQ ID NO: 1883008
ccggcugagaaauacuauu

SEQ ID NO: 2163377 - RNA, 19 nt, Artificial Sequence
  Description of Artificial Sequence: Synthetic oligonucleotide
  Antisense strand to SEQ ID NO: 2163376
aauaguauuucucagccgg

SEQ ID NO: 2163378 - RNA, 19 nt, Artificial Sequence
  Description of Artificial Sequence: Synthetic oligonucleotide
  Sense strand starting at position 3229 of SEQ ID NO: 1883008
ggcuuuggacccugaccaa

SEQ ID NO: 2163379 - RNA, 19 nt, Artificial Sequence
  Description of Artificial Sequence: Synthetic oligonucleotide
  Antisense strand to SEQ ID NO: 2163378
uuggucaggguccaaagcc

SEQ ID NO: 2163380 - RNA, 19 nt, Artificial Sequence
  Description of Artificial Sequence: Synthetic oligonucleotide
  Sense strand starting at position 3317 of SEQ ID NO: 1883008
auucuuucccgucaccauu

SEQ ID NO: 2163381 - RNA, 19 nt, Artificial Sequence
  Description of Artificial Sequence: Synthetic oligonucleotide
  Antisense strand to SEQ ID NO: 2163380
aauggugacgggaaagaau

SEQ ID NO: 2163382 - RNA, 19 nt, Artificial Sequence
  Description of Artificial Sequence: Synthetic oligonucleotide
  Sense strand starting at position 3553 of SEQ ID NO: 1883008
cuccucuguggguacuaaa

SEQ ID NO: 2163383 - RNA, 19 nt, Artificial Sequence
  Description of Artificial Sequence: Synthetic oligonucleotide
  Antisense strand to SEQ ID NO: 2163382
uuuaguacccacagaggag

SEQ ID NO: 2163384 - RNA, 19 nt, Artificial Sequence
  Description of Artificial Sequence: Synthetic oligonucleotide
  Sense strand starting at position 3603 of SEQ ID NO: 1883008
cuguuuaucuuacuucuga

SEQ ID NO: 2163385 - RNA, 19 nt, Artificial Sequence
  Description of Artificial Sequence: Synthetic oligonucleotide
  Antisense strand to SEQ ID NO: 2163384
ucagaaguaagauaaacag

SEQ ID NO: 2163386 - RNA, 19 nt, Artificial Sequence
  Description of Artificial Sequence: Synthetic oligonucleotide
  Sense strand starting at position 3692 of SEQ ID NO: 1883008
ugaagaacucuuuauugcu

SEQ ID NO: 2163387 - RNA, 19 nt, Artificial Sequence
  Description of Artificial Sequence: Synthetic oligonucleotide
  Antisense strand to SEQ ID NO: 2163386
agcaauaaagaguucuuca

SEQ ID NO: 2163388 - RNA, 19 nt, Artificial Sequence
  Description of Artificial Sequence: Synthetic oligonucleotide
  Sense strand starting at position 3844 of SEQ ID NO: 1883008
ccauguucuguagaaugug

SEQ ID NO: 2163389 - RNA, 19 nt, Artificial Sequence
  Description of Artificial Sequence: Synthetic oligonucleotide
  Antisense strand to SEQ ID NO: 2163388
cacauucuacagaacaugg

SEQ ID NO: 2163390 - RNA, 19 nt, Artificial Sequence
  Description of Artificial Sequence: Synthetic oligonucleotide
  Sense strand starting at position 3849 of SEQ ID NO: 1883008
uucuguagaaugugaugaa

SEQ ID NO: 2163391 - RNA, 19 nt, Artificial Sequence
  Description of Artificial Sequence: Synthetic oligonucleotide
  Antisense strand to SEQ ID NO: 2163390
uucaucacauucuacagaa

SEQ ID NO: 2163392 - RNA, 19 nt, Artificial Sequence
  Description of Artificial Sequence: Synthetic oligonucleotide
  Sense strand starting at position 3858 of SEQ ID NO: 1883008
augugaugaagaugucuaa

SEQ ID NO: 2163393 - RNA, 19 nt, Artificial Sequence
  Description of Artificial Sequence: Synthetic oligonucleotide
  Antisense strand to SEQ ID NO: 2163392
uuagacaucuucaucacau

SEQ ID NO: 2163394 - RNA, 19 nt, Artificial Sequence
  Description of Artificial Sequence: Synthetic oligonucleotide
  Sense strand starting at position 3871 of SEQ ID NO: 1883008
gucuaauagagguauacgu

SEQ ID NO: 2163395 - RNA, 19 nt, Artificial Sequence
  Description of Artificial Sequence: Synthetic oligonucleotide
  Antisense strand to SEQ ID NO: 2163394
acguauaccucuauuagac

SEQ ID NO: 2163396 - RNA, 19 nt, Artificial Sequence
  Description of Artificial Sequence: Synthetic oligonucleotide
  Sense strand starting at position 3873 of SEQ ID NO: 1883008
cuaauagagguauacguaa

SEQ ID NO: 2163397 - RNA, 19 nt, Artificial Sequence
  Description of Artificial Sequence: Synthetic oligonucleotide
  Antisense strand to SEQ ID NO: 2163396
uuacguauaccucuauuag

SEQ ID NO: 2163398 - RNA, 19 nt, Artificial Sequence
  Description of Artificial Sequence: Synthetic oligonucleotide
  Sense strand starting at position 3875 of SEQ ID NO: 1883008
aauagagguauacguaagu

SEQ ID NO: 2163399 - RNA, 19 nt, Artificial Sequence
  Description of Artificial Sequence: Synthetic oligonucleotide
  Antisense strand to SEQ ID NO: 2163398
acuuacguauaccucuauu

SEQ ID NO: 2163400 - RNA, 19 nt, Artificial Sequence
  Description of Artificial Sequence: Synthetic oligonucleotide
  Sense strand starting at position 122 of SEQ ID NO: 1883009
cauguuguagcacaaagaa

SEQ ID NO: 2163401 - RNA, 19 nt, Artificial Sequence
  Description of Artificial Sequence: Synthetic oligonucleotide
  Antisense strand to SEQ ID NO: 2163400
uucuuugugcuacaacaug

SEQ ID NO: 2163402 - RNA, 19 nt, Artificial Sequence
  Description of Artificial Sequence: Synthetic oligonucleotide
  Sense strand starting at position 539 of SEQ ID NO: 1883009
cugggagaauguguuuaaa

SEQ ID NO: 2163403 - RNA, 19 nt, Artificial Sequence
  Description of Artificial Sequence: Synthetic oligonucleotide
  Antisense strand to SEQ ID NO: 2163402
uuuaaacacauucucccag

SEQ ID NO: 2163404 - RNA, 19 nt, Artificial Sequence
  Description of Artificial Sequence: Synthetic oligonucleotide
  Sense strand starting at position 541 of SEQ ID NO: 1883009
gggagaauguguuuaaaug

SEQ ID NO: 2163405 - RNA, 19 nt, Artificial Sequence
  Description of Artificial Sequence: Synthetic oligonucleotide
  Antisense strand to SEQ ID NO: 2163404
cauuuaaacacauucuccc

SEQ ID NO: 2163406 - RNA, 19 nt, Artificial Sequence
  Description of Artificial Sequence: Synthetic oligonucleotide
  Sense strand starting at position 636 of SEQ ID NO: 1883009
agaugaaauuggucagggu

SEQ ID NO: 2163407 - RNA, 19 nt, Artificial Sequence
  Description of Artificial Sequence: Synthetic oligonucleotide
  Antisense strand to SEQ ID NO: 2163406
acccugaccaauuucaucu

SEQ ID NO: 2163408 - RNA, 19 nt, Artificial Sequence
  Description of Artificial Sequence: Synthetic oligonucleotide
  Sense strand starting at position 640 of SEQ ID NO: 1883009
gaaauuggucaggguccaa

SEQ ID NO: 2163409 - RNA, 19 nt, Artificial Sequence
  Description of Artificial Sequence: Synthetic oligonucleotide
  Antisense strand to SEQ ID NO: 2163408
uuggacccugaccaauuuc

SEQ ID NO: 2163410 - RNA, 19 nt, Artificial Sequence
  Description of Artificial Sequence: Synthetic oligonucleotide
  Sense strand starting at position 665 of SEQ ID NO: 1883009
uguggagggcuucacauaa

SEQ ID NO: 2163411 - RNA, 19 nt, Artificial Sequence
  Description of Artificial Sequence: Synthetic oligonucleotide
  Antisense strand to SEQ ID NO: 2163410
uuaugugaagcccuccaca

SEQ ID NO: 2163412 - RNA, 19 nt, Artificial Sequence
  Description of Artificial Sequence: Synthetic oligonucleotide
  Sense strand starting at position 694 of SEQ ID NO: 1883009
uaguauuucucagccggau

SEQ ID NO: 2163413 - RNA, 19 nt, Artificial Sequence
  Description of Artificial Sequence: Synthetic oligonucleotide
  Antisense strand to SEQ ID NO: 2163412
auccggcugagaaauacua

SEQ ID NO: 2163414 - RNA, 19 nt, Artificial Sequence
  Description of Artificial Sequence: Synthetic oligonucleotide
  Sense strand starting at position 866 of SEQ ID NO: 1883009
augcuuccuguugauuaaa

SEQ ID NO: 2163415 - RNA, 19 nt, Artificial Sequence
  Description of Artificial Sequence: Synthetic oligonucleotide
  Antisense strand to SEQ ID NO: 2163414
uuuaaucaacaggaagcau

SEQ ID NO: 2163416 - RNA, 19 nt, Artificial Sequence
  Description of Artificial Sequence: Synthetic oligonucleotide
  Sense strand starting at position 1248 of SEQ ID NO: 1883009
ucaaauuagccuuggaaau

SEQ ID NO: 2163417 - RNA, 19 nt, Artificial Sequence
  Description of Artificial Sequence: Synthetic oligonucleotide
  Antisense strand to SEQ ID NO: 2163416
auuuccaaggcuaauuuga

SEQ ID NO: 2163418 - RNA, 19 nt, Artificial Sequence
  Description of Artificial Sequence: Synthetic oligonucleotide
  Sense strand starting at position 1326 of SEQ ID NO: 1883009
gaaggcauauaucuggaau

SEQ ID NO: 2163419 - RNA, 19 nt, Artificial Sequence
  Description of Artificial Sequence: Synthetic oligonucleotide
  Antisense strand to SEQ ID NO: 2163418
auuccagauauaugccuuc

SEQ ID NO: 2163420 - RNA, 19 nt, Artificial Sequence
  Description of Artificial Sequence: Synthetic oligonucleotide
  Sense strand starting at position 1516 of SEQ ID NO: 1883009
aucaaaucugucuguaaau

SEQ ID NO: 2163421 - RNA, 19 nt, Artificial Sequence
  Description of Artificial Sequence: Synthetic oligonucleotide
  Antisense strand to SEQ ID NO: 2163420
auuuacagacagauuugau

SEQ ID NO: 2163422 - RNA, 19 nt, Artificial Sequence
  Description of Artificial Sequence: Synthetic oligonucleotide
  Sense strand starting at position 1517 of SEQ ID NO: 1883009
ucaaaucugucuguaaaua

SEQ ID NO: 2163423 - RNA, 19 nt, Artificial Sequence
  Description of Artificial Sequence: Synthetic oligonucleotide
  Antisense strand to SEQ ID NO: 2163422
uauuuacagacagauuuga

SEQ ID NO: 2163424 - RNA, 19 nt, Artificial Sequence
  Description of Artificial Sequence: Synthetic oligonucleotide
  Sense strand starting at position 1539 of SEQ ID NO: 1883009
agacucaaugguggcauua

SEQ ID NO: 2163425 - RNA, 19 nt, Artificial Sequence
  Description of Artificial Sequence: Synthetic oligonucleotide
  Antisense strand to SEQ ID NO: 2163424
uaaugccaccauugagucu

SEQ ID NO: 2163426 - RNA, 19 nt, Artificial Sequence
  Description of Artificial Sequence: Synthetic oligonucleotide
  Sense strand starting at position 1557 of SEQ ID NO: 1883009
augccaaugcccgaaauua

SEQ ID NO: 2163427 - RNA, 19 nt, Artificial Sequence
  Description of Artificial Sequence: Synthetic oligonucleotide
  Antisense strand to SEQ ID NO: 2163426
uaauuucgggcauuggcau

SEQ ID NO: 2163428 - RNA, 19 nt, Artificial Sequence
  Description of Artificial Sequence: Synthetic oligonucleotide
  Sense strand starting at position 2140 of SEQ ID NO: 1883009
ccgggauugaauuaguuua

SEQ ID NO: 2163429 - RNA, 19 nt, Artificial Sequence
  Description of Artificial Sequence: Synthetic oligonucleotide
  Antisense strand to SEQ ID NO: 2163428
uaaacuaauucaaucccgg

SEQ ID NO: 2163430 - RNA, 19 nt, Artificial Sequence
  Description of Artificial Sequence: Synthetic oligonucleotide
  Sense strand starting at position 2173 of SEQ ID NO: 1883009
guaauuaucgcagagaaac

SEQ ID NO: 2163431 - RNA, 19 nt, Artificial Sequence
  Description of Artificial Sequence: Synthetic oligonucleotide
  Antisense strand to SEQ ID NO: 2163430
guuucucugcgauaauuac

SEQ ID NO: 2163432 - RNA, 19 nt, Artificial Sequence
  Description of Artificial Sequence: Synthetic oligonucleotide
  Sense strand starting at position 2336 of SEQ ID NO: 1883009
auuagauaucgacacuagu

SEQ ID NO: 2163433 - RNA, 19 nt, Artificial Sequence
  Description of Artificial Sequence: Synthetic oligonucleotide
  Antisense strand to SEQ ID NO: 2163432
acuagugucgauaucuaau

SEQ ID NO: 2163434 - RNA, 19 nt, Artificial Sequence
  Description of Artificial Sequence: Synthetic oligonucleotide
  Sense strand starting at position 2366 of SEQ ID NO: 1883009
ucaagaggucugugaaaua

SEQ ID NO: 2163435 - RNA, 19 nt, Artificial Sequence
  Description of Artificial Sequence: Synthetic oligonucleotide
  Antisense strand to SEQ ID NO: 2163434
uauuucacagaccucuuga

SEQ ID NO: 2163436 - RNA, 19 nt, Artificial Sequence
  Description of Artificial Sequence: Synthetic oligonucleotide
  Sense strand starting at position 2371 of SEQ ID NO: 1883009
aggucugugaaauaagguu

SEQ ID NO: 2163437 - RNA, 19 nt, Artificial Sequence
  Description of Artificial Sequence: Synthetic oligonucleotide
  Antisense strand to SEQ ID NO: 2163436
aaccuuauuucacagaccu

SEQ ID NO: 2163438 - RNA, 19 nt, Artificial Sequence
  Description of Artificial Sequence: Synthetic oligonucleotide
  Sense strand starting at position 2502 of SEQ ID NO: 1883009
acaguuugucuauacaaua

SEQ ID NO: 2163439 - RNA, 19 nt, Artificial Sequence
  Description of Artificial Sequence: Synthetic oligonucleotide
  Antisense strand to SEQ ID NO: 2163438
uauuguauagacaaacugu

SEQ ID NO: 2163440 - RNA, 19 nt, Artificial Sequence
  Description of Artificial Sequence: Synthetic oligonucleotide
  Sense strand starting at position 2620 of SEQ ID NO: 1883009
agugacguuacagaucuua

SEQ ID NO: 2163441 - RNA, 19 nt, Artificial Sequence
  Description of Artificial Sequence: Synthetic oligonucleotide
  Antisense strand to SEQ ID NO: 2163440
uaagaucuguaacgucacu

SEQ ID NO: 2163442 - RNA, 19 nt, Artificial Sequence
  Description of Artificial Sequence: Synthetic oligonucleotide
  Sense strand starting at position 2656 of SEQ ID NO: 1883009
guacuuuacgcagcuaagu

SEQ ID NO: 2163443 - RNA, 19 nt, Artificial Sequence
  Description of Artificial Sequence: Synthetic oligonucleotide
  Antisense strand to SEQ ID NO: 2163442
acuuagcugcguaaaguac

SEQ ID NO: 2163444 - RNA, 19 nt, Artificial Sequence
  Description of Artificial Sequence: Synthetic oligonucleotide
  Sense strand starting at position 2776 of SEQ ID NO: 1883009
ccguguuaacuauaauaag

SEQ ID NO: 2163445 - RNA, 19 nt, Artificial Sequence
  Description of Artificial Sequence: Synthetic oligonucleotide
  Antisense strand to SEQ ID NO: 2163444
cuuauuauaguuaacacgg

SEQ ID NO: 2163446 - RNA, 19 nt, Artificial Sequence
  Description of Artificial Sequence: Synthetic oligonucleotide
  Sense strand starting at position 3122 of SEQ ID NO: 1883009
gaguuuauuuaugagaacu

SEQ ID NO: 2163447 - RNA, 19 nt, Artificial Sequence
  Description of Artificial Sequence: Synthetic oligonucleotide
  Antisense strand to SEQ ID NO: 2163446
aguucucauaaauaaacuc

SEQ ID NO: 2163448 - RNA, 19 nt, Artificial Sequence
  Description of Artificial Sequence: Synthetic oligonucleotide
  Sense strand starting at position 3133 of SEQ ID NO: 1883009
ugagaacugguuuagguau

SEQ ID NO: 2163449 - RNA, 19 nt, Artificial Sequence
  Description of Artificial Sequence: Synthetic oligonucleotide
  Antisense strand to SEQ ID NO: 2163448
auaccuaaaccaguucuca

SEQ ID NO: 2163450 - RNA, 19 nt, Artificial Sequence
  Description of Artificial Sequence: Synthetic oligonucleotide
  Sense strand starting at position 3165 of SEQ ID NO: 1883009
gucauaacauuugagauug

SEQ ID NO: 2163451 - RNA, 19 nt, Artificial Sequence
  Description of Artificial Sequence: Synthetic oligonucleotide
  Antisense strand to SEQ ID NO: 2163450
caaucucaaauguuaugac

SEQ ID NO: 2163452 - RNA, 19 nt, Artificial Sequence
  Description of Artificial Sequence: Synthetic oligonucleotide
  Sense strand starting at position 3221 of SEQ ID NO: 1883009
agcgaacaauuaucaaauu

SEQ ID NO: 2163453 - RNA, 19 nt, Artificial Sequence
  Description of Artificial Sequence: Synthetic oligonucleotide
  Antisense strand to SEQ ID NO: 2163452
aauuugauaauuguucgcu

SEQ ID NO: 2163454 - RNA, 19 nt, Artificial Sequence
  Description of Artificial Sequence: Synthetic oligonucleotide
  Sense strand starting at position 3243 of SEQ ID NO: 1883009
gugugaaacauuggaguaa

SEQ ID NO: 2163455 - RNA, 19 nt, Artificial Sequence
  Description of Artificial Sequence: Synthetic oligonucleotide
  Antisense strand to SEQ ID NO: 2163454
uuacuccaauguuucacac

SEQ ID NO: 2163456 - RNA, 19 nt, Artificial Sequence
  Description of Artificial Sequence: Synthetic oligonucleotide
  Sense strand starting at position 3285 of SEQ ID NO: 1883009
aaauauagucccggaacua

SEQ ID NO: 2163457 - RNA, 19 nt, Artificial Sequence
  Description of Artificial Sequence: Synthetic oligonucleotide
  Antisense strand to SEQ ID NO: 2163456
uaguuccgggacuauauuu

SEQ ID NO: 2163458 - RNA, 19 nt, Artificial Sequence
  Description of Artificial Sequence: Synthetic oligonucleotide
  Sense strand starting at position 3598 of SEQ ID NO: 1883009
uuugcuccuagguagagaa

SEQ ID NO: 2163459 - RNA, 19 nt, Artificial Sequence
  Description of Artificial Sequence: Synthetic oligonucleotide
  Antisense strand to SEQ ID NO: 2163458
uucucuaccuaggagcaaa

SEQ ID NO: 2163460 - RNA, 19 nt, Artificial Sequence
  Description of Artificial Sequence: Synthetic oligonucleotide
  Sense strand starting at position 3600 of SEQ ID NO: 1883009
ugcuccuagguagagaaua

SEQ ID NO: 2163461 - RNA, 19 nt, Artificial Sequence
  Description of Artificial Sequence: Synthetic oligonucleotide
  Antisense strand to SEQ ID NO: 2163460
uauucucuaccuaggagca

SEQ ID NO: 2163462 - RNA, 19 nt, Artificial Sequence
  Description of Artificial Sequence: Synthetic oligonucleotide
  Sense strand starting at position 3611 of SEQ ID NO: 1883009
agagaauauauuggcgaau

SEQ ID NO: 2163463 - RNA, 19 nt, Artificial Sequence
  Description of Artificial Sequence: Synthetic oligonucleotide
  Antisense strand to SEQ ID NO: 2163462
auucgccaauauauucucu

SEQ ID NO: 2163464 - RNA, 19 nt, Artificial Sequence
  Description of Artificial Sequence: Synthetic oligonucleotide
  Sense strand starting at position 3612 of SEQ ID NO: 1883009
gagaauauauuggcgaaug

SEQ ID NO: 2163465 - RNA, 19 nt, Artificial Sequence
  Description of Artificial Sequence: Synthetic oligonucleotide
  Antisense strand to SEQ ID NO: 2163464
cauucgccaauauauucuc

SEQ ID NO: 2163466 - RNA, 19 nt, Artificial Sequence
  Description of Artificial Sequence: Synthetic oligonucleotide
  Sense strand starting at position 3614 of SEQ ID NO: 1883009
gaauauauuggcgaaugca

SEQ ID NO: 2163467 - RNA, 19 nt, Artificial Sequence
  Description of Artificial Sequence: Synthetic oligonucleotide
  Antisense strand to SEQ ID NO: 2163466
ugcauucgccaauauauuc

SEQ ID NO: 2163468 - RNA, 19 nt, Artificial Sequence
  Description of Artificial Sequence: Synthetic oligonucleotide
  Sense strand starting at position 3622 of SEQ ID NO: 1883009
uggcgaaugcaagauuaga

SEQ ID NO: 2163469 - RNA, 19 nt, Artificial Sequence
  Description of Artificial Sequence: Synthetic oligonucleotide
  Antisense strand to SEQ ID NO: 2163468
ucuaaucuugcauucgcca

SEQ ID NO: 2163470 - RNA, 19 nt, Artificial Sequence
  Description of Artificial Sequence: Synthetic oligonucleotide
  Sense strand starting at position 3639 of SEQ ID NO: 1883009
gaggaaagauguuuaguua

SEQ ID NO: 2163471 - RNA, 19 nt, Artificial Sequence
  Description of Artificial Sequence: Synthetic oligonucleotide
  Antisense strand to SEQ ID NO: 2163470
uaacuaaacaucuuuccuc

SEQ ID NO: 2163472 - RNA, 19 nt, Artificial Sequence
  Description of Artificial Sequence: Synthetic oligonucleotide
  Sense strand starting at position 3642 of SEQ ID NO: 1883009
gaaagauguuuaguuaaga

SEQ ID NO: 2163473 - RNA, 19 nt, Artificial Sequence
  Description of Artificial Sequence: Synthetic oligonucleotide
  Antisense strand to SEQ ID NO: 2163472
ucuuaacuaaacaucuuuc

SEQ ID NO: 2163474 - RNA, 19 nt, Artificial Sequence
  Description of Artificial Sequence: Synthetic oligonucleotide
  Sense strand starting at position 3643 of SEQ ID NO: 1883009
aaagauguuuaguuaagag

SEQ ID NO: 2163475 - RNA, 19 nt, Artificial Sequence
  Description of Artificial Sequence: Synthetic oligonucleotide
  Antisense strand to SEQ ID NO: 2163474
cucuuaacuaaacaucuuu

SEQ ID NO: 2163476 - RNA, 19 nt, Artificial Sequence
  Description of Artificial Sequence: Synthetic oligonucleotide
  Sense strand starting at position 3676 of SEQ ID NO: 1883009
uuaggugagaguugaugau

SEQ ID NO: 2163477 - RNA, 19 nt, Artificial Sequence
  Description of Artificial Sequence: Synthetic oligonucleotide
  Antisense strand to SEQ ID NO: 2163476
aucaucaacucucaccuaa

SEQ ID NO: 2163478 - RNA, 19 nt, Artificial Sequence
  Description of Artificial Sequence: Synthetic oligonucleotide
  Sense strand starting at position 3843 of SEQ ID NO: 1883009
uagguacuguuauuaaaga

SEQ ID NO: 2163479 - RNA, 19 nt, Artificial Sequence
  Description of Artificial Sequence: Synthetic oligonucleotide
  Antisense strand to SEQ ID NO: 2163478
ucuuuaauaacaguaccua

SEQ ID NO: 2163480 - RNA, 19 nt, Artificial Sequence
  Description of Artificial Sequence: Synthetic oligonucleotide
  Sense strand starting at position 84 of SEQ ID NO: 1883010
agggaaaugccuugcaauu

SEQ ID NO: 2163481 - RNA, 19 nt, Artificial Sequence
  Description of Artificial Sequence: Synthetic oligonucleotide
  Antisense strand to SEQ ID NO: 2163480
aauugcaaggcauuucccu

SEQ ID NO: 2163482 - RNA, 19 nt, Artificial Sequence
  Description of Artificial Sequence: Synthetic oligonucleotide
  Sense strand starting at position 155 of SEQ ID NO: 1883010
gagagcauucuguauguag

SEQ ID NO: 2163483 - RNA, 19 nt, Artificial Sequence
  Description of Artificial Sequence: Synthetic oligonucleotide
  Antisense strand to SEQ ID NO: 2163482
cuacauacagaaugcucuc

SEQ ID NO: 2163484 - RNA, 19 nt, Artificial Sequence
  Description of Artificial Sequence: Synthetic oligonucleotide
  Sense strand starting at position 318 of SEQ ID NO: 1883010
acuuguauugcaugaaaga

SEQ ID NO: 2163485 - RNA, 19 nt, Artificial Sequence
  Description of Artificial Sequence: Synthetic oligonucleotide
  Antisense strand to SEQ ID NO: 2163484
ucuuucaugcaauacaagu

SEQ ID NO: 2163486 - RNA, 19 nt, Artificial Sequence
  Description of Artificial Sequence: Synthetic oligonucleotide
  Sense strand starting at position 319 of SEQ ID NO: 1883010
cuuguauugcaugaaagaa

SEQ ID NO: 2163487 - RNA, 19 nt, Artificial Sequence
  Description of Artificial Sequence: Synthetic oligonucleotide
  Antisense strand to SEQ ID NO: 2163486
uucuuucaugcaauacaag

SEQ ID NO: 2163488 - RNA, 19 nt, Artificial Sequence
  Description of Artificial Sequence: Synthetic oligonucleotide
  Sense strand starting at position 507 of SEQ ID NO: 1883010
gaguuacuucuggaugcau

SEQ ID NO: 2163489 - RNA, 19 nt, Artificial Sequence
  Description of Artificial Sequence: Synthetic oligonucleotide
  Antisense strand to SEQ ID NO: 2163488
augcauccagaaguaacuc

SEQ ID NO: 2163490 - RNA, 19 nt, Artificial Sequence
  Description of Artificial Sequence: Synthetic oligonucleotide
  Sense strand starting at position 587 of SEQ ID NO: 1883010
uuuaaaucccaugguggua

SEQ ID NO: 2163491 - RNA, 19 nt, Artificial Sequence
  Description of Artificial Sequence: Synthetic oligonucleotide
  Antisense strand to SEQ ID NO: 2163490
uaccaccaugggauuuaaa

SEQ ID NO: 2163492 - RNA, 19 nt, Artificial Sequence
  Description of Artificial Sequence: Synthetic oligonucleotide
  Sense strand starting at position 599 of SEQ ID NO: 1883010
ggugguaaucugggauaag

SEQ ID NO: 2163493 - RNA, 19 nt, Artificial Sequence
  Description of Artificial Sequence: Synthetic oligonucleotide
  Antisense strand to SEQ ID NO: 2163492
cuuaucccagauuaccacc

SEQ ID NO: 2163494 - RNA, 19 nt, Artificial Sequence
  Description of Artificial Sequence: Synthetic oligonucleotide
  Sense strand starting at position 610 of SEQ ID NO: 1883010
gggauaagacaggguuucu

SEQ ID NO: 2163495 - RNA, 19 nt, Artificial Sequence
  Description of Artificial Sequence: Synthetic oligonucleotide
  Antisense strand to SEQ ID NO: 2163494
agaaacccugucuuauccc

SEQ ID NO: 2163496 - RNA, 19 nt, Artificial Sequence
  Description of Artificial Sequence: Synthetic oligonucleotide
  Sense strand starting at position 615 of SEQ ID NO: 1883010
aagacaggguuucucuuua

SEQ ID NO: 2163497 - RNA, 19 nt, Artificial Sequence
  Description of Artificial Sequence: Synthetic oligonucleotide
  Antisense strand to SEQ ID NO: 2163496
uaaagagaaacccugucuu

SEQ ID NO: 2163498 - RNA, 19 nt, Artificial Sequence
  Description of Artificial Sequence: Synthetic oligonucleotide
  Sense strand starting at position 626 of SEQ ID NO: 1883010
ucucuuuaggcugaugagu

SEQ ID NO: 2163499 - RNA, 19 nt, Artificial Sequence
  Description of Artificial Sequence: Synthetic oligonucleotide
  Antisense strand to SEQ ID NO: 2163498
acucaucagccuaaagaga

SEQ ID NO: 2163500 - RNA, 19 nt, Artificial Sequence
  Description of Artificial Sequence: Synthetic oligonucleotide
  Sense strand starting at position 632 of SEQ ID NO: 1883010
uaggcugaugagugagaau

SEQ ID NO: 2163501 - RNA, 19 nt, Artificial Sequence
  Description of Artificial Sequence: Synthetic oligonucleotide
  Antisense strand to SEQ ID NO: 2163500
auucucacucaucagccua

SEQ ID NO: 2163502 - RNA, 19 nt, Artificial Sequence
  Description of Artificial Sequence: Synthetic oligonucleotide
  Sense strand starting at position 780 of SEQ ID NO: 1883010
aagaacaguugugugaaau

SEQ ID NO: 2163503 - RNA, 19 nt, Artificial Sequence
  Description of Artificial Sequence: Synthetic oligonucleotide
  Antisense strand to SEQ ID NO: 2163502
auuucacacaacuguucuu

SEQ ID NO: 2163504 - RNA, 19 nt, Artificial Sequence
  Description of Artificial Sequence: Synthetic oligonucleotide
  Sense strand starting at position 920 of SEQ ID NO: 1883010
auaguauaaucucuaggca

SEQ ID NO: 2163505 - RNA, 19 nt, Artificial Sequence
  Description of Artificial Sequence: Synthetic oligonucleotide
  Antisense strand to SEQ ID NO: 2163504
ugccuagagauuauacuau

SEQ ID NO: 2163506 - RNA, 19 nt, Artificial Sequence
  Description of Artificial Sequence: Synthetic oligonucleotide
  Sense strand starting at position 923 of SEQ ID NO: 1883010
guauaaucucuaggcaaau

SEQ ID NO: 2163507 - RNA, 19 nt, Artificial Sequence
  Description of Artificial Sequence: Synthetic oligonucleotide
  Antisense strand to SEQ ID NO: 2163506
auuugccuagagauuauac

SEQ ID NO: 2163508 - RNA, 19 nt, Artificial Sequence
  Description of Artificial Sequence: Synthetic oligonucleotide
  Sense strand starting at position 1071 of SEQ ID NO: 1883010
acuugaauuagguauggca

SEQ ID NO: 2163509 - RNA, 19 nt, Artificial Sequence
  Description of Artificial Sequence: Synthetic oligonucleotide
  Antisense strand to SEQ ID NO: 2163508
ugccauaccuaauucaagu

SEQ ID NO: 2163510 - RNA, 19 nt, Artificial Sequence
  Description of Artificial Sequence: Synthetic oligonucleotide
  Sense strand starting at position 1073 of SEQ ID NO: 1883010
uugaauuagguauggcauu

SEQ ID NO: 2163511 - RNA, 19 nt, Artificial Sequence
  Description of Artificial Sequence: Synthetic oligonucleotide
  Antisense strand to SEQ ID NO: 2163510
aaugccauaccuaauucaa

SEQ ID NO: 2163512 - RNA, 19 nt, Artificial Sequence
  Description of Artificial Sequence: Synthetic oligonucleotide
  Sense strand starting at position 1108 of SEQ ID NO: 1883010
gucuuagucguggcagguu

SEQ ID NO: 2163513 - RNA, 19 nt, Artificial Sequence
  Description of Artificial Sequence: Synthetic oligonucleotide
  Antisense strand to SEQ ID NO: 2163512
aaccugccacgacuaagac

SEQ ID NO: 2163514 - RNA, 19 nt, Artificial Sequence
  Description of Artificial Sequence: Synthetic oligonucleotide
  Sense strand starting at position 1422 of SEQ ID NO: 1883010
uugaauuggucuccaugga

SEQ ID NO: 2163515 - RNA, 19 nt, Artificial Sequence
  Description of Artificial Sequence: Synthetic oligonucleotide
  Antisense strand to SEQ ID NO: 2163514
uccauggagaccaauucaa

SEQ ID NO: 2163516 - RNA, 19 nt, Artificial Sequence
  Description of Artificial Sequence: Synthetic oligonucleotide
  Sense strand starting at position 1620 of SEQ ID NO: 1883010
aauccugugguuuagguua

SEQ ID NO: 2163517 - RNA, 19 nt, Artificial Sequence
  Description of Artificial Sequence: Synthetic oligonucleotide
  Antisense strand to SEQ ID NO: 2163516
uaaccuaaaccacaggauu

SEQ ID NO: 2163518 - RNA, 19 nt, Artificial Sequence
  Description of Artificial Sequence: Synthetic oligonucleotide
  Sense strand starting at position 1764 of SEQ ID NO: 1883010
cucgaugucccugaaagaa

SEQ ID NO: 2163519 - RNA, 19 nt, Artificial Sequence
  Description of Artificial Sequence: Synthetic oligonucleotide
  Antisense strand to SEQ ID NO: 2163518
uucuuucagggacaucgag

SEQ ID NO: 2163520 - RNA, 19 nt, Artificial Sequence
  Description of Artificial Sequence: Synthetic oligonucleotide
  Sense strand starting at position 2142 of SEQ ID NO: 1883010
cuuugcaugagcgaauuga

SEQ ID NO: 2163521 - RNA, 19 nt, Artificial Sequence
  Description of Artificial Sequence: Synthetic oligonucleotide
  Antisense strand to SEQ ID NO: 2163520
ucaauucgcucaugcaaag

SEQ ID NO: 2163522 - RNA, 19 nt, Artificial Sequence
  Description of Artificial Sequence: Synthetic oligonucleotide
  Sense strand starting at position 2152 of SEQ ID NO: 1883010
gcgaauugaggcgagaacu

SEQ ID NO: 2163523 - RNA, 19 nt, Artificial Sequence
  Description of Artificial Sequence: Synthetic oligonucleotide
  Antisense strand to SEQ ID NO: 2163522
aguucucgccucaauucgc

SEQ ID NO: 2163524 - RNA, 19 nt, Artificial Sequence
  Description of Artificial Sequence: Synthetic oligonucleotide
  Sense strand starting at position 2431 of SEQ ID NO: 1883010
gcagauugaacucggaaag

SEQ ID NO: 2163525 - RNA, 19 nt, Artificial Sequence
  Description of Artificial Sequence: Synthetic oligonucleotide
  Antisense strand to SEQ ID NO: 2163524
cuuuccgaguucaaucugc

SEQ ID NO: 2163526 - RNA, 19 nt, Artificial Sequence
  Description of Artificial Sequence: Synthetic oligonucleotide
  Sense strand starting at position 2463 of SEQ ID NO: 1883010
uuugcaugacagugauaug

SEQ ID NO: 2163527 - RNA, 19 nt, Artificial Sequence
  Description of Artificial Sequence: Synthetic oligonucleotide
  Antisense strand to SEQ ID NO: 2163526
cauaucacugucaugcaaa

SEQ ID NO: 2163528 - RNA, 19 nt, Artificial Sequence
  Description of Artificial Sequence: Synthetic oligonucleotide
  Sense strand starting at position 2464 of SEQ ID NO: 1883010
uugcaugacagugauaugu

SEQ ID NO: 2163529 - RNA, 19 nt, Artificial Sequence
  Description of Artificial Sequence: Synthetic oligonucleotide
  Antisense strand to SEQ ID NO: 2163528
acauaucacugucaugcaa

SEQ ID NO: 2163530 - RNA, 19 nt, Artificial Sequence
  Description of Artificial Sequence: Synthetic oligonucleotide
  Sense strand starting at position 2587 of SEQ ID NO: 1883010
accucuagauugccaaagu

SEQ ID NO: 2163531 - RNA, 19 nt, Artificial Sequence
  Description of Artificial Sequence: Synthetic oligonucleotide
  Antisense strand to SEQ ID NO: 2163530
acuuuggcaaucuagaggu

SEQ ID NO: 2163532 - RNA, 19 nt, Artificial Sequence
  Description of Artificial Sequence: Synthetic oligonucleotide
  Sense strand starting at position 2782 of SEQ ID NO: 1883010
ugaucaguuuccuuccaua

SEQ ID NO: 2163533 - RNA, 19 nt, Artificial Sequence
  Description of Artificial Sequence: Synthetic oligonucleotide
  Antisense strand to SEQ ID NO: 2163532
uauggaaggaaacugauca

SEQ ID NO: 2163534 - RNA, 19 nt, Artificial Sequence
  Description of Artificial Sequence: Synthetic oligonucleotide
  Sense strand starting at position 2901 of SEQ ID NO: 1883010
gugaguuagaaugaagcca

SEQ ID NO: 2163535 - RNA, 19 nt, Artificial Sequence
  Description of Artificial Sequence: Synthetic oligonucleotide
  Antisense strand to SEQ ID NO: 2163534
uggcuucauucuaacucac

SEQ ID NO: 2163536 - RNA, 19 nt, Artificial Sequence
  Description of Artificial Sequence: Synthetic oligonucleotide
  Sense strand starting at position 2981 of SEQ ID NO: 1883010
cuggcaugcuuguugauuu

SEQ ID NO: 2163537 - RNA, 19 nt, Artificial Sequence
  Description of Artificial Sequence: Synthetic oligonucleotide
  Antisense strand to SEQ ID NO: 2163536
aaaucaacaagcaugccag

SEQ ID NO: 2163538 - RNA, 19 nt, Artificial Sequence
  Description of Artificial Sequence: Synthetic oligonucleotide
  Sense strand starting at position 3017 of SEQ ID NO: 1883010
guaguaaacuuuccucaug

SEQ ID NO: 2163539 - RNA, 19 nt, Artificial Sequence
  Description of Artificial Sequence: Synthetic oligonucleotide
  Antisense strand to SEQ ID NO: 2163538
caugaggaaaguuuacuac

SEQ ID NO: 2163540 - RNA, 19 nt, Artificial Sequence
  Description of Artificial Sequence: Synthetic oligonucleotide
  Sense strand starting at position 3020 of SEQ ID NO: 1883010
guaaacuuuccucauguca

SEQ ID NO: 2163541 - RNA, 19 nt, Artificial Sequence
  Description of Artificial Sequence: Synthetic oligonucleotide
  Antisense strand to SEQ ID NO: 2163540
ugacaugaggaaaguuuac

SEQ ID NO: 2163542 - RNA, 19 nt, Artificial Sequence
  Description of Artificial Sequence: Synthetic oligonucleotide
  Sense strand starting at position 3066 of SEQ ID NO: 1883010
gcuaaugugccacauaaug

SEQ ID NO: 2163543 - RNA, 19 nt, Artificial Sequence
  Description of Artificial Sequence: Synthetic oligonucleotide
  Antisense strand to SEQ ID NO: 2163542
cauuauguggcacauuagc

SEQ ID NO: 2163544 - RNA, 19 nt, Artificial Sequence
  Description of Artificial Sequence: Synthetic oligonucleotide
  Sense strand starting at position 3149 of SEQ ID NO: 1883010
acgagaugaagcugaugau

SEQ ID NO: 2163545 - RNA, 19 nt, Artificial Sequence
  Description of Artificial Sequence: Synthetic oligonucleotide
  Antisense strand to SEQ ID NO: 2163544
aucaucagcuucaucucgu

SEQ ID NO: 2163546 - RNA, 19 nt, Artificial Sequence
  Description of Artificial Sequence: Synthetic oligonucleotide
  Sense strand starting at position 3228 of SEQ ID NO: 1883010
uccagugugacugaucaug

SEQ ID NO: 2163547 - RNA, 19 nt, Artificial Sequence
  Description of Artificial Sequence: Synthetic oligonucleotide
  Antisense strand to SEQ ID NO: 2163546
caugaucagucacacugga

SEQ ID NO: 2163548 - RNA, 19 nt, Artificial Sequence
  Description of Artificial Sequence: Synthetic oligonucleotide
  Sense strand starting at position 3230 of SEQ ID NO: 1883010
cagugugacugaucaugaa

SEQ ID NO: 2163549 - RNA, 19 nt, Artificial Sequence
  Description of Artificial Sequence: Synthetic oligonucleotide
  Antisense strand to SEQ ID NO: 2163548
uucaugaucagucacacug

SEQ ID NO: 2163550 - RNA, 19 nt, Artificial Sequence
  Description of Artificial Sequence: Synthetic oligonucleotide
  Sense strand starting at position 3521 of SEQ ID NO: 1883010
aacgauggagcuugucaaa

SEQ ID NO: 2163551 - RNA, 19 nt, Artificial Sequence
  Description of Artificial Sequence: Synthetic oligonucleotide
  Antisense strand to SEQ ID NO: 2163550
uuugacaagcuccaucguu

SEQ ID NO: 2163552 - RNA, 19 nt, Artificial Sequence
  Description of Artificial Sequence: Synthetic oligonucleotide
  Sense strand starting at position 3587 of SEQ ID NO: 1883010
auauuaaaggaggguugua

SEQ ID NO: 2163553 - RNA, 19 nt, Artificial Sequence
  Description of Artificial Sequence: Synthetic oligonucleotide
  Antisense strand to SEQ ID NO: 2163552
uacaacccuccuuuaauau

SEQ ID NO: 2163554 - RNA, 19 nt, Artificial Sequence
  Description of Artificial Sequence: Synthetic oligonucleotide
  Sense strand starting at position 3813 of SEQ ID NO: 1883010
uagagcugugcccagaaau

SEQ ID NO: 2163555 - RNA, 19 nt, Artificial Sequence
  Description of Artificial Sequence: Synthetic oligonucleotide
  Antisense strand to SEQ ID NO: 2163554
auuucugggcacagcucua

SEQ ID NO: 2163556 - RNA, 19 nt, Artificial Sequence
  Description of Artificial Sequence: Synthetic oligonucleotide
  Sense strand starting at position 3863 of SEQ ID NO: 1883010
uggcccuugagauguaaau

SEQ ID NO: 2163557 - RNA, 19 nt, Artificial Sequence
  Description of Artificial Sequence: Synthetic oligonucleotide
  Antisense strand to SEQ ID NO: 2163556
auuuacaucucaagggcca

SEQ ID NO: 2163558 - RNA, 19 nt, Artificial Sequence
  Description of Artificial Sequence: Synthetic oligonucleotide
  Sense strand starting at position 3977 of SEQ ID NO: 1883010
ucacuugaauacuugugau

SEQ ID NO: 2163559 - RNA, 19 nt, Artificial Sequence
  Description of Artificial Sequence: Synthetic oligonucleotide
  Antisense strand to SEQ ID NO: 2163558
aucacaaguauucaaguga

SEQ ID NO: 2163560 - RNA, 19 nt, Artificial Sequence
  Description of Artificial Sequence: Synthetic oligonucleotide
  Sense strand starting at position 645 of SEQ ID NO: 1883011
acgccugcuuccuaagaga

SEQ ID NO: 2163561 - RNA, 19 nt, Artificial Sequence
  Description of Artificial Sequence: Synthetic oligonucleotide
  Antisense strand to SEQ ID NO: 2163560
ucucuuaggaagcaggcgu

SEQ ID NO: 2163562 - RNA, 19 nt, Artificial Sequence
  Description of Artificial Sequence: Synthetic oligonucleotide
  Sense strand starting at position 648 of SEQ ID NO: 1883011
ccugcuuccuaagagauga

SEQ ID NO: 2163563 - RNA, 19 nt, Artificial Sequence
  Description of Artificial Sequence: Synthetic oligonucleotide
  Antisense strand to SEQ ID NO: 2163562
ucaucucuuaggaagcagg

SEQ ID NO: 2163564 - RNA, 19 nt, Artificial Sequence
  Description of Artificial Sequence: Synthetic oligonucleotide
  Sense strand starting at position 658 of SEQ ID NO: 1883011
aagagaugauccuuugggu

SEQ ID NO: 2163565 - RNA, 19 nt, Artificial Sequence
  Description of Artificial Sequence: Synthetic oligonucleotide
  Antisense strand to SEQ ID NO: 2163564
acccaaaggaucaucucuu

SEQ ID NO: 2163566 - RNA, 19 nt, Artificial Sequence
  Description of Artificial Sequence: Synthetic oligonucleotide
  Sense strand starting at position 701 of SEQ ID NO: 1883011
gggagggaguccugcgaaa

SEQ ID NO: 2163567 - RNA, 19 nt, Artificial Sequence
  Description of Artificial Sequence: Synthetic oligonucleotide
  Antisense strand to SEQ ID NO: 2163566
uuucgcaggacucccuccc

SEQ ID NO: 2163568 - RNA, 19 nt, Artificial Sequence
  Description of Artificial Sequence: Synthetic oligonucleotide
  Sense strand starting at position 1333 of SEQ ID NO: 1883011
ggcugcgguguuucgagaa

SEQ ID NO: 2163569 - RNA, 19 nt, Artificial Sequence
  Description of Artificial Sequence: Synthetic oligonucleotide
  Antisense strand to SEQ ID NO: 2163568
uucucgaaacaccgcagcc

SEQ ID NO: 2163570 - RNA, 19 nt, Artificial Sequence
  Description of Artificial Sequence: Synthetic oligonucleotide
  Sense strand starting at position 1336 of SEQ ID NO: 1883011
ugcgguguuucgagaagca

SEQ ID NO: 2163571 - RNA, 19 nt, Artificial Sequence
  Description of Artificial Sequence: Synthetic oligonucleotide
  Antisense strand to SEQ ID NO: 2163570
ugcuucucgaaacaccgca

SEQ ID NO: 2163572 - RNA, 19 nt, Artificial Sequence
  Description of Artificial Sequence: Synthetic oligonucleotide
  Sense strand starting at position 1337 of SEQ ID NO: 1883011
gcgguguuucgagaagcac

SEQ ID NO: 2163573 - RNA, 19 nt, Artificial Sequence
  Description of Artificial Sequence: Synthetic oligonucleotide
  Antisense strand to SEQ ID NO: 2163572
gugcuucucgaaacaccgc

SEQ ID NO: 2163574 - RNA, 19 nt, Artificial Sequence
  Description of Artificial Sequence: Synthetic oligonucleotide
  Sense strand starting at position 2047 of SEQ ID NO: 1883011
ucagauuaccucugggaau

SEQ ID NO: 2163575 - RNA, 19 nt, Artificial Sequence
  Description of Artificial Sequence: Synthetic oligonucleotide
  Antisense strand to SEQ ID NO: 2163574
auucccagagguaaucuga

SEQ ID NO: 2163576 - RNA, 19 nt, Artificial Sequence
  Description of Artificial Sequence: Synthetic oligonucleotide
  Sense strand starting at position 2049 of SEQ ID NO: 1883011
agauuaccucugggaaucu

SEQ ID NO: 2163577 - RNA, 19 nt, Artificial Sequence
  Description of Artificial Sequence: Synthetic oligonucleotide
  Antisense strand to SEQ ID NO: 2163576
agauucccagagguaaucu

SEQ ID NO: 2163578 - RNA, 19 nt, Artificial Sequence
  Description of Artificial Sequence: Synthetic oligonucleotide
  Sense strand starting at position 2140 of SEQ ID NO: 1883011
agaccucagccacgaguaa

SEQ ID NO: 2163579 - RNA, 19 nt, Artificial Sequence
  Description of Artificial Sequence: Synthetic oligonucleotide
  Antisense strand to SEQ ID NO: 2163578
uuacucguggcugaggucu

SEQ ID NO: 2163580 - RNA, 19 nt, Artificial Sequence
  Description of Artificial Sequence: Synthetic oligonucleotide
  Sense strand starting at position 2193 of SEQ ID NO: 1883011
cugauuugccuacgagggu

SEQ ID NO: 2163581 - RNA, 19 nt, Artificial Sequence
  Description of Artificial Sequence: Synthetic oligonucleotide
  Antisense strand to SEQ ID NO: 2163580
acccucguaggcaaaucag

SEQ ID NO: 2163582 - RNA, 19 nt, Artificial Sequence
  Description of Artificial Sequence: Synthetic oligonucleotide
  Sense strand starting at position 2194 of SEQ ID NO: 1883011
ugauuugccuacgaggguu

SEQ ID NO: 2163583 - RNA, 19 nt, Artificial Sequence
  Description of Artificial Sequence: Synthetic oligonucleotide
  Antisense strand to SEQ ID NO: 2163582
aacccucguaggcaaauca

SEQ ID NO: 2163584 - RNA, 19 nt, Artificial Sequence
  Description of Artificial Sequence: Synthetic oligonucleotide
  Sense strand starting at position 2204 of SEQ ID NO: 1883011
acgaggguuccguaggaaa

SEQ ID NO: 2163585 - RNA, 19 nt, Artificial Sequence
  Description of Artificial Sequence: Synthetic oligonucleotide
  Antisense strand to SEQ ID NO: 2163584
uuuccuacggaacccucgu

SEQ ID NO: 2163586 - RNA, 19 nt, Artificial Sequence
  Description of Artificial Sequence: Synthetic oligonucleotide
  Sense strand starting at position 2308 of SEQ ID NO: 1883011
guggcuucaggguguaaca

SEQ ID NO: 2163587 - RNA, 19 nt, Artificial Sequence
  Description of Artificial Sequence: Synthetic oligonucleotide
  Antisense strand to SEQ ID NO: 2163586
uguuacacccugaagccac

SEQ ID NO: 2163588 - RNA, 19 nt, Artificial Sequence
  Description of Artificial Sequence: Synthetic oligonucleotide
  Sense strand starting at position 2310 of SEQ ID NO: 1883011
ggcuucaggguguaacaga

SEQ ID NO: 2163589 - RNA, 19 nt, Artificial Sequence
  Description of Artificial Sequence: Synthetic oligonucleotide
  Antisense strand to SEQ ID NO: 2163588
ucuguuacacccugaagcc

SEQ ID NO: 2163590 - RNA, 19 nt, Artificial Sequence
  Description of Artificial Sequence: Synthetic oligonucleotide
  Sense strand starting at position 2387 of SEQ ID NO: 1883011
cgaggaguuucgcagaauc

SEQ ID NO: 2163591 - RNA, 19 nt, Artificial Sequence
  Description of Artificial Sequence: Synthetic oligonucleotide
  Antisense strand to SEQ ID NO: 2163590
gauucugcgaaacuccucg

SEQ ID NO: 2163592 - RNA, 19 nt, Artificial Sequence
  Description of Artificial Sequence: Synthetic oligonucleotide
  Sense strand starting at position 2389 of SEQ ID NO: 1883011
aggaguuucgcagaaucaa

SEQ ID NO: 2163593 - RNA, 19 nt, Artificial Sequence
  Description of Artificial Sequence: Synthetic oligonucleotide
  Antisense strand to SEQ ID NO: 2163592
uugauucugcgaaacuccu

SEQ ID NO: 2163594 - RNA, 19 nt, Artificial Sequence
  Description of Artificial Sequence: Synthetic oligonucleotide
  Sense strand starting at position 2401 of SEQ ID NO: 1883011
gaaucaacuucugguuaga

SEQ ID NO: 2163595 - RNA, 19 nt, Artificial Sequence
  Description of Artificial Sequence: Synthetic oligonucleotide
  Antisense strand to SEQ ID NO: 2163594
ucuaaccagaaguugauuc

SEQ ID NO: 2163596 - RNA, 19 nt, Artificial Sequence
  Description of Artificial Sequence: Synthetic oligonucleotide
  Sense strand starting at position 2403 of SEQ ID NO: 1883011
aucaacuucugguuagagu

SEQ ID NO: 2163597 - RNA, 19 nt, Artificial Sequence
  Description of Artificial Sequence: Synthetic oligonucleotide
  Antisense strand to SEQ ID NO: 2163596
acucuaaccagaaguugau

SEQ ID NO: 2163598 - RNA, 19 nt, Artificial Sequence
  Description of Artificial Sequence: Synthetic oligonucleotide
  Sense strand starting at position 2404 of SEQ ID NO: 1883011
ucaacuucugguuagaguu

SEQ ID NO: 2163599 - RNA, 19 nt, Artificial Sequence
  Description of Artificial Sequence: Synthetic oligonucleotide
  Antisense strand to SEQ ID NO: 2163598
aacucuaaccagaaguuga

SEQ ID NO: 2163600 - RNA, 19 nt, Artificial Sequence
  Description of Artificial Sequence: Synthetic oligonucleotide
  Sense strand starting at position 2406 of SEQ ID NO: 1883011
aacuucugguuagaguuau

SEQ ID NO: 2163601 - RNA, 19 nt, Artificial Sequence
  Description of Artificial Sequence: Synthetic oligonucleotide
  Antisense strand to SEQ ID NO: 2163600
auaacucuaaccagaaguu

SEQ ID NO: 2163602 - RNA, 19 nt, Artificial Sequence
  Description of Artificial Sequence: Synthetic oligonucleotide
  Sense strand starting at position 2410 of SEQ ID NO: 1883011
ucugguuagaguuauggga

SEQ ID NO: 2163603 - RNA, 19 nt, Artificial Sequence
  Description of Artificial Sequence: Synthetic oligonucleotide
  Antisense strand to SEQ ID NO: 2163602
ucccauaacucuaaccaga

SEQ ID NO: 2163604 - RNA, 19 nt, Artificial Sequence
  Description of Artificial Sequence: Synthetic oligonucleotide
  Sense strand starting at position 2412 of SEQ ID NO: 1883011
ugguuagaguuaugggaag

SEQ ID NO: 2163605 - RNA, 19 nt, Artificial Sequence
  Description of Artificial Sequence: Synthetic oligonucleotide
  Antisense strand to SEQ ID NO: 2163604
cuucccauaacucuaacca

SEQ ID NO: 2163606 - RNA, 19 nt, Artificial Sequence
  Description of Artificial Sequence: Synthetic oligonucleotide
  Sense strand starting at position 3021 of SEQ ID NO: 1883011
uguagcugcgucuuccaau

SEQ ID NO: 2163607 - RNA, 19 nt, Artificial Sequence
  Description of Artificial Sequence: Synthetic oligonucleotide
  Antisense strand to SEQ ID NO: 2163606
auuggaagacgcagcuaca

SEQ ID NO: 2163608 - RNA, 19 nt, Artificial Sequence
  Description of Artificial Sequence: Synthetic oligonucleotide
  Sense strand starting at position 3136 of SEQ ID NO: 1883011
uugggucucugugguauuu

SEQ ID NO: 2163609 - RNA, 19 nt, Artificial Sequence
  Description of Artificial Sequence: Synthetic oligonucleotide
  Antisense strand to SEQ ID NO: 2163608
aaauaccacagagacccaa

SEQ ID NO: 2163610 - RNA, 19 nt, Artificial Sequence
  Description of Artificial Sequence: Synthetic oligonucleotide
  Sense strand starting at position 3411 of SEQ ID NO: 1883011
ccaaguaaauguuugugua

SEQ ID NO: 2163611 - RNA, 19 nt, Artificial Sequence
  Description of Artificial Sequence: Synthetic oligonucleotide
  Antisense strand to SEQ ID NO: 2163610
uacacaaacauuuacuugg

SEQ ID NO: 2163612 - RNA, 19 nt, Artificial Sequence
  Description of Artificial Sequence: Synthetic oligonucleotide
  Sense strand starting at position 3412 of SEQ ID NO: 1883011
caaguaaauguuuguguac

SEQ ID NO: 2163613 - RNA, 19 nt, Artificial Sequence
  Description of Artificial Sequence: Synthetic oligonucleotide
  Antisense strand to SEQ ID NO: 2163612
guacacaaacauuuacuug

SEQ ID NO: 2163614 - RNA, 19 nt, Artificial Sequence
  Description of Artificial Sequence: Synthetic oligonucleotide
  Sense strand starting at position 3413 of SEQ ID NO: 1883011
aaguaaauguuuguguaca

SEQ ID NO: 2163615 - RNA, 19 nt, Artificial Sequence
  Description of Artificial Sequence: Synthetic oligonucleotide
  Antisense strand to SEQ ID NO: 2163614
uguacacaaacauuuacuu

SEQ ID NO: 2163616 - RNA, 19 nt, Artificial Sequence
  Description of Artificial Sequence: Synthetic oligonucleotide
  Sense strand starting at position 3414 of SEQ ID NO: 1883011
aguaaauguuuguguacac

SEQ ID NO: 2163617 - RNA, 19 nt, Artificial Sequence
  Description of Artificial Sequence: Synthetic oligonucleotide
  Antisense strand to SEQ ID NO: 2163616
guguacacaaacauuuacu

SEQ ID NO: 2163618 - RNA, 19 nt, Artificial Sequence
  Description of Artificial Sequence: Synthetic oligonucleotide
  Sense strand starting at position 3415 of SEQ ID NO: 1883011
guaaauguuuguguacaca

SEQ ID NO: 2163619 - RNA, 19 nt, Artificial Sequence
  Description of Artificial Sequence: Synthetic oligonucleotide
  Antisense strand to SEQ ID NO: 2163618
uguguacacaaacauuuac

SEQ ID NO: 2163620 - RNA, 19 nt, Artificial Sequence
  Description of Artificial Sequence: Synthetic oligonucleotide
  Sense strand starting at position 3481 of SEQ ID NO: 1883011
cagagugcuccguagagaa

SEQ ID NO: 2163621 - RNA, 19 nt, Artificial Sequence
  Description of Artificial Sequence: Synthetic oligonucleotide
  Antisense strand to SEQ ID NO: 2163620
uucucuacggagcacucug

SEQ ID NO: 2163622 - RNA, 19 nt, Artificial Sequence
  Description of Artificial Sequence: Synthetic oligonucleotide
  Sense strand starting at position 3483 of SEQ ID NO: 1883011
gagugcuccguagagaaag

SEQ ID NO: 2163623 - RNA, 19 nt, Artificial Sequence
  Description of Artificial Sequence: Synthetic oligonucleotide
  Antisense strand to SEQ ID NO: 2163622
cuuucucuacggagcacuc

SEQ ID NO: 2163624 - RNA, 19 nt, Artificial Sequence
  Description of Artificial Sequence: Synthetic oligonucleotide
  Sense strand starting at position 3485 of SEQ ID NO: 1883011
gugcuccguagagaaaguu

SEQ ID NO: 2163625 - RNA, 19 nt, Artificial Sequence
  Description of Artificial Sequence: Synthetic oligonucleotide
  Antisense strand to SEQ ID NO: 2163624
aacuuucucuacggagcac

SEQ ID NO: 2163626 - RNA, 19 nt, Artificial Sequence
  Description of Artificial Sequence: Synthetic oligonucleotide
  Sense strand starting at position 3525 of SEQ ID NO: 1883011
gugggagugcgcagugaau

SEQ ID NO: 2163627 - RNA, 19 nt, Artificial Sequence
  Description of Artificial Sequence: Synthetic oligonucleotide
  Antisense strand to SEQ ID NO: 2163626
auucacugcgcacucccac

SEQ ID NO: 2163628 - RNA, 19 nt, Artificial Sequence
  Description of Artificial Sequence: Synthetic oligonucleotide
  Sense strand starting at position 3695 of SEQ ID NO: 1883011
agguccuccuguguaaacu

SEQ ID NO: 2163629 - RNA, 19 nt, Artificial Sequence
  Description of Artificial Sequence: Synthetic oligonucleotide
  Antisense strand to SEQ ID NO: 2163628
aguuuacacaggaggaccu

SEQ ID NO: 2163630 - RNA, 19 nt, Artificial Sequence
  Description of Artificial Sequence: Synthetic oligonucleotide
  Sense strand starting at position 3726 of SEQ ID NO: 1883011
ugccuaacgcuugggugaa

SEQ ID NO: 2163631 - RNA, 19 nt, Artificial Sequence
  Description of Artificial Sequence: Synthetic oligonucleotide
  Antisense strand to SEQ ID NO: 2163630
uucacccaagcguuaggca

SEQ ID NO: 2163632 - RNA, 19 nt, Artificial Sequence
  Description of Artificial Sequence: Synthetic oligonucleotide
  Sense strand starting at position 3886 of SEQ ID NO: 1883011
cucgauuaugcaggaauaa

SEQ ID NO: 2163633 - RNA, 19 nt, Artificial Sequence
  Description of Artificial Sequence: Synthetic oligonucleotide
  Antisense strand to SEQ ID NO: 2163632
uuauuccugcauaaucgag

SEQ ID NO: 2163634 - RNA, 19 nt, Artificial Sequence
  Description of Artificial Sequence: Synthetic oligonucleotide
  Sense strand starting at position 3899 of SEQ ID NO: 1883011
gaauaaguguucuauuuga

SEQ ID NO: 2163635 - RNA, 19 nt, Artificial Sequence
  Description of Artificial Sequence: Synthetic oligonucleotide
  Antisense strand to SEQ ID NO: 2163634
ucaaauagaacacuuauuc

SEQ ID NO: 2163636 - RNA, 19 nt, Artificial Sequence
  Description of Artificial Sequence: Synthetic oligonucleotide
  Sense strand starting at position 3933 of SEQ ID NO: 1883011
guuuacaucucucauguaa

SEQ ID NO: 2163637 - RNA, 19 nt, Artificial Sequence
  Description of Artificial Sequence: Synthetic oligonucleotide
  Antisense strand to SEQ ID NO: 2163636
uuacaugagagauguaaac

SEQ ID NO: 2163638 - RNA, 19 nt, Artificial Sequence
  Description of Artificial Sequence: Synthetic oligonucleotide
  Sense strand starting at position 3961 of SEQ ID NO: 1883011
aaccauguucgugaguuaa

SEQ ID NO: 2163639 - RNA, 19 nt, Artificial Sequence
  Description of Artificial Sequence: Synthetic oligonucleotide
  Antisense strand to SEQ ID NO: 2163638
uuaacucacgaacaugguu

SEQ ID NO: 2163640 - RNA, 19 nt, Artificial Sequence
  Description of Artificial Sequence: Synthetic oligonucleotide
  Sense strand starting at position 16 of SEQ ID NO: 1883012
aaagguaaggcacgaauaa

SEQ ID NO: 2163641 - RNA, 19 nt, Artificial Sequence
  Description of Artificial Sequence: Synthetic oligonucleotide
  Antisense strand to SEQ ID NO: 2163640
uuauucgugccuuaccuuu

SEQ ID NO: 2163642 - RNA, 19 nt, Artificial Sequence
  Description of Artificial Sequence: Synthetic oligonucleotide
  Sense strand starting at position 117 of SEQ ID NO: 1883012
gccauucuuuauucuguua

SEQ ID NO: 2163643 - RNA, 19 nt, Artificial Sequence
  Description of Artificial Sequence: Synthetic oligonucleotide
  Antisense strand to SEQ ID NO: 2163642
uaacagaauaaagaauggc

SEQ ID NO: 2163644 - RNA, 19 nt, Artificial Sequence
  Description of Artificial Sequence: Synthetic oligonucleotide
  Sense strand starting at position 122 of SEQ ID NO: 1883012
ucuuuauucuguuacuggu

SEQ ID NO: 2163645 - RNA, 19 nt, Artificial Sequence
  Description of Artificial Sequence: Synthetic oligonucleotide
  Antisense strand to SEQ ID NO: 2163644
accaguaacagaauaaaga

SEQ ID NO: 2163646 - RNA, 19 nt, Artificial Sequence
  Description of Artificial Sequence: Synthetic oligonucleotide
  Sense strand starting at position 592 of SEQ ID NO: 1883012
uacagaacuugugagguuu

SEQ ID NO: 2163647 - RNA, 19 nt, Artificial Sequence
  Description of Artificial Sequence: Synthetic oligonucleotide
  Antisense strand to SEQ ID NO: 2163646
aaaccucacaaguucugua

SEQ ID NO: 2163648 - RNA, 19 nt, Artificial Sequence
  Description of Artificial Sequence: Synthetic oligonucleotide
  Sense strand starting at position 594 of SEQ ID NO: 1883012
cagaacuugugagguuuaa

SEQ ID NO: 2163649 - RNA, 19 nt, Artificial Sequence
  Description of Artificial Sequence: Synthetic oligonucleotide
  Antisense strand to SEQ ID NO: 2163648
uuaaaccucacaaguucug

SEQ ID NO: 2163650 - RNA, 19 nt, Artificial Sequence
  Description of Artificial Sequence: Synthetic oligonucleotide
  Sense strand starting at position 598 of SEQ ID NO: 1883012
acuugugagguuuaaauac

SEQ ID NO: 2163651 - RNA, 19 nt, Artificial Sequence
  Description of Artificial Sequence: Synthetic oligonucleotide
  Antisense strand to SEQ ID NO: 2163650
guauuuaaaccucacaagu

SEQ ID NO: 2163652 - RNA, 19 nt, Artificial Sequence
  Description of Artificial Sequence: Synthetic oligonucleotide
  Sense strand starting at position 888 of SEQ ID NO: 1883012
uugacaugguugucaggaa

SEQ ID NO: 2163653 - RNA, 19 nt, Artificial Sequence
  Description of Artificial Sequence: Synthetic oligonucleotide
  Antisense strand to SEQ ID NO: 2163652
uuccugacaaccaugucaa

SEQ ID NO: 2163654 - RNA, 19 nt, Artificial Sequence
  Description of Artificial Sequence: Synthetic oligonucleotide
  Sense strand starting at position 889 of SEQ ID NO: 1883012
ugacaugguugucaggaaa

SEQ ID NO: 2163655 - RNA, 19 nt, Artificial Sequence
  Description of Artificial Sequence: Synthetic oligonucleotide
  Antisense strand to SEQ ID NO: 2163654
uuuccugacaaccauguca

SEQ ID NO: 2163656 - RNA, 19 nt, Artificial Sequence
  Description of Artificial Sequence: Synthetic oligonucleotide
  Sense strand starting at position 892 of SEQ ID NO: 1883012
caugguugucaggaaacga

SEQ ID NO: 2163657 - RNA, 19 nt, Artificial Sequence
  Description of Artificial Sequence: Synthetic oligonucleotide
  Antisense strand to SEQ ID NO: 2163656
ucguuuccugacaaccaug

SEQ ID NO: 2163658 - RNA, 19 nt, Artificial Sequence
  Description of Artificial Sequence: Synthetic oligonucleotide
  Sense strand starting at position 2610 of SEQ ID NO: 1883012
uugcguuuccguuucaaug

SEQ ID NO: 2163659 - RNA, 19 nt, Artificial Sequence
  Description of Artificial Sequence: Synthetic oligonucleotide
  Antisense strand to SEQ ID NO: 2163658
cauugaaacggaaacgcaa

SEQ ID NO: 2163660 - RNA, 19 nt, Artificial Sequence
  Description of Artificial Sequence: Synthetic oligonucleotide
  Sense strand starting at position 2657 of SEQ ID NO: 1883012
ggcuguacuguuugauuga

SEQ ID NO: 2163661 - RNA, 19 nt, Artificial Sequence
  Description of Artificial Sequence: Synthetic oligonucleotide
  Antisense strand to SEQ ID NO: 2163660
ucaaucaaacaguacagcc

SEQ ID NO: 2163662 - RNA, 19 nt, Artificial Sequence
  Description of Artificial Sequence: Synthetic oligonucleotide
  Sense strand starting at position 2745 of SEQ ID NO: 1883012
cgccguuggugauaucgaa

SEQ ID NO: 2163663 - RNA, 19 nt, Artificial Sequence
  Description of Artificial Sequence: Synthetic oligonucleotide
  Antisense strand to SEQ ID NO: 2163662
uucgauaucaccaacggcg

SEQ ID NO: 2163664 - RNA, 19 nt, Artificial Sequence
  Description of Artificial Sequence: Synthetic oligonucleotide
  Sense strand starting at position 2955 of SEQ ID NO: 1883012
aguggauuggccgggaacu

SEQ ID NO: 2163665 - RNA, 19 nt, Artificial Sequence
  Description of Artificial Sequence: Synthetic oligonucleotide
  Antisense strand to SEQ ID NO: 2163664
aguucccggccaauccacu

SEQ ID NO: 2163666 - RNA, 19 nt, Artificial Sequence
  Description of Artificial Sequence: Synthetic oligonucleotide
  Sense strand starting at position 3392 of SEQ ID NO: 1883012
gauagagacuuggucuuaa

SEQ ID NO: 2163667 - RNA, 19 nt, Artificial Sequence
  Description of Artificial Sequence: Synthetic oligonucleotide
  Antisense strand to SEQ ID NO: 2163666
uuaagaccaagucucuauc

SEQ ID NO: 2163668 - RNA, 19 nt, Artificial Sequence
  Description of Artificial Sequence: Synthetic oligonucleotide
  Sense strand starting at position 3665 of SEQ ID NO: 1883012
guggcugugauuugucagu

SEQ ID NO: 2163669 - RNA, 19 nt, Artificial Sequence
  Description of Artificial Sequence: Synthetic oligonucleotide
  Antisense strand to SEQ ID NO: 2163668
acugacaaaucacagccac

SEQ ID NO: 2163670 - RNA, 19 nt, Artificial Sequence
  Description of Artificial Sequence: Synthetic oligonucleotide
  Sense strand starting at position 3667 of SEQ ID NO: 1883012
ggcugugauuugucaguaa

SEQ ID NO: 2163671 - RNA, 19 nt, Artificial Sequence
  Description of Artificial Sequence: Synthetic oligonucleotide
  Antisense strand to SEQ ID NO: 2163670
uuacugacaaaucacagcc

SEQ ID NO: 2163672 - RNA, 19 nt, Artificial Sequence
  Description of Artificial Sequence: Synthetic oligonucleotide
  Sense strand starting at position 3693 of SEQ ID NO: 1883012
gggcaucuggcggacaaau

SEQ ID NO: 2163673 - RNA, 19 nt, Artificial Sequence
  Description of Artificial Sequence: Synthetic oligonucleotide
  Antisense strand to SEQ ID NO: 2163672
auuuguccgccagaugccc

SEQ ID NO: 2163674 - RNA, 19 nt, Artificial Sequence
  Description of Artificial Sequence: Synthetic oligonucleotide
  Sense strand starting at position 3736 of SEQ ID NO: 1883012
gggcauuugugggucucaa

SEQ ID NO: 2163675 - RNA, 19 nt, Artificial Sequence
  Description of Artificial Sequence: Synthetic oligonucleotide
  Antisense strand to SEQ ID NO: 2163674
uugagacccacaaaugccc

SEQ ID NO: 2163676 - RNA, 19 nt, Artificial Sequence
  Description of Artificial Sequence: Synthetic oligonucleotide
  Sense strand starting at position 3890 of SEQ ID NO: 1883012
ugcugugcucuguggagau

SEQ ID NO: 2163677 - RNA, 19 nt, Artificial Sequence
  Description of Artificial Sequence: Synthetic oligonucleotide
  Antisense strand to SEQ ID NO: 2163676
aucuccacagagcacagca

SEQ ID NO: 2163678 - RNA, 19 nt, Artificial Sequence
  Description of Artificial Sequence: Synthetic oligonucleotide
  Sense strand starting at position 3894 of SEQ ID NO: 1883012
gugcucuguggagaucaca

SEQ ID NO: 2163679 - RNA, 19 nt, Artificial Sequence
  Description of Artificial Sequence: Synthetic oligonucleotide
  Antisense strand to SEQ ID NO: 2163678
ugugaucuccacagagcac

SEQ ID NO: 2163680 - RNA, 19 nt, Artificial Sequence
  Description of Artificial Sequence: Synthetic oligonucleotide
  Sense strand starting at position 3903 of SEQ ID NO: 1883012
ggagaucacacgugagauu

SEQ ID NO: 2163681 - RNA, 19 nt, Artificial Sequence
  Description of Artificial Sequence: Synthetic oligonucleotide
  Antisense strand to SEQ ID NO: 2163680
aaucucacgugugaucucc

SEQ ID NO: 2163682 - RNA, 19 nt, Artificial Sequence
  Description of Artificial Sequence: Synthetic oligonucleotide
  Sense strand starting at position 48 of SEQ ID NO: 1883013
ggucaaaucacagggacuu

SEQ ID NO: 2163683 - RNA, 19 nt, Artificial Sequence
  Description of Artificial Sequence: Synthetic oligonucleotide
  Antisense strand to SEQ ID NO: 2163682
aagucccugugauuugacc

SEQ ID NO: 2163684 - RNA, 19 nt, Artificial Sequence
  Description of Artificial Sequence: Synthetic oligonucleotide
  Sense strand starting at position 1333 of SEQ ID NO: 1883013
aggcaagaaucagauggau

SEQ ID NO: 2163685 - RNA, 19 nt, Artificial Sequence
  Description of Artificial Sequence: Synthetic oligonucleotide
  Antisense strand to SEQ ID NO: 2163684
auccaucugauucuugccu

SEQ ID NO: 2163686 - RNA, 19 nt, Artificial Sequence
  Description of Artificial Sequence: Synthetic oligonucleotide
  Sense strand starting at position 1778 of SEQ ID NO: 1883013
gugggcugucguccuacau

SEQ ID NO: 2163687 - RNA, 19 nt, Artificial Sequence
  Description of Artificial Sequence: Synthetic oligonucleotide
  Antisense strand to SEQ ID NO: 2163686
auguaggacgacagcccac

SEQ ID NO: 2163688 - RNA, 19 nt, Artificial Sequence
  Description of Artificial Sequence: Synthetic oligonucleotide
  Sense strand starting at position 2276 of SEQ ID NO: 1883013
uaaggaaucugggaggaga

SEQ ID NO: 2163689 - RNA, 19 nt, Artificial Sequence
  Description of Artificial Sequence: Synthetic oligonucleotide
  Antisense strand to SEQ ID NO: 2163688
ucuccucccagauuccuua

SEQ ID NO: 2163690 - RNA, 19 nt, Artificial Sequence
  Description of Artificial Sequence: Synthetic oligonucleotide
  Sense strand starting at position 2451 of SEQ ID NO: 1883013
cugaucuacccugaaugca

SEQ ID NO: 2163691 - RNA, 19 nt, Artificial Sequence
  Description of Artificial Sequence: Synthetic oligonucleotide
  Antisense strand to SEQ ID NO: 2163690
ugcauucaggguagaucag

SEQ ID NO: 2163692 - RNA, 19 nt, Artificial Sequence
  Description of Artificial Sequence: Synthetic oligonucleotide
  Sense strand starting at position 2494 of SEQ ID NO: 1883013
cgcugucucccuugucaua

SEQ ID NO: 2163693 - RNA, 19 nt, Artificial Sequence
  Description of Artificial Sequence: Synthetic oligonucleotide
  Antisense strand to SEQ ID NO: 2163692
uaugacaagggagacagcg

SEQ ID NO: 2163694 - RNA, 19 nt, Artificial Sequence
  Description of Artificial Sequence: Synthetic oligonucleotide
  Sense strand starting at position 2499 of SEQ ID NO: 1883013
ucucccuugucauagguga

SEQ ID NO: 2163695 - RNA, 19 nt, Artificial Sequence
  Description of Artificial Sequence: Synthetic oligonucleotide
  Antisense strand to SEQ ID NO: 2163694
ucaccuaugacaagggaga

SEQ ID NO: 2163696 - RNA, 19 nt, Artificial Sequence
  Description of Artificial Sequence: Synthetic oligonucleotide
  Sense strand starting at position 2501 of SEQ ID NO: 1883013
ucccuugucauaggugaug

SEQ ID NO: 2163697 - RNA, 19 nt, Artificial Sequence
  Description of Artificial Sequence: Synthetic oligonucleotide
  Antisense strand to SEQ ID NO: 2163696
caucaccuaugacaaggga

SEQ ID NO: 2163698 - RNA, 19 nt, Artificial Sequence
  Description of Artificial Sequence: Synthetic oligonucleotide
  Sense strand starting at position 2591 of SEQ ID NO: 1883013
aggaaauccuguuggcuuc

SEQ ID NO: 2163699 - RNA, 19 nt, Artificial Sequence
  Description of Artificial Sequence: Synthetic oligonucleotide
  Antisense strand to SEQ ID NO: 2163698
gaagccaacaggauuuccu

SEQ ID NO: 2163700 - RNA, 19 nt, Artificial Sequence
  Description of Artificial Sequence: Synthetic oligonucleotide
  Sense strand starting at position 2725 of SEQ ID NO: 1883013
ggagaauuggccuggcuag

SEQ ID NO: 2163701 - RNA, 19 nt, Artificial Sequence
  Description of Artificial Sequence: Synthetic oligonucleotide
  Antisense strand to SEQ ID NO: 2163700
cuagccaggccaauucucc

SEQ ID NO: 2163702 - RNA, 19 nt, Artificial Sequence
  Description of Artificial Sequence: Synthetic oligonucleotide
  Sense strand starting at position 2726 of SEQ ID NO: 1883013
gagaauuggccuggcuagu

SEQ ID NO: 2163703 - RNA, 19 nt, Artificial Sequence
  Description of Artificial Sequence: Synthetic oligonucleotide
  Antisense strand to SEQ ID NO: 2163702
acuagccaggccaauucuc

SEQ ID NO: 2163704 - RNA, 19 nt, Artificial Sequence
  Description of Artificial Sequence: Synthetic oligonucleotide
  Sense strand starting at position 2900 of SEQ ID NO: 1883013
agugcauaccucugaguug

SEQ ID NO: 2163705 - RNA, 19 nt, Artificial Sequence
  Description of Artificial Sequence: Synthetic oligonucleotide
  Antisense strand to SEQ ID NO: 2163704
caacucagagguaugcacu

SEQ ID NO: 2163706 - RNA, 19 nt, Artificial Sequence
  Description of Artificial Sequence: Synthetic oligonucleotide
  Sense strand starting at position 2901 of SEQ ID NO: 1883013
gugcauaccucugaguuga

SEQ ID NO: 2163707 - RNA, 19 nt, Artificial Sequence
  Description of Artificial Sequence: Synthetic oligonucleotide
  Antisense strand to SEQ ID NO: 2163706
ucaacucagagguaugcac

SEQ ID NO: 2163708 - RNA, 19 nt, Artificial Sequence
  Description of Artificial Sequence: Synthetic oligonucleotide
  Sense strand starting at position 2903 of SEQ ID NO: 1883013
gcauaccucugaguugaau

SEQ ID NO: 2163709 - RNA, 19 nt, Artificial Sequence
  Description of Artificial Sequence: Synthetic oligonucleotide
  Antisense strand to SEQ ID NO: 2163708
auucaacucagagguaugc

SEQ ID NO: 2163710 - RNA, 19 nt, Artificial Sequence
  Description of Artificial Sequence: Synthetic oligonucleotide
  Sense strand starting at position 3529 of SEQ ID NO: 1883013
ugacccuuuccagggauca

SEQ ID NO: 2163711 - RNA, 19 nt, Artificial Sequence
  Description of Artificial Sequence: Synthetic oligonucleotide
  Antisense strand to SEQ ID NO: 2163710
ugaucccuggaaaggguca

SEQ ID NO: 2163712 - RNA, 19 nt, Artificial Sequence
  Description of Artificial Sequence: Synthetic oligonucleotide
  Sense strand starting at position 3542 of SEQ ID NO: 1883013
ggaucaguuugcuuugugu

SEQ ID NO: 2163713 - RNA, 19 nt, Artificial Sequence
  Description of Artificial Sequence: Synthetic oligonucleotide
  Antisense strand to SEQ ID NO: 2163712
acacaaagcaaacugaucc

SEQ ID NO: 2163714 - RNA, 19 nt, Artificial Sequence
  Description of Artificial Sequence: Synthetic oligonucleotide
  Sense strand starting at position 3560 of SEQ ID NO: 1883013
ugcugugagccagaaucca

SEQ ID NO: 2163715 - RNA, 19 nt, Artificial Sequence
  Description of Artificial Sequence: Synthetic oligonucleotide
  Antisense strand to SEQ ID NO: 2163714
uggauucuggcucacagca

SEQ ID NO: 2163716 - RNA, 19 nt, Artificial Sequence
  Description of Artificial Sequence: Synthetic oligonucleotide
  Sense strand starting at position 3611 of SEQ ID NO: 1883013
gguugaucucguccacggu

SEQ ID NO: 2163717 - RNA, 19 nt, Artificial Sequence
  Description of Artificial Sequence: Synthetic oligonucleotide
  Antisense strand to SEQ ID NO: 2163716
accguggacgagaucaacc

SEQ ID NO: 2163718 - RNA, 19 nt, Artificial Sequence
  Description of Artificial Sequence: Synthetic oligonucleotide
  Sense strand starting at position 3694 of SEQ ID NO: 1883013
gucaaagacucaucauguc

SEQ ID NO: 2163719 - RNA, 19 nt, Artificial Sequence
  Description of Artificial Sequence: Synthetic oligonucleotide
  Antisense strand to SEQ ID NO: 2163718
gacaugaugagucuuugac

SEQ ID NO: 2163720 - RNA, 19 nt, Artificial Sequence
  Description of Artificial Sequence: Synthetic oligonucleotide
  Sense strand starting at position 3713 of SEQ ID NO: 1883013
ugcuuaauccuguggugcu

SEQ ID NO: 2163721 - RNA, 19 nt, Artificial Sequence
  Description of Artificial Sequence: Synthetic oligonucleotide
  Antisense strand to SEQ ID NO: 2163720
agcaccacaggauuaagca

SEQ ID NO: 2163722 - RNA, 19 nt, Artificial Sequence
  Description of Artificial Sequence: Synthetic oligonucleotide
  Sense strand starting at position 62 of SEQ ID NO: 1883014
ggagccgaugccuguaauu

SEQ ID NO: 2163723 - RNA, 19 nt, Artificial Sequence
  Description of Artificial Sequence: Synthetic oligonucleotide
  Antisense strand to SEQ ID NO: 2163722
aauuacaggcaucggcucc

SEQ ID NO: 2163724 - RNA, 19 nt, Artificial Sequence
  Description of Artificial Sequence: Synthetic oligonucleotide
  Sense strand starting at position 64 of SEQ ID NO: 1883014
agccgaugccuguaauuuc

SEQ ID NO: 2163725 - RNA, 19 nt, Artificial Sequence
  Description of Artificial Sequence: Synthetic oligonucleotide
  Antisense strand to SEQ ID NO: 2163724
gaaauuacaggcaucggcu

SEQ ID NO: 2163726 - RNA, 19 nt, Artificial Sequence
  Description of Artificial Sequence: Synthetic oligonucleotide
  Sense strand starting at position 94 of SEQ ID NO: 1883014
acacuugaggcgggagaau

SEQ ID NO: 2163727 - RNA, 19 nt, Artificial Sequence
  Description of Artificial Sequence: Synthetic oligonucleotide
  Antisense strand to SEQ ID NO: 2163726
auucucccgccucaagugu

SEQ ID NO: 2163728 - RNA, 19 nt, Artificial Sequence
  Description of Artificial Sequence: Synthetic oligonucleotide
  Sense strand starting at position 103 of SEQ ID NO: 1883014
gcgggagaauggcuugagu

SEQ ID NO: 2163729 - RNA, 19 nt, Artificial Sequence
  Description of Artificial Sequence: Synthetic oligonucleotide
  Antisense strand to SEQ ID NO: 2163728
acucaagccauucucccgc

SEQ ID NO: 2163730 - RNA, 19 nt, Artificial Sequence
  Description of Artificial Sequence: Synthetic oligonucleotide
  Sense strand starting at position 562 of SEQ ID NO: 1883014
ccacacuguucugaaagua

SEQ ID NO: 2163731 - RNA, 19 nt, Artificial Sequence
  Description of Artificial Sequence: Synthetic oligonucleotide
  Antisense strand to SEQ ID NO: 2163730
uacuuucagaacagugugg

SEQ ID NO: 2163732 - RNA, 19 nt, Artificial Sequence
  Description of Artificial Sequence: Synthetic oligonucleotide
  Sense strand starting at position 570 of SEQ ID NO: 1883014
uucugaaaguaucuugacu

SEQ ID NO: 2163733 - RNA, 19 nt, Artificial Sequence
  Description of Artificial Sequence: Synthetic oligonucleotide
  Antisense strand to SEQ ID NO: 2163732
agucaagauacuuucagaa

SEQ ID NO: 2163734 - RNA, 19 nt, Artificial Sequence
  Description of Artificial Sequence: Synthetic oligonucleotide
  Sense strand starting at position 632 of SEQ ID NO: 1883014
acugauuggaaaggucauu

SEQ ID NO: 2163735 - RNA, 19 nt, Artificial Sequence
  Description of Artificial Sequence: Synthetic oligonucleotide
  Antisense strand to SEQ ID NO: 2163734
aaugaccuuuccaaucagu

SEQ ID NO: 2163736 - RNA, 19 nt, Artificial Sequence
  Description of Artificial Sequence: Synthetic oligonucleotide
  Sense strand starting at position 670 of SEQ ID NO: 1883014
auuucuuaaucuugaggau

SEQ ID NO: 2163737 - RNA, 19 nt, Artificial Sequence
  Description of Artificial Sequence: Synthetic oligonucleotide
  Antisense strand to SEQ ID NO: 2163736
auccucaagauuaagaaau

SEQ ID NO: 2163738 - RNA, 19 nt, Artificial Sequence
  Description of Artificial Sequence: Synthetic oligonucleotide
  Sense strand starting at position 673 of SEQ ID NO: 1883014
ucuuaaucuugaggauaug

SEQ ID NO: 2163739 - RNA, 19 nt, Artificial Sequence
  Description of Artificial Sequence: Synthetic oligonucleotide
  Antisense strand to SEQ ID NO: 2163738
cauauccucaagauuaaga

SEQ ID NO: 2163740 - RNA, 19 nt, Artificial Sequence
  Description of Artificial Sequence: Synthetic oligonucleotide
  Sense strand starting at position 685 of SEQ ID NO: 1883014
ggauaugaaucaguaacuc

SEQ ID NO: 2163741 - RNA, 19 nt, Artificial Sequence
  Description of Artificial Sequence: Synthetic oligonucleotide
  Antisense strand to SEQ ID NO: 2163740
gaguuacugauucauaucc

SEQ ID NO: 2163742 - RNA, 19 nt, Artificial Sequence
  Description of Artificial Sequence: Synthetic oligonucleotide
  Sense strand starting at position 1112 of SEQ ID NO: 1883014
ggucacucgcgcugagaca

SEQ ID NO: 2163743 - RNA, 19 nt, Artificial Sequence
  Description of Artificial Sequence: Synthetic oligonucleotide
  Antisense strand to SEQ ID NO: 2163742
ugucucagcgcgagugacc

SEQ ID NO: 2163744 - RNA, 19 nt, Artificial Sequence
  Description of Artificial Sequence: Synthetic oligonucleotide
  Sense strand starting at position 2380 of SEQ ID NO: 1883014
guuaaagggucuuaagcca

SEQ ID NO: 2163745 - RNA, 19 nt, Artificial Sequence
  Description of Artificial Sequence: Synthetic oligonucleotide
  Antisense strand to SEQ ID NO: 2163744
uggcuuaagacccuuuaac

SEQ ID NO: 2163746 - RNA, 19 nt, Artificial Sequence
  Description of Artificial Sequence: Synthetic oligonucleotide
  Sense strand starting at position 2393 of SEQ ID NO: 1883014
aagccaaucguuugaucca

SEQ ID NO: 2163747 - RNA, 19 nt, Artificial Sequence
  Description of Artificial Sequence: Synthetic oligonucleotide
  Antisense strand to SEQ ID NO: 2163746
uggaucaaacgauuggcuu

SEQ ID NO: 2163748 - RNA, 19 nt, Artificial Sequence
  Description of Artificial Sequence: Synthetic oligonucleotide
  Sense strand starting at position 2719 of SEQ ID NO: 1883014
ugaaauaauuaaccagugu

SEQ ID NO: 2163749 - RNA, 19 nt, Artificial Sequence
  Description of Artificial Sequence: Synthetic oligonucleotide
  Antisense strand to SEQ ID NO: 2163748
acacugguuaauuauuuca

SEQ ID NO: 2163750 - RNA, 19 nt, Artificial Sequence
  Description of Artificial Sequence: Synthetic oligonucleotide
  Sense strand starting at position 2723 of SEQ ID NO: 1883014
auaauuaaccagugucaca

SEQ ID NO: 2163751 - RNA, 19 nt, Artificial Sequence
  Description of Artificial Sequence: Synthetic oligonucleotide
  Antisense strand to SEQ ID NO: 2163750
ugugacacugguuaauuau

SEQ ID NO: 2163752 - RNA, 19 nt, Artificial Sequence
  Description of Artificial Sequence: Synthetic oligonucleotide
  Sense strand starting at position 2746 of SEQ ID NO: 1883014
augaaugguugagucacaa

SEQ ID NO: 2163753 - RNA, 19 nt, Artificial Sequence
  Description of Artificial Sequence: Synthetic oligonucleotide
  Antisense strand to SEQ ID NO: 2163752
uugugacucaaccauucau

SEQ ID NO: 2163754 - RNA, 19 nt, Artificial Sequence
  Description of Artificial Sequence: Synthetic oligonucleotide
  Sense strand starting at position 2773 of SEQ ID NO: 1883014
cuguuuacuuucuuuaugu

SEQ ID NO: 2163755 - RNA, 19 nt, Artificial Sequence
  Description of Artificial Sequence: Synthetic oligonucleotide
  Antisense strand to SEQ ID NO: 2163754
acauaaagaaaguaaacag

SEQ ID NO: 2163756 - RNA, 19 nt, Artificial Sequence
  Description of Artificial Sequence: Synthetic oligonucleotide
  Sense strand starting at position 2775 of SEQ ID NO: 1883014
guuuacuuucuuuauguga

SEQ ID NO: 2163757 - RNA, 19 nt, Artificial Sequence
  Description of Artificial Sequence: Synthetic oligonucleotide
  Antisense strand to SEQ ID NO: 2163756
ucacauaaagaaaguaaac

SEQ ID NO: 2163758 - RNA, 19 nt, Artificial Sequence
  Description of Artificial Sequence: Synthetic oligonucleotide
  Sense strand starting at position 2782 of SEQ ID NO: 1883014
uucuuuaugugauucccau

SEQ ID NO: 2163759 - RNA, 19 nt, Artificial Sequence
  Description of Artificial Sequence: Synthetic oligonucleotide
  Antisense strand to SEQ ID NO: 2163758
augggaaucacauaaagaa

SEQ ID NO: 2163760 - RNA, 19 nt, Artificial Sequence
  Description of Artificial Sequence: Synthetic oligonucleotide
  Sense strand starting at position 2786 of SEQ ID NO: 1883014
uuaugugauucccauguaa

SEQ ID NO: 2163761 - RNA, 19 nt, Artificial Sequence
  Description of Artificial Sequence: Synthetic oligonucleotide
  Antisense strand to SEQ ID NO: 2163760
uuacaugggaaucacauaa

SEQ ID NO: 2163762 - RNA, 19 nt, Artificial Sequence
  Description of Artificial Sequence: Synthetic oligonucleotide
  Sense strand starting at position 2788 of SEQ ID NO: 1883014
augugauucccauguaagg

SEQ ID NO: 2163763 - RNA, 19 nt, Artificial Sequence
  Description of Artificial Sequence: Synthetic oligonucleotide
  Antisense strand to SEQ ID NO: 2163762
ccuuacaugggaaucacau

SEQ ID NO: 2163764 - RNA, 19 nt, Artificial Sequence
  Description of Artificial Sequence: Synthetic oligonucleotide
  Sense strand starting at position 2827 of SEQ ID NO: 1883014
caugcugauugcucugagu

SEQ ID NO: 2163765 - RNA, 19 nt, Artificial Sequence
  Description of Artificial Sequence: Synthetic oligonucleotide
  Antisense strand to SEQ ID NO: 2163764
acucagagcaaucagcaug

SEQ ID NO: 2163766 - RNA, 19 nt, Artificial Sequence
  Description of Artificial Sequence: Synthetic oligonucleotide
  Sense strand starting at position 2849 of SEQ ID NO: 1883014
ggaugccaucuauggugaa

SEQ ID NO: 2163767 - RNA, 19 nt, Artificial Sequence
  Description of Artificial Sequence: Synthetic oligonucleotide
  Antisense strand to SEQ ID NO: 2163766
uucaccauagauggcaucc

SEQ ID NO: 2163768 - RNA, 19 nt, Artificial Sequence
  Description of Artificial Sequence: Synthetic oligonucleotide
  Sense strand starting at position 2853 of SEQ ID NO: 1883014
gccaucuauggugaaaggu

SEQ ID NO: 2163769 - RNA, 19 nt, Artificial Sequence
  Description of Artificial Sequence: Synthetic oligonucleotide
  Antisense strand to SEQ ID NO: 2163768
accuuucaccauagauggc

SEQ ID NO: 2163770 - RNA, 19 nt, Artificial Sequence
  Description of Artificial Sequence: Synthetic oligonucleotide
  Sense strand starting at position 3113 of SEQ ID NO: 1883014
ucucgaguagccggaauua

SEQ ID NO: 2163771 - RNA, 19 nt, Artificial Sequence
  Description of Artificial Sequence: Synthetic oligonucleotide
  Antisense strand to SEQ ID NO: 2163770
uaauuccggcuacucgaga

SEQ ID NO: 2163772 - RNA, 19 nt, Artificial Sequence
  Description of Artificial Sequence: Synthetic oligonucleotide
  Sense strand starting at position 3211 of SEQ ID NO: 1883014
uuggaaucgugaccucaag

SEQ ID NO: 2163773 - RNA, 19 nt, Artificial Sequence
  Description of Artificial Sequence: Synthetic oligonucleotide
  Antisense strand to SEQ ID NO: 2163772
cuugaggucacgauuccaa

SEQ ID NO: 2163774 - RNA, 19 nt, Artificial Sequence
  Description of Artificial Sequence: Synthetic oligonucleotide
  Sense strand starting at position 3332 of SEQ ID NO: 1883014
uggccagucuagucuagua

SEQ ID NO: 2163775 - RNA, 19 nt, Artificial Sequence
  Description of Artificial Sequence: Synthetic oligonucleotide
  Antisense strand to SEQ ID NO: 2163774
uacuagacuagacuggcca

SEQ ID NO: 2163776 - RNA, 19 nt, Artificial Sequence
  Description of Artificial Sequence: Synthetic oligonucleotide
  Sense strand starting at position 3433 of SEQ ID NO: 1883014
uucuguucuugcucauuau

SEQ ID NO: 2163777 - RNA, 19 nt, Artificial Sequence
  Description of Artificial Sequence: Synthetic oligonucleotide
  Antisense strand to SEQ ID NO: 2163776
auaaugagcaagaacagaa

SEQ ID NO: 2163778 - RNA, 19 nt, Artificial Sequence
  Description of Artificial Sequence: Synthetic oligonucleotide
  Sense strand starting at position 3434 of SEQ ID NO: 1883014
ucuguucuugcucauuauu

SEQ ID NO: 2163779 - RNA, 19 nt, Artificial Sequence
  Description of Artificial Sequence: Synthetic oligonucleotide
  Antisense strand to SEQ ID NO: 2163778
aauaaugagcaagaacaga

SEQ ID NO: 2163780 - RNA, 19 nt, Artificial Sequence
  Description of Artificial Sequence: Synthetic oligonucleotide
  Sense strand starting at position 3439 of SEQ ID NO: 1883014
ucuugcucauuauugguaa

SEQ ID NO: 2163781 - RNA, 19 nt, Artificial Sequence
  Description of Artificial Sequence: Synthetic oligonucleotide
  Antisense strand to SEQ ID NO: 2163780
uuaccaauaaugagcaaga

SEQ ID NO: 2163782 - RNA, 19 nt, Artificial Sequence
  Description of Artificial Sequence: Synthetic oligonucleotide
  Sense strand starting at position 3442 of SEQ ID NO: 1883014
ugcucauuauugguaaagu

SEQ ID NO: 2163783 - RNA, 19 nt, Artificial Sequence
  Description of Artificial Sequence: Synthetic oligonucleotide
  Antisense strand to SEQ ID NO: 2163782
acuuuaccaauaaugagca

SEQ ID NO: 2163784 - RNA, 19 nt, Artificial Sequence
  Description of Artificial Sequence: Synthetic oligonucleotide
  Sense strand starting at position 3460 of SEQ ID NO: 1883014
uggagauuaauugauucgu

SEQ ID NO: 2163785 - RNA, 19 nt, Artificial Sequence
  Description of Artificial Sequence: Synthetic oligonucleotide
  Antisense strand to SEQ ID NO: 2163784
acgaaucaauuaaucucca

SEQ ID NO: 2163786 - RNA, 19 nt, Artificial Sequence
  Description of Artificial Sequence: Synthetic oligonucleotide
  Sense strand starting at position 3462 of SEQ ID NO: 1883014
gagauuaauugauucguuu

SEQ ID NO: 2163787 - RNA, 19 nt, Artificial Sequence
  Description of Artificial Sequence: Synthetic oligonucleotide
  Antisense strand to SEQ ID NO: 2163786
aaacgaaucaauuaaucuc

SEQ ID NO: 2163788 - RNA, 19 nt, Artificial Sequence
  Description of Artificial Sequence: Synthetic oligonucleotide
  Sense strand starting at position 3466 of SEQ ID NO: 1883014
uuaauugauucguuucuca

SEQ ID NO: 2163789 - RNA, 19 nt, Artificial Sequence
  Description of Artificial Sequence: Synthetic oligonucleotide
  Antisense strand to SEQ ID NO: 2163788
ugagaaacgaaucaauuaa

SEQ ID NO: 2163790 - RNA, 19 nt, Artificial Sequence
  Description of Artificial Sequence: Synthetic oligonucleotide
  Sense strand starting at position 3469 of SEQ ID NO: 1883014
auugauucguuucucaaau

SEQ ID NO: 2163791 - RNA, 19 nt, Artificial Sequence
  Description of Artificial Sequence: Synthetic oligonucleotide
  Antisense strand to SEQ ID NO: 2163790
auuugagaaacgaaucaau

SEQ ID NO: 2163792 - RNA, 19 nt, Artificial Sequence
  Description of Artificial Sequence: Synthetic oligonucleotide
  Sense strand starting at position 3470 of SEQ ID NO: 1883014
uugauucguuucucaaauu

SEQ ID NO: 2163793 - RNA, 19 nt, Artificial Sequence
  Description of Artificial Sequence: Synthetic oligonucleotide
  Antisense strand to SEQ ID NO: 2163792
aauuugagaaacgaaucaa

SEQ ID NO: 2163794 - RNA, 19 nt, Artificial Sequence
  Description of Artificial Sequence: Synthetic oligonucleotide
  Sense strand starting at position 3908 of SEQ ID NO: 1883014
aguacauuacauggugaua

SEQ ID NO: 2163795 - RNA, 19 nt, Artificial Sequence
  Description of Artificial Sequence: Synthetic oligonucleotide
  Antisense strand to SEQ ID NO: 2163794
uaucaccauguaauguacu

SEQ ID NO: 2163796 - RNA, 19 nt, Artificial Sequence
  Description of Artificial Sequence: Synthetic oligonucleotide
  Sense strand starting at position 3919 of SEQ ID NO: 1883014
uggugauaauugcuauuac

SEQ ID NO: 2163797 - RNA, 19 nt, Artificial Sequence
  Description of Artificial Sequence: Synthetic oligonucleotide
  Antisense strand to SEQ ID NO: 2163796
guaauagcaauuaucacca

SEQ ID NO: 2163798 - RNA, 19 nt, Artificial Sequence
  Description of Artificial Sequence: Synthetic oligonucleotide
  Sense strand starting at position 3964 of SEQ ID NO: 1883014
gaucuuaacugacuuguga

SEQ ID NO: 2163799 - RNA, 19 nt, Artificial Sequence
  Description of Artificial Sequence: Synthetic oligonucleotide
  Antisense strand to SEQ ID NO: 2163798
ucacaagucaguuaagauc

SEQ ID NO: 2163800 - RNA, 19 nt, Artificial Sequence
  Description of Artificial Sequence: Synthetic oligonucleotide
  Sense strand starting at position 3971 of SEQ ID NO: 1883014
acugacuugugaucauaga

SEQ ID NO: 2163801 - RNA, 19 nt, Artificial Sequence
  Description of Artificial Sequence: Synthetic oligonucleotide
  Antisense strand to SEQ ID NO: 2163800
ucuaugaucacaagucagu

SEQ ID NO: 2163802 - RNA, 19 nt, Artificial Sequence
  Description of Artificial Sequence: Synthetic oligonucleotide
  Sense strand starting at position 2842 of SEQ ID NO: 1883015
gcgugagcucacuacaauc

SEQ ID NO: 2163803 - RNA, 19 nt, Artificial Sequence
  Description of Artificial Sequence: Synthetic oligonucleotide
  Antisense strand to SEQ ID NO: 2163802
gauuguagugagcucacgc

SEQ ID NO: 2163804 - RNA, 19 nt, Artificial Sequence
  Description of Artificial Sequence: Synthetic oligonucleotide
  Sense strand starting at position 3094 of SEQ ID NO: 1883015
gggcucucaauauggagau

SEQ ID NO: 2163805 - RNA, 19 nt, Artificial Sequence
  Description of Artificial Sequence: Synthetic oligonucleotide
  Antisense strand to SEQ ID NO: 2163804
aucuccauauugagagccc

SEQ ID NO: 2163806 - RNA, 19 nt, Artificial Sequence
  Description of Artificial Sequence: Synthetic oligonucleotide
  Sense strand starting at position 3095 of SEQ ID NO: 1883015
ggcucucaauauggagaua

SEQ ID NO: 2163807 - RNA, 19 nt, Artificial Sequence
  Description of Artificial Sequence: Synthetic oligonucleotide
  Antisense strand to SEQ ID NO: 2163806
uaucuccauauugagagcc

SEQ ID NO: 2163808 - RNA, 19 nt, Artificial Sequence
  Description of Artificial Sequence: Synthetic oligonucleotide
  Sense strand starting at position 3272 of SEQ ID NO: 1883015
uuuguuacuuggucauaag

SEQ ID NO: 2163809 - RNA, 19 nt, Artificial Sequence
  Description of Artificial Sequence: Synthetic oligonucleotide
  Antisense strand to SEQ ID NO: 2163808
cuuaugaccaaguaacaaa

SEQ ID NO: 2163810 - RNA, 19 nt, Artificial Sequence
  Description of Artificial Sequence: Synthetic oligonucleotide
  Sense strand starting at position 3273 of SEQ ID NO: 1883015
uuguuacuuggucauaagu

SEQ ID NO: 2163811 - RNA, 19 nt, Artificial Sequence
  Description of Artificial Sequence: Synthetic oligonucleotide
  Antisense strand to SEQ ID NO: 2163810
acuuaugaccaaguaacaa

SEQ ID NO: 2163812 - RNA, 19 nt, Artificial Sequence
  Description of Artificial Sequence: Synthetic oligonucleotide
  Sense strand starting at position 3275 of SEQ ID NO: 1883015
guuacuuggucauaaguag

SEQ ID NO: 2163813 - RNA, 19 nt, Artificial Sequence
  Description of Artificial Sequence: Synthetic oligonucleotide
  Antisense strand to SEQ ID NO: 2163812
cuacuuaugaccaaguaac

SEQ ID NO: 2163814 - RNA, 19 nt, Artificial Sequence
  Description of Artificial Sequence: Synthetic oligonucleotide
  Sense strand starting at position 3858 of SEQ ID NO: 1883015
uuacauagucugugguacu

SEQ ID NO: 2163815 - RNA, 19 nt, Artificial Sequence
  Description of Artificial Sequence: Synthetic oligonucleotide
  Antisense strand to SEQ ID NO: 2163814
aguaccacagacuauguaa

SEQ ID NO: 2163816 - RNA, 19 nt, Artificial Sequence
  Description of Artificial Sequence: Synthetic oligonucleotide
  Sense strand starting at position 3859 of SEQ ID NO: 1883015
uacauagucugugguacuu

SEQ ID NO: 2163817 - RNA, 19 nt, Artificial Sequence
  Description of Artificial Sequence: Synthetic oligonucleotide
  Antisense strand to SEQ ID NO: 2163816
aaguaccacagacuaugua

SEQ ID NO: 2163818 - RNA, 19 nt, Artificial Sequence
  Description of Artificial Sequence: Synthetic oligonucleotide
  Sense strand starting at position 78 of SEQ ID NO: 1883016
cagcgugugcuguuacuga

SEQ ID NO: 2163819 - RNA, 19 nt, Artificial Sequence
  Description of Artificial Sequence: Synthetic oligonucleotide
  Antisense strand to SEQ ID NO: 2163818
ucaguaacagcacacgcug

SEQ ID NO: 2163820 - RNA, 19 nt, Artificial Sequence
  Description of Artificial Sequence: Synthetic oligonucleotide
  Sense strand starting at position 174 of SEQ ID NO: 1883016
ucagcaugcuccucugaga

SEQ ID NO: 2163821 - RNA, 19 nt, Artificial Sequence
  Description of Artificial Sequence: Synthetic oligonucleotide
  Antisense strand to SEQ ID NO: 2163820
ucucagaggagcaugcuga

SEQ ID NO: 2163822 - RNA, 19 nt, Artificial Sequence
  Description of Artificial Sequence: Synthetic oligonucleotide
  Sense strand starting at position 177 of SEQ ID NO: 1883016
gcaugcuccucugagaucu

SEQ ID NO: 2163823 - RNA, 19 nt, Artificial Sequence
  Description of Artificial Sequence: Synthetic oligonucleotide
  Antisense strand to SEQ ID NO: 2163822
agaucucagaggagcaugc

SEQ ID NO: 2163824 - RNA, 19 nt, Artificial Sequence
  Description of Artificial Sequence: Synthetic oligonucleotide
  Sense strand starting at position 272 of SEQ ID NO: 1883016
gcagcaucuagaggugaca

SEQ ID NO: 2163825 - RNA, 19 nt, Artificial Sequence
  Description of Artificial Sequence: Synthetic oligonucleotide
  Antisense strand to SEQ ID NO: 2163824
ugucaccucuagaugcugc

SEQ ID NO: 2163826 - RNA, 19 nt, Artificial Sequence
  Description of Artificial Sequence: Synthetic oligonucleotide
  Sense strand starting at position 476 of SEQ ID NO: 1883016
gugacagguacugagugua

SEQ ID NO: 2163827 - RNA, 19 nt, Artificial Sequence
  Description of Artificial Sequence: Synthetic oligonucleotide
  Antisense strand to SEQ ID NO: 2163826
uacacucaguaccugucac

SEQ ID NO: 2163828 - RNA, 19 nt, Artificial Sequence
  Description of Artificial Sequence: Synthetic oligonucleotide
  Sense strand starting at position 479 of SEQ ID NO: 1883016
acagguacugaguguacaa

SEQ ID NO: 2163829 - RNA, 19 nt, Artificial Sequence
  Description of Artificial Sequence: Synthetic oligonucleotide
  Antisense strand to SEQ ID NO: 2163828
uuguacacucaguaccugu

SEQ ID NO: 2163830 - RNA, 19 nt, Artificial Sequence
  Description of Artificial Sequence: Synthetic oligonucleotide
  Sense strand starting at position 835 of SEQ ID NO: 1883016
accucuagcuaagaaagaa

SEQ ID NO: 2163831 - RNA, 19 nt, Artificial Sequence
  Description of Artificial Sequence: Synthetic oligonucleotide
  Antisense strand to SEQ ID NO: 2163830
uucuuucuuagcuagaggu

SEQ ID NO: 2163832 - RNA, 19 nt, Artificial Sequence
  Description of Artificial Sequence: Synthetic oligonucleotide
  Sense strand starting at position 1184 of SEQ ID NO: 1883016
gggugaugcucuucagcca

SEQ ID NO: 2163833 - RNA, 19 nt, Artificial Sequence
  Description of Artificial Sequence: Synthetic oligonucleotide
  Antisense strand to SEQ ID NO: 2163832
uggcugaagagcaucaccc

SEQ ID NO: 2163834 - RNA, 19 nt, Artificial Sequence
  Description of Artificial Sequence: Synthetic oligonucleotide
  Sense strand starting at position 1434 of SEQ ID NO: 1883016
gucuguagugccucaucuu

SEQ ID NO: 2163835 - RNA, 19 nt, Artificial Sequence
  Description of Artificial Sequence: Synthetic oligonucleotide
  Antisense strand to SEQ ID NO: 2163834
aagaugaggcacuacagac

SEQ ID NO: 2163836 - RNA, 19 nt, Artificial Sequence
  Description of Artificial Sequence: Synthetic oligonucleotide
  Sense strand starting at position 1435 of SEQ ID NO: 1883016
ucuguagugccucaucuuu

SEQ ID NO: 2163837 - RNA, 19 nt, Artificial Sequence
  Description of Artificial Sequence: Synthetic oligonucleotide
  Antisense strand to SEQ ID NO: 2163836
aaagaugaggcacuacaga

SEQ ID NO: 2163838 - RNA, 19 nt, Artificial Sequence
  Description of Artificial Sequence: Synthetic oligonucleotide
  Sense strand starting at position 2365 of SEQ ID NO: 1883016
augccauuucugggucuuu

SEQ ID NO: 2163839 - RNA, 19 nt, Artificial Sequence
  Description of Artificial Sequence: Synthetic oligonucleotide
  Antisense strand to SEQ ID NO: 2163838
aaagacccagaaauggcau

SEQ ID NO: 2163840 - RNA, 19 nt, Artificial Sequence
  Description of Artificial Sequence: Synthetic oligonucleotide
  Sense strand starting at position 2370 of SEQ ID NO: 1883016
auuucugggucuuuguuau

SEQ ID NO: 2163841 - RNA, 19 nt, Artificial Sequence
  Description of Artificial Sequence: Synthetic oligonucleotide
  Antisense strand to SEQ ID NO: 2163840
auaacaaagacccagaaau

SEQ ID NO: 2163842 - RNA, 19 nt, Artificial Sequence
  Description of Artificial Sequence: Synthetic oligonucleotide
  Sense strand starting at position 2719 of SEQ ID NO: 1883016
ucuuauuucuuugagaguc

SEQ ID NO: 2163843 - RNA, 19 nt, Artificial Sequence
  Description of Artificial Sequence: Synthetic oligonucleotide
  Antisense strand to SEQ ID NO: 2163842
gacucucaaagaaauaaga

SEQ ID NO: 2163844 - RNA, 19 nt, Artificial Sequence
  Description of Artificial Sequence: Synthetic oligonucleotide
  Sense strand starting at position 2721 of SEQ ID NO: 1883016
uuauuucuuugagagucuu

SEQ ID NO: 2163845 - RNA, 19 nt, Artificial Sequence
  Description of Artificial Sequence: Synthetic oligonucleotide
  Antisense strand to SEQ ID NO: 2163844
aagacucucaaagaaauaa

SEQ ID NO: 2163846 - RNA, 19 nt, Artificial Sequence
  Description of Artificial Sequence: Synthetic oligonucleotide
  Sense strand starting at position 2727 of SEQ ID NO: 1883016
cuuugagagucuuuagcau

SEQ ID NO: 2163847 - RNA, 19 nt, Artificial Sequence
  Description of Artificial Sequence: Synthetic oligonucleotide
  Antisense strand to SEQ ID NO: 2163846
augcuaaagacucucaaag

SEQ ID NO: 2163848 - RNA, 19 nt, Artificial Sequence
  Description of Artificial Sequence: Synthetic oligonucleotide
  Sense strand starting at position 2731 of SEQ ID NO: 1883016
gagagucuuuagcauaggu

SEQ ID NO: 2163849 - RNA, 19 nt, Artificial Sequence
  Description of Artificial Sequence: Synthetic oligonucleotide
  Antisense strand to SEQ ID NO: 2163848
accuaugcuaaagacucuc

SEQ ID NO: 2163850 - RNA, 19 nt, Artificial Sequence
  Description of Artificial Sequence: Synthetic oligonucleotide
  Sense strand starting at position 2753 of SEQ ID NO: 1883016
gcaguuuguucuuugguga

SEQ ID NO: 2163851 - RNA, 19 nt, Artificial Sequence
  Description of Artificial Sequence: Synthetic oligonucleotide
  Antisense strand to SEQ ID NO: 2163850
ucaccaaagaacaaacugc

SEQ ID NO: 2163852 - RNA, 19 nt, Artificial Sequence
  Description of Artificial Sequence: Synthetic oligonucleotide
  Sense strand starting at position 2757 of SEQ ID NO: 1883016
uuuguucuuuggugacuga

SEQ ID NO: 2163853 - RNA, 19 nt, Artificial Sequence
  Description of Artificial Sequence: Synthetic oligonucleotide
  Antisense strand to SEQ ID NO: 2163852
ucagucaccaaagaacaaa

SEQ ID NO: 2163854 - RNA, 19 nt, Artificial Sequence
  Description of Artificial Sequence: Synthetic oligonucleotide
  Sense strand starting at position 2760 of SEQ ID NO: 1883016
guucuuuggugacugaguu

SEQ ID NO: 2163855 - RNA, 19 nt, Artificial Sequence
  Description of Artificial Sequence: Synthetic oligonucleotide
  Antisense strand to SEQ ID NO: 2163854
aacucagucaccaaagaac

SEQ ID NO: 2163856 - RNA, 19 nt, Artificial Sequence
  Description of Artificial Sequence: Synthetic oligonucleotide
  Sense strand starting at position 2768 of SEQ ID NO: 1883016
gugacugaguuccucaaau

SEQ ID NO: 2163857 - RNA, 19 nt, Artificial Sequence
  Description of Artificial Sequence: Synthetic oligonucleotide
  Antisense strand to SEQ ID NO: 2163856
auuugaggaacucagucac

SEQ ID NO: 2163858 - RNA, 19 nt, Artificial Sequence
  Description of Artificial Sequence: Synthetic oligonucleotide
  Sense strand starting at position 2770 of SEQ ID NO: 1883016
gacugaguuccucaaaugu

SEQ ID NO: 2163859 - RNA, 19 nt, Artificial Sequence
  Description of Artificial Sequence: Synthetic oligonucleotide
  Antisense strand to SEQ ID NO: 2163858
acauuugaggaacucaguc

SEQ ID NO: 2163860 - RNA, 19 nt, Artificial Sequence
  Description of Artificial Sequence: Synthetic oligonucleotide
  Sense strand starting at position 2778 of SEQ ID NO: 1883016
uccucaaaugucugguuau

SEQ ID NO: 2163861 - RNA, 19 nt, Artificial Sequence
  Description of Artificial Sequence: Synthetic oligonucleotide
  Antisense strand to SEQ ID NO: 2163860
auaaccagacauuugagga

SEQ ID NO: 2163862 - RNA, 19 nt, Artificial Sequence
  Description of Artificial Sequence: Synthetic oligonucleotide
  Sense strand starting at position 2779 of SEQ ID NO: 1883016
ccucaaaugucugguuauu

SEQ ID NO: 2163863 - RNA, 19 nt, Artificial Sequence
  Description of Artificial Sequence: Synthetic oligonucleotide
  Antisense strand to SEQ ID NO: 2163862
aauaaccagacauuugagg

SEQ ID NO: 2163864 - RNA, 19 nt, Artificial Sequence
  Description of Artificial Sequence: Synthetic oligonucleotide
  Sense strand starting at position 2820 of SEQ ID NO: 1883016
agggaagugcugcaaucuu

SEQ ID NO: 2163865 - RNA, 19 nt, Artificial Sequence
  Description of Artificial Sequence: Synthetic oligonucleotide
  Antisense strand to SEQ ID NO: 2163864
aagauugcagcacuucccu

SEQ ID NO: 2163866 - RNA, 19 nt, Artificial Sequence
  Description of Artificial Sequence: Synthetic oligonucleotide
  Sense strand starting at position 2828 of SEQ ID NO: 1883016
gcugcaaucuugccuggaa

SEQ ID NO: 2163867 - RNA, 19 nt, Artificial Sequence
  Description of Artificial Sequence: Synthetic oligonucleotide
  Antisense strand to SEQ ID NO: 2163866
uuccaggcaagauugcagc

SEQ ID NO: 2163868 - RNA, 19 nt, Artificial Sequence
  Description of Artificial Sequence: Synthetic oligonucleotide
  Sense strand starting at position 2829 of SEQ ID NO: 1883016
cugcaaucuugccuggaaa

SEQ ID NO: 2163869 - RNA, 19 nt, Artificial Sequence
  Description of Artificial Sequence: Synthetic oligonucleotide
  Antisense strand to SEQ ID NO: 2163868
uuuccaggcaagauugcag

SEQ ID NO: 2163870 - RNA, 19 nt, Artificial Sequence
  Description of Artificial Sequence: Synthetic oligonucleotide
  Sense strand starting at position 2830 of SEQ ID NO: 1883016
ugcaaucuugccuggaaag

SEQ ID NO: 2163871 - RNA, 19 nt, Artificial Sequence
  Description of Artificial Sequence: Synthetic oligonucleotide
  Antisense strand to SEQ ID NO: 2163870
cuuuccaggcaagauugca

SEQ ID NO: 2163872 - RNA, 19 nt, Artificial Sequence
  Description of Artificial Sequence: Synthetic oligonucleotide
  Sense strand starting at position 2831 of SEQ ID NO: 1883016
gcaaucuugccuggaaaga

SEQ ID NO: 2163873 - RNA, 19 nt, Artificial Sequence
  Description of Artificial Sequence: Synthetic oligonucleotide
  Antisense strand to SEQ ID NO: 2163872
ucuuuccaggcaagauugc

SEQ ID NO: 2163874 - RNA, 19 nt, Artificial Sequence
  Description of Artificial Sequence: Synthetic oligonucleotide
  Sense strand starting at position 2862 of SEQ ID NO: 1883016
auagcuacuuccugguaca

SEQ ID NO: 2163875 - RNA, 19 nt, Artificial Sequence
  Description of Artificial Sequence: Synthetic oligonucleotide
  Antisense strand to SEQ ID NO: 2163874
uguaccaggaaguagcuau

SEQ ID NO: 2163876 - RNA, 19 nt, Artificial Sequence
  Description of Artificial Sequence: Synthetic oligonucleotide
  Sense strand starting at position 3491 of SEQ ID NO: 1883016
ugcuucccuucuuugaaga

SEQ ID NO: 2163877 - RNA, 19 nt, Artificial Sequence
  Description of Artificial Sequence: Synthetic oligonucleotide
  Antisense strand to SEQ ID NO: 2163876
ucuucaaagaagggaagca

SEQ ID NO: 2163878 - RNA, 19 nt, Artificial Sequence
  Description of Artificial Sequence: Synthetic oligonucleotide
  Sense strand starting at position 3529 of SEQ ID NO: 1883016
ggacauaauuugggaugga

SEQ ID NO: 2163879 - RNA, 19 nt, Artificial Sequence
  Description of Artificial Sequence: Synthetic oligonucleotide
  Antisense strand to SEQ ID NO: 2163878
uccaucccaaauuaugucc

SEQ ID NO: 2163880 - RNA, 19 nt, Artificial Sequence
  Description of Artificial Sequence: Synthetic oligonucleotide
  Sense strand starting at position 3571 of SEQ ID NO: 1883016
uggccucagguauaaagua

SEQ ID NO: 2163881 - RNA, 19 nt, Artificial Sequence
  Description of Artificial Sequence: Synthetic oligonucleotide
  Antisense strand to SEQ ID NO: 2163880
uacuuuauaccugaggcca

SEQ ID NO: 2163882 - RNA, 19 nt, Artificial Sequence
  Description of Artificial Sequence: Synthetic oligonucleotide
  Sense strand starting at position 3579 of SEQ ID NO: 1883016
gguauaaaguaguagucuu

SEQ ID NO: 2163883 - RNA, 19 nt, Artificial Sequence
  Description of Artificial Sequence: Synthetic oligonucleotide
  Antisense strand to SEQ ID NO: 2163882
aagacuacuacuuuauacc

SEQ ID NO: 2163884 - RNA, 19 nt, Artificial Sequence
  Description of Artificial Sequence: Synthetic oligonucleotide
  Sense strand starting at position 3587 of SEQ ID NO: 1883016
guaguagucuugcauuugu

SEQ ID NO: 2163885 - RNA, 19 nt, Artificial Sequence
  Description of Artificial Sequence: Synthetic oligonucleotide
  Antisense strand to SEQ ID NO: 2163884
acaaaugcaagacuacuac

SEQ ID NO: 2163886 - RNA, 19 nt, Artificial Sequence
  Description of Artificial Sequence: Synthetic oligonucleotide
  Sense strand starting at position 3612 of SEQ ID NO: 1883016
ugccauaauuuagagacaa

SEQ ID NO: 2163887 - RNA, 19 nt, Artificial Sequence
  Description of Artificial Sequence: Synthetic oligonucleotide
  Antisense strand to SEQ ID NO: 2163886
uugucucuaaauuauggca

SEQ ID NO: 2163888 - RNA, 19 nt, Artificial Sequence
  Description of Artificial Sequence: Synthetic oligonucleotide
  Sense strand starting at position 3753 of SEQ ID NO: 1883016
ccuggugguucuggccaaa

SEQ ID NO: 2163889 - RNA, 19 nt, Artificial Sequence
  Description of Artificial Sequence: Synthetic oligonucleotide
  Antisense strand to SEQ ID NO: 2163888
uuuggccagaaccaccagg

SEQ ID NO: 2163890 - RNA, 19 nt, Artificial Sequence
  Description of Artificial Sequence: Synthetic oligonucleotide
  Sense strand starting at position 3756 of SEQ ID NO: 1883016
ggugguucuggccaaagga

SEQ ID NO: 2163891 - RNA, 19 nt, Artificial Sequence
  Description of Artificial Sequence: Synthetic oligonucleotide
  Antisense strand to SEQ ID NO: 2163890
uccuuuggccagaaccacc

SEQ ID NO: 2163892 - RNA, 19 nt, Artificial Sequence
  Description of Artificial Sequence: Synthetic oligonucleotide
  Sense strand starting at position 56 of SEQ ID NO: 1883017
gccugaguaguccaccaug

SEQ ID NO: 2163893 - RNA, 19 nt, Artificial Sequence
  Description of Artificial Sequence: Synthetic oligonucleotide
  Antisense strand to SEQ ID NO: 2163892
caugguggacuacucaggc

SEQ ID NO: 2163894 - RNA, 19 nt, Artificial Sequence
  Description of Artificial Sequence: Synthetic oligonucleotide
  Sense strand starting at position 164 of SEQ ID NO: 1883017
ggcacucguagugacaaau

SEQ ID NO: 2163895 - RNA, 19 nt, Artificial Sequence
  Description of Artificial Sequence: Synthetic oligonucleotide
  Antisense strand to SEQ ID NO: 2163894
auuugucacuacgagugcc

SEQ ID NO: 2163896 - RNA, 19 nt, Artificial Sequence
  Description of Artificial Sequence: Synthetic oligonucleotide
  Sense strand starting at position 391 of SEQ ID NO: 1883017
aggcaaaggucugcagaca

SEQ ID NO: 2163897 - RNA, 19 nt, Artificial Sequence
  Description of Artificial Sequence: Synthetic oligonucleotide
  Antisense strand to SEQ ID NO: 2163896
ugucugcagaccuuugccu

SEQ ID NO: 2163898 - RNA, 19 nt, Artificial Sequence
  Description of Artificial Sequence: Synthetic oligonucleotide
  Sense strand starting at position 392 of SEQ ID NO: 1883017
ggcaaaggucugcagacaa

SEQ ID NO: 2163899 - RNA, 19 nt, Artificial Sequence
  Description of Artificial Sequence: Synthetic oligonucleotide
  Antisense strand to SEQ ID NO: 2163898
uugucugcagaccuuugcc

SEQ ID NO: 2163900 - RNA, 19 nt, Artificial Sequence
  Description of Artificial Sequence: Synthetic oligonucleotide
  Sense strand starting at position 535 of SEQ ID NO: 1883017
gagccacaaguguagaaua

SEQ ID NO: 2163901 - RNA, 19 nt, Artificial Sequence
  Description of Artificial Sequence: Synthetic oligonucleotide
  Antisense strand to SEQ ID NO: 2163900
uauucuacacuuguggcuc

SEQ ID NO: 2163902 - RNA, 19 nt, Artificial Sequence
  Description of Artificial Sequence: Synthetic oligonucleotide
  Sense strand starting at position 537 of SEQ ID NO: 1883017
gccacaaguguagaauauu

SEQ ID NO: 2163903 - RNA, 19 nt, Artificial Sequence
  Description of Artificial Sequence: Synthetic oligonucleotide
  Antisense strand to SEQ ID NO: 2163902
aauauucuacacuuguggc

SEQ ID NO: 2163904 - RNA, 19 nt, Artificial Sequence
  Description of Artificial Sequence: Synthetic oligonucleotide
  Sense strand starting at position 644 of SEQ ID NO: 1883017
agugcuuauggaugaaaca

SEQ ID NO: 2163905 - RNA, 19 nt, Artificial Sequence
  Description of Artificial Sequence: Synthetic oligonucleotide
  Antisense strand to SEQ ID NO: 2163904
uguuucauccauaagcacu

SEQ ID NO: 2163906 - RNA, 19 nt, Artificial Sequence
  Description of Artificial Sequence: Synthetic oligonucleotide
  Sense strand starting at position 645 of SEQ ID NO: 1883017
gugcuuauggaugaaacau

SEQ ID NO: 2163907 - RNA, 19 nt, Artificial Sequence
  Description of Artificial Sequence: Synthetic oligonucleotide
  Antisense strand to SEQ ID NO: 2163906
auguuucauccauaagcac

SEQ ID NO: 2163908 - RNA, 19 nt, Artificial Sequence
  Description of Artificial Sequence: Synthetic oligonucleotide
  Sense strand starting at position 660 of SEQ ID NO: 1883017
acaucuuaguuaucaaguc

SEQ ID NO: 2163909 - RNA, 19 nt, Artificial Sequence
  Description of Artificial Sequence: Synthetic oligonucleotide
  Antisense strand to SEQ ID NO: 2163908
gacuugauaacuaagaugu

SEQ ID NO: 2163910 - RNA, 19 nt, Artificial Sequence
  Description of Artificial Sequence: Synthetic oligonucleotide
  Sense strand starting at position 782 of SEQ ID NO: 1883017
gggacaggcaucugaacau

SEQ ID NO: 2163911 - RNA, 19 nt, Artificial Sequence
  Description of Artificial Sequence: Synthetic oligonucleotide
  Antisense strand to SEQ ID NO: 2163910
auguucagaugccuguccc

SEQ ID NO: 2163912 - RNA, 19 nt, Artificial Sequence
  Description of Artificial Sequence: Synthetic oligonucleotide
  Sense strand starting at position 858 of SEQ ID NO: 1883017
accaucuagugacauauuu

SEQ ID NO: 2163913 - RNA, 19 nt, Artificial Sequence
  Description of Artificial Sequence: Synthetic oligonucleotide
  Antisense strand to SEQ ID NO: 2163912
aaauaugucacuagauggu

SEQ ID NO: 2163914 - RNA, 19 nt, Artificial Sequence
  Description of Artificial Sequence: Synthetic oligonucleotide
  Sense strand starting at position 1107 of SEQ ID NO: 1883017
agccuaagugaucaccaga

SEQ ID NO: 2163915 - RNA, 19 nt, Artificial Sequence
  Description of Artificial Sequence: Synthetic oligonucleotide
  Antisense strand to SEQ ID NO: 2163914
ucuggugaucacuuaggcu

SEQ ID NO: 2163916 - RNA, 19 nt, Artificial Sequence
  Description of Artificial Sequence: Synthetic oligonucleotide
  Sense strand starting at position 1110 of SEQ ID NO: 1883017
cuaagugaucaccagaugu

SEQ ID NO: 2163917 - RNA, 19 nt, Artificial Sequence
  Description of Artificial Sequence: Synthetic oligonucleotide
  Antisense strand to SEQ ID NO: 2163916
acaucuggugaucacuuag

SEQ ID NO: 2163918 - RNA, 19 nt, Artificial Sequence
  Description of Artificial Sequence: Synthetic oligonucleotide
  Sense strand starting at position 1114 of SEQ ID NO: 1883017
gugaucaccagaugugcaa

SEQ ID NO: 2163919 - RNA, 19 nt, Artificial Sequence
  Description of Artificial Sequence: Synthetic oligonucleotide
  Antisense strand to SEQ ID NO: 2163918
uugcacaucuggugaucac

SEQ ID NO: 2163920 - RNA, 19 nt, Artificial Sequence
  Description of Artificial Sequence: Synthetic oligonucleotide
  Sense strand starting at position 1118 of SEQ ID NO: 1883017
ucaccagaugugcaauuau

SEQ ID NO: 2163921 - RNA, 19 nt, Artificial Sequence
  Description of Artificial Sequence: Synthetic oligonucleotide
  Antisense strand to SEQ ID NO: 2163920
auaauugcacaucugguga

SEQ ID NO: 2163922 - RNA, 19 nt, Artificial Sequence
  Description of Artificial Sequence: Synthetic oligonucleotide
  Sense strand starting at position 1198 of SEQ ID NO: 1883017
agagaauagcccugucaug

SEQ ID NO: 2163923 - RNA, 19 nt, Artificial Sequence
  Description of Artificial Sequence: Synthetic oligonucleotide
  Antisense strand to SEQ ID NO: 2163922
caugacagggcuauucucu

SEQ ID NO: 2163924 - RNA, 19 nt, Artificial Sequence
  Description of Artificial Sequence: Synthetic oligonucleotide
  Sense strand starting at position 1216 of SEQ ID NO: 1883017
ggaaucucccauggaaugu

SEQ ID NO: 2163925 - RNA, 19 nt, Artificial Sequence
  Description of Artificial Sequence: Synthetic oligonucleotide
  Antisense strand to SEQ ID NO: 2163924
acauuccaugggagauucc

SEQ ID NO: 2163926 - RNA, 19 nt, Artificial Sequence
  Description of Artificial Sequence: Synthetic oligonucleotide
  Sense strand starting at position 1282 of SEQ ID NO: 1883017
gagagaagagcguaucugu

SEQ ID NO: 2163927 - RNA, 19 nt, Artificial Sequence
  Description of Artificial Sequence: Synthetic oligonucleotide
  Antisense strand to SEQ ID NO: 2163926
acagauacgcucuucucuc

SEQ ID NO: 2163928 - RNA, 19 nt, Artificial Sequence
  Description of Artificial Sequence: Synthetic oligonucleotide
  Sense strand starting at position 1305 of SEQ ID NO: 1883017
gugccugcauuucuaacaa

SEQ ID NO: 2163929 - RNA, 19 nt, Artificial Sequence
  Description of Artificial Sequence: Synthetic oligonucleotide
  Antisense strand to SEQ ID NO: 2163928
uuguuagaaaugcaggcac

SEQ ID NO: 2163930 - RNA, 19 nt, Artificial Sequence
  Description of Artificial Sequence: Synthetic oligonucleotide
  Sense strand starting at position 1447 of SEQ ID NO: 1883017
cacagucggcuuuaagaaa

SEQ ID NO: 2163931 - RNA, 19 nt, Artificial Sequence
  Description of Artificial Sequence: Synthetic oligonucleotide
  Antisense strand to SEQ ID NO: 2163930
uuucuuaaagccgacugug

SEQ ID NO: 2163932 - RNA, 19 nt, Artificial Sequence
  Description of Artificial Sequence: Synthetic oligonucleotide
  Sense strand starting at position 1509 of SEQ ID NO: 1883017
gggagucucuugcugggau

SEQ ID NO: 2163933 - RNA, 19 nt, Artificial Sequence
  Description of Artificial Sequence: Synthetic oligonucleotide
  Antisense strand to SEQ ID NO: 2163932
aucccagcaagagacuccc

SEQ ID NO: 2163934 - RNA, 19 nt, Artificial Sequence
  Description of Artificial Sequence: Synthetic oligonucleotide
  Sense strand starting at position 1511 of SEQ ID NO: 1883017
gagucucuugcugggauca

SEQ ID NO: 2163935 - RNA, 19 nt, Artificial Sequence
  Description of Artificial Sequence: Synthetic oligonucleotide
  Antisense strand to SEQ ID NO: 2163934
ugaucccagcaagagacuc

SEQ ID NO: 2163936 - RNA, 19 nt, Artificial Sequence
  Description of Artificial Sequence: Synthetic oligonucleotide
  Sense strand starting at position 1512 of SEQ ID NO: 1883017
agucucuugcugggaucau

SEQ ID NO: 2163937 - RNA, 19 nt, Artificial Sequence
  Description of Artificial Sequence: Synthetic oligonucleotide
  Antisense strand to SEQ ID NO: 2163936
augaucccagcaagagacu

SEQ ID NO: 2163938 - RNA, 19 nt, Artificial Sequence
  Description of Artificial Sequence: Synthetic oligonucleotide
  Sense strand starting at position 1516 of SEQ ID NO: 1883017
ucuugcugggaucauuaca

SEQ ID NO: 2163939 - RNA, 19 nt, Artificial Sequence
  Description of Artificial Sequence: Synthetic oligonucleotide
  Antisense strand to SEQ ID NO: 2163938
uguaaugaucccagcaaga

SEQ ID NO: 2163940 - RNA, 19 nt, Artificial Sequence
  Description of Artificial Sequence: Synthetic oligonucleotide
  Sense strand starting at position 1598 of SEQ ID NO: 1883017
guuuaaugaccauggauag

SEQ ID NO: 2163941 - RNA, 19 nt, Artificial Sequence
  Description of Artificial Sequence: Synthetic oligonucleotide
  Antisense strand to SEQ ID NO: 2163940
cuauccauggucauuaaac

SEQ ID NO: 2163942 - RNA, 19 nt, Artificial Sequence
  Description of Artificial Sequence: Synthetic oligonucleotide
  Sense strand starting at position 1634 of SEQ ID NO: 1883017
ggaagaaguccacguucuu

SEQ ID NO: 2163943 - RNA, 19 nt, Artificial Sequence
  Description of Artificial Sequence: Synthetic oligonucleotide
  Antisense strand to SEQ ID NO: 2163942
aagaacguggacuucuucc

SEQ ID NO: 2163944 - RNA, 19 nt, Artificial Sequence
  Description of Artificial Sequence: Synthetic oligonucleotide
  Sense strand starting at position 1840 of SEQ ID NO: 1883017
cuagcucugucaucauaga

SEQ ID NO: 2163945 - RNA, 19 nt, Artificial Sequence
  Description of Artificial Sequence: Synthetic oligonucleotide
  Antisense strand to SEQ ID NO: 2163944
ucuaugaugacagagcuag

SEQ ID NO: 2163946 - RNA, 19 nt, Artificial Sequence
  Description of Artificial Sequence: Synthetic oligonucleotide
  Sense strand starting at position 2454 of SEQ ID NO: 1883017
acuccuaucuggguccaaa

SEQ ID NO: 2163947 - RNA, 19 nt, Artificial Sequence
  Description of Artificial Sequence: Synthetic oligonucleotide
  Antisense strand to SEQ ID NO: 2163946
uuuggacccagauaggagu

SEQ ID NO: 2163948 - RNA, 19 nt, Artificial Sequence
  Description of Artificial Sequence: Synthetic oligonucleotide
  Sense strand starting at position 2615 of SEQ ID NO: 1883017
cuguguucuuaccucaaca

SEQ ID NO: 2163949 - RNA, 19 nt, Artificial Sequence
  Description of Artificial Sequence: Synthetic oligonucleotide
  Antisense strand to SEQ ID NO: 2163948
uguugagguaagaacacag

SEQ ID NO: 2163950 - RNA, 19 nt, Artificial Sequence
  Description of Artificial Sequence: Synthetic oligonucleotide
  Sense strand starting at position 2668 of SEQ ID NO: 1883017
gcuuauaauuuggacaagu

SEQ ID NO: 2163951 - RNA, 19 nt, Artificial Sequence
  Description of Artificial Sequence: Synthetic oligonucleotide
  Antisense strand to SEQ ID NO: 2163950
acuuguccaaauuauaagc

SEQ ID NO: 2163952 - RNA, 19 nt, Artificial Sequence
  Description of Artificial Sequence: Synthetic oligonucleotide
  Sense strand starting at position 2678 of SEQ ID NO: 1883017
uggacaaguccugaaucgu

SEQ ID NO: 2163953 - RNA, 19 nt, Artificial Sequence
  Description of Artificial Sequence: Synthetic oligonucleotide
  Antisense strand to SEQ ID NO: 2163952
acgauucaggacuugucca

SEQ ID NO: 2163954 - RNA, 19 nt, Artificial Sequence
  Description of Artificial Sequence: Synthetic oligonucleotide
  Sense strand starting at position 2824 of SEQ ID NO: 1883017
ucugaauuaucaucugguu

SEQ ID NO: 2163955 - RNA, 19 nt, Artificial Sequence
  Description of Artificial Sequence: Synthetic oligonucleotide
  Antisense strand to SEQ ID NO: 2163954
aaccagaugauaauucaga

SEQ ID NO: 2163956 - RNA, 19 nt, Artificial Sequence
  Description of Artificial Sequence: Synthetic oligonucleotide
  Sense strand starting at position 2991 of SEQ ID NO: 1883017
ggaggaaaucuguagcccu

SEQ ID NO: 2163957 - RNA, 19 nt, Artificial Sequence
  Description of Artificial Sequence: Synthetic oligonucleotide
  Antisense strand to SEQ ID NO: 2163956
agggcuacagauuuccucc

SEQ ID NO: 2163958 - RNA, 19 nt, Artificial Sequence
  Description of Artificial Sequence: Synthetic oligonucleotide
  Sense strand starting at position 3152 of SEQ ID NO: 1883017
guuguucuugcuuaggaag

SEQ ID NO: 2163959 - RNA, 19 nt, Artificial Sequence
  Description of Artificial Sequence: Synthetic oligonucleotide
  Antisense strand to SEQ ID NO: 2163958
cuuccuaagcaagaacaac

SEQ ID NO: 2163960 - RNA, 19 nt, Artificial Sequence
  Description of Artificial Sequence: Synthetic oligonucleotide
  Sense strand starting at position 3166 of SEQ ID NO: 1883017
ggaagugucaaggacgagu

SEQ ID NO: 2163961 - RNA, 19 nt, Artificial Sequence
  Description of Artificial Sequence: Synthetic oligonucleotide
  Antisense strand to SEQ ID NO: 2163960
acucguccuugacacuucc

SEQ ID NO: 2163962 - RNA, 19 nt, Artificial Sequence
  Description of Artificial Sequence: Synthetic oligonucleotide
  Sense strand starting at position 3708 of SEQ ID NO: 1883017
auugcaaaguuggcagauu

SEQ ID NO: 2163963 - RNA, 19 nt, Artificial Sequence
  Description of Artificial Sequence: Synthetic oligonucleotide
  Antisense strand to SEQ ID NO: 2163962
aaucugccaacuuugcaau

SEQ ID NO: 2163964 - RNA, 19 nt, Artificial Sequence
  Description of Artificial Sequence: Synthetic oligonucleotide
  Sense strand starting at position 3717 of SEQ ID NO: 1883017
uuggcagauucuguaccua

SEQ ID NO: 2163965 - RNA, 19 nt, Artificial Sequence
  Description of Artificial Sequence: Synthetic oligonucleotide
  Antisense strand to SEQ ID NO: 2163964
uagguacagaaucugccaa

SEQ ID NO: 2163966 - RNA, 19 nt, Artificial Sequence
  Description of Artificial Sequence: Synthetic oligonucleotide
  Sense strand starting at position 3793 of SEQ ID NO: 1883017
ucugaaauccuuuggaauc

SEQ ID NO: 2163967 - RNA, 19 nt, Artificial Sequence
  Description of Artificial Sequence: Synthetic oligonucleotide
  Antisense strand to SEQ ID NO: 2163966
gauuccaaaggauuucaga

SEQ ID NO: 2163968 - RNA, 19 nt, Artificial Sequence
  Description of Artificial Sequence: Synthetic oligonucleotide
  Sense strand starting at position 3876 of SEQ ID NO: 1883017
acauguuacuacuuagcuu

SEQ ID NO: 2163969 - RNA, 19 nt, Artificial Sequence
  Description of Artificial Sequence: Synthetic oligonucleotide
  Antisense strand to SEQ ID NO: 2163968
aagcuaaguaguaacaugu

SEQ ID NO: 2163970 - RNA, 19 nt, Artificial Sequence
  Description of Artificial Sequence: Synthetic oligonucleotide
  Sense strand starting at position 3901 of SEQ ID NO: 1883017
gccaaucucuggccuaaag

SEQ ID NO: 2163971 - RNA, 19 nt, Artificial Sequence
  Description of Artificial Sequence: Synthetic oligonucleotide
  Antisense strand to SEQ ID NO: 2163970
cuuuaggccagagauuggc

SEQ ID NO: 2163972 - RNA, 19 nt, Artificial Sequence
  Description of Artificial Sequence: Synthetic oligonucleotide
  Sense strand starting at position 396 of SEQ ID NO: 1883018
ugggaaaucuuauacauug

SEQ ID NO: 2163973 - RNA, 19 nt, Artificial Sequence
  Description of Artificial Sequence: Synthetic oligonucleotide
  Antisense strand to SEQ ID NO: 2163972
caauguauaagauuuccca

SEQ ID NO: 2163974 - RNA, 19 nt, Artificial Sequence
  Description of Artificial Sequence: Synthetic oligonucleotide
  Sense strand starting at position 407 of SEQ ID NO: 1883018
auacauugcugguuuggau

SEQ ID NO: 2163975 - RNA, 19 nt, Artificial Sequence
  Description of Artificial Sequence: Synthetic oligonucleotide
  Antisense strand to SEQ ID NO: 2163974
auccaaaccagcaauguau

SEQ ID NO: 2163976 - RNA, 19 nt, Artificial Sequence
  Description of Artificial Sequence: Synthetic oligonucleotide
  Sense strand starting at position 419 of SEQ ID NO: 1883018
uuuggauaguaacuuggaa

SEQ ID NO: 2163977 - RNA, 19 nt, Artificial Sequence
  Description of Artificial Sequence: Synthetic oligonucleotide
  Antisense strand to SEQ ID NO: 2163976
uuccaaguuacuauccaaa

SEQ ID NO: 2163978 - RNA, 19 nt, Artificial Sequence
  Description of Artificial Sequence: Synthetic oligonucleotide
  Sense strand starting at position 459 of SEQ ID NO: 1883018
agcaauacgcccuaaauua

SEQ ID NO: 2163979 - RNA, 19 nt, Artificial Sequence
  Description of Artificial Sequence: Synthetic oligonucleotide
  Antisense strand to SEQ ID NO: 2163978
uaauuuagggcguauugcu

SEQ ID NO: 2163980 - RNA, 19 nt, Artificial Sequence
  Description of Artificial Sequence: Synthetic oligonucleotide
  Sense strand starting at position 481 of SEQ ID NO: 1883018
auguacauucccugugacu

SEQ ID NO: 2163981 - RNA, 19 nt, Artificial Sequence
  Description of Artificial Sequence: Synthetic oligonucleotide
  Antisense strand to SEQ ID NO: 2163980
agucacagggaauguacau

SEQ ID NO: 2163982 - RNA, 19 nt, Artificial Sequence
  Description of Artificial Sequence: Synthetic oligonucleotide
  Sense strand starting at position 483 of SEQ ID NO: 1883018
guacauucccugugacuua

SEQ ID NO: 2163983 - RNA, 19 nt, Artificial Sequence
  Description of Artificial Sequence: Synthetic oligonucleotide
  Antisense strand to SEQ ID NO: 2163982
uaagucacagggaauguac

SEQ ID NO: 2163984 - RNA, 19 nt, Artificial Sequence
  Description of Artificial Sequence: Synthetic oligonucleotide
  Sense strand starting at position 514 of SEQ ID NO: 1883018
ccagguauauuagcuaaag

SEQ ID NO: 2163985 - RNA, 19 nt, Artificial Sequence
  Description of Artificial Sequence: Synthetic oligonucleotide
  Antisense strand to SEQ ID NO: 2163984
cuuuagcuaauauaccugg

SEQ ID NO: 2163986 - RNA, 19 nt, Artificial Sequence
  Description of Artificial Sequence: Synthetic oligonucleotide
  Sense strand starting at position 515 of SEQ ID NO: 1883018
cagguauauuagcuaaaga

SEQ ID NO: 2163987 - RNA, 19 nt, Artificial Sequence
  Description of Artificial Sequence: Synthetic oligonucleotide
  Antisense strand to SEQ ID NO: 2163986
ucuuuagcuaauauaccug

SEQ ID NO: 2163988 - RNA, 19 nt, Artificial Sequence
  Description of Artificial Sequence: Synthetic oligonucleotide
  Sense strand starting at position 530 of SEQ ID NO: 1883018
aagaaaccucuguguguuc

SEQ ID NO: 2163989 - RNA, 19 nt, Artificial Sequence
  Description of Artificial Sequence: Synthetic oligonucleotide
  Antisense strand to SEQ ID NO: 2163988
gaacacacagagguuucuu

SEQ ID NO: 2163990 - RNA, 19 nt, Artificial Sequence
  Description of Artificial Sequence: Synthetic oligonucleotide
  Sense strand starting at position 535 of SEQ ID NO: 1883018
accucuguguguucuccaa

SEQ ID NO: 2163991 - RNA, 19 nt, Artificial Sequence
  Description of Artificial Sequence: Synthetic oligonucleotide
  Antisense strand to SEQ ID NO: 2163990
uuggagaacacacagaggu

SEQ ID NO: 2163992 - RNA, 19 nt, Artificial Sequence
  Description of Artificial Sequence: Synthetic oligonucleotide
  Sense strand starting at position 537 of SEQ ID NO: 1883018
cucuguguguucuccaaga

SEQ ID NO: 2163993 - RNA, 19 nt, Artificial Sequence
  Description of Artificial Sequence: Synthetic oligonucleotide
  Antisense strand to SEQ ID NO: 2163992
ucuuggagaacacacagag

SEQ ID NO: 2163994 - RNA, 19 nt, Artificial Sequence
  Description of Artificial Sequence: Synthetic oligonucleotide
  Sense strand starting at position 539 of SEQ ID NO: 1883018
cuguguguucuccaagaaa

SEQ ID NO: 2163995 - RNA, 19 nt, Artificial Sequence
  Description of Artificial Sequence: Synthetic oligonucleotide
  Antisense strand to SEQ ID NO: 2163994
uuucuuggagaacacacag

SEQ ID NO: 2163996 - RNA, 19 nt, Artificial Sequence
  Description of Artificial Sequence: Synthetic oligonucleotide
  Sense strand starting at position 542 of SEQ ID NO: 1883018
uguguucuccaagaaauau

SEQ ID NO: 2163997 - RNA, 19 nt, Artificial Sequence
  Description of Artificial Sequence: Synthetic oligonucleotide
  Antisense strand to SEQ ID NO: 2163996
auauuucuuggagaacaca

SEQ ID NO: 2163998 - RNA, 19 nt, Artificial Sequence
  Description of Artificial Sequence: Synthetic oligonucleotide
  Sense strand starting at position 580 of SEQ ID NO: 1883018
cagggaugguggucauuac

SEQ ID NO: 2163999 - RNA, 19 nt, Artificial Sequence
  Description of Artificial Sequence: Synthetic oligonucleotide
  Antisense strand to SEQ ID NO: 2163998
guaaugaccaccaucccug

SEQ ID NO: 2164000 - RNA, 19 nt, Artificial Sequence
  Description of Artificial Sequence: Synthetic oligonucleotide
  Sense strand starting at position 589 of SEQ ID NO: 1883018
uggucauuacagcaaauau

SEQ ID NO: 2164001 - RNA, 19 nt, Artificial Sequence
  Description of Artificial Sequence: Synthetic oligonucleotide
  Antisense strand to SEQ ID NO: 2164000
auauuugcuguaaugacca

SEQ ID NO: 2164002 - RNA, 19 nt, Artificial Sequence
  Description of Artificial Sequence: Synthetic oligonucleotide
  Sense strand starting at position 693 of SEQ ID NO: 1883018
guuaaaugaaagugugaua

SEQ ID NO: 2164003 - RNA, 19 nt, Artificial Sequence
  Description of Artificial Sequence: Synthetic oligonucleotide
  Antisense strand to SEQ ID NO: 2164002
uaucacacuuucauuuaac

SEQ ID NO: 2164004 - RNA, 19 nt, Artificial Sequence
  Description of Artificial Sequence: Synthetic oligonucleotide
  Sense strand starting at position 696 of SEQ ID NO: 1883018
aaaugaaagugugauacca

SEQ ID NO: 2164005 - RNA, 19 nt, Artificial Sequence
  Description of Artificial Sequence: Synthetic oligonucleotide
  Antisense strand to SEQ ID NO: 2164004
ugguaucacacuuucauuu

SEQ ID NO: 2164006 - RNA, 19 nt, Artificial Sequence
  Description of Artificial Sequence: Synthetic oligonucleotide
  Sense strand starting at position 1154 of SEQ ID NO: 1883018
gcggauuugucagaaauuu

SEQ ID NO: 2164007 - RNA, 19 nt, Artificial Sequence
  Description of Artificial Sequence: Synthetic oligonucleotide
  Antisense strand to SEQ ID NO: 2164006
aaauuucugacaaauccgc

SEQ ID NO: 2164008 - RNA, 19 nt, Artificial Sequence
  Description of Artificial Sequence: Synthetic oligonucleotide
  Sense strand starting at position 1162 of SEQ ID NO: 1883018
gucagaaauuucuguaacc

SEQ ID NO: 2164009 - RNA, 19 nt, Artificial Sequence
  Description of Artificial Sequence: Synthetic oligonucleotide
  Antisense strand to SEQ ID NO: 2164008
gguuacagaaauuucugac
